United States Patent Application Publication US 2021/0199660 A1 - sequence listing, part 57

SEQ ID NO: 818941 - DNA, 120 bp, Artificial Sequence
  ENSG00000218510_22 (sequence is synthesized)
tttgcctcccgccccgccgccccccacggctatagctggtttgataatcctggagctctcaaatatccaaagagttggaagtgtactctattaggattttgacaagtcccatacactgat

SEQ ID NO: 818942 - DNA, 120 bp, Artificial Sequence
  ENSG00000218510_23 (sequence is synthesized)
taggttgttcccaagattttgctttcccacagtgtttcacccaacctttcttggacgaaatattttagtccaactcaccctaagtgattctgcttttccctattcaccaccctaggttag

SEQ ID NO: 818943 - DNA, 120 bp, Artificial Sequence
  ENSG00000218510_24 (sequence is synthesized)
taacagcttactttgggggatgagcacaccttattaactgagcaaaaaccaagataatgtgagaagaattggtgtactcccaagaatatccaaggtgctgggtctagaatcaattaaagt

SEQ ID NO: 818944 - DNA, 120 bp, Artificial Sequence
  ENSG00000218510_25 (sequence is synthesized)
ctcctaagaaatgggtcagggaacctttagagaagggatgactaggtgctgggtgcacggcagctagtcagcgttagtgattgttggcttctgtcaattgttgctcaggaaacagatttg

SEQ ID NO: 818945 - DNA, 74 bp, Artificial Sequence
  ENSG00000218510_26 (sequence is synthesized)
tgtcagctctcctgctatgtattatatgtctggaagggattagttctttgagggaagagagtattaaagaaaac

SEQ ID NO: 818946 - DNA, 120 bp, Artificial Sequence
  ENSG00000218510_27 (sequence is synthesized)
ggtgcaaaggcttaagggtgtaacctcagaatggggccctgaatcagctgtgggcgagctcctagagtatcttaattcctgcttcatctctttccattttgcagttgggcaaactgcggc

SEQ ID NO: 818947 - DNA, 120 bp, Artificial Sequence
  ENSG00000242009_0 (sequence is synthesized)
atcctatcaggagtatctagaattaagacactgagtgggaagagagatacaaatatgtccatagaaatatggaaggttttaagccagaaaatccttaaatgaaggtctgtagcagtatct

SEQ ID NO: 818948 - DNA, 120 bp, Artificial Sequence
  ENSG00000242009_1 (sequence is synthesized)
ctccagatatttaaaaatacaatgatcaccaaaatatgctataaatgtttaaaatggactcctatcgaaagttcagaggttaaagatgatgttgtttatggtactcctagaaattgattc

SEQ ID NO: 818949 - DNA, 120 bp, Artificial Sequence
  ENSG00000242009_2 (sequence is synthesized)
ttctttattttttcttttcgttgagtttaattgccactagaattattttcaagttaagaagataagaggattgactttttaaacttcaaaatgaacttccctgctgtgactgactatatt

SEQ ID NO: 818950 - DNA, 120 bp, Artificial Sequence
  ENSG00000242009_3 (sequence is synthesized)
ccccagtatggagaattatgaggaacctgttgaacagaaaagtctctgaccataatcaaggtcacacagtcagaaggcatcccagcagacactccacactagccaatgtggattcagaga

SEQ ID NO: 818951 - DNA, 120 bp, Artificial Sequence
  ENSG00000242009_4 (sequence is synthesized)
ctgcacccttgattactgtgttgtttgatgatactagtgatttccacggggggcagagatgattttcctggctctgggcctcatggtttcacactacctttgtaatttctcttggagcct

SEQ ID NO: 818952 - DNA, 120 bp, Artificial Sequence
  ENSG00000242009_5 (sequence is synthesized)
ttcattacagaactaaagttgcctctgctcagctgtattcttctttgagttacgttgcctcacgtggatatataagataaagcatccagccaagtgagggaataatgcatactgactact

SEQ ID NO: 818953 - DNA, 120 bp, Artificial Sequence
  ENSG00000242009_6 (sequence is synthesized)
tcagcagtaagagaatgaagaaactggagtcaagacagggtccagtagagagagagaaaaaaaacccactgttttggattgttctttcacatcctaagcaatcatgaatgttacagaact

SEQ ID NO: 818954 - DNA, 120 bp, Artificial Sequence
  ENSG00000242009_7 (sequence is synthesized)
agaatctggacttcttttagctacatgctcaagattaaaagcaaatgacagggagaatgcaagaagggattgctgggaagaaggccagaggaaattggagtgagaaattcaaaatgtatg

SEQ ID NO: 818955 - DNA, 120 bp, Artificial Sequence
  ENSG00000242009_8 (sequence is synthesized)
caagagtttgtctaaggagaatcaaaactactatgtttagaaaaggttgaaatttcattattttgcaagagttacatcaacaactgcaaaagcttcaggaattccagccctttggattga

SEQ ID NO: 818956 - DNA, 120 bp, Artificial Sequence
  ENSG00000242009_9 (sequence is synthesized)
aactcttgcctggagcattaagaacttgggggagaaatcactactcactgctttgctcgcaattctcatttggactagcgcttgcagaaactgagctgaactttccgcactgttattgca

SEQ ID NO: 818957 - DNA, 120 bp, Artificial Sequence
  ENSG00000242009_10 (sequence is synthesized)
tctgtaaggtaattgcctaaacttgttgagccaatcggaattgctgttgttgacttttgcaaatgtgaagaatccgatgaagcaatttgtaagccatatgtggtacatccctctttcccc

SEQ ID NO: 818958 - DNA, 120 bp, Artificial Sequence
  ENSG00000242009_11 (sequence is synthesized)
actcaaagtcatattgctctctataggattttgtgtgatccttatgaaacatcacactccagaattctattttaaaagcttcaaacattagtgtttaaaaagtcattcatatttatggga

SEQ ID NO: 818959 - DNA, 120 bp, Artificial Sequence
  ENSG00000242009_12 (sequence is synthesized)
cagaactaaagttgcctctgctcagctgtattcttctttgaggtgaggatctgggtaggccacagtagttggcagaattttaatattgtatatgtagttagggtggacacacaagactcc

SEQ ID NO: 818960 - DNA, 120 bp, Artificial Sequence
  ENSG00000242009_13 (sequence is synthesized)
ttccctgactaccttccagctaggattggactggccgtgtgacacaattctgaccaatgagatgtaggtggaattctgtcagttacgttgcctcacgtggatatataagataaagcatcc

SEQ ID NO: 818961 - DNA, 120 bp, Artificial Sequence
  ENSG00000242009_14 (sequence is synthesized)
tgtgttgtttgatgatactagtgtttaaaaacatctgaggaagatagaaaacattttatctttcaagataaaaaaagaaaagctctttgccaacagaaaacataatatgcggactctatg

SEQ ID NO: 818962 - DNA, 120 bp, Artificial Sequence
  ENSG00000242009_15 (sequence is synthesized)
gctattgtttctgaaaaatataagagatgattacatcacattgtgtattctgtaggaaaaacactgtaatgcttatatggctaataatggaatgatctaagtcaatatattgtgcagttt

SEQ ID NO: 818963 - DNA, 120 bp, Artificial Sequence
  ENSG00000242009_16 (sequence is synthesized)
tgagtgacagaagaattacaccattattctttgtattttggtttctgcactaagttagtcatgttcactgtttcatcatcaattatcattcactcattttataaaattttagcatctgca

SEQ ID NO: 818964 - DNA, 120 bp, Artificial Sequence
  ENSG00000242009_17 (sequence is synthesized)
gaggttattcagcatgtcctttgtgagtaatggttacaggtataaggtgcatacaggtagatgtgaagaaggcagtggaggataacaggaaaatggaagagaatgaggaaatgtatggtc

SEQ ID NO: 818965 - DNA, 120 bp, Artificial Sequence
  ENSG00000242009_18 (sequence is synthesized)
ctcagctgtattcttctttgagctaggattggactggccgtgtgacacaattctgaccaatgagatgtaggtggaattctgtcagttacgttgcctcacgtggatatataagataaagca

SEQ ID NO: 818966 - DNA, 120 bp, Artificial Sequence
  ENSG00000242009_19 (sequence is synthesized)
agaaacactggaattaagccggcatcaattgcgggcaaggctgaatccaggttttgggggcctgaagcttaatcaatgtggaggacctctttgaggaaaagcatgcaaaattacaaatac

SEQ ID NO: 818967 - DNA, 120 bp, Artificial Sequence
  ENSG00000283849_0 (sequence is synthesized)
ccgtgactcaccgcgcctccctctacgctcatccctccactccctccctgacccccgccggccgggggcgcccggcacacgccgcagctcccgcagcctccccgaggggggagcccgagg

SEQ ID NO: 818968 - DNA, 120 bp, Artificial Sequence
  ENSG00000283849_1 (sequence is synthesized)
aggaaggcgacaaatgtcacctgctccggccacgcgaggaacttctgaaaagttctcaggcaactgggtcaaaaggaaactcacccgcggacgcacgcccccgtcgcctcgccgctcgcg

SEQ ID NO: 818969 - DNA, 120 bp, Artificial Sequence
  ENSG00000283849_2 (sequence is synthesized)
cgcaagcccggctctgtccccactcgcgccgagctcggggagccgtgacttctctcggggttaccgcggcgggcgggggaggggagcagaaaacctgcgactcccgccggccgggccccc

SEQ ID NO: 818970 - DNA, 120 bp, Artificial Sequence
  ENSG00000283849_3 (sequence is synthesized)
ggcccccgactccggccgcggcacgccgtcagagccgggcagctccagcccccgcgcccgctcagggtgccggggagtgaacggcaggaggcaggagcggcagtgccactcgcgctgaat

SEQ ID NO: 818971 - DNA, 120 bp, Artificial Sequence
  ENSG00000283849_4 (sequence is synthesized)
gccccctccccaaagtcccgtcctgccgggcccgaggcccctcggcgctcacctgcaatccggacgctcgcggaggacaacgacgcgacccgcgtcccggccggggacgccccctgcgcc

SEQ ID NO: 818972 - DNA, 120 bp, Artificial Sequence
  ENSG00000283849_5 (sequence is synthesized)
gtcggtccagccgcccctcgctctgcgcgtccggcagcggcggcggcggcgggagactgcctgcgcccagccccgcccgccgctccgccctcctcgtcagtggaaaactccggggctcac

SEQ ID NO: 818973 - DNA, 80 bp, Artificial Sequence
  ENSG00000283849_6 (sequence is synthesized)
ctcgtcagtggaaaactccggggctcactgcgctgacgcacgccgggcctccagccaggccgcccggcagccccgccccg

SEQ ID NO: 818974 - DNA, 120 bp, Artificial Sequence
  ENSG00000283849_7 (sequence is synthesized)
ggactgtgacccggcgactgcgcctccgccgctctccgcccccagccctctcccgccagcgccctccccgccccgcttccagcacggtccctaaaggcgcggacgactcaagccggcaga

SEQ ID NO: 818975 - DNA, 120 bp, Artificial Sequence
  ENSG00000283849_8 (sequence is synthesized)
gccgagcgtagagatccccacctcgccccaccgccccagtttacagatgggtagaccgaggccgggagcacctcgtaactccgcaaggccacgggctagacagtggcagagccgacgtct

SEQ ID NO: 818976 - DNA, 120 bp, Artificial Sequence
  ENSG00000283849_9 (sequence is synthesized)
cctgtacgctctccacccccacccctctagagggagtttattttattccaatctaaaagttcccccctccgcccccaacctaccacccacccccagatccgccggaaaagtaaactgtgg

SEQ ID NO: 818977 - DNA, 120 bp, Artificial Sequence
  ENSG00000283849_10 (sequence is synthesized)
ctggagaggaatctggggtgtgtggggagcggggaggcagggagcgggaaggatggatgtaatcagtgggcctgaacttcattcctgcccacgggccaagagacccttccctgcagaagt

SEQ ID NO: 818978 - DNA, 120 bp, Artificial Sequence
  ENSG00000283849_11 (sequence is synthesized)
tccaaactaggggttcttagaactagcttccccactcccacctcaaccttcccttaaaaaaataaaaaggctggtttcttccgggccagatcttggccacttaaaatggtccactgcctt

SEQ ID NO: 818979 - DNA, 120 bp, Artificial Sequence
  ENSG00000283849_12 (sequence is synthesized)
ctctgctcccgccaaggcctttcctgactcggggccaaccctcccggtacgacatgccccggcaaccaagtcctggcctgggagcccaccctcagccccacttcccaaccgcaggtacga

SEQ ID NO: 818980 - DNA, 120 bp, Artificial Sequence
  ENSG00000283849_13 (sequence is synthesized)
gtctactcatcacctcgagcgtttccaccctcacgcttttactgcagccggtcttctcgactggaatgctctcctgccctctctctgcttaccagaatcccaatgcctttaagggctcag

SEQ ID NO: 818981 - DNA, 120 bp, Artificial Sequence
  ENSG00000283849_14 (sequence is synthesized)
cttgcactgcctcctccagggagccttcgtgggagcctgaccctccccctcccagtcctgctcccgctgcattctgggttcttctgactgtcctagatgaatgctgtcagccactagccc

SEQ ID NO: 818982 - DNA, 120 bp, Artificial Sequence
  ENSG00000230033_0 (sequence is synthesized)
agcaccccccctttccttctgggtcccttccctgctccaaacacccccagctccctggagactcagcctggaccaccgcagaccatagatgggcagacaccagggcccgccttcaggcgg

SEQ ID NO: 818983 - DNA, 120 bp, Artificial Sequence
  ENSG00000230033_1 (sequence is synthesized)
aattgtgcccatctgtgcttcagagcctttccctgcacaatgaagacgtggtctgcacctcacatggtggctgccgtgaggatgaaggacgaggcttgggaagccatctgcacagcttct

SEQ ID NO: 818984 - DNA, 120 bp, Artificial Sequence
  ENSG00000230033_2 (sequence is synthesized)
ttagaagatgtaatgatcccattgacaaaaacagagtgataagacacttaagaataaattctgcaagaaacgtatgcacaacctatatgaagagaacacagactgtctgaatgaatggaa

SEQ ID NO: 818985 - DNA, 120 bp, Artificial Sequence
  ENSG00000230033_3 (sequence is synthesized)
ggtatatactgtccttagagaggaagatttaacatcataaatattctattcatctttccaccagttcagacctcatctcagtttagtctacaaattaaacacaaccccggttaaaatacc

SEQ ID NO: 818986 - DNA, 120 bp, Artificial Sequence
  ENSG00000230030_0 (sequence is synthesized)
ttaattgctgagtaatacttcattgtctggatgtactacagtttatgtatccatttacctactgaagaacatcttggctgcttccaagttttgacaattatgaataaaggtgccataaaa

SEQ ID NO: 818987 - DNA, 120 bp, Artificial Sequence
  ENSG00000230035_0 (sequence is synthesized)
gggatgggggtgggagtctgctccatgctttgggcagctctcaggtggagtctctctccctctaagaccgcagcctgggaaggttggagctcaaacgagcacctgttgagttgccgtgag

SEQ ID NO: 818988 - DNA, 120 bp, Artificial Sequence
  ENSG00000230035_1 (sequence is synthesized)
aacgaggtgaccaatggtcggtggctccgtagtcccaccccacagctggcttctctgagccctgcacagtggcatctccaggacacctgctgcctccatctattggcagagccgacagcc

SEQ ID NO: 818989 - DNA, 120 bp, Artificial Sequence
  ENSG00000230035_2 (sequence is synthesized)
cgcggagcaggagtggggatggaggtaaagacggttcctgtttccacaacagagtctccacgctgcctcccactttcaaaccagaaactctcgagtagacagagatgccttgtgatccaa

SEQ ID NO: 818990 - DNA, 120 bp, Artificial Sequence
  ENSG00000254952_0 (sequence is synthesized)
gcctgcgtctcacaatggcgctttttgtttcaactgtttatgcagttggagttctccatataattaatatgaactatcatttatggggatccttctcagaagaactgctgaatgctggat

SEQ ID NO: 818991 - DNA, 120 bp, Artificial Sequence
  ENSG00000254952_1 (sequence is synthesized)
agtggacaagtctgtaacaggggctttgctgctggaaggaaagcgaccaagggtctgatccaaggcagcctggggatgaatacagtcagtgccaccacagcaggaacaggcacagttctg

SEQ ID NO: 818992 - DNA, 120 bp, Artificial Sequence
  ENSG00000254952_2 (sequence is synthesized)
atggctgtggaagtaatatatatctttttaagaagaatttgtatctctacttatagcacatttttttctgtagtaagtactgttgcactaatacaataatataaataggttttatattca

SEQ ID NO: 818993 - DNA, 120 bp, Artificial Sequence
  ENSG00000254951_0 (sequence is synthesized)
taaagctcagggcccttgtccactagagacaaggtgccctccgaccccttcttccaaatatactcttttgcctcttgtcttttattcccgtgtttgccccctttgttcagtccccctagg

SEQ ID NO: 818994 - DNA, 120 bp, Artificial Sequence
  ENSG00000254951_1 (sequence is synthesized)
ctttgttcagtccccctaggtccatgcaggttacatagtggtgccccaaacagtgacacaattgggttctcaacaagtggtgactcagaacagggacgccaaggatgccaacaagtggcg

SEQ ID NO: 818995 - DNA, 120 bp, Artificial Sequence
  ENSG00000254951_2 (sequence is synthesized)
tctgaacacgggacttcgacgatgtgaacaaaaaagatctgctggagcagagaagctgaaattgacaaggcaaacggggaccccaggatgagtctgccggcagcatatataaggcaggga

SEQ ID NO: 818996 - DNA, 120 bp, Artificial Sequence
  ENSG00000254951_3 (sequence is synthesized)
ctataggaaatgaaggtgaactcgtggagattttggagagaatttaatgaagaggctgtttaccaaggatctctctctgtctccgaggctggagtgcaatgttgcaatcagggctcactg

SEQ ID NO: 818997 - DNA, 120 bp, Artificial Sequence
  ENSG00000254951_4 (sequence is synthesized)
cagcctcgacctcctgggctcaactgatcttcgtaccacagcctcatgagtaactgggactacagatagtatctcatgatatgaatggtcctggatttacttacacatcctcctttggat

SEQ ID NO: 818998 - DNA, 120 bp, Artificial Sequence
  ENSG00000254951_5 (sequence is synthesized)
gagcaaaaagtaaatttttcacagtgatagacatttgtagtgctttttaaaggcactggttctggtggacactgagagacaatttttatttgctgcacgtggaaaggacaacaacatacc

SEQ ID NO: 818999 - DNA, 120 bp, Artificial Sequence
  ENSG00000254951_6 (sequence is synthesized)
tggacagaaatgcctcgaggatgtactgaaggcccctctcacttttcacagccataactgtaagtttcctggggcctctccagaagacaagcagatgccgctatgcttcctgaacagccc

SEQ ID NO: 819000 - DNA, 120 bp, Artificial Sequence
  ENSG00000254951_7 (sequence is synthesized)
acagaactatgaaaaagttaaggctagacgggtcaagccacttgactgataccacaggtcagagcatacaaaggactcaagatcagactagtaatcaaggaggcgtgttgagccaagtgt

SEQ ID NO: 819001 - DNA, 120 bp, Artificial Sequence
  ENSG00000254951_8 (sequence is synthesized)
acaaattcaacagctgggaaggtattatggggaggtcttgtaacattttattcaggtttccttgaaaagaactgaaaactgatgaaacttttagaccgaatattcctttgaaaacatgaa

SEQ ID NO: 819002 - DNA, 120 bp, Artificial Sequence
  ENSG00000254951_9 (sequence is synthesized)
tagaattcatttgctgagaggcatgtattgaaacgtgatatctagtgcatggttatttttcactttctaaattaaactgacatagagagtttgagaaataagtttaagaaatagacatgg

SEQ ID NO: 819003 - DNA, 120 bp, Artificial Sequence
  ENSG00000254951_10 (sequence is synthesized)
atggtctgtcgacagctccagctcgtgccatcttcccaatgtaccaacttctctttctctggtcaggttgcgctgttgcctttgtatgtcttcccacctcatggatgttagtttcattat

SEQ ID NO: 819004 - DNA, 120 bp, Artificial Sequence
  ENSG00000254951_11 (sequence is synthesized)
gagaatattgaaaaacagtcttccagtcataaccccactggcttccttttctctgtcacttccaaaccgcaggaccattgctgggcaccatgtctacccacccatgagagttaggaataa

SEQ ID NO: 819005 - DNA, 120 bp, Artificial Sequence
  ENSG00000254951_12 (sequence is synthesized)
acacaaacgagttcaattcagttcagcaaacagttattgtgcatctattttatgccaggaactgcagaaggtgctggggtacaaagtgaagaagataatttgcttggtctcaagggggag

SEQ ID NO: 819006 - DNA, 120 bp, Artificial Sequence
  ENSG00000254951_13 (sequence is synthesized)
ctcctggtctaatacccaggctcctataatccctcagcattatcctctccactttgcctgttcccctgttgctcattacctgtgcaaccgctcctccctctctggctcaattcctgcttt

SEQ ID NO: 819007 - DNA, 120 bp, Artificial Sequence
  ENSG00000254951_14 (sequence is synthesized)
tcttccctctgttcctttatcctgctagtgtcttccttttcaaccatagccaacactccatcttcaaatgcttagcgatacaacttatacctcaactatctggaaaggctttctgaacta

SEQ ID NO: 819008 - DNA, 120 bp, Artificial Sequence
  ENSG00000254951_15 (sequence is synthesized)
agtaggagaagttgtaaatatttaactttttatttttctaaattatctgattataagcaacagtaaaacaaagatcccatattattatctgcagagttaatttggggacaacagggacct

SEQ ID NO: 819009 - DNA, 120 bp, Artificial Sequence
  ENSG00000254951_16 (sequence is synthesized)
acctcttagtttttttgattaattttaaacttacttgtaattaattggtagtatatgttacaaaccattaaaaattacttaacagtaatcacttttgaaaataggaggaaaataaacatt

SEQ ID NO: 819010 - DNA, 120 bp, Artificial Sequence
  ENSG00000254951_17 (sequence is synthesized)
gaggaaaataaacatttttatggcagatttgtttgccttaagaattattttgaaagaagtattagaatcgaggcttagaaaaacggtagagtgcttggctgggcgcagtggctcacacct

SEQ ID NO: 819011 - DNA, 120 bp, Artificial Sequence
  ENSG00000204581_0 (sequence is synthesized)
tgaattgtaatagtccaacaatacatcttccctgaaaatgtgctctattacaccagtaatttctaatgaaaaacttcattcttcacacactgtggttaagcatcatcaaatcagtactga

SEQ ID NO: 819012 - DNA, 120 bp, Artificial Sequence
  ENSG00000204581_1 (sequence is synthesized)
aaagacctttgatcgtatttgcaagatgcactaaaatgaactttcactgaccaagatttcaaagtttgtaattaatactcttgaaaaatccctgactaatctgtcaactctcaacgtctt

SEQ ID NO: 819013 - DNA, 120 bp, Artificial Sequence
  ENSG00000204581_2 (sequence is synthesized)
taaccacacagttcaaaaccatgaggtggcgtacacagcccctaaactttccacatattgtcatatgattattcaagataattttccctttgggtttgcattatgaaactcaaccaactt

SEQ ID NO: 819014 - DNA, 120 bp, Artificial Sequence
  ENSG00000204581_3 (sequence is synthesized)
tggtaatatattcaccggtgggggaaatacaatgatttgaatgagtgtaaaatagagtatgggttttatctatctggtgccaaaaacagaacgtagggccagaggtaggaattaaatgag

SEQ ID NO: 819015 - DNA, 120 bp, Artificial Sequence
  ENSG00000204581_4 (sequence is synthesized)
gcagatttcaatataaagaaaattttaaaaaaataaacttgaaaaggaacccaatggctggtgaaaaggagggtttcttcactcataagtgttcagggagtgtgccctccaatggcaccc

SEQ ID NO: 819016 - DNA, 120 bp, Artificial Sequence
  ENSG00000204581_5 (sequence is synthesized)
tagagaagaaaaatgaactggctgtgaagaggagttgactgccaagattctttctaaatctaaagttctggagcagtttaaaatactccttctagccttctccatttttcctagactgca

SEQ ID NO: 819017 - DNA, 120 bp, Artificial Sequence
  ENSG00000204581_6 (sequence is synthesized)
acagaaacctcagaatgattattgtctcaatggacggatccggcatcattcctgttagttattgtttgactcttagttattgtttgactctgattccaggtacccacccacctctgttcc

SEQ ID NO: 819018 - DNA, 120 bp, Artificial Sequence
  ENSG00000204581_7 (sequence is synthesized)
tggctgtcaagatgataataataattaccatcctttcactcacaaatggtatgctggattcctacccagtgttaggtacaattctggactttagaggtttaatggtacacactacaggaa

SEQ ID NO: 819019 - DNA, 120 bp, Artificial Sequence
  ENSG00000204581_8 (sequence is synthesized)
caggtctcacatcgtgaagctgttgaggcgttttaaaaatttttaaaaatatatgatctctttaatacaaaataaacttgagaagataatatagcattgattattacacagttacagtat

SEQ ID NO: 819020 - DNA, 120 bp, Artificial Sequence
  ENSG00000204581_9 (sequence is synthesized)
ttttattaccagggggtatttttatatggggctaagcagtgtattattaaagtttagttttgttaccaaacatgcttccatactataagcataaaaattgcacatagtgtaggggtcctc

SEQ ID NO: 819021 - DNA, 120 bp, Artificial Sequence
  ENSG00000204581_10 (sequence is synthesized)
tgccctgccagtttatgacccatttatgctggacaaagtacttcaagcttacccatatctttacaaagaaaattcaccagcttttgaaaaagacaaatgaataggtatactttaaaaata

SEQ ID NO: 819022 - DNA, 120 bp, Artificial Sequence
  ENSG00000204581_11 (sequence is synthesized)
actggaaatagccagtgagtggaatttgagaatatctgctttaaagaaagcagaagcactcagccctcaagggatgacactgtgtttgactatattaatatgtatatttgggagtgaggg

SEQ ID NO: 819023 - DNA, 120 bp, Artificial Sequence
  ENSG00000204581_12 (sequence is synthesized)
aaaaattgtaacatcagtttggcttcccacctccatctagttgcagtactcaatttatttttctgctctttttgactctccctacagtttccttatttcagttgggagagtaggatggcc

SEQ ID NO: 819024 - DNA, 120 bp, Artificial Sequence
  ENSG00000204581_13 (sequence is synthesized)
aaggatgggcagtgactaagctttgcagtcctctgaacaaaccatattttcccagcatggcatggtgttagtcctataatagatgttcagggtgggaagtgcccagtacacttggaggga

SEQ ID NO: 819025 - DNA, 120 bp, Artificial Sequence
  ENSG00000204581_14 (sequence is synthesized)
caccccagctattcctaggactccatgcagaaggttttcctgcctcttcccatatgtctcacccctgttctcagcataagatgaccacatgctgttttttgtgaaaaatcccttacccaa

SEQ ID NO: 819026 - DNA, 120 bp, Artificial Sequence
  ENSG00000204581_15 (sequence is synthesized)
acttgaaatgtcccttcattagcccctttcgtctggctaccttggtagagtctttttctccatccctttaatctgggctgagttatgacttgctttgccagtagaatatggggaacatgt

SEQ ID NO: 819027 - DNA, 120 bp, Artificial Sequence
  ENSG00000204581_16 (sequence is synthesized)
cactgtgtgatttccagagtttaggccttaagaagctttgaatcccccattatcactctcctataaccgtgagaatacctgctgtgcagaagcccagtctagcctgctggaggacaaaag

SEQ ID NO: 819028 - DNA, 120 bp, Artificial Sequence
  ENSG00000204581_17 (sequence is synthesized)
gccacgtagagatggaccaaggtgccttggccaacagccagcacccactgccagatatgagagagaggccatcttggacatcctagtcctgttgaactcagatgactgcagccacaggag

SEQ ID NO: 819029 - DNA, 120 bp, Artificial Sequence
  ENSG00000204581_18 (sequence is synthesized)
tgatcccagtgcctcactgcttccagttgctggaggatatgtggtgctgcactgacaaatgcctccaccactgtggcagacgtgtgacccttgacgttcttcctaagtcagaatctgtat

SEQ ID NO: 819030 - DNA, 120 bp, Artificial Sequence
  ENSG00000204581_19 (sequence is synthesized)
tctgtgtgtgcctagtgtggagaacatggatctgcccagccacactggctcagattctctgagaggaccagggcagtaatggtgcccaggagtactctatgatgttgccaccggaggaag

SEQ ID NO: 819031 - DNA, 120 bp, Artificial Sequence
  ENSG00000204581_20 (sequence is synthesized)
gtgccaaggatatcggcttcagagccagctaccatgtgaaaagtccagcttgatgacctagaaggacctttacctgcagaaggacaaggcttcaactctgttctgcagattctccttcag

SEQ ID NO: 819032 - DNA, 120 bp, Artificial Sequence
  ENSG00000204581_21 (sequence is synthesized)
taaattgggagtgcccttccacactggtcaacaggcccctccctgctgctttggatcaccaccttaagtcaaacacaattcaagtgccttcaaaagagcagcacatggactggcaaatcg

SEQ ID NO: 819033 - DNA, 120 bp, Artificial Sequence
  ENSG00000204581_22 (sequence is synthesized)
tgactggtgaaaatgggcacaatcaagtagttaacctgcacctattctcactttttgcagacttccaaactcgctgaatgcacagaggccttggcctggcttatctcctcctcgctcact

SEQ ID NO: 819034 - DNA, 120 bp, Artificial Sequence
  ENSG00000204581_23 (sequence is synthesized)
ctagtcctgttgaactcagatgactgcagccacaggagtgatcccagagtcttttgcactgggaggagaaggtggaacaggagacacccacattctagttggtccctgctgtctccaaga

SEQ ID NO: 819035 - DNA, 120 bp, Artificial Sequence
  ENSG00000204581_24 (sequence is synthesized)
ggtggtgaaccaggagtcctacagatgtgaagctaggttaaaaccagttctggggatgctttcaaatcaaagaggatttaaaaatgtgactcccagttgcatttccggagccaagcagca

SEQ ID NO: 819036 - DNA, 120 bp, Artificial Sequence
  ENSG00000204581_25 (sequence is synthesized)
tcctggcttgggggcctggtgtctaccacacttctgcgcattcttcctccaagccacatctcctgagaataaagcaagatgccattggcaatgtctactcagaactacttgaatgactca

SEQ ID NO: 819037 - DNA, 120 bp, Artificial Sequence
  ENSG00000204581_26 (sequence is synthesized)
tcaatcaacaggcttgaatgctcttcttcctctatgattcaacggtttgattgactgaactgaaactaaaacccaaccctagtggtcattttagacttgagcagatacagtcagaatctc

SEQ ID NO: 819038 - DNA, 120 bp, Artificial Sequence
  ENSG00000204581_27 (sequence is synthesized)
aatcacatgtcatcagcaggccctccttggcctccttattgcagctgggctcctgagcagctctccctcactcagggaggaaacgaatggctcctttcagtagggcagacgaaggctgct

SEQ ID NO: 819039 - DNA, 120 bp, Artificial Sequence
  ENSG00000204581_28 (sequence is synthesized)
ggctgatgcaactgctcctgtgtccacttcccagcaagggtgcaaaacaggatttgtgcttgtgctggtgaatctgggcttcacctagcaaatcagggggacaccaaaatgaaaacagcc

SEQ ID NO: 819040 - DNA, 120 bp, Artificial Sequence
  ENSG00000204581_29 (sequence is synthesized)
ctagaggcatggagaaagcctcaggtgcactaaggtgccaacagaaacgatgcatctcagagttgacagtcatgactcaaataggacgtgaaggcaacatgtgggtgagagtagcagcta

SEQ ID NO: 819041 - DNA, 120 bp, Artificial Sequence
  ENSG00000204581_30 (sequence is synthesized)
tgggtgtaaatatgatcaaatatgggggaggtgtccagatttcttggacatggttacaatcagtatttattttctctcttagtgaacgagtttttggtttttcaatactgctaattttac

SEQ ID NO: 819042 - DNA, 120 bp, Artificial Sequence
  ENSG00000204581_31 (sequence is synthesized)
aggcaattcactacgttccctgggaggtggagtggccttcctccctgctgtgcgtgggttacacagcctgcctcacttccctgtgggtccttcatcacctgcatgctcacatgattccat

SEQ ID NO: 819043 - DNA, 120 bp, Artificial Sequence
  ENSG00000204581_32 (sequence is synthesized)
tatttgagctcatggcaggaaatagaacctgattcaacattttgctaagtattattttcaccacactgaatagggtccttttttgatctgcaacccacagctgggctgtggttctctcaa

SEQ ID NO: 819044 - DNA, 120 bp, Artificial Sequence
  ENSG00000204581_33 (sequence is synthesized)
cacaggtagactgaaaagcttcctcctgcattgatttctcagcatgggctgaccacatgttcacaagtacttgttcttttccatacgtcccaatgcaggcaggcactggcagagcaggac

SEQ ID NO: 819045 - DNA, 120 bp, Artificial Sequence
  ENSG00000204581_34 (sequence is synthesized)
agctgtgtccaggagttcagggaacaaaataaggctactgtaacttcagtcaacttcaaggcacggtgtaaaataaagtaagagattatcagtcaaatagccatttgcattaaaattctc

SEQ ID NO: 819046 - DNA, 120 bp, Artificial Sequence
  ENSG00000204581_35 (sequence is synthesized)
ttattttttaaaaagcaaaatgaagtcagttttaatggagatatacaattgttaactgttgggtcattttgaaaggctttcttccttaaaatgagtctcagctgatagctactcactaat

SEQ ID NO: 819047 - DNA, 120 bp, Artificial Sequence
  ENSG00000204581_36 (sequence is synthesized)
gctgataattatctgaagcaaaataaatacaaatgtctgggttaatgaagactgaaacaggataatgcctggacactaaattttccaagaacaaggaacacaattgttctctacataccc

SEQ ID NO: 819048 - DNA, 120 bp, Artificial Sequence
  ENSG00000204581_37 (sequence is synthesized)
ctgcaaaaatgcttaatggccaggacacaggaatcttgtgtacttagagaccttgttaggatggagccccgggggcaccaccactggccttcgagccaaggtctcacagagagggcagca

SEQ ID NO: 819049 - DNA, 120 bp, Artificial Sequence
  ENSG00000204581_38 (sequence is synthesized)
agggggagcagctcatcctcctccccagctagggagacactaggacagcagtggagtggagtccgaaatctgccatagaagccccagcttactatttgctcactgagcagcaagtcaacc

SEQ ID NO: 819050 - DNA, 120 bp, Artificial Sequence
  ENSG00000204581_39 (sequence is synthesized)
tcagtttctctgtgcctacaggggagtaacagctgttcacactaaagggtgcttgtgaggatgatataagaatgaatatggacctgctctgacaacactgaagttccagacaaaagaata

SEQ ID NO: 819051 - DNA, 120 bp, Artificial Sequence
  ENSG00000204581_40 (sequence is synthesized)
ggcattagttatctgatttgaaggactgtgggggattggaattttaaaaataaacctcaacccaactccttctcttgtggggcctcggttgaacaactgggcacttgcactgccttctga

SEQ ID NO: 819052 - DNA, 120 bp, Artificial Sequence
  ENSG00000204581_41 (sequence is synthesized)
atatgtggatggattttgcctgctttggagaagcatatgaactcctcagggcatctagtgccctagagtgtgccaaaggaacaaggaggactacaaatgggtgatgcctggagcttaacc

SEQ ID NO: 819053 - DNA, 120 bp, Artificial Sequence
  ENSG00000204581_42 (sequence is synthesized)
cacctccatttgggattcggagctctggtttctgtgttcagctagaatcttcgacagtcatttaatgtctctctttcttagttttactcatttgttgaatggggattatattagccttac

SEQ ID NO: 819054 - DNA, 120 bp, Artificial Sequence
  ENSG00000204581_43 (sequence is synthesized)
tttccttgaaggtcttaatgagaatgaaatgagataatttttaagtatatatatgcatttctaatttccatcagactggagcgtcggtataagtcctgggtgttctggaaagttttattt

SEQ ID NO: 819055 - DNA, 120 bp, Artificial Sequence
  ENSG00000204581_44 (sequence is synthesized)
atttagaaacagtttaggctgattgctatctccctatgctaactttttgtttttttagtaaactttttattttggaatactttcaaatttacagaaaagtttcaaagataacaagagttc

SEQ ID NO: 819056 - DNA, 120 bp, Artificial Sequence
  ENSG00000204581_45 (sequence is synthesized)
tcatttgcccttcacccagtttccccataactatggctcattgtaaaaactaggaaaccaatattaatgcattactaataactatagactttattcagattttaccagtttttctactca

SEQ ID NO: 819057 - DNA, 120 bp, Artificial Sequence
  ENSG00000204581_46 (sequence is synthesized)
tgttcttctgtcccaggattcaatacatgatactgcattgtatttagttaccatatctcctgagtctcttctgctctgtgatggcttcagtcttttctcgtcttccatgcatcgtcagtt

SEQ ID NO: 819058 - DNA, 120 bp, Artificial Sequence
  ENSG00000204581_47 (sequence is synthesized)
ttaatgggtactaggcaggtattatggacaagcttggcaaatccacagcccatgggccacatgaggcccaggataactttgaatgtggcccagtacaaattcataaactttttaaaaaac

SEQ ID NO: 819059 - DNA, 120 bp, Artificial Sequence
  ENSG00000204584_0 (sequence is synthesized)
cttgagctggagtcacccagcctggccaagaactggaaaagtctctttggggatttggacccatttctgaaaagctcatgaaaaccactttgccttggactcctgcccccagccggagcc

SEQ ID NO: 819060 - DNA, 120 bp, Artificial Sequence
  ENSG00000204584_1 (sequence is synthesized)
ctccatatccatttaacccaaatccccaactccagggatgactacaggttgggggagccccgagagcaagggaggtgaggaaactgatgtccagaaagaagcaggcatcagtggagacac

SEQ ID NO: 819061 - DNA, 120 bp, Artificial Sequence
  ENSG00000204584_2 (sequence is synthesized)
tcctagccctgctgccctctcctcactgcacacacttccaggttcagacaaaccggaaaggaaacccaccatgcaggactgtccatgtgatggctcttcccgtggctccatttctaagcg

SEQ ID NO: 819062 - DNA, 120 bp, Artificial Sequence
  ENSG00000204584_3 (sequence is synthesized)
cctccgaggacctcatcgtggcccaggaccgcaagccaaggccaccccagtgtccttaccatcctgggaatgggaggagtcaggcccagccttgtcctgtctgcccccctggaagccttc

SEQ ID NO: 819063 - DNA, 120 bp, Artificial Sequence
  ENSG00000204584_4 (sequence is synthesized)
cctgagcactggcctcttatttacccgtctttgtctctggcttgttggtatctgtcccttgtctgattagggaacgcctgaggtcaggatctttgcctccccaatcagattgtcaggcag

SEQ ID NO: 819064 - DNA, 120 bp, Artificial Sequence
  ENSG00000204584_5 (sequence is synthesized)
gagtgggggtagtgcagatgctgggtcatttctacatgtgagaccaaatagtggtcctgtttaagttgatccccttgaaagaaaattctggaaaagctcctcagatgcacagatacacag

SEQ ID NO: 819065 - DNA, 120 bp, Artificial Sequence
  ENSG00000204584_6 (sequence is synthesized)
aatcagaccttgggcaaagtgtgtagttgtgcttttgaagctgtgcaaccttggacaaactacttgacttctctgtgcctcagtttccttatttgtgaaatgaggggtagtcatgatacc

SEQ ID NO: 819066 - DNA, 120 bp, Artificial Sequence
  ENSG00000204584_7 (sequence is synthesized)
ttccccatgaggttgatgggaggattgagttaatatttataaagcatttcagacagtgccagagatataccgtgtgttaaataagtatttcttacacacacacacacacacacagacaca

SEQ ID NO: 819067 - DNA, 120 bp, Artificial Sequence
  ENSG00000204584_8 (sequence is synthesized)
cttgaatctacccatggtagagagtcagacaacttgccttgcagactgcctgctctcccagcagccatgcaggggatcttctgcctctgcactgccgattatcccctgccctcgtcagag

SEQ ID NO: 819068 - DNA, 120 bp, Artificial Sequence
  ENSG00000204584_9 (sequence is synthesized)
cctctccccaaaagtacctccaaggccacaattacccaggtctctgcttcagtgctgagtgtctgttcctctccaccatcacctgccacagtgcacacggacagctccatcaggagaagc

SEQ ID NO: 819069 - DNA, 120 bp, Artificial Sequence
  ENSG00000204584_10 (sequence is synthesized)
agggcgaggcaaggcagcatggtgagcctgcactgtcctggaatctctgggagcccctctcagcttgaagatgcctcctgcaggctttggtttgctctttggctccttgagtgtagatag

SEQ ID NO: 819070 - DNA, 120 bp, Artificial Sequence
  ENSG00000204584_11 (sequence is synthesized)
gggaaactccccctgttttctggtccttccagctgttcctgattccttccttcagcttaactgatccccaggccagtttctgtgactcccctccctccctggctggacaggccaatgata

SEQ ID NO: 819071 - DNA, 120 bp, Artificial Sequence
  ENSG00000204584_12 (sequence is synthesized)
ttaggagctgctcaggaggagggatcagacctcttccactgctgccccctaacatttgatcccagggcttaacactctgatgcaacacctgcctcacctttggctgtttccctggtggca

SEQ ID NO: 819072 - DNA, 120 bp, Artificial Sequence
  ENSG00000204584_13 (sequence is synthesized)
ggtgcacagtggggcagtgtgtgggacctggagcttgcagcttccaggctggaaaacctgaagggaccttctcatcttagaaataagggagggggccatatgccttctccctacctggtg

SEQ ID NO: 819073 - DNA, 120 bp, Artificial Sequence
  ENSG00000204584_14 (sequence is synthesized)
ctctgctcccctgtacagagaggcctctccctggaaattagcagtatcccctttctgtctcctcttcctgtctttgagccccctcctctccagcattctcctccatcaatagtccctgtg

SEQ ID NO: 819074 - DNA, 120 bp, Artificial Sequence
  ENSG00000204584_15 (sequence is synthesized)
tgtgcaaaagaacacgtcttcctttaagagaaataacacattgcttaaagaaatgaggctcctcacgagtgggaattgggatttgccagaaaaatggctgcaggtttcaagcgtcattgg

SEQ ID NO: 819075 - DNA, 120 bp, Artificial Sequence
  ENSG00000204584_16 (sequence is synthesized)
ctctaagtgatctttcccctgttgtcaaagtgatgtttctaagtccctaaactgacttgtctctcctgcttacaacctttcagtgtcttcccactgcccttgagtgaattcaagctccct

SEQ ID NO: 819076 - DNA, 120 bp, Artificial Sequence
  ENSG00000204588_0 (sequence is synthesized)
agtagcgcagcgagaaggatcgccatcacacggcgcactggtgcggcttctcccccgagtggatgaacatgtgcttggtgtcgtttttccttgagctgaacgtcttgcaacagtggccgc

SEQ ID NO: 819077 - DNA, 120 bp, Artificial Sequence
  ENSG00000204588_1 (sequence is synthesized)
acgcatagctgccccagatcccggaagaaaatctctcccacaccactgtagtcagagaggccagtgggtgcatggaactcctcgcacgcgctgtcagcagcagcagtgaggaagccggca

SEQ ID NO: 819078 - DNA, 120 bp, Artificial Sequence
  ENSG00000204588_2 (sequence is synthesized)
gcacagtctgggaaggaaggaggtgcttggctctctcccgggccgccaccttcgccgtcctcgccatcggtctcatcgtcagtttcctcgtcatcgttgtcacctcggtcgtcaggggcc

SEQ ID NO: 819079 - DNA, 120 bp, Artificial Sequence
  ENSG00000204588_3 (sequence is synthesized)
gcggacagtgaggggtaggcaccaagcccctcggctttggcaggtgtcgggggcgcaggcagctgcaaactcgcgggccggcgctgcttaccgctgtgcgcggcaccggggtgccccggg

SEQ ID NO: 819080 - DNA, 120 bp, Artificial Sequence
  ENSG00000204588_4 (sequence is synthesized)
ggtgcgcagccagcaggtggcgcaggcggtgacgcagctgctcaggtgcgagtggcgggggcacaggggtgggcaggggcgcgggtgcagaggtgctcgcgggtgcagaggagcgcgtgc

SEQ ID NO: 819081 - DNA, 120 bp, Artificial Sequence
  ENSG00000204588_5 (sequence is synthesized)
gataatctgcgtgcattcgtcgataactgtctatgcgaagcaccgacgcagccatgagtacctgcggggcttcactctgtgccacaacgagcgaaccgctgtacaggagctcgactagct

SEQ ID NO: 819082 - DNA, 120 bp, Artificial Sequence
  ENSG00000204588_6 (sequence is synthesized)
gtcgcaccgtctgcacaggcaccaccgaaggcacacggatctcagaggggccgagcagcagcttgtcttggaaggagggcgagccgattgccagcccgcagcggtgcgcacgcagcgaag

SEQ ID NO: 819083 - DNA, 120 bp, Artificial Sequence
  ENSG00000204588_7 (sequence is synthesized)
cttcatgaatgcacacagtcacgtcgcagaagtgcccacccagcttctgcccattgagggtctcaagcagagagcgtgagaagttctgcagatgtatgtggcgcacagcctctacagccg

SEQ ID NO: 819084 - DNA, 120 bp, Artificial Sequence
  ENSG00000204588_8 (sequence is synthesized)
ccgactccgactcctcttcaggcaccaggcctggccgtggccgccttctcaccgactccaaggcagcacttccgggcgcttctctttatttttatacagttttattgagatataatttac

SEQ ID NO: 819085 - DNA, 120 bp, Artificial Sequence
  ENSG00000204588_9 (sequence is synthesized)
atgctatccagcccatctatttcaagtgtaccatgcaaggggtttgtatatattcacagagttgtgtatccatcaccatcgttttagaacattcatcactccagaagaaactacgtaccc

SEQ ID NO: 819086 - DNA, 120 bp, Artificial Sequence
  ENSG00000204588_10 (sequence is synthesized)
ccctaggaaatccgtaatcactttcagtctatggatttgcctattctagaccattcatataaatgaagtcacacaacactgggtcttatgtgactggcttctatcaaagtttgcaaggtt

SEQ ID NO: 819087 - DNA, 120 bp, Artificial Sequence
  ENSG00000204588_11 (sequence is synthesized)
cagctgtggggaggaaagatgctgcagaggagacggatgcccacagaggcccctgagtggatacaatgctcactaagtgggctgaccccacattggacaccgctgcatccatgtccatca

SEQ ID NO: 819088 - DNA, 88 bp, Artificial Sequence
  ENSG00000204588_12 (sequence is synthesized)
gctgaccccacattggacaccgctgcatccatgtccatcacacaacacagctgccgttctcctccgttttcttctcttcctgccctat

SEQ ID NO: 819089 - DNA, 83 bp, Artificial Sequence
  ENSG00000204588_13 (sequence is synthesized)
ggaatggctgcatgttttctcccccagtccaaggcactgggtcttggctgggttgaaggttccaagctgctctcctgctgtgt

SEQ ID NO: 819090 - DNA, 120 bp, Artificial Sequence
  ENSG00000204588_14 (sequence is synthesized)
gcacaaacccaggtctggaactggctccttaccttggaaggtgaatgatcctgccaggactcttagcctccctgggtctcaatttctttatctgtttcatgggaatgaggatctctgctg

SEQ ID NO: 819091 - DNA, 120 bp, Artificial Sequence
  ENSG00000204588_15 (sequence is synthesized)
tctttatctgtttcatgggaatgaggatctctgctgggtggttgggtgatgtgggggctgtgtgaaaacagcttgtcaatacaagccaaaatagaaatatttctccacagagtatgaagg

SEQ ID NO: 819092 - DNA, 79 bp, Artificial Sequence
  ENSG00000204588_16 (sequence is synthesized)
atttaaattaaatggaaaattaaaatggtaaaaaatgcaaagctgtattaagaatcctgtactcgttccccctaaatat

SEQ ID NO: 819093 - DNA, 120 bp, Artificial Sequence
  ENSG00000204588_17 (sequence is synthesized)
acccgattctttccttgagcctccagaagggacacagccccgccagcaccttgactttagcctggtgagatcctcttaggacttttggcaatcagaactataagacagaaatggaagcca

SEQ ID NO: 819094 - DNA, 63 bp, Artificial Sequence
  ENSG00000204588_18 (sequence is synthesized)
tgcagcagcaatagaaaactaatgcagggcccaagaaatcactggtgatgagatgaggtctgg

SEQ ID NO: 819095 - DNA, 61 bp, Artificial Sequence
  ENSG00000204588_19 (sequence is synthesized)
gggaaagtgggctcaagaggtctggatctgtggtgagatgggggaagtgggctcaggaggt

SEQ ID NO: 819096 - DNA, 120 bp, Artificial Sequence
  ENSG00000226968_0 (sequence is synthesized)
ttctgcccatgggcacaggcaattggtctcaactgcgcatggtttgccctgtaatgccctccaaatgaccagctgaaaagattgatagtctagagcagaggacctgcggcacctgatcca

SEQ ID NO: 819097 - DNA, 120 bp, Artificial Sequence
  ENSG00000226968_1 (sequence is synthesized)
cagaccagacagttaggaggcttctttgtcctcccagaagtgcaggcaaagttttggtgttcatcaaatgagtgatcaatgacaggttatcacacctactgcaaaaatatatggcacttc

SEQ ID NO: 819098 - DNA, 120 bp, Artificial Sequence
  ENSG00000226968_2 (sequence is synthesized)
cctctccacctccacagtgggctgtgaaaattaattgagttcaggctgtgaaaaacttaagctgctacatgaaatgcaaaatcattaagcttcagagattgtaacattctgcttgtggcc

SEQ ID NO: 819099 - DNA, 120 bp, Artificial Sequence
  ENSG00000226968_3 (sequence is synthesized)
ctcaagattgagcgcattttgggttttgaccttgcactgctatactgagattcagcagaagttaactacccgcaagactccctccagagaactgaggcctcaggatcatcttcaacacct

SEQ ID NO: 819100 - DNA, 120 bp, Artificial Sequence
  ENSG00000226968_4 (sequence is synthesized)
tcacccagagtacggagacaaaacccttgccacatagacctgccacaccacaataccaggtggagatgcaccgttgcttgagttggtccaccaagaaagttgccatagaagcctgaagtt

SEQ ID NO: 819101 - DNA, 120 bp, Artificial Sequence
  ENSG00000226968_5 (sequence is synthesized)
acgacagcttataaggaagtggttatcgattatgacggatggagaaaatggcaaacgtggctgaaagtggacatttttgccttgacaactccatctgctcctcctctatgaaagctccat

SEQ ID NO: 819102 - DNA, 89 bp, Artificial Sequence
  ENSG00000226968_6 (sequence is synthesized)
ccaaacactttgggaggccaagagatgcccaggtcccaaatgtaataattccatggtatgatgggttgctgctgcacctgtctgatttg

SEQ ID NO: 819103 - DNA, 120 bp, Artificial Sequence
  ENSG00000226965_0 (sequence is synthesized)
agatgcctccttgttccaggctgacaagcccgggcttgtgcttatttcactgtctaaccctgcccaggccccggggagaagcctggtattcttcgtgtttatttaattgtcaactctctg

SEQ ID NO: 819104 - DNA, 120 bp, Artificial Sequence
  ENSG00000226965_1 (sequence is synthesized)
tgttctaagacgataccctggccttgactcagtacaacctaggactgtaagtcccatcatgtctatggacttcagtttccagacatgaaacacaagaggcttggacgagattagaaatca

SEQ ID NO: 819105 - DNA, 120 bp, Artificial Sequence
  ENSG00000226965_2 (sequence is synthesized)
atggtcagagccacgagagtttccataaaggaacacaaccatgtggacaacttgattatgccctacaaaactgaattcctgtgagcattcctcttcaagatggaagaaaaagggaatatt

SEQ ID NO: 819106 - DNA, 120 bp, Artificial Sequence
  ENSG00000226965_3 (sequence is synthesized)
tcacaaccccaatggtgaaacgtctgcctatagccaacaatacaatcttcttgctctgtcacccaggctgaaatgcagtggcgccatctcgtctcactcggctcactacaacctccgcct

SEQ ID NO: 819107 - DNA, 120 bp, Artificial Sequence
  ENSG00000226965_4 (sequence is synthesized)
gcctatagccaacaatacaatctccatccatgtatgatgtgacttgctcctacatgccttccaccatgattatgaggcctcctgagccatgtggaactgtgctcagcactgaatagaaag

SEQ ID NO: 819108 - DNA, 120 bp, Artificial Sequence
  ENSG00000226965_5 (sequence is synthesized)
cctggcgcatgttctggaggctgggaagtccacaatcaaagcactagcatatgatgtctgaaaaattacacaacagcctcagactggtcggacccttcaggatgaattccggaagaagac

SEQ ID NO: 819109 - DNA, 120 bp, Artificial Sequence
  ENSG00000226965_6 (sequence is synthesized)
attgctgtcataggagatgacagctccaagcgttattaccccttcatgaagatgtttcagtgggacaagatgtgaaggtggaagacaatgatattgatgatcctgaccctgtgcaagcct

SEQ ID NO: 819110 - DNA, 89 bp, Artificial Sequence
  ENSG00000226965_7 (sequence is synthesized)
aagctaatagtttaaaaagcagacaaaaaaattgtaatagaaaaaaatgcttacagaaaaagaataaaaagaaacaaatttttacagct

SEQ ID NO: 819111 - DNA, 120 bp, Artificial Sequence
  ENSG00000226965_8 (sequence is synthesized)
ccctccagaggggagaaatactgttcctctcatggcagagaaaaggaagagacagaatttactcccacaagcccttttatagtggcattgacccattcgtgagggcagatccctcttgat

SEQ ID NO: 819112 - DNA, 120 bp, Artificial Sequence
  ENSG00000226965_9 (sequence is synthesized)
ctatacatcactcattaggcccccaccacccaacactgtagcaggtgtgacttatgtttcaacttgagttttggagggcactaaaacacttaaaccacaccatgaatcaaaggcgtaagt

SEQ ID NO: 819113 - DNA, 120 bp, Artificial Sequence
  ENSG00000226965_10 (sequence is synthesized)
gaaggagcttaaactataaatatcttagagaaaaacatagccatggaataaatctttgtgactttggattacccaaagtttcttagatttggcactaaaaccacaaagaactaaataaaa

SEQ ID NO: 819114 - DNA, 120 bp, Artificial Sequence
  ENSG00000226965_11 (sequence is synthesized)
cttatttgagttcaaaatgggtcgtatagcaacagacatagcttgtgacatcaacaatgcatttggcccaggaactgctaatgaacatactgtgcagtggtggttcaagaagttttgcaa

SEQ ID NO: 819115 - DNA, 120 bp, Artificial Sequence
  ENSG00000226965_12 (sequence is synthesized)
ggagcatagtggctggctatcagaagttgatacaggagaagttaccaaagaactcaacatcgaccattctagggttgtttggcatttgaaacaaattggaaaggtgaaaaagctcgataa

SEQ ID NO: 819116 - DNA, 120 bp, Artificial Sequence
  ENSG00000226965_13 (sequence is synthesized)
aaagtggattttatacagcaactgacgatgaccagctcaatggttggactgagaagaagtgccaaagcacttcccaaagccaaacttgcatcaaaaaaatggtcatggttactctttggt

SEQ ID NO: 819117 - DNA, 84 bp, Artificial Sequence
  ENSG00000226965_14 (sequence is synthesized)
caaacttgcatcaaaaaaatggtcatggttactctttggtggtcggctacctgtctgatccactacagctttttgaatccctga

SEQ ID NO: 819118 - DNA, 120 bp, Artificial Sequence
  ENSG00000226965_15 (sequence is synthesized)
tggttaacagaaagggtccaattcttctccacgacaatgatggaccatacattgcataaccaatacttcagaagttgaacaaatcgggctacaaaattttgcctcatacgccatattcac

SEQ ID NO: 819119 - DNA, 120 bp, Artificial Sequence
  ENSG00000226965_16 (sequence is synthesized)
acttcttcaagcatctcaacaacttttgtggggaaaatgcttccaaaaccatcaggatgcagaaaatgctttctaagtgatcgttgattcccaaatcacggatttttatgctacagggat

SEQ ID NO: 819120 - DNA, 82 bp, Artificial Sequence
  ENSG00000226965_17 (sequence is synthesized)
atgcagaaaatgctttctaagtgatcgttgattcccaaatcacggatttttatgctacagggataaacaaacatttctttat

SEQ ID NO: 819121 - DNA, 120 bp, Artificial Sequence
  ENSG00000226965_18 (sequence is synthesized)
agttaactttgagatgatgcctctatcatttcatttacatatcaaagattaatgtttcacttgggccctgggtatctgaggcactagatgttatttaagacatcaatgggtcattatgaa

SEQ ID NO: 819122 - DNA, 120 bp, Artificial Sequence
  ENSG00000226965_19 (sequence is synthesized)
agcagagctgataaagaaaggtagatgccattgtaatctagtgatctttacagcacaacaagttcccctgaagttggaaatctaaccacgttccacaaggaaagcacatggcttagggaa

SEQ ID NO: 819123 - DNA, 120 bp, Artificial Sequence
  ENSG00000226965_20 (sequence is synthesized)
attggaagtccgctgggtccagaaggactacagtcagaggtaaccacattggaacctgtttacatggtcaccagcctgcaaatgagtgttatctaaagagagaagatgcttgaagtatca

SEQ ID NO: 819124 - DNA, 80 bp, Artificial Sequence
  ENSG00000226965_21 (sequence is synthesized)
ttacagtcatgcgtgtttcaccatgttgccaaggctggtctggaattcctcgcctcaagtgatccgcccacctcagcctc

SEQ ID NO: 819125 - DNA, 71 bp, Artificial Sequence
  ENSG00000226965_22 (sequence is synthesized)
ctcacgtgagccactgtgctcagcccacaattacttttaaaataaatcaagagccttttatacttgtgtaa

SEQ ID NO: 819126 - DNA, 120 bp, Artificial Sequence
  ENSG00000226963_0 (sequence is synthesized)
agcgaacaggtgtttggttaattcccgcccccacccccatctttttttttttttttttcaaaggcatgtaaaagtatctcctaaggagcgcccccgccttgctgagaaagtcatgcagga

SEQ ID NO: 819127 - DNA, 120 bp, Artificial Sequence
  ENSG00000226963_1 (sequence is synthesized)
cacatggaaagtggctttccaacttgtgcggggcgcgccagtctgcgggggagacggggtgcaccgtgagtttgggaaaggcctagaccatcctggaactacgctccctgcaaacccaca

SEQ ID NO: 819128 - DNA, 120 bp, Artificial Sequence
  ENSG00000226963_2 (sequence is synthesized)
ggtcccagcaaacacgcccggagggaagaaccggcggaaagcactttgtttaaaacagaaaaaaaattgccagtgcatggccagcgagaagccgaagaggctcccggggtctccatattt

SEQ ID NO: 819129 - DNA, 120 bp, Artificial Sequence
  ENSG00000226963_3 (sequence is synthesized)
ccggatcacgttgtcctcccgagtgtccaagttgaaggctgcgccgagccgggacaggagccccgccgacaggtagagcaagcacagctgcccggcggcggccatgggcggacgcacggg

SEQ ID NO: 819130 - DNA, 120 bp, Artificial Sequence
  ENSG00000237560_0 (sequence is synthesized)
ccctcccaaggcaagttcaactgggttctttggcagccgaagtctacacggaccctgcagggagcggtggagaaaagttagatgtctgaagtgtttttcattggaccaaaatcaaggtgt

SEQ ID NO: 819131 - DNA, 120 bp, Artificial Sequence
  ENSG00000237560_1 (sequence is synthesized)
tggctgggctaccttcccttctggagactctaaggaagaatccatttccttgtcttttccagatcctagaggctacctgcattccttggcttttatccccaatcttccatcttcggagcc

SEQ ID NO: 819132 - DNA, 120 bp, Artificial Sequence
  ENSG00000237560_2 (sequence is synthesized)
gagaagtagttggggaagcaatatgcggaaacaaagccatgaatctgacaagaaatgtacttaagattgtatatatggagatgaatacccattgtcctttgcactttctggatgataaat

SEQ ID NO: 819133 - DNA, 120 bp, Artificial Sequence
  ENSG00000237560_3 (sequence is synthesized)
tagaaaagaaaaatccaaagaatgaagttgtgctatttgtcctcacttctgatttgggaaactagaggaaattaagatgggaaaagaccatgtgaggacacagtgagaaggagaccatat

SEQ ID NO: 819134 - DNA, 120 bp, Artificial Sequence
  ENSG00000237560_4 (sequence is synthesized)
gcaaagcaggaaggaagatctcactggaaccaaaaaccagccctgctggcaccctgatcttggacttctagcctttctcagaactgtgagaaaataaatttctgatgtttcagccactca

SEQ ID NO: 819135 - DNA, 120 bp, Artificial Sequence
  ENSG00000237560_5 (sequence is synthesized)
ataggtaaaagggaatggcagatattcaagcttagggagcaagcagcaaggacagagccttccccgtctctgtgtgttgaagtcagcagatagcacacctgctgctgcgtgagttccttc

SEQ ID NO: 819136 - DNA, 120 bp, Artificial Sequence
  ENSG00000237560_6 (sequence is synthesized)
aaatctagctctggaagccaaccattattcactttgggggagcatgccatgcaaaagatctcctggttttgggaaatcacacagtgacctatgttgtttctgctgcctaccgaggaacac

SEQ ID NO: 819137 - DNA, 120 bp, Artificial Sequence
  ENSG00000237560_7 (sequence is synthesized)
ggacgcagcttcagtctaagaaagaacgttcaattgaggcagtcactttctctgggccaaattacattcttcataatctcccaagtgttatatttaatttacatttgaaatagaaaatat

SEQ ID NO: 819138 - DNA, 120 bp, Artificial Sequence
  ENSG00000237560_8 (sequence is synthesized)
gtgaacatagactttggctcacgaattatttcagttttctgaattcaggagaatgtgcttgttgaagcagatgtttctgaattttattttattactgaaatttccacaaatataaatcat

SEQ ID NO: 819139 - DNA, 120 bp, Artificial Sequence
  ENSG00000237560_9 (sequence is synthesized)
ttttgtatctttcctcagcatttctgatcatgtgttttcaagaaagcattgaattttttagcaaagcttctcatgcagataatctcttaaaggtttaaatctcttacggagcataagaaa

SEQ ID NO: 819140 - DNA, 120 bp, Artificial Sequence
  ENSG00000237560_10 (sequence is synthesized)
aataaactattttttgacttcaatctaaatggaattctgtactcttcacaagcccctgaatatttcataactctgaaagatgcaaatgtaaatttcctatgaatcccgattttattcaaa

SEQ ID NO: 819141 - DNA, 120 bp, Artificial Sequence
  ENSG00000237560_11 (sequence is synthesized)
gattgaagccctatcacctcacttagaacaaatttcatccattaacaactatcttgcaggtaaagggaagccaaatataagtaaagtactaacaaggccaattacgttcaggtgcatgga

SEQ ID NO: 819142 - DNA, 120 bp, Artificial Sequence
  ENSG00000237560_12 (sequence is synthesized)
tgattaatcataaaattcacaacggaggacactctgtgggtaaggaatatgattcctttttgcaaataatgtggtatatgtatatatttttcttctcttctcctttcacatgcactgttt

SEQ ID NO: 819143 - DNA, 120 bp, Artificial Sequence
  ENSG00000237560_13 (sequence is synthesized)
agaggaaattaagatggttagtattgctatgatttttttccccctgaaccctaggaaataggaatttaaagtccttaaatatattttctataatcaacaaattataaagttattttcact

SEQ ID NO: 819144 - DNA, 120 bp, Artificial Sequence
  ENSG00000237560_14 (sequence is synthesized)
aatctttttgaaaatacaaatataagccagaggttcttattcatggctcatttctcaggacttcataagaccatgaagcacagtgaaacccatatattgaataggtctcatgcaatctgc

SEQ ID NO: 819145 - DNA, 120 bp, Artificial Sequence
  ENSG00000237560_15 (sequence is synthesized)
atataagtaaagtactaacaaggccaattacgttcaggtgcatggatgattaatcataaaattcacaacggaggacactctgtggggaaaagaccatgtgaggacacagtgagaaggaga

SEQ ID NO: 819146 - DNA, 120 bp, Artificial Sequence
  ENSG00000237560_16 (sequence is synthesized)
agctgttcatctacacacaaaggccccaaaacatcgtgtgcctcccacagatggaagaagatgggaaatcaaatactgtccaaggaaggaaaaaagattaataatgaattggtatcccaa

SEQ ID NO: 819147 - DNA, 120 bp, Artificial Sequence
  ENSG00000237560_17 (sequence is synthesized)
gagtcacacaaatatcaaatcaagagggactaattccctgagcaggaagctaacctaagccacaatgggaattgtaaccaacagactacaaaatggagcagtgtccactgtgaacgttgc

SEQ ID NO: 819148 - DNA, 120 bp, Artificial Sequence
  ENSG00000237560_18 (sequence is synthesized)
atggaatccaaagtggcctgtgtgcccactttgatgacttgttgtactagcgcctttgatctccatcatagaaaatgctctgctccatttcaaaagagattgtcatatatgccatttgcc

SEQ ID NO: 819149 - DNA, 120 bp, Artificial Sequence
  ENSG00000237560_19 (sequence is synthesized)
attcactggcctttggatcaaaccaacaacagacctcacagatagaattccaccaatgaccattcacaaagagactgtctctcttgctcctgctctggccatgagatgtgcctgtttcaa

SEQ ID NO: 819150 - DNA, 120 bp, Artificial Sequence
  ENSG00000237560_20 (sequence is synthesized)
ctttaccttcagccttgagtaaaagctcccagaggcctcaccagaagctgagcagatgccaatgccatgcttgtacagcctgcagaactgtgagcaaattaaaactcttttctttgtaaa

SEQ ID NO: 819151 - DNA, 120 bp, Artificial Sequence
  ENSG00000237563_0 (sequence is synthesized)
aaggctgcctgagataacccactgccttacccaaaaggtctagactctagagcccttttgggcagtctccatggtcaggtccaactgaaagaggagtcattttgagactgtgaggtggtc

SEQ ID NO: 819152 - DNA, 120 bp, Artificial Sequence
  ENSG00000237563_1 (sequence is synthesized)
gctgcaatctgctcctctgtctccattccaaaaagagactgtgtgtaagagtctgctctcttggggattggaataccatctggtggaggttatttggatgctgaaacattttggcatgct

SEQ ID NO: 819153 - DNA, 120 bp, Artificial Sequence
  ENSG00000237563_2 (sequence is synthesized)
actcatgaatgattcacagaaaaataaagaacactgagcaatacagcccaagccaagccacacagacaggccaccaaaaggtcccaggataaaatcccaacatgatggaggagtgccccc

SEQ ID NO: 819154 - DNA, 120 bp, Artificial Sequence
  ENSG00000237563_3 (sequence is synthesized)
tcattatgtgaagcacctgctgggcttggaaccaaattcagtgtaagttcaagtggccctgtggagaggactgctagtgtctccccctgtatttgctgcaggaaaataaaacagtgaaaa

SEQ ID NO: 819155 - DNA, 120 bp, Artificial Sequence
  ENSG00000237567_0 (sequence is synthesized)
aacatagaatactcccaagcaacattcagctttgattttccatctatgctggaaaatgctagtcatctcaaatataccacgcttgaattccatttaatttgcagtgtgcctaacatatta

SEQ ID NO: 819156 - DNA, 120 bp, Artificial Sequence
  ENSG00000237567_1 (sequence is synthesized)
cctgatattttaccattagcgggtttctctcttggctaaagattttcttgattgctcataagggaggtctatttcatgtacattaggactgtagagaaaggaacagctacatctgcctag

SEQ ID NO: 819157 - DNA, 120 bp, Artificial Sequence
  ENSG00000237567_2 (sequence is synthesized)
tccatacagaagagggaaatgcttgtgctgaggcttgaaagaggaggaaacactggctccatgaagccttcatcgaccctcaaggattgctccttcctgtcctttatttccattgataag

SEQ ID NO: 819158 - DNA, 120 bp, Artificial Sequence
  ENSG00000237567_3 (sequence is synthesized)
aaaaagctgtctgtaactgatttccaggccgaagtacaagaacagcttcccactgtcgctagtctctgggtgcctcaacatcccttgtttgtttctttaacctgcttgtaaccttgcaag

SEQ ID NO: 819159 - DNA, 120 bp, Artificial Sequence
  ENSG00000237567_4 (sequence is synthesized)
caggaaatgtgtacattctatagtccattcatccaagttgacaagaagaaacctcaggcatgaagacagaacaagcatttctcaacaatacaaagtgataaagcgtcaaaatgagcttca

SEQ ID NO: 819160 - DNA, 120 bp, Artificial Sequence
  ENSG00000237567_5 (sequence is synthesized)
attacctgttttcttgtgagaagacaaactcagagtggaagagaacttgtcccaggtcacccttggtggaggtgagctcagatcagcctgacctcacaacccaacaagaagcagtgcaag

SEQ ID NO: 819161 - DNA, 120 bp, Artificial Sequence
  ENSG00000237568_0 (sequence is synthesized)
aaagtttgaaaaaataattataaagtttatttaaatgttgattgtcccaaggtctacagtttcttttctgttgtgtcatcagtgacaaagagtaaaaaaaggaaactcccatatttagca

SEQ ID NO: 819162 - DNA, 120 bp, Artificial Sequence
  ENSG00000237568_1 (sequence is synthesized)
gtcattttgcttactgaacctggggacatactactccccagcactgcctaagtttctggaaaaaaaaagttttaaaataaaaagagtcctgtaaaatagagagactttattttaaaacaa

SEQ ID NO: 819163 - DNA, 120 bp, Artificial Sequence
  ENSG00000285850_0 (sequence is synthesized)
agtgtccaaaaagtggagcagcaaatgggaagtgactggcattcagaaactgacacaggatcctgcatttctaaacaatgctgacaacgcacactgaggcagcacctccggggaagtctc

SEQ ID NO: 819164 - DNA, 120 bp, Artificial Sequence
  ENSG00000285850_1 (sequence is synthesized)
cgtgctccgatgctgtggccatgtacagcatatgcagtccccaaagggatatttcagcacagagtttcaatgtaaaatgacacacgctactgcaggctagagatcttattggggacacag

SEQ ID NO: 819165 - DNA, 120 bp, Artificial Sequence
  ENSG00000285850_2 (sequence is synthesized)
ggctatattcatctgcttcccagcaagaaaaccagaaagccagagataaacagaagtcaatcaaagcagaaagtgacatctagaaaaaaaacacctaattctgccaaacctgttttgctg

SEQ ID NO: 819166 - DNA, 120 bp, Artificial Sequence
  ENSG00000285850_3 (sequence is synthesized)
aataaagataagagcgctgtggacaatatggctttggtataagaaattaaatgatggcaccattcccaaaagcaactaaagcagttgacatcgggcttgttcccaacagcctagaaggga

SEQ ID NO: 819167 - DNA, 120 bp, Artificial Sequence
  ENSG00000285850_4 (sequence is synthesized)
aaagtattactgtgctttacttcctactctgaaagggtggagtttgtttcatggtttaagggatggtgctaccatcagaatccggccaggctattttctgcggcgtctgcgcataaagat

SEQ ID NO: 819168 - DNA, 120 bp, Artificial Sequence
  ENSG00000285850_5 (sequence is synthesized)
gatgttcacccaattaccagcgactcctcgcatggaaatctaccatcaatactattaacataaacagcatctggcaaaatacatggccttcaacctacagcaaaacctgcgctggactct

SEQ ID NO: 819169 - DNA, 120 bp, Artificial Sequence
  ENSG00000285850_6 (sequence is synthesized)
cacaaaggaaaaaggccaggtctggcttccatttgatttccagagaatacgcaattaattattttttctcaccgtcagcagctgagtctcagtgaaatccgtgcttgtaattatcgctgt

SEQ ID NO: 819170 - DNA, 120 bp, Artificial Sequence
  ENSG00000285850_7 (sequence is synthesized)
aattattattttaatacaaatcagcaacttatcaaaatattacgtgtcaggtgctacctctctgctgcaagactatggatggaaggtggaggccgtcaccccagcttcactctgtgcaca

SEQ ID NO: 819171 - DNA, 120 bp, Artificial Sequence
  ENSG00000285850_8 (sequence is synthesized)
cagaggatgggaatcagggtgagggtacttctaccagagccagactttcagcttcctagatgtccacgtccacagtcagtttcacactcgaccttttttttacaggcaataagtcactct

SEQ ID NO: 819172 - DNA, 120 bp, Artificial Sequence
  ENSG00000285852_0 (sequence is synthesized)
gccccaggagtttggtggcggaggaggcgctgccgtcgccacgctcccccgcgctccttctccacactttgaggagggaaggcagctcgcaatttgccagatctgccgccgcaccctcct

SEQ ID NO: 819173 - DNA, 120 bp, Artificial Sequence
  ENSG00000285852_1 (sequence is synthesized)
ccctcctccctccgccctccccttcgctcctccaggcttctcccaccttcctccctgaaaccggcagcccgcacagacctgtccaatggctgcactttcctcggggctggctgaggagtc

SEQ ID NO: 819174 - DNA, 120 bp, Artificial Sequence
  ENSG00000285852_2 (sequence is synthesized)
gcggccaacagattaagccgggggagcctagcgaaggggagggagagggccactccagccccgtgcgccccaggcagccggctgccccagagcgcggggagaggggacaggccggggagc

SEQ ID NO: 819175 - DNA, 120 bp, Artificial Sequence
  ENSG00000285852_3 (sequence is synthesized)
agagcgcggggagaggggacaggccggggagctatcgggggagcgcggggcggtacctccgcgccgccggggcgccatcctcgcagcctgctcgcacgccctgggcagctccgccaactg

SEQ ID NO: 819176 - DNA, 120 bp, Artificial Sequence
  ENSG00000285852_4 (sequence is synthesized)
tcgcgcccgactgcggggggcgatcgcgccccgccccgaccctggcggggtctccctgggcacgaaagggttaaccacagctcgccccttcgcggaggctggttctggtagtggctaggg

SEQ ID NO: 819177 - DNA, 120 bp, Artificial Sequence
  ENSG00000285852_5 (sequence is synthesized)
agtggagaaagcaaaccagagccggttcggttaccgactctgcgaagccccctcgaccccagcccagcgcgggagggtggcggaaggtggtgcaccgcagcgtggtccccgccgctgccg

SEQ ID NO: 819178 - DNA, 120 bp, Artificial Sequence
  ENSG00000285852_6 (sequence is synthesized)
ccgcggctttgcaaagtgtcagcgggggcgaaagcgagagtttaaaggaacaggaggcccattgaatttcctaccggagctttcaggggctctggctccccagtttgtttttgttttttc

SEQ ID NO: 819179 - DNA, 120 bp, Artificial Sequence
  ENSG00000285852_7 (sequence is synthesized)
agctcggggatctgtttccgcgttaacccttgccggccctctcgttagttgatatcttattttgcatacagttaatcatttttgaaagggataaatacaaggaaaagaagcaaagcgcta

SEQ ID NO: 819180 - DNA, 120 bp, Artificial Sequence
  ENSG00000285852_8 (sequence is synthesized)
ttggttaaaagtacaggatctagagcccggacagcctgggctggaatttcacctcccccgcaatgagcagtttatctcctagcctcagttatccatccatcaaatggagagaattagagt

SEQ ID NO: 819181 - DNA, 120 bp, Artificial Sequence
  ENSG00000285852_9 (sequence is synthesized)
cctaccgcaaagtacatggctttgtttaagtgtttactgaagcaaaagtgagagaagacgacttcaatcacataataaatgtgcatgtgttctaagttcaaggtcctttccactccaagc

SEQ ID NO: 819182 - DNA, 120 bp, Artificial Sequence
  ENSG00000285852_10 (sequence is synthesized)
tctgaagagtctatggatgctgtcaatagatgtctcggcttgccacaaaacccactggaagtggatccggataatcaatctacctttgcaaatgtgatgctcaaaggacggctctctcat

SEQ ID NO: 819183 - DNA, 120 bp, Artificial Sequence
  ENSG00000285852_11 (sequence is synthesized)
gggaaacaagaaaggtttcccttaatccaatactcaatttgctctttatttccaaacaacagatatacacgtataaacacaaacatatatcatgcctatactctttattatgccaggacc

SEQ ID NO: 819184 - DNA, 120 bp, Artificial Sequence
  ENSG00000285852_12 (sequence is synthesized)
ctggctctttcctgagctttcctcccataggttgatttctacttaggtaactgggtttttctatttctgcttaactaggagtgtttaagttctatgtaatattacatccgaatttgagta

SEQ ID NO: 819185 - DNA, 120 bp, Artificial Sequence
  ENSG00000285852_13 (sequence is synthesized)
cccggatatatacctgcttaaaatcaagtttgaaaactgagtcttctcatcaaaacctgattgtgcggttgacccttgaacaacaggggtttgaactgcgaggatccgcttttgcatgga

SEQ ID NO: 819186 - DNA, 120 bp, Artificial Sequence
  ENSG00000285852_14 (sequence is synthesized)
ttttcttcctcctctgccacccctaacagagcaagactaacccctcctcttcctccgcttcagcccactcaatgtgaagacgatgaggatgaaagcctttctgatgatccacttccactt

SEQ ID NO: 819187 - DNA, 120 bp, Artificial Sequence
  ENSG00000285852_15 (sequence is synthesized)
aataaacagacctgtccaaaattggaacttggctaacaggatgctgaagaaaacagcatgctcacttggaaatgagattctatacatgctgtagaatacttggcatttattataatcttt

SEQ ID NO: 819188 - DNA, 120 bp, Artificial Sequence
  ENSG00000285852_16 (sequence is synthesized)
tcttaactattcaggaaatagtttttgtccattttaacaggatttgttaaaactttctacaattgctgtcagataaagggaaattgctattagtgaaatgcttttattcagtccaaatat

SEQ ID NO: 819189 - DNA, 120 bp, Artificial Sequence
  ENSG00000285852_17 (sequence is synthesized)
tatgacctttcctctaggtctcagcatttcctctccctcctcatttggtaaggctaattttttgacctctggtatgcaattacaagactcatttgttcgtcttggctgatctgctctcag

SEQ ID NO: 819190 - DNA, 120 bp, Artificial Sequence
  ENSG00000285852_18 (sequence is synthesized)
aataaactgtaattctattgtactgttgatggatattccagctttttgttctttatagttttaaggtgaaaattttatcaattatgtgtttgaattgaataaacatctttttaaaactca

SEQ ID NO: 819191 - DNA, 120 bp, Artificial Sequence
  ENSG00000285855_0 (sequence is synthesized)
aaacagtcccatgctggggtgccggaggttagggcttcaacataggattgcaggggacaggacacagaatgtgacaccaggcaggcaatgtgtgtccctcagggggcctgggttccggga

SEQ ID NO: 819192 - DNA, 120 bp, Artificial Sequence
  ENSG00000285855_1 (sequence is synthesized)
atctgcacccagattgcacaccccatggagcaggagcacttcccgacaagaaacttggcacaggtccaatggttggggctggtgtcctgccgtcctgggtggtaaaggaatttaccgaga

SEQ ID NO: 819193 - DNA, 120 bp, Artificial Sequence
  ENSG00000285855_2 (sequence is synthesized)
cggtcccaggacactcctgagcctgggtggacgtgctcgggtgctataatgggagcaaaaacggatgcaacaggctgaagagcagtttgggagcctcaggtgaagatgctgagacccagg

SEQ ID NO: 819194 - DNA, 120 bp, Artificial Sequence
  ENSG00000285855_3 (sequence is synthesized)
tcagcaacaactctggcaaagccttaatatcctccacgtttaaggagcatttatccaccaccaggagacaaatggtttgaatggccttttccttcacttccatgaggtccctggaggcac

SEQ ID NO: 819195 - DNA, 120 bp, Artificial Sequence
  ENSG00000285855_4 (sequence is synthesized)
aggacagacccgcaaacaggaagagcagtggggcaggccacaggctggcacccagcacccagcccagcaggcgagttctatttaaacgaagaaagaaagcacattccagatccttttgtt

SEQ ID NO: 819196 - DNA, 120 bp, Artificial Sequence
  ENSG00000285855_5 (sequence is synthesized)
catccagagacttcaggtaaaaattgaggcaattaaattatgcatcctggcggctttctctcaccgtcagcacgagtcgagatttttttttttttgagaagtaaaacatgaaattcaaaa

SEQ ID NO: 819197 - DNA, 120 bp, Artificial Sequence
  ENSG00000285856_0 (sequence is synthesized)
atggagagcgcagttactattctaatgcaatgacttaaaataattaagcaacataaattatgcatgttgggattaaggtgcaatgttttcccaaatataagccacgcgcttcatgaatga

SEQ ID NO: 819198 - DNA, 120 bp, Artificial Sequence
  ENSG00000285856_1 (sequence is synthesized)
ttaaccgaaatagttaacatgaaaaccagtaagtcagctgagaagaaattgtggatccaccgcagtggaggagcgcaggaaggcgcctacagactccctagtgctttagtccaaggtaga

SEQ ID NO: 819199 - DNA, 120 bp, Artificial Sequence
  ENSG00000285856_2 (sequence is synthesized)
attgtgagggccaccagcaacacatgtaaggtgtttggaccttacccacggcaagaaactaaggaaaccagaaacagtaccaattactagaaaattttaagaagcctgaggcatacgaaa

SEQ ID NO: 819200 - DNA, 120 bp, Artificial Sequence
  ENSG00000285856_3 (sequence is synthesized)
aactttattttgttttttgctctaaggattattttaactgtaagaaaacttatgttccaaattacatgtgaagacattaagcgttgacatttaaactaatgcgtcatctagaactctagc

SEQ ID NO: 819201 - DNA, 120 bp, Artificial Sequence
  ENSG00000285856_4 (sequence is synthesized)
atttgaggacattaaaggcatttttgtccttctgtactgtaggagaaaatcacgacatttcaccaggctactcaggaatactgtggtttcattttatggtgctcaggtgttttaaaatta

SEQ ID NO: 819202 - DNA, 120 bp, Artificial Sequence
  ENSG00000285856_5 (sequence is synthesized)
tacattttttcagtggaatggcaaaagcaaagctgcttcctaatccgttttgctctttaaaataattttcaaaaattatcacatatctagcctggaagttttccatcttgcagcagtgca

SEQ ID NO: 819203 - DNA, 120 bp, Artificial Sequence
  ENSG00000285856_6 (sequence is synthesized)
cctcaggaagatgacaggtgcaaagtctgcctttctgtatgaattgggagaatggccatcatgagagaggagatgggacggcccaaccagcttcatgtcttccatggcttggcaccttct

SEQ ID NO: 819204 - DNA, 120 bp, Artificial Sequence
  ENSG00000285856_7 (sequence is synthesized)
aaggctagtcagttttaggtgactgtgtatgtaagttgagggtctggaagtggattcccttaaaaccatcctgtgcctgcatatcccttgaaaaatatttctgtacatgtacatgggtac

SEQ ID NO: 819205 - DNA, 120 bp, Artificial Sequence
  ENSG00000285856_8 (sequence is synthesized)
ctgtagcaagctaggtcaaagaacactgtacctaaaacatacttgtttggaaaactgtaatgtcaaagagtcaaaactttatagtaagtagtgcctggctgtataacaaatatgttgtgt

SEQ ID NO: 819206 - DNA, 120 bp, Artificial Sequence
  ENSG00000285856_9 (sequence is synthesized)
cacactggacaagtcacttgaccccttgggtctatgcctttgtccctgatttaaggctaacacatctttttgcacagagtggctgggaggatgaaatgggtaataaattaatccagcaat

SEQ ID NO: 819207 - DNA, 120 bp, Artificial Sequence
  ENSG00000285857_0 (sequence is synthesized)
aagctgcacatggtggcttgcacctatagtcctaactactcaggagaccgagatgggaggatcacttgagccctggaaatcaaggttgcaccgagctatgatggtgccactacacttcag

SEQ ID NO: 819208 - DNA, 120 bp, Artificial Sequence
  ENSG00000285857_1 (sequence is synthesized)
cctgggtgaaagagcagagaccctgtctctagaaaaacaaaaaaaagcacacctacttaggtaagttatgtaatgtagcaggacactctgctttacaagagttaccaagatctctctaaa

SEQ ID NO: 819209 - DNA, 120 bp, Artificial Sequence
  ENSG00000285857_2 (sequence is synthesized)
tacaaaaatacatttcatggaaagactgctgaaaactaggtctaattaaaccacaaatcccaaatacttacataccatttgagctctttaaagagggctcctaacatttattgtaaccat

SEQ ID NO: 819210 - DNA, 120 bp, Artificial Sequence
  ENSG00000285857_3 (sequence is synthesized)
cctttctccattctgaaatttcactaatttcatatataaaatctttgttttggaaactatttccgtttttattttcatatttttaacatgcaacccagaaatactaatctacgtagtcat

SEQ ID NO: 819211 - DNA, 120 bp, Artificial Sequence
  ENSG00000285857_4 (sequence is synthesized)
catcttgtgcttgtatcagattttcttttagcataaaataactaaagtttatggaagtcatctttgtgcctttccctagtgccatttccttcctttattccttttttctctctttttttt

SEQ ID NO: 819212 - DNA, 89 bp, Artificial Sequence
  ENSG00000285857_5 (sequence is synthesized)
ccgcctcctttgttccttctttaaaaagtaatggctttcatcatgaacttagtgtgtcttttcctgtccacattttcacggcatgtgtg

SEQ ID NO: 819213 - DNA, 120 bp, Artificial Sequence
  ENSG00000285857_6 (sequence is synthesized)
tagtgtgtcttttcctgtccacattttcacggcatgtgtgtaaatttcatgaatagggttgtacggctaccaaattttatgttaatagtatacttaaaaatcttttaggctgggcacggt

SEQ ID NO: 819214 - DNA, 74 bp, Artificial Sequence
  ENSG00000285857_7 (sequence is synthesized)
gttaatagtatacttaaaaatcttttaggctgggcacggtggcttacgcctgtaatcctggcactatcctgacc

SEQ ID NO: 819215 - DNA, 120 bp, Artificial Sequence
  ENSG00000285858_0 (sequence is synthesized)
cccttgttagagtcagtctcctcccggctctccactgccactgtctctggctgccaccttggtcctaaagcagcctggccctactggctcgctgctctcattctctggagccagacttct

SEQ ID NO: 819216 - DNA, 120 bp, Artificial Sequence
  ENSG00000285858_1 (sequence is synthesized)
gattcccatgcatttgacctctggcctcctcagcccacaccacctcaactcttgagcatggagcccaggaggaggtccctccggggacaaggtcaccacccctctgcgcctccctctaag

SEQ ID NO: 819217 - DNA, 120 bp, Artificial Sequence
  ENSG00000285858_2 (sequence is synthesized)
cccagttaagttctcgggacagaatgaggtccaacgtggtcaacaaacatgacatcatgccacccacgagctggacacgcgacacctggggctccagctggccatgcaaaagggtgaggt

SEQ ID NO: 819218 - DNA, 120 bp, Artificial Sequence
  ENSG00000285858_3 (sequence is synthesized)
ctccatccctccttccgtgacaaaagtaagctctcctttctgaagagccctcaagccagagactgaacccccaaataaaaatacaacagaggtcagctctgagaaaccaaaatgactcat

SEQ ID NO: 819219 - DNA, 120 bp, Artificial Sequence
  ENSG00000285858_4 (sequence is synthesized)
cacctcacctcctgtcctaagtccctggcttctcacactctcccctcttgactgtgtttcgaggcaaggaaaatacctatcattgccaattatggaacctgttaccaatgaaggccacct

SEQ ID NO: 819220 - DNA, 120 bp, Artificial Sequence
  ENSG00000285858_5 (sequence is synthesized)
gagaacagacccttttcccttctatggtaatatgccccaatggaggttttccaccacgtgaataatctagacgacaggttttctgtgtagcatcttatgccaatctacgtccctcgtgca

SEQ ID NO: 819221 - DNA, 120 bp, Artificial Sequence
  ENSG00000285858_6 (sequence is synthesized)
cagctttggagaagggtccatagctctgtctagaggcccgtccaccctgagcccagaacatctccatccctcaggcggccgcctgcagcagtgcagctggaggaacctgccgtgtttctg

SEQ ID NO: 819222 - DNA, 120 bp, Artificial Sequence
  ENSG00000285858_7 (sequence is synthesized)
aagctgctcctgccacagcagaatgcctctaatggatgaccccccacttaggacagcactgactcacccacgcaaatccaaagtgtggtgcatgcaaattttagcctcgagttctagtct

SEQ ID NO: 819223 - DNA, 120 bp, Artificial Sequence
  ENSG00000285858_8 (sequence is synthesized)
cagagcacaaaatagtaacaactacaacaaaaataacagcaccacgcactgagtctactgtgcttcatgtactacatgaaagaggaaccgcaacaccaatattccagtcaacggaaacgg

SEQ ID NO: 819224 - DNA, 120 bp, Artificial Sequence
  ENSG00000285858_9 (sequence is synthesized)
ggctcaaagggactaaagagtggactgaccaaggtgacacgtgcaagtcagtggtggagctaagatcaaagctcttcgcttaatcactacagatatattaaatattaaacatttacagtc

SEQ ID NO: 819225 - DNA, 120 bp, Artificial Sequence
  ENSG00000249436_0 (sequence is synthesized)
ctctccgttttcctccttcctgccatgttgaatgtgtcagcctctccttcaccttccactctgatttattttggaacgacaacaataaaaactggtaagaccaagaagaggagaaaattt

SEQ ID NO: 819226 - DNA, 120 bp, Artificial Sequence
  ENSG00000249436_1 (sequence is synthesized)
cgtcattctcagtccttagagtcccttaaaggaagtatttacatctaaagaaatgcttgtgcctctgcctgtctccttcagctggctgctctcctctacattcggtggccttgggaacac

SEQ ID NO: 819227 - DNA, 120 bp, Artificial Sequence
  ENSG00000249436_2 (sequence is synthesized)
caaagatgtggccttggcaacacttgcacatcgaggtcaagaggccaggaagagcatcctgccttctaactcctttgaagtttactcaaaattctcatcctgaactggacttttggactc

SEQ ID NO: 819228 - DNA, 120 bp, Artificial Sequence
  ENSG00000249436_3 (sequence is synthesized)
aacaacaaaagggatgacgctgtgtttcagaggaattcataagcagaattgaatttgttttagttaactccttatttgattggaatattgtcgacttaacaaaatagtagaaagagcatt

SEQ ID NO: 819229 - DNA, 120 bp, Artificial Sequence
  ENSG00000249436_4 (sequence is synthesized)
gggctgaagtgagaagatttgaattctagtccaaaatctgttactaaccagctctttgaccctgagaagtcatttgacttgaattatagtctttttcttatatgggaaaggtggagtata

SEQ ID NO: 819230 - DNA, 120 bp, Artificial Sequence
  ENSG00000249436_5 (sequence is synthesized)
atgggttgtaaatgagaaaaaagaaagaaggagagcaaaatgacttaaagacattttcaagaaaaaaagaggagagaagtcactgaaatggaaaaataaacatattatataactatttat

SEQ ID NO: 819231 - DNA, 120 bp, Artificial Sequence
  ENSG00000249436_6 (sequence is synthesized)
tgcactatgcaataaaaacatcttcagcaacagccacacaagtgcgggtagagggtctgctttgaagagagaaaaaaggctgctgcagaaaaaacaaacctcaattcataattggagctt

SEQ ID NO: 819232 - DNA, 120 bp, Artificial Sequence
  ENSG00000249436_7 (sequence is synthesized)
ttgttctttctggattgttttgtgaagaacatgctgccaaaaaacatttttcttctgtaaccgcttcttttgaaactccattcttttttatttcaaggatgtttattatctactcatttc

SEQ ID NO: 819233 - DNA, 120 bp, Artificial Sequence
  ENSG00000249436_8 (sequence is synthesized)
tttttatttatttttgaatcatataccccaatgtctagatgactgggaccactaggtttcatatttcccagatgagattagttgtacagttcattttgcaggtttattcagagcatttca

SEQ ID NO: 819234 - DNA, 120 bp, Artificial Sequence
  ENSG00000249436_9 (sequence is synthesized)
atggcatttcacctacagttcacctatattgagtcctaagaaattgaaggtgtttcttgatagttctcctgctccatcttcttccaggggattgatttggcttcttatgtttttgtattt

SEQ ID NO: 819235 - DNA, 120 bp, Artificial Sequence
  ENSG00000249436_10 (sequence is synthesized)
ggttgctcattagagataagcctgattatttggcattgtgtattttctctgttttaaaaagggaaaatacaacatgttattaattattatgatataataaaaaatggagagaaggaaaaa

SEQ ID NO: 819236 - DNA, 120 bp, Artificial Sequence
  ENSG00000249436_11 (sequence is synthesized)
gccatagacataatattgtttagaagaaaaggaatctacattatgaagtagaattagtaggtgaagcctgcttaaggcagagaagcttagatttgagattcgaaggaacattgtagggta

SEQ ID NO: 819237 - DNA, 120 bp, Artificial Sequence
  ENSG00000249436_12 (sequence is synthesized)
gatctcaacagggatttgagaagtagcattctggattgggctatagaataagccaagacctgcaggcaagaaagaacagaagataaaatatatgtgtgggagaaaaggggccctggctgt

SEQ ID NO: 819238 - DNA, 120 bp, Artificial Sequence
  ENSG00000249436_13 (sequence is synthesized)
cttgctttgtcatttgtttctttaaactcaagagatttggtttctgaatttgaataatcttcaatacactgcatgctgattcacaggtctccagtaaaacaacttgaaaaactcaaaaaa

SEQ ID NO: 819239 - DNA, 120 bp, Artificial Sequence
  ENSG00000249436_14 (sequence is synthesized)
aatgtcccaatcatctacaaattgccttttaaaaagaaaagccatttcaaatgtatatgagcatcatgtaacaaaaatattaatattttagctctgtgctcatttcaacttatagaaaac

SEQ ID NO: 819240 - DNA, 120 bp, Artificial Sequence
  ENSG00000249436_15 (sequence is synthesized)
acctcattcccccccccaaattattacttagttctaaagctagatatataaaattttaggatgaaaccagattgaacaaattctgcatccttgaaaatacatgaacactgcaaataatga

SEQ ID NO: 819241 - DNA, 120 bp, Artificial Sequence
  ENSG00000249436_16 (sequence is synthesized)
tacaaattcttagcattacaatttgtttctagctacttaataatgacctggattgaaaattaaaatagtagtatagataatcaaaatagggacaatgtagtgctttttctctaatcagtt

SEQ ID NO: 819242 - DNA, 120 bp, Artificial Sequence
  ENSG00000249436_17 (sequence is synthesized)
taactgaataatgcatagattcagtatccagaaggaatatcatcaacaaaattacaaagttaccaggcttcagggcacaataggacttaattgtttctggatatgaagctcctgatagca

SEQ ID NO: 819243 - DNA, 120 bp, Artificial Sequence
  ENSG00000249436_18 (sequence is synthesized)
tggaaatttaactgtactgtataggtatatatcactaaaaataagatgaaaaaaagacgagatggcatatacagaatcgatagccctcagacatttgaatgcaggatgcagctgctttct

SEQ ID NO: 819244 - DNA, 120 bp, Artificial Sequence
  ENSG00000249436_19 (sequence is synthesized)
tgcagaatatgtggtggtatgatttatggtcccccattcctaatagtttcttctattagcctgttattgatagttgaaatgcagtacattaattaagatggttttgaacacaggtaatag

SEQ ID NO: 819245 - DNA, 120 bp, Artificial Sequence
  ENSG00000249436_20 (sequence is synthesized)
aaagtccaactcaaattattttaaatgtattgtcccatatagaaagtgcagcagtacggatagccattaatgttggttgattcacaggttaactgtgtgatcaagaccacgttaacacca

SEQ ID NO: 819246 - DNA, 120 bp, Artificial Sequence
  ENSG00000249436_21 (sequence is synthesized)
tcattctgttctgcttttctgagtccacttggtttttggcctgtctcatcaatgatgtaagatgactttttggggggatgctggcctttggaacccagccacctggggaaaacccaggct

SEQ ID NO: 819247 - DNA, 120 bp, Artificial Sequence
  ENSG00000249436_22 (sequence is synthesized)
gcgtggagaggctacatgtaggtgttcaaaccaacagcttcagtaagttttagttgatagccagcatcaaccaccagagtgaataagctttctactaagtccaactcccagccttggagt

SEQ ID NO: 819248 - DNA, 120 bp, Artificial Sequence
  ENSG00000249436_23 (sequence is synthesized)
ctcccagttgaggtctcagatattgtagagaagaggcaaggcatccctcctatgctctgctgaattcttgactcacagacactctaagagatgataaataattgctcttttcagcccgct

SEQ ID NO: 819249 - DNA, 120 bp, Artificial Sequence
  ENSG00000249436_24 (sequence is synthesized)
gagttttgggctgatttgttatacagcaatagataactattgctattgctatatgtttcattgttcatgtgcagtgtgtaggggggagagaggaaaagagaatgaaactatgataaacca

SEQ ID NO: 819250 - DNA, 120 bp, Artificial Sequence
  ENSG00000249436_25 (sequence is synthesized)
ttctccactatgaaattacagtctttctgttctgtctgattgagtcaacttggtcttatgcccactcctagaccagtagcagttatcagagaaagctgtgcattggttggtttggaatat

SEQ ID NO: 819251 - DNA, 120 bp, Artificial Sequence
  ENSG00000249436_26 (sequence is synthesized)
ttgaggtctctctcttgaagctgcgaatggagccagcttccttggcatcacaagctgtttaggggttagttacatacttgaaccaaatatagttaaaaaggagaaagaggaaatgaaagg

SEQ ID NO: 819252 - DNA, 120 bp, Artificial Sequence
  ENSG00000249436_27 (sequence is synthesized)
tgagttaggcgaaaatgcccactacatgcaaatagaaaagggtttacaaatgttaaagtaccctgacgattttgctgcattactatatgataaaaatttaattacagaaaacttttagta

SEQ ID NO: 819253 - DNA, 120 bp, Artificial Sequence
  ENSG00000249436_28 (sequence is synthesized)
ttgaagcataaatcaatatttatagagtagcttttgtatagaggcactgtagcaatttcaaggagttgatgattagttaaacatgaatcttgctctccaagagctatatactagagttga

SEQ ID NO: 819254 - DNA, 120 bp, Artificial Sequence
  ENSG00000249436_29 (sequence is synthesized)
aaaacaaaaaagtgaaagcaaaatacaaattaagttacagggtagtttagaaaagagaggactcacttcaacttaaggtcaatcaggggaggctttttggagaagctggcctttgtcctg

SEQ ID NO: 819255 - DNA, 120 bp, Artificial Sequence
  ENSG00000249436_30 (sequence is synthesized)
agagaatgagtcaaatttggaattatggagaatgatagaaaagggattctaagcagaaggaagagcacatgcagaaacgtggaaacgggaaatgtataaagtctgagaatagcacagaca

SEQ ID NO: 819256 - DNA, 120 bp, Artificial Sequence
  ENSG00000249436_31 (sequence is synthesized)
aattagaaaatacaagtggggccttatattgacttcttatagtgctttcatcatcaaagaagcttgtatggtattagtgcaggaaaggggaaaaaaagatctaatgaacaaataaccaaa

SEQ ID NO: 819257 - DNA, 120 bp, Artificial Sequence
  ENSG00000249436_32 (sequence is synthesized)
agatacgagaggaaatggcacaaatcagttcttctatatcaccacttgactgattctctgatgacagaaatgaggggactaagttttcaggaagatcctgaacacttgatgaggaggatg

SEQ ID NO: 819258 - DNA, 120 bp, Artificial Sequence
  ENSG00000249436_33 (sequence is synthesized)
aaacaattgtattcaatggaaggtagagatgctctttcatttagatggaaaatcaaattataaagatcattcactacaggaaggcagctgcaataaacatccaactgattcaactgcaga

SEQ ID NO: 819259 - DNA, 120 bp, Artificial Sequence
  ENSG00000255388_0 (sequence is synthesized)
ggagagggaattacacatcacctgattttggatgcatgtgtgaggtatgctactgtactcacaagacatctgaaactatacccagatcatctagaagtgaacatgttccaggtgatgtcc

SEQ ID NO: 819260 - DNA, 120 bp, Artificial Sequence
  ENSG00000255388_1 (sequence is synthesized)
ctatgtaaaccaagggttggttttcagtgggtagaaaatgcccttcaaacactgaccctgtcatattgcagatgccttcaggtaaaaagtcaattaaccactggtgggcaatatccaaaa

SEQ ID NO: 819261 - DNA, 120 bp, Artificial Sequence
  ENSG00000255388_2 (sequence is synthesized)
ttgatagcagaaacagaaaaataaaagactactcagcaaagacaagtagagtttctggaggctgggatgtccaaggtcaagatgctgacagattgattgtccctggaaagcctgcttcat

SEQ ID NO: 819262 - DNA, 120 bp, Artificial Sequence
  ENSG00000255388_3 (sequence is synthesized)
gtgttctccctgtgttctcaggagtggggttacctttctggtgcctctttttcataaggacactattcccgttcctgagggctccattctcataacacaacatccagaaggtcctacatt

SEQ ID NO: 819263 - DNA, 120 bp, Artificial Sequence
  ENSG00000255388_4 (sequence is synthesized)
ctaatatcatcatactgcagattggcatggtgtggatggaagtgaagaaaaatgttccaggttgcttgtgcaagactttcaaagtgaaaacaattgagagactgatgcatggaaatcaca

SEQ ID NO: 819264 - DNA, 120 bp, Artificial Sequence
  ENSG00000255388_5 (sequence is synthesized)
gatgaagatgaaaataccaccttcatggccagtcaagtgttgaagaatgtgatttagatgcagccaacggtacctacaattacactccaacaaaatggaactcacttcaaactaagagcc

SEQ ID NO: 819265 - DNA, 120 bp, Artificial Sequence
  ENSG00000255388_6 (sequence is synthesized)
cattccatggaggagaggagaatgagaatgtagaacagtcagacaaaggtagagaaaggaagaatcccagccaattcttgaagcttagctttaaatccagtttgttcctaaacactcagc

SEQ ID NO: 819266 - DNA, 120 bp, Artificial Sequence
  ENSG00000255388_7 (sequence is synthesized)
cttataacctggagcagagccaccacagcttcagatatgtaacaattatggtgtttactctcttgaataattttattttgcttattcagaaacctcagcaaataaaaatctttttggaaa

SEQ ID NO: 819267 - DNA, 120 bp, Artificial Sequence
  ENSG00000255388_8 (sequence is synthesized)
tttctaacaatggaaacagcatctcttctacagtctctctctctttaaattctaatttagagattagtttaaaaaagagtaaaaaagatggtagaaatttttttaaagaaaattaaatga

SEQ ID NO: 819268 - DNA, 120 bp, Artificial Sequence
  ENSG00000255388_9 (sequence is synthesized)
acaaaatctcatgcaagcttttgatcatgctaatatatgaagataaattgtaaatgaaatgaggatttgacagagactcatatacatttatacctctgagtttggcaaagacatcttgtt

SEQ ID NO: 819269 - DNA, 120 bp, Artificial Sequence
  ENSG00000255388_10 (sequence is synthesized)
tcatattatttttcagcatttttagtgagaatactgatagtcagcaattttaaatgtcttgcccagtgtcacatgggaggtgaactaagcagcaatacccctggacattgagtcccatac

SEQ ID NO: 819270 - DNA, 120 bp, Artificial Sequence
  ENSG00000255388_11 (sequence is synthesized)
atttgtactccactcacgctacctcttctgtcttaccacagaagagatggtgacgctaacttattgacttttaaaataagcaaaaaatgattaaaagggagaagttcttttgaattagat

SEQ ID NO: 819271 - DNA, 120 bp, Artificial Sequence
  ENSG00000255388_12 (sequence is synthesized)
gaacttcttaagcattagtcatgaaacgctaatgttagaaccaatctgttctcaatttttgtaattttgtcacttaaaagaacaatatttaaatggaattttgcagcagataaacttttg

SEQ ID NO: 819272 - DNA, 120 bp, Artificial Sequence
  ENSG00000255388_13 (sequence is synthesized)
ggattgacttttttcattcaataattatctggagattcatctaaattgttgggtatgtcaatagtttgttcctttttctttcagagtagtattccatggtatgcatatactacaatttgt

SEQ ID NO: 819273 - DNA, 120 bp, Artificial Sequence
  ENSG00000255388_14 (sequence is synthesized)
ttaaccatgaccattcacagtttgttcagccactccatgttttaaccattgaaaaacatctgagctttttctagtttttggctatttatgtataaaactgctgtaaaaaaagaaactatc

SEQ ID NO: 819274 - DNA, 120 bp, Artificial Sequence
  ENSG00000255388_15 (sequence is synthesized)
aacagagtgatcagacaacctgcagaatggaagaaaatatttgccaacaagcatatgaaaaaacgctcaatatcagtaaccattagagaaatgcaaattaaaagcacaatggagtaccaa

SEQ ID NO: 819275 - DNA, 120 bp, Artificial Sequence
  ENSG00000255388_16 (sequence is synthesized)
ttcagctctgaaggctgggaaatttaaagtcaaggaccaccaggtttggtgtctggtgaaggctgctctctttgcctttgagatgatgtcctgtttctgtgtcctcctgagggaatgaac

SEQ ID NO: 819276 - DNA, 120 bp, Artificial Sequence
  ENSG00000255388_17 (sequence is synthesized)
tatctaaaaggctcacctctttatactaccacaatcaggatgaagcttcaatgtgcatctgggaggggacacacattcaaattgtagtccatgggttactttaatcaaactccaattttt

SEQ ID NO: 819277 - DNA, 120 bp, Artificial Sequence
  ENSG00000255388_18 (sequence is synthesized)
taaatatttactcccctcttagttcatttagaatcttgtcaccatgttctgtacacagttttaatttctctctttctctttttcttttgataagggtaaactcttttgtacatatgatga

SEQ ID NO: 819278 - DNA, 120 bp, Artificial Sequence
  ENSG00000255388_19 (sequence is synthesized)
ctcttttgtacatatgatgagtctataaagtcttgacaattttatgtatgtaatatttcataaaatttcacaaatactttattatacctatcctttgaaatcagtatgagaaaatctaat

SEQ ID NO: 819279 - DNA, 120 bp, Artificial Sequence
  ENSG00000255384_0 (sequence is synthesized)
gggagaacttgcgttggctgaggctgggggatcgatacacagcctgcaggccccggggcagcctccatcccccaagccgagggggagttcgctggaaggtcatgcagccttcctggactc

SEQ ID NO: 819280 - DNA, 120 bp, Artificial Sequence
  ENSG00000255384_1 (sequence is synthesized)
ccgcaccggtacagcgcactgcatgtaatattacagcctggggcggcgaatttgggaaggagggagagggtcgttgtgagcaggttgcactcagctctggccctccggagggtgcacttc

SEQ ID NO: 819281 - DNA, 120 bp, Artificial Sequence
  ENSG00000255384_2 (sequence is synthesized)
acgcctccagagaaggtccacagcctcctggtgctgaaaacctacgtccctccactggcgaaacatttgtgcagagcggacgatgggatgggggctggagaggagcaatgaaagggagga

SEQ ID NO: 819282 - DNA, 120 bp, Artificial Sequence
  ENSG00000255384_3 (sequence is synthesized)
gacacaggcaagcctcaactcccccaactcgtcccgaatcgatcttcgttccaaccgcgcaggatggggcccagatggtttgcaaagcgcacactcgcacaacgcaatacacagaacaag

SEQ ID NO: 819283 - DNA, 120 bp, Artificial Sequence
  ENSG00000255384_4 (sequence is synthesized)
attccgttgttacagcgcgtggtttactagatgctaaaagggtgggagtagcaggagggtcttaaacggcagccccaaggctctgctaaggacagagacaccccattgtggacggtttct

SEQ ID NO: 819284 - DNA, 120 bp, Artificial Sequence
  ENSG00000255384_5 (sequence is synthesized)
ccattgcaatatatttagcgttgggcgctggggtttttgcttcagtgtagctgctctgatcagttacagattggcgaccacgtggattccctcaagcatcctgatttgttcgttctctct

SEQ ID NO: 819285 - DNA, 120 bp, Artificial Sequence
  ENSG00000255384_6 (sequence is synthesized)
ctctctctctctctttctctctctctctcgtctctcttatttttcttttgtatttgccgcccccccttctttaatatgcataacggtctgcagaggtaataggcaggggactgaatgaca

SEQ ID NO: 819286 - DNA, 120 bp, Artificial Sequence
  ENSG00000255384_7 (sequence is synthesized)
ggctttatataactgtgtcaacagatttcttcccgccttctacccttgagaaaacatgaaccgggtgggttctgagtaacctcacttcaagcattcttcatttaacacaggtgggaggtc

SEQ ID NO: 819287 - DNA, 120 bp, Artificial Sequence
  ENSG00000255384_8 (sequence is synthesized)
tgtgtggagtccccagactcaagcctctgagcagaaaaactccttgagaaatcatatagtttgtctctttgcctctagactagtccaaaaggagccagagcaagtcagaatttggtttat

SEQ ID NO: 819288 - DNA, 120 bp, Artificial Sequence
  ENSG00000255384_9 (sequence is synthesized)
tgttggagattttagggcgaaaatattaataataacatttttcagtgctttctgtgagcctaagtgctttatgtgcactcaattctctccaattctataagtttgattttacatatgggg

SEQ ID NO: 819289 - DNA, 120 bp, Artificial Sequence
  ENSG00000255384_10 (sequence is synthesized)
aaactgaggcttagaataatgtctaaagtcacacagctagtaagtagaagtgctaaaactcactggggtctgacagcaaatatccgttaaccatcctgctgatcataaaaagacattacg

SEQ ID NO: 819290 - DNA, 120 bp, Artificial Sequence
  ENSG00000255384_11 (sequence is synthesized)
aaaaaaaaaaaaaaaaaaagacattctgtgccttacacattaggtaccttaaattcgatgtgctttacttattttttattttaaattttcattcaacatatttttcttgaatacctaata

SEQ ID NO: 819291 - DNA, 66 bp, Artificial Sequence
  ENSG00000255384_12 (sequence is synthesized)
tcattcaacatatttttcttgaatacctaatacattcatatggttaaaaattctgggcagatcacc

SEQ ID NO: 819292 - DNA, 120 bp, Artificial Sequence
  ENSG00000255384_13 (sequence is synthesized)
ggagttcaagaacagcctagccaacatggtgaaacccccgtctcgactaaaaatacaaaaattagcgggtgtggtggcgggtgcctgtaatcagctactcgggaggctgaggcaggggaa

SEQ ID NO: 819293 - DNA, 120 bp, Artificial Sequence
  ENSG00000255382_0 (sequence is synthesized)
ggagacaaaactgttgcattctgttgagagatcaagaaagatgctggctgagatcaaccattcggtttttgacacaggacggcaattgttactgaaacttacctgggcctcctaagacct

SEQ ID NO: 819294 - DNA, 120 bp, Artificial Sequence
  ENSG00000255382_1 (sequence is synthesized)
ggctgcttcttctgtggagagagaataataggaacatctgcttcaagattttcataaaggtcaactaagaaatgtgacaagctgtgcatccctacattttaggagttacaaaacaaagaa

SEQ ID NO: 819295 - DNA, 120 bp, Artificial Sequence
  ENSG00000255382_2 (sequence is synthesized)
aaacagttaacaccactccaccaaatgaatagaggaaatttagtaaagatgtcaacctctctgtattggaagaagctccttgttgcttgtcttgaccctgcctcccatcgctgaggagtc

SEQ ID NO: 819296 - DNA, 120 bp, Artificial Sequence
  ENSG00000255382_3 (sequence is synthesized)
tagttcacctctaagccaagtaggatgagagtatatttggtgtctgagctcatttttgaatctacttcatttgtgttaccacacattattcattccccctgttcaactatctactaagac

SEQ ID NO: 819297 - DNA, 120 bp, Artificial Sequence
  ENSG00000255382_4 (sequence is synthesized)
atgtgtacacctgtaatatagttcctttgttcactgtaaaatcattgttatactctggtgttatgactttcgtttatactgaaagaatgtacaagtatgaatacaatgaaatctataaat

SEQ ID NO: 819298 - DNA, 120 bp, Artificial Sequence
  ENSG00000255382_5 (sequence is synthesized)
atgtgaagagagattagagctcccactcatacttttcccatttctgaggttcttccagtaagttcccgcgtgggcttctccagattaattggtctgtttttatctgctgcacagagtaaa

SEQ ID NO: 819299 - DNA, 120 bp, Artificial Sequence
  ENSG00000255382_6 (sequence is synthesized)
ctgtttaactgcttttatttttgttttctgctagaaagcttagagccagattttcttagccctcatcttcagaaaatatgtagacttctatggcagtatttcccaacaggtgctcagcag

SEQ ID NO: 819300 - DNA, 120 bp, Artificial Sequence
  ENSG00000255382_7 (sequence is synthesized)
agcactagtttctcaaatgttgcatttaaagagtttcagatcaaataaatttgagaaatgtcacattcttgttaattcacaatgagtgaaatgttacatgaaaaagggttctggatcaaa

SEQ ID NO: 819301 - DNA, 120 bp, Artificial Sequence
  ENSG00000255382_8 (sequence is synthesized)
taagttttggggaaaaaaaccttagttttggaaagtttttttattgtttcacaatgtttatagcatattaaaggtttgagagatttggtaataaagataatctgtttaaacttgtttcaa

SEQ ID NO: 819302 - DNA, 120 bp, Artificial Sequence
  ENSG00000245928_0 (sequence is synthesized)
ccgatttagctgaggacaatgttgcagagaaagggcagctgagggccaccagcagctgacattcacaacaagtggggcaaacaggtacaccggcctcgtgaagggaatgtcagccaggac

SEQ ID NO: 819303 - DNA, 120 bp, Artificial Sequence
  ENSG00000245928_1 (sequence is synthesized)
gaatgtcagccaggactcaaccccaaccactaaaaggacaatgatgaaatgctcaaactgactgtctaatggacggagtctcactctgttgccacgctggaatgcagtggcacgatctcg

SEQ ID NO: 819304 - DNA, 78 bp, Artificial Sequence
  ENSG00000245928_2 (sequence is synthesized)
ccttggcctcccttattgtactttcttcctcctctctctcttttacagctttgttatgagttttccccacaagcccat

SEQ ID NO: 819305 - DNA, 120 bp, Artificial Sequence
  ENSG00000245928_3 (sequence is synthesized)
tcttttacagctttgttatgagttttccccacaagcccatgtatttctttgctcctgtgggcagcgaaaacttttggccttgcctctggacaaatctatcagggctgatagattttgtca

SEQ ID NO: 819306 - DNA, 120 bp, Artificial Sequence
  ENSG00000245928_4 (sequence is synthesized)
ttggtacaggccctcgcttctcatccacctccactgcctctctttttgctgatccaaggtccccaacattctccctagctggcagagatcatccctgtttccccattattcagagaaatt

SEQ ID NO: 819307 - DNA, 120 bp, Artificial Sequence
  ENSG00000245928_5 (sequence is synthesized)
tagcttagttttgctttaacttccataccatcaaaagtcctaggcccatctctccctaatcaaaggctccatacaaaagagacatctgccctgagaatttcgctctgttgccaggctgga

SEQ ID NO: 819308 - DNA, 120 bp, Artificial Sequence
  ENSG00000245928_6 (sequence is synthesized)
ccctggttaaattttaaaaattacttacagtagactgtctggaaataatttaaatgttcctttaatttttctgtatagtctgagaataagagtagtcaaggatgacttataaagacaaaa

SEQ ID NO: 819309 - DNA, 120 bp, Artificial Sequence
  ENSG00000245928_7 (sequence is synthesized)
tatgcacacatccttcaacctagcaatcctaatctctagaaaggaaagaattacagacacaatactgccacagtaagttttatttcagcagtaaaaatttggaaataatctatatttcca

SEQ ID NO: 819310 - DNA, 120 bp, Artificial Sequence
  ENSG00000245928_8 (sequence is synthesized)
acaataatcctggtcatataaattatggtttatccatatgatgaaatacagtttggccattaaaaatgacattaagtaaaaatgacattattagagatttactgacacgagaaaatgttc

SEQ ID NO: 819311 - DNA, 120 bp, Artificial Sequence
  ENSG00000245928_9 (sequence is synthesized)
atgatatagtgttaatgaaaaagcagattacaaaacagtgtatagtatatgatttaatttttgtgcttatatacgtgtatgtaaaaacatatctatgttatgtgcacacgaagcaagtaa

SEQ ID NO: 819312 - DNA, 120 bp, Artificial Sequence
  ENSG00000245928_10 (sequence is synthesized)
ggaagatttagaaaactgtatactaaggggttaacagtatttgtcactcaagggtagaattatgcgtgatttttattttcttctattgtgttacctgcattaaacattttgtacaataaa

SEQ ID NO: 819313 - DNA, 78 bp, Artificial Sequence
  ENSG00000271620_0 (sequence is synthesized)
ggccgtattaaaagcaaagctaatggtgggacaacagactacgctgcacctgtgaaaggcagattcaccatctcaaga

SEQ ID NO: 819314 - DNA, 120 bp, Artificial Sequence
  ENSG00000271620_1 (sequence is synthesized)
ctacgctgcacctgtgaaaggcagattcaccatctcaagagttgattcaaaaaacacgctgtatctgcaaatgaacagcctgaaaaccgaggacacggccgtgtattactgtaccacaga

SEQ ID NO: 819315 - DNA, 120 bp, Artificial Sequence
  ENSG00000278740_0 (sequence is synthesized)
agcgtattataagatgattaaatatgcatagtacaagtatgttatggaaggctgtgttaactgatatagtgggaccacaatagtatgtgtaagtgagatttggaaaatttgatatgccag

SEQ ID NO: 819316 - DNA, 120 bp, Artificial Sequence
  ENSG00000278740_1 (sequence is synthesized)
caaggacaaagaagtgttgaatttgcaagtttatgcacataattctgagaatccaggcagctatttctccttttgaattgttctcttggctaggggataagggtgagacacaatacacat

SEQ ID NO: 819317 - DNA, 120 bp, Artificial Sequence
  ENSG00000278740_2 (sequence is synthesized)
agttaccactgcaatatcttctgtatgttgaaaaactggtacttatatgtactaatactatctaccatgaaaaaaacaattaaaaatttaaaatatcatgtaaattaaataaagttcaaa

SEQ ID NO: 819318 - DNA, 120 bp, Artificial Sequence
  ENSG00000278740_3 (sequence is synthesized)
taccactagccagaaaaaaatattttatattatagtctggggtcagaagaggaaaaccttatgtaaagtatcaaaattaatttttatttcaatttaaatgcaccatcatataacatagtt

SEQ ID NO: 819319 - DNA, 120 bp, Artificial Sequence
  ENSG00000278740_4 (sequence is synthesized)
tcataactgaaattacatttgtcagaatttgatcttttcattattaaagaattgagggaaaattgatggttataatattgatatgccatgtaaataaactttttttgattgttataggaa

SEQ ID NO: 819320 - DNA, 120 bp, Artificial Sequence
  ENSG00000278743_0 (sequence is synthesized)
atttatagctcgtatttaaagagcccttgggagtctccccgggctcggcagggcggcggcgacggcggtggctgcggagctgcagttagcgctgcgcgcgtgaggtggcggggcggcagc

SEQ ID NO: 819321 - DNA, 120 bp, Artificial Sequence
  ENSG00000278743_1 (sequence is synthesized)
cgcgcatcccggccctgtggcgtgttgggcgtgggggagcgtccttacacgttccagggtggcttttcccccacgtcctcgctcggtttctggaaagggggaggaaacgctgcagcttct

SEQ ID NO: 819322 - DNA, 120 bp, Artificial Sequence
  ENSG00000278743_2 (sequence is synthesized)
cggagccccgagcggcgccgtttcctgatgctggctgtgcgtagaggcggccttcctggggggaggggagaacaatgcttcctgaaaagccaaaagtcgtggaatttgggggcggggctc

SEQ ID NO: 819323 - DNA, 120 bp, Artificial Sequence
  ENSG00000278743_3 (sequence is synthesized)
gggccaattaaagtgtattcgtggaaaataaatcgcaagatagtggcagtgatgatcttggcgttcaatcgattgatctgacttcccagcagcgaactgcacactgcagcgcgaaagcag

SEQ ID NO: 819324 - DNA, 120 bp, Artificial Sequence
  ENSG00000271192_0 (sequence is synthesized)
tccgaggctcctgtgccacgcaccctcccccctgcggggcgaccccgcgtatgcgtgtgtgtgtcacgcgtttaatcgcacagagtaattcccagacgtgcaagacaaagcatttcaagc

SEQ ID NO: 819325 - DNA, 120 bp, Artificial Sequence
  ENSG00000271192_1 (sequence is synthesized)
aaagatggtccagagttcaaattggaaagcacatctcgaggcgctgaatctgttctcgccgtctgcctcggtctctggggcgtcgcatccaggagaagggttttaactccctgccagatc

SEQ ID NO: 819326 - DNA, 120 bp, Artificial Sequence
  ENSG00000271192_2 (sequence is synthesized)
ggactacatcctcctcctctcccagcccctagtccaaacgggagtaggtaatggcggggaaagggggaggtgacgagagcggggagaaggaagtacatattttttaattgtgaaattgtc

SEQ ID NO: 819327 - DNA, 120 bp, Artificial Sequence
  ENSG00000271192_3 (sequence is synthesized)
tgtctgcgtgctgtgctctgggattctcttgtctcaatcaacttcaattttaacgtggccgtaacgttaagattaagacctagaaatgaaaacgtacccacctttcttattacaaaggtc

SEQ ID NO: 819328 - DNA, 120 bp, Artificial Sequence
  ENSG00000271199_0 (sequence is synthesized)
atctacaaggaataatgtgaaaacacttgagcatttttagaaactgtaataaaggtacaatattaatgctaactgataaaatttttacaggaacttaggcagttataaaaccactttaaa

SEQ ID NO: 819329 - DNA, 120 bp, Artificial Sequence
  ENSG00000233714_0 (sequence is synthesized)
gtgtcctacgtctccaggcctcttcagcatgtcgtttgggaccacctgctcagcagactgtgactgtgccaggattgcatcacctccgccttctctcttgccattaacacgggctgctgt

SEQ ID NO: 819330 - DNA, 120 bp, Artificial Sequence
  ENSG00000233714_1 (sequence is synthesized)
ggccatgctgaggaagccacagcagagccattcttgaccagttggatgctgccacccacccaccccacggggcccatcagctccactggcccatgtgtttccaggtctctgacaacagct

SEQ ID NO: 819331 - DNA, 120 bp, Artificial Sequence
  ENSG00000233714_2 (sequence is synthesized)
gcatgtcctgccagcctgatcgttcttattcctgagttcccttccctccttttaagcactgaacgaatcccagagctgagcccctgcccagaacccaggggtctgtcctttgcagctctg

SEQ ID NO: 819332 - DNA, 120 bp, Artificial Sequence
  ENSG00000233714_3 (sequence is synthesized)
ctcaggtccttgagtgcttctctctgctcccagcctccctgccctccagaggccagccccgggttaaacaggggttgcacaggccagagaccgcatcccggattccagacccacgcggct

SEQ ID NO: 819333 - DNA, 120 bp, Artificial Sequence
  ENSG00000233714_4 (sequence is synthesized)
ggaacaggctccgcaaattctgccaaactatgcgaagcattcttaggtccagcttcttctgagaaatctcaaaatggagaggacaaaggcaaagacagtgagtttcccaggaagccccaa

SEQ ID NO: 819334 - DNA, 120 bp, Artificial Sequence
  ENSG00000233714_5 (sequence is synthesized)
agccctggcttccgcccaaactcgtttgcggccctgggagtccgtggtggggacggagaacgacgtggcactccctctagcggcaaacgtctcgcacagagcccggcatctctgcggccg

SEQ ID NO: 819335 - DNA, 120 bp, Artificial Sequence
  ENSG00000233714_6 (sequence is synthesized)
gaggctcgcctgccgcatgctctcctgccagggccacgcagcctgccctcctctcccggggaggggagatctgctcagcaactcccctgtggccatggaagaggggctgtcgggtgtcgg

SEQ ID NO: 819336 - DNA, 120 bp, Artificial Sequence
  ENSG00000233718_0 (sequence is synthesized)
aggctgagcccctgttcccgggaatggcaggggcgcccgcgcgaggagggtcgccgggagagccgcctctcctccaagctggagcagccgtgacccagattgcgaccgcggcggcctcgc

SEQ ID NO: 819337 - DNA, 120 bp, Artificial Sequence
  ENSG00000233718_1 (sequence is synthesized)
cctgcctaatccccccctcttcttcctccaggggcaccctttggagaagaaccccagcctggggtggggacgcaccggctctccgacagctcaaacacagacagatcttctagagccgag

SEQ ID NO: 819338 - DNA, 120 bp, Artificial Sequence
  ENSG00000233718_2 (sequence is synthesized)
ggaatttcttttcgcagaagccattactccccccgttctgaggattcagaaacaaggaggccccactcgctgccccctggatgcttccagcccagaaggcacgaagatgaagacatgccc

SEQ ID NO: 819339 - DNA, 120 bp, Artificial Sequence
  ENSG00000233718_3 (sequence is synthesized)
aactgcagtaccctgtggtcaatgctacataggagcccaggagtgccagagagagagagagagaggcctgctccagccatgcaggagaccagcacagacccatcagtgaagcctgttctc

SEQ ID NO: 819340 - DNA, 120 bp, Artificial Sequence
  ENSG00000233718_4 (sequence is synthesized)
aacaaacgcttgtaaatgactcactcctactggggtctagaggacgatggatcccagatcaagttgcttgttgcctcatttgtcaagttctgcctgtacatcggctgttcttccttacga

SEQ ID NO: 819341 - DNA, 120 bp, Artificial Sequence
  ENSG00000233718_5 (sequence is synthesized)
taaatctgaagatcagaaacacggcggaacaacaagcacgcaggacaagtccatcctgcccataacaccctagagcaggctcaaagcaggaaaacagcatgagtcacattcagcaacaga

SEQ ID NO: 819342 - DNA, 120 bp, Artificial Sequence
  ENSG00000233718_6 (sequence is synthesized)
cacacggggaaccctgctctcccctctaccctgaggagaaacaacaacaccttccctgcctggggaaactcctactcatgctatccgtctcagacagcagctcctctgcgaagccatctt

SEQ ID NO: 819343 - DNA, 120 bp, Artificial Sequence
  ENSG00000233718_7 (sequence is synthesized)
ccactctctcagaaagagtccattgtttcttcctctgcgttctctcttgcctctattaaggtgttcagcagacagtattgaaacgatctccttgcctatttggtattttccagtatggca

SEQ ID NO: 819344 - DNA, 120 bp, Artificial Sequence
  ENSG00000233718_8 (sequence is synthesized)
gacacatatgggaatcagttctgggagcacagtggtttaaaaggatgcagaccaccaaacatcagaagaagagaagtcagggtagggaaggaccaggaaacctgtgccccatgagcggac

SEQ ID NO: 819345 - DNA, 120 bp, Artificial Sequence
  ENSG00000233718_9 (sequence is synthesized)
tgagggttgagttggtcccggacgttgctgtgtctcggtgtgattaccaatagcacccaagttcattctcaaaagtgtcctggtttagtccatcacatatataatcaccctccatttgag

SEQ ID NO: 819346 - DNA, 120 bp, Artificial Sequence
  ENSG00000233718_10 (sequence is synthesized)
aaatatgtaaagaagccacagggatttgacccacgggagccttggggagtccatcactgtctttagtcattcagggtgcagccgcatgcgctgcgtggcctcaggggacctgtgggagag

SEQ ID NO: 819347 - DNA, 120 bp, Artificial Sequence
  ENSG00000233718_11 (sequence is synthesized)
gatgatgtaacgaaagcctttcccctagtctctgttttgtttactgttgggcacccaggacttggcaccattcctggaatatattaatctcttgataaatatttgtgggagagaggaagg

SEQ ID NO: 819348 - DNA, 120 bp, Artificial Sequence
  ENSG00000233718_12 (sequence is synthesized)
aagagagggaggaggggggaagagggtacaatctggcaaagagctggttgcattgcaggccttgtcccctcagtgggggcacctgccagaggctgaaggaccccttgctggggatggcac

SEQ ID NO: 819349 - DNA, 120 bp, Artificial Sequence
  ENSG00000233718_13 (sequence is synthesized)
gctgttgcaggtgttagttgagatgaggtcatactggagtaggataggctcctaatccaatatgacaggtgtccttacaaaaagactgtcatgtgcagacagaggcctacagggagaagt

SEQ ID NO: 819350 - DNA, 120 bp, Artificial Sequence
  ENSG00000233718_14 (sequence is synthesized)
ccacgtctagacaggcagaggctggcatgatgcatctacaagccagggacttccaagattgccagaataccaccagagtctaggaagagacaaggaaggattgtcccagaggtttcagag

SEQ ID NO: 819351 - DNA, 120 bp, Artificial Sequence
  ENSG00000233718_15 (sequence is synthesized)
ggagtctgccaacaccttgatttcagacttctagcctgcagaactgtgagaatacatttctgttgtttaagccatccggtttgtgggggttgtttatgccagccctaggaaactaacacg

SEQ ID NO: 819352 - DNA, 120 bp, Artificial Sequence
  ENSG00000233718_16 (sequence is synthesized)
gaaggaattctgccttgggtgggaagatgcatgagatggatgatctctggactcactaggcttccatctcggagccaggcagcagtgatggatttgcctcaggcagccttgcagacccac

SEQ ID NO: 819353 - DNA, 120 bp, Artificial Sequence
  ENSG00000233718_17 (sequence is synthesized)
tgtgtgtccatcgaactctgcactggtggtctgcacccagggagccaagcacaagctcatctgagctaactgcagcaccagcatcctgaaacctcccttcaccgtccagccggtcatggg

SEQ ID NO: 819354 - DNA, 120 bp, Artificial Sequence
  ENSG00000233718_18 (sequence is synthesized)
ctcagggctctttggctcctggaacttcagagtgatggaaactcacaaagacacccaagtccacccctccctcacaccgccagattccaggcttagaggcgtgggggatacctggactct

SEQ ID NO: 819355 - DNA, 120 bp, Artificial Sequence
  ENSG00000233718_19 (sequence is synthesized)
ttccctgctctgtgctctttccgtgttgtcacaagaaataactctgtggtctactcattgttttccagataagccccaaccttcccacctgtaggaatcccctttgccagaaattcctca

SEQ ID NO: 819356 - DNA, 120 bp, Artificial Sequence
  ENSG00000233718_20 (sequence is synthesized)
ccccagcctcctcctctcagcctgccaagacgcactaagataggagaccacttccttcagctgatctcctgtccaggggatctctgcttccctccatccccaaccctgcccgccacgcag

SEQ ID NO: 819357 - DNA, 120 bp, Artificial Sequence
  ENSG00000233718_21 (sequence is synthesized)
aatcctctggcctcactcccaggcagtccacccttacctaccacttgtcatgggctactttgcagggggcgaatgacatcttctttcacctctattcttgttcctggtagtcattcaatc

SEQ ID NO: 819358 - DNA, 120 bp, Artificial Sequence
  ENSG00000233718_22 (sequence is synthesized)
acccacagatatatattgagaacctaccttattgcagaagttaaattgtcaataagaataaaaagactatagtgttgttgggaacatggatacttcagcattcacttacaatacagagtc

SEQ ID NO: 819359 - DNA, 120 bp, Artificial Sequence
  ENSG00000233718_23 (sequence is synthesized)
ccaagcagaaaaattggaaaaatacaggctgcccttgaggtcagagctggagagagtggtggggagctgtcaggcaaagtccacaagcctcctcccagacctcacttctcaccactggcc

SEQ ID NO: 819360 - DNA, 120 bp, Artificial Sequence
  ENSG00000233718_24 (sequence is synthesized)
cctttctctctgccccagccactctgaatgtcttgcttttttctctgcactccagctttattcccacagaggtttcgcacgtatttcccccaaccttgaacatctgtgtccctcccattc

SEQ ID NO: 819361 - DNA, 120 bp, Artificial Sequence
  ENSG00000233718_25 (sequence is synthesized)
ttctttgtatgaccagctcccttacttccgtgctccctgcgtaccatacccaaaacagcaccctgccgctctctagttccttccctgccccactgtgcttcagaacacttgccattaaca

SEQ ID NO: 819362 - DNA, 120 bp, Artificial Sequence
  ENSG00000233718_26 (sequence is synthesized)
agggggtggtggcgaggctccgcaactttggaaactgccatttcattcacacaaggcactgcctgggggagggggctgttcctggctgcagaattctagctctcacgagcacgcagacaa

SEQ ID NO: 819363 - DNA, 120 bp, Artificial Sequence
  ENSG00000233718_27 (sequence is synthesized)
gcgcggagcggtgcaatgcagcacccaccctgcgagcctggcaattgcttgtcattaaaagaaaaaaaaattacggagggctccgggggtgtgtgttggggaggggagaccgatgcttct

SEQ ID NO: 819364 - DNA, 120 bp, Artificial Sequence
  ENSG00000233718_28 (sequence is synthesized)
aacccagcccccgctttgactgcgtgttgtgcagctgagcgcgaggccaacgttgagcaaggccttgcagggaggttgctcctgtgtaattacgaaagaaggctagtccgaaggtgcaaa

SEQ ID NO: 819365 - DNA, 120 bp, Artificial Sequence
  ENSG00000233718_29 (sequence is synthesized)
atagcagggagaggacgcgcccccttaggaacaagacctctggatgtttccagtttcaaattgaaagaagaggggcgccccccttgtttgaaaataaataaataaataagtgcgagctac

SEQ ID NO: 819366 - DNA, 120 bp, Artificial Sequence
  ENSG00000233718_30 (sequence is synthesized)
gacagcgggggcgtgggcagcagctcaaacttcttccagatgtcctcccccgggggggtcgagtcggggccgccgaagtagaagtcatcttcgtccgggggcaccctttggagaagaacc

SEQ ID NO: 819367 - DNA, 120 bp, Artificial Sequence
  ENSG00000233718_31 (sequence is synthesized)
cactcacctccatttgtaatgatccatgcctgggagtatttgtttagtgctcacttccgtgacactgtggaagacaggctcagtctccctcactaacctgtgacctgggtcagttttgct

SEQ ID NO: 819368 - DNA, 120 bp, Artificial Sequence
  ENSG00000233718_32 (sequence is synthesized)
ccagagggaatccttacggcacagcagtgtacctgtatatagggatggtacgccatgaaggccctcagcaattgctggcaccttgatattggacttctcagcctccagaaacatgagaaa

SEQ ID NO: 819369 - DNA, 120 bp, Artificial Sequence
  ENSG00000233718_33 (sequence is synthesized)
tacatttcttttctttataaattacccagtctgtgctattaggttatagcaacacaaaatgaactgagacaagtacccatctattactgtgtctgagcccctgggtgggtttggaacaga

SEQ ID NO: 819370 - DNA, 120 bp, Artificial Sequence
  ENSG00000233718_34 (sequence is synthesized)
atttggtttataattaaggtgatttttgagagaggagaatattttagtttacaaatctcctctttactaagacacacacacacaaagaaacaacacacacatacacatgttgagaagggc

SEQ ID NO: 819371 - DNA, 120 bp, Artificial Sequence
  ENSG00000233718_35 (sequence is synthesized)
atacacatgttgagaagggcccaaatcatgactggctaggagagcaacagcctctagatggtttttccagattgtgaattaaagatctgctgggttggccaggcatggtggctcacgcct

SEQ ID NO: 819372 - DNA, 74 bp, Artificial Sequence
  ENSG00000233718_36 (sequence is synthesized)
tggctcacgcctgtaatcctggcacttcaagagtctgaggagggcagatggcttgagcccaggattttgagacc

SEQ ID NO: 819373 - DNA, 67 bp, Artificial Sequence
  ENSG00000233718_37 (sequence is synthesized)
ggctgaggcaggaagatcacctgagcccagggagatcaaggctgcagtgtgccatgaaaaaaaaaaa

SEQ ID NO: 819374 - DNA, 120 bp, Artificial Sequence
  ENSG00000233718_38 (sequence is synthesized)
aaaagaaaaaaaaaaagatctactgagtctgtcttcagggacaagagcacagtttctcctaggatcttcacacctccctcaaaatgtgtacatttttactgattaaataatttaaaaatc

SEQ ID NO: 819375 - DNA, 120 bp, Artificial Sequence
  ENSG00000232043_0 (sequence is synthesized)
aaaaagtgaacaaggaacagcaggtgaggcactggctctgggcaactttcagacgggggcttcaagatgatctggaggtttcagaggattgtcactttagagaaaaaagtagcagacttg

SEQ ID NO: 819376 - DNA, 120 bp, Artificial Sequence
  ENSG00000232043_1 (sequence is synthesized)
gtctccaaagactggtgactccaaggtgtggctcaacacccagctgaagaggcagtcaatgcgaacggcatcagcccatgaaccgagtgtgtcctacgtgctggcgctgcgctctcccac

SEQ ID NO: 819377 - DNA, 120 bp, Artificial Sequence
  ENSG00000232043_2 (sequence is synthesized)
cagctgctccaggcaggcactcccatccattttccgatgaggaggtggatgtttggaggcagagagtccatgctgagagcctgctgcagacacgtttgaaaggtggaccccagcccttgt

SEQ ID NO: 819378 - DNA, 120 bp, Artificial Sequence
  ENSG00000232043_3 (sequence is synthesized)
cccagaatgtctcttccgtggctgggtctgccccagaggaacagaagcaatggcctggcgtctgtttccagctctgctccttccttgaggcttctggcggctgtgatcaaaaggcagccc

SEQ ID NO: 819379 - DNA, 120 bp, Artificial Sequence
  ENSG00000232043_4 (sequence is synthesized)
tcactggggggagtacgcaacatcttcaatgacctaagagctcctagtaaatgggaaccagtcacttgactcgaagactgaggaccacaaagaaggcagcatgcttcactgggacttgca

SEQ ID NO: 819380 - DNA, 120 bp, Artificial Sequence
  ENSG00000232043_5 (sequence is synthesized)
ggctgccgctccagtccctctgcagctgcacaagcaggaaccagtcttttgggtaagaaactctcctttccctaagaactggtgttaactgttgttaaaggtcagagagagcactgtggc

SEQ ID NO: 819381 - DNA, 120 bp, Artificial Sequence
  ENSG00000232043_6 (sequence is synthesized)
ctccaccctccctgggcacttggtaggtacacaagtaagctccgctcaccacagtgcccaaaccacatcttgctcggggtatacaaaagccaggaacactgacattaggtaatatcaccc

SEQ ID NO: 819382 - DNA, 120 bp, Artificial Sequence
  ENSG00000232043_7 (sequence is synthesized)
aagggataaaggaagaggcatgtgaaccagtagccgcctgaagtgctgaagtgtgtgctatactcactgtaaggttttccaattctagctgtcgcactgtataatatgacttgatatctt

SEQ ID NO: 819383 - DNA, 120 bp, Artificial Sequence
  ENSG00000232043_8 (sequence is synthesized)
cagagatcaatgttaatttcaaatttgtgtcttcaaagatcatctctttttcttctttttgtggccagtattgtgcgcattttaactggggaaacaaataatagtgaattattgtgagca

SEQ ID NO: 819384 - DNA, 120 bp, Artificial Sequence
  ENSG00000232043_9 (sequence is synthesized)
atatggcagtttttctatggcaggaggcttggagcacatcccacaagcttcatgataactcaaaggcctgggggtttctgaacatggaagccatggtcagcacagatgcctgcctcatgg

SEQ ID NO: 819385 - DNA, 120 bp, Artificial Sequence
  ENSG00000232043_10 (sequence is synthesized)
ggagatgggggtgggggcacgaagctgctgaccggggcaggttgtgcagacagggctcagacttccaaacccatcggctccccggtcaaacgtggcaacgggatcctgcagggctctgac

SEQ ID NO: 819386 - DNA, 120 bp, Artificial Sequence
  ENSG00000232043_11 (sequence is synthesized)
gctttctcaccgtctacgaggtgaagccagattgaacaaaaggctttgaaactcctctgtgtagccatttcaaacattacccaggacctgatcaggctgctggcatagaatgtaggtgcc

SEQ ID NO: 819387 - DNA, 120 bp, Artificial Sequence
  ENSG00000232043_12 (sequence is synthesized)
ttaccctgcacagaaaactcacaggcaattaaaaataaaactgggagagacagcaggtgaggccctttggagaggctgagcagttatcaccaaatacagactccctttcagagaaggctt

SEQ ID NO: 819388 - DNA, 120 bp, Artificial Sequence
  ENSG00000232043_13 (sequence is synthesized)
ggagacaggctccccagggcttgccctttcattctggtttggttcagttcattcagaaaaatacttttgatgttctattttgataatctcagacactatctgatgttctcagtttaaatg

SEQ ID NO: 819389 - DNA, 120 bp, Artificial Sequence
  ENSG00000232043_14 (sequence is synthesized)
tagctcattaaatttttctttaaaacaagaaaatttatgaaaatttggtttcatttagggtctaagacaaaaactgactcgaatttagtgacattttacttgaactaagtttctgcctca

SEQ ID NO: 819390 - DNA, 120 bp, Artificial Sequence
  ENSG00000232043_15 (sequence is synthesized)
gttacacaaatgtttctgctcatggataactgttgtggacaaaaatggcaggtcagcaggggcagagctaccgggtcagcctgaccatgtgcctggacagagggaagctcaaagccctta

SEQ ID NO: 819391 - DNA, 120 bp, Artificial Sequence
  ENSG00000232043_16 (sequence is synthesized)
tgattttcagcaaaagaaatgtcagcgtgtgtcaacagctctttggcaaatgacactggcagttcacgtgcactgacccactcaatacctcctctggggcaaaggatggtgtgggtgaag

SEQ ID NO: 819392 - DNA, 120 bp, Artificial Sequence
  ENSG00000232043_17 (sequence is synthesized)
ggaaccacttcagggccagctgtctgtcagaagacactgctgtgcccagcagtgacaaggtggactatgggggagggctgagggggaaatgctacggacatgcagcaggaattcagaaga

SEQ ID NO: 819393 - DNA, 120 bp, Artificial Sequence
  ENSG00000232043_18 (sequence is synthesized)
gggaaatgtttcaggtcagccaaggttacagaaaagagagatcagagaaagctctgtgcaagaggcaggttttgaaggatgactaggatttcctaggcagtgactgcaaataagaggctg

SEQ ID NO: 819394 - DNA, 120 bp, Artificial Sequence
  ENSG00000232043_19 (sequence is synthesized)
agaggcccagatcacagacgactggcagcaggcccagggacctgtggcatcatctgggggcaatgaggagccaggaagcacgtgaggagggtgaatatagaaccacaaatgcctattggt

SEQ ID NO: 819395 - DNA, 120 bp, Artificial Sequence
  ENSG00000232043_20 (sequence is synthesized)
cctgctctactggagctggaagctgcccaaaagacaaaaccaaagcaaaatgtgggagaaacaaattaggaaacaccaggttgtggtgccagcatcacagcaaacttcacagtgccagac

SEQ ID NO: 819396 - DNA, 120 bp, Artificial Sequence
  ENSG00000232043_21 (sequence is synthesized)
cagaagccaacagagctttctcaagagtctggacacaagcctgtctgaagtcttagccagtttcatccatgtcaccttcctggatcaatgatgagttgccaaaagtgaactcttgaatgg

SEQ ID NO: 819397 - DNA, 120 bp, Artificial Sequence
  ENSG00000232043_22 (sequence is synthesized)
ggacaatctgtcaccattgaagcaattctgccacttggcatggaggcgctaattacatggcaagacccccacttagccaaagtgggtgtggcagctaaaagcaggaacttagaagaatgt

SEQ ID NO: 819398 - DNA, 120 bp, Artificial Sequence
  ENSG00000232043_23 (sequence is synthesized)
gaaaagatgaattaatcccacacttctaacaactagatcttataatgcctcaagaccccagaaacaagagactgatctgacaggttccaccccacccgtgctggggtgggcattccacag

SEQ ID NO: 819399 - DNA, 120 bp, Artificial Sequence
  ENSG00000232043_24 (sequence is synthesized)
agtgagcagacagagaaggaagcgaagaacagaaatgcaggaggaagaggccacccttcctcatctcataagcagggcagacgagtcttaaagctcacctccagacagcaagcactcact

SEQ ID NO: 819400 - DNA, 120 bp, Artificial Sequence
  ENSG00000232043_25 (sequence is synthesized)
ttcaaaaccaaacctaatgcttaataaccctctgtaatctgggtaaagactaagactttggaactgtacaagtgaggaattctgtcatgcaactaagtgtcaataacccaatatttattt

SEQ ID NO: 819401 - DNA, 120 bp, Artificial Sequence
  ENSG00000232043_26 (sequence is synthesized)
ttaaggactctcaggtgtctacagcaacaagctatgctctgtcatttccaatagaaatttttgttttaaacacacaaaatttttaaaaggcacaagatcacatttccagttaccctatta

SEQ ID NO: 819402 - DNA, 120 bp, Artificial Sequence
  ENSG00000232043_27 (sequence is synthesized)
cattgatatatacggccatgaaaagtagatggatttttattagaacacagtacttcaccaggcctcaaattgagtcctatcttgggctggtaccagaggaacatggcagtgccaacatgc

SEQ ID NO: 819403 - DNA, 120 bp, Artificial Sequence
  ENSG00000232043_28 (sequence is synthesized)
tagcatctctcatagttgctgtttccaccatgaaggcagatgttaaacagtccttggggccttcccaaacaagtgggcaagtggtgtttggaaaacctatgaaagacatctacagtaacc

SEQ ID NO: 819404 - DNA, 120 bp, Artificial Sequence
  ENSG00000232043_29 (sequence is synthesized)
ctgtgacgggtaatttggtttcgccaaaaattattaacacagagaactaagtaagtaattcttaacacagagaactaagtacgagagaaaaatgaattatatggaccctgtgatacaaaa

SEQ ID NO: 819405 - DNA, 120 bp, Artificial Sequence
  ENSG00000232043_30 (sequence is synthesized)
tgcagtgtcttgtgcatgaaagcacctgaaagcaaacggcagctttagtgaggatttcaggagggagatacgggtgagattctgcaatggccaattaaactcaccttgcttacttccccc

SEQ ID NO: 819406 - DNA, 120 bp, Artificial Sequence
  ENSG00000232043_31 (sequence is synthesized)
ttctaaacaacaatcccaacccttacgccatggtgcagcctacactgaggtgtctaaagtcaatccttaaacagaaccagtgagaactctagccatctggatgaccccagtctaacacac

SEQ ID NO: 819407 - DNA, 120 bp, Artificial Sequence
  ENSG00000232043_32 (sequence is synthesized)
acaatcatcttctgcataactggtttccaggaagcccagggtcccaaaagataacaggcatgtttgccaaaaataagagggagcatcctacactatttggtgaaggaaggaaatcagaag

SEQ ID NO: 819408 - DNA, 120 bp, Artificial Sequence
  ENSG00000232043_33 (sequence is synthesized)
acaagtatgcattaaatgaaaactccccaaaagctggttttaccacaagctgtgtggatcatttataattagattagctgagcaaataagatactgtaacttctcatgatttctcccagc

SEQ ID NO: 819409 - DNA, 120 bp, Artificial Sequence
  ENSG00000232043_34 (sequence is synthesized)
cagccctctgggagggataatgctgatacagaattgaaaatgttgatcccaaagaaactttaacaatctcaaaccatacattgcttttcatgccaatctgcacgcccaagtaatcctcca

SEQ ID NO: 819410 - DNA, 120 bp, Artificial Sequence
  ENSG00000232043_35 (sequence is synthesized)
gtggaatgggatacttaacaaaggaaagcagggactgctggcacagttatcacagtaaactacagcaaagccaaccagccatgttctcgatgccaccacagtaacccaaagggaaaggtt

SEQ ID NO: 819411 - DNA, 120 bp, Artificial Sequence
  ENSG00000232043_36 (sequence is synthesized)
gtcacagtggatctgtgggccatttgtggtcagtcttgagtgggagacaatgaagcacagggcctggtgaggctggaacacataactacagcactggacactgctcaaatacataactac

SEQ ID NO: 819412 - DNA, 120 bp, Artificial Sequence
  ENSG00000232043_37 (sequence is synthesized)
agcgctggacaccactccttgctgtaatgtgacaacaattgctaaagcaaaccttgtgctcacagcaaagaggttttgccaaacacttagcaacaaagaaataaataagaagcaaatgct

SEQ ID NO: 819413 - DNA, 67 bp, Artificial Sequence
  ENSG00000232044_0 (sequence is synthesized)
ccaccatggtgaacttgtaatctcagctacccgggaggctaatgcaggagaatcgcttgaacccagg

SEQ ID NO: 819414 - DNA, 81 bp, Artificial Sequence
  ENSG00000232044_1 (sequence is synthesized)
aaataaacaaacaaaacctaagcatttgaggggtttggcctgggcagtggagcttgtgagctatatgagctggaatctgag

SEQ ID NO: 819415 - DNA, 120 bp, Artificial Sequence
  ENSG00000232044_2 (sequence is synthesized)
ggagaaggaattgtggcgggcctaacaccttttctttcccaaacaccaagagcaggttctttctgttacatccattgaggtcacattcttgaagtgcattttgaggaagtcattattttc

SEQ ID NO: 819416 - DNA, 120 bp, Artificial Sequence
  ENSG00000232044_3 (sequence is synthesized)
gctacagcagggactgatgtatcagtctattagaattcagaaaaaagtaagcaaacaaaaaacgtgttggaattattctcttctagcattttgaaatgtacaatggttaatgttaactat

SEQ ID NO: 819417 - DNA, 120 bp, Artificial Sequence
  ENSG00000232044_4 (sequence is synthesized)
agccaccatgatgtattgaagaccaggtcttattctttttatctaactgtacatttgtacccattaacctaatgctcatagcatcaagaaaagatcaatatttaaggtgacaaatatccc

SEQ ID NO: 819418 - DNA, 120 bp, Artificial Sequence
  ENSG00000232044_5 (sequence is synthesized)
aattatgctgatttgattatatgaatgtgttgaattatcatatgtactcccaaaatatgcacatctaagatgtatcaataaaaataaagacaaaaattaaagcttttacagtagaaaaaa

SEQ ID NO: 819419 - DNA, 120 bp, Artificial Sequence
  ENSG00000232044_6 (sequence is synthesized)
agtctggctggagctggaccggctggtggcgccaggcagtgccaagcacccctggcagccctgcagagggttctcaaatccagatttcattctgcagtcccggcagtgttttgacgactg

SEQ ID NO: 819420 - DNA, 120 bp, Artificial Sequence
  ENSG00000232044_7 (sequence is synthesized)
cctcactaaaggaagctaaaagctgtgctgatgcctcccagacgagcctcgttggaagcacagaaccttcacggctcggagccgctgacaccgtgacaaagggagccctgctcaggagaa

SEQ ID NO: 819421 - DNA, 120 bp, Artificial Sequence
  ENSG00000232044_8 (sequence is synthesized)
agagcaaatgagaggcagttgcactttttcaggtgtcaggctggaggaagccacttgaagatgaatctacctctgccttaggattgcctgatggcctgtgccattccatgttatatctac

SEQ ID NO: 819422 - DNA, 120 bp, Artificial Sequence
  ENSG00000232044_9 (sequence is synthesized)
tgatttgctccctgtattcaaagattttttttttttacttaattctctcttactgaccctgagagtgaccatatttttaaccaatttggtcttcagcctcaaaacttagctctttccttt

SEQ ID NO: 819423 - DNA, 120 bp, Artificial Sequence
  ENSG00000232044_10 (sequence is synthesized)
tgtggtccccgaatcctatcacgtgtcatggtggctgtgaagatgtttgccaagcctgctgagaaggctcatctgtggcatccaaaagcagagatttcaactctggacccctgtgacctg

SEQ ID NO: 819424 - DNA, 120 bp, Artificial Sequence
  ENSG00000232044_11 (sequence is synthesized)
cctttgtaattatggatacccagcactgttttgaaatatcagtggacatccagtttttaaaagccctcagagctttgggagacacccctttatctctctggcatgtcagagaaccgattc

SEQ ID NO: 819425 - DNA, 120 bp, Artificial Sequence
  ENSG00000232044_12 (sequence is synthesized)
aacccttctcatctcctcctccttccctctcttgggccatcaggatgcggcagcaactcactgtgcatgtttttacagctcttctccagtaatgctgccatttccactgcagaccacagg

SEQ ID NO: 819426 - DNA, 120 bp, Artificial Sequence
  ENSG00000232044_13 (sequence is synthesized)
ataaaaggaccgcttcaccgtggcccaggatacccttttaagtaggaggtaactattcagtttcgtagtggcccatacataaacttgattatgttcttcgttgctccaatatactatttg

SEQ ID NO: 819427 - DNA, 120 bp, Artificial Sequence
  ENSG00000232044_14 (sequence is synthesized)
tgtgttttgttttttccagagggagaagaaagtactgctttgatctaaaattaagcaaacgttcttcaataaacccaccatgagacttgaccactaatggtgaccagcagtggctttgtc

SEQ ID NO: 819428 - DNA, 120 bp, Artificial Sequence
  ENSG00000232044_15 (sequence is synthesized)
atggccctgcccactgggggcaggcacatgccggggccagggcaggctgccagctggtgagcacgaataggtggctggtggagcgcatgcagtgggaagggcagatggctccattttgat

SEQ ID NO: 819429 - DNA, 120 bp, Artificial Sequence
  ENSG00000232044_16 (sequence is synthesized)
ttgttagcaggccacttcctcggaaggggctttcccttcagtggggtctgcaccgccagcctcagctgtcttggagcagatgtgtatagttagagatggggaccttttcactgtaaatac

SEQ ID NO: 819430 - DNA, 120 bp, Artificial Sequence
  ENSG00000232044_17 (sequence is synthesized)
tgctcacatgttcctaggctgactttactatgtgcagagcctcttctcaaatatccaaatcccctctgttgggtactacagaacagatgttaccctgcctcctattacattaatttacga

SEQ ID NO: 819431 - DNA, 120 bp, Artificial Sequence
  ENSG00000232044_18 (sequence is synthesized)
actttacatatgctgagttacggaccctaagctgttgcatgtgcttggctcttatgttccaaaaagtacatttgtatggttttgtggaaactgtgctgttctgcttttgcagtctgtgag

SEQ ID NO: 819432 - DNA, 120 bp, Artificial Sequence
  ENSG00000232044_19 (sequence is synthesized)
attctgattttttttttctcatcagcaattatccttgtcttggaacatcagagcttgaagaaagggattctagcagcccacctctctccttcctaatccagatggttagaggcttagaga

SEQ ID NO: 819433 - DNA, 120 bp, Artificial Sequence
  ENSG00000232044_20 (sequence is synthesized)
gaggtggtggttgctctgagtttaccagattcagtgacaaaccccttctaatttctaatcaatctggcagccttcatttaccaaaagttgacttttgatagtataacttttatacaccgt

SEQ ID NO: 819434 - DNA, 120 bp, Artificial Sequence
  ENSG00000232044_21 (sequence is synthesized)
gagacaacttattttaaaaaacagtttagaaatatttaatttttttttgaaagactttttaaggtcaggcaccatgggtcatgcctatcatctcaacgctttgaggactgaagtgggagg

SEQ ID NO: 819435 - DNA, 120 bp, Artificial Sequence
  ENSG00000232044_22 (sequence is synthesized)
ggactgaagtgggaggatcatttgaggccaagatttcaagatcagcttgggcaacatagtgagactctgtctctaaaaaattaaaaaaaaaaatagccaggtgtggtggcgcatgcctgt

SEQ ID NO: 819436 - DNA, 76 bp, Artificial Sequence
  ENSG00000232044_23 (sequence is synthesized)
gcgcatgcctgtagtcccagctacttcggaggctgaagtgggaggatccattgagcctaagagatggcgattgagt

SEQ ID NO: 819437 - DNA, 120 bp, Artificial Sequence
  ENSG00000232044_24 (sequence is synthesized)
tattttaatattaatattatttaataatttcatattatttattattattagttttattattagcaaaactgagtggaaggcacagagattttccatattcttcctgcctctccaacaaac

SEQ ID NO: 819438 - DNA, 120 bp, Artificial Sequence
  ENSG00000232044_25 (sequence is synthesized)
tgcctctccaacaaacatgtctccctcattatcaacatttcttcccagagtggtacactttttataattgatgatcctacactgacacatcatcatcacaatgagttcatagttgacgcc

SEQ ID NO: 819439 - DNA, 120 bp, Artificial Sequence
  ENSG00000232044_26 (sequence is synthesized)
agggttcactcttggtgttgtacattccaggcatttggacaaatgtataatgacatgactccaccattttagtatcatacagacgagtttcactgccctaaaatcctctgtgctccactg

SEQ ID NO: 819440 - DNA, 120 bp, Artificial Sequence
  ENSG00000232044_27 (sequence is synthesized)
atacttactccttcatccccttgctccctcagcccctgacaaccactgatctttttattgtctccatagtttggtcttatttaatattttttgaggttgcactgttgccccaggacatcg

SEQ ID NO: 819441 - DNA, 120 bp, Artificial Sequence
  ENSG00000232044_28 (sequence is synthesized)
tatgagtagagggttaaccaccttagccaagagtaatttggtctggtgagttctccaccttcaggacaaaagcatttcagaaccatcctaacaatagtgttcccataagtaaccagacac

SEQ ID NO: 819442 - DNA, 120 bp, Artificial Sequence
  ENSG00000232044_29 (sequence is synthesized)
tgtttgtatccatagcaacatggctccatgagccctgcttccgaggagcagctgcccttcctgggcactgtcaagagttgttcttctctgacatccacacccttctttacctggcacata

SEQ ID NO: 819443 - DNA, 120 bp, Artificial Sequence
  ENSG00000232044_30 (sequence is synthesized)
ccagcccaggcaccaggcatccagggccttctatggctgtccggatgcattccttcacagctggaatgtggttggcttgttgacttctgttcccagcatagtgaacagtgggcactataa

SEQ ID NO: 819444 - DNA, 120 bp, Artificial Sequence
  ENSG00000232044_31 (sequence is synthesized)
gccagtaggcactcaattgatgattcttcaatgaaataattgatgccacttttaggtcagtctttcttgtacgttacaccttctgttgttcaacagagccccacaatatcccagaacttg

SEQ ID NO: 819445 - DNA, 120 bp, Artificial Sequence
  ENSG00000232044_32 (sequence is synthesized)
gaggtcttatctcggggtttctcagatgttggagtacccaggtatcacctgctgagccagtttccctggcctcacctgcaggggctctgagtcagtaaatctggggcaggcccagtactt

SEQ ID NO: 819446 - DNA, 120 bp, Artificial Sequence
  ENSG00000232044_33 (sequence is synthesized)
tgcatgtgagcacagacccaggtgtttctgaacctggtggtccagggactgctgcaggaaggagccaataggactgcatgccttagaggcagtgggtctcatccatccctatctatggca

SEQ ID NO: 819447 - DNA, 120 bp, Artificial Sequence
  ENSG00000232044_34 (sequence is synthesized)
ctgactacaggccatgtccaggccacatgggcacatgctattataattattttgtgtgatggatgagttacagaactggagccctaagacctgagttctagtttcagctctgccagttgc

SEQ ID NO: 819448 - DNA, 120 bp, Artificial Sequence
  ENSG00000232044_35 (sequence is synthesized)
tggctgattgaaactgaacaagccacctgccttccctgagactgtctcttctcctgtgaaattagggcattagaatacatgaagacccctttatgtccttaataacctgtaagtttaaga

SEQ ID NO: 819449 - DNA, 120 bp, Artificial Sequence
  ENSG00000232044_36 (sequence is synthesized)
acctagggaatctccatgctggtggctgcggttatatccccttatcctcaactcgtgaagaaagagtcaaaaatggcagcagggttgtgtcaactgctctcctcagcagctatcataagg

SEQ ID NO: 819450 - DNA, 120 bp, Artificial Sequence
  ENSG00000232044_37 (sequence is synthesized)
gaattgcctttgtcattttccccagccatcaccacactcccacacggccaccatcacctaaaccatctggcagtgggggttacctcctaaatctaagacgcagagacccaccgcaggcct

SEQ ID NO: 819451 - DNA, 120 bp, Artificial Sequence
  ENSG00000232044_38 (sequence is synthesized)
ttctttctggctgccctccactcccacccagaggctcagttttgctgggctgcacacctccgaggactcagttctttgtgtttcatgttgtttcatatccactagtgttacagaaactgc

SEQ ID NO: 819452 - DNA, 120 bp, Artificial Sequence
  ENSG00000232044_39 (sequence is synthesized)
tgcaaaccagggaccaaaagtccataggttctaattctagctgtgacactagtgagatgagtgactgctggcaagttactttatctatctgacctcacctcccatgtacaaaattgggtc

SEQ ID NO: 819453 - DNA, 120 bp, Artificial Sequence
  ENSG00000232044_40 (sequence is synthesized)
tgtatgcacatttgtggttctaaatcctggagtccaaatcagagttctttgtgcaaaatatacgtagctaggtcctaacctcggagatcctgactcagtctggggaaaggcgcagatctt

SEQ ID NO: 819454 - DNA, 120 bp, Artificial Sequence
  ENSG00000232044_41 (sequence is synthesized)
ggggagaaaacaactctctagaagagtctcgccttcagtgagtgacaagatctctcctgtctctcggttcacaatgttaccctaactaatccatcctctgatgtcacctgctaacaactt

SEQ ID NO: 819455 - DNA, 120 bp, Artificial Sequence
  ENSG00000232044_42 (sequence is synthesized)
cccctgtggcatcaaaccagtagcccatttgcagctagtacaaacacttctttacatttaagttttgtttacgagatttagcctacaatcatagaggctgccagctgggtttcaaatgtg

SEQ ID NO: 819456 - DNA, 120 bp, Artificial Sequence
  ENSG00000232044_43 (sequence is synthesized)
tatgttccattgctaataggaaaaactgcatctattagaaaaattctctctgggagctgagcacagaggcaggccttgtattgcaaacatttgaaaagccataagcaggtattctggact

SEQ ID NO: 819457 - DNA, 120 bp, Artificial Sequence
  ENSG00000232044_44 (sequence is synthesized)
gtgttttagatcacctgagaacatttcttgaacactagtatttgcttagagtgacaaacctattaagtggttctttcaggtaagtttgcatccaagcaatgtcgtctgaatcgcaggagg

SEQ ID NO: 819458 - DNA, 120 bp, Artificial Sequence
  ENSG00000232044_45 (sequence is synthesized)
aagtcaggagttgtgtctggctttctggccatacaaatggcatatgggaaagtcattgtatattattaatatcctttgatgtatattattatgactttctcacggtagtaatgttgttgg

SEQ ID NO: 819459 - DNA, 120 bp, Artificial Sequence
  ENSG00000232044_46 (sequence is synthesized)
tttttattaatgttatttttatagcaatgctaatattatgagctaaaagtttctgagcatctgctgggtgccaaaaattcttataaatgctttacatgcattagctcctaacaacacttt

SEQ ID NO: 819460 - DNA, 120 bp, Artificial Sequence
  ENSG00000232044_47 (sequence is synthesized)
aaatgctttacatgcattagctcctaacaacactttgaagtaattcttattgtccttacttgacatatacaggaataaaaacctgaccattagaccgagcgtggtggctcacgcctgtaa

SEQ ID NO: 819461 - DNA, 120 bp, Artificial Sequence
  ENSG00000232044_48 (sequence is synthesized)
cagctgagcgtgtgcagagggagcccctcaggctttctctctgtctgcctccatcttaccgtatccagagaccacactaaaatggtggctgacgtggagacagaggaagctcctttctag

SEQ ID NO: 819462 - DNA, 120 bp, Artificial Sequence
  ENSG00000232044_49 (sequence is synthesized)
ttatggccacaaggcaggatgctgaggtgttgtctagttcattcatcaggaggaaggggagtcattccagccttcactgcctgtggacggcaacaacttcactgtggaagacgccagtag

SEQ ID NO: 819463 - DNA, 120 bp, Artificial Sequence
  ENSG00000232044_50 (sequence is synthesized)
agtctggacacagctgaccgtaatgtttattcaatcaatgactggttgcatgggcttgatccacaatgactcagctttcagccatcgcaattgtgctatgctcagctgtcaagtgtgttt

SEQ ID NO: 819464 - DNA, 120 bp, Artificial Sequence
  ENSG00000232044_51 (sequence is synthesized)
taaatctcctactacattttttttaaagtttttctgccatcctttgtactcctttttaaaaacttatccaggaagtggtatgaaatctccagtacttctcggcacacacagatgcgtctt

SEQ ID NO: 819465 - DNA, 120 bp, Artificial Sequence
  ENSG00000232044_52 (sequence is synthesized)
tttctgtttattgttttccctctgagagttgtagtgttcagttggttacaccaagagaagtacttggctgggactgttaaaaaaagtgtcacaaagcagcaccaaggagaaaacaacact

SEQ ID NO: 819466 - DNA, 120 bp, Artificial Sequence
  ENSG00000232044_53 (sequence is synthesized)
gttttctgaatgttcgtgcttggaatttctttactacagggaaaatgagatgggggagggcccttcttatctattttcagacagacatctcacaaatgcataaaaaatataatcctttta

SEQ ID NO: 819467 - DNA, 120 bp, Artificial Sequence
  ENSG00000232044_54 (sequence is synthesized)
gttccactggccttgtagttgttgtaaatgcatcttaaattcctaaatgatttttaaattacattatgtctttcagcggtgtaggctttgatttctgaggctgttagccagatataggct

SEQ ID NO: 819468 - DNA, 120 bp, Artificial Sequence
  ENSG00000232044_55 (sequence is synthesized)
ctgttagccagatataggctttaacaaacactcatgttcttttgtctttatgtctttattttaaaattatatatatacatatatatatgtatgtatgtatgtataagtatccagtgagta

SEQ ID NO: 819469 - DNA, 120 bp, Artificial Sequence
  ENSG00000232044_56 (sequence is synthesized)
agaatttttctcattctgtcttcaaataggtaatacttcacaaattgatgtatgctcatggacaatagcaggtaatgcttttgaaactgaaagatttgtctctgagttccaacaattgtc

SEQ ID NO: 819470 - DNA, 120 bp, Artificial Sequence
  ENSG00000232044_57 (sequence is synthesized)
atcattgtcaatacagataaactgcaggttaactctctctctgtctcgcccctggaaactaggcttaatgttttgccaaaaattgggtatttgctcttgaccctagagcaaaggctctca

SEQ ID NO: 819471 - DNA, 120 bp, Artificial Sequence
  ENSG00000232044_58 (sequence is synthesized)
cttcaacaaaacttttcactactctccagaagagccaagcctcatactgatgagaagaagagaaggaagagaaatgggaagccgatcattaaaatattttcctgcaaggggaagaaaaca

SEQ ID NO: 819472 - DNA, 120 bp, Artificial Sequence
  ENSG00000232044_59 (sequence is synthesized)
acaattcttaagtgccaatatgagacaggcactatactgagcactttggatgtggtatctgtttacatttatttgaataataatcagcatatagaaattcaacatagattctgcaccatt

SEQ ID NO: 819473 - DNA, 120 bp, Artificial Sequence
  ENSG00000232044_60 (sequence is synthesized)
tctttcagtccttctggatggtttttcatttgtatttgtaataacttgaaagttacttaatctctcattaagttgctgaggtatgctttttaacataatatttgcataggccatgaacca

SEQ ID NO: 819474 - DNA, 120 bp, Artificial Sequence
  ENSG00000232044_61 (sequence is synthesized)
gaatgaataaaaggaaaatcccaagatctagaacattgttttagaattgatgcctacccaacactttgtcctgagtttacttagcatatagaaaggagttacatacacaatgaacattcg

SEQ ID NO: 819475 - DNA, 120 bp, Artificial Sequence
  ENSG00000232044_62 (sequence is synthesized)
aggactgaattttagttgaagtaactgagatgagtaaacaaaaaatgccagaagctcactgcctcctccacccccaccacacctgatgcagtccagaggcaaatttctttgttaatccac

SEQ ID NO: 819476 - DNA, 120 bp, Artificial Sequence
  ENSG00000232044_63 (sequence is synthesized)
ttatttgtgttatttttatgtatttatacttatagtacgtagcatatctaagctcatgtctgtcttaggaattggaattttagcaggcagagagatcatcaccttaactctgtggtgttc

SEQ ID NO: 819477 - DNA, 120 bp, Artificial Sequence
  ENSG00000232044_64 (sequence is synthesized)
aatcttttagcttccctgggccacatcacaagaagaaaaattgtcttgggccatacataaaatacaccaacactaatgatagctgatgagctaaaaaaaaaaaaacctgtcaaaaatatc

SEQ ID NO: 819478 - DNA, 63 bp, Artificial Sequence
  ENSG00000232044_65 (sequence is synthesized)
agctgatgagctaaaaaaaaaaaaacctgtcaaaaatatcataatttttttcattgcttgagc

SEQ ID NO: 819479 - DNA, 120 bp, Artificial Sequence
  ENSG00000232044_66 (sequence is synthesized)
cacagctgaccgtaatgtttattcaatcaatgactgcaaaaacttgggcttttactcaaggacttgaggagctgttgaagatttcaactgagaagcttcgagaggaaccttgagactgag

SEQ ID NO: 819480 - DNA, 120 bp, Artificial Sequence
  ENSG00000232044_67 (sequence is synthesized)
ctagtgcccttcgatggctgtgtgaaaggatggacttcatgggaggaaagaatccgacaagctgagaggacgctaaagaaaaagaaaagaggcactgaaggactgggctaaacagtgatg

SEQ ID NO: 819481 - DNA, 120 bp, Artificial Sequence
  ENSG00000232044_68 (sequence is synthesized)
atagactctcaagttatggaagaagcacataaatggggctgagcaggtcgctggagttaggggagttggagtctgctttggctaccttgcatggaaatgatgctggttgttaaaccaagg

SEQ ID NO: 819482 - DNA, 120 bp, Artificial Sequence
  ENSG00000232044_69 (sequence is synthesized)
aatacaggaaaaaaaagacactgtttagagatgacatcatgatttcagtgtgagtcaatttcagtatgagacaccaatgagacactcaggaggagtgggctagttaaccacccaccagtg

SEQ ID NO: 819483 - DNA, 120 bp, Artificial Sequence
  ENSG00000232044_70 (sequence is synthesized)
cctggagctcaagaggaatgtcagggctgggatgaaggtaagtcagaaacactccagaacagctaaaaaccaagtctacatgcagtgagaataacagtagcaagatataactatataata

SEQ ID NO: 819484 - DNA, 120 bp, Artificial Sequence
  ENSG00000232044_71 (sequence is synthesized)
ctggtcaataataaaatttaaagcaaacaagaagaaaactaggaaggtagacttggagcaagcatgtagagagatatgagagatccagaaacaagtcaagtccagaaagttaacatgggg

SEQ ID NO: 819485 - DNA, 120 bp, Artificial Sequence
  ENSG00000232044_72 (sequence is synthesized)
agagagtggatatatgattttcagacaccatagaaagtgtctgtcctactagcatacagccctatccactggttactaggtgaggcaatagatgtattaattagctgggttgtggggata

SEQ ID NO: 819486 - DNA, 120 bp, Artificial Sequence
  ENSG00000232044_73 (sequence is synthesized)
tttcaaaatgtatacatatataaaaacaacaccttgtacaagttaaataaataaaatttcaattcgtcaatgatacaccaataaagctaaaaacaaacaaacaaacaaaaaaggtggcca

SEQ ID NO: 819487 - DNA, 81 bp, Artificial Sequence
  ENSG00000232044_74 (sequence is synthesized)
agggtgagcagatcttaaaaccccatttctatgaaaaatgcaaaaacattaaaggtggtggcacatgcctgtagtcccagc

SEQ ID NO: 819488 - DNA, 73 bp, Artificial Sequence
  ENSG00000232044_75 (sequence is synthesized)
ttaaaaaaaaggaaaagaaaaaggaaaagaacggtgaggaattgtcaatgaatgtgtaggggagaaaatgaaa

SEQ ID NO: 819489 - DNA, 120 bp, Artificial Sequence
  ENSG00000232044_76 (sequence is synthesized)
gtgaggaattgtcaatgaatgtgtaggggagaaaatgaaacagaaaagactatttctaagtttttcagccttcttgtcttggagaaagagggattctttgatagaaataagactctggaa

SEQ ID NO: 819490 - DNA, 120 bp, Artificial Sequence
  ENSG00000232044_77 (sequence is synthesized)
gaagtagtgcttctcagcatataaaaatgcctttttaaaaaatggtgattccaatttcccaaagaagaaatagttttagagtgtaccagaagactactataaacattacacctaatatgt

SEQ ID NO: 819491 - DNA, 120 bp, Artificial Sequence
  ENSG00000232044_78 (sequence is synthesized)
ctctttaaattttgtgtattcacttagcagtgaactttgcacaccttcatgttagtccctcagtgaatactcactcactttcacaccgctatgccaccaatgcaattaccattccagtgc

SEQ ID NO: 819492 - DNA, 120 bp, Artificial Sequence
  ENSG00000232044_79 (sequence is synthesized)
aaacccaactgtggtggtcctacctcacctgtcaggagcaatttcataacagagagcagcactgaggtctcatattactaatatttcattacatttacaaaagagacaagagtgcattca

SEQ ID NO: 819493 - DNA, 120 bp, Artificial Sequence
  ENSG00000232044_80 (sequence is synthesized)
ttagtatactatgaaatattaccataaataagtaaaattaaattatacttgtcaaaataaatgaacactgcacacaccatgattcagtgtccctaattcttttaattatgtttttttctt

SEQ ID NO: 819494 - DNA, 120 bp, Artificial Sequence
  ENSG00000232044_81 (sequence is synthesized)
acttgctaatttgtgaaatttgctaactcacaatggactcccttgtcattagtgagaatgagtctgattctgctggaatacaaagggctttgcacaccctatgtagcatggctcctggca

SEQ ID NO: 819495 - DNA, 120 bp, Artificial Sequence
  ENSG00000232044_82 (sequence is synthesized)
ttctgtacctggagcaccatgttgactaattggtgctttttctcatgtcaagcttgttgaaagctacatattaattatcaccttttgaaattggtgattacaagatgaatgttatccggg

SEQ ID NO: 819496 - DNA, 120 bp, Artificial Sequence
  ENSG00000232044_83 (sequence is synthesized)
taaatggaagtgtaccattttgctctaaaataggaaattccagtgcagagttataatagctaaaatgttgccctatttttagtgttgtaccttgatgtttaatgtatgttttctacgaat

SEQ ID NO: 819497 - DNA, 120 bp, Artificial Sequence
  ENSG00000232044_84 (sequence is synthesized)
gcaaagaacagacaattgtgctagtttcaaatttgttgctctgctgagtccacattaatgatccatcacctagaaaaatacagaagtcattttggcctatgtgaagcatggtaaagcttt

SEQ ID NO: 819498 - DNA, 120 bp, Artificial Sequence
  ENSG00000232044_85 (sequence is synthesized)
aaatccaggcaatatttattgggtacctactttttgtatgtatgcattctccagcaattgtatataaattatctgattaatcctcacaatatttcagtgagttaggcagtttgagtttcc

SEQ ID NO: 819499 - DNA, 120 bp, Artificial Sequence
  ENSG00000232044_86 (sequence is synthesized)
tttcatgaataaggagtctcaaaggagttagatagacttcccaagttcatgcacctggtgaatgacagatgggaacatacatctttccattacgtgttttacctcctcatggcttgatat

SEQ ID NO: 819500 - DNA, 120 bp, Artificial Sequence
  ENSG00000232044_87 (sequence is synthesized)
cagcttatgtcaaactgcctgtagattgtatattattgttaagaaatacatggatttggatgataaagaaataggatacatgaagagaaagactggagagggggcgtaggggaatcgtta

SEQ ID NO: 819501 - DNA, 120 bp, Artificial Sequence
  ENSG00000232044_88 (sequence is synthesized)
gttagcagcaggcattaaggaaaggcttacgtagctgtgtcatttctaattttcattctttttgtgttggaaaaagaatgatgtttaagaaaattgagggccgggcgcggtggctcacgc

SEQ ID NO: 819502 - DNA, 120 bp, Artificial Sequence
  ENSG00000232044_89 (sequence is synthesized)
cagatgattttacctgccttccctaagtgcactcgggaagagaaggatcatctcaaaaagggttaaggaatgagatcatggaaatcacttacacacgcggtcgcggcttggacttggcta

SEQ ID NO: 819503 - DNA, 120 bp, Artificial Sequence
  ENSG00000232044_90 (sequence is synthesized)
gtgaggccggcctgcccactctgcttccattcactcagacacagcttgggcttttcctccaagtgctggtagcagtcatttatgagggaggaaaggagcagaataaacacacttctcagc

SEQ ID NO: 819504 - DNA, 120 bp, Artificial Sequence
  ENSG00000232044_91 (sequence is synthesized)
aaaagggatggagagtacttctgtgggaacagttggagctgaagaacagagaacatttcctttgatgtttggactctacggaatctttgggaattgtgttcaagtccaggaggaatggct

SEQ ID NO: 819505 - DNA, 120 bp, Artificial Sequence
  ENSG00000232044_92 (sequence is synthesized)
gaaaacatgattgagataaatttgcagccaggaggttgaagacaaattaggatctgattttattcaactgggagtaaccatggccaagcataattcttctggtggattctgaagttattt

SEQ ID NO: 819506 - DNA, 120 bp, Artificial Sequence
  ENSG00000232044_93 (sequence is synthesized)
ggaatttgcccataagatgaattttcctgaagaaggaaggatgtggaggctgatactgaggccccatttccacatgtgaacttctaagaaaccacagctttcatccagagtggagatgaa

SEQ ID NO: 819507 - DNA, 120 bp, Artificial Sequence
  ENSG00000232044_94 (sequence is synthesized)
tggcactggggtccacgttgccagaatgcctggggacaaggaatgaggacttgtcacccaaggcacgagatccatagtggctacgggaatgaagccactgcctttgtggaaatgactaat

SEQ ID NO: 819508 - DNA, 120 bp, Artificial Sequence
  ENSG00000232044_95 (sequence is synthesized)
actgagacatcctactgggaagttgcatcagtggtcagtatctgaggccacagaaaatgtcacatgatggtgtgtcacagggctccacatttaggacatttgtgtactcaaagagaatct

SEQ ID NO: 819509 - DNA, 120 bp, Artificial Sequence
  ENSG00000232044_96 (sequence is synthesized)
ttgacgaccatgactcagagaaatttttaatgacttaaaacaggttttggatcatgttgatgatgacagatggtgcaagccacctacctaaatccctctggggaggggtggtatttctgc

SEQ ID NO: 819510 - DNA, 120 bp, Artificial Sequence
  ENSG00000232044_97 (sequence is synthesized)
attgttctcagagcagaaatgtgacatggatgtggaggctctggacagtgagatgtgaagctggaggcatggcttggcctccctagaatgggtgtggccagggcaaagctgggacatcct

SEQ ID NO: 819511 - DNA, 120 bp, Artificial Sequence
  ENSG00000232044_98 (sequence is synthesized)
caacccaaaggtttgcataactggatttgaactccttatagatattcctaaacagtggtgatacggaagggagaggaggaggaaaaaaggatggctcttcatcaagagcaaaagcaagag

SEQ ID NO: 819512 - DNA, 120 bp, Artificial Sequence
  ENSG00000232044_99 (sequence is synthesized)
attcagataggagatttcacttggcttttctagtcttgggtggggacccattatggaagtgaagagctctggaatcttccagagaaacaagcatgggtatcctttaacaggtcccagata

SEQ ID NO: 819513 - DNA, 120 bp, Artificial Sequence
  ENSG00000232044_100 (sequence is synthesized)
gccagttaccgcagaacaatgtcctgttaccagaagcttattgcagaccttgtaacctgaatcattgtgttggcccagggcacacccaggagggtggcttgggaaggagattccaggctg

SEQ ID NO: 819514 - DNA, 120 bp, Artificial Sequence
  ENSG00000232044_101 (sequence is synthesized)
aggtaaataccgacatctgatttcctgacattgagtaggaaagcatttcagagacaagctccaagagctttggaaaggggaacattcacccacttcccacaatttataagggggctggca

SEQ ID NO: 819515 - DNA, 120 bp, Artificial Sequence
  ENSG00000232044_102 (sequence is synthesized)
gtggttgttttggggaggataataatgggaaaagagaacggggtatgttatggcacacagaaccaaaaatgaagattcctaagtagtaatctattagtgagggaattcttgggcaatttc

SEQ ID NO: 819516 - DNA, 120 bp, Artificial Sequence
  ENSG00000232044_103 (sequence is synthesized)
aaaaaactcaaaacgtgttacagagaggagccccttggactttgtaggagactcgtttgtctatctggccccaaggcccagaagtagctgacaaagagacccagttgtcccctggatgcc

SEQ ID NO: 819517 - DNA, 120 bp, Artificial Sequence
  ENSG00000232044_104 (sequence is synthesized)
aaacttggggagagaatggtcctgggtggcagcccctccccatccagcctcagtcagagctctccagcaagtcagcctgcaggtagctatggagttgcagtgtagtcctgttattaatgg

SEQ ID NO: 819518 - DNA, 120 bp, Artificial Sequence
  ENSG00000232044_105 (sequence is synthesized)
ctttctgctttggctggatttcagacataaagaagagaagaaggaaaggtctgggtgatctgcctcttctgataacactaaagttgcacacatcacctcagctcatatttgatgggctgg

SEQ ID NO: 819519 - DNA, 120 bp, Artificial Sequence
  ENSG00000232044_106 (sequence is synthesized)
gacttagtcactaagccacacccatctgcaaaagtgctggaaagcgttgcactctctgatgaccacatgcccagctaaatattgaggtcatatattcctatataataagacataagcaaa

SEQ ID NO: 819520 - DNA, 120 bp, Artificial Sequence
  ENSG00000232044_107 (sequence is synthesized)
caggccccagtgtgtgatgttcccaaaaatatcataatggtttaggaaagtttacgaatttgtgctgggctgcattcaaagccatcctgggttgcatgtggtctgcaggccccaggttgg

SEQ ID NO: 819521 - DNA, 120 bp, Artificial Sequence
  ENSG00000232044_108 (sequence is synthesized)
acaagcttgccttaaatgaagtttacaaatagttacaattatgtttagtgctacagattagaagtatatgctaatatgtaattgatatggtttggctgtgttcccacccacatctcactt

SEQ ID NO: 819522 - DNA, 80 bp, Artificial Sequence
  ENSG00000232044_109 (sequence is synthesized)
gggccaggtggagataattgaatcatggaggcagtttaccccatactactcccgtggtcagtttccctgcacaagctctc

SEQ ID NO: 819523 - DNA, 90 bp, Artificial Sequence
  ENSG00000232044_110 (sequence is synthesized)
atgagatctgatggttttataaatgacagtttccctgcacaagctctcttgcctgccgccatgtaagataggactttgctcctcattcat

SEQ ID NO: 819524 - DNA, 120 bp, Artificial Sequence
  ENSG00000232044_111 (sequence is synthesized)
tggcggtaccgttctctccacttcaaaaatacacagaaacatgtggaaatgttctgtcatccagaatgaaaagcatgtgcaccaaattttcacagacctgattcgaatgtagataaaagt

SEQ ID NO: 819525 - DNA, 120 bp, Artificial Sequence
  ENSG00000232044_112 (sequence is synthesized)
gcaaaatccagaggagggaacacgctatagaaatcctgtcttctatactataatttaatcatcgtgtgccacagaatgtctttgcataaattacaaccacaataatagcatcactttcac

SEQ ID NO: 819526 - DNA, 120 bp, Artificial Sequence
  ENSG00000232044_113 (sequence is synthesized)
ccgtggccggcgcccatcgagcagcccatcctggctgttcccttgttcagctgattttcttttttatcttgacatttgctaaccgcttggtttttattttccgggaagagaggattattg

SEQ ID NO: 819527 - DNA, 120 bp, Artificial Sequence
  ENSG00000232044_114 (sequence is synthesized)
gcaactggcaccacccccatgtctggaggagggacgtttctaggatgacccccagagtggagaaatagccgagctcatgaggcaacccacacaggcaggctggagaggagtggcaagaag

SEQ ID NO: 819528 - DNA, 120 bp, Artificial Sequence
  ENSG00000232044_115 (sequence is synthesized)
ctcaccttcggacagtagtgagcagagcaacagaggcccccagagacttcgcacaacggaaaagagatcaactcccgcatttgcaggggacgtgaaagtgcaatactgtgaggaacaaaa

SEQ ID NO: 819529 - DNA, 120 bp, Artificial Sequence
  ENSG00000232044_116 (sequence is synthesized)
ggaagcctcatctctggaagccgggaggaaaaacagtcggtgtagacagcagcggcagggaccagagctgaccagaaggctgggtcccagcaacaattagagacaggcagcagctgaggc

SEQ ID NO: 819530 - DNA, 120 bp, Artificial Sequence
  ENSG00000232044_117 (sequence is synthesized)
cccttctctgagaaccatttcaattgcacagtggccacagaaggctccattggcccggcagccagctctgcagagccatttgtccacaaggaaaataatagccccggcctcattgctttg

SEQ ID NO: 819531 - DNA, 120 bp, Artificial Sequence
  ENSG00000232044_118 (sequence is synthesized)
ggctgcagggaggacaatgacccaccatgaaaagagttaaaaagattctggggaaggggaaaggcaggcccacacggtggcaattcaagatcttttggatgccgtgagcgtgttctttaa

SEQ ID NO: 819532 - DNA, 120 bp, Artificial Sequence
  ENSG00000232044_119 (sequence is synthesized)
ttaagcccctcttcttcagctcatcctgcagaaacgcacctgcttcccatctgccatccaaaacggcaagcacaagaatgacttcacactgtcactttcagagttccgctgtggcccaca

SEQ ID NO: 819533 - DNA, 120 bp, Artificial Sequence
  ENSG00000232044_120 (sequence is synthesized)
gtgatttttcaagaaaggcagccacagactcgctcgcgctttctctttctcctttcctctgaaagactctataaaaaccacattaaaaagtgtgtgagccaagcaatttcatttatcaaa

SEQ ID NO: 819534 - DNA, 120 bp, Artificial Sequence
  ENSG00000232044_121 (sequence is synthesized)
ggaagaaggtcatccatagcattcattctaagaatatcaggcacacggccagccctggacacaaggcatgaagaccagagggccctttattgacctaatctctattttgtcgccaaactg

SEQ ID NO: 819535 - DNA, 120 bp, Artificial Sequence
  ENSG00000232044_122 (sequence is synthesized)
catctgtgtctgaaagctgggacacacaatatttccctctaccaaaataattttattttctgcagcagcatgtaacaaacaattaatggtggtaacatgggcttctgtcattttctgaac

SEQ ID NO: 819536 - DNA, 120 bp, Artificial Sequence
  ENSG00000232044_123 (sequence is synthesized)
gacactgggttgagttaaaatgaaaactggaataaatacaatgagaagatagaaagcctgctgagaacactggggtacttgagtggaactttaaacagtgtctttgctaatgtgtatggt

SEQ ID NO: 819537 - DNA, 120 bp, Artificial Sequence
  ENSG00000232044_124 (sequence is synthesized)
aactgttcagattgtctgtttctttaagctaattgttttctgattgttgaagcaataataactcatatcttgcttgagaaaaaattaaaaagtatgaaaaatcaaatataattatcacac

SEQ ID NO: 819538 - DNA, 120 bp, Artificial Sequence
  ENSG00000232044_125 (sequence is synthesized)
accttggaatccatgttattgccagaactgtgtggggccttgcttgagggcctgtcccctgtcctcttcacagatgtttctgtgccttcagggagaggactgattgtgctgtctccctct

SEQ ID NO: 819539 - DNA, 120 bp, Artificial Sequence
  ENSG00000232044_126 (sequence is synthesized)
cccacccgtgtctgctgtctccaaaactaagggaggctgcggtgaaaccagcctggcccaggttcctctggtgcctgccgtggctcaaattatccaaactacagtggctgattcccagcg

SEQ ID NO: 819540 - DNA, 120 bp, Artificial Sequence
  ENSG00000232044_127 (sequence is synthesized)
acccatcccttagtgcccttgtgccccgttgaagaagtggcccatgttatgaatagggaagctaaggtcattaagaatttgtgcaggcgtacaaagaaagtgcaagtcagagatccttgt

SEQ ID NO: 819541 - DNA, 120 bp, Artificial Sequence
  ENSG00000232044_128 (sequence is synthesized)
ctcagctactttgcttgaaaaatgactccatgctctgagatgctataaatggagcaaacagtgtgaagtggttctccccctccaagaaactgccccctgatgcgttcccccattagacac

SEQ ID NO: 819542 - DNA, 120 bp, Artificial Sequence
  ENSG00000232044_129 (sequence is synthesized)
ctgctcctccaagcctggtcttctctctgcaaccacttcccctatgcctctccccacccaccatgcatgactccttgtcacacacatgatctctggtcctaccttgcacttggtgctggg

SEQ ID NO: 819543 - DNA, 120 bp, Artificial Sequence
  ENSG00000232044_130 (sequence is synthesized)
ggctgtgattccctctgcctctgtctccccacatcgtccctgacatcacctttcaccgtgcactggtctcgcttcctcgggaactctatgaatggccttgttctctgattatttgattat

SEQ ID NO: 819544 - DNA, 120 bp, Artificial Sequence
  ENSG00000232044_131 (sequence is synthesized)
tccattatcaacccaaagctcactgggtctatggggctgagaggtcgtttttattacatcattttaattattcagataaaagactcgcaggcacagatttatcaccactgcctaaagaaa

SEQ ID NO: 819545 - DNA, 120 bp, Artificial Sequence
  ENSG00000232044_132 (sequence is synthesized)
agcagagacacacataattccattttgaaaatccattcttaaaagcaaaaatatgattcagttgaaggtattcagaaaaaaaaatgctcattgaaaaaccctgatgatttttagcatttc

SEQ ID NO: 819546 - DNA, 120 bp, Artificial Sequence
  ENSG00000232044_133 (sequence is synthesized)
gtaatgtttattcaatcaatgactggtaaggaagctaacattcaaaggtgctttgctctgcttgcctccaggactggggaggaaaatgctttgtagagtgtgctttatgccattatggtc

SEQ ID NO: 819547 - DNA, 120 bp, Artificial Sequence
  ENSG00000232044_134 (sequence is synthesized)
aaactagcatagtcagccaaaagagaggtgcccacatagatccccctgaagaagtcgctgatgtgaaggtggcaaagtacaagaaagacagatccaatctgggtcaactgggttacacag

SEQ ID NO: 819548 - DNA, 120 bp, Artificial Sequence
  ENSG00000232044_135 (sequence is synthesized)
agatcagctctgcactcctaaggccatgggaacctgttcccgaacctgtggagcatcaattttctgttctactctgagttgtaccacaattagaagcatcattatgtggaaaggaattcc

SEQ ID NO: 819549 - DNA, 120 bp, Artificial Sequence
  ENSG00000232044_136 (sequence is synthesized)
cagaggttcctaaacatccttctcctcctttaaccaataaagacatatgcatcttgcattaatactgtggaataaataatgaattataaacggaatagaaattataatacagtgatgtga

SEQ ID NO: 819550 - DNA, 120 bp, Artificial Sequence
  ENSG00000232044_137 (sequence is synthesized)
tgtctgcacagatttttatggtccctggagtcagtccctttagaaatgtacattattttctctatttaaagatattcacaactctttgttaatccagctcaccatactcatctagggaca

SEQ ID NO: 819551 - DNA, 120 bp, Artificial Sequence
  ENSG00000232044_138 (sequence is synthesized)
ctgggagggaaaatgtatttggaattctacgggctccattcttccattgcttttcaattagagacaccattcgtcttgtgtgttttatctcttggagcattctcccatgtgctgccggaa

SEQ ID NO: 819552 - DNA, 120 bp, Artificial Sequence
  ENSG00000232044_139 (sequence is synthesized)
aattaagcatcctcgttccaaatctcagcagctgaaagttcaagtgttaaatggtgggatagtgaatccaggaggcagtgaatgaggaggcaactcgggccctggctgagtttttacttc

SEQ ID NO: 819553 - DNA, 120 bp, Artificial Sequence
  ENSG00000232044_140 (sequence is synthesized)
tttttcttctgttgcattattttgtttctgttttgccaggtgctgcctggttaaagatgccagtaggctcgacacagagccaaatatactgtccaaatgtgagattagaaattagatcat

SEQ ID NO: 819554 - DNA, 120 bp, Artificial Sequence
  ENSG00000232044_141 (sequence is synthesized)
atgtgataaaagacagcaatttattttagcttggtgttatatcaggaaactatgaaataatataatcaatttatttgcttactcacacaagcaatgtctgctatgtgccagacacaggaa

SEQ ID NO: 819555 - DNA, 120 bp, Artificial Sequence
  ENSG00000232044_142 (sequence is synthesized)
aaaaaaataccagggctaaaatgatccataagacaagattcttgctcttgaaatacacaatccagtgggggaggaagacaagtagtagacagttataggacagcatcctgagaattggga

SEQ ID NO: 819556 - DNA, 120 bp, Artificial Sequence
  ENSG00000232044_143 (sequence is synthesized)
gagagatttgtttatgagtcttggaagtaggagttaaattcagagaaggtggcatttgagcagtgtaaggacctgttggatgaatagtgggaattgaagtaggagaaaaacagaatttag

SEQ ID NO: 819557 - DNA, 120 bp, Artificial Sequence
  ENSG00000232044_144 (sequence is synthesized)
agagaggagcccggagtgtgggaagaggggcatcacagagagatgcatcctacagagactggaggactccgagcttggggaagagacagttaaaccttccccgtgagagcgagttatatc

SEQ ID NO: 819558 - DNA, 120 bp, Artificial Sequence
  ENSG00000232044_145 (sequence is synthesized)
cttgaacaaacatgatttttaaattcccctcatcatttttagtgctttggagtcttctcagatgtggacgaaaacagttcgtgagctgcgctgagcagttccggagccctggctcccttt

SEQ ID NO: 819559 - DNA, 120 bp, Artificial Sequence
  ENSG00000232044_146 (sequence is synthesized)
ccccggggcctaagcccccaagaagagagtctttttcaggaccatgggagcaggttttaaaaggctttctattgaagcgaggccgtcagccagccgtgcgtgtccgcattgtggtggtcc

SEQ ID NO: 819560 - DNA, 120 bp, Artificial Sequence
  ENSG00000232044_147 (sequence is synthesized)
cagagccttatggacaatcctttgaaagaatagggttgggaagattctcaggacagaagcggctaatttccatccttggagctttatctcacaaaggatatttgatagaaagaaaaaatg

SEQ ID NO: 819561 - DNA, 120 bp, Artificial Sequence
  ENSG00000232044_148 (sequence is synthesized)
gagtctgtggaagctttgctcctatttccaaatgggttgactctggatgcaaaggaatattttcacatttttcccaatagaggaaagcttttagtgccaaaatcctcaaaggagaatgaa

SEQ ID NO: 819562 - DNA, 120 bp, Artificial Sequence
  ENSG00000232044_149 (sequence is synthesized)
catcacacattacacatgtatgtataagggtagaataatatggtacaaaatccagtgagtacaagcacacaatgggcattcagtacaggttaaatgaatatgcaagaaaaattcaaagtt

SEQ ID NO: 819563 - DNA, 120 bp, Artificial Sequence
  ENSG00000232044_150 (sequence is synthesized)
tttgtaatcacagcaaggtaaaagtcttatctctgatcattaccatgaggacacttaaatatttagccctggggacaaaatggtttgtaggcaggacgtcctgtgtgtttatgcacacat

SEQ ID NO: 819564 - DNA, 120 bp, Artificial Sequence
  ENSG00000232044_151 (sequence is synthesized)
aaaatgccgccctggccccaggactgcaaggcctctgactgcatcatttacattcaggggtggtcctgatcaacatggccccatagaataatagagggaatttcagatagtacagcgtta

SEQ ID NO: 819565 - DNA, 120 bp, Artificial Sequence
  ENSG00000232044_152 (sequence is synthesized)
gataataagcgctttccactgactctgtttacatgtggaaattagaagcgctgagtgaaaaagagtagtgaaaataaagacaggaagtatatacacaacaaacaatttttcctctctgca

SEQ ID NO: 819566 - DNA, 120 bp, Artificial Sequence
  ENSG00000232044_153 (sequence is synthesized)
aatcggattattcccttgcgcaccccctgcaacccccatctatgatgtcaaactcaatggactgttgaactaatagcctgggagtcaccagcgtgagagtgtgtatgtccacgctgtgca

SEQ ID NO: 819567 - DNA, 120 bp, Artificial Sequence
  ENSG00000232044_154 (sequence is synthesized)
acttgaattaggctggccaccacggctgtgtacagctaccccaggaagagcccctcccctcctcagcatttcagtggaaaacgtgctgactgggacccagctacaggaatcacatttggg

SEQ ID NO: 819568 - DNA, 120 bp, Artificial Sequence
  ENSG00000232044_155 (sequence is synthesized)
cagagagaatggcttatccttttcatgaggggtcttgactcaagaacacttgccaattctgcttgaccgtttcccattctttacggtttttcctatcactccttagactaagaaagaaaa

SEQ ID NO: 819569 - DNA, 120 bp, Artificial Sequence
  ENSG00000232044_156 (sequence is synthesized)
atctgtaggaatgattcggtgggatttctcttttgttcctaaataaaccttatccctggatgagctcgttcacactagggaagttactaccactggctttgaagccaggcagatctgggt

SEQ ID NO: 819570 - DNA, 120 bp, Artificial Sequence
  ENSG00000232044_157 (sequence is synthesized)
gttccttcccatgtctttatttgctttgtgggggatcttttcccagcctttctgctttcatccttcttagtgagagcttcttcagctgcagaacaggggcaataatgcctaccttgctgg

SEQ ID NO: 819571 - DNA, 120 bp, Artificial Sequence
  ENSG00000232044_158 (sequence is synthesized)
gttgcagcagagaatgctgcttatgcaggaaaataaaaaaacacatagcacacaatgggagcttaatacataagaattataaacagtcttttgtgtatatatcaatgtatttcatgtcct

SEQ ID NO: 819572 - DNA, 120 bp, Artificial Sequence
  ENSG00000232044_159 (sequence is synthesized)
taatgtttatttaaagcaagtacattcttttgaattaagcataaaaaggtcataaaatgccagagatgtgcttatttgaaatgtttgcaatgctttgcaattgttttaaaataaggagat

SEQ ID NO: 819573 - DNA, 120 bp, Artificial Sequence
  ENSG00000232044_160 (sequence is synthesized)
gatataacagggtgttacctccgccactaattagttacgtaatcttagattatgtcacttccctgggtctcagttgtaaacagttgcttaataaataatgtttgttttgctttcatcaat

SEQ ID NO: 819574 - DNA, 120 bp, Artificial Sequence
  ENSG00000232044_161 (sequence is synthesized)
tgtgtcactttacagatgaggcagagggtcccgcaactccttaagggtggaactaggattggaaaccactcctcctggctcctcttttcctgccaagagcgctgcaccagctctggagga

SEQ ID NO: 819575 - DNA, 120 bp, Artificial Sequence
  ENSG00000232044_162 (sequence is synthesized)
agcctcaggagaggttacacaagtctcagctgcctgtggtatttgagtggccatggaggatggaatttatgctgctggaataactagagccactgcccctcatctgcagagaagacacac

SEQ ID NO: 819576 - DNA, 120 bp, Artificial Sequence
  ENSG00000232044_163 (sequence is synthesized)
tatcttgcaattgcagaactcctgtgcctcgctttcgaaattggtcataagctggaggctgatgttatctttcctcacccttcagacccaagttccccaactcctctcaccgcccccaac

SEQ ID NO: 819577 - DNA, 120 bp, Artificial Sequence
  ENSG00000232044_164 (sequence is synthesized)
caccgctttaatgaccggtaaacaagcagctaaatgcaccatgcactgaggggctccagcgaggggaggaggtgactcttctgaagaagggctccacctgagttactgagtcagcgaaaa

SEQ ID NO: 819578 - DNA, 120 bp, Artificial Sequence
  ENSG00000232044_165 (sequence is synthesized)
ggcacctttatccaggcctagagcaaaacgcaatcagccttcacaggactggtttcccagccatgagcttgggggacagggctggctgcaacgggggctgccaagggcccaggttctgtg

SEQ ID NO: 819579 - DNA, 120 bp, Artificial Sequence
  ENSG00000232044_166 (sequence is synthesized)
ccacctccccgacattcctgccccaggcttctctcccaggctttccttcctggccctgccattctgcattccttaccaacctgctgtattcccactctcggctgccaggaagcctcctct

SEQ ID NO: 819580 - DNA, 120 bp, Artificial Sequence
  ENSG00000232044_167 (sequence is synthesized)
tcccccgagctttacagcgttcattatttaccttccagtttgcacagttatatcactggagtttaagcacactttctatgtgcagaacaaacattcgcacatgccacaacgtacagtggg

SEQ ID NO: 819581 - DNA, 120 bp, Artificial Sequence
  ENSG00000232044_168 (sequence is synthesized)
ctgttttgtgccacgtgatgtgctactgtatgcaaattaaagacgaagttaacattccctgttgctggcttttccaagtgtgtgggtatccattatagacttcaattctttgtaaatatt

SEQ ID NO: 819582 - DNA, 120 bp, Artificial Sequence
  ENSG00000232044_169 (sequence is synthesized)
tcaaaggaagaaactcaaagagatgatatgaaggttgtgaaattccccatcataaaatcagaaactgattaaacctggaacatgcaaagccaatattgatttcagcagcaaaaccaaaat

SEQ ID NO: 819583 - DNA, 120 bp, Artificial Sequence
  ENSG00000232044_170 (sequence is synthesized)
caggacaagcagacaatattttcataattaaaaaagaaaatgagctcatgtgaagagatgttatcatcactcgtaacttgaagatgcttttggatacactgcaataattcagctaacgtt

SEQ ID NO: 819584 - DNA, 120 bp, Artificial Sequence
  ENSG00000232044_171 (sequence is synthesized)
aacataaaaatgaaagaaatttttccacatctgtattattagcaaatgaattaggcaattaataatttgtttgctttaaaatgtcattttcataaacacaatttaagcattatatattta

SEQ ID NO: 819585 - DNA, 120 bp, Artificial Sequence
  ENSG00000232044_172 (sequence is synthesized)
tgacaatatctttcattttaaagttatttttacttagtgtttattgtatgttaattcgctctctttctgttccttttttattgtcaaaagtccatattatgtagagataatttttgctag

SEQ ID NO: 819586 - DNA, 120 bp, Artificial Sequence
  ENSG00000232044_173 (sequence is synthesized)
tttgctagctattgtaatatataatcttgttagaatatattcgtccataataacaaattatacatttatcatagtatgtgttttacaaaaaaatctcctttaatgtaaccctattacaga

SEQ ID NO: 819587 - DNA, 120 bp, Artificial Sequence
  ENSG00000232044_174 (sequence is synthesized)
aggctggagacttgcagtgcacactccaggcctgtggaaatggttccacctgggtccctctattgctcctcagctgccacattagggcacctcgcccaagtccacgtgtgggatgtgcct

SEQ ID NO: 819588 - DNA, 120 bp, Artificial Sequence
  ENSG00000232044_175 (sequence is synthesized)
gcctgtggcccacctaacgtatgcagtctgtctggagtgccaggcacaggctcctcacgtgggcttcagctggaattgaaaactgcatttctcaagaatcacattgcctttgcctcgtag

SEQ ID NO: 819589 - DNA, 120 bp, Artificial Sequence
  ENSG00000232046_0 (sequence is synthesized)
agatgaagctagccttctcagctagccttcagatttgtctgctaacagtaaaaatactataataaatcggtaacatatgttgccaggcaaggaaaagtgatataaataaagagactggga

SEQ ID NO: 819590 - DNA, 120 bp, Artificial Sequence
  ENSG00000232046_1 (sequence is synthesized)
gacccaaaccaaattgcattcttacccaaatactcttcgtgattgcctgctttgcggctttgggccgatgcaagctgcaaaatggcgagtcttctaaggtgcctttccttccctgggatc

SEQ ID NO: 819591 - DNA, 120 bp, Artificial Sequence
  ENSG00000232046_2 (sequence is synthesized)
ctcatcttagaatgagcagaggcacatcgataagaactggaccttgatttcacaacctcatacaaagccaggcaattcttgagccaaacaaagggggtgtaagctatttcatttattttg

SEQ ID NO: 819592 - DNA, 120 bp, Artificial Sequence
  ENSG00000232046_3 (sequence is synthesized)
ataatcctcctcttgcacgggagcattttgctgtctttgtcaaagtgaatgacaacaatttggccaactctctctgagctgcactcaacagtgacaggcaaattatcagaggccctgcac

SEQ ID NO: 819593 - DNA, 120 bp, Artificial Sequence
  ENSG00000232046_4 (sequence is synthesized)
ttcttattatcagaggagaagccatcagggggacgcatggaggatacctctcccttgtcactatttgtcagtgggacaagggccactgctatgggtagctgacaggtaatttcaacaata

SEQ ID NO: 819594 - DNA, 120 bp, Artificial Sequence
  ENSG00000232046_5 (sequence is synthesized)
acaattactcctattactggtgtcataaacaattcgcccaaggcatgacaatagcaaagctttataattcaatgccatataaataaatgccagcaggtaacaagtaatttagctccaatc

SEQ ID NO: 819595 - DNA, 120 bp, Artificial Sequence
  ENSG00000232046_6 (sequence is synthesized)
aagctttcaccccggcattaatattgttattgcaagaaaatggaaaattgaaaaaattcaatatgttaatgaattaagagaggttcaagggctagacaagacgagttggaaaaaggaaac

SEQ ID NO: 819596 - DNA, 120 bp, Artificial Sequence
  ENSG00000232046_7 (sequence is synthesized)
gaaaaatgtgacatgagctttcaaaaaatccacctaactccaatttctgaagaatataaggagaaatatgagagtgtatatatataatgtagcatttcactggctttctttttctacctg

SEQ ID NO: 819597 - DNA, 120 bp, Artificial Sequence
  ENSG00000232046_8 (sequence is synthesized)
aaatatttcatatgaagcagaagcatgagtatcaaagaaacgtttccatctgtttaagaaaattgtatcagcacctgcttcctttacattaagtctcataatgaaactattttaataatc

SEQ ID NO: 819598 - DNA, 120 bp, Artificial Sequence
  ENSG00000232046_9 (sequence is synthesized)
cttttttttttaatctggggtgaaggtaaagctgaaagtcatctttgctctccagctgtccaccttttggaagtggactagaggatacagtgttatcttcatacgtaaaacttcctgatc

SEQ ID NO: 819599 - DNA, 120 bp, Artificial Sequence
  ENSG00000232046_10 (sequence is synthesized)
aagccaatttgcaattttagtatttgtccagcaagacaatgtgccatcatggtgacagcagtaaaagaatttgaaaatctctaattaggagagctgcacaccaattaacgcatgtcaaat

SEQ ID NO: 819600 - DNA, 120 bp, Artificial Sequence
  ENSG00000232046_11 (sequence is synthesized)
ttcacttcatcaagtgccactctaattttccctctaaaaattaatggattttttttcttttggtatgtgtgtgtgtccccttaaggcaatgttgattcaaatctgctcgagatgcagtgt

SEQ ID NO: 819601 - DNA, 120 bp, Artificial Sequence
  ENSG00000232046_12 (sequence is synthesized)
tgcacagctaagcatcttcttgattacaatccgccacacttctaactgcgctcattcgcactgccacggatactttgtcaacagtcaaattacaccacgctgataacaatgcataatggt

SEQ ID NO: 819602 - DNA, 120 bp, Artificial Sequence
  ENSG00000232046_13 (sequence is synthesized)
gttcctcctccagtcccctgtcaggagaggggcttcataaaaatgtgatgttttcttctcaactgtatctaaaggaagtttgtatgaccaggtccccagtcaggtgttgatttttaaaat

SEQ ID NO: 819603 - DNA, 120 bp, Artificial Sequence
  ENSG00000232046_14 (sequence is synthesized)
cgctaggggagggaggtttacaagtgaagagtagttagggaatatggtgactctgaagaatcgagatcagcagtgtccaggaattagaaaaaataaactgctatttccgtgagttccccc

SEQ ID NO: 819604 - DNA, 120 bp, Artificial Sequence
  ENSG00000232046_15 (sequence is synthesized)
tctgtgagccatttaggtagtgctgtcctcagtctcttggggcatacttctttcccgatctggcacaaatgacccctcagggcttaaagacttgagaatgacagatgatcaagctctgga

SEQ ID NO: 819605 - DNA, 120 bp, Artificial Sequence
  ENSG00000232046_16 (sequence is synthesized)
ccaaattgcattcttacccaaatactcttcgtgattgcctgctttgcggctttgggatttctgaaccaacttacggatacatgaagaagtcagacaaggccgggtgcggtggctcacgcc

SEQ ID NO: 819606 - DNA, 120 bp, Artificial Sequence
  ENSG00000232046_17 (sequence is synthesized)
tgggaggccgagatggaggagggaggggaagagaactggcagaattatcactaggcactgcaaaaccttccattgaaatccacgtttaccatggtgacgtttgctagttacggcagagct

SEQ ID NO: 819607 - DNA, 120 bp, Artificial Sequence
  ENSG00000232046_18 (sequence is synthesized)
gatcaactgcagattttcctgctgctgaggctaaattgcaagctgctcataatgccatcagatgctgctgggtttccagccaatgagaactttgggaatactttcctccctccctgtttt

SEQ ID NO: 819608 - DNA, 120 bp, Artificial Sequence
  ENSG00000232046_19 (sequence is synthesized)
ccaccacagtagagcccccatgccaccatgcgtgcaaagtcagcacacactgctgtgtttgaacttgattgacctcacgcagcactttcttaaaataaatacaactcccatcaacttatg

SEQ ID NO: 819609 - DNA, 120 bp, Artificial Sequence
  ENSG00000232046_20 (sequence is synthesized)
ggttccaaatactcaagccagaaatcccagggccttcatttttgttttccctaacaggtatttatttttctaaatgaaatggtcaatatctaggagtatatattattcataagactgaag

SEQ ID NO: 819610 - DNA, 120 bp, Artificial Sequence
  ENSG00000232046_21 (sequence is synthesized)
ctattattcagcccatagctgcttcaatcatttctttaccaacaatggtgaaaagatgtgactttacaagcaaacaggaagaaaaagcttgaacacaccctgggaacgtgtttaagacgt

SEQ ID NO: 819611 - DNA, 120 bp, Artificial Sequence
  ENSG00000232046_22 (sequence is synthesized)
tgatttatgtttcgtgctgagtcttacacctgcagttcaagcaaaaccaacttggctgccccacagagtctggtttattaggtatcaaggagtcgcaagaagccatgtaattaaaaccgt

SEQ ID NO: 819612 - DNA, 120 bp, Artificial Sequence
  ENSG00000232046_23 (sequence is synthesized)
aattaactggaaaaggaaagtgccacctgagttttgagaggctgtcaattttatttccattacagctctccttctgtttctcttctcggacattttcttttactttgcttgatcagaaag

SEQ ID NO: 819613 - DNA, 120 bp, Artificial Sequence
  ENSG00000232046_24 (sequence is synthesized)
caatatatacatacacactatgtacatattcgctttgtaatgtatttaaacctgcatagtggctactgcttatggaaaaagtcacaagaattgttacctgcttcaggttttctagatcag

SEQ ID NO: 819614 - DNA, 120 bp, Artificial Sequence
  ENSG00000232046_25 (sequence is synthesized)
tttgatcagaggagaggagaaactgtatgaaatgtgacatccaatatggtagccaccagccccatgtggctatggagcattcgaactgtggtcagtcacaaggaagatgcgctgtaagtt

SEQ ID NO: 819615 - DNA, 120 bp, Artificial Sequence
  ENSG00000232046_26 (sequence is synthesized)
taaaataatgtcagatattgaagatgcagtacaaaacagaatgtaagaaacagctcagtgatactttttatattgattgcttgacaagtgatattattttgaatatattgggttgtgtaa

SEQ ID NO: 819616 - DNA, 120 bp, Artificial Sequence
  ENSG00000232046_27 (sequence is synthesized)
atgccttcaaaaagttggcctcattttctgaagctgaaatccttttgatcataattacttctgacctaaaattacccacagtcaccatacaatgccacgctgggacaaaaaagaaataca

SEQ ID NO: 819617 - DNA, 120 bp, Artificial Sequence
  ENSG00000232046_28 (sequence is synthesized)
agatttgtctgctaacagtaaaaatactataataaatcggtaacatatgttgccaggcaaggaaaagtgatataaataaagagactgggagacccaaaccaagtacaatattgcattctt

SEQ ID NO: 819618 - DNA, 120 bp, Artificial Sequence
  ENSG00000232046_29 (sequence is synthesized)
acccaaatactcttcgtgattgcctgctttgcggctttgggattcttcagggagtagagaacattcacacgggttgacatcccagttttctcagcatatttctgaaccaacttacggata

SEQ ID NO: 819619 - DNA, 120 bp, Artificial Sequence
  ENSG00000232046_30 (sequence is synthesized)
cgaggaaataaaattaggagaaatctgctaaattcatccaaaataatacaagagtttgggaatataaaaaaagtactacttctttaaatgctaatgaacaccagctttatcatttctaaa

SEQ ID NO: 819620 - DNA, 120 bp, Artificial Sequence
  ENSG00000232046_31 (sequence is synthesized)
gaagaggattttggtgttatttttcttctcccagtgaaaaatttactgctcctacctggcaaagggacatgggcttgagcctgatatttgagactgtataaatagctgatctggaaattt

SEQ ID NO: 819621 - DNA, 120 bp, Artificial Sequence
  ENSG00000287171_0 (sequence is synthesized)
aataatgcctcgcagaagtttatggggctgccctctttgagacacatggaagttgtgagctgccccatggagaggcctatatgacagagaactggtcaacagccaacaaagaatggaggg

SEQ ID NO: 819622 - DNA, 120 bp, Artificial Sequence
  ENSG00000287171_1 (sequence is synthesized)
cctccgtgcagcagcccatgaggatctgaatcccaccaatcaccttgcaagggagcttggaaaaggatccacctaggcttgacacgactgatgtcccggctgactacaggctcataagag

SEQ ID NO: 819623 - DNA, 120 bp, Artificial Sequence
  ENSG00000287171_2 (sequence is synthesized)
gtcccggctgactacaggctcataagagggctcagctaagcaatgccaaaattcctcacccacagaaactgtgagccttgtgaagaaggtgccttgcttccctttcaccttccaccatga

SEQ ID NO: 819624 - DNA, 120 bp, Artificial Sequence
  ENSG00000287171_3 (sequence is synthesized)
atgtgaaactctgcagttgtctgcaggtaactgaaactgcagacagagaaactgtggataaggcgactgctgtaatgcattcactatacttcatctctgaatgtgagcaactccagaaaa

SEQ ID NO: 819625 - DNA, 120 bp, Artificial Sequence
  ENSG00000287171_4 (sequence is synthesized)
ctacttggccagaaatggggttccactatgttgcccaagctttgaactcccagactgaagagatcctcctaccttcgcctcccaaaatgctgggattaagggcacaagccactgtgccct

SEQ ID NO: 819626 - DNA, 120 bp, Artificial Sequence
  ENSG00000287171_5 (sequence is synthesized)
gcctcctacaatattttgacagacatcaaatagctgcactctttctgaacaagcctgaatgtaacctcttattttcttctcaactatggtagttcaggtcactatactaattaatcagca

SEQ ID NO: 819627 - DNA, 120 bp, Artificial Sequence
  ENSG00000287171_6 (sequence is synthesized)
ttgttaccatttgtgacagactcaacagtatccagagtagagcaaattatcattgaaagcacttttgaaaaatggaattgggaactggtagtatttagcaaagaatgacagtatccaaca

SEQ ID NO: 819628 - DNA, 120 bp, Artificial Sequence
  ENSG00000287171_7 (sequence is synthesized)
gaacacgggagctctcttcaaatatttaaaggagtggtgtatggaagaggaagtagattcactatttgttacagctcttgaagtcaaaacaaagaagaaggcagagaattgcaggatctc

SEQ ID NO: 819629 - DNA, 120 bp, Artificial Sequence
  ENSG00000287171_8 (sequence is synthesized)
tgcttataatagaaaatgtcaattagtgaaataagtgctcttaaaatgctatagttactctcaacccctagaactatgcaaaagtggctgaggtattaatcattgagaagactttggtaa

SEQ ID NO: 819630 - DNA, 120 bp, Artificial Sequence
  ENSG00000287171_9 (sequence is synthesized)
cagtgaaataggtgaccaataaattagtacccagaggctaaattatgacattaaaacaccctcggattttcataaaaataattattttgccaccatttgtaccagattatgtctgattgt

SEQ ID NO: 819631 - DNA, 120 bp, Artificial Sequence
  ENSG00000287171_10 (sequence is synthesized)
attcaaatattttatgcaaatatttcagcacagcataattactgagtttgatttgtagacatgatttatatattcaaagaagactgtggacatctctcttgttgaaagctctttgggcaa

SEQ ID NO: 819632 - DNA, 120 bp, Artificial Sequence
  ENSG00000287171_11 (sequence is synthesized)
aaactaaagtggccttagactcaacgtgctctgcaatattatctgcattaattttgaatgtcacaaacaattagaagcattgttagagataaaagtatttatcatcatgtatgtcaatgt

SEQ ID NO: 819633 - DNA, 120 bp, Artificial Sequence
  ENSG00000287171_12 (sequence is synthesized)
attctcttaataagttaatagatggagatcatcattctagatttacttttatcttcattttgacatctgaggaattatggtaatgttatgtcagaaagtatgaataaatgcttggaaagt

SEQ ID NO: 819634 - DNA, 120 bp, Artificial Sequence
  ENSG00000287171_13 (sequence is synthesized)
gtcaaaattacacaggtgccattttgaaaggggtaacttcagaaaagtgcacttgtaatatccaggaattcatacggatagtgaatagaatgatagaagacaatgcaaagcacttcctca

SEQ ID NO: 819635 - DNA, 120 bp, Artificial Sequence
  ENSG00000287171_14 (sequence is synthesized)
cagatagccaagtgagaaacacataaagaatgatggagttgggaaatctttgtattgtaaccaccatattggcatcaaggccaactagatgacaaaattaatttgatgaacaagatatga

SEQ ID NO: 819636 - DNA, 120 bp, Artificial Sequence
  ENSG00000287171_15 (sequence is synthesized)
tatatacatagtctgaaatagcccattgatttcttatcaataccacatgtcttataaattgcaaaggtaaaattaataactttgtacggggatatccaagagacaccattttaaccaagt

SEQ ID NO: 819637 - DNA, 120 bp, Artificial Sequence
  ENSG00000287171_16 (sequence is synthesized)
atccagttatcaggaatcattaaaccagctcatatcgaaggatgttcaacaaaataactggcctgtcttcagatatatcagcttcatgaacaaacaagaaacagagaatgttccagactg

SEQ ID NO: 819638 - DNA, 120 bp, Artificial Sequence
  ENSG00000287171_17 (sequence is synthesized)
aaggaaagtaaagttaccagacaatgtgatgtcattcatgattgtgaattggatactggaccagaaaaaaatatagctaaaaaagacagtatagcaataatgaagaaattttcagtatca

SEQ ID NO: 819639 - DNA, 120 bp, Artificial Sequence
  ENSG00000287171_18 (sequence is synthesized)
ctgtgaattagatagtactgcgccaatgttatcaatgataccaatactatcaatgaattagatagtattgtaccaatgttaaatgtcttgattttgttaattgtatcaggttcgtgcagt

SEQ ID NO: 819640 - DNA, 120 bp, Artificial Sequence
  ENSG00000287171_19 (sequence is synthesized)
cagtttttatctttgggaaattcataccaaaatatttggtgttaggtgaatatgatatctacaacttaatttcaagtagttcagaaaagtatatgcatatatagatatacatatatagat

SEQ ID NO: 819641 - DNA, 120 bp, Artificial Sequence
  ENSG00000287171_20 (sequence is synthesized)
agaattgtgtgtgttatgtgtgtatttgtgtgcatgaaaacacttaggggagagaagacagatagatgataggtagataggtagctagagagagagagagacagacagatagacagacag

SEQ ID NO: 819642 - DNA, 120 bp, Artificial Sequence
  ENSG00000287171_21 (sequence is synthesized)
aaagacagacaggtcccttagacagatagatggacagacagacagacgggcagacggatggacagacagacagaaaaatagacggacagaaagaaagacagatagacagatagatggacg

SEQ ID NO: 819643 - DNA, 120 bp, Artificial Sequence
  ENSG00000287171_22 (sequence is synthesized)
gaggacgaaaagacatacagacagacagacagatggacagatagaaaaacagacagaaagatagacagaaaggtagacagactgaaaggtagacaggcagatagaaagacaggtaggtag

SEQ ID NO: 819644 - DNA, 120 bp, Artificial Sequence
  ENSG00000287171_23 (sequence is synthesized)
tagatagatagatagatagatagatagccagccagccagtcagacaaatagacagataggcagacagatagacagatagatagacagatagacagaaagatagttagacagacagatcca

SEQ ID NO: 819645 - DNA, 120 bp, Artificial Sequence
  ENSG00000287171_24 (sequence is synthesized)
cagatagacagaaagatagttagacagacagatccacagatagatagacaaacgatagccagccagcaagccagccagacagacaaatagagagacagacagatagatagacagagagac

SEQ ID NO: 819646 - DNA, 83 bp, Artificial Sequence
  ENSG00000287171_25 (sequence is synthesized)
agacaaatagagagacagacagatagatagacagagagacagatagacagatatagatagatagatagatacaaatagatgga

SEQ ID NO: 819647 - DNA, 70 bp, Artificial Sequence
  ENSG00000287171_26 (sequence is synthesized)
gatagatagatagatagacagtcagatagagcaaagcagttgggcgcactgaggtcgggagttcaagacc

SEQ ID NO: 819648 - DNA, 120 bp, Artificial Sequence
  ENSG00000287171_27 (sequence is synthesized)
aaaaacaaaacaaaacaaaacaaaaaaccacaataacatagatagagcaaagccactgtgggaaatttttaacatgtcctaaatctggttgaatgtttacagcaaattttatactgtact

SEQ ID NO: 819649 - DNA, 120 bp, Artificial Sequence
  ENSG00000287171_28 (sequence is synthesized)
atgtttacagcaaattttatactgtactttgatattttctgtgtgcttgaaaatatataaaataaaaatttataaaaataaaaagagaaccagaaacgaaagttggaataatcaaaaata

SEQ ID NO: 819650 - DNA, 120 bp, Artificial Sequence
  ENSG00000287171_29 (sequence is synthesized)
aatctaaacaatgatgcatctctgggtaatcagttgttttttttagctcattctgatgaaatttttggctgaattgacttcagcagtggatctcactttctgaaagatttgtgctgtcct

SEQ ID NO: 819651 - DNA, 120 bp, Artificial Sequence
  ENSG00000287171_30 (sequence is synthesized)
gttaggctatctgatacacaggactcagtttgtgggaaacagaaatgaagtacagtaacttatggtaaatatttaacaagaatacagctcagtaccctgcagcatgaactgcagggaaac

SEQ ID NO: 819652 - DNA, 120 bp, Artificial Sequence
  ENSG00000287171_31 (sequence is synthesized)
ttaccttaagcagaaccatacctaacaatatttaggtttcttaagctgtttgggattacaccacttgtgcctgcataatgtctaggatgccttcttaacagcaattgcaattttttttgc

SEQ ID NO: 819653 - DNA, 120 bp, Artificial Sequence
  ENSG00000287170_0 (sequence is synthesized)
gggcctcctccggggaatgctgggaaatggagtctacaggccggaggggtgccccacggcatactaggaagtgtgtagcaccgggtaaaggggatgaatagcagactgccccggggcagt

SEQ ID NO: 819654 - DNA, 120 bp, Artificial Sequence
  ENSG00000287170_1 (sequence is synthesized)
ggggcagttaggaattcgactggacagccgcgtgggagggagtgcggggagaggcagagttgttttgttattgttgttttattttgttttctttgttttgagacggagtctcgctctgtc

SEQ ID NO: 819655 - DNA, 86 bp, Artificial Sequence
  ENSG00000287170_2 (sequence is synthesized)
atatcggctcgggctcagtccccagagtagctgggataacaggcgcgcgccaccccgccctgctaatttttatatttttagtagag

SEQ ID NO: 819656 - DNA, 76 bp, Artificial Sequence
  ENSG00000287170_3 (sequence is synthesized)
gtaatcctgctgggatgacgagcgtaagccaccatgcccagctgggttttatttattttggtttttttcctgaccc

SEQ ID NO: 819657 - DNA, 120 bp, Artificial Sequence
  ENSG00000287170_4 (sequence is synthesized)
actacttgtcctcggttcttagaacagaacctgagagaacctgatcgcaaatatttttggaatgaatgaatgaatgggttcaccagggcaccatgggaaactgagtccgcaacctagaag

SEQ ID NO: 819658 - DNA, 120 bp, Artificial Sequence
  ENSG00000287170_5 (sequence is synthesized)
ccatgaaagacagtccacttccaagcttccctgggtgacctcgcagggcatgctgggaaatgaaatttgcggtgaaaaggacagaagagtcaattttatacttttgtggatgttctaact

SEQ ID NO: 819659 - DNA, 120 bp, Artificial Sequence
  ENSG00000287170_6 (sequence is synthesized)
tcacctgcttatctgaaccatctttatggtgcagactaatatctatttttctgctgttacagaagaagtgggaacattttcttcttatctttctgaggttatttacaccagtgaggaggg

SEQ ID NO: 819660 - DNA, 120 bp, Artificial Sequence
  ENSG00000287170_7 (sequence is synthesized)
cctgcagttccaaggttaagcaccaacattccactgttaccattgagagcaaagagcagaccctagaagtgaaaacaaaacctttaccacaggaagacaagagcaaaagatgatgttctt

SEQ ID NO: 819661 - DNA, 120 bp, Artificial Sequence
  ENSG00000287170_8 (sequence is synthesized)
agagagcaaggggaagagggagtggaggaagacggaacctgaaggaggcggcagggaaggatctgggccagccgtagaggtgacccaggccacaagctgcagacagaaagcggcacaggc

SEQ ID NO: 819662 - DNA, 120 bp, Artificial Sequence
  ENSG00000287170_9 (sequence is synthesized)
catctcatcaactccaggaggcagagactaagagactagccccagtcacagagctagaaattggccaagacaaggttcaatctgaggactgtcaaatccagaactggaatttcttttttt

SEQ ID NO: 819663 - DNA, 120 bp, Artificial Sequence
  ENSG00000287170_10 (sequence is synthesized)
aggcatgagccactgcacctggccttagaagcctcagttcctgatggcagttgggatctgcctttccttccctggactgcctacctcttgtcttttaggttacatatgagaaaacaaacc

SEQ ID NO: 819664 - DNA, 120 bp, Artificial Sequence
  ENSG00000287170_11 (sequence is synthesized)
aacaaacctccaattcaccaaaactattgttatttggggagctgtctcttactatcagccaaacataactcctcaatgacactgttagtttagcactgccattataatcaggagggatct

SEQ ID NO: 819665 - DNA, 120 bp, Artificial Sequence
  ENSG00000287170_12 (sequence is synthesized)
gggtccagctgcgggaacatgaagaggcactagtgggatgaccacagccagcccctgttgattcaccaggagactgcagatgcatgagcaagtccagccaagatcagccagacaagaact

SEQ ID NO: 819666 - DNA, 61 bp, Artificial Sequence
  ENSG00000287170_13 (sequence is synthesized)
gccaagatcagccagacaagaactcccagcggagcccagcccaatttgccaactctcaaac

SEQ ID NO: 819667 - DNA, 72 bp, Artificial Sequence
  ENSG00000287170_14 (sequence is synthesized)
aaaccataagttaaatagatgactgttgactcaagccactaatatttggggtaacttttttcttttttcttt

SEQ ID NO: 819668 - DNA, 88 bp, Artificial Sequence
  ENSG00000287170_15 (sequence is synthesized)
cagccctcaaaccataagttaaatagatgactgttgactcaagccactaatatttggggtaaagaccaagtcccactctgtcatccag

SEQ ID NO: 819669 - DNA, 90 bp, Artificial Sequence
  ENSG00000287170_16 (sequence is synthesized)
cctcagcctcctaagtaactggactttttgtgtgttttcagtagagatggggtttcactatgctgaccaggctggtcttgaactcctggc

SEQ ID NO: 819670 - DNA, 80 bp, Artificial Sequence
  ENSG00000287170_17 (sequence is synthesized)
ggtgagccactgcgcccacctggggtaactttttatgccacaaaagcaaactgatgcaaggcattccaagaggcctttga

SEQ ID NO: 819671 - DNA, 120 bp, Artificial Sequence
  ENSG00000287170_18 (sequence is synthesized)
caaaagcaaactgatgcaaggcattccaagaggcctttgagcctcttgcaagtcaagctgattgcaagacactctgcctttgataaaatgtagtggacagagaagcagtggtttcagtgg

SEQ ID NO: 819672 - DNA, 120 bp, Artificial Sequence
  ENSG00000287170_19 (sequence is synthesized)
cagagatgacaaattgttgcccaatattcgttgtccccttctttctcaacaaaatggaacctctgattatgctgggtttagcatagccatctagaataatggttacatatcccagtgtcg

SEQ ID NO: 819673 - DNA, 120 bp, Artificial Sequence
  ENSG00000287170_20 (sequence is synthesized)
caagctaagccatcatatcccctgtgggcctgcacatatacatgaagatggcctgaagcaactgaagatccaaaaaagaagcgaaaatagtcttacctgatgacattctaccattgtgat

SEQ ID NO: 819674 - DNA, 120 bp, Artificial Sequence
  ENSG00000287170_21 (sequence is synthesized)
taccattgtgatttgttcccgccccaccctaactgatacgatatattctgcctggtccttaagaaggtactttgtaatattctcccccgcctttaagaaggtactttgtaatattctccc

SEQ ID NO: 819675 - DNA, 85 bp, Artificial Sequence
  ENSG00000287170_22 (sequence is synthesized)
tctcccccgcctttaagaaggtactttgtaatattctccctgcccttgagaatgtactttgtacgccctttgctgactctgtttt

SEQ ID NO: 819676 - DNA, 120 bp, Artificial Sequence
  ENSG00000287173_0 (sequence is synthesized)
gcaggccagcgtggaggtccccctttctccttatagctcagagatggaggaacttgtcatgtcaaaacacagaatcgcctcaacccaacctctttacccgtactttctgctcctgtggat

SEQ ID NO: 819677 - DNA, 120 bp, Artificial Sequence
  ENSG00000287173_1 (sequence is synthesized)
ggctcagcttcttctaagtgagctgtttcttccacttcgctgcaggccttagttcacagtgtcctggtgggctactgatgatggccaggatggacttatggaatatgaatatgtaattgt

SEQ ID NO: 819678 - DNA, 120 bp, Artificial Sequence
  ENSG00000287173_2 (sequence is synthesized)
atttcaattttaaacatgagtaaaagctcaaagaagtagacagtagaatggtggcctccagggcctggggtggggaaggaggatttcggttcgacaggaagaataagttctagagatctg

SEQ ID NO: 819679 - DNA, 120 bp, Artificial Sequence
  ENSG00000287173_3 (sequence is synthesized)
ttgatctgttgatcacagggttgtgcaacactgtgactatagttaataatatattgtattcttgaaaattcctaagaaagtggtgttatcaccataataagtaaagcttatgttaattca

SEQ ID NO: 819680 - DNA, 120 bp, Artificial Sequence
  ENSG00000287173_4 (sequence is synthesized)
ttcaattcagccattccacaatgtatacatatttttaaatattatgttgtacacaacaaatatgtacaattttatggcaattaaaagtaaataaatcagaaaaaagaataacaaattaaa

SEQ ID NO: 819681 - DNA, 120 bp, Artificial Sequence
  ENSG00000287173_5 (sequence is synthesized)
agcaaatgagactgtttccctggcaacttagaaaatgatgtctatatcaaccagtaaatcacttgtaactcaaaaaatgggaaaaaagtccaaagaatcacagattgagaaggctcacag

SEQ ID NO: 819682 - DNA, 120 bp, Artificial Sequence
  ENSG00000287173_6 (sequence is synthesized)
aaatgaggtttgcctgggcacagccccagcgagtgggggtcctggcaccacatgctaagccttccccatgcccagtctttcactctgcactgaagctgcctgggtctgccttccctcagc

SEQ ID NO: 819683 - DNA, 120 bp, Artificial Sequence
  ENSG00000287173_7 (sequence is synthesized)
acctacaggaaatccccatagcccccatgctgggcaccaagagtgggcagcatatagcaacagtccatcagctgtcaatcaggttctcaaatacatctgggcacctactggaaaggatct

SEQ ID NO: 819684 - DNA, 120 bp, Artificial Sequence
  ENSG00000287173_8 (sequence is synthesized)
gaatcatccttttatccagcatctccatgttgtagacgctccctgctggtggtccctgacattgtctgctcctggcacccagccacaaacatgctcacggtgcaaagatccaggatcatc

SEQ ID NO: 819685 - DNA, 120 bp, Artificial Sequence
  ENSG00000287173_9 (sequence is synthesized)
tgaggcagataattctccatccaataacttgtcagaaggtcaatggcaggctaacgctgcatctcaatgcctacatcacgtaccccaacttcctctacatcgcacaacagcacaagaaaa

SEQ ID NO: 819686 - DNA, 120 bp, Artificial Sequence
  ENSG00000287173_10 (sequence is synthesized)
agggcagggaatgtgggatcctggtagctgcatgaatgtggaagagagaggagacgtctgcggtgaggactgattgtgtggaattaggatcactgagtggaggctacagagaaactgctg

SEQ ID NO: 819687 - DNA, 120 bp, Artificial Sequence
  ENSG00000287173_11 (sequence is synthesized)
aacacgaagagcattccaaggacatcactgcctgtgggcggcatcatcagcttagataagtggtaggcccccggcactgcaagtattggagggtaagctgcctaggcacatgaagcaaag

SEQ ID NO: 819688 - DNA, 120 bp, Artificial Sequence
  ENSG00000287173_12 (sequence is synthesized)
gccatgaagtgatatttctcaatctttgcttttaacacaactagtgttctctatgatcatactagttgtttcacagaacatgttcgataggacattaaagtttagaaatattagtttaaa

SEQ ID NO: 819689 - DNA, 81 bp, Artificial Sequence
  ENSG00000287175_0 (sequence is synthesized)
agagttttttattgatcattcagtgattctgaagggaagacagttctactctcactgccagtgacagcacagcccaggaga

SEQ ID NO: 819690 - DNA, 120 bp, Artificial Sequence
  ENSG00000287175_1 (sequence is synthesized)
agttctactctcactgccagtgacagcacagcccaggagagcaagggcaggctcctctccaggtgtggctgctctccatggcctgggtcatagtctggagatgactgaagagttagtctt

SEQ ID NO: 819691 - DNA, 120 bp, Artificial Sequence
  ENSG00000287175_2 (sequence is synthesized)
ggggctgttgcttgtgagaactggagaggtgtgtgtcattatctgaatcggccaggcccacgccagggtgaactgggcttacaggaaatgcagtcacagaacattcgaggatcctgaatg

SEQ ID NO: 819692 - DNA, 120 bp, Artificial Sequence
  ENSG00000287175_3 (sequence is synthesized)
tggatgatccagaagtagttcaatccacagggctggagtgtagtggcgtgatctcgactccctgaaaccaactactctgttttttgaattcttgcttcttcacgtcagtgcagtgcgaga

SEQ ID NO: 819693 - DNA, 120 bp, Artificial Sequence
  ENSG00000287175_4 (sequence is synthesized)
tgcatggtgaaaggcacacctgtgaatcccaagaagctggatgttatctgtacccttttcccactggcatctggaagaacctaagttaaggaaagatgtttgctgcactctcttgttttt

SEQ ID NO: 819694 - DNA, 120 bp, Artificial Sequence
  ENSG00000287175_5 (sequence is synthesized)
ttatgtttatgatgctaacccatgctagtcactattgctttgagctatggtctgagtgtctacgtccccttcaaaattcttatgttgaaatcctaacccccaaggtgatcgtattaggag

SEQ ID NO: 819695 - DNA, 120 bp, Artificial Sequence
  ENSG00000287175_6 (sequence is synthesized)
gtggggcctttggaaggtgaggaggacttgagggtggagtgctcatgaatggaataagtgccctcctaaaacattggtcgggggacatcctcaccctttccaccatataaggacacagtg

SEQ ID NO: 819696 - DNA, 120 bp, Artificial Sequence
  ENSG00000287175_7 (sequence is synthesized)
agaaggagccatctatgagccagaaattcagccctcaccacacagaacctgccagtgtcttcatcgtggactccttagcctctggaactgggataaataaatttctgctgcctatcagct

SEQ ID NO: 819697 - DNA, 120 bp, Artificial Sequence
  ENSG00000287174_0 (sequence is synthesized)
agttttgttttctgttacaacagagcagcactgagttaaatgcctcacagttgctgcaacatccctctccctaacgcacagaaatgctctgcacatcatgctacctctgctgggggatgg

SEQ ID NO: 819698 - DNA, 120 bp, Artificial Sequence
  ENSG00000287174_1 (sequence is synthesized)
gagaagagcagcatcggtgatacaagactgaatttactacctcttccgtggctttttcagcaataagaagttaaaactagatggaaaaatgcttcccccaggagacacaataataactta

SEQ ID NO: 819699 - DNA, 120 bp, Artificial Sequence
  ENSG00000287174_2 (sequence is synthesized)
ttcgaccaggaaggtaagactggccactctgaatcaacgagcaaagaaaggagttgctgtgctgactggggtgattgtccctgactactaaaggaaaaattggacagctatgatggctac

SEQ ID NO: 819700 - DNA, 120 bp, Artificial Sequence
  ENSG00000287174_3 (sequence is synthesized)
tctacaatggagagtcattgtgatttaaggagatgtgtatgagtgccaagttgacaagacaaagcatgaacttatgatggttaatttacatgtcgttttgacaggacactgcataaccag

SEQ ID NO: 819701 - DNA, 120 bp, Artificial Sequence
  ENSG00000287174_4 (sequence is synthesized)
agatttttctcccaaatgtgggtgggcagtgtccaattctttgagagcctgaatagaagaaaaaggcagaggaaggggaaatctgttctctctgcctgatcacgtgagctgggacattag

SEQ ID NO: 819702 - DNA, 120 bp, Artificial Sequence
  ENSG00000287174_5 (sequence is synthesized)
tcttctcctgtcccggcatgaggcttgtaccaacagccctcttgttctcaaaagtacaccactggctttcctgggtcttgagtttacagatggaacattctgggaccagttagccataat

SEQ ID NO: 819703 - DNA, 120 bp, Artificial Sequence
  ENSG00000287174_6 (sequence is synthesized)
ttcatcagccaattccttgcaaaaaattatatgcttatatagtttccttggttttgtttctatggaaaaccctgacagacaataaccatgttcctaagaaatagccagtgaaatattata

SEQ ID NO: 819704 - DNA, 120 bp, Artificial Sequence
  ENSG00000287174_7 (sequence is synthesized)
gcataaagagatatactactatatgcactgtattctcaaatagtccagaaaaaaatgtgaacatacaaacatatgtagatatgcacacacatgtgtatatatgatatacatttgtgatat

SEQ ID NO: 819705 - DNA, 86 bp, Artificial Sequence
  ENSG00000287177_0 (sequence is synthesized)
ttgcttggtaaattttcctccatctcattattttgagcctctttgtgtcctcgatgggtcttgaatctttatacaatttgccagtc

SEQ ID NO: 819706 - DNA, 86 bp, Artificial Sequence
  ENSG00000287177_1 (sequence is synthesized)
gtgagatgggtctcctgaatacagcacatcgatgggtcttgaatctttatacaattccattcacatttaagattattattgttatg

SEQ ID NO: 819707 - DNA, 75 bp, Artificial Sequence
  ENSG00000287177_2 (sequence is synthesized)
ttgttatgtgtgaatttgatcctgtcatcatgatactatccatttattttgcacaaattctgggttgagttgctt

SEQ ID NO: 819708 - DNA, 120 bp, Artificial Sequence
  ENSG00000287177_3 (sequence is synthesized)
cttccctttgtaggtatcctggtctttctctctggctgcatttaacatttatttcttcattttgaccttggaaaatctgacaattatgtgtcttggggttgatcttctcatggactatct

SEQ ID NO: 819709 - DNA, 120 bp, Artificial Sequence
  ENSG00000287177_4 (sequence is synthesized)
aatttgaatgttggcctgtcttgctaagttgcggaatttttcctggataatatcttgaagtgtgttttccagcttggttccattctctctgtctttttcaggtactccaatcaatcatag

SEQ ID NO: 819710 - DNA, 120 bp, Artificial Sequence
  ENSG00000287177_5 (sequence is synthesized)
ttcaggtactccaatcaatcataggttcagtctttttacatagtcccatatttttcagatgttttgttcattccttttcattctttttttctgtaatcttatcagcatgcctttttttca

SEQ ID NO: 819711 - DNA, 120 bp, Artificial Sequence
  ENSG00000287177_6 (sequence is synthesized)
gcaagaggatcttcaaaatctgacatcctttcttctgcttggttgattcacctattgatacttgtgtatgcttaacgaagttcacgtgctatgtttttcagctccgttcggtcatttatg

SEQ ID NO: 819712 - DNA, 120 bp, Artificial Sequence
  ENSG00000287177_7 (sequence is synthesized)
ttcacgtgctatgtttttcagctccgttcggtcatttatgttcctctccagcctggttattctagttagccgcgcctgtaaccttttatcaggattcttagcttctttgcattgggttag

SEQ ID NO: 819713 - DNA, 120 bp, Artificial Sequence
  ENSG00000287177_8 (sequence is synthesized)
tttctgaagcctacttctgccaattcatccatctcatcctctgtccagtgctgcatccttgccggagaggcattgcaatcatttggaagagtagaggcactctggctttttgggttttca

SEQ ID NO: 819714 - DNA, 120 bp, Artificial Sequence
  ENSG00000287177_9 (sequence is synthesized)
gcatttttttgttgattctttctcatcttcatgaatttctctagcatcgatctttgagactgctgacccttggatggggtttttgtggggacttttttcgttgatgctgttgttgctttc

SEQ ID NO: 819715 - DNA, 120 bp, Artificial Sequence
  ENSG00000287177_10 (sequence is synthesized)
tgtttatttttctttcaatgctcaggaccctctgttgtagggctgctgtggtttgctggggggttcacttcaggccctattcatctggtttgctccagcacctggagagatcactccagg

SEQ ID NO: 819716 - DNA, 120 bp, Artificial Sequence
  ENSG00000287177_11 (sequence is synthesized)
agtctggagaacagcaaagatgggtgcctgcttcttcctctgggttctctgacctcaagaggcaccgacctgatgccagtagaaatgctcctgtatggagtgtctgaaaacccctgttgg

SEQ ID NO: 819717 - DNA, 120 bp, Artificial Sequence
  ENSG00000287177_12 (sequence is synthesized)
tctcacccagttgggtggcacagggagcaggacccatttaataaagtactttgactgtcccttggtggagggggtgtgcttcactggggggaaacccccttgtctgggctgcctggattt

SEQ ID NO: 819718 - DNA, 120 bp, Artificial Sequence
  ENSG00000287177_13 (sequence is synthesized)
atttctcagaatcagcaggaggaaacacttaccctgctggtctgctgagactgcaaccactcctcccccaggggctcaggcccagggagatcaaagttctgtctctgagcccctggctgg

SEQ ID NO: 819719 - DNA, 120 bp, Artificial Sequence
  ENSG00000287177_14 (sequence is synthesized)
agttgttgaagttcctgcaaggccccacccagtgaggacagatgggttaaggtcaggcctgaagaggcactctgtccacagtctgcctcagctggtgtgttgggctgtgggggatacctc

SEQ ID NO: 819720 - DNA, 120 bp, Artificial Sequence
  ENSG00000287177_15 (sequence is synthesized)
tgggaccaggccatccagcttcctactccagcagaggaaaagtgtggcctggagctatagagatggctgctgcccttccactaccctgggagcttagtgtgttaggagactgtcagtccc

SEQ ID NO: 819721 - DNA, 120 bp, Artificial Sequence
  ENSG00000287177_16 (sequence is synthesized)
agtgttggctgttttccctccctcaaggagatcaaatggcttagacagcaggtagccgcagctgtggtgctggtcggggcaggctcaagcagattctagcttagtggctgttgagaattg

SEQ ID NO: 819722 - DNA, 120 bp, Artificial Sequence
  ENSG00000287177_17 (sequence is synthesized)
gcgtggctctgtggttgggactctcagtccccgtgtcgtgggttcatgagtgggatctttcaatctgcaggttgcacagttctgtggaaaaagcacgttttcccaggctgggtcgcacac

SEQ ID NO: 819723 - DNA, 120 bp, Artificial Sequence
  ENSG00000287177_18 (sequence is synthesized)
tcttccttccactccgtggggcatgccagctgcctagtcagttgtgatgacagaacccggatgccctgtttgccagtgcaggattcgcacacgttatggttcttttccatggagcctctg

SEQ ID NO: 819724 - DNA, 120 bp, Artificial Sequence
  ENSG00000287177_19 (sequence is synthesized)
atcacgctgcttctagttggccatcttggccccacccccggtattctcatattagaagagcgcttaatatagttcgtagcacaaggagaaaatcatgttaatcttcacagatactacaaa

SEQ ID NO: 819725 - DNA, 120 bp, Artificial Sequence
  ENSG00000287177_20 (sequence is synthesized)
agcacttgttaaaatttaacaataaatcttgatttaaaaatgtcttcaataaaataagaataagattttttttatatatgacaaaactggcccatctatatctcagtgtgtatgcatatg

SEQ ID NO: 819726 - DNA, 120 bp, Artificial Sequence
  ENSG00000287177_21 (sequence is synthesized)
tttgctccaaaacctggcatcatgcttagcgggaaaaagactagaaatagtccttctaaagttctgttaaactcaggaacaaaaccaatgtgccctctaatgtgttataaaagatactag

SEQ ID NO: 819727 - DNA, 120 bp, Artificial Sequence
  ENSG00000287177_22 (sequence is synthesized)
ccaattatattacagtgtaattatacaagagaaaggaataatcaatatcaaaatacgaatagtgaagacaaaaaaatcttctatttacagatgataatattgggggttttctcgtttgtt

SEQ ID NO: 819728 - DNA, 120 bp, Artificial Sequence
  ENSG00000287177_23 (sequence is synthesized)
ttttagaggggttcttgctatgttgcccagggtggtctcaaactccttagctcaaatgatcctcctgcctcagctttcccagcagctgggtgcacctaccctgcacggctcagaggagta

SEQ ID NO: 819729 - DNA, 120 bp, Artificial Sequence
  ENSG00000287177_24 (sequence is synthesized)
tattttttaaatgaaaaaatataaaatgatcaactcaacaacttctataaaacaagaggattcagtaagtacactgatggaaaaatcagtgtgcagaaattgatatctttcatatataca

SEQ ID NO: 819730 - DNA, 120 bp, Artificial Sequence
  ENSG00000287177_25 (sequence is synthesized)
aataacaaccagtgagaagatgtaatgggaaagatttaaaatcactttaaataacatcaacaagaaattcctagggataaaatttaaggatctgatatcaaactgctacagaaaaaaata

SEQ ID NO: 819731 - DNA, 120 bp, Artificial Sequence
  ENSG00000287177_26 (sequence is synthesized)
ctacagcacccttaaaggacacagaataagacttgaacaaatggaaaggcatcttttgtttgaataggtagattcaaaataataaagttaattcttaaattactttataatttaatgtgg

SEQ ID NO: 819732 - DNA, 120 bp, Artificial Sequence
  ENSG00000287177_27 (sequence is synthesized)
tctccataatactttgagaccttttattctggaattacacaaagttattattctaaaatacagaagaatatctaggagaactcaatattaaagcatattctaaaagccatgtaaattaaa

SEQ ID NO: 819733 - DNA, 120 bp, Artificial Sequence
  ENSG00000287177_28 (sequence is synthesized)
acaatgatgtactggtaaatgaatacacaaccttctaattttgcaaagtagaaagttcttaaatagatctacatgtatttgtgaatttagaatgtaaagacatcatcttacatttgcaag

SEQ ID NO: 819734 - DNA, 120 bp, Artificial Sequence
  ENSG00000287177_29 (sequence is synthesized)
ataaagataagctttttagtaaatgccatggtaaacaaataaatataaatggctcataaatacatatgaacctcagtcataataagagaaatgcaaattaatgctaaatcaaaatatttc

SEQ ID NO: 819735 - DNA, 120 bp, Artificial Sequence
  ENSG00000287177_30 (sequence is synthesized)
tcaccttccaaaattgataaaacatcaaaagtgtgacaacaacacactttgttggtgagactttaacaatgatcaaaattccaaagaaaaatatctccctttgacaaaatgcttttatgt

SEQ ID NO: 819736 - DNA, 120 bp, Artificial Sequence
  ENSG00000287177_31 (sequence is synthesized)
ttctgagtatctatacccatatctatatcggtacacttataaaatgtccccacttataaaatgtccacaattgttcatttaactcttttcttttgcagtaacaaaaaactgcaagtaatt

SEQ ID NO: 819737 - DNA, 120 bp, Artificial Sequence
  ENSG00000287177_32 (sequence is synthesized)
ctagctttcctctataggagattgattaaataaactgtgaaatgcccgcaaaatatagtactgtataattacttaaaataaatacttcggagggtctctaagtgctgatatgaatcattt

SEQ ID NO: 819738 - DNA, 120 bp, Artificial Sequence
  ENSG00000287177_33 (sequence is synthesized)
taagtgaaaagcaagatgctggcctgtggaattatcaaaattcacatctacatctatatgtattgatatatgtatacaggaaacctttatatgtgcaataaaaaataagactacaaactc

SEQ ID NO: 819739 - DNA, 120 bp, Artificial Sequence
  ENSG00000287177_34 (sequence is synthesized)
atatatacttttatttctagacaataatatacaagaaatttctctaagaggagagaaaggagagagatcatggcagatgggacagagacctcatacagatttgttgaattgcaacattat

SEQ ID NO: 819740 - DNA, 120 bp, Artificial Sequence
  ENSG00000287177_35 (sequence is synthesized)
gggaggtgcaagtcacatttttggaagaacaagtcacattatgttggaatatatttctacaagttattaggtattatttttatttaagagttctaaaacataaactattttttcaaatca

SEQ ID NO: 819741 - DNA, 120 bp, Artificial Sequence
  ENSG00000287176_0 (sequence is synthesized)
ttgccttcttaagactgcaaagggaatttgccagctctgtaggacagaaaatagcctgcaaatcaatggaagaaacctctcctcatagtcagatactttggaatcgtcggccagtcctcc

SEQ ID NO: 819742 - DNA, 120 bp, Artificial Sequence
  ENSG00000287176_1 (sequence is synthesized)
gaaggcactgaaaagcatccctcctcaggaagatgtgtattggtccctaatgatcatcttgcactccagactccatctcagaatcttcctccagagaactcaacctgtgaaaccattata

SEQ ID NO: 819743 - DNA, 120 bp, Artificial Sequence
  ENSG00000287176_2 (sequence is synthesized)
gaagatgtttatccactcgactgtagaagggcatctgggctgccctcaattattggcttttttcagtagagctactgcaaacattctagtaaatttctttgggatatatatttaggagta

SEQ ID NO: 819744 - DNA, 120 bp, Artificial Sequence
  ENSG00000287176_3 (sequence is synthesized)
ggattgttggataacagcatttgtttgcttaagtttagtaaacacatttttataaaaggctataccaatttactaccaatgtacaaaaaatttagttacacaactcttcattcaatcttt

SEQ ID NO: 819745 - DNA, 120 bp, Artificial Sequence
  ENSG00000287176_4 (sequence is synthesized)
gttggttgagacagagagagcatagggaaaaaagacaaaaacctttgtattttagtgtgctatattttagctttgttggtgagtgtgtagtggtatcttgctgtggttttaattaacatt

SEQ ID NO: 819746 - DNA, 120 bp, Artificial Sequence
  ENSG00000287176_5 (sequence is synthesized)
tctctgatgactaatgtaattcagcaaaattcaaatgtttgttggatatttggacactcgtatatcttttttttgcatgaagtggctgcttgaagtcttttgctagttttaattgagctg

SEQ ID NO: 819747 - DNA, 120 bp, Artificial Sequence
  ENSG00000287176_6 (sequence is synthesized)
tctttttctttttgattttgtagtctttcatttttctgaatgtatttctcttttcaaatatgcatattgtaaatgccttcttttaatatgtgatttactttgacattcacataatggtaa

SEQ ID NO: 819748 - DNA, 120 bp, Artificial Sequence
  ENSG00000287176_7 (sequence is synthesized)
atattgttctgttttctactaaaagtgttattgtttagccttctacatactgtgaggcacttttcaaatactattattttcctgcatagaagtccatttgatccagcatctcttggtgaa

SEQ ID NO: 819749 - DNA, 120 bp, Artificial Sequence
  ENSG00000287176_8 (sequence is synthesized)
aattccatttgttacccactgttcaaatgggggtaacaaatttgtcatggagaaattcatcatgaagaaattcctcatgtctgtgtctctttgtaacatgcctgactggcttattgtcta

SEQ ID NO: 819750 - DNA, 120 bp, Artificial Sequence
  ENSG00000287176_9 (sequence is synthesized)
actggcttattgtctaatacttctgctgtagttttatatgttaatatccaattatgctagtgctccagcttttaaaatttttatttttaacatttgtgggtacatagtaggtgtatatat

SEQ ID NO: 819751 - DNA, 120 bp, Artificial Sequence
  ENSG00000287176_10 (sequence is synthesized)
atatttgatactggcatgcaatgcctaataatcacagcagagtgaatggggtttccatcacatcatgcatttatatttccttgtgttaaaaaaatccaattacactctttttgttattat

SEQ ID NO: 819752 - DNA, 120 bp, Artificial Sequence
  ENSG00000287176_11 (sequence is synthesized)
aaaaaatccaattacactctttttgttattataaaatgtgtgataaactattgttgactgtagtcaccaggttatgctattaaatactagaatttattcattctatctaactatattttt

SEQ ID NO: 819753 - DNA, 120 bp, Artificial Sequence
  ENSG00000287176_12 (sequence is synthesized)
cactacacttcctagcctctggtaatcaacattctactctccatctccattagtccaagtgttttaatgtttttcagctactacaaattagtgagaacatgcaaagattgtctttctgtg

SEQ ID NO: 819754 - DNA, 120 bp, Artificial Sequence
  ENSG00000287176_13 (sequence is synthesized)
cctggcttatttcacttaacctccagtttcatccatattactgcaaatgacagaatctcaaaacacctccagtttcacacgttattgcaaatgacagaattgtattctttttttatgtct

SEQ ID NO: 819755 - DNA, 120 bp, Artificial Sequence
  ENSG00000287176_14 (sequence is synthesized)
ttgcaaatgacagaattgtattctttttttatgtctaaatagtgctccataaggtatacctaccatattttctttatccgtttgtctgttattggacacttaggttgcttccaaatcttg

SEQ ID NO: 819756 - DNA, 120 bp, Artificial Sequence
  ENSG00000287179_0 (sequence is synthesized)
gtactccagtaaagatcactggaatagattattggattcattacactcgagtaaaggcctgggaaactgacagaattacctctgtcgatccagaagagcacccaaagcaccagtgtgaag

SEQ ID NO: 819757 - DNA, 120 bp, Artificial Sequence
  ENSG00000287179_1 (sequence is synthesized)
aaatcggagaccgtaagctaaaaatcacaaaatatgctggtgcccaatgcggaagccactttcagcatgctgggtccagctgcaggctgaacacgaagccacggcggtatgggatccagg

SEQ ID NO: 819758 - DNA, 120 bp, Artificial Sequence
  ENSG00000287179_2 (sequence is synthesized)
ccagtagcccaagccaagcgcaacctgctggactgagtgggcagagcaagcccagcaagcctgaattaagccccaggcagagggcacagaggccacggagacttcaggctggcaaagcag

SEQ ID NO: 819759 - DNA, 120 bp, Artificial Sequence
  ENSG00000287179_3 (sequence is synthesized)
gggagaaaaaacgtcgctgggcactattccctcccactcactgaacaacaaaagctgcaacataaccatatcagtggtgatatctttttgcattggcccttttgtcgctatgaattttcc

SEQ ID NO: 819760 - DNA, 120 bp, Artificial Sequence
  ENSG00000287179_4 (sequence is synthesized)
gtctttaattctataaatgctttatctgctaaagtctactttatcttatattactgtagttttaccagaattcttttgaataaggtttgcatggcgtctctttgtccttgcttttatttt

SEQ ID NO: 819761 - DNA, 120 bp, Artificial Sequence
  ENSG00000287179_5 (sequence is synthesized)
caacctttaggtagctttatatttaaagcatattccatggaaaaagcatttgctagactgtttttatttttaatctagagggaaaacgttagtattttatttgtagtatttattttatgt

SEQ ID NO: 819762 - DNA, 120 bp, Artificial Sequence
  ENSG00000287179_6 (sequence is synthesized)
ataccttatataattattaatatagatgatttacacttattatcttactatttgattttatttggaccttgtgatttatgccacctttccctttcttttttgccttcattttaattaatc

SEQ ID NO: 819763 - DNA, 120 bp, Artificial Sequence
  ENSG00000287178_0 (sequence is synthesized)
gctgggactataagcatacaccaccacacccagtcaagagagttctgtcatacaaagattagaggttcaccaaaaacggctactacatcttattgttttctaaacctgacttcttcatat

SEQ ID NO: 819764 - DNA, 120 bp, Artificial Sequence
  ENSG00000287178_1 (sequence is synthesized)
atagcattcgtgaacattccctttggagacaaaagtaaaatctggagccataaaaagcaaacaagttctgatgaaaaacaaatgaagaactaagatgtctgtaaataagataatgaagat

SEQ ID NO: 819765 - DNA, 120 bp, Artificial Sequence
  ENSG00000287178_2 (sequence is synthesized)
aatgaaagggagaggctggagtaagagaaccgtgcacctaagaggagggaatagatgattttggcaagcaaagaggaaaatgtggcaccgttattttctaaatgcaagggtccgatgaac

SEQ ID NO: 819766 - DNA, 120 bp, Artificial Sequence
  ENSG00000287178_3 (sequence is synthesized)
aggccagaagaagttcactaacctccctctacgctttcagtctgcttccacctgttaaacataggaaaatagtcaacagaagcattctgcaccaggggaacatgggccagaggtcagagc

SEQ ID NO: 819767 - DNA, 120 bp, Artificial Sequence
  ENSG00000287178_4 (sequence is synthesized)
tcacttgaacgcttttgaagaaaaagtactgctattgagtcatgattcagcaggggctgtcattaatggcagaccaaacagccaggtgccacagtttgccactggcttccagcctcctca

SEQ ID NO: 819768 - DNA, 120 bp, Artificial Sequence
  ENSG00000287178_5 (sequence is synthesized)
tccagctgccaggaagtggaaagggtagtagagagggatggctcactggagtagagccaagaggagtaagaggctgacaggcacctttctgctgtgaagagccaggctacagctgggccc

SEQ ID NO: 819769 - DNA, 120 bp, Artificial Sequence
  ENSG00000287178_6 (sequence is synthesized)
atcaaacagctccatggagtacctacattgtaataagaaaaagcaggaaagaattgaccaggcaaggtttttttggaacctgaaacacatttttcaaggtggcacaaacagtggagcctc

SEQ ID NO: 819770 - DNA, 120 bp, Artificial Sequence
  ENSG00000287178_7 (sequence is synthesized)
tgaaagaataacatggcacgtcaagcattctgatcacttaactttattattggcttttgaaaaggaaaccaactactaagcatgcaagctgaaaattaaaataatagagatgatgaaata

SEQ ID NO: 819771 - DNA, 120 bp, Artificial Sequence
  ENSG00000224970_0 (sequence is synthesized)
gagagtcgaggtcagtggtccatacgtccactgggtgtgcttccgcttctgcatcaggtgctgaaacatctaagggaaagtgaagatgactcaggagcagcacaaaagacaaacaagaag

SEQ ID NO: 819772 - DNA, 120 bp, Artificial Sequence
  ENSG00000224970_1 (sequence is synthesized)
ctttacaagtaggctaagtgtgccttgcagcggatcggctttctgggagaagtaaaatggaaagagcaattgatctgtaataaagacagctgcattctaaccccagctgaccagaaatca

SEQ ID NO: 819773 - DNA, 120 bp, Artificial Sequence
  ENSG00000254166_0 (sequence is synthesized)
atagtaggtgctcaatatgtgcttgttgaataaatgtgtcaatgtttgatgtacagaccttttattatgtttgatttgctgccagtgctgcctccaaacacaggagtgcttcatgagatg

SEQ ID NO: 819774 - DNA, 120 bp, Artificial Sequence
  ENSG00000254166_1 (sequence is synthesized)
ttcacaaaagctcttaaaatattccacaaaaatcttaaaatatttcatgagttttctttcctgtatttttatagcagcatctggaatttagcctgcataggaccctctgtaagctgaccc

SEQ ID NO: 819775 - DNA, 120 bp, Artificial Sequence
  ENSG00000254166_2 (sequence is synthesized)
tgtttatctattcagctttacttctcccctctctccactttgtattttattctctactacttccaactgattgtaatttgaccagactccagactatcttatgcctctttgcttttgttt

SEQ ID NO: 819776 - DNA, 120 bp, Artificial Sequence
  ENSG00000254166_3 (sequence is synthesized)
acctgttacttctctctggaattccctgccccttcttaatttttctggccaattctcactctctaggactcagaggtttctcctcaggagacttccatgagtctcatgttgagttaggtg

SEQ ID NO: 819777 - DNA, 120 bp, Artificial Sequence
  ENSG00000254166_4 (sequence is synthesized)
ctagagaagggctcaacagtgagtgctgaggctgcacagaggaggaaggcagcacaatgatggaaggcttcctaaagagataacactaacaaagttgaccttagaattggagtgcctggg

SEQ ID NO: 819778 - DNA, 120 bp, Artificial Sequence
  ENSG00000254166_5 (sequence is synthesized)
ttagaaccctgctggtaccacctgcttactgcatgcttctgatgtgagttcaggagaagacactggcaaggacagcaaagaacaggagaacactctagcttccctgatagcattcaaggt

SEQ ID NO: 819779 - DNA, 78 bp, Artificial Sequence
  ENSG00000254166_6 (sequence is synthesized)
actgcacatgcgatgacctgtcaccgtctcccatcacccctagatgggagtgtctagttgcaggaaacaagctcaggg

SEQ ID NO: 819780 - DNA, 120 bp, Artificial Sequence
  ENSG00000254166_7 (sequence is synthesized)
agggcttccactgattctacattatggctgtggcttgccttttcacttcttgtgtcctgtttaagaaatatctgctatcccaagataacactaacaaagttgaccttagaattggagtgc

SEQ ID NO: 819781 - DNA, 120 bp, Artificial Sequence
  ENSG00000254166_8 (sequence is synthesized)
ccaaagctcttgagtttctgctttcaagtgaccctcagaaattcctccattcactgcagaggttctgtttctccttgctttgttctgactttacggcagaactaagctaatgagttagtt

SEQ ID NO: 819782 - DNA, 120 bp, Artificial Sequence
  ENSG00000254166_9 (sequence is synthesized)
actatgggttatcacttggatttgaagaaccatcatttctaggcattgctgctcagagtgggtctgccctcaggggaagctgtctaaccagagcctaacccactagggttttatcagaac

SEQ ID NO: 819783 - DNA, 120 bp, Artificial Sequence
  ENSG00000254166_10 (sequence is synthesized)
ctaactgacctgaggaaaagaaatactcaactccagcaagctccagccttccaaatggaggaggagaaaacccaactccagcccacttcagctatcttgtcccacataaaggggaagtgg

SEQ ID NO: 819784 - DNA, 120 bp, Artificial Sequence
  ENSG00000254166_11 (sequence is synthesized)
aagaaacctgagaagcaggcatgaagttcacagtccagaggtacagacacatcagagttcagtatctgatgaattagatgcaaaaacctcaacaaagtattagcaaattgaattcaacaa

SEQ ID NO: 819785 - DNA, 120 bp, Artificial Sequence
  ENSG00000254166_12 (sequence is synthesized)
ggggtcgtataggtgaaacaactcactcaatatcacaagctgttatgtggtgaagtttgcatgatcagtacagggttctggtcatcccactcattgagtggtgctagtcaagatctggaa

SEQ ID NO: 819786 - DNA, 120 bp, Artificial Sequence
  ENSG00000254166_13 (sequence is synthesized)
gctcttctggtcttagtttctctagccgtgaagtgacaatgattaggtctaatcatagaacatgagagtacatgtgaaaaaatgcctttttaaagagtatgaaaaacttgagttgtaaaa

SEQ ID NO: 819787 - DNA, 120 bp, Artificial Sequence
  ENSG00000254166_14 (sequence is synthesized)
agcagactcaagaaaaaaaaccacattatcatatcagtagatgtagaaaaaaaaaattaacaaaatccagcacccattcacaatgaaaatgcccagtaaattagaaatagaaggtaactt

SEQ ID NO: 819788 - DNA, 120 bp, Artificial Sequence
  ENSG00000254166_15 (sequence is synthesized)
cctcaaattgataaggaatatctctaaaaacctacaactaaaatcatacttaatggtagaaaactagaagccttcccagtaagagtaagaacaagtcaaagatgtatgctctcaccaatg

SEQ ID NO: 819789 - DNA, 120 bp, Artificial Sequence
  ENSG00000254166_16 (sequence is synthesized)
cttttcaacatcatattggaagtcctagctagtgcaataagcaaaaaaaaaaaaaaagttatattaataagaacaaaaactgtgtttgtttgcagatgacatgattttctatgcaaaaaa

SEQ ID NO: 819790 - DNA, 120 bp, Artificial Sequence
  ENSG00000254166_17 (sequence is synthesized)
aataaagagaaatgtgatgttcagtgatccattttgcaggcatgcttctgatgtgagttcaggagaagacactggcaaggacagcaaagaacaggagaacactctagcttccctgatagc

SEQ ID NO: 819791 - DNA, 120 bp, Artificial Sequence
  ENSG00000254166_18 (sequence is synthesized)
attcaaggtgctgtccaaagtgagttttcctcaagcagagagatgcactgcctcttttatgctttgtttttcttacttgcctactctatttacaccttctaagtaaggaccaatcagcaa

SEQ ID NO: 819792 - DNA, 120 bp, Artificial Sequence
  ENSG00000254166_19 (sequence is synthesized)
aaccccaagagggtcactgtcatgaaaataattatgaactggctgagtgcttgcaatgtttattatttaggtttttaagaacagataattaaaggcccaagagaatttagtctctcccaa

SEQ ID NO: 819793 - DNA, 120 bp, Artificial Sequence
  ENSG00000254166_20 (sequence is synthesized)
ttgtaaaagtggggtcttatagaaacccacagagcgcttggggttgtacacttacttctaaaagttctcttaataaatcactgccctggtgcactccctggggtatttcatgaccaagtg

SEQ ID NO: 819794 - DNA, 120 bp, Artificial Sequence
  ENSG00000254166_21 (sequence is synthesized)
tttcttgcatgtgctttgttaccaatgtaccaagtccttatacatttggactgcatttaccgcagtttggaatggtttctcagaaatgggacattaaaatcctggagtgtgacactgaca

SEQ ID NO: 819795 - DNA, 120 bp, Artificial Sequence
  ENSG00000254166_22 (sequence is synthesized)
cgtggaaagagcttcctttgtaagctgctcaggcatgctgagaattagtgtagaaatgattttttccttaattttcttggatagcaacctatgtaggatcttataattatgtgtaggaat

SEQ ID NO: 819796 - DNA, 120 bp, Artificial Sequence
  ENSG00000254166_23 (sequence is synthesized)
tcattaaagaaactctctccattgctagaaatccaagctggtagtgaggagagagctgtgtgatttgttgcagcagaagtattatggaaatatttactaaatatcttccatgtgctgggc

SEQ ID NO: 819797 - DNA, 120 bp, Artificial Sequence
  ENSG00000254166_24 (sequence is synthesized)
attgagtgaaacactttcatatcccttgtaacatgtgtcttagtctaaggtaatactttaatgtaattgtaacaaatggataaaaggggaattgtcgtcattttacagatgaaacattag

SEQ ID NO: 819798 - DNA, 120 bp, Artificial Sequence
  ENSG00000254166_25 (sequence is synthesized)
agactgtaggaaactaggcccagaacagttaaacagagtagacataacctcttaccactttatctgctactatgtaacaaatcaccctaaaatttagtgtcttaaaacaacaaaaacaaa

SEQ ID NO: 819799 - DNA, 120 bp, Artificial Sequence
  ENSG00000254166_26 (sequence is synthesized)
ctgtacattgggaaaggtgccgagacatgaactttggtcttctctgcaatccatctggagcattcactgacaacatcgactttgaagttgcactgacctggccagccctgccacttacca

SEQ ID NO: 819800 - DNA, 120 bp, Artificial Sequence
  ENSG00000254166_27 (sequence is synthesized)
ttattaatggctctcctactaggagcctgacatcatggtgagcatcgagaaaggaataacctaagctgaagacacgccttttcaggaggccaagttccacgttctgtgcatgcttttggc

SEQ ID NO: 819801 - DNA, 120 bp, Artificial Sequence
  ENSG00000254166_28 (sequence is synthesized)
gtgcgatcttcagagggcctaattccttgcaagttccatttgagggtggaagagctagaacaagctataaccagtagacaactccgtgactcaggagcttaagcatgtgactaattagta

SEQ ID NO: 819802 - DNA, 120 bp, Artificial Sequence
  ENSG00000254166_29 (sequence is synthesized)
ctccagacagacagcgatgccacatgttcaagatggcagaatcactatcagcttcaattcctgaatgactgcagagcaaaatttcttacctgcaacatacactctattttcagcctccct

SEQ ID NO: 819803 - DNA, 120 bp, Artificial Sequence
  ENSG00000254166_30 (sequence is synthesized)
ggactgttacataatgatacataaaaatatttcttgtgttgaggcatcccaaatttgatttatttgtcatcacagtctatcctatgaatatatttctgatccaaataatgctagattcat

SEQ ID NO: 819804 - DNA, 120 bp, Artificial Sequence
  ENSG00000254166_31 (sequence is synthesized)
ataatgctagattcatgagagtttatagtccagagattttttttttttttttgagacagaatctgtctcccaggctggggtgcagtggcataatcttagctcactgcaacctctgcctcc

SEQ ID NO: 819805 - DNA, 120 bp, Artificial Sequence
  ENSG00000254166_32 (sequence is synthesized)
gaccacaggtgtgcaccaccacaccccgctaattattttgtattttttgcagaggggggtttcaccacattgcccaagctggtctcaaactcctagacttaagggatctgcctgccttgg

SEQ ID NO: 819806 - DNA, 120 bp, Artificial Sequence
  ENSG00000254166_33 (sequence is synthesized)
tagtccggagatattttaaaaactttagtgtgagttatttctctttgctataattctctcatgcattttgaaaaccttttctgccatacagtggtttttgggaagtccttttggacagac

SEQ ID NO: 819807 - DNA, 120 bp, Artificial Sequence
  ENSG00000254166_34 (sequence is synthesized)
atatcacaggatggagaaactaaaaagagagaatgcattaaagaaaaaatagtacttcgtatttcagaaattacaaaagggtgtcatgccccacagcatggtgggcagtcatttgtaacc

SEQ ID NO: 819808 - DNA, 120 bp, Artificial Sequence
  ENSG00000254166_35 (sequence is synthesized)
cacagaacattgagtttctaaaatttgagtgtttttaacttacgaaggccaactttactgatgaagtgattaccccaaatatgtgaaatccatatttcaagtacaatagtaggaaattgg

SEQ ID NO: 819809 - DNA, 120 bp, Artificial Sequence
  ENSG00000254166_36 (sequence is synthesized)
caagattgcaaactcctagagaagggctcaacagtgagtgctgaggctgcacagaggaggaaggcagcacaatgatggaaggcttcctaaagagataacactaacaaagttgaccttaga

SEQ ID NO: 819810 - DNA, 120 bp, Artificial Sequence
  ENSG00000254166_37 (sequence is synthesized)
ggtaactacatgcatgtaatgatgagaatatttatatgtatttatgattatcacaaaaaaacaaagattctaccattcaagaggaacatttattttatttttttatttgagaaaagtata

SEQ ID NO: 819811 - DNA, 120 bp, Artificial Sequence
  ENSG00000254166_38 (sequence is synthesized)
attttatttatttatttatttgtgcaaatttatggggtacttgagaaaatgtgttacatgtatataatgtgtagtgatccaatcaggatactaagggtgtccatcacctgagtgtattac

SEQ ID NO: 819812 - DNA, 120 bp, Artificial Sequence
  ENSG00000254166_39 (sequence is synthesized)
atttttgttaagtataatcatcctactccaggagaacattttaaaaactgttctgtagagatactactcaaattaagttctcagtcctgaaacatcagatcagctaggaatctgacaaaa

SEQ ID NO: 819813 - DNA, 120 bp, Artificial Sequence
  ENSG00000254166_40 (sequence is synthesized)
atgcaagttctcagatgacagatgagaccacttcaatcagaatttctggagtggagcccacacatttgtatttttgcaacctttccaatgatacttatgtacatgctcaagcttgaaaac

SEQ ID NO: 819814 - DNA, 120 bp, Artificial Sequence
  ENSG00000254166_41 (sequence is synthesized)
cactttcctaggacattagttcctcgacaagatttgtgagtaaccttgtttcatgaaaaagtgtttaggagatactgattcaataaaaactaatcaggcttttattgtttgcagggcttt

SEQ ID NO: 819815 - DNA, 120 bp, Artificial Sequence
  ENSG00000254166_42 (sequence is synthesized)
caaaacttgcaataggccactgtgcattgttaatttctaagaggaagatgcttatgtcctcaatgaatatcttcccaccatgaagtactcttcttcccccactttttaaaacaattacta

SEQ ID NO: 819816 - DNA, 120 bp, Artificial Sequence
  ENSG00000254166_43 (sequence is synthesized)
acacctggcagaagtaggcagacagcttacagcttagaaaaagttggcctaagataatggctaattttcatacattatttatttgtcatcatgcttatctttctctctctaaattgtata

SEQ ID NO: 819817 - DNA, 120 bp, Artificial Sequence
  ENSG00000254166_44 (sequence is synthesized)
tttcatctctgtgatcacagattgagcctcatatttcatatctgcccctggcctaatggttgtttacagaatgagctcaatgaatattgttaaataacactaacaaagttgaccttagaa

SEQ ID NO: 819818 - DNA, 120 bp, Artificial Sequence
  ENSG00000254166_45 (sequence is synthesized)
tttggagtcagactgcttgaacttgaatcctggccctctcatcagagacttgacttattttaggctgtggcttgccttttcacttcttgtgtcctgtttaagaaatatctgctatcccaa

SEQ ID NO: 819819 - DNA, 120 bp, Artificial Sequence
  ENSG00000254166_46 (sequence is synthesized)
gaggtcatctcctgaatcaattaaaaaaaaaaccaacagtgacaacaaaactaaaaaatatgaagaagctgaaacatgaaagctctgccaactgcaatatgtagctgctaaggttgctgt

SEQ ID NO: 819820 - DNA, 120 bp, Artificial Sequence
  ENSG00000254166_47 (sequence is synthesized)
aagtgaactggtggttaaaaagagcctggcacctgcccccctcccttttgcttcctctctcaccatgtggtcagttcacaccagcctttccttgccttgtactgtgagtggaagcagcct

SEQ ID NO: 819821 - DNA, 120 bp, Artificial Sequence
  ENSG00000254166_48 (sequence is synthesized)
gagggtgtcatcagaagcagatgttggtaccaggcttcttatagtttgtagaactgtgaaccaaagaaacctcgtttctttataaattattcagcttcaggtattcttttctcacaacac

SEQ ID NO: 819822 - DNA, 120 bp, Artificial Sequence
  ENSG00000254166_49 (sequence is synthesized)
aaaatgatccaggacagtacctaaaagcttcaatttgccatttgattctttctatgagatgactagattttttgggaggacaggtctatctatctggaaagaagccgtttggaatggaag

SEQ ID NO: 819823 - DNA, 120 bp, Artificial Sequence
  ENSG00000254166_50 (sequence is synthesized)
cagtatgaaacaagcataattttcttggtttaagccaaccttattataagcccctgaatcttacaactttattacatttctgcaaatatccagaagcttatgtatttattattctttcag

SEQ ID NO: 819824 - DNA, 120 bp, Artificial Sequence
  ENSG00000254166_51 (sequence is synthesized)
gaagttgcactgacctggccagccctgccacttaccaggttggattctagtgaacttgatgagtcaagactattgcaattggaaatctgttctcctctgctgctgcattccctgcttaat

SEQ ID NO: 819825 - DNA, 120 bp, Artificial Sequence
  ENSG00000254166_52 (sequence is synthesized)
gacagcttgcttcttcagtgaatgaataaattaataaagagaaatgtgatgttcagtgatccattttgcagcatttattaaatactggtgcataatgatggaataaattttataccgtaa

SEQ ID NO: 819826 - DNA, 120 bp, Artificial Sequence
  ENSG00000254166_53 (sequence is synthesized)
cacatccttatgcgcaaacactaagaaacacacgcatacacaaacatacatgtacacaaaattaaatacatagctatggcactttcactatacatgtaaacacccttacacacatacaaa

SEQ ID NO: 819827 - DNA, 120 bp, Artificial Sequence
  ENSG00000254166_54 (sequence is synthesized)
tgtacatgcgcgtgtgcgcacacacatatggaattagctttttctctttgtgggaggagggaaatgaaaagacccaaaacattcagattcccaaatggacacgtaagaaccccgtcatgg

SEQ ID NO: 819828 - DNA, 120 bp, Artificial Sequence
  ENSG00000254166_55 (sequence is synthesized)
aaataggtctgggtttttttctcttttgagggaagcagggcgtttctggttactgtcgccattgccattgtgcccctgcttaccatccccctgcaccgcccccccggcccccgcccgcca

SEQ ID NO: 819829 - DNA, 120 bp, Artificial Sequence
  ENSG00000254166_56 (sequence is synthesized)
ctgctagggtttacaggtcatccctggattaaataagtgatattgtgtttttttttctttgacacaaagtaaaattataattaatattgaataaagtaaaaatgaactcctgagttccag

SEQ ID NO: 819830 - DNA, 120 bp, Artificial Sequence
  ENSG00000254166_57 (sequence is synthesized)
tcccttatgtaacacacctggtttgtggcaggcactcaggaaatattagttgcatgaacgaaggctgcattttcattagaacaacatgcagttcaaccccttcatgtttcaatgagggtt

SEQ ID NO: 819831 - DNA, 120 bp, Artificial Sequence
  ENSG00000254166_58 (sequence is synthesized)
ccacaccatttcatattccatcgcattccattctacacaattccacatctccccggccacatcagcctgagagtaataaacagaccttgccatcgtatccccttttggagacacaagcca

SEQ ID NO: 819832 - DNA, 120 bp, Artificial Sequence
  ENSG00000254166_59 (sequence is synthesized)
ggaaggaagctcttcagtgcagctgtgaatagagaaatgctggctgaggttttggagacactgggtgatcattcccagtgaaatttttagatccctggggacatgagctgctttgtcttt

SEQ ID NO: 819833 - DNA, 120 bp, Artificial Sequence
  ENSG00000254166_60 (sequence is synthesized)
tccaaggacagcagacagagcatgaatgagacccccaaagaagggaagcaaatgagacaagccccacaattattctggctttttgcctagagacaatctatgaactgtggggcaaacaac

SEQ ID NO: 819834 - DNA, 120 bp, Artificial Sequence
  ENSG00000254166_61 (sequence is synthesized)
agagatcaaaacagcttggcaatctgagttgaggatgaagacaccattggggcagaagcagcgatagctcaaatttgtggagcaaagtaccggagaagataaactgctccaaattccaag

SEQ ID NO: 819835 - DNA, 120 bp, Artificial Sequence
  ENSG00000254166_62 (sequence is synthesized)
aggctgggcaaagaaaaactttgtggaaagaagaattatcagggaactctaagctgaaaaattgccagggctcacacagacctggggaattggttgagtttatgccacctacaggataga

SEQ ID NO: 819836 - DNA, 120 bp, Artificial Sequence
  ENSG00000254166_63 (sequence is synthesized)
gaacttgctgaatgttcaaggattttgttacagatgcaagatgacacttaaagggatgcaaaactaacatctctggattagtcttaataaagtttaaaaataagcttagaaaaagtcaaa

SEQ ID NO: 819837 - DNA, 120 bp, Artificial Sequence
  ENSG00000254166_64 (sequence is synthesized)
ttcacaagtcacacaatattccaatcaaatacagatggttgagaaaagtcatccatcttccctccccaccctcccacagcccctcaaccactgccctgaaacttatatgctgttatccgc

SEQ ID NO: 819838 - DNA, 120 bp, Artificial Sequence
  ENSG00000254166_65 (sequence is synthesized)
agctccatctggagcatcacagctactgtcaaccctgacgctctttctgaaaaaacaccggatggacatcagaactatttctttaaggatgttactgagccacacaggaaaacttgcctt

SEQ ID NO: 819839 - DNA, 120 bp, Artificial Sequence
  ENSG00000254166_66 (sequence is synthesized)
atgattttgaatgcacggatctgatttgactaaacatgataactagagaatcacccaatctactcccattttcaactctaaatcatcagagtgtctcaaatccaaagcacacacagacca

SEQ ID NO: 819840 - DNA, 120 bp, Artificial Sequence
  ENSG00000254166_67 (sequence is synthesized)
gcctggccaacacggtgaaactccacccctactaaaagtataaaaattatccaggtgtggtggcgggcgcctgtaatccaagctacttgggagtctggaggcaggagaatcccttgaacc

SEQ ID NO: 819841 - DNA, 120 bp, Artificial Sequence
  ENSG00000254166_68 (sequence is synthesized)
actctagcctgggccacaaatcaacaacaacaacaacaacaaaaaacaaagcgcacacagagactgaggtcctctttggcattgagaagatggctatgcaagtcccaactagcaagtgca

SEQ ID NO: 819842 - DNA, 120 bp, Artificial Sequence
  ENSG00000254166_69 (sequence is synthesized)
aacttcccagcttcacttctgccagtgtcccttcaccccttctcaaccccactgggaggcaggagggtgcttgacaataacagccttggcatcactctgccagggtgtaataggaactgt

SEQ ID NO: 819843 - DNA, 120 bp, Artificial Sequence
  ENSG00000254166_70 (sequence is synthesized)
atgaatcaagggagatccttggatgtctgatggctgctattctgtttctcaaacaatttgaattcagcaagccgtcactgaagatatggagtcacacagtcaagtttaaatccatgctat

SEQ ID NO: 819844 - DNA, 120 bp, Artificial Sequence
  ENSG00000254166_71 (sequence is synthesized)
gctatttaaaacttgcatgatcttgtgctaattaatcaatttttgcttcagtttccgaaacggtaaggggcacggggataatacagtctgcttaccgtatgggtgaagatgtgggggaag

SEQ ID NO: 819845 - DNA, 120 bp, Artificial Sequence
  ENSG00000254166_72 (sequence is synthesized)
attaaatacattgttcttacatgaaatgtaaacagaaagctcctccacagtaagctgtcagctaaagctagtttactttccactgctcttcaataacggaaagagtaatttttcattact

SEQ ID NO: 819846 - DNA, 120 bp, Artificial Sequence
  ENSG00000254166_73 (sequence is synthesized)
tagaaacactatcacctacgcatacctctgcttcttttcattaacctgctatcctctttacaaatgggattcttcacccactcccttcttctagattagcaatgccctgttaagtaaacg

SEQ ID NO: 819847 - DNA, 120 bp, Artificial Sequence
  ENSG00000254166_74 (sequence is synthesized)
aacacgaaattcaaagggaaacaggagcaatcatcattaccagctgccgtgttaagcattgcgaaaacgctcacgattcacagaaaaatccatgctgttctttgaaggcattcaagcctt

SEQ ID NO: 819848 - DNA, 120 bp, Artificial Sequence
  ENSG00000254166_75 (sequence is synthesized)
ttctcctctcttttttaactgcatgctcctatttatctttcaaagcccggaaaaaataacactgcacacgggaaatgctcccttcctactgcagtcatttagatgactctatgccattcc

SEQ ID NO: 819849 - DNA, 120 bp, Artificial Sequence
  ENSG00000254166_76 (sequence is synthesized)
attcatttctctttcctaccacagaagtgctttgagattttggagtcagactgcttgaacttgaatcctggccctctcatcagagacttgacttattttaggcaagttatataaccaatt

SEQ ID NO: 819850 - DNA, 120 bp, Artificial Sequence
  ENSG00000254166_77 (sequence is synthesized)
ttacctcagttccttacccataaaatgggtctaatgagagtacctaccacacagaattttgatgaaaactgaatgagatgaaggcctttaaggcagtggtccccaaccctggggacacag

SEQ ID NO: 819851 - DNA, 76 bp, Artificial Sequence
  ENSG00000254166_78 (sequence is synthesized)
tgggtgagtgagatcagcgttatttacagctgctccccattgctcaccttactgcctgagctccacctcctgtcag

SEQ ID NO: 819852 - DNA, 120 bp, Artificial Sequence
  ENSG00000254166_79 (sequence is synthesized)
taataatagaaacacagtgcacaacaaatgtaatgtgcttgaatcatccccaaaccatcccagtccacggtcttccacattttgtcttttcacaaaattgtcttccacaaaactggtccc

SEQ ID NO: 819853 - DNA, 120 bp, Artificial Sequence
  ENSG00000254166_80 (sequence is synthesized)
tggtgccaaaaaggcttgggaccactgctttaaagcctttgcatagtgcttagaattgagggggaaaaaaaaaacaaaaacaatgtagctagttgctacaatcactatattggtgagttt

SEQ ID NO: 819854 - DNA, 120 bp, Artificial Sequence
  ENSG00000254166_81 (sequence is synthesized)
caaaaggaaaagaattctgtcccatttatgcttgagccttgagttgctaaccaagcctgacacaaaattactgttgaagggatgtgtgagtcctaattgaaatgaggcctcttaagggaa

SEQ ID NO: 819855 - DNA, 120 bp, Artificial Sequence
  ENSG00000254166_82 (sequence is synthesized)
ttgtggaccaaaccccaagcaggcagaaagccgtatcttaattattgcaagtatttcaggcaaggtgtggatggccatttgaattcaagcagactaggacctgggatgagaaagaaggtg

SEQ ID NO: 819856 - DNA, 120 bp, Artificial Sequence
  ENSG00000254166_83 (sequence is synthesized)
tgtacgtgacttgatctttgaactttagctcaccatctggaagaaggctgagtattctctgcactcacatagtagctaatgcctactccccagccacccacaattctttctgtaggaagg

SEQ ID NO: 819857 - DNA, 120 bp, Artificial Sequence
  ENSG00000254166_84 (sequence is synthesized)
ctcgctagaatactttgtgatattggatattagttccatattctactgtgtatcttagttcaaccaaattgtaatcatctgatatttatttcttttaatataaatataagtatattaagt

SEQ ID NO: 819858 - DNA, 120 bp, Artificial Sequence
  ENSG00000254166_85 (sequence is synthesized)
atttaacagttggggtcccttggccaccaggtgctggagtaggaatctgagcccggacatgcctgatctgtaaattttgtgttttccccactgtgctgggcagatcacagctatcagcgc

SEQ ID NO: 819859 - DNA, 120 bp, Artificial Sequence
  ENSG00000254166_86 (sequence is synthesized)
caaattcatagaaggggcgccccctgtggtcaattgagggatttgtgtttgaggtagatctcaagaaggaatgggtggggaacttagcctaggacagagcagaaaggagccctcactccc

SEQ ID NO: 819860 - DNA, 120 bp, Artificial Sequence
  ENSG00000254166_87 (sequence is synthesized)
caagcaccaacggcctcagtccttcctgctgactccagcctctagctctcacccagactatctgcatccttctctccaccacgctcctttggaacctgcgtaaaacacagattaaaggaa

SEQ ID NO: 819861 - DNA, 120 bp, Artificial Sequence
  ENSG00000254166_88 (sequence is synthesized)
ttccgccttacttccctttccgcattatgaccaaatggttttacactatcattgaacagtttagtacaaaacatgccaccttttaatctattcattcatttaacaaatactttggagtgt

SEQ ID NO: 819862 - DNA, 120 bp, Artificial Sequence
  ENSG00000254166_89 (sequence is synthesized)
ttaccatgtgccaagtgctgttctaatagacataagctgtgaggttatgcttatctgattctcacagcaacagctttcgagatatgaattggtatactcatttgacagatgaggaaattg

SEQ ID NO: 819863 - DNA, 120 bp, Artificial Sequence
  ENSG00000254166_90 (sequence is synthesized)
aattcatgtagtgagaaaggaagagctgcaattcagggttactggtttctcctgcactaagcactgagccacactagaagagaaggcatgaggaagacaaaagtgagaaggtacgagaga

SEQ ID NO: 819864 - DNA, 120 bp, Artificial Sequence
  ENSG00000254166_91 (sequence is synthesized)
agatattaagtagaggtctattagttcctcttaaaactatttatgaaagaggcggatggggtagtggatgggaaagacagatggattcatgttcttcactccaggtttccccccattccc

SEQ ID NO: 819865 - DNA, 120 bp, Artificial Sequence
  ENSG00000254166_92 (sequence is synthesized)
ttcccttttaaatgcctgctcattttttggctacctttcaagctctaggaaatactctggaattccaggctgggaggggtttcctttgcagatctggctattgtaactttacaagaaatt

SEQ ID NO: 819866 - DNA, 120 bp, Artificial Sequence
  ENSG00000254166_93 (sequence is synthesized)
gctcaatacttcctctcaccagttacaaaccacggttttctgaatgaactttatgttcattaaacagttaacccttcagctttctgactcacatttttcatgttattaatcagctcttag

SEQ ID NO: 819867 - DNA, 120 bp, Artificial Sequence
  ENSG00000254166_94 (sequence is synthesized)
aatactcaagccagaaaccaggaaggtatgtgccacaaagtaaagtgggattcaggacaattatccatcaagactttgttacagatatccaaagcaggcaattcaagacccagcttgact

SEQ ID NO: 819868 - DNA, 120 bp, Artificial Sequence
  ENSG00000254166_95 (sequence is synthesized)
ttactgtctccattgtggtggttaatggagacaaattcaattcaaatatgtgcacgtggatttctttgtttctctgaggtttgacttatctgccaaaagagagaaacacagaaagagggg

SEQ ID NO: 819869 - DNA, 120 bp, Artificial Sequence
  ENSG00000254166_96 (sequence is synthesized)
agaaacaggagaggggaaagagagaggagagagaaaccaaggaaatgtgacatataataattttttaaagaatattttttcatttttttattgaggtataaaatacatgtagtaaggtat

SEQ ID NO: 819870 - DNA, 120 bp, Artificial Sequence
  ENSG00000254166_97 (sequence is synthesized)
gtcaataactcaaatcttatgtgatttttttatgtacatgtatacctgtgtacacctgtgtaaccactacctaagtcaagatagagaacattttaatcatcttaaaagatttcctgtgtc

SEQ ID NO: 819871 - DNA, 120 bp, Artificial Sequence
  ENSG00000254166_98 (sequence is synthesized)
tcttcccaccaatacctgctgatgagcccactctccttacagctatcagcagagttgttttacctgtccttgaacttaatataaatgtaattatactgtatatgctcttttgtgtctgat

SEQ ID NO: 819872 - DNA, 120 bp, Artificial Sequence
  ENSG00000254166_99 (sequence is synthesized)
ttctttcacccaacgtacttgttggtttagtccatgttgtgtatatcagcagtttgtttttgttaagtagcagtgttccattgtataaatggaccatattttatccttcatgttaatgaa

SEQ ID NO: 819873 - DNA, 120 bp, Artificial Sequence
  ENSG00000254166_100 (sequence is synthesized)
catttgaattgttttcatgttcttgttatgaatcaacatggttatgaatagtttggttatgaagagttttacacatgtttttagtctattttgtttctcttaaatatatacttagtcacg

SEQ ID NO: 819874 - DNA, 120 bp, Artificial Sequence
  ENSG00000254166_101 (sequence is synthesized)
ggattactggtcatatagtataggcaggcagatgttcagctttaattgacacaaccaactgtttttgaaaggggttgaggcaattcacacacaataaataacaatatataaaagttccaa

SEQ ID NO: 819875 - DNA, 120 bp, Artificial Sequence
  ENSG00000254166_102 (sequence is synthesized)
gaggtccttcatcccattcttgggggaggcactcatggcctaacaacctcctaaagaacctactattttgtgtaataccatcatatcggctgctgttaactatcagtacctgaattttgg

SEQ ID NO: 819876 - DNA, 120 bp, Artificial Sequence
  ENSG00000254166_103 (sequence is synthesized)
agggaacacattcaaactatagcatttatttaggctaaaaagatagttcattgtcagtgtatgaaaaacctactgattttttacgttgattttatatactgcaactttattgaattctca

SEQ ID NO: 819877 - DNA, 120 bp, Artificial Sequence
  ENSG00000254166_104 (sequence is synthesized)
acaaatggtgttgaaaaaactggatgtcctcatgaagaagaatgaaattgaacacatcacatcccatatacaagaatcaactcaaagtgggttgaagacttaaatataagatctgaaact

SEQ ID NO: 819878 - DNA, 120 bp, Artificial Sequence
  ENSG00000254166_105 (sequence is synthesized)
aaaaaacgtaagaggaaagctccacacactgatctggacaaagatttttttgaccatgaccctaaaagcacaggcaacaaaaacaaaaagagaccattaatctattagttattgtattgc

SEQ ID NO: 819879 - DNA, 120 bp, Artificial Sequence
  ENSG00000254166_106 (sequence is synthesized)
atcaaactaaaaagcttacgcacagcaaaggaaacaatttacaaaataaagagacaacccataggttaagagaaaaatatgtgcaaataatacatctgttaaggggctctaatatccaaa

SEQ ID NO: 819880 - DNA, 120 bp, Artificial Sequence
  ENSG00000254166_107 (sequence is synthesized)
atacagagagaaattaaacaactcaataataagaaaacaagtgattacattaaaaatagtcaaatgacttgaacagatatttctcaaaagaagacacataaatggccagtgggttattaa

SEQ ID NO: 819881 - DNA, 120 bp, Artificial Sequence
  ENSG00000254166_108 (sequence is synthesized)
taacaaagcccaatatccctatcactaatcattggggaaatgcaaattgaaaccacaattaaatatcacctcagatctgtcagaatggctattatcaaaaagatgaaatttaaatgttgg

SEQ ID NO: 819882 - DNA, 120 bp, Artificial Sequence
  ENSG00000254166_109 (sequence is synthesized)
aaagagacagaacaatgttataggactgtattgtctgctagaccatttattcaaagtgggaggatgatgttctaaaagccaatgataaagctcatggcaatgcagggtatatctgatggc

SEQ ID NO: 819883 - DNA, 120 bp, Artificial Sequence
  ENSG00000254166_110 (sequence is synthesized)
gcaaactctggcttcttggagcctccattagccacctagggaaaggtaattggctttatgtttggctccatcactgctggcgacaagctccactgcattctcaagcagtagatgaaatac

SEQ ID NO: 819884 - DNA, 120 bp, Artificial Sequence
  ENSG00000254166_111 (sequence is synthesized)
aactgtgctcctgaatgcagcaaaggaaagagaacccaactggaccagtgtgaaattgggacctttggaggcaagaatgcacatatttataaatgaataaacataatttttctctcttct

SEQ ID NO: 819885 - DNA, 120 bp, Artificial Sequence
  ENSG00000254166_112 (sequence is synthesized)
atagcaagatttcaggatatgagatttatatacaaaggtcaattactttcatatatacaagcaatgaacaagagggatttgaaattaaaaacgaaactatttacattagtacccccaaaa

SEQ ID NO: 819886 - DNA, 120 bp, Artificial Sequence
  ENSG00000254166_113 (sequence is synthesized)
agacattaatcttaagtatccagggagccctaaaacattgtatcccactagcaaggaccatggtaattgccacgtaaatcccctccattatgtggcccttattatgaccagccagccaag

SEQ ID NO: 819887 - DNA, 120 bp, Artificial Sequence
  ENSG00000254166_114 (sequence is synthesized)
aaagagacagaacaatgttataggtgagtgcatggacaatgacctcaaacagctaagattcaaacccctgcgttgaatgattgaattgaaatgattcaatgagctaatgtacataaagca

SEQ ID NO: 819888 - DNA, 120 bp, Artificial Sequence
  ENSG00000254166_115 (sequence is synthesized)
gggactatatcagaactatgagagaagaaaggctaccttttacctttgaggaattttcaaagcctttttttttttttttggttggtttgtgactgacaaagggcacaatttcaacacctc

SEQ ID NO: 819889 - DNA, 120 bp, Artificial Sequence
  ENSG00000254166_116 (sequence is synthesized)
agaaaaatgcctcatcatttcctcttgtgaaatctgggtgcttctgaatgaatccatgttaggaatgtgtacttccatccattaaagtcaatgtccagtctcattttgggccagaggctg

SEQ ID NO: 819890 - DNA, 120 bp, Artificial Sequence
  ENSG00000254166_117 (sequence is synthesized)
ttactaagttgtagtactggtgagaaaaggacagagcatttaccttccctgggtatcctgtgacctacatgtgtccttgcaaggcagggaaatgttactaattaagagcatagcctttcg

SEQ ID NO: 819891 - DNA, 120 bp, Artificial Sequence
  ENSG00000254166_118 (sequence is synthesized)
tcagatgggttcagatcctaacacatcctctttctggttacaggacagtcctctctgagcctcagttttctcatctctaagatgaggctaattatacctacttcccaggggggtactaag

SEQ ID NO: 819892 - DNA, 120 bp, Artificial Sequence
  ENSG00000254166_119 (sequence is synthesized)
gataaagtaacaacacaagaaaattttttatccttgattttcttagctggaaaattaggctagaaagacctccatccttggggtatttaaaataaaaggacaaacatatgatgagtctaa

SEQ ID NO: 819893 - DNA, 120 bp, Artificial Sequence
  ENSG00000254166_120 (sequence is synthesized)
attctggaggggacagagctagcagatcagacctaactggaaatctgctgtgccagtatatatttcagtgatgtgagccaatatatccccttgattgctcaaagtagtttggtcgatata

SEQ ID NO: 819894 - DNA, 120 bp, Artificial Sequence
  ENSG00000254166_121 (sequence is synthesized)
ttttgttgctttaaattgaacacattcttatgtacagcctctgtctcctcatctccaaccaagcaaaatagcttgttctctttatgcagggacacatgacatttcccacgtggctttgtg

SEQ ID NO: 819895 - DNA, 120 bp, Artificial Sequence
  ENSG00000254166_122 (sequence is synthesized)
catatctccacctcaatttaaaatgccttccaatccctgctcaaagtcaaacagcttaataatggtagacatagaatttgacttattctaataataggtcttttaaacaatgccttcttc

SEQ ID NO: 819896 - DNA, 120 bp, Artificial Sequence
  ENSG00000254166_123 (sequence is synthesized)
aaagtgcctgtgaagtgaaactttacctttctatatcaccagcttcctgttagagcagactttttctttgctcaaagtctaagcattgaagaacttctttttagtaggtagatttttgtg

SEQ ID NO: 819897 - DNA, 74 bp, Artificial Sequence
  ENSG00000254166_124 (sequence is synthesized)
ttagtaggtagatttttgtgtttggtgcagtggcacgatctcggcccactgcaagctctgcctcccgggttcac

SEQ ID NO: 819898 - DNA, 120 bp, Artificial Sequence
  ENSG00000254166_125 (sequence is synthesized)
tccacccgccttggcctgccagagtgctggaattacaggcgtgatttagtaggtagttttgagtagggagtatacatttaaaatgctgaaactcagttaaggaataatctaatactgtat

SEQ ID NO: 819899 - DNA, 120 bp, Artificial Sequence
  ENSG00000254166_126 (sequence is synthesized)
tcaactgaaactcagttgagaaatttctttccaataataaaggaaaatcaactgcagtaatgagggagatgattttgctgctaattacaacaaatatttactacagacctgttatgcacc

SEQ ID NO: 819900 - DNA, 120 bp, Artificial Sequence
  ENSG00000254166_127 (sequence is synthesized)
gcctgtctgagaacagtactggcacaaaagtgcttaatacacttcactcattattattaatattactattgttgcattttccccttgaaggcatgcttctgatgtgagttcaggagaaga

SEQ ID NO: 819901 - DNA, 120 bp, Artificial Sequence
  ENSG00000254166_128 (sequence is synthesized)
atgttttctaggagatgcttatcctgggatgagagctttcataagcattgatatttacatgactcttaccgtgtgtcaggaactgttctaattgttttacctatgtcaattcatttgata

SEQ ID NO: 819902 - DNA, 120 bp, Artificial Sequence
  ENSG00000254166_129 (sequence is synthesized)
gtcacaaccactgaaaggagtaagtactcttattacttccattttacagatagggaaactgaggtatagagaagtcaagtgacttgcccgaggttattaaactacttaatgtcaacacca

SEQ ID NO: 819903 - DNA, 120 bp, Artificial Sequence
  ENSG00000254166_130 (sequence is synthesized)
gctgaaaaagttttggaagccctcctaagcaggtgccagacccttttttggccagagacaggatcttacgctgttgcccaggctggagtgcaatagtgtcatcatggctcactgtagcct

SEQ ID NO: 819904 - DNA, 120 bp, Artificial Sequence
  ENSG00000254166_131 (sequence is synthesized)
acaacctttagcaattgagtagagtgtactcttgtcaatagaatttgaagcacatttctctctctgcctgatttctgtagaatttgtaaactatttgtgaatattcttaatttatggcaa

SEQ ID NO: 819905 - DNA, 120 bp, Artificial Sequence
  ENSG00000254166_132 (sequence is synthesized)
tatggttgcttacataagttcaataataatctgttttcttttacaatgagacacagttggaggaactggttattttcccagggctttgactgaaatggccttgtgaatggttccaggaaa

SEQ ID NO: 819906 - DNA, 120 bp, Artificial Sequence
  ENSG00000254166_133 (sequence is synthesized)
gccaattttggagaccctatgtggatgatgatgcttgctgtactttctgtgggtaatcgggccaagtatatgggactgaagctaattttgcaggtgagaaaatggaggtccagagagaaa

SEQ ID NO: 819907 - DNA, 120 bp, Artificial Sequence
  ENSG00000254166_134 (sequence is synthesized)
agtgactcacccaagctgaaaacagttgcaggaagaaaagccaggacagaactgggctgttagaaaccttggagtacactaaagatgaggaactgagtcaccgcaatgccaaatgtaaca

SEQ ID NO: 819908 - DNA, 120 bp, Artificial Sequence
  ENSG00000254166_135 (sequence is synthesized)
cgctgtgggtcaaaatttggatggttgcgttggaaattattctgaagccacagacagggctaaaaggatgattcacaaagtgttcatagcagggaagctgatggaaaagtgacatgcccc

SEQ ID NO: 819909 - DNA, 120 bp, Artificial Sequence
  ENSG00000254166_136 (sequence is synthesized)
tagacttgagagatgctctctaagtttaaaaaggaaacagcttattgtaaaatttatttgaatcctacaaccttcccatatctgtgtaattagcaaaaagacaagctgcaaccagagagg

SEQ ID NO: 819910 - DNA, 120 bp, Artificial Sequence
  ENSG00000254166_137 (sequence is synthesized)
cagggcttccactgattctacattatggctgtggcttgccttttcacttcttgtgtcctgtttaagaaatatctgctatcccaagcatctggcatctttcttgacatatgtagcagttgc

SEQ ID NO: 819911 - DNA, 72 bp, Artificial Sequence
  ENSG00000254166_138 (sequence is synthesized)
gcaatcttggctcactgcaacctccgtctttcgggctaaggcagaagaacggcttgaacccgggaggtggag

SEQ ID NO: 819912 - DNA, 120 bp, Artificial Sequence
  ENSG00000254166_139 (sequence is synthesized)
tttggagagataagttcccatcatgttgcccaggctggtctctaactcttggactcaagtggtcctcccacatcagcctctcaaagtgctgagattgcaggtgttagccactgcacttgg

SEQ ID NO: 819913 - DNA, 120 bp, Artificial Sequence
  ENSG00000254166_140 (sequence is synthesized)
cctggccccagtattctttgggatctggagtttgctgttgaatgagaaggcaagatgaaattccatgtagtcagactcctacgctgctgttctaagcagggttgggcctgattagtaggt

SEQ ID NO: 819914 - DNA, 120 bp, Artificial Sequence
  ENSG00000254166_141 (sequence is synthesized)
tatagatgatgtttttctgtggtgctatctggacctagtgctctttggcatctgggaaggtatggcctttaaaaagcaaactgccatgagaactgctctaccccaaattttggttcacag

SEQ ID NO: 819915 - DNA, 120 bp, Artificial Sequence
  ENSG00000254166_142 (sequence is synthesized)
gaacctgtttgtaaactggtgagtttctattgctatttcatagctaaagttttgaggtaaatgctattggatctttgtgtctgtgtgtgtatacatatttagatgtgtttatgtgtatgt

SEQ ID NO: 819916 - DNA, 120 bp, Artificial Sequence
  ENSG00000254166_143 (sequence is synthesized)
acatttattatatgttgtgtctaccaactttgcttataagcaaaagaatgcttgtaaattaagtaaataagttcaagaattttttaaattcacttgattaagtaaattgttaattttaaa

SEQ ID NO: 819917 - DNA, 120 bp, Artificial Sequence
  ENSG00000254166_144 (sequence is synthesized)
aactagctttaaaattattggtaaggtaaaaatagaaatgtctttggaattgccagcatacctttttgtctgggttttatatttgtctctgctagatattttggggtgtcggggtttagc

SEQ ID NO: 819918 - DNA, 120 bp, Artificial Sequence
  ENSG00000254166_145 (sequence is synthesized)
ataaaaggttataaaacaatatacccagccaaaactaaatagtctttgtttgtgtgacttttttcaataagtaagactaattcaatgttagtttaatgaaaatagctgaattttctgaat

SEQ ID NO: 819919 - DNA, 120 bp, Artificial Sequence
  ENSG00000254166_146 (sequence is synthesized)
tattgacacaatacccatgtatttaactttaaaagtgttcttacttaggtgaacatctgatcttcgcaggctataaaaaaggttaacaaggaaataacttgaaatgatgattagctttgt

SEQ ID NO: 819920 - DNA, 120 bp, Artificial Sequence
  ENSG00000254166_147 (sequence is synthesized)
ctaatatttcagttttcagaagtaatctagataaatcgtttgaaaaaatgaaagaatcatgtacatgtaaatgggataaatgcttgtagctgcactttttaatgtaatttgaaatcttga

SEQ ID NO: 819921 - DNA, 120 bp, Artificial Sequence
  ENSG00000254166_148 (sequence is synthesized)
taatttgaaatcttgaagttatttaggattgaataatagatgctttttggccatctgggtcacttccaattaagaaaggattatggggccggatgtggtggctcaggcctgtaatctcag

SEQ ID NO: 819922 - DNA, 120 bp, Artificial Sequence
  ENSG00000254166_149 (sequence is synthesized)
aaatttggatggttgcgttggaaattattctgaagccacagacagggctaaaagagtctagaatgtcctactagctgttggaacctgctggagttctaaaggcatgcgatgtcctgaatg

SEQ ID NO: 819923 - DNA, 120 bp, Artificial Sequence
  ENSG00000254166_150 (sequence is synthesized)
tgcttgaccaatggacacagcaggtatttgaagagttttgatgcttcctttctgttttcagtgctatttttttgctttatttcttttaaaaaactttccccacagaggctatttattaca

SEQ ID NO: 819924 - DNA, 120 bp, Artificial Sequence
  ENSG00000254166_151 (sequence is synthesized)
cagcagcagccagcatgcaccaagcagaactgcttttcataataaacctatttatcttctggcatgtcagaaatttctcaaattgatacttataataaatatgattaataacacattgta

SEQ ID NO: 819925 - DNA, 120 bp, Artificial Sequence
  ENSG00000254166_152 (sequence is synthesized)
cactctcatgtttttctctttcattagactatgactcctcgatggtagcaatttgtagtaatcaaatttttgtattttattttagcatctggcatctttcttgacatatgtagcagttgc

SEQ ID NO: 819926 - DNA, 120 bp, Artificial Sequence
  ENSG00000254166_153 (sequence is synthesized)
atcagctacagtctggaacttgcttcttttggggaattcattaaaagaatccttgaatgcaggtttctgataactttggagattttgccattgggctagagagaaaacttccaggatatt

SEQ ID NO: 819927 - DNA, 120 bp, Artificial Sequence
  ENSG00000254166_154 (sequence is synthesized)
aattgaaaagctgatgtgttcttaaagattactaacccaatatgaagcagagtgggagttgattgcatggactgagctaatggaggacagaaataatttttatggttttttttttttttt

SEQ ID NO: 819928 - DNA, 120 bp, Artificial Sequence
  ENSG00000254166_155 (sequence is synthesized)
tgagccaccatgcccagcctaatttttcttacatgagatacggtttaccaaagtccaccttccacttcttccttcgtgtatatatagagatagcatttcctagcttctcttgcaattaat

SEQ ID NO: 819929 - DNA, 120 bp, Artificial Sequence
  ENSG00000254166_156 (sequence is synthesized)
gcatttcctagcttctcttgcaattaattgtggccatgagctttgggcagtggaatgtgaatggaagtgatgtggccactccatatgtgtttctctgtgtcctttccccttctagctgac

SEQ ID NO: 819930 - DNA, 120 bp, Artificial Sequence
  ENSG00000254166_157 (sequence is synthesized)
tcagacacccttaaggcactgatgctctcagttgatctagcaaataggcatctgtcacagaaaatagagaagatatcccaagagaagaggagaaactccacaatgtgaagagatttccag

SEQ ID NO: 819931 - DNA, 120 bp, Artificial Sequence
  ENSG00000254166_158 (sequence is synthesized)
aggcatcagcactccgtctgtcactattggcatcctgtgacatggtttagtttatgcgtgctggttaggctgatttacataatacattatctagttataccttaaataaacctcaaaact

SEQ ID NO: 819932 - DNA, 120 bp, Artificial Sequence
  ENSG00000254166_159 (sequence is synthesized)
ttttttagataacactaacaaagttgaccttagaattggagtgcctgggttagaaccctgctggtaccacctgcttactgtaagactttggtcaagttattaacttttctgttcctcatt

SEQ ID NO: 819933 - DNA, 84 bp, Artificial Sequence
  ENSG00000254166_160 (sequence is synthesized)
ccaatagtttatgaaaccccccccaaaaaaaatatatgccagtggcctccagttgcccaccaggtagcatccacattctttaat

SEQ ID NO: 819934 - DNA, 120 bp, Artificial Sequence
  ENSG00000254166_161 (sequence is synthesized)
gcctccagttgcccaccaggtagcatccacattctttaatggaaagcccttccttgcttcgaacttgccaactgggattggacatttgtagttgcatttctaagaactgttcccttttgt

SEQ ID NO: 819935 - DNA, 120 bp, Artificial Sequence
  ENSG00000254166_162 (sequence is synthesized)
caatggagcctgatttccacttggatatctgggtgatttagggaaactgacctcaaaacccaattctacatttcgaccatgtgaccttggcttaatcaattcacgcatctttttccctca

SEQ ID NO: 819936 - DNA, 120 bp, Artificial Sequence
  ENSG00000254166_163 (sequence is synthesized)
atgcttggattttatattgatctttgctgtaaatttgcttaattttaaataggaaaattatctttccttggcctatgcttcagcctttactccagttcaatgatttcaacactggctgga

SEQ ID NO: 819937 - DNA, 120 bp, Artificial Sequence
  ENSG00000254166_164 (sequence is synthesized)
aattggaatgttaacaaaaatatcaatgcctattttcattcccaaagattctagtataattggtctgaattgtggcctaggtgttgggattaatttaataaaataatcttttgtaaataa

SEQ ID NO: 819938 - DNA, 80 bp, Artificial Sequence
  ENSG00000177410_0 (sequence is synthesized)
cgggggcccagggtggagagcacgagggcctggcccaggcacggccggcgcctccgccctcgaggagggcgtcacctcag

SEQ ID NO: 819939 - DNA, 120 bp, Artificial Sequence
  ENSG00000177410_1 (sequence is synthesized)
gctgaggggagcggaccgcggggggcgggagatgactgcgcccaaggcctttgcgggcctcagccggccccagaggaaggggaacccgtcgagcggtttggtgcgtgtgaagcgcgacat

SEQ ID NO: 819940 - DNA, 120 bp, Artificial Sequence
  ENSG00000177410_2 (sequence is synthesized)
ggcgaggaagcggacaagcccgggtggcccggcgtgtagagggaagggggcggggctagacgcggcctggacaactactagagcgcctcgggctgtgctgctcgagactacatttcccag

SEQ ID NO: 819941 - DNA, 120 bp, Artificial Sequence
  ENSG00000177410_3 (sequence is synthesized)
agcgacgcgcgcggagcgggcgggaaagagagcgtttcgggtccagtgcgcaggtgcgaaagccatctttggttatataagggaggttcaggaagccattcgttctttcgcgtctgcggt

SEQ ID NO: 819942 - DNA, 120 bp, Artificial Sequence
  ENSG00000177410_4 (sequence is synthesized)
ctccaaggaagccacgtgcagacatctacaaccttcgatctcctgacgagtttattgttggccaaaaccaggctttgattgaaccaggatgaatgcgggtgttggaagtagaatatatat

SEQ ID NO: 819943 - DNA, 120 bp, Artificial Sequence
  ENSG00000177410_5 (sequence is synthesized)
atacatataaaattggttgggagccacgtgtaccagtgtgtgttgatcttggcttgattcagtctgccttgtaacagatacagggtatgatacagcatcctacaagaatgagcaaaccta

SEQ ID NO: 819944 - DNA, 120 bp, Artificial Sequence
  ENSG00000177410_6 (sequence is synthesized)
ttctgatggcaggagattgaggacaaactggcgatggaatatgagaggagccctctggaaagaaaaggacagaccctgtgctttcatgaaagtgaagatctggctgaaccagttccacaa

SEQ ID NO: 819945 - DNA, 120 bp, Artificial Sequence
  ENSG00000177410_7 (sequence is synthesized)
ggttactgtatacatagcctgagtttaaaaggctgtgcccacttcaagaatgtcattgttagactttgaaatttctaactgcctacctgcataaagaaaataaaatcttttaaatcaaaa

SEQ ID NO: 819946 - DNA, 120 bp, Artificial Sequence
  ENSG00000177410_8 (sequence is synthesized)
cacaattgccagagaagatagagcaggtctctcccaggacttgcagctccagcctgtgtctgcaaggggtgttgtagcgactgatttctccagcccatggcaagaggccttcatcttgtg

SEQ ID NO: 819947 - DNA, 120 bp, Artificial Sequence
  ENSG00000177410_9 (sequence is synthesized)
cctggaaagagggaagtacaagtccgtctggcagagatggtgcagatgggcaagtttttcagacactgcagccagcacttctgggaccgcagcagtggagcctgcagagggccggttctc

SEQ ID NO: 819948 - DNA, 120 bp, Artificial Sequence
  ENSG00000177410_10 (sequence is synthesized)
caggcatgggctactgacattgtcacttccagactccttatgcaataaacaacccctaaacagatttattcacaatttctccatcctaacaagtcagtgatcagttttcacttttccaca

SEQ ID NO: 819949 - DNA, 120 bp, Artificial Sequence
  ENSG00000177410_11 (sequence is synthesized)
ttcccttctgtccccattatgttcccatagtggggcagcttctacctgcatggttggagcttcccatttttaaagaggcaagaaatcctttaaagttctttgaaatgtttgtagcctgtt

SEQ ID NO: 819950 - DNA, 120 bp, Artificial Sequence
  ENSG00000177410_12 (sequence is synthesized)
ccaattttataaactgtgaagactgagcaacacacaatgcatgggcctcatatggcctggaggccaccagttggagacctctgtagcttgagctgtgtccctttcagcactgttcttgtc

SEQ ID NO: 819951 - DNA, 120 bp, Artificial Sequence
  ENSG00000177410_13 (sequence is synthesized)
attcctgagctgggatgccccctgaaacataggatgctcagttaaatttgaatttctttttttttttccttgaaatggagtgtcgctctgtcgccaggctggagtgctgtggcgtgatct

SEQ ID NO: 819952 - DNA, 65 bp, Artificial Sequence
  ENSG00000177410_14 (sequence is synthesized)
ccactgcgcccggccgatggcaatcattctttaagatgcagcctccgtggacctcgtaccttctc

SEQ ID NO: 819953 - DNA, 120 bp, Artificial Sequence
  ENSG00000177410_15 (sequence is synthesized)
attctttaagatgcagcctccgtggacctcgtaccttctcagtaatttccatattctttgctgacttgggtttttcctccaaaattgtctgggataaattgaggtttgtggagtttcctg

SEQ ID NO: 819954 - DNA, 120 bp, Artificial Sequence
  ENSG00000177410_16 (sequence is synthesized)
atggctagtttccaaactggcttcaaagcctgggcttgtggaattggctgggtctgcggccagcctaacccatccttcggtcacagtctcccatggtcctgatattaattcatcacaggt

SEQ ID NO: 819955 - DNA, 120 bp, Artificial Sequence
  ENSG00000177410_17 (sequence is synthesized)
ctgtttagaaggtggcagaaacagacggtcttgggcttatttatatctgtggctttttttaaaagacagaaaaggagaaatctggatcctttccttgtcagcctcctttaactaaatggt

SEQ ID NO: 819956 - DNA, 120 bp, Artificial Sequence
  ENSG00000177410_18 (sequence is synthesized)
cttttgctaaaatagactggccccactgtgtgggtaggaagggttgagatgggagtgggccaagtgagtgagaactttttttttttgccttgatgttaaaatggcagcatgtgcagtctt

SEQ ID NO: 819957 - DNA, 120 bp, Artificial Sequence
  ENSG00000177410_19 (sequence is synthesized)
ctgcctctgcccaggttgacctgatgtttttacagggagagaggctgcttgttgagtgtggtggtatttatcatagtgtatgttaggctgcctcaaacatccctcgctgtcgtacctttc

SEQ ID NO: 819958 - DNA, 120 bp, Artificial Sequence
  ENSG00000177410_20 (sequence is synthesized)
agccaactctaatgtacctctctcagcctgatttctccccacttgagttataataacaacaactgccttttaaaaaatttcctactgggcttcatgctaggtactttccacgttttattt

SEQ ID NO: 819959 - DNA, 120 bp, Artificial Sequence
  ENSG00000177410_21 (sequence is synthesized)
aagcgatcctcctgcctcaacctcccaaagtattgggattactggtgtgagccaccattatatgttttaaataatttattcctcacctcaagtgagtgaggtaacatcccagttttacag

SEQ ID NO: 819960 - DNA, 120 bp, Artificial Sequence
  ENSG00000177410_22 (sequence is synthesized)
tgaggtaacatcccagttttacagacaaggaaacagattgggcaggggaagtgacttgcctcagatgcacaataaatggctctgccagtgtcttccttagcgcctccgatccccttctca

SEQ ID NO: 819961 - DNA, 120 bp, Artificial Sequence
  ENSG00000177410_23 (sequence is synthesized)
cccttgtcctctctgctcctctctgctcaatgctcctgggagcgtgaactgcattaatggctccttgtctggtggcctcaaggttccccaggaggcagggagggtgaggctgagatgtgt

SEQ ID NO: 819962 - DNA, 120 bp, Artificial Sequence
  ENSG00000177410_24 (sequence is synthesized)
gctcccctaaggcacatgcctcagcctggctgcctctgtctaaggccacagcccctcaagtgcttccccacctgactttctgggctctggtaaccgcttcctgcctgccccatcaggtgt

SEQ ID NO: 819963 - DNA, 120 bp, Artificial Sequence
  ENSG00000177410_25 (sequence is synthesized)
agggggtgcttcatgggtcaacattagcttatgtggtttccttatatcctgggcgcacctttgttagtctcaaattacattctgcttgaactattctctatccagtgggttgtgactatc

SEQ ID NO: 819964 - DNA, 120 bp, Artificial Sequence
  ENSG00000177410_26 (sequence is synthesized)
tagaggcagagttgggatttgaaccccaagacttcaaaataagctctgtgcaaatggcctcccagagctgcctgctggtttcttctgcgaggcctggcttctccattttggcttggacca

SEQ ID NO: 819965 - DNA, 120 bp, Artificial Sequence
  ENSG00000177410_27 (sequence is synthesized)
tggcctgctgtcatttccacaacagttgcaggaagttgccaaatgcgttttctgtgactgccaggctggtgaccctgttaaaaacaaagcaacaacaaaaaaagcaatttcttcaattaa

SEQ ID NO: 819966 - DNA, 120 bp, Artificial Sequence
  ENSG00000177410_28 (sequence is synthesized)
aattacaaaacagaaaaaaaaaaagatgtcacacttgggggaagctggttgaagtgtacttgatattctacatactattttcgcagttctctgtgaatcaatagttatttccaaataaaa

SEQ ID NO: 819967 - DNA, 120 bp, Artificial Sequence
  ENSG00000177410_29 (sequence is synthesized)
tgttaaaaaaaactttattactaaatcagaaaaaaacaacaacaaacaacaacaaaaaccaaagcagaatatgtggtgcactgttgagggaagtacagaaggataaaaacaagaaaatac

SEQ ID NO: 819968 - DNA, 120 bp, Artificial Sequence
  ENSG00000177410_30 (sequence is synthesized)
acaagaaaatactgacacaactcagactccactgttgaaccttattttattttatatacttctaggtcttttttttttttttttttgagaagagtctcagctcactgcaacctctgcctc

SEQ ID NO: 819969 - DNA, 89 bp, Artificial Sequence
  ENSG00000177410_31 (sequence is synthesized)
aggccacttctaggtctttttctacatgtttatatatacactgtatgtattctttaccaaagtgggatcataccataatgctgtttttt

SEQ ID NO: 819970 - DNA, 78 bp, Artificial Sequence
  ENSG00000177410_32 (sequence is synthesized)
ctaggtctttttctacatgtttatatatacactgtatgtattctttaccaaagtgggatcataccataatgaagacag

SEQ ID NO: 819971 - DNA, 73 bp, Artificial Sequence
  ENSG00000177410_33 (sequence is synthesized)
ctaggtgtaagccaccacgcccggcctatagtgctgttttgtaacctctgtcagttaaccatctccatttttt

SEQ ID NO: 819972 - DNA, 120 bp, Artificial Sequence
  ENSG00000177410_34 (sequence is synthesized)
ctgttttgtaacctctgtcagttaaccatctccattttttcacatcaataaatttcccatttgtccacaaaagtcctgtacagctggcagaggatatgtgtgactggaggccattaggtc

SEQ ID NO: 819973 - DNA, 120 bp, Artificial Sequence
  ENSG00000177410_35 (sequence is synthesized)
cttcaggttcttccagcctagcaccaccctttcttcccctttaccataggggcttgtcctagagaacgtctcaccttctggattcatctgagtgttgccttctgggggtgtcacttcatt

SEQ ID NO: 819974 - DNA, 120 bp, Artificial Sequence
  ENSG00000177410_36 (sequence is synthesized)
tgttcctctgtatcctgcatcccctgtaaattggagagtcaatctaaagttttgataagatcaagttaaatattttggcaagaaagcgtcatacatgatgatgctgggcacatcaggtga

SEQ ID NO: 819975 - DNA, 120 bp, Artificial Sequence
  ENSG00000177410_37 (sequence is synthesized)
catcacattttatatttaatggacaaataaaagttgtatatatttactgtgtacaacacgatgttttggaatatgtatatgttgtggaatggctaaatcaagctaattaaaatatgcatt

SEQ ID NO: 819976 - DNA, 120 bp, Artificial Sequence
  ENSG00000177410_38 (sequence is synthesized)
ctttcgcgtctgcggtgcccggagtgtggtacttctcctagttgcagtcaggcttcatacgctattgtcctgcccgtaagttcccgttttgtgtgtggttagagcagccagcgggtacag

SEQ ID NO: 819977 - DNA, 120 bp, Artificial Sequence
  ENSG00000177410_39 (sequence is synthesized)
caccactggacctccaaggaagccacgtgcagacatctacaaccttcgatctcctgacgagtaagtctttgtctcctatgggtctactgtagaaaacacgtgctttgagaagctttagtt

SEQ ID NO: 819978 - DNA, 120 bp, Artificial Sequence
  ENSG00000177410_40 (sequence is synthesized)
gcactttctatcgagcatttattaggtatttaaaaaagtgttctgacggccgggcgctgtggctgacgcctgtaaccccagcacttggggaggccaaggcagatgggtcacctgaggtca

SEQ ID NO: 819979 - DNA, 88 bp, Artificial Sequence
  ENSG00000177410_41 (sequence is synthesized)
ctctatacgcgcctgtaatcccagcaactcacaaggctgaggcaggagaattgcccgaacccgggcggcggaggttgtagtgagttga

SEQ ID NO: 819980 - DNA, 120 bp, Artificial Sequence
  ENSG00000177410_42 (sequence is synthesized)
ccagcaactcacaaggctgaggcaggagaattgcccgaacccgggcggcggaggttgtagtgagttgagattgcgccactgccctacagtcggggcaacagagccagactccgtctcaaa

SEQ ID NO: 819981 - DNA, 120 bp, Artificial Sequence
  ENSG00000177410_43 (sequence is synthesized)
ggtaagtggtgccaacacgtcttccctggctgagtagacacaggctctggagggggtagtagctgcttttcagtgtgggtttgtcaccctacttcttgtacgactcaaatgtggcctttg

SEQ ID NO: 819982 - DNA, 120 bp, Artificial Sequence
  ENSG00000177410_44 (sequence is synthesized)
cagctgatgatacagcttctttccccatcagatcgaccctgttgatctctacactattggccagttttgtctgatgcattggccccagtaataactcctatctttgttttctgcttatct

SEQ ID NO: 819983 - DNA, 120 bp, Artificial Sequence
  ENSG00000177410_45 (sequence is synthesized)
attgcttgttcatgggaactgggctttctctattttttccagcattcagatggcttcttttgacctgttaactttctataggttgggagccacgtgtaccagtgtgtgttgatcttggct

SEQ ID NO: 819984 - DNA, 120 bp, Artificial Sequence
  ENSG00000177410_46 (sequence is synthesized)
tgattcagtctgccttgtaacaggtgaggtttctgctttctatctgccaaaccccaccgcaaaatttgtccaactgggcctaacctcaggacccatttccaagttgggtataaaactggg

SEQ ID NO: 819985 - DNA, 120 bp, Artificial Sequence
  ENSG00000177410_47 (sequence is synthesized)
agaataagtcattaggactgacattggcctgttggtattactaggtctttgttggaaataagagcttggagttccaaagaaaacgagcacttgaacaaaagatttctcagcaaggcaaat

SEQ ID NO: 819986 - DNA, 120 bp, Artificial Sequence
  ENSG00000177410_48 (sequence is synthesized)
ccttcccaggtattggcaacaccagaagtccagttggtcaggagctgtggaatcaacctcatgtaccatgtgaatcccttggcaaatgctattggttctaccttcaaaatacatctgaaa

SEQ ID NO: 819987 - DNA, 120 bp, Artificial Sequence
  ENSG00000177410_49 (sequence is synthesized)
cccaccccctcttagcgtcttcattgctaccaccttggtacaaaccatcaaacaagcttggaatactggtctctacttcagcctttgctccctacgatcaattgagatgcaaccagagcg

SEQ ID NO: 819988 - DNA, 120 bp, Artificial Sequence
  ENSG00000177410_50 (sequence is synthesized)
ggcatatatgatgacttagcttttttccccgacagatcgactatgttgatctaacttttctaagccagtttctgtctgatatgccagcttgagcagctcctttgtcccagctcccctggg

SEQ ID NO: 819989 - DNA, 120 bp, Artificial Sequence
  ENSG00000177410_51 (sequence is synthesized)
catttggttttagttttttgaggggagaatcaccctagtgggcagttggtttctgtgggcaaagcctgctttccacaggtattgtgcctcgtgattggcttctgcattggaaacctaaga

SEQ ID NO: 819990 - DNA, 120 bp, Artificial Sequence
  ENSG00000177410_52 (sequence is synthesized)
tatgttaaatcgtgggtattaggccttaatggttgcatgagatgagtaaggatgatgtgggctatggtatttgtttataaacttcataggaaattgcaaaaataggctgcatcatttatc

SEQ ID NO: 819991 - DNA, 120 bp, Artificial Sequence
  ENSG00000177410_53 (sequence is synthesized)
aatatgtgatgattttttatttaaaatacacagtgaataattttttaagtatcttaaaatctcacctcaaagatgggacctctagatttcttttttttttctgaggcagagtctcgctgt

SEQ ID NO: 819992 - DNA, 60 bp, Artificial Sequence
  ENSG00000177410_54 (sequence is synthesized)
tcttttttttttctgaggctctgcttcctgggttcacattctcctgcctcagcctcccaa

SEQ ID NO: 819993 - DNA, 120 bp, Artificial Sequence
  ENSG00000177410_55 (sequence is synthesized)
atgagccactgcgcccagcctgggacctctagatttctaaaatgactcctggtattgactcagaatcccctccccttgactaggctggacctagtgtaacttctgagacttgctagctct

SEQ ID NO: 819994 - DNA, 120 bp, Artificial Sequence
  ENSG00000177410_56 (sequence is synthesized)
ctctttttctcattctccttggcttgctcactttttttttttttttttgagatctcagctcactgcaacctccgtcccctgggtttaagcaaattctcctgcctcaccctcccgagtagc

SEQ ID NO: 819995 - DNA, 120 bp, Artificial Sequence
  ENSG00000177410_57 (sequence is synthesized)
caggcgtgagccaccacgcctggcctagcttgctcacttttaattaagctgccatgttgggagaggccagcgtagcaatcaactgaggttgaaccattagtgtgggaggagttacccaac

SEQ ID NO: 819996 - DNA, 120 bp, Artificial Sequence
  ENSG00000177410_58 (sequence is synthesized)
caacaaccatgtgagtttgtaagcacgtctttctgtagcggaggcttgtgagaaaccctgagagcggacccacccagattgtgcttggatttctgacctatgggaaatgtatttcaagcc

SEQ ID NO: 819997 - DNA, 120 bp, Artificial Sequence
  ENSG00000177410_59 (sequence is synthesized)
actaggttttgagataacttgctacaaagcagtaaattcacaactctataatgcccactctaaaggtcctgacatgggcatctccattacctaagtcaactgatgctacttcaatttctc

SEQ ID NO: 819998 - DNA, 120 bp, Artificial Sequence
  ENSG00000177410_60 (sequence is synthesized)
cacgtagcatttgaagcgtttatgtctggccccagcctacattttcagacttatttgtgcatttgacttaacatgtccaaaactaaatgcctgatgcttcactcacctaaccccattccc

SEQ ID NO: 819999 - DNA, 120 bp, Artificial Sequence
  ENSG00000254164_0 (sequence is synthesized)
tctgtctttcatttttctcaatggaagcacattccccacttctcaatttgccttgggagctcttatttcaatctcttctcaatccttcgaagcaggactcctccctagccatattctaca

SEQ ID NO: 820000 - DNA, 120 bp, Artificial Sequence
  ENSG00000254164_1 (sequence is synthesized)
taccctgatacatttcagcaaattgatatgcaaggcccctttccaggccctgggaacatgaagaggaagttgctgatggctgtgctcaaagacttcccaggtgctggtgaaacagacatg

SEQ ID NO: 820001 - DNA, 120 bp, Artificial Sequence
  ENSG00000254164_2 (sequence is synthesized)
aaaaggcacaacccctgcctcgggatctggtggcaagatcaacaggtaaactgcaggtctgatacggattgacaggtgccactcagagtgagtacgggtggcagaaactcagaggggtcc

SEQ ID NO: 820002 - DNA, 80 bp, Artificial Sequence
  ENSG00000254165_0 (sequence is synthesized)
taatatacatgtatatatacagagtaggttatattttagttaggcaaacctagtgtacacatgtgaaacagtactagaat

SEQ ID NO: 820003 - DNA, 120 bp, Artificial Sequence
  ENSG00000254165_1 (sequence is synthesized)
cctagtgtacacatgtgaaacagtactagaatttggagctaaataagagttaatacttatgtcgtgcttaaaatgtgaacctcacaacaatcctttgaagtaggtacaattatttcctca

SEQ ID NO: 820004 - DNA, 120 bp, Artificial Sequence
  ENSG00000254165_2 (sequence is synthesized)
ctggggagctttactttatacttcgaagggacatctaagcactacttttgcagctgtaagagatgctcttttaaaaatttcaaagtagcgtaagagattgcagtgtctctaaactgcaga

SEQ ID NO: 820005 - DNA, 120 bp, Artificial Sequence
  ENSG00000254165_3 (sequence is synthesized)
aggaatgctggattttctatatagaggacattgataatggaatggttaaggggacattatatattgaaatgactaaagatggtggagagaaactgaagtttgaatctcaaagctgaggat

SEQ ID NO: 820006 - DNA, 120 bp, Artificial Sequence
  ENSG00000254165_4 (sequence is synthesized)
tatgattttttatagatactgaattctagaacagtgattcaccaggacataggacaatgattgcttgttactaatttagtatcaaaaaacttatgccaaataaaataatattgaatgaca

SEQ ID NO: 820007 - DNA, 74 bp, Artificial Sequence
  ENSG00000254162_0 (sequence is synthesized)
agcagagatcgtgccaccacaaaaataaatacaaataaaaaataaaaataaatacctgacatggctatttatta

SEQ ID NO: 820008 - DNA, 120 bp, Artificial Sequence
  ENSG00000254162_1 (sequence is synthesized)
ataaaaaataaaaataaatacctgacatggctatttattagcgtgcttgaaaaccagtcctgcatagagctacacatgcataaaaattatttgggagaatacacaataaaatgttaacaa

SEQ ID NO: 820009 - DNA, 120 bp, Artificial Sequence
  ENSG00000254162_2 (sequence is synthesized)
ttactatctctaagtggtgcgattatggatgattttttcacttttcttctttatttagtcatacctttctatattttcatatgcttcttttctttttgagacagagtcccatgctgttgc

SEQ ID NO: 820010 - DNA, 120 bp, Artificial Sequence
  ENSG00000254162_3 (sequence is synthesized)
ttgagccaccatgcctggccctgatgggtttcttttatcttttatacaaaattgaaagcatactatggtgtttgactagtttttccttaatattcaaacaagataatatattatctttct

SEQ ID NO: 820011 - DNA, 120 bp, Artificial Sequence
  ENSG00000254162_4 (sequence is synthesized)
ttgaaaatattatcatcaatgggcacctaattataatatgaggatctatcataacttatttcttcccatatttcttccaatatacatattggaaacaaggggtttttttgtggcttataa

SEQ ID NO: 820012 - DNA, 120 bp, Artificial Sequence
  ENSG00000254162_5 (sequence is synthesized)
attaccttttgaaaaacatccttttatgaaagtcatctctgctttgggatagttttctaggagtacatttttaagtcatcaagtttttaaacttttttttttttgagacaaggtctcact

SEQ ID NO: 820013 - DNA, 120 bp, Artificial Sequence
  ENSG00000254162_6 (sequence is synthesized)
atattgcccaggctggatttgaactctgaggctcaagtgattctcttgcctcaacctacccagtagctggcactacaggtgtgcattaccatacctggttatgaccggtttttaatgact

SEQ ID NO: 820014 - DNA, 120 bp, Artificial Sequence
  ENSG00000254162_7 (sequence is synthesized)
cttgaaatgtattaccaaattgctttccagagaggctctcccaataatgtcaaatcttatctagtcttacagttgcaaattgatagtagtatagttttaaaaaattatccattttctagt

SEQ ID NO: 820015 - DNA, 120 bp, Artificial Sequence
  ENSG00000254162_8 (sequence is synthesized)
tttaatttatatttgagaaatagtttcattggataatttttatgtgtattggccatataaatggcattttgatggcaaatgctataatagcactatactaatgactattatccaacaaat

SEQ ID NO: 820016 - DNA, 120 bp, Artificial Sequence
  ENSG00000254162_9 (sequence is synthesized)
caattatgggccagaagttttaataacagtaagtttttaaggaaaaactttatgacttttatttctattaaaattttttttaaaaaaaccacactttttcgaattgactcaagacattaa

SEQ ID NO: 820017 - DNA, 120 bp, Artificial Sequence
  ENSG00000254162_10 (sequence is synthesized)
aaaaagaaatttttttccccaaaattgtaataaatagccttctatcagtccacaagatgggagtattctgatcttacaatattttagcttcagttgctaaaagtggcagtttttagtttt

SEQ ID NO: 820018 - DNA, 120 bp, Artificial Sequence
  ENSG00000254162_11 (sequence is synthesized)
aaataattatattcaatttatagctcataatagtttccattcacatgtttgtaagttcacagtcaaaaggactttctacttctatggaatatttttcatgcagttaatatgtggtagcat

SEQ ID NO: 820019 - DNA, 85 bp, Artificial Sequence
  ENSG00000254162_12 (sequence is synthesized)
tctatggaatatttttcatgcagttaatatgtggtagcatcaggtaactgcagtacatgtttactttaaaaaaataataataact

SEQ ID NO: 820020 - DNA, 120 bp, Artificial Sequence
  ENSG00000254162_13 (sequence is synthesized)
ggagtccaagaccagctggggccacgtggcgaaaacctgtctctactaaaaatccaaaaattagtcaggtgtggtagtgcacatctgtagtcctagctactcacaaggctgtggtgggag

SEQ ID NO: 820021 - DNA, 120 bp, Artificial Sequence
  ENSG00000254162_14 (sequence is synthesized)
ctgggaggttgaggctgcagtgagctgcaatcatgccaatgcactccagcctgagggacagagggagaccctgtctcaaagcaaaacgaaacaaaaaagcacacacacaaagaaacccct

SEQ ID NO: 820022 - DNA, 120 bp, Artificial Sequence
  ENSG00000254162_15 (sequence is synthesized)
aaagaaacccctaaaaaactaaaaaaacttagctggacatgatggtgtgtgcctatagttccagctactcacaggctaaggctggaggatcgcttgagctcaggagtttgaggctgcagt

SEQ ID NO: 820023 - DNA, 86 bp, Artificial Sequence
  ENSG00000254162_16 (sequence is synthesized)
agcaagaccctgtctcttaaaaaaaaaattaacttttatgcttaggcttacatgctttaataaacagtgacttagaaatatcaggg

SEQ ID NO: 820024 - DNA, 120 bp, Artificial Sequence
  ENSG00000254162_17 (sequence is synthesized)
gccactgcactctagcctgggtgacacagcgagactgtctcagaaaaaaaaaagaaagaagtatcaggggaacaaacttgtgaaagaaacagacatacgtgaacctttctcatcaaacct

SEQ ID NO: 820025 - DNA, 120 bp, Artificial Sequence
  ENSG00000254162_18 (sequence is synthesized)
tcaaaccttaacagctatcaatcaccatttatataaaactggtaccatctccaatctcaagtgttcttttccacatttctggaaattttaccttagaatcactagttctttggttggcct

SEQ ID NO: 820026 - DNA, 120 bp, Artificial Sequence
  ENSG00000254162_19 (sequence is synthesized)
ttctatttctacttcatgtgggctactaatcctggttaaaactcttatatgtacggtaatggaatcaacggcttcgactgtcttttttttagcaagccctgatcaactaggaatacgacc

SEQ ID NO: 820027 - DNA, 120 bp, Artificial Sequence
  ENSG00000254162_20 (sequence is synthesized)
acttacaattggctactctcttttctcttattcaacaaaagcaaaaaccaggaggcatgtgtagctgaccttacacagcaaccaactttccaacactctcatcagcaggaggtcgttctt

SEQ ID NO: 820028 - DNA, 120 bp, Artificial Sequence
  ENSG00000254162_21 (sequence is synthesized)
taaactctcttaaaataatttcatacttagtagcactatccaagtgtcactggacccaatcactataattcattctccttagcactgtccaacaatctctaattttacaaaaatactcaa

SEQ ID NO: 820029 - DNA, 70 bp, Artificial Sequence
  ENSG00000254162_22 (sequence is synthesized)
agcactgtccaacaatctctaattttacaaaaatactcaagagtgcatcagaggccaggcgcctctgata

SEQ ID NO: 820030 - DNA, 120 bp, Artificial Sequence
  ENSG00000254163_0 (sequence is synthesized)
agaccatgtgcttagagacttgtagattaaacccaggtctctgattcctcactagtatgttttcgtaataatccatggttctgactgtttaaaagtagcttttatatttattgggtagaa

SEQ ID NO: 820031 - DNA, 120 bp, Artificial Sequence
  ENSG00000254163_1 (sequence is synthesized)
ttttaatccaaaatgttcaaagagatgaatgaaatgataggatagaagcctggcggatatctggacagaactatgcaagagccttcctgagaatggaagccacaggagggaaaacggaac

SEQ ID NO: 820032 - DNA, 120 bp, Artificial Sequence
  ENSG00000254163_2 (sequence is synthesized)
ttgggaaaggaaagagtaaagtggaatttcaatgacatcatttaaatgcctggatccaaaagtgtctggacattcaatatcaaaatatttgcttctcacatcatatttcagtgatgtgag

SEQ ID NO: 820033 - DNA, 63 bp, Artificial Sequence
  ENSG00000270571_0 (sequence is synthesized)
aatcagccaaggaaacccagtggagattcagcactaacccaccacacacacacacacacacac

SEQ ID NO: 820034 - DNA, 120 bp, Artificial Sequence
  ENSG00000270571_1 (sequence is synthesized)
acacacacacacacacacacactctctgaagaaacccagtggagattcagcactaacccagcacagaagaggagaagagacatacagaggacaaggccatgtcacaacaagtggagactg

SEQ ID NO: 820035 - DNA, 120 bp, Artificial Sequence
  ENSG00000270571_2 (sequence is synthesized)
gtcacaacaagtggagactggaattatgcagccacaagccaaggaacctctggaaccaccagaagctggaaatggcagtcattgacatttattgaagctgtgctattttcaaaatgctga

SEQ ID NO: 820036 - DNA, 120 bp, Artificial Sequence
  ENSG00000270571_3 (sequence is synthesized)
ggaagtattgggaggagatgaagcaaggaatttttatccaggtgtacagagaaaaaaagaaaggaaagatgcagacaaagaaaaaaggatgaaaacttccagatgacatgtgggtccaga

SEQ ID NO: 820037 - DNA, 120 bp, Artificial Sequence
  ENSG00000270571_4 (sequence is synthesized)
cagaccctggcagaaagcccagctcttggaaaactggccctcgccccaggatttgtaaacagcacaaattcactgatgaagatgcaggagaggtgaagaatctgctttggccatctcagc

SEQ ID NO: 820038 - DNA, 120 bp, Artificial Sequence
  ENSG00000270571_5 (sequence is synthesized)
agcactgccctgctgcccttaaccccaacccactggactggctgagaatatattccacagtcccttcttaacatccttccaggttgtaaagatattacatatttatcaaaacaattagtg

SEQ ID NO: 820039 - DNA, 120 bp, Artificial Sequence
  ENSG00000270571_6 (sequence is synthesized)
acttataagaagtctgaagaagacagaagcaaatacgcaaacaaatgcagagtgcagtagcacctcagggcagagataattctgcctgtgacaggaaaagatctttcaacagcagtttga

SEQ ID NO: 820040 - DNA, 120 bp, Artificial Sequence
  ENSG00000270571_7 (sequence is synthesized)
cagctcctggtgacagatccccaccacagtatcctccagcagaccccttggtggtatacctgggactattttttgaaagccaaactctggatacttctgtattacctaaactccggcacc

SEQ ID NO: 820041 - DNA, 120 bp, Artificial Sequence
  ENSG00000270571_8 (sequence is synthesized)
tcttacattccacattggcacagttccgaggtctaagtttgttttaattctctacaatctttcctgttcaaggagtaggtaactagaatgaacacattcccattttaagatacaaatggg

SEQ ID NO: 820042 - DNA, 120 bp, Artificial Sequence
  ENSG00000270571_9 (sequence is synthesized)
accttggaggtagaaagacgtccatattgtttgtaccgtagtgtgattttaattagctgctcttctcttggttcaactcaacttactaaattggattggctgtgaagggaatggagcagt

SEQ ID NO: 820043 - DNA, 120 bp, Artificial Sequence
  ENSG00000270571_10 (sequence is synthesized)
aatttgggttcatgcatttgtgaagcaggattggggagtgcctcaatgcagactgtagctggttataacattattggagggaaaccaacaaaaacgagggaaatagtatctgcgccttct

SEQ ID NO: 820044 - DNA, 120 bp, Artificial Sequence
  ENSG00000270571_11 (sequence is synthesized)
ttgcattctgcctaaagtcttaggatcacagtgtcctaattggatcattgaaaacctatgatggctttgatttggcaggtaatctagctgaatctttaacacattaacttccagacccct

SEQ ID NO: 820045 - DNA, 120 bp, Artificial Sequence
  ENSG00000270571_12 (sequence is synthesized)
catcattccagctgggaagagaaaagaacttcaggaacaaattttaaaaatgaaatttgttaaatcatgaaaattccaatgaagttttctcttttatcttcctagctcatgtttgaagag

SEQ ID NO: 820046 - DNA, 120 bp, Artificial Sequence
  ENSG00000270571_13 (sequence is synthesized)
cccagctaagttgttgagctaactcgtatttcaagctcagggctgcattcattttggttcccatcacgaattctaaaggcatttgaaatttccccttggctccctgggactatttagaag

SEQ ID NO: 820047 - DNA, 120 bp, Artificial Sequence
  ENSG00000270571_14 (sequence is synthesized)
cactattcaagtggatgtttctctacagtaaaataaaattaataaatcatacaaagtgggtatttaagcttatgctcctaatctcctcacgtgccactcaatgtgcacatgaggttttta

SEQ ID NO: 820048 - DNA, 120 bp, Artificial Sequence
  ENSG00000270571_15 (sequence is synthesized)
aaaattagtgtctcaattatattctatgatagagagaacagaggtgttgctagcatgactgctcagcactctcccctcatgagctcaggcagctgtgtgatttgtgaaggtggctgctca

SEQ ID NO: 820049 - DNA, 120 bp, Artificial Sequence
  ENSG00000270571_16 (sequence is synthesized)
tcagtccatctgtggcttagggcactgggctgagctgtaaaggcagagtatcattacagattattttttattatctgaaataatggcaataaagtggaagtgaaggtgaagaaacccagc

SEQ ID NO: 820050 - DNA, 120 bp, Artificial Sequence
  ENSG00000270571_17 (sequence is synthesized)
actcctagagctatgaaaaagccataaggctctggcctcaaggggaaacccagttaatttaaagaaggaatctctaatcatccagttggaggattcaagggtactaggtggttttcaggc

SEQ ID NO: 820051 - DNA, 120 bp, Artificial Sequence
  ENSG00000270571_18 (sequence is synthesized)
tccaggaagaaggtccctgccactgatgacctcatgccaagaggaaagaaagctgctctgtagaccttctttataagagtacaggttggaaccatactaagagcctggctttgttaaacc

SEQ ID NO: 820052 - DNA, 120 bp, Artificial Sequence
  ENSG00000270571_19 (sequence is synthesized)
caacacatactacaatatttttgatgatttatgtgggtaaataggatacatccagaaaaaatctggcacatatttttcatgacctcagaatctcaaaaaggcaactttaggaccaggtct

SEQ ID NO: 820053 - DNA, 120 bp, Artificial Sequence
  ENSG00000270571_20 (sequence is synthesized)
tgtggtgattcttttttctttttggtcatttttttcatgtcaataaaaaggtaaaatgtagaatgtagttaacgttaatcaggtagataaaggatgcaaactaggggtggggtgaggctg

SEQ ID NO: 820054 - DNA, 120 bp, Artificial Sequence
  ENSG00000270571_21 (sequence is synthesized)
tgcatgattccgtctatgcaaatcagtcaaggatttacactggaactacaaaactcgatttcagtggaaaaagcatgagtggactctgtaggcaccaggtaggcagaactccactgtgag

SEQ ID NO: 820055 - DNA, 120 bp, Artificial Sequence
  ENSG00000270571_22 (sequence is synthesized)
aggggctcaggtatcgagatgcagctctgggcaagacccctgtgaggcatagccagatttgggtctccaactcaacccctgattccagaacctcagctgcctcttacagagaagatgatt

SEQ ID NO: 820056 - DNA, 120 bp, Artificial Sequence
  ENSG00000270571_23 (sequence is synthesized)
ctgccacttttgtttgtatgactttgtaactctaagaaggcatttttaaaaagtaagtaggcaataaagaaatggtacttctatgtaagtagtgcatgtgtagtagtgagttttgtgatc

SEQ ID NO: 820057 - DNA, 120 bp, Artificial Sequence
  ENSG00000270571_24 (sequence is synthesized)
aatatacattgctttgtatgtgatttgcttttaagatgttggaaatgagaatctgatatattagagaatttgacttacaagatttgcaattttaagtgtaacacctaggaggatttaatg

SEQ ID NO: 820058 - DNA, 120 bp, Artificial Sequence
  ENSG00000270571_25 (sequence is synthesized)
aattaattttgtagtcaatgtttggatgctcaggagaacctgaatttatcagtttaattctcagcaggttgaaatgctttaagagaatttgtgtgctaaatttagaagttttgatttatt

SEQ ID NO: 820059 - DNA, 120 bp, Artificial Sequence
  ENSG00000270571_26 (sequence is synthesized)
agtcttacaagaactaagtaagtcctgagaaagattttgtttcttctatttgtaagtcttcctgttagggatttgaagattttaacaaagccagatgtatcaaatttgtgagtatagttt

SEQ ID NO: 820060 - DNA, 120 bp, Artificial Sequence
  ENSG00000270571_27 (sequence is synthesized)
gtatcaaatttgtgagtatagtttgaaatgcttagaggaatttaattaatcaagtttataaatactgtttacattttgaaagattatttgatttgttaagcttataaaaattgtgactaa

SEQ ID NO: 820061 - DNA, 120 bp, Artificial Sequence
  ENSG00000254161_0 (sequence is synthesized)
atggcctggacccctctgctcctcatgttcctctctcattgctcaggttccctctcccagcctgtgctgactcagatgacctcactctctgcatctccaggagcatgagccagacttacc

SEQ ID NO: 820062 - DNA, 120 bp, Artificial Sequence
  ENSG00000254161_1 (sequence is synthesized)
tgcaccctgagcagtggcttcagagttggtaactttgcaatatagtggtcagctgaagccaggcagccgtcccaggtgtctcctgagatactactcagactcaaatatcactcagcaccc

SEQ ID NO: 820063 - DNA, 120 bp, Artificial Sequence
  ENSG00000254161_2 (sequence is synthesized)
tggggttcccatccacttctctggatccaatgatacattagccaatgcagggattctgtacattcctgggctgaagcctgagggtgaggctattactgttgtacgtgtcacagcagctcc

SEQ ID NO: 820064 - DNA, 120 bp, Artificial Sequence
  ENSG00000237500_0 (sequence is synthesized)
aattcaaaaactcacagaccaatgccagggtcaaccagatctacatgtgattttaatgggttatttttaggacatcataaggaattcggaatccttgaaagtggaatgcgtgatgtccat

SEQ ID NO: 820065 - DNA, 120 bp, Artificial Sequence
  ENSG00000237500_1 (sequence is synthesized)
tgaccccacttcctcagctagcacgtctggtgtgtcacagcagagtccagcaaaggtaaccaacaacaaagggaaaactagacacagttgcctggaataaatacgaaaggtaagaacaaa

SEQ ID NO: 820066 - DNA, 120 bp, Artificial Sequence
  ENSG00000287289_0 (sequence is synthesized)
agaagtgcaaacatctattctcaccagcacattacatcaatacagcttaactgaaggtcactgaactcctgaaccaaccaacaaggtgacgagcatgtgactctgtggagacctaggaag

SEQ ID NO: 820067 - DNA, 120 bp, Artificial Sequence
  ENSG00000287289_1 (sequence is synthesized)
agttacgaatactggccccagagggtggaataacacatgttctatgtcttagtatgaggaacagatcaagcaagtaaactattcccagacctttattacatagctcaggtctggaatgat

SEQ ID NO: 820068 - DNA, 120 bp, Artificial Sequence
  ENSG00000287289_2 (sequence is synthesized)
tattgtgcttctggcaagacacaaaggtggaaaacagacatttaagtagagttaacattaaaggaattattgcattcttttctgaacataatcacctgtaaccgaaaaagcaatggttcc

SEQ ID NO: 820069 - DNA, 120 bp, Artificial Sequence
  ENSG00000287289_3 (sequence is synthesized)
acatgtcatgttctttattgatttctgttagatgttggtacttgtttgacctgagtatagatgtcggaggttgctaacatagagataattgagaacttaatacaagtatacttggtttgc

SEQ ID NO: 820070 - DNA, 120 bp, Artificial Sequence
  ENSG00000287289_4 (sequence is synthesized)
caagtggctattgataagaatagaggagtatatttagagcagggaggggtccccaaccctgaggccgtggtccagagacggttcgtggcctgttaggaaccagactgcacagcaggaggt

SEQ ID NO: 820071 - DNA, 85 bp, Artificial Sequence
  ENSG00000287289_5 (sequence is synthesized)
cctgtcagatcagcggtggcattctgcatgtgagggatgtaggttgcatgctccttttgagagctaatgcctgatgacctgaggt

SEQ ID NO: 820072 - DNA, 120 bp, Artificial Sequence
  ENSG00000287289_6 (sequence is synthesized)
gcatgctccttttgagagctaatgcctgatgacctgaggtggaactgtttcatcccaaaaccgtcccctctgccacctgtccctccatagaaaacttgtcttccatgaaaccagctcctg

SEQ ID NO: 820073 - DNA, 120 bp, Artificial Sequence
  ENSG00000287289_7 (sequence is synthesized)
gtgcaaaaaaggttggggacggctgatttagagtatataaaagctagtatttcaaaaaacataaatagcatgcttgtgttaaaatacataaaatcatgccctccctctaacacctatata

SEQ ID NO: 820074 - DNA, 120 bp, Artificial Sequence
  ENSG00000287289_8 (sequence is synthesized)
attttaaataaattgacatctattttgttctcttagtgcaaatttgtggaaataattttgtttaatcactttgtcatatatatttctgaatacgtgttgtaaacctctttctcaagacat

SEQ ID NO: 820075 - DNA, 120 bp, Artificial Sequence
  ENSG00000287289_9 (sequence is synthesized)
ttcttaatctgaagtccctattttcgagctaccatcttaatatctcattattattattcttcattaacactttatttctcttattgagactacctggattttctgaatatattgttattg

SEQ ID NO: 820076 - DNA, 120 bp, Artificial Sequence
  ENSG00000287289_10 (sequence is synthesized)
tctaggaagaatttttccattatacagcatgagagtcctttgattaatatagcttttacaaaattcaaaaaattagtaattggaccaaggctagttccagaaaatacctttttttggctg

SEQ ID NO: 820077 - DNA, 120 bp, Artificial Sequence
  ENSG00000287289_11 (sequence is synthesized)
tggaccaaggctagttccagaaaatacctttttttggctgaatacaaccaatatgcaccaagcagtgcattgcccagactggagtgcagtggagcgatcttggctcattgcaacctccac

SEQ ID NO: 820078 - DNA, 120 bp, Artificial Sequence
  ENSG00000287289_12 (sequence is synthesized)
ctgggattacaggcgttagccaccgcacctggcccatcctccatcttttagcataaaacatagctatctacaagagacagatactcagaactccaaagagaaaaatcacaaacaactcta

SEQ ID NO: 820079 - DNA, 120 bp, Artificial Sequence
  ENSG00000287289_13 (sequence is synthesized)
tcagaactccaaagagaaaaatcacaaacaactctattcataaagctctctgggctttgataatacaatgtgtgataatgggaaagaataaaaatagttatcctacctttcctgtatgaa

SEQ ID NO: 820080 - DNA, 120 bp, Artificial Sequence
  ENSG00000287289_14 (sequence is synthesized)
ttttatcttaaaagtatccaaatagcttgtgaaggaaagtttttatttattaactaattcaggctagtaaattcaagaaacgaatttagaaaatcgcctaaaacgattcttgcaaaaaca

SEQ ID NO: 820081 - DNA, 120 bp, Artificial Sequence
  ENSG00000287289_15 (sequence is synthesized)
gaagtgtaactcaggccaaagtgtcaaggtattttatctagttaataacaataataataataaaatcctgtatacagaatttcaaacactactccaaggtctcctttaaataaggatgga

SEQ ID NO: 820082 - DNA, 120 bp, Artificial Sequence
  ENSG00000287289_16 (sequence is synthesized)
aatttagacacagagaggtaaaagaacctggccattgtcatgcaggaagcaagtggctttatccatacataccattatcagaagctaagtcttgaatgctggtctcttgtcactcttaag

SEQ ID NO: 820083 - DNA, 120 bp, Artificial Sequence
  ENSG00000287289_17 (sequence is synthesized)
atatcagactgtgattctggtgctttttctatgacactcaaagtagaatgtccttggaacgtccctgaggatctaccagggaaacaaaggcaatgagccatcaaatagctgttgttttta

SEQ ID NO: 820084 - DNA, 120 bp, Artificial Sequence
  ENSG00000287289_18 (sequence is synthesized)
cttttattttgctggaaggagcctgaaaatgaaatagcgagtgaagactctgaggcctctctccacagattgaagtttagggaagtccatgtctgcagtggtcaggttcatcgattgtcc

SEQ ID NO: 820085 - DNA, 120 bp, Artificial Sequence
  ENSG00000287289_19 (sequence is synthesized)
cgtcagttttaagaaaaaactttggttctccataattagtggacctgtgggaagaaggactcggccacagattcttccccagccttttccataactctgtggcttactggtcagaaagaa

SEQ ID NO: 820086 - DNA, 120 bp, Artificial Sequence
  ENSG00000287289_20 (sequence is synthesized)
ggaaaagtatgaggaaaacaaacggaaacggaccttctttgcgcattggctctcggcctgctcaatcagcgggctggacgcggaggcaacttccttactgtgtgcggacttctgcggagt

SEQ ID NO: 820087 - DNA, 120 bp, Artificial Sequence
  ENSG00000287289_21 (sequence is synthesized)
tctgcggccttctgcggagttctgcggccttctgcggagttctgcggccttctgcggacttctgcctggggaagttgggaaatatgtattgtcgaatgaggccctgggagattatccttg

SEQ ID NO: 820088 - DNA, 120 bp, Artificial Sequence
  ENSG00000287289_22 (sequence is synthesized)
gaagcaacaacctctgaacctgtgtgttgattgaaaatctcttacagccagagtttcacaaacttgatgcgattgccccctcccaacacaaaaattattggggaacagaaaaaaaatcat

SEQ ID NO: 820089 - DNA, 120 bp, Artificial Sequence
  ENSG00000287289_23 (sequence is synthesized)
taagttttgaaatccaatcgtatgagtgtggtttcttctcaagataatttatctctggagcactgagttagggaagtatggaaataggggataaactgtaagacactctgctgcttttta

SEQ ID NO: 820090 - DNA, 120 bp, Artificial Sequence
  ENSG00000287288_0 (sequence is synthesized)
ggggagcctctgttagcccttggcttctgtaacaggcaaactgaggccagcccctcttgaaggcagtccttgaactctgccctaggtgggatggttgcctcattaccagtcaagtaatgt

SEQ ID NO: 820091 - DNA, 120 bp, Artificial Sequence
  ENSG00000287288_1 (sequence is synthesized)
tgcacctcagagtatttgtgcaatacagccacttcccacaaacttcggatttcaaagtgctttgtaggctcctggagagatagagtagcggattgggagtgagactccaacaggggaaga

SEQ ID NO: 820092 - DNA, 120 bp, Artificial Sequence
  ENSG00000287288_2 (sequence is synthesized)
aacttggccaagctgtgtgtggagacaggaattaagcctcgtttcctctagatcagagagatggcttctggattcttctttccctgcaatccagcttcttctcctggggccctcatactg

SEQ ID NO: 820093 - DNA, 120 bp, Artificial Sequence
  ENSG00000287288_3 (sequence is synthesized)
ctgggatcatcatccaggcttttgcactgggccaggaatttgggagtcatcctggatccgtctgcccctgtcaacctttctctgtcaacagatatttattgggcatcttcaacagccagg

SEQ ID NO: 820094 - DNA, 120 bp, Artificial Sequence
  ENSG00000287288_4 (sequence is synthesized)
ccctgttcatggtgctgaagaacagcatgtataaaacaaccctgccctcacagggcgatcaccagtgacctgtggtgtggagtctccttttacctctgtctcctccttcccattgtcacc

SEQ ID NO: 820095 - DNA, 120 bp, Artificial Sequence
  ENSG00000287288_5 (sequence is synthesized)
atctttggtcctcctctgtcatctggaatactccacttggtaaccagcatgatcttataacgctagttttacccttgtcagcactttgccgaaaacctcaaataaagactttttaaaaaa

SEQ ID NO: 820096 - DNA, 74 bp, Artificial Sequence
  ENSG00000287283_0 (sequence is synthesized)
ggctaatttttttgtatttttagtaaatatggggtttcactgtgttagccagggtgggcttgatctcctgacct

SEQ ID NO: 820097 - DNA, 120 bp, Artificial Sequence
  ENSG00000287283_1 (sequence is synthesized)
aagtgctaagattacaggtgtaagacaccacaccggttgactttttttctagatcatccctaccattatcataagaaatgaaacttaaaaagtcttgcttcatatatccatacacatagt

SEQ ID NO: 820098 - DNA, 120 bp, Artificial Sequence
  ENSG00000287283_2 (sequence is synthesized)
tgtataaatcaataattttccctctccctaccattatcataagaaataaacttaaaaaatcttgcttcctatatccacacacatagttgcataaatcaataatttttcattattacaaac

SEQ ID NO: 820099 - DNA, 120 bp, Artificial Sequence
  ENSG00000287283_3 (sequence is synthesized)
tataactcatactcaatatttcttatgcatttctgaaacagaagtgaagtcataaactgaaagagaccccagagagtccgtctttcctataacacaactctctatcatacagagtatttc

SEQ ID NO: 820100 - DNA, 120 bp, Artificial Sequence
  ENSG00000287283_4 (sequence is synthesized)
ttaaatcttgataatgattctgtttgttaggcatgtatctttattctcttttcatagatgtaaaacctgactttcgagtcagatagcattcattcattcattgaacaaattaagagcttc

SEQ ID NO: 820101 - DNA, 120 bp, Artificial Sequence
  ENSG00000287283_5 (sequence is synthesized)
atttgctaggcactatggagctagagaagactcttgtcatcaaagaccccatagtcctgacaaaaacaaagctgtgttcaccacaccaatttttctcccctagtacataagaagattgat

SEQ ID NO: 820102 - DNA, 120 bp, Artificial Sequence
  ENSG00000287283_6 (sequence is synthesized)
tctttctgcccccacctcctactacagctagactgtggccatgtgactgaaagtttggttaatgatgggtgaacataataaaaaatatttctaggcctgaccctggaaaaatataatctt

SEQ ID NO: 820103 - DNA, 120 bp, Artificial Sequence
  ENSG00000287283_7 (sequence is synthesized)
actatgttattttggagtttaattttggagtttaatttcttaccactgcatagtctattctttcctgtctaatacaaagtttcatgagcaagacagacactaatcaaatagttacagaaa

SEQ ID NO: 820104 - DNA, 120 bp, Artificial Sequence
  ENSG00000287283_8 (sequence is synthesized)
atacaattgctttgaagggaacaatctgagtgctctgaactgaagtaacagggaagcctttttgtagtagatcggataatatttcagaaatatttaatccctcccttattttcatagaag

SEQ ID NO: 820105 - DNA, 120 bp, Artificial Sequence
  ENSG00000287283_9 (sequence is synthesized)
gaatataccagtgatgttggttgggtttggctttgtgacttgctttagtcaataaaataggtggaagtaatggtggaccggttctcaatttatcccttaaaaggtcttgtgtgtttctgc

SEQ ID NO: 820106 - DNA, 120 bp, Artificial Sequence
  ENSG00000287283_10 (sequence is synthesized)
tcacattgttccatttctgccacacataaaggctataaaagaaacctgtccaggttagcccactggccctaggaggaatatgagcgacatatggagcagagttgtaccaacagagactcc

SEQ ID NO: 820107 - DNA, 120 bp, Artificial Sequence
  ENSG00000287283_11 (sequence is synthesized)
ttagatcagctgacctccagacatgaacatgcccatatgagatcagcacaaccactgagtgaagtctatccttaccatcaggcccccaaccaatgctcacacatttggcctaaatagatg

SEQ ID NO: 820108 - DNA, 120 bp, Artificial Sequence
  ENSG00000287283_12 (sequence is synthesized)
tttagaattgcataccacagaaattttgttattgatatacacactattacactaataactaactgacatatcttctcagataaagacctcaatgaggtggtaacagtttagtgaacacct

SEQ ID NO: 820109 - DNA, 120 bp, Artificial Sequence
  ENSG00000287283_13 (sequence is synthesized)
aaaggaagaaaattctgggagaagaaacaacgttcaaaaaggcactaaggctgcattgaacacaagccgaaagactgttctcaggcagatatgacagtgtctgcacttacatgccatggc

SEQ ID NO: 820110 - DNA, 120 bp, Artificial Sequence
  ENSG00000287283_14 (sequence is synthesized)
atgactggaataacaaggatcaaatggacatgggaggattctcaacagctacagaaacttttttttatttattcctcattaatcatcatcattttagacccttaattcccttattgctca

SEQ ID NO: 820111 - DNA, 120 bp, Artificial Sequence
  ENSG00000287283_15 (sequence is synthesized)
acttaaagacacatcctaccacactctaaaacttgtttctttccttctgattccttatcacaattgtttactggtaattttatccttttttgtatattttctgtatttgtcattagactg

SEQ ID NO: 820112 - DNA, 120 bp, Artificial Sequence
  ENSG00000287282_0 (sequence is synthesized)
cccattcatgctctctgaggtctggcaggaccagaggtgctaaaagctcaggtctccactgcttagtattctcagaatggccaaaagggagtcatttgggctgaattatgttccctctaa

SEQ ID NO: 820113 - DNA, 120 bp, Artificial Sequence
  ENSG00000287282_1 (sequence is synthesized)
gagtcacctgctgatgatctaaccactgggacctcagaatgtggctgtatttggagctcgggtcctttaaaaggtgattgagttaaaattaggtcattagggtgggccctaatccatttt

SEQ ID NO: 820114 - DNA, 120 bp, Artificial Sequence
  ENSG00000287282_2 (sequence is synthesized)
gactattgtccttataagaagaggaaatttggacacaaaaagagataccaggggcacacaaaggagagaccatctgaggacatagcaagaaggcaatgatctgcaagtcaagaagagacg

SEQ ID NO: 820115 - DNA, 120 bp, Artificial Sequence
  ENSG00000287282_3 (sequence is synthesized)
cctcaggagaaaccaaacctgaagacacctggatcttggacttccagcctgcaatactgtaagaccataaattcctgttgtttaagccaaccaggctgtgtattttgttatggcagctcc

SEQ ID NO: 820116 - DNA, 120 bp, Artificial Sequence
  ENSG00000287282_4 (sequence is synthesized)
agaaaatgaacacagggagcaagagggcataacctcagggagcgtcctttgatttctctacctcctccaccccaggaagtcctctccatttagtcctacctttacactgcagctggcctt

SEQ ID NO: 820117 - DNA, 120 bp, Artificial Sequence
  ENSG00000287282_5 (sequence is synthesized)
gtccacattacaaaatctcttccttccctgactgtgtttccctccagagaagactagggtgtgttctggactaaggccacagacgcaaattttccctagaagagcctggaaaagaagcag

SEQ ID NO: 820118 - DNA, 120 bp, Artificial Sequence
  ENSG00000287282_6 (sequence is synthesized)
taagtcacggagctgcagttaagttataagaaaactcacctgaaaaaacagccaggggttttcacagggcaggccaattacgtaaagcacatctccactgtgtgttgtcttaagataatg

SEQ ID NO: 820119 - DNA, 120 bp, Artificial Sequence
  ENSG00000287282_7 (sequence is synthesized)
aggctcctcaccatcagcaagagctggctggaagcagagggatcagaacacttgcttttggagccctgggctgccatgtaaaggttctaactaccacaagatcactggatgagctgcata

SEQ ID NO: 820120 - DNA, 120 bp, Artificial Sequence
  ENSG00000287282_8 (sequence is synthesized)
caagcactctgtagggcatttctgctgagcctagccttccagcaattctcaccaagtctccagacacatgaactacaccatcttggactctccaaatcagcccatccaccagctaattaa

SEQ ID NO: 820121 - DNA, 120 bp, Artificial Sequence
  ENSG00000287282_9 (sequence is synthesized)
cattgaatgacttctgtcaacaccatgcataatgcagaaaacccaccagctgagccctgcccaaatccttgacctaaaaaaaattataaaatacaataaaacagctgttgttttaagcta

SEQ ID NO: 820122 - DNA, 120 bp, Artificial Sequence
  ENSG00000287281_0 (sequence is synthesized)
aggaggggacgcagagttcacggcgaagacggatcgcgggggctcgtcccgcccgggttgcgcgcagcgggggccgcgtgatggatgggccgggccgggcacccgggaacccgcgagcgc

SEQ ID NO: 820123 - DNA, 120 bp, Artificial Sequence
  ENSG00000287281_1 (sequence is synthesized)
ggggctgggctctgggctgcgtccgggggccccgacttggttattgatcggcccaagcgcaggagaactgactctataatgcatcgcctgaccaggaaaagtgtttgcttttgtgggagc

SEQ ID NO: 820124 - DNA, 120 bp, Artificial Sequence
  ENSG00000287281_2 (sequence is synthesized)
aaaagacaactttctgccccgccagagcgttgctaagtgagcggtaatgaccacgctagaaatttcatagggagaggctaatggcaggctgactctaaaagtgcttttaagtgcaacttc

SEQ ID NO: 820125 - DNA, 120 bp, Artificial Sequence
  ENSG00000287281_3 (sequence is synthesized)
tgtctaatcccttgagggggaagaaaacatcggcgactaagaaagttcaagttgtacaggacccgggtttttggggtcggggtcacttctgctctgcgtgactttgaagaggaagacctg

SEQ ID NO: 820126 - DNA, 120 bp, Artificial Sequence
  ENSG00000287281_4 (sequence is synthesized)
cggttttttccagtggattttcacacgtgttttaaagagaactcccggctcctgaaatgaaaggcccgcctgtagggttttgctgcctcccctctgcccacgccccacccccacagcctg

SEQ ID NO: 820127 - DNA, 120 bp, Artificial Sequence
  ENSG00000287281_5 (sequence is synthesized)
gatcaaagcgatcagacaaattattcagaagtaacacagccctgaaatgttcctaaacgtgactatttgaggcgatgaatcaagcgtgttccctccgcccccaacccacccccagaccga

SEQ ID NO: 820128 - DNA, 120 bp, Artificial Sequence
  ENSG00000287281_6 (sequence is synthesized)
aaatgtgactctggaaacggacttgcagagctggcttcggtttatatgcggttctgacccctgttgactttaggacaagccttcctgtttccagtactgcagcatcgccagacagcctcg

SEQ ID NO: 820129 - DNA, 120 bp, Artificial Sequence
  ENSG00000287281_7 (sequence is synthesized)
ccatgcaatcggctttccagatacgatttcactcctcaccaaagacacttctttagggcgattttaggattctatcaacgctagtaaaggaactacttaaacacgttgatttgtatcgcc

SEQ ID NO: 820130 - DNA, 120 bp, Artificial Sequence
  ENSG00000287281_8 (sequence is synthesized)
ttccctgactatgaaacattgaagtggaatactactcatcaataaaaaaaatataaactcctgatacacctcatggatggatgcatagatggatggatggatctgaaaaacatcgtgctg

SEQ ID NO: 820131 - DNA, 120 bp, Artificial Sequence
  ENSG00000287281_9 (sequence is synthesized)
aataaaagaagccagacatgaaagagctgccactaccaggagcacgctggcctgccggcgggaggaacagatgccagaggagacctgactgtgtcctcaaggccatgccccatcagccat

SEQ ID NO: 820132 - DNA, 120 bp, Artificial Sequence
  ENSG00000287281_10 (sequence is synthesized)
cccagcagagcccacagccacccacagaggaatgaggatccccatccaggatcaccggaactgcacaactgactcacaaacgtgtgaagagtaatgggtaacgtgttgaactgtgagcct

SEQ ID NO: 820133 - DNA, 120 bp, Artificial Sequence
  ENSG00000287281_11 (sequence is synthesized)
ttgagcctggggaggtttgtgatgcagcagtagctcccagacccttgaggctcttcggcacgaaggtgctgagccatgcacctatgcaaagccaaactctgcactaggcctactggggtg

SEQ ID NO: 820134 - DNA, 120 bp, Artificial Sequence
  ENSG00000287281_12 (sequence is synthesized)
tgcagagagagagggctgaacaaactgcggttccacccagaagacccagaagaacatttacggaggagtcagtgcaagaggcgagagagcatgcgtgaagaggctcgttcttgtggtgta

SEQ ID NO: 820135 - DNA, 120 bp, Artificial Sequence
  ENSG00000287281_13 (sequence is synthesized)
gaaaaggaggccagagtctcccagaccacgattcttttcctttaggtgtttcttgggcattttcaatcttaaatctcttcccatgttattgagatttctgattgaatgtccccattttcc

SEQ ID NO: 820136 - DNA, 120 bp, Artificial Sequence
  ENSG00000287281_14 (sequence is synthesized)
ctcagacagcaggccgtgtgtgagtcaccacctccatctttctatgtcctgggtgtgggcccagtgaaggacagttatggaaatttagagagaagaggtcgcaggtgtggtgggggtggt

SEQ ID NO: 820137 - DNA, 120 bp, Artificial Sequence
  ENSG00000287281_15 (sequence is synthesized)
gaagcttcagaagagaaaagaagcatggtggagagggtggactctggaggctactgcagagctctcccccaggctatgagggggcatgatggtcccaatagcctgagtctgtgttcattt

SEQ ID NO: 820138 - DNA, 120 bp, Artificial Sequence
  ENSG00000287281_16 (sequence is synthesized)
caactggctaccttgtgacgaggaagatggcccaggttcccagtgggaaatctatggttatcattaagaacgcagggcctgagatgaaacctggcaggtgaaaggcacctggttttatgc

SEQ ID NO: 820139 - DNA, 120 bp, Artificial Sequence
  ENSG00000287281_17 (sequence is synthesized)
aacctggttttgcagaagcctgtgggagggggcccaggggggaagggagcagagggcagtgttggctctggttcccccaccaggcaggtgggctagcacctgggtaaggggctttgcatc

SEQ ID NO: 820140 - DNA, 120 bp, Artificial Sequence
  ENSG00000287281_18 (sequence is synthesized)
tggagctggtcatgcctcagtccagatcctgcctttatcagttgatgggctgttacctgccagtggttatggtgaggactaaattacggaaagtcatcaaggatcttcattcattgccca

SEQ ID NO: 820141 - DNA, 120 bp, Artificial Sequence
  ENSG00000287281_19 (sequence is synthesized)
ccacagagcaggcactcaatggagaacactcaccaccatctatgttgttaatgttgcatctgcagcccttggtttcctggaaagactctacagtacaggggcaggttaggggccacaacc

SEQ ID NO: 820142 - DNA, 120 bp, Artificial Sequence
  ENSG00000287281_20 (sequence is synthesized)
aggaaacaagacacatctgagagaatgcatgggagcttatggaaggatgtacaaggctgggtgtgggaatcccggcacttcgggaggctaaggtggaaggatcacttgcatccaggattc

SEQ ID NO: 820143 - DNA, 120 bp, Artificial Sequence
  ENSG00000287281_21 (sequence is synthesized)
aagcctagcctggccacgtagtgagaccccagctctacaaaaaatcaaaaatcaactgggcatggtggcatgtgcctctaatccaagctactcaggaagcagagatgggaggatcgcttg

SEQ ID NO: 820144 - DNA, 120 bp, Artificial Sequence
  ENSG00000287281_22 (sequence is synthesized)
aataaataaataaataaataaataaagaaagaaagaaagaaagaaagaatttacaagaggggagttttagtggttgaaaaatcattcactcattccaggagcaagagccttgtgggtttt

SEQ ID NO: 820145 - DNA, 120 bp, Artificial Sequence
  ENSG00000287281_23 (sequence is synthesized)
cttcctgttcttgcctgggttatctctactgaaccaaagaatccttgttaggaatgctctggtggtgtcaatcaatgcgtttataaatcatttgcttttaccatggaaaaagatatcaca

SEQ ID NO: 820146 - DNA, 120 bp, Artificial Sequence
  ENSG00000287281_24 (sequence is synthesized)
aaacaacacagctgtagtgcaggtgcagatgaccatggaacggcagcctggcgttttcagtagagcactgggcagcagagtccctgggcctcggaaccccggcctgttaccacccaacac

SEQ ID NO: 820147 - DNA, 120 bp, Artificial Sequence
  ENSG00000287281_25 (sequence is synthesized)
catccctgggcaaaatgcgaaactcccatcagatccatgaatggaaaatgggcgtaattataattgcaccccactctctacctctcagctaaggtgagaaatgaatatgaggatgctcag

SEQ ID NO: 820148 - DNA, 120 bp, Artificial Sequence
  ENSG00000287281_26 (sequence is synthesized)
tgaaaatgctttgaagtctgtgaaatgcgaagcaaatgtgaagcgagaggaataataaggttctaaggacccacacttgggcgtttgctctgagctggcccctgtcctccacactgaacc

SEQ ID NO: 820149 - DNA, 120 bp, Artificial Sequence
  ENSG00000287281_27 (sequence is synthesized)
tacagcctctcctctcacctaatctgcacaaaaatcttacgaagcagacacacttaccatgctggcctttccgtgaaatttcaggtcttagtgtcgcccattactggtggcatttcatgc

SEQ ID NO: 820150 - DNA, 120 bp, Artificial Sequence
  ENSG00000287281_28 (sequence is synthesized)
cacaagttgggccatctgcacctccaagcacagggtcacagaagactttatcccgtcccttgggctgactgaatggttggtttgtgtcaacccctgttgtccctttgagcaactcggggg

SEQ ID NO: 820151 - DNA, 120 bp, Artificial Sequence
  ENSG00000287281_29 (sequence is synthesized)
caatggttatgggtagggcttaaaaaaccgtctggctgcaaacccagtgctgatacgaacaaggcctagtcaggcactaagtgttttgtgttccccaaagagatcttaatgaaatcccag

SEQ ID NO: 820152 - DNA, 120 bp, Artificial Sequence
  ENSG00000287281_30 (sequence is synthesized)
catgccactcactcctacacttaaaataccttttaagtgtaggaaagaaagtgctttcaaccccaccccagccatttggattcggagactccatttaagatgcacagctttcctccagca

SEQ ID NO: 820153 - DNA, 120 bp, Artificial Sequence
  ENSG00000287281_31 (sequence is synthesized)
caggggctgggtatccaaacgcagagcctcccccagactctctctaggcttagcctggcttggtgggctcaggagggattcaagattatttcatcctttatgtccattcgatgacagttt

SEQ ID NO: 820154 - DNA, 120 bp, Artificial Sequence
  ENSG00000287281_32 (sequence is synthesized)
atcatcattgccacctcatactctattgtagccaaacatcataaccagcaccatgtgaactacgtcactgacgccacattctttttctcggctgtcactaggctcaggtcaggacagccc

SEQ ID NO: 820155 - DNA, 120 bp, Artificial Sequence
  ENSG00000287281_33 (sequence is synthesized)
tcccggctgacttccgcgatactttctgtatctccttttcagtctgccctaaaatgacagctggacttccgacagtggtttcttatgtgggacacatggctcttatactctgggtggcac

SEQ ID NO: 820156 - DNA, 120 bp, Artificial Sequence
  ENSG00000287281_34 (sequence is synthesized)
ggattcctttattgccagtggcttaattttcccagatctatttccatgcagacagtgtgaggttggacttcatgcctcatgctcctgattggggctcggaagtctaacccagcttcctgc

SEQ ID NO: 820157 - DNA, 120 bp, Artificial Sequence
  ENSG00000287281_35 (sequence is synthesized)
agtgccgcccccagcttattcaatgcccaacctgcaggtcctaagttgaacccgcacactgcacgctcacctggtctgtgctgccagctgcattggaaatggaagcattaaacaccgttc

SEQ ID NO: 820158 - DNA, 120 bp, Artificial Sequence
  ENSG00000287281_36 (sequence is synthesized)
tccactgtcagccacctgctagctaatgagtgacatcatttaacactgttttgaaaagagagatttaaagttgttttgaaaactgaaggaaaaatacaaatgtttgagtgttaaacattt

SEQ ID NO: 820159 - DNA, 120 bp, Artificial Sequence
  ENSG00000287281_37 (sequence is synthesized)
tgcccaaatactaaaatgtgaatgtctttttattgtgacagttcacaggaaagcgggctatagcatgcctgtgcttgtcaatgaaaatcttagcactgagtttggtaaacattctggcag

SEQ ID NO: 820160 - DNA, 120 bp, Artificial Sequence
  ENSG00000287281_38 (sequence is synthesized)
tcgggaagccacttaaaaataaagtttaaagaaaagaaagagaagtgttcactttccttctaattttcccagatacgctcaatattctgctttattttttagtattttaactaaaataag

SEQ ID NO: 820161 - DNA, 120 bp, Artificial Sequence
  ENSG00000287281_39 (sequence is synthesized)
aaaactcggattctacctctatgtgtcctatgattgttgttgttttctctgattataaaatacaggtttgcagcagaaaacttggcaaaacagagatatgaagaataaaataaaaatcac

SEQ ID NO: 820162 - DNA, 120 bp, Artificial Sequence
  ENSG00000287281_40 (sequence is synthesized)
ctgtagttctaagccatgagaataatcatatatatattccctaggtattctgaagcatatgtattacagtccaaatatttaaaaacaaaatttgggtaatactttagatagagagttgta

SEQ ID NO: 820163 - DNA, 120 bp, Artificial Sequence
  ENSG00000287281_41 (sequence is synthesized)
ttctgattttttctattaatattataactttgaaacgagggacttcaccattgcttttatttttctttgctatgtaagtacttatgttctttatgaggaaaataaaaactatagaaaaga

SEQ ID NO: 820164 - DNA, 120 bp, Artificial Sequence
  ENSG00000287281_42 (sequence is synthesized)
aagataagaaaataaaatcagtaataatcccctcacttacaaatgactgctgttaacattttagttttttggtttctatctatttatgtgaaatttgaatgaaaatagtataatttcgct

SEQ ID NO: 820165 - DNA, 120 bp, Artificial Sequence
  ENSG00000287281_43 (sequence is synthesized)
gtctctatattgcttggtaacataatgatttaactgtataataaatagtatattacatgaatattttgagtaatagtctgtgtgataatttttattcggtgtgtggtgttccactacata

SEQ ID NO: 820166 - DNA, 120 bp, Artificial Sequence
  ENSG00000287280_0 (sequence is synthesized)
gaggagcacaggaagatgcctttatctcaagagctaggaaataaggcaactgtattaaattgtcaagggaggacagcagaccaacaaggatgaagaagcttgaaaaattcttcattgcag

SEQ ID NO: 820167 - DNA, 120 bp, Artificial Sequence
  ENSG00000287280_1 (sequence is synthesized)
ggtccactcattgtctctaatgatttgctgctcctcaaaagaatgtctacactcccgatcgccccttttgccatgagaaaagttgattttcactgaaccttcagagggtgaagaggaagc

SEQ ID NO: 820168 - DNA, 120 bp, Artificial Sequence
  ENSG00000287280_2 (sequence is synthesized)
ttttccttgacttctacacaggctggaaataaataacctccgcttaggacacccctggcaggggctttccaaaccacttccaaccctggagagaaagataatgatgtgcccaaacaacac

SEQ ID NO: 820169 - DNA, 120 bp, Artificial Sequence
  ENSG00000287280_3 (sequence is synthesized)
atctgcagatgttccgtggagcatcatcaccaaaaatgcacacgaaactgccactagaagcaaatggaggaagcacacagcaggactgggtgtctttaattgccattgcgaacgtgtgtc

SEQ ID NO: 820170 - DNA, 120 bp, Artificial Sequence
  ENSG00000287280_4 (sequence is synthesized)
catctgcaccacgtgaatgatttgcggcacagccgggacctggctcagttctcttgacacatacatcaactcacaagcactgaagtggcaaggctgtttgcagaagacatttaaggcaaa

SEQ ID NO: 820171 - DNA, 120 bp, Artificial Sequence
  ENSG00000287280_5 (sequence is synthesized)
ggcacagtaatggaaaacagcaaagaactgtgaggaactttgctggcactttttccagggccagcagctggaaagaggggccacaaaacatcagcaaggaaactgctgttctaaaagaaa

SEQ ID NO: 820172 - DNA, 120 bp, Artificial Sequence
  ENSG00000287280_6 (sequence is synthesized)
gacacaagaagctgtgcttccagaagagaaaagtagtcactgccaccccaggaacctggcatggagggatgcagtggtgtaataccactctctccttgcaccacccacaagcccagccca

SEQ ID NO: 820173 - DNA, 120 bp, Artificial Sequence
  ENSG00000287280_7 (sequence is synthesized)
tcctggggacagacgcatgctgaaagtggaggtcgggtctggaagggcaaaagcagatggcccagcatagcccaccacttttctttgtcaacatcaagtatttctgtgtctgtacgaaaa

SEQ ID NO: 820174 - DNA, 120 bp, Artificial Sequence
  ENSG00000287280_8 (sequence is synthesized)
accaaggttctgtcccagggaaatgacggagtcccatcagctacaggatcataacaaggagatgtcaattcagtcatactcgcctgaaagctacagcaccttgaacggttcacccaacca

SEQ ID NO: 820175 - DNA, 120 bp, Artificial Sequence
  ENSG00000287280_9 (sequence is synthesized)
cctcatctgcatgtggttctcgtggcacgtaaagccctaactgggtggtctcagtttcacaccgctatgactttgttttctgctggaagcagttccccttatcaccagagcctccaaacc

SEQ ID NO: 820176 - DNA, 120 bp, Artificial Sequence
  ENSG00000287280_10 (sequence is synthesized)
tagaaaagccaagaaagcagagatggaagcaattcctgatgtgggctatttggggcaaaactggtatctccccttatgtcccccgtgagtaagcattccacagacagtttcaaaacatta

SEQ ID NO: 820177 - DNA, 76 bp, Artificial Sequence
  ENSG00000287287_0 (sequence is synthesized)
cctgcctcagcctcctgagttgctgggacttcagcctcctgagttgctgggactacatgtgcacaccaccatgccc

SEQ ID NO: 820178 - DNA, 120 bp, Artificial Sequence
  ENSG00000287287_1 (sequence is synthesized)
atccaagactttataaagacatgtaagagggtgggagacagaaagcggaaaaggatacatcaaaactagcaatggatgaatgagaacatgtccagcctccagttaaggcaactgtggctt

SEQ ID NO: 820179 - DNA, 120 bp, Artificial Sequence
  ENSG00000287287_2 (sequence is synthesized)
caaaaaggaatcttaaataccagcacagaaatcagagggatcctaacctggctcaaaacagaagagaaacagtggctggccatacagcaggacgggcataactaacagaataccagcttt

SEQ ID NO: 820180 - DNA, 120 bp, Artificial Sequence
  ENSG00000287287_3 (sequence is synthesized)
ccagccattgtttcatccctcagcgataccacctgcttccgcgtggaacccaaacccccaggaaactaaatctgctcaggtcacccacctaggaataaataaaaacaggtttcaggccct

SEQ ID NO: 820181 - DNA, 120 bp, Artificial Sequence
  ENSG00000287286_0 (sequence is synthesized)
agggccgggcgggctgcgcggagcacctgcaggcgcctccatgggtgacggaagacagaggggctgaccaggtcttctacaggtgcttatggcgggagctccaggccagtccattagtgc

SEQ ID NO: 820182 - DNA, 120 bp, Artificial Sequence
  ENSG00000287286_1 (sequence is synthesized)
tgtttgtagtgtttggaatagtctgggaaccttctgcaaaagtgttcaggtggccattggctgaaccttccactctaaaacctgaccttcaagaaggcttttcctgagtcctatgagccc

SEQ ID NO: 820183 - DNA, 120 bp, Artificial Sequence
  ENSG00000287286_2 (sequence is synthesized)
tctgcctcctactcttactcctgccccagccttcccggagaccctgatgagtatgagcctaccttggaagccacagttcctccaggactaaggtaatgctgagaaccctacaaatcaggg

SEQ ID NO: 820184 - DNA, 120 bp, Artificial Sequence
  ENSG00000287286_3 (sequence is synthesized)
acgaaaaccaaggtcgcgaagcctggattttcaggttttatagaaattcttaggtgccttctccctgtgtgctgtcagggcattggggctgacagaggcacccatttgcagcagaactgg

SEQ ID NO: 820185 - DNA, 120 bp, Artificial Sequence
  ENSG00000287286_4 (sequence is synthesized)
ggtgaggctgaggggatcagaaagggaggagcaaggggtattttctgggtcaacacaggccagcttatcttgtgcagaaggatgtctcaggggtattttaaagcagcctttatcttgact

SEQ ID NO: 820186 - DNA, 120 bp, Artificial Sequence
  ENSG00000287286_5 (sequence is synthesized)
acccttcaatacagatatacttttgtacattccctctgtatttcaaggaaaagaatctctaaaattaactctttaatttatggaaaatgactcatttacagctaattcagtaagcagata

SEQ ID NO: 820187 - DNA, 120 bp, Artificial Sequence
  ENSG00000287286_6 (sequence is synthesized)
agaggaaaaaatactccacaatgccaccattctaacagaaccacactaatttttacgtatgttttccttatgtattttttctaaccatatttttgcataactgtaattatgatgtacata

SEQ ID NO: 820188 - DNA, 120 bp, Artificial Sequence
  ENSG00000287286_7 (sequence is synthesized)
tgctttttatataggtaaacttcttaatctggaataattttagatccacagtaaagttgcaaagatagtacaaattcgtcacatagccctcacccgatttcagctctccctaatgttacc

SEQ ID NO: 820189 - DNA, 120 bp, Artificial Sequence
  ENSG00000287286_8 (sequence is synthesized)
atcttacattactgtagtactggacatttcccaaaactaaggaaccaacattggtatgttacttttaactaaactccaaattgtattcagattttgccagttttttcactaatatccttt

SEQ ID NO: 820190 - DNA, 120 bp, Artificial Sequence
  ENSG00000287286_9 (sequence is synthesized)
ctccatttcgggatcccacccgggatcccacatggcattcagtcatcgtatctgcttagtctcctctcgtccgtgacggcatctctttccttgttttcgagaccttggcaattttgagta

SEQ ID NO: 820191 - DNA, 120 bp, Artificial Sequence
  ENSG00000287286_10 (sequence is synthesized)
gggtcaagtgttttgtagaaagttcctcgaattttgctcctgtgtttatgttgtttgttgtttttctcatgattagactgaggttatgggtttctgaatgaatgtcagggaagatgtacc

SEQ ID NO: 820192 - DNA, 120 bp, Artificial Sequence
  ENSG00000287286_11 (sequence is synthesized)
cctttcattgtattagtaggtacatgacatccaatgacatctttggagatgttaacgttgattacttggttaaggtcgtgttagctctctctactctaaagttgctattttcctctttct

SEQ ID NO: 820193 - DNA, 120 bp, Artificial Sequence
  ENSG00000287286_12 (sequence is synthesized)
atatccttttatttaaaaaagtgaatcactaattccagtccaccctcaatgggagaaggaattaaactccacctcctgggagaatttacgtattttgtttagaattcttctgtgagaatt

SEQ ID NO: 820194 - DNA, 120 bp, Artificial Sequence
  ENSG00000287286_13 (sequence is synthesized)
tatttatttggtcatttatttatgtatgtatggactaataaatatatatttgacatacactttttctaacttcttctcacataacattgtattacaagactttttccccatgttactatc

SEQ ID NO: 820195 - DNA, 71 bp, Artificial Sequence
  ENSG00000287286_14 (sequence is synthesized)
ataacattgtattacaagactttttccccatgttactatcataatttatttttttgtttgagacagagtcc

SEQ ID NO: 820196 - DNA, 120 bp, Artificial Sequence
  ENSG00000287286_15 (sequence is synthesized)
gctgggattacaggcgtgagccactgtgtgcggctcactatcataatttttataactgtcattttgatggttgcatcaatttttttattttccattaactttttactttcataaattatg

SEQ ID NO: 820197 - DNA, 120 bp, Artificial Sequence
  ENSG00000287286_16 (sequence is synthesized)
aactttttactttcataaattatgctgcagtaaacatctttaaacaatattctgtgattctttgtactctcagctctggcatggtgtctggaacacggaggcatctatagatgtttggga

SEQ ID NO: 820198 - DNA, 120 bp, Artificial Sequence
  ENSG00000287286_17 (sequence is synthesized)
ttgacggatgattgaatgaataaataaatgctgggctgccattgtgaatcaatggtccttgttttcctcttcaacagtctttccaattttggaatatgatcatctaaaatctaagttaaa

SEQ ID NO: 820199 - DNA, 120 bp, Artificial Sequence
  ENSG00000287286_18 (sequence is synthesized)
tgttgagaacagaagtttgggaacttactggaaatcaagctttggcttcctgtgaactacaccagtttgtaacaatgaacaaaagggccttagaacaaagtgaaggttttgtactgtaag

SEQ ID NO: 820200 - DNA, 120 bp, Artificial Sequence
  ENSG00000287286_19 (sequence is synthesized)
ctattttcctatctctagttgaaaaacatttgaacattttatcaacttcagcagtctttcacatggctttttcattctcctctcagtttaatttgtaaatatgaagatttttaaatatgt

SEQ ID NO: 820201 - DNA, 120 bp, Artificial Sequence
  ENSG00000287286_20 (sequence is synthesized)
agggtgtgtttacagcatataaatatcatcttatctcctggtttagtccctggcaaggaaagagctggcagtttaataataaagtgactgaaggacatttgggatgtgtgtcctctgatg

SEQ ID NO: 820202 - DNA, 120 bp, Artificial Sequence
  ENSG00000287286_21 (sequence is synthesized)
atgactgctggacaaacacaacaggagcagttgcagacaaagtagctgagggagaagacaggagatgaggacacgctcactactgcagagacttggtgagcactaagaggggaggtagag

SEQ ID NO: 820203 - DNA, 120 bp, Artificial Sequence
  ENSG00000287286_22 (sequence is synthesized)
gtggtcacaatcccgcccctcatgccacagtgtgctggtgctttttttgttttgttttgtttttttgagacagggtctcgctcttcatccaggatggagtgcaatggagcaagcttggct

SEQ ID NO: 820204 - DNA, 81 bp, Artificial Sequence
  ENSG00000287286_23 (sequence is synthesized)
ctcttcatccaggatggagtgcaatggagcaagcttggctcactgcagccctcgccttccaggttcaagtgattctcatga

SEQ ID NO: 820205 - DNA, 120 bp, Artificial Sequence
  ENSG00000287286_24 (sequence is synthesized)
ggtcttgaattcctgacctcaggtgatccccctgccttggtctctcaaagtactggatgacactcgtgagccaccgcgcccggctcctcatcccacaaggtgcttctaatcattgttcca

SEQ ID NO: 820206 - DNA, 120 bp, Artificial Sequence
  ENSG00000287286_25 (sequence is synthesized)
tgcttctaatcattgttccactgaggcgcagggaggaaaataatgtatgatcaagaacacctgaatttgtgtgctagtggcagaaaagtaatgagagatttattttagaggaaaacatcc

SEQ ID NO: 820207 - DNA, 120 bp, Artificial Sequence
  ENSG00000287286_26 (sequence is synthesized)
cacttacagaggaagttgaagacaattaattttcaaacctgggtgactaatggttaggtttttggaaatacggaatttatgctggttttagacacactggttggagatgacaaggggaca

SEQ ID NO: 820208 - DNA, 120 bp, Artificial Sequence
  ENSG00000287286_27 (sequence is synthesized)
tttaaggggaaatgttgagagagttgcagcgtagagctggagctccagtgggccaggagcagaagagaaagatgctagctgctcacagaagtgggaactgaagcatctaaggcaagtcag

SEQ ID NO: 820209 - DNA, 120 bp, Artificial Sequence
  ENSG00000287286_28 (sequence is synthesized)
atgttgcggagaggaagacacctcattttaagtgacagttacaccatgcaccagaaacccagagaagtgaagtggttcgctcgaggtctcatggcaagttagagacacagccactccacc

SEQ ID NO: 820210 - DNA, 120 bp, Artificial Sequence
  ENSG00000287286_29 (sequence is synthesized)
tcactttccttgatgtgtgtggtccagtttgctttacattataacacagaaaccttctcaatgttcagatatacctgctttacagtggacacatgccatttcttgacagtcaaggcaggc

SEQ ID NO: 820211 - DNA, 120 bp, Artificial Sequence
  ENSG00000287286_30 (sequence is synthesized)
tgacgaaagacagaattttatttccttagtttattaaagatgacaatgaactgccaggctgcacaagcaccacagcaggtggaaacgcagttcagagcacgggcggcacacacggaacat

SEQ ID NO: 820212 - DNA, 120 bp, Artificial Sequence
  ENSG00000287286_31 (sequence is synthesized)
ctctactaagactcgcactccttttatgttagttcaacgaaagctctaaatccttggcagagaacgtcaaaaacagcctcatttaagtggaaaatatttgtcttccactcttctgctatg

SEQ ID NO: 820213 - DNA, 120 bp, Artificial Sequence
  ENSG00000287286_32 (sequence is synthesized)
tcttgaatcttgtctccacctggtaagcaaactatgttttttttctttccctttacttacagaaagaacactatcacctgccttcatttagaaggaattctcttcagtgcattcaaagct

SEQ ID NO: 820214 - DNA, 120 bp, Artificial Sequence
  ENSG00000287286_33 (sequence is synthesized)
tctccccgcaacagcaggggattttcagatagtggtaacttgcaaagtgcttccaaaacatcccatcctctacccacttcccccctcttgaataaataactgggtatttggaaggtgagg

SEQ ID NO: 820215 - DNA, 120 bp, Artificial Sequence
  ENSG00000287286_34 (sequence is synthesized)
acggcatcgtgtcagagtcactaaaacagacgcacgatctaaagggatggggtgcggttgagggagctagggaaaaataagtgacaagtgaggagcctatgagactgttgagttcggctt

SEQ ID NO: 820216 - DNA, 120 bp, Artificial Sequence
  ENSG00000287286_35 (sequence is synthesized)
cagaagctgtcagcattgtcatcctttgatcctatgctgatgtgaaacaggcaggacaagacggcacatctgtcctccagcgcagtgacctggagaaagagctggatgtgtcaccttttt

SEQ ID NO: 820217 - DNA, 120 bp, Artificial Sequence
  ENSG00000287286_36 (sequence is synthesized)
ggtgtgagccactgtgcctggcctggatgtgtaatttaaaccaaaactggaagtagagctcatttttataaactcctgggtctgaatctgggacctaacccctagttaaacttgagttct

SEQ ID NO: 820218 - DNA, 120 bp, Artificial Sequence
  ENSG00000287286_37 (sequence is synthesized)
aacccctagttaaacttgagttctgtggggtcattcttaaagctccctgaaggacctgggcacttctagtcacagcccttcagaacttctgggacttggctttttgagtctcactatgaa

SEQ ID NO: 820219 - DNA, 120 bp, Artificial Sequence
  ENSG00000287286_38 (sequence is synthesized)
cagaagggagaacagcctcagggtcttctagccctacatggctttcagatcccaactttgaggcagaggaatcaagggcaggggccagttcccacatgttccctctcacgctggtggagc

SEQ ID NO: 820220 - DNA, 120 bp, Artificial Sequence
  ENSG00000287286_39 (sequence is synthesized)
ctcagccctggccatcaccttaatgcctctcccacttccctgggagactccttcttaccgccagctcaagctctcatcagcttccaccaaccacaggcaactttccgctcagcttccagg

SEQ ID NO: 820221 - DNA, 120 bp, Artificial Sequence
  ENSG00000287286_40 (sequence is synthesized)
gcagcacccacgcccatttctttcctaccagcaagcaactatgagaagacatgcccatgggcagaattcaatcccagaacaaaaatgatgcaggctttagttcacagagctgccagctct

SEQ ID NO: 820222 - DNA, 120 bp, Artificial Sequence
  ENSG00000287286_41 (sequence is synthesized)
tggagaagccactctgaccagtgttttcacagaggttagaagctgcatcaacttaaggaacatcacaaacacacacatggccccacccaaggacttcactgtcaacacacacattaacgg

SEQ ID NO: 820223 - DNA, 120 bp, Artificial Sequence
  ENSG00000287286_42 (sequence is synthesized)
gggggaagggggaggcagcacaccaaaatcagcattatcaaaaggacttcaccatcaacacacattaacggggggaggggggcagcacactaaaatcagcattatcaaatgaacagataa

SEQ ID NO: 820224 - DNA, 120 bp, Artificial Sequence
  ENSG00000287286_43 (sequence is synthesized)
acattaccaggctacacagagttaagtgcataattggcataaaggctcttgttatcccaagaacacagggacattcacactcacatccacaaaccgtcaagttctgtaacagcactaata

SEQ ID NO: 820225 - DNA, 120 bp, Artificial Sequence
  ENSG00000287286_44 (sequence is synthesized)
gcaggaagcttttctccaactttgaccaaagaagctaaggcaagagagactcggccaccagggaaggacccagctctgctgcaggaaggggagagaacggagtcgggttgtacttttact

SEQ ID NO: 820226 - DNA, 120 bp, Artificial Sequence
  ENSG00000287286_45 (sequence is synthesized)
cagaagcacaacgaccatctaacagaggacagagtcatcagggacacgctaagaagatggtgggtgaggttcctgtcctcaccttaggatggcatcagggacctgcctgagcttcaaaga

SEQ ID NO: 820227 - DNA, 120 bp, Artificial Sequence
  ENSG00000287286_46 (sequence is synthesized)
tcacacctgcaccaaaaagccaggttaactaagagaccttaacaccaagagggggccgaccgctcctctgagtaagcgctccttcagcgacagagctggcgcctcacgtatgcttgcggc

SEQ ID NO: 820228 - DNA, 120 bp, Artificial Sequence
  ENSG00000287286_47 (sequence is synthesized)
gtaaggctacaggtgagcctggcctgagcatcagttctgttctttgcttcaagatcaccaaggtagatgaagaaagtcagcttgtggcatcctctatgcttcaaatatttcaaacaggaa

SEQ ID NO: 820229 - DNA, 120 bp, Artificial Sequence
  ENSG00000287286_48 (sequence is synthesized)
ctcccggcaacatagggacattcacagctgcctctgaggtctctgaggagtctaggatagtcaggattgttctgtggcccccaaaatacccaaataagtggacgaaatgcccatgacgta

SEQ ID NO: 820230 - DNA, 120 bp, Artificial Sequence
  ENSG00000287286_49 (sequence is synthesized)
gtcctattctctgctgcttctcctcggggcacagtctgaccccagtccaggacagggagagggaaaacgccatccccgtttcagcagcaggagaggtggttgagaaaggcctggctcaga

SEQ ID NO: 820231 - DNA, 120 bp, Artificial Sequence
  ENSG00000287286_50 (sequence is synthesized)
agctccagaactgaaacaaaggaaaattggaaatgatacctgacatgcaggtgaaacctagaggagaaggccacagacgctggaagaacttggtcttgctgtctcttccactgacagagg

SEQ ID NO: 820232 - DNA, 120 bp, Artificial Sequence
  ENSG00000287286_51 (sequence is synthesized)
cactagaagcttcactgaaggacccgcatgtcagttctgatggaaacacctggtgtttacaaattatctgtcaccacagactctggacccatcaacctgccgacggctgactgcacacag

SEQ ID NO: 820233 - DNA, 120 bp, Artificial Sequence
  ENSG00000287285_0 (sequence is synthesized)
tggttagaactgaggaggccctaccagcaggcaaaagtcaggccttgtccagcaatggaggtacatgcacctctgcaccagatgctcctgcctttttctttcgtaattttgaaggacctc

SEQ ID NO: 820234 - DNA, 120 bp, Artificial Sequence
  ENSG00000287285_1 (sequence is synthesized)
agctccctgcctcctagatttttgctactatggtctcagagctgtgtaatttggatgactgagatggaaaaacctctggaaaacctttatttatgttgaataagtattccttgaatcctt

SEQ ID NO: 820235 - DNA, 120 bp, Artificial Sequence
  ENSG00000287285_2 (sequence is synthesized)
cctcagcatcctgggttatatttgatttgctctgctcatgataacttcatgccaaggagactgctatcagttctcttaaaacagatcccaactccctgctcatagtggccaaaggaatgg

SEQ ID NO: 820236 - DNA, 120 bp, Artificial Sequence
  ENSG00000287285_3 (sequence is synthesized)
tccctgcacaaaacctctgtttctacccttccattcactcggctcacttttctgctcttagtaccctttgtttcttgtgaactctccagcaggagtgacttgcaatttgtatccactgac

SEQ ID NO: 820237 - DNA, 120 bp, Artificial Sequence
  ENSG00000287285_4 (sequence is synthesized)
acttaagttctcggaagtgctggagaagtgtatggaagtaaattatcctgatgtataattttgtgcatgtgaaactcaccgtggaagtgcctatctaatttcagtatggaacacagctaa

SEQ ID NO: 820238 - DNA, 120 bp, Artificial Sequence
  ENSG00000287285_5 (sequence is synthesized)
acatttggatcaataatccagttttgaaaccacacttcatttaaagtacaatgtgctgaaaaaaatgaaaaaagggtgctttcaaatttgtacttagtaaactttcactagatcacatca

SEQ ID NO: 820239 - DNA, 120 bp, Artificial Sequence
  ENSG00000287284_0 (sequence is synthesized)
tcatgtcacctgggactagacagatttacttctttttcaatctggatgcttttttattttcttgcctaatttcactggggagaatctttagcagtgttaaagaaaagtgatgaccattct

SEQ ID NO: 820240 - DNA, 120 bp, Artificial Sequence
  ENSG00000287284_1 (sequence is synthesized)
aagtaacaccgagggttagttcagtgatctcatcaacttagcttccacaaagcctcctggttcctgttttctacgtatctttcgtcatctcagtaaggcaagtgaaaaactttgctgaga

SEQ ID NO: 820241 - DNA, 120 bp, Artificial Sequence
  ENSG00000287284_2 (sequence is synthesized)
aaacactgtccctgtccttccctcaaggcaacgtccaacttaaacaaattggcccatgcttgatacacacttgccattcatgtcctcaagcttccgaaggcctgtcagcaaatgaatgaa

SEQ ID NO: 820242 - DNA, 120 bp, Artificial Sequence
  ENSG00000287284_3 (sequence is synthesized)
tggaggtcatgtttatacttacactgtcaacagtcagcaattgttgggactgaattattctcatggctagttattaaatcattaagtcttaaaagtttattcatcctaacagtgctcagg

SEQ ID NO: 820243 - DNA, 120 bp, Artificial Sequence
  ENSG00000287284_4 (sequence is synthesized)
acaatctagttttgtttttctaaatgatgaataaaatgttttcaaatttgagggtctgaatgaacctaacaaattatcacccttctaaaaggaacttataacagagccatgatttataac

SEQ ID NO: 820244 - DNA, 120 bp, Artificial Sequence
  ENSG00000287284_5 (sequence is synthesized)
ccatcaacgaggaaacagaaaggtgaagtgaaactcactatatctcacgatatttccaatgcagactatggagagatagagaagagataagaaagagaaagagttccagggaacatgtgc

SEQ ID NO: 820245 - DNA, 120 bp, Artificial Sequence
  ENSG00000287284_6 (sequence is synthesized)
gagttccagggaacatgtgcaggatgtgcagttttgttacataggtaaacgtgtaccatggtggtttgctgaacctatcaacccatcactgaggtattaagccccacatgcattagctat

SEQ ID NO: 820246 - DNA, 120 bp, Artificial Sequence
  ENSG00000287284_7 (sequence is synthesized)
ccccgaccccatgacaggacccagtgtgtgctgttcctttccctgtgcccatgtgttctcactaaaaacataaaattttaatagaatctcttttcatttagaaggtgacaattctatagt

SEQ ID NO: 820247 - DNA, 120 bp, Artificial Sequence
  ENSG00000287284_8 (sequence is synthesized)
aacttctaaagctaattaaaattgcttataatttgattatatattatatactatttaaaaacatagcaccttatttcatggctgaggttatctctagaaatacaaatatctttttgcctg

SEQ ID NO: 820248 - DNA, 120 bp, Artificial Sequence
  ENSG00000287284_9 (sequence is synthesized)
gaaatacaaatatctttttgcctgtcttttgaaaacacagaataatacagtcatgtttacaaataatctttttagagcgtgcaataaaagagttctaccctggctaagaagaaattactg

SEQ ID NO: 820249 - DNA, 120 bp, Artificial Sequence
  ENSG00000251081_0 (sequence is synthesized)
atgaatattaataatcacattttcttactcagagatgtccagatatggaaagagaatgtctttactttggtttaatcagatacaaggacaagtagacttgtggatactgcccacttttgt

SEQ ID NO: 820250 - DNA, 120 bp, Artificial Sequence
  ENSG00000251081_1 (sequence is synthesized)
aagtgatctgaacagcaagctttgaagagctgatagactggcatttcctcaaaaggatctctacatacagtgtgaaaaaaataagagaagaaatggaagcctagaggcaagatgacagaa

SEQ ID NO: 820251 - DNA, 120 bp, Artificial Sequence
  ENSG00000251081_2 (sequence is synthesized)
tggatctgaatgctaccaagaaggtcaaattcaacggtgcttacaggcataccttggaaacattgcagatttagttctagaacaccacagtaaagcaaatattgcaagaaaatgaatcac

SEQ ID NO: 820252 - DNA, 120 bp, Artificial Sequence
  ENSG00000251081_3 (sequence is synthesized)
atgaattttgggtttcccagcgcacataaaagttatgtttacactatactatagtctaagtgtgtaatagcattatgtattttaaaagtacatgccttaattaaaaaatattttattgct

SEQ ID NO: 820253 - DNA, 120 bp, Artificial Sequence
  ENSG00000288101_0 (sequence is synthesized)
gaaaattgatggagataaaatattattaaaggattagattggaaaaacgtggcatttcactctggagcattcatttttacttacttggattaagacacccatttcacaagtgactaatac

SEQ ID NO: 820254 - DNA, 120 bp, Artificial Sequence
  ENSG00000288101_1 (sequence is synthesized)
tcagggatggtctaagaagaggcaacattgcttagacacagagaggagaaatgaagcgagaagaggaaaaggctatgtgaaagcagaagcggaggttggagttatcctaccacaagccat

SEQ ID NO: 820255 - DNA, 120 bp, Artificial Sequence
  ENSG00000288101_2 (sequence is synthesized)
ggaatgcctagagctaccagaaacagaagaagaaagttcttccctcatcttcagaaggaacacagcattgcagaaagcttgattttaaacttctaggctctagaatagtaagagaataaa

SEQ ID NO: 820256 - DNA, 120 bp, Artificial Sequence
  ENSG00000288101_3 (sequence is synthesized)
tcaatttatgttgttgatttccattgttttccattatgttgaatgtgtttggcctgttttctttgttgttgtcatttggtatttgttaatatgtccattagggcaaaaaatgatgataag

SEQ ID NO: 820257 - DNA, 120 bp, Artificial Sequence
  ENSG00000288101_4 (sequence is synthesized)
cattttgtatatataatatatggtttctcttatgtagatataacatatgctttcccttttttggaggcataattctatattgctgttgttttgttgttcaactctcctagatccttattt

SEQ ID NO: 820258 - DNA, 120 bp, Artificial Sequence
  ENSG00000288101_5 (sequence is synthesized)
tagggttagttccattggtttagttggtttttgagagaagtgtatgaaatcttccactatgagtgtggatttgccaatttcttcttgttttattatcaatttttttcttattagttataa

SEQ ID NO: 820259 - DNA, 120 bp, Artificial Sequence
  ENSG00000288101_6 (sequence is synthesized)
aggagaagaaatgaagtattgaaataaaaagtattacagcagaaatcaatgaagtaacaaataaaattaatacagaaaaatcaatgaaaccaaaagtttattcttgaaaaaactataaaa

SEQ ID NO: 820260 - DNA, 120 bp, Artificial Sequence
  ENSG00000288100_0 (sequence is synthesized)
cagagtgcgcactcagtcacgcaggaaatgcccttctctggattcaggggcagcagggagtattgctgacagctcagcgctggtccggtcaagctcagagccccagaattgaggccctga

SEQ ID NO: 820261 - DNA, 120 bp, Artificial Sequence
  ENSG00000288100_1 (sequence is synthesized)
aataacaatcgacccctctccgagggaaaactagccccgaggtgcgtagttccctgggactggggcttgctttgtgtctggtgaagagataaggacacactgctacactcaggatgagaa

SEQ ID NO: 820262 - DNA, 120 bp, Artificial Sequence
  ENSG00000288100_2 (sequence is synthesized)
agggacaggatggaaaagcaagcacgagcagcctcacgtcctccatgtgttggctaagtggggcagggatattcgaagacctgatctcttctccccgaccccctgttctgtgcctcgata

SEQ ID NO: 820263 - DNA, 120 bp, Artificial Sequence
  ENSG00000288100_3 (sequence is synthesized)
cttgagccctaaacttctgagcaggaactaaagatggtccatagttcctaaagatccaaggtcagaaggtcagagatacggctgaggacattagaaaagagccaaagaaaccaggaaaat

SEQ ID NO: 820264 - DNA, 120 bp, Artificial Sequence
  ENSG00000288100_4 (sequence is synthesized)
actgaaataaagtttcttggcactgtagctccccaacaccccagagctgagaagcctgctcctctcttggcccaccttgtgcgcagtttctgcaaactgctgggcgctgttcttcaggtc

SEQ ID NO: 820265 - DNA, 120 bp, Artificial Sequence
  ENSG00000288100_5 (sequence is synthesized)
ttctgtcttctcctctgctcggcctaatcgctctccacgctcattcaaggcctggcttgccttctgcactgcgctggtcacgctgtcagcagctgaatggaggatgctgtttcctgaaag

SEQ ID NO: 820266 - DNA, 120 bp, Artificial Sequence
  ENSG00000288100_6 (sequence is synthesized)
tgtctaggaaacaagccgacatttcttttgattgggtttgactgacgcacttgcagcaagaacacccactgactgcaggacctaggaaaatcctaaatgcttctctataaactcatcact

SEQ ID NO: 820267 - DNA, 120 bp, Artificial Sequence
  ENSG00000288100_7 (sequence is synthesized)
gacatgccagtcatttccattctgccagtattctatctgtggaggctcaaaaggatggggcctgtctggatttacaacttggcttgcaaagataaatgaaaacgttgacaagttcacaga

SEQ ID NO: 820268 - DNA, 120 bp, Artificial Sequence
  ENSG00000288100_8 (sequence is synthesized)
attaggcaagttcaatgagacatatctggatcttatgttatttccttttgacctgtggtttcggtgaataaccataggaaaactgggaccacagaacttttctagatagaatgctctata

SEQ ID NO: 820269 - DNA, 120 bp, Artificial Sequence
  ENSG00000288100_9 (sequence is synthesized)
ttccttccaatgcttcttcttcattttaccccttcatccagcaagtaaagaacaccccaaaatgtacagcttcatgtaagagctatgatccagtctcaaagctcagagtagatgtgtctg

SEQ ID NO: 820270 - DNA, 120 bp, Artificial Sequence
  ENSG00000288100_10 (sequence is synthesized)
ctcccaaccttggattctgtaccatggctcggatggttgggactccttacctctgatctctagtatgtgaaatacggagcctcaggaccatacttaaccagcaggtacaaaacagtgata

SEQ ID NO: 820271 - DNA, 120 bp, Artificial Sequence
  ENSG00000288100_11 (sequence is synthesized)
gaaaccagccctagaagaaacttggtactcccaaactcaggagtggtgataccaagaaggttgaaagccattgcatctcagagggtcatgcattcctgacatcccatttgccgggactgg

SEQ ID NO: 820272 - DNA, 120 bp, Artificial Sequence
  ENSG00000288100_12 (sequence is synthesized)
gcagcaaaattcaatagtgaagaacttgccaatgcataaatcactgagaaatagcaacttgcaaaatgacaaccaaaggaaatttatagctgtattttgttaacactgagtgtgagatat

SEQ ID NO: 820273 - DNA, 120 bp, Artificial Sequence
  ENSG00000288103_0 (sequence is synthesized)
ggaaatgccaccactggatagagagccacacgctgcttcctatcatacgtctacctggacctaactcaggaagaaacatacacttcctacattttatcccataagcaaagcaacttctgt

SEQ ID NO: 820274 - DNA, 120 bp, Artificial Sequence
  ENSG00000288103_1 (sequence is synthesized)
agaactgcccatggagattttgtcttaacttcaaaaagtgcttctcctaatttattttctgttgcacggtatcaagaagcacctgtggaaaaaaaggattcaaaagaagaaaaccataac

SEQ ID NO: 820275 - DNA, 120 bp, Artificial Sequence
  ENSG00000288103_2 (sequence is synthesized)
catcttacaagtttttgcattgctgaagactgacgacttcacccagacccaccaactggtcctgggacccccacccaggaacccattcagtgcaggaggacagcttcagctccctgtgtc

SEQ ID NO: 820276 - DNA, 120 bp, Artificial Sequence
  ENSG00000288103_3 (sequence is synthesized)
ttcacgtgtgacccaattgatcagcacttccctcttcctggccccctactgaccaaactatcctttaaaaaccctagtcactgagtttccagggagactaatttgactaataataaaact

SEQ ID NO: 820277 - DNA, 120 bp, Artificial Sequence
  ENSG00000288103_4 (sequence is synthesized)
ggtctcccattcagccagctctgcatgaattaaactttctctattgcattcccctgtcttaacaaatcagctgtacctgggcactgggcaaaatgaacccattggatggctacatatgtc

SEQ ID NO: 820278 - DNA, 120 bp, Artificial Sequence
  ENSG00000288103_5 (sequence is synthesized)
caggttaatcccgtcatcactgggggacttgtgtaggggattttggctctggaaaggatggattagagatctgtgttctccagactgaagtgtgcagattattgccaagaaaaacctctg

SEQ ID NO: 820279 - DNA, 120 bp, Artificial Sequence
  ENSG00000288103_6 (sequence is synthesized)
agaagcacaagctcaggccttggggacttcacgcatgttggttgcctgctgaataggaggctcctgtgtccaccctcacagcttggtcctcacttatatgagcccaactgggaatgctct

SEQ ID NO: 820280 - DNA, 120 bp, Artificial Sequence
  ENSG00000288103_7 (sequence is synthesized)
atgttaccccaggagcatagtagattagccattgacttgttttccccctgttggatcttaatcttccatgcaaattaatcaccaagggctcaaaaacagcccttggattaacatgctctg

SEQ ID NO: 820281 - DNA, 120 bp, Artificial Sequence
  ENSG00000288103_8 (sequence is synthesized)
ttcacagtcctggcatgttgggacccaagcccagtccctcatggggagggacttcactttcttttgctcctccccagtagccctcctattggtttggatacagctaccctgggtttggct

SEQ ID NO: 820282 - DNA, 120 bp, Artificial Sequence
  ENSG00000288103_9 (sequence is synthesized)
cctgccttttccttcacagttgctacccaggaacagggaaaaaaggggtctgctattgatgatgttggtaacccccactgggtgaacctcactgggtgaacaggtcagccacacacgcta

SEQ ID NO: 820283 - DNA, 120 bp, Artificial Sequence
  ENSG00000288103_10 (sequence is synthesized)
caaaaaagaagggcatctgcctcaacagtagagtgaagaaaggcagaagtctgctccttatgagctagcctccagggcatacaaagacattcttacacattcattcctttttgtattcac

SEQ ID NO: 820284 - DNA, 120 bp, Artificial Sequence
  ENSG00000288103_11 (sequence is synthesized)
tttttgaacatttattgggcatctgtagtatgctgggacattcattggttctgaagacatggagataaacattggggtactctgatccataaaacaaatacttctaaacctgcaaaaaac

SEQ ID NO: 820285 - DNA, 120 bp, Artificial Sequence
  ENSG00000288103_12 (sequence is synthesized)
ttagccacacactaatagtggggaacttcaacatcctactgacagctttaaatggatgattgtggtgaaaactaacaaagaaattctggacttaaacttgacacttgacgaatttgacct

SEQ ID NO: 820286 - DNA, 120 bp, Artificial Sequence
  ENSG00000288103_13 (sequence is synthesized)
aatagtcttattgttttatccaaattaccactgtgtcccttttaagtagggcatttagaccaattacattgaaggttaatattgatatgtgggatgtttatcctgtcattgttttgtaga

SEQ ID NO: 820287 - DNA, 120 bp, Artificial Sequence
  ENSG00000288103_14 (sequence is synthesized)
ctcaattgtgcagttgcttgatagagtcattggacgatgtacttaagtgtgtttttatgttagtagtactctatctaacaaacacagaatatacattcttctcatctgcatatagaacat

SEQ ID NO: 820288 - DNA, 120 bp, Artificial Sequence
  ENSG00000288102_0 (sequence is synthesized)
tgggatgtctctgagtgttcaaaaatgttttgctgatgagtaattattttctagccttgagcaaatattgacaattttcaaagtaattctggattactacaatttaaactgtataattct

SEQ ID NO: 820289 - DNA, 120 bp, Artificial Sequence
  ENSG00000288102_1 (sequence is synthesized)
cctccaagactaaggatgttctctgacagcagctgcatccatgttaatgctgaggaatctgggactcagagaggtgaagtgacttcccaagatcacaaatatctgcaaaagtcaacatta

SEQ ID NO: 820290 - DNA, 120 bp, Artificial Sequence
  ENSG00000288102_2 (sequence is synthesized)
tgaataactgaaaagaagatgacataagaaatacaataaagtcagcaagtgtcaacttgactggattaaggaatatctagagatctggcaaagcttctgtgtgtttgtgaggatgtttca

SEQ ID NO: 820291 - DNA, 120 bp, Artificial Sequence
  ENSG00000288102_3 (sequence is synthesized)
ctaatgccttgagtaggtgaccgggtgtgcactacccctcaatgagctgtgaacaggcctactgctgtttcataatgtgcatttggctttcctggacctaccgtgaagatcttttaaatc

SEQ ID NO: 820292 - DNA, 120 bp, Artificial Sequence
  ENSG00000288102_4 (sequence is synthesized)
tcagttttcttccagtacagataattcagaagtcaattttaagaaacaagacttgtgagtcatcaatgtataggtggttactgaatatagagatttatccaggatgatcattaaattgag

SEQ ID NO: 820293 - DNA, 120 bp, Artificial Sequence
  ENSG00000288102_5 (sequence is synthesized)
ccaatggatgattgcctgacagaaagaagaatacacttttaggataactatgtgtgaagttgtttgggccaataagcaacacgaagaaagagttcccagccccatttcaaactgaagtgt

SEQ ID NO: 820294 - DNA, 120 bp, Artificial Sequence; identical to SEQ ID NO: 803773
  ENSG00000288102_6 (sequence is synthesized)

SEQ ID NO: 820295 - DNA, 120 bp, Artificial Sequence
  ENSG00000288105_0 (sequence is synthesized)
taatcacctccacctggtaacaaccaattgtccaccgaatgatttagcgaaatgtttttattgtaaagaaagatacagaggctgccttgaaaatctgaactccttaatgccatttccttc

SEQ ID NO: 820296 - DNA, 120 bp, Artificial Sequence
  ENSG00000288105_1 (sequence is synthesized)
agcaaaacaggcatctcttagagtgtcaagacaagacccagagtcttggttcctgtgtttgctccctgagtgaaaaatcatgcttcaaattgattcatagatctggcaaataccactgat

SEQ ID NO: 820297 - DNA, 120 bp, Artificial Sequence
  ENSG00000288105_2 (sequence is synthesized)
ctcaccattgcttcacagagtggaggcatgtcttgttccacaacagtgagtatgaaggatctggaagaatgggccactcagaagagttgctgaaccttttcaaggccgggcgaggtggct

SEQ ID NO: 820298 - DNA, 120 bp, Artificial Sequence
  ENSG00000288105_3 (sequence is synthesized)
agagtggagggttaaaaaaaaagtgtcagtaccaggatcgaagccaactattggtcatttaaaaatatagtattttggaataggacatccatataaagtatccagaatggagaagtggct

SEQ ID NO: 820299 - DNA, 120 bp, Artificial Sequence
  ENSG00000288105_4 (sequence is synthesized)
taggacatccatataaagtatccagaatggagaagtggctgagaaggagcaacaatgaactatgagaaagagtttttaaaaactgttaaatatatttttttaattattatactttaagtt

SEQ ID NO: 820300 - DNA, 87 bp, Artificial Sequence
  ENSG00000288105_5 (sequence is synthesized)
ctaaatcgtgctgctataaagacacatgaacacagacttggaaccaacccaaatgtccatctattatagactggattaagaaaatgt

SEQ ID NO: 820301 - DNA, 62 bp, Artificial Sequence
  ENSG00000288105_6 (sequence is synthesized)
agggaacatcacatactggggcctgtcgtggggcatggggagggaggagggatagcattagg

SEQ ID NO: 820302 - DNA, 120 bp, Artificial Sequence
  ENSG00000288105_7 (sequence is synthesized)
acgagttaatgggtgcagtacaccaacaaggcacatgtatacatatgtaacaaaaactgttaaatgtttttaagggaattgatgtggttaggctgtgttcccacccaaatctcaccttga

SEQ ID NO: 820303 - DNA, 67 bp, Artificial Sequence
  ENSG00000288105_8 (sequence is synthesized)
aatttagaggtctgatggttttataagtggtaaaagagagcttgtcccctacacaagctctcttgcc

SEQ ID NO: 820304 - DNA, 120 bp, Artificial Sequence
  ENSG00000288105_9 (sequence is synthesized)
ggtagtgaataagtctcaagaggtctgatggttttataagtggtaaaagagagcttgtcccctacacaagctctcttgcctgccaccatgaaagatgtgactttgctcctcattcacctt

SEQ ID NO: 820305 - DNA, 120 bp, Artificial Sequence
  ENSG00000288105_10 (sequence is synthesized)
aagttatctcagccatcgagagcagcagcatcagtaacagcacagccatgccagactcagcaattctgctcttagaagttttacccaagagaaaaggaaaacacatgcccacatgaagag

SEQ ID NO: 820306 - DNA, 120 bp, Artificial Sequence
  ENSG00000288105_11 (sequence is synthesized)
agaacaatattgcagatgtgtggagcttacggaatgtggagcccatttattttgcatgcacatttaatgtgaaaaattatttttaagttctaaagcaacctctcggaaatgctaagaact

SEQ ID NO: 820307 - DNA, 120 bp, Artificial Sequence
  ENSG00000288105_12 (sequence is synthesized)
gcaaagctacgcagaccctgatgcattcctaaatataatgaagaaaaaacagaaatgcaccaagaattgaaaaccctggttactcacgattcttttcacctttccaccttgacccagctt

SEQ ID NO: 820308 - DNA, 120 bp, Artificial Sequence
  ENSG00000288104_0 (sequence is synthesized)
tgaaaatgatataacaggatggagcaaaaatagaagacaaaggaacgaagagacttaaaacaacaacaacgactacaactacaacaacatttggctgggtgcagtggctcatggccgtaa

SEQ ID NO: 820309 - DNA, 120 bp, Artificial Sequence
  ENSG00000288104_1 (sequence is synthesized)
tcccagcgctttgagaagccaaggcaggaagatcacttgagaccgggagtttgagacaagtctgggcaacacagcaagacccccatctctacaaactattttttaagaaattagctgggc

SEQ ID NO: 820310 - DNA, 120 bp, Artificial Sequence
  ENSG00000288104_2 (sequence is synthesized)
atggtggtgcatgcctataggattagctacctgggaggctgagggtgttggattgctttagctcaggtgtttaaggttacagtgagctatgatcataccacttgcattccagcctgggtg

SEQ ID NO: 820311 - DNA, 120 bp, Artificial Sequence
  ENSG00000288104_3 (sequence is synthesized)
acaaagtgagactatgtctctaaaattaaattaaattaaaaaaacactgtctgtcccctgcaaagttttacaatactgatgtaattatttagttttaatcaggttggccagtttctggca

SEQ ID NO: 820312 - DNA, 120 bp, Artificial Sequence
  ENSG00000288104_4 (sequence is synthesized)
ggtgctgcaaaagcaacatttaaatagaatatggctagatggactgctttcatatgtgcaaatgctgcaggttttcccaaaataacctgttagaaatttcattgctattttcttaagact

SEQ ID NO: 820313 - DNA, 120 bp, Artificial Sequence
  ENSG00000288104_5 (sequence is synthesized)
tacagaatgctgcctaaaatatggatgaccaaattatgtttttctaaaggcaaaatcaatacattctgtgatctagaaaagatgattttgaaaactaagagcagaacagcaacatatagg

SEQ ID NO: 820314 - DNA, 120 bp, Artificial Sequence
  ENSG00000288104_6 (sequence is synthesized)
gagaggtgcatatgtgtttgttttgcatcttaattttaaaactattatttgaagataaatcttatctttaatttcataatctactttgcatgaaggcatttgtgtttcactaagaggtca

SEQ ID NO: 820315 - DNA, 120 bp, Artificial Sequence
  ENSG00000288104_7 (sequence is synthesized)
ctcacctgtacatctttttgtacatttaaggagtcaatggaaataaaattacaaaaaagggcttttatccccccaagaaattaggtcttagcaaggatctcttattctctactcaatcag

SEQ ID NO: 820316 - DNA, 120 bp, Artificial Sequence
  ENSG00000288104_8 (sequence is synthesized)
aggtgctggcactccactgatgtctatagaacatcctaaggtctccagtagaataaatcaagaaataaatatataatatataatacacaaatatatacaatactaagtgtgtgtgtgtgt

SEQ ID NO: 820317 - DNA, 120 bp, Artificial Sequence
  ENSG00000288104_9 (sequence is synthesized)
gtataattacagtttataatgctccttcaatatgaatactgggttaaagtaagttcaccatgttctttataataaggtgctggggacttggggcagagcaaggtggaggaatagaaggct

SEQ ID NO: 820318 - DNA, 120 bp, Artificial Sequence
  ENSG00000288104_10 (sequence is synthesized)
ccaccgattttccactcaaagtggacaccaatttagcagctatctacacaagaaaaaaccttcataagaaccaaatacaaggtgagcactcaaagtacttggttttaacttcatattgct

SEQ ID NO: 820319 - DNA, 120 bp, Artificial Sequence
  ENSG00000288104_11 (sequence is synthesized)
gaaaggcactgaagaggtagggaaaagcagtcctgaatcactagtggcaaacctccccccaatgccagcagcagttgtgtgatgctgagagcgtgactgtgacagagatgccgtatatct

SEQ ID NO: 820320 - DNA, 120 bp, Artificial Sequence
  ENSG00000288104_12 (sequence is synthesized)
tgattgtgattgtgtatacatggttatatacatttgtcaaaattcatcaagctgtacattgaagaatggagaatcttactgtatgtgaattatacctcaatatatccagtaattgtgact

SEQ ID NO: 820321 - DNA, 120 bp, Artificial Sequence
  ENSG00000288104_13 (sequence is synthesized)
tgagcgataagactatcatatcaagatgttgtctgatagaccagatactgtgggactaccaactccttgatttgaataacattctataaatgtacttaaaactggtgtttgatttaggac

SEQ ID NO: 820322 - DNA, 120 bp, Artificial Sequence
  ENSG00000288104_14 (sequence is synthesized)
ggacatccattttatagttttgtttcatatcaagcttgtaatccattaaaacatcctatatgtatctagcttataaaaaattaaatgcagtatttcataataatactttaaagatttcat

SEQ ID NO: 820323 - DNA, 120 bp, Artificial Sequence
  ENSG00000288104_15 (sequence is synthesized)
tgtatttaaatctattatatgaacttgatgaaatcttttgtaatctacatattgctatacaaaggattagatattctatacagtcttgtgtcatttacaatttagtcaatatgctttttt

SEQ ID NO: 820324 - DNA, 120 bp, Artificial Sequence
  ENSG00000288104_16 (sequence is synthesized)
cacaaatcatcagaaaaatgcaaataaaaaaaccacaatgagataccaccttaccccagccacaatggccaatattaaaaagttaaaaaacagatattggcatagattgtggtgaaaagg

SEQ ID NO: 820325 - DNA, 120 bp, Artificial Sequence
  ENSG00000288104_17 (sequence is synthesized)
gaatgcttatatgctgttggtgggaatgtaaattcgtacaacctctagggaaaacagtatggagattcctcaaagaactaacagtaaatctaccattcaacacagcaatcccactactgt

SEQ ID NO: 820326 - DNA, 120 bp, Artificial Sequence
  ENSG00000288107_0 (sequence is synthesized)
agtacgcatgtgtagcgccgaagcttcctgtgaagtgtgcgtgtctgacggatgacgactccacaaggcgctgtggccctggcagcctcatgaggttgcggctctgcgggaccacaccgc

SEQ ID NO: 820327 - DNA, 120 bp, Artificial Sequence
  ENSG00000288107_1 (sequence is synthesized)
cgcgggagtgcacgggccccagcgagtgaaatctgcggcagcccccgctgggcccgctgttcctgcgcgcgcagaggagcgtagcctgcccctaggccgcgttcccgtgagctccatgcc

SEQ ID NO: 820328 - DNA, 120 bp, Artificial Sequence
  ENSG00000288107_2 (sequence is synthesized)
cacagtggccgaggccggccacaagcccacggtcccttctgcacggtccctgccgcgctggggccaccgtggaggcccggagggccctgggaggagggaggaggagcagaggctttcggg

SEQ ID NO: 820329 - DNA, 120 bp, Artificial Sequence
  ENSG00000288107_3 (sequence is synthesized)
agaacccagcccttcaccggccaggggaggccgcgatgcatcgcgactggttgtgaagagccaggggaagaactttaccgtgcaggtaacccaactgatcacaagacaaacagcctagat

SEQ ID NO: 820330 - DNA, 120 bp, Artificial Sequence
  ENSG00000288107_4 (sequence is synthesized)
tctgaacatcagctcctgtcttcacactgcggacaccacctgaatcccgtcaaagcccacattgtttctcaacatccaccagcaagacgtattccagggcagcctctcaaaactgcctca

SEQ ID NO: 820331 - DNA, 120 bp, Artificial Sequence
  ENSG00000288107_5 (sequence is synthesized)
gtgagacgggacaaggtgtggtggagctccaggttcagaacagctgcctcatcccttcctactgcggcggagtctgtctctgctggtcagagccctccaactagcctagtctatgtccaa

SEQ ID NO: 820332 - DNA, 120 bp, Artificial Sequence
  ENSG00000288107_6 (sequence is synthesized)
gcaagtgtcccctaaaaggaccttcttgtctccccctctgctgaggaaagcatgcaggaacgagaccttctatgttaaggagtactcagcctccagtcccagatgacttgattgactgat

SEQ ID NO: 820333 - DNA, 120 bp, Artificial Sequence
  ENSG00000288107_7 (sequence is synthesized)
gaactgattccttgaggaggagaaagacacagggaagagactgtgttgggtgagtctgtgttttcccagctgtgctgcctgtgcaaatagtggaacgaaaaaagaattagtggtagacag

SEQ ID NO: 820334 - DNA, 120 bp, Artificial Sequence
  ENSG00000288107_8 (sequence is synthesized)
agtggtagacagacactgcctagtgaaattgtctgaaagtaaatggaacttatcataatatgatatcgttatatattataatattatgatatgaaatttgacatctaaataaattttgat

SEQ ID NO: 820335 - DNA, 120 bp, Artificial Sequence
  ENSG00000288107_9 (sequence is synthesized)
aatatataaaatttggtcaggtaatttcataaattttgtaacaacattaacctataaactcaatagaaagctaggaaaattgtctgctcttgtgtaaatgactgcgttttggataactct

SEQ ID NO: 820336 - DNA, 120 bp, Artificial Sequence
  ENSG00000288107_10 (sequence is synthesized)
tctgctacttacgtgatagtaagtacttgataagacatcgacttgcacatctttgctgtttttaaccaatgctctctcaagatatgagaatattttactctaagaaagtattttcctaga

SEQ ID NO: 820337 - DNA, 80 bp, Artificial Sequence
  ENSG00000288107_11 (sequence is synthesized)
aatttatgtcattgttaaaatatattcctacagagaacatattacccatgtgtttttatttgtcctttaatctcaggtaa

SEQ ID NO: 820338 - DNA, 120 bp, Artificial Sequence
  ENSG00000288107_12 (sequence is synthesized)
tatttgtcctttaatctcaggtaaattttttaaatttttatttattaaattctatttattttagacaaaagagaccttgtaactgccatatgatgtactttcttagaaagagaaattctc

SEQ ID NO: 820339 - DNA, 60 bp, Artificial Sequence
  ENSG00000288107_13 (sequence is synthesized)
gctagcctagccaacataaggaagccccatctgcactaaaaatacaaaaaaaaaaattag

SEQ ID NO: 820340 - DNA, 90 bp, Artificial Sequence
  ENSG00000288107_14 (sequence is synthesized)
ccttaggtcaggagttcaaggctagcctagccaacataaggaagccccatctgcactaaaaatacaaaaaaaaaaattagctgaagttgg

SEQ ID NO: 820341 - DNA, 89 bp, Artificial Sequence
  ENSG00000288107_15 (sequence is synthesized)
actcagccttatttttatcaaaatctagattttaaatgacatttctaggtgtcccctttcaataaaaatccaaaccaaaacaaacaaaa

SEQ ID NO: 820342 - DNA, 120 bp, Artificial Sequence
  ENSG00000288107_16 (sequence is synthesized)
tgtcccctttcaataaaaatccaaaccaaaacaaacaaaaagtttctaggtaattcatatgaatattaataactgttaaattgggtacttttatttttaagagagggattgtttatatgg

SEQ ID NO: 820343 - DNA, 120 bp, Artificial Sequence
  ENSG00000288107_17 (sequence is synthesized)
gagagggattgtttatatggatgtgttgatgtatcaaacatgtacagttaaaattgtacctttttttgacagagcctcactctgtccctctggaaggagtgcagtggtgcaatcacagct

SEQ ID NO: 820344 - DNA, 120 bp, Artificial Sequence
  ENSG00000288107_18 (sequence is synthesized)
agactccagtgatcctcccaagtcagcctctcaaatagctgtgactagaagtgtgcaccactatgcccaactaacttttaaaaaattgttgtagagatgaggtctcactctcttgcccca

SEQ ID NO: 820345 - DNA, 86 bp, Artificial Sequence
  ENSG00000288107_19 (sequence is synthesized)
gtgaggccttgtctggcttccaaagtgatgaggttacgaatgtgagccaccatgcccagccaagattagacctttcaatgagtgca

SEQ ID NO: 820346 - DNA, 120 bp, Artificial Sequence
  ENSG00000288107_20 (sequence is synthesized)
gaagagaggaccctgggaagagccagagctccctatacaagtgatggcatgaatgaacatctcagagacaaagaaaaagactgtgaatactcgccaggtggatcttccaacatggggcca

SEQ ID NO: 820347 - DNA, 120 bp, Artificial Sequence
  ENSG00000288107_21 (sequence is synthesized)
gccaggggaagaactttaccgtgcaggtgccgcagcccaataggaagagacgtgcttggtcaacttagtttctgccctcaagcaccagagagaaaaggcagagaaaccaggtgacaatca

SEQ ID NO: 820348 - DNA, 120 bp, Artificial Sequence
  ENSG00000288107_22 (sequence is synthesized)
ttaaaggtggccatgctggcagtactgtctgtggcagaccttttggattcaaagttgtgtccagccaccttttatgttagcaataggaaatgttattcttgacataaatacccattctat

SEQ ID NO: 820349 - DNA, 120 bp, Artificial Sequence
  ENSG00000288107_23 (sequence is synthesized)
cacatgccccgaatgtcacttgtttagttgcattaactcaacctttgataaaaatcaaactttcttgttaattagagccagagaaggagtttggatccctgtgtctctaaatagaccacg

SEQ ID NO: 820350 - DNA, 120 bp, Artificial Sequence
  ENSG00000288107_24 (sequence is synthesized)
ggatgcatcaccatccattcatattgtaactgagattcttaaaaacctgttatcccattcaaaaagattcacagttgctcttgtatttgctataattggcctcattgctgttaccactac

SEQ ID NO: 820351 - DNA, 120 bp, Artificial Sequence
  ENSG00000288107_25 (sequence is synthesized)
tgctgcagtagctggtgtggctttacactcatctgtgcagactgttgaatttgttgataaatggcaaaagaattctacgaaattatggaactctcaggcccaaatagatcaaaagatagt

SEQ ID NO: 820352 - DNA, 120 bp, Artificial Sequence
  ENSG00000288107_26 (sequence is synthesized)
caaatcagtgatctctgtcagacagtaatttggatgggggatcacatcctaagtttagaaactagaattcaaatgcgttgtgtttggaatatatccgatttttgcattactcctcatagt

SEQ ID NO: 820353 - DNA, 120 bp, Artificial Sequence
  ENSG00000288107_27 (sequence is synthesized)
tacaatgagacagaacaccaatgggaaagaattaaacgccatctagagggcagagaggaaaatctcaccttcaatattgtaaaactgaaagagcaggtttttgaagcctctcaggctcac

SEQ ID NO: 820354 - DNA, 120 bp, Artificial Sequence
  ENSG00000288107_28 (sequence is synthesized)
ttggccctgccccctggcactgatattttaaacaaggcagctgatgagttgtctgcaatctatcctcttaaatggattaagaccattggaaactctacacttgtaaactttgttctagta

SEQ ID NO: 820355 - DNA, 120 bp, Artificial Sequence
  ENSG00000288107_29 (sequence is synthesized)
taaaagggagacatgttggtagaagagctgaggcaggactagcttgtctgtcataatgtaaaagagtcttggaacatgtcctgggtccagggtctaaaccccctcatggcctttggaaca

SEQ ID NO: 820356 - DNA, 120 bp, Artificial Sequence
  ENSG00000288107_30 (sequence is synthesized)
tgtgccaaagggtggaaggctgccctgtggcaccacaatctaagctcagggcataaaaccccttgtggctttgatggaatccagggctcagaccataaaacccctcgtggccttttgaat

SEQ ID NO: 820357 - DNA, 120 bp, Artificial Sequence
  ENSG00000288107_31 (sequence is synthesized)
ttttgaatgtgcaccgacttgctggctccttgcttcttgctctcccagaatcgtaaattgattgtatcttgagttggaagaacatgttctccattatctcacgtagcagagcatgttcca

SEQ ID NO: 820358 - DNA, 120 bp, Artificial Sequence
  ENSG00000288107_32 (sequence is synthesized)
acgtagcagagcatgttccatgtacttcaaagaaaatgctaaaccgtcacagctacgcttgatgcaccactacctttctacccccacatccgcacgtcctcaccacctgcttctttgttt

SEQ ID NO: 820359 - DNA, 120 bp, Artificial Sequence
  ENSG00000288107_33 (sequence is synthesized)
ggctcccagagctcagggccttcactgcctccatactagcgttggccccctggaccaaccttatgcactcttagccttttctcattcctttgactctgccagactttgtagccaccatgg

SEQ ID NO: 820360 - DNA, 120 bp, Artificial Sequence
  ENSG00000288107_34 (sequence is synthesized)
cctggtgttgggtctgatcacctgtagggaaaagaaaaagagatcagattgtcactgtgtctatgtagaaaggaaagccataagagactccattttgaaaaagagctgtactttaaacag

SEQ ID NO: 820361 - DNA, 120 bp, Artificial Sequence
  ENSG00000288107_35 (sequence is synthesized)
ttaaacagttgctttgctgagatgttgttaatttgtagttttgtcccagccactttgccccagccactttgacccaaccactttgatccaatctggagctcacaaaaacatgtgttgtat

SEQ ID NO: 820362 - DNA, 90 bp, Artificial Sequence
  ENSG00000288107_36 (sequence is synthesized)
gaaatcaaggtttaagggatctagggttgtgcaggacgtgccttattaacaaagtgtttactagcagtatacttggtaaaagtcattgct

SEQ ID NO: 820363 - DNA, 120 bp, Artificial Sequence
  ENSG00000288107_37 (sequence is synthesized)
accggttgtcagctgcggggccgggcggagacctcctcaacctccggccttgtttcagggaggatggggtcgacccttgcgatccccagaggccccccatggctccttctgggctggctg

SEQ ID NO: 820364 - DNA, 120 bp, Artificial Sequence
  ENSG00000288106_0 (sequence is synthesized)
gccaggctggagtgcagtggcgcgattatattcacctagaagtttgtgaacactgttcctctttcagtaaaatccatgttatagatgctgctggattttaggcatccagaaaggcctgag

SEQ ID NO: 820365 - DNA, 120 bp, Artificial Sequence
  ENSG00000288106_1 (sequence is synthesized)
gaaaggcctgagattggcagctatttgttgacaattcaatgggtataaaaggtgctcccgtgcacagtgctgacttatccgattatgtgcttgcttagaaatttcagggggcagttttgc

SEQ ID NO: 820366 - DNA, 120 bp, Artificial Sequence
  ENSG00000288106_2 (sequence is synthesized)
aacaagccaggcagagagacccagctgttgaatcctcccgctcaagggaagttaggaagttagtccaccaccactgggctgaagacaggatgacacaaaccagacctccagatgggtgat

SEQ ID NO: 820367 - DNA, 120 bp, Artificial Sequence
  ENSG00000288106_3 (sequence is synthesized)
tacttgagatagctatagaacaagacatgcagacctgcattctcctgcaccatgcccgcatattttctacacctttttccttcttaaatcccttcactcagcccagaaggcagagacgtt

SEQ ID NO: 820368 - DNA, 120 bp, Artificial Sequence
  ENSG00000288106_4 (sequence is synthesized)
tccctttgaagcttgagcccagccatggtcccatctgctagcatttgaccaatagaagctgctttcctttcaccacataccaagcttctcatgctttgactgctgagcggtgagcagctg

SEQ ID NO: 820369 - DNA, 120 bp, Artificial Sequence
  ENSG00000288106_5 (sequence is synthesized)
aacttgagctggttacagacttggtgcctgagtgaggaggtgtgtgttctgagcagctcagcctgtaggcctggtttccagcgagtggagcagttggccaggcagtggaccaaggcttac

SEQ ID NO: 820370 - DNA, 120 bp, Artificial Sequence
  ENSG00000288106_6 (sequence is synthesized)
ccactgatggtaccaggcagggcagggccatttgcaaatgctagctatgctagctacttgtggccagtggaccctgcgactggggccttgggaattcccaacagatgcagagactgcctt

SEQ ID NO: 820371 - DNA, 120 bp, Artificial Sequence
  ENSG00000288106_7 (sequence is synthesized)
tgtttggggtattttcctttgcctccttttcatggcatcaggtgctatcatgctctgatggtgtaaggaaagcagcattcagtaagttgatggccttcaggactgggtaagtcaaccaga

SEQ ID NO: 820372 - DNA, 120 bp, Artificial Sequence
  ENSG00000288106_8 (sequence is synthesized)
gtgcacctggagttgtctgtctctgccatctgggctgtccagccacctggacctagcataggtcatcttggtgccatctgagcctccatgctatctgcacctaacacaggtcactctgtg

SEQ ID NO: 820373 - DNA, 120 bp, Artificial Sequence
  ENSG00000288106_9 (sequence is synthesized)
gtgccctctgggtttgacacaagatctcaggacttttctccagtctctcctctttggggattggtatggagtgctctgtctgcatgggatctgtctgtgtttgtgtctctgtttagtgtt

SEQ ID NO: 820374 - DNA, 120 bp, Artificial Sequence
  ENSG00000288106_10 (sequence is synthesized)
acccctttctccaagggtgctttggactagtctccatcccacccgccaagactaggtcagaaagcatcaagataggctgcttctctcctctgcaggggagaaagtttccaatatcctagc

SEQ ID NO: 820375 - DNA, 120 bp, Artificial Sequence
  ENSG00000288106_11 (sequence is synthesized)
ctctaattttgtcatcctctctgagacctccagagtatttcctgaatccatgtcaaggtttgtggggggagaaagcaagtcaactctcttttctagacaatctgagactccacctggtta

SEQ ID NO: 820376 - DNA, 120 bp, Artificial Sequence
  ENSG00000288106_12 (sequence is synthesized)
ggcaaattacagtaagggaaattcagaggtcaaatggttaacctgcaactctacagttaagcagagtcttctaaggctctctacctctcttttcttttctgccttctttgaatctgctgt

SEQ ID NO: 820377 - DNA, 120 bp, Artificial Sequence
  ENSG00000288106_13 (sequence is synthesized)
tattcagctactggtgttgagataaaacttactgtttccacattacttggagattttgtttttcttatacatttcagccagttctagctaaaatggaaacactagaaactcacttgaaac

SEQ ID NO: 820378 - DNA, 120 bp, Artificial Sequence
  ENSG00000288106_14 (sequence is synthesized)
tgcagaaaaaagaagagtaaaaaggttttcaaaaccaaactgccatagaaactactttacccaaattttggttcacagatttccttaaattggggcaaacagctttccttagccatgtga

SEQ ID NO: 820379 - DNA, 120 bp, Artificial Sequence
  ENSG00000288106_15 (sequence is synthesized)
acaggttccaatttcatcagaaaaataatttggatccagctatcttttataaagtggtgagtctgtactgctatcttatggctggagttccaaagtaaaagctattggatctttgtgcat

SEQ ID NO: 820380 - DNA, 120 bp, Artificial Sequence
  ENSG00000288106_16 (sequence is synthesized)
gtaggtatacatgtttagatatgcttgtgtgtacatacatgtattatgttgtatattgtgtctagcatgctaccaaattggattataagtaaatgagtactcataaattaaataagtcca

SEQ ID NO: 820381 - DNA, 120 bp, Artificial Sequence
  ENSG00000288106_17 (sequence is synthesized)
gatgcttttcaaattcacatgaatctttggtaaataaaactaaaattattgatagaaatgtcttcaaaattgtcagaatacatttttgtctgagttttttaaccaaatggttttatattt

SEQ ID NO: 820382 - DNA, 120 bp, Artificial Sequence
  ENSG00000288106_18 (sequence is synthesized)
gtctctgtctacatgttaaggtgtcagagtttcacataaaggttataggactataaacccaaacaaaaccaaaattatctttgtgtaatttttttttgacaaaaagactagattgttggt

SEQ ID NO: 820383 - DNA, 120 bp, Artificial Sequence
  ENSG00000288106_19 (sequence is synthesized)
ttaattaaaacagctgaatcttctgagttattggcaaaatgtgtttacgtttaaggttcttgggtgttcacctgctattcagacttttaaaatggttaataaataaataacttatttatt

SEQ ID NO: 820384 - DNA, 120 bp, Artificial Sequence
  ENSG00000288106_20 (sequence is synthesized)
tatttattttttgagacagggtcttgctgtgttgtccaggctggagtacaatggtgcaaacttgcctcactgcaacctcctcttcccaggcttaagtgatcctcccacctcagtctccca

SEQ ID NO: 820385 - DNA, 120 bp, Artificial Sequence
  ENSG00000288106_21 (sequence is synthesized)
cctcactgcaacctcctcttcccaggcttaagtgatcctcccacctcagtctcccaagaagctgaactatggctgtgtaccaccacgtggtaccagctaatttttgtatttttttgtaga

SEQ ID NO: 820386 - DNA, 120 bp, Artificial Sequence
  ENSG00000288106_22 (sequence is synthesized)
aataatgactagatttgtgtaacatctcagttttcagaagtaatctagataaactgttaaaaatggaaaaaattgagtacatgtaaatgagataaatgcttgtaagtggacttcttgtat

SEQ ID NO: 820387 - DNA, 120 bp, Artificial Sequence
  ENSG00000288106_23 (sequence is synthesized)
aatttaaaatcttgacattattttgaattaaataatagatgcttttttggatgtctgggtcatttccaattaagaaaaaaataatgtgtgaaaacatgttataatgttataatatgggaa

SEQ ID NO: 820388 - DNA, 120 bp, Artificial Sequence
  ENSG00000288109_0 (sequence is synthesized)
ccttagagcaccatgatatgaggaggcccaagctagccatgtggtgagaccatgtggcaacatgctcaaccaggtctcagatgctccagccatctcagctgagaccacgttgagtgaaag

SEQ ID NO: 820389 - DNA, 120 bp, Artificial Sequence
  ENSG00000288109_1 (sequence is synthesized)
ggccatctgagatatttcaatccaagctcacatcatgaagagcagatctggccagctaaacccagtcaagagtgcagaattgtgagaaacaatgcactctcattgttttaagccactaaa

SEQ ID NO: 820390 - DNA, 120 bp, Artificial Sequence
  ENSG00000288109_2 (sequence is synthesized)
ttttggggctgttgctcagcaacaggtaacaaaacacatccatcaagcatattataaaacaggtgcattaactggattaccaaagatgaagagaatgaatgctgctttgttctttcccag

SEQ ID NO: 820391 - DNA, 120 bp, Artificial Sequence
  ENSG00000288109_3 (sequence is synthesized)
acaagcctgaaagctgaaaacaaggaaatttatacctctcaagaagctctcatgagttaaaatacaggaggtggagttaaacagggaaatttggtttctttccccatctgtcttttgact

SEQ ID NO: 820392 - DNA, 120 bp, Artificial Sequence
  ENSG00000288109_4 (sequence is synthesized)
tcctcccaacagaggtaaatgatgggtgtttacctctgatagttgcacgtaaacaactatcttgaggcttagaagacatggcttcccccctgcagttgaccagaatatggacaggcaaac

SEQ ID NO: 820393 - DNA, 120 bp, Artificial Sequence
  ENSG00000288109_5 (sequence is synthesized)
cctcgagaacctaagtggaggtcttcctgcttgggtcctgcacagtgggtctgactgagcaagaggaacctggaccagttggctgtgcccgaccttgccctccctccctgattcatggac

SEQ ID NO: 820394 - DNA, 120 bp, Artificial Sequence
  ENSG00000288108_0 (sequence is synthesized)
cgctcgccgggctgtggagttgttgtttttgttttaataaggccaccgatactccacgtgatgatctggtggcctcgctgggtgtcctcgggaggccactttgacagacagggaggccgt

SEQ ID NO: 820395 - DNA, 120 bp, Artificial Sequence
  ENSG00000288108_1 (sequence is synthesized)
ttctgcactctgctgcgtcagaccttgctggtaactccgggcctctgcagaggaaatctgcatagggaaggcggtgtggacggacagaaacggccctcacagccacagaaccaccgcggc

SEQ ID NO: 820396 - DNA, 120 bp, Artificial Sequence
  ENSG00000288108_2 (sequence is synthesized)
gaccgtggtggaggcctctgagccgagcaggccacgcagacccgggaggcgctgaagcgggcgcagctgcgccctggagcaggcagaccaggccacggcggagggagaggcccggggacg

SEQ ID NO: 820397 - DNA, 80 bp, Artificial Sequence
  ENSG00000288108_3 (sequence is synthesized)
cggcgcagcccctgcggagaggcacgggggcggcggggacgccctcccactggctgaaatgccagggaccggcctgggcg

SEQ ID NO: 820398 - DNA, 120 bp, Artificial Sequence
  ENSG00000231028_0 (sequence is synthesized)
ggaacttagggggctcccgcctccccggccacgcgagcgggaacagtctcctccactcggagcggcgccatcttcagctctgagtcaccagggctggaaaaatactagatgcgctactcg

SEQ ID NO: 820399 - DNA, 120 bp, Artificial Sequence
  ENSG00000231028_1 (sequence is synthesized)
ccggcaaagacaagttccactgtcacaactagagaaaagaggatgggtttggaattgaaaggcttggctgttgttgatataaaggaatgcagctaaccagggagatggaaaatctctaca

SEQ ID NO: 820400 - DNA, 120 bp, Artificial Sequence
  ENSG00000231028_2 (sequence is synthesized)
ccagggagatggaaaatctctacagtgagagccacaaaacacttctcaaagaaatcagagatgacacagacaaatggaaaaacattacatgcttatggataggaagaatcaatatcatta

SEQ ID NO: 820401 - DNA, 120 bp, Artificial Sequence
  ENSG00000231028_3 (sequence is synthesized)
gccgttcccatggcgaccgatgcgtcccgcgctctaggcgaagaccgcggccccgtccccgcgcctccaccgccttcttccaggaggaggggccgtgcggcgcctgcccgggggccctca

SEQ ID NO: 820402 - DNA, 120 bp, Artificial Sequence
  ENSG00000231028_4 (sequence is synthesized)
tgcccatggccaactctctgctgatgactggacttgactacacaagttgttggccatcttaaaaccactcaaagttgacggtctcctctcctgcctcctgcggcttccattaccatggca

SEQ ID NO: 820403 - DNA, 120 bp, Artificial Sequence
  ENSG00000231028_5 (sequence is synthesized)
gagactgtggtgtctgaggtggtgtagcgtactgaagcaaggctgtcttgaagaagaggagacaactcacaattctaccacctttgttgacctcttcttccccccaacttattgctgtag

SEQ ID NO: 820404 - DNA, 120 bp, Artificial Sequence
  ENSG00000231028_6 (sequence is synthesized)
aggctacctgagctcattgtccctggagatggaccaaatagaagaataagcagtgcctgtgtgctgaaggtaaagaaatttcatgtggtggattcctacaaaagaaaaagctgcaaaaga

SEQ ID NO: 820405 - DNA, 120 bp, Artificial Sequence
  ENSG00000231028_7 (sequence is synthesized)
gtcaaccaggaaaggtgctagacacacatccaatggctgctgagtgatgaatgagaaagaaaccttcggccccaactacagaagataagagggcataggaaaagtttttcctctctacaa

SEQ ID NO: 820406 - DNA, 120 bp, Artificial Sequence
  ENSG00000231028_8 (sequence is synthesized)
gccaaaagtcgcaaggctaatatttactcccctgattctctcctccagagcccacacccttcatcactactgataaagtttcaaatatgtttttcaaatctggcattcatggttgctact

SEQ ID NO: 820407 - DNA, 120 bp, Artificial Sequence
  ENSG00000231028_9 (sequence is synthesized)
gcactggaataatggtaacaacaggctgatgagaatcttaagtggcacttactcagtggagtaattggaagcggcaatggttatacaaatgaatgcccctcagagggaagaaggagagat

SEQ ID NO: 820408 - DNA, 120 bp, Artificial Sequence
  ENSG00000231028_10 (sequence is synthesized)
ttgccttgaaactgcggctgtaaaaagttagtgctggtaagtgaagaaacagaaactaagtgatagagaatgggaactaaggtagaaataactaacaaagatcactgtgcagaaccgtag

SEQ ID NO: 820409 - DNA, 120 bp, Artificial Sequence
  ENSG00000231028_11 (sequence is synthesized)
tggtgttcagagtagatgcgcaagtccatatgcatgtagcaaatacaagtctcaacccacaaaataaagtgaagatgaatatattttaattttgttaataaagttattttaatttctgtt

SEQ ID NO: 820410 - DNA, 120 bp, Artificial Sequence
  ENSG00000231028_12 (sequence is synthesized)
ataagctctcttccaccaagacagaagcacggtcacatgcctgggtaaaaagaatatcccagatacccaagactagacagcatgcaggggtgacaggcttattaacttcacactcactgg

SEQ ID NO: 820411 - DNA, 120 bp, Artificial Sequence
  ENSG00000231028_13 (sequence is synthesized)
gccatcagtactttacttataacctcattcatggttttgaagttttaaaaaaatgttgccaccttgttattttgttactcctctcttataagtgattttcagataagcagaaacacatta

SEQ ID NO: 820412 - DNA, 120 bp, Artificial Sequence
  ENSG00000231028_14 (sequence is synthesized)
aagggaaagtttatttggttcatttgcaaggcagagtccatggatttcttttggctatccctttttgcactttcaatggaacaaacagtgcaatttttatcccttctgtttttagagcag

SEQ ID NO: 820413 - DNA, 120 bp, Artificial Sequence
  ENSG00000231028_15 (sequence is synthesized)
cagctgtaaaagtaattaatggctaaagagactctagcacatcctactgaaaggccattctgggttcagcaggagctctggaccccaggctcctgcctctgcacgttcacagacttgcag

SEQ ID NO: 820414 - DNA, 120 bp, Artificial Sequence
  ENSG00000231028_16 (sequence is synthesized)
agagcactctgatgaatgctgaaggacccccctcccaaacttgggatctccgcagcaccctgatccattttgaccactgccacttataaagaaaactggtgtcaacaggtgttttcatac

SEQ ID NO: 820415 - DNA, 120 bp, Artificial Sequence
  ENSG00000231028_17 (sequence is synthesized)
tatttccagtgatgactttggtgcatatccagtattcttttttttaatctctgggagttgacaatgttctcatgaattctattaaaaaatgagcatttcccctaatatgttttctcttcc

SEQ ID NO: 820416 - DNA, 120 bp, Artificial Sequence
  ENSG00000231028_18 (sequence is synthesized)
tttcagccttcactttcttctttttgtctctaccttccttaaaatagcattgtgcaaaaacatccctgaggttaaataataatcatgtataatgaggaagcgttctgtgtgtgccctctg

SEQ ID NO: 820417 - DNA, 120 bp, Artificial Sequence
  ENSG00000231028_19 (sequence is synthesized)
atgtgggactgaaaacacaagctggcctccaggcctggtgagggtcatgctccctgtgacctcgagtcaattgctcgacactttggattctcagttttctgatctttaaaataaggatga

SEQ ID NO: 820418 - DNA, 120 bp, Artificial Sequence
  ENSG00000231028_20 (sequence is synthesized)
cagtacctacctgggctacttcacagtgtccttgagggatcatgaaagtgagtgtattttgtaaactgcagtgttccatagggacataaggaatgttggtcttattgattttgttagaac

SEQ ID NO: 820419 - DNA, 120 bp, Artificial Sequence
  ENSG00000231028_21 (sequence is synthesized)
aagactcttcagaaacagtggtgagagagaggaatcagtccgggattcctcttttccatctcattgactcatctgataacactgagatagtggcttgctgctgcatattccctagcggac

SEQ ID NO: 820420 - DNA, 120 bp, Artificial Sequence
  ENSG00000231028_22 (sequence is synthesized)
tgagagaacacacatttgccaaatatggaggggaagatgagctttctgaacaccctcctattgtctgcactggagctaagccaggccacatcttcaggataatgatctgaggacggtcag

SEQ ID NO: 820421 - DNA, 120 bp, Artificial Sequence
  ENSG00000231028_23 (sequence is synthesized)
gctcaattcattctgcctgagctttgctgctgccccttcaaactacttacgaaagtggtattaggttgtgatggctgctgccccacccttgggagaatgcccaggggatgtggactgccc

SEQ ID NO: 820422 - DNA, 120 bp, Artificial Sequence
  ENSG00000231028_24 (sequence is synthesized)
taggcagccacaggaaactggaccagaaagtgcagagtcactgtgtgcccaggcgcctgcaggcagatctttctccaccacatacatttttagtgggccctctcacaaatgcctgatatt

SEQ ID NO: 820423 - DNA, 120 bp, Artificial Sequence
  ENSG00000231028_25 (sequence is synthesized)
taacatttgagaaagtcagcaaaatgttttgttagtcttttattcaccattttaagaatataacgtttatccagttggtgtcggataaaatcgggaaagaaaaatatgactgcactatag

SEQ ID NO: 820424 - DNA, 120 bp, Artificial Sequence
  ENSG00000231028_26 (sequence is synthesized)
actcagggcccaaaattattctgatgatggccaagtaaaaacattaaaagctgaaaaatataatagcatccaggatattactgaagattagttttaagcttaagtttttttccctcactt

SEQ ID NO: 820425 - DNA, 120 bp, Artificial Sequence
  ENSG00000231028_27 (sequence is synthesized)
atccagatttgagtatgagaagatttaaagaattctataaaaactgtgaaaatgcatctgctaaattaataacagtatttatttcacaaaaatgtcctaagttttgtaatgcctctaaaa

SEQ ID NO: 820426 - DNA, 120 bp, Artificial Sequence
  ENSG00000231028_28 (sequence is synthesized)
caattctcaaacttcttggtctcagtatccctttaaaattcatacattacttaggaccccaaagggcttttgttcatgtaaataatatcaatatgtatttattgtattaaaagttaaacc

SEQ ID NO: 820427 - DNA, 120 bp, Artificial Sequence
  ENSG00000231028_29 (sequence is synthesized)
tgagagtttttaaaaatttatttactaattcatttaaaattaacaaaaacaaacatactacctgttaacatcagtgcaatgatgtcgtcatattgatgccggatttcttgctccttagct

SEQ ID NO: 820428 - DNA, 120 bp, Artificial Sequence
  ENSG00000231028_30 (sequence is synthesized)
cagctaggtctgggttcttgtctcatgaccaggaagaagtaggcacctgggcactcttagagtgagcaaggcaggaaattttattgagtgatgaaacagctttttcaggaaggggacggg

SEQ ID NO: 820429 - DNA, 120 bp, Artificial Sequence
  ENSG00000231028_31 (sequence is synthesized)
gatggtccccctatccaaaggcaggagagttctcaatataaccgagcccagggctttttaagggctcagaatagggagtgtgtgctgactggtttgtgagtatgcaaaaaaggtcaaagc

SEQ ID NO: 820430 - DNA, 120 bp, Artificial Sequence
  ENSG00000231028_32 (sequence is synthesized)
aaagatgccactcaaaggtgggcacgacattgtagaaaatcaattaggaaagggtaggtatgtgtaaaatgggtgaagggtggagatcaatcagaggaaagcacaccaaacaggaaagcg

SEQ ID NO: 820431 - DNA, 90 bp, Artificial Sequence
  ENSG00000231028_33 (sequence is synthesized)
cgtgggatttcgctggggacccgcccctacatgcttaggcatttggctgcctcctgctgctctcaatatttcatatagctatggaaaaac

SEQ ID NO: 820432 - DNA, 120 bp, Artificial Sequence
  ENSG00000231028_34 (sequence is synthesized)
ctcctgctgctctcaatatttcatatagctatggaaaaactctactcataaggaaatgagagtgagaagggcaaatgacttcttagtgcttgcttgtcaagggcttgtttgacaatgttt

SEQ ID NO: 820433 - DNA, 120 bp, Artificial Sequence
  ENSG00000231028_35 (sequence is synthesized)
gctctaaaatattttgatctccatgaaaaaagtgttaaagaaaatgaggaattacaattttattatcctaggatttttaaaagtctgtttcattgatcttaaaaagtatatttgtattgt

SEQ ID NO: 820434 - DNA, 120 bp, Artificial Sequence
  ENSG00000231028_36 (sequence is synthesized)
tcaaattgtgggctatgagtttgaatcctcatcctgtcatgtactggttgaatgaccttggacaagctatttaagttttctggacttcagtgtcctcacctgtaaaataaaaatgataat

SEQ ID NO: 820435 - DNA, 120 bp, Artificial Sequence
  ENSG00000231028_37 (sequence is synthesized)
aatacaggccatttcctgtacctacagccacccgctccactcatcatgccttacctggatgatgcagaagtccctggaaacagaaggtctcacccttctttatctttctcatggctttcc

SEQ ID NO: 820436 - DNA, 120 bp, Artificial Sequence
  ENSG00000231028_38 (sequence is synthesized)
aaggctctttatcatgttactttcctgctcagaattctttaatgacttgcctcaatgaccagatacatgtgatctacagtcagccttccagcctcatcattcctcttccatttcctcccc

SEQ ID NO: 820437 - DNA, 120 bp, Artificial Sequence
  ENSG00000231028_39 (sequence is synthesized)
agaaacactgtactttatgaagctcctccaagacagactggtttaacaagagtcatgtgatctttctggtcaatgaaagataaggggaagccagcctggagttgcttcagaaaggctgct

SEQ ID NO: 820438 - DNA, 120 bp, Artificial Sequence
  ENSG00000231028_40 (sequence is synthesized)
cttaaacagaaacatatttgaagaaacagtaactttattctgactctttatgtgtgtggcggaggaagtgatgcctagagctactacaggcacttaggccatgaggagaaccagtgtaag

SEQ ID NO: 820439 - DNA, 120 bp, Artificial Sequence
  ENSG00000231028_41 (sequence is synthesized)
gaaaatggcaagaatcttgtccttgatgctgttgagctactgaattaaccagggctgcaactccctgtattagtaaggattctccagaggaacagaaccaatagaatgtatatataagta

SEQ ID NO: 820440 - DNA, 120 bp, Artificial Sequence
  ENSG00000231028_42 (sequence is synthesized)
tataataaggaattagctcatgcagttacagaggctgacaaattccaatatctgcagttggcaagctggagactcaggagaactgacggtgtagtctaacggctagcaggcccaagaacc

SEQ ID NO: 820441 - DNA, 120 bp, Artificial Sequence
  ENSG00000231028_43 (sequence is synthesized)
aggaaaagctgattaaagttcaaaggcgggaaaaaaaaacccaatgtcccaacttgaaggcatttaggcaggaggaattccctcttatttatgagactgtcagcctttttgttctattta

SEQ ID NO: 820442 - DNA, 120 bp, Artificial Sequence
  ENSG00000231028_44 (sequence is synthesized)
ggctatcaattgttttgatgaggcccacaacattagaaagggcagtgtgctttgctcagtctatcaatttcaacgttaaactcatccagtataatgtttgatcaactatctgggtatgcc

SEQ ID NO: 820443 - DNA, 120 bp, Artificial Sequence
  ENSG00000231028_45 (sequence is synthesized)
atggttcagtcaacttgacacataaagttaaccaatcgtcaaaaccccctacttttggtttcttgataaataaaataatatttatcttctgttttagtggaataaaggtatggaaaacgc

SEQ ID NO: 820444 - DNA, 120 bp, Artificial Sequence
  ENSG00000231028_46 (sequence is synthesized)
taaagcaaagacgggagatgtgtatattagctatccattactgtataattaattatacacaaaactaaactatacactaaactaaaacttcacagcttaaaacaggaaatatgtattatc

SEQ ID NO: 820445 - DNA, 120 bp, Artificial Sequence
  ENSG00000231028_47 (sequence is synthesized)
agctagtttggttctggctcagggtgacctatggagttgcagccaagatgtcatctgggactactatcattggaaggctcagctggggctggaggctacacttccaagatggctcactta

SEQ ID NO: 820446 - DNA, 120 bp, Artificial Sequence
  ENSG00000231028_48 (sequence is synthesized)
tagggctattggtgggaggcttcagttcctctccacatgaaactttcctcatgccatggaactggcttccctcagagtgaaagacccaagagagagactaagacagaagctgcaatgttt

SEQ ID NO: 820447 - DNA, 120 bp, Artificial Sequence
  ENSG00000231028_49 (sequence is synthesized)
ttatgacctagtcttggaagtgacttactgtcatttctactgtattttattcattagaagcaagtcattaagtccagcccacattcaaagtaagaggatttaagctgaacctcttgaaaa

SEQ ID NO: 820448 - DNA, 120 bp, Artificial Sequence
  ENSG00000231028_50 (sequence is synthesized)
aatggtatcaaagtatttacggacattttaaaaactaccacaatacatataggtgaacttcacaaggtgtagacatgggctgagacagaatattggataatatctcattctgcaaacagc

SEQ ID NO: 820449 - DNA, 120 bp, Artificial Sequence
  ENSG00000231028_51 (sequence is synthesized)
agcctcatctgtaataaaatcccagcattcagaaattatcacgatcaagtaggaaaagggcttgttggaaaaaacttatcaaagatgttacttcatttatccatttattctgagccatag

SEQ ID NO: 820450 - DNA, 120 bp, Artificial Sequence
  ENSG00000231028_52 (sequence is synthesized)
cataatagcgacaaattgtgtgtcctgtgtaatttggatacctctgctcaataatagctgaacagattttatcctatttttagaatagttaatatatacacatggcacaaaatttaaaag

SEQ ID NO: 820451 - DNA, 120 bp, Artificial Sequence
  ENSG00000231028_53 (sequence is synthesized)
gtataaaagtttctggttcaaaaataagattccctcattttctttttttctgattctttgaatgcaattcgatttactgatttctcatgtagccttagaaagtattctatgtacttacaa

SEQ ID NO: 820452 - DNA, 120 bp, Artificial Sequence
  ENSG00000231028_54 (sequence is synthesized)
gacccggtcttggaatcttagtgtcaactatgatgaatcaccaacactaacaaaaacattatcttttattgggttaaatagtttctactcttcccaagactgggaactgatgtaacaggc

SEQ ID NO: 820453 - DNA, 120 bp, Artificial Sequence
  ENSG00000231028_55 (sequence is synthesized)
ttcgtgctttcttcccaacaaattgattctgtgtggtcagctcctgtcatgatgatagaaccccctgtattgatttatacttaggggtatatcaatgtcagtctaaacttgtcctaccta

SEQ ID NO: 820454 - DNA, 120 bp, Artificial Sequence
  ENSG00000231028_56 (sequence is synthesized)
gcattcccccgggacacccggcccacgctcgtcggtcactacgctatcagcctccgcgctctcggactccagcagccccgacacgccgcccaggagagggccgggcaggccgagcacccc

SEQ ID NO: 820455 - DNA, 120 bp, Artificial Sequence
  ENSG00000231028_57 (sequence is synthesized)
ggcccgcgctcccgccaccagcgcacccatgatgtactcacggagaggggtacgcagaaccgcccgtcccgccggagccgacacccggagcagtgcaaatcaactcccccagcctagcgg

SEQ ID NO: 820456 - DNA, 120 bp, Artificial Sequence
  ENSG00000231028_58 (sequence is synthesized)
cgcgtgcgcgaagtgaggcggccacgcagccacctaacccgccagcgacccgtgtcctgaaagcaagccgcggctctgtgccgcagtgcggacagcgcgccgcctgctgacgtcagcgcc

SEQ ID NO: 820457 - DNA, 120 bp, Artificial Sequence
  ENSG00000231028_59 (sequence is synthesized)
agagtttatggaggccagcttttccattcttactgacattgccacaccttacaaactatatgtcttgtgcttccctaaatcctgtgaggaagcaacgagaaagattactaatccaatgcg

SEQ ID NO: 820458 - DNA, 120 bp, Artificial Sequence
  ENSG00000231028_60 (sequence is synthesized)
taccgaactgagctgttcaactttccgttctaaacatactctcctagatttctatcttgctgtaagccaccacaatcctcccagtgttttagtaagaacagtagagtatcctaaatgcat

SEQ ID NO: 820459 - DNA, 120 bp, Artificial Sequence
  ENSG00000231028_61 (sequence is synthesized)
cttatgccaaagcatatccattctctctttttaacttcctcagatgggccctttaccagttctctgactccagtttgactcttaaattctccacactgctatcagaatgacctgactaaa

SEQ ID NO: 820460 - DNA, 120 bp, Artificial Sequence
  ENSG00000231028_62 (sequence is synthesized)
aatgtaaatcggataatggcactctcctgctgaaaatttttgaaaggcaatctgtaagagaaaatgattactttgcctaggatacaagattctccatctccctgactagtttcatctctc

SEQ ID NO: 820461 - DNA, 120 bp, Artificial Sequence
  ENSG00000231028_63 (sequence is synthesized)
atagcctttcacgccccgtccttactcatattgtcctctcttcctgaaaattcctccttttacactcctgcatcacagccaaatgttgtccatcctttgaatcttaagcaggttgactga

SEQ ID NO: 820462 - DNA, 120 bp, Artificial Sequence
  ENSG00000231028_64 (sequence is synthesized)
ctccttcaaacactcctactccctattagacttcggatactcattctatatattagactttggatgctcattctatagtttcatagtttactttgtattttctctatccccagcatctac

SEQ ID NO: 820463 - DNA, 120 bp, Artificial Sequence
  ENSG00000231028_65 (sequence is synthesized)
cacagtgtctatgaaatagttggcatttcatgaacatttgttgaatgaataatggataacatatattgagctccttctaggaggtatgcattgtaggtgttttatgtacttttcatctgt

SEQ ID NO: 820464 - DNA, 120 bp, Artificial Sequence
  ENSG00000231028_66 (sequence is synthesized)
cctcacaactgcatttaagtacctgcttttccaaagggaagttataactctgactgctcattcttagtagggtgttagtttcagaatacaatccccagactagcggatgtgtaaccctgt

SEQ ID NO: 820465 - DNA, 120 bp, Artificial Sequence
  ENSG00000231028_67 (sequence is synthesized)
tatcatctcttgcttctccatttacagtagcatgcagaggtgcagtggggtgggggaggtcagggaatatttcatagcagaagtgacatttaagtaaagaccaaaataatgtgtagagtt

SEQ ID NO: 820466 - DNA, 120 bp, Artificial Sequence
  ENSG00000231028_68 (sequence is synthesized)
gtccaggttaggaagggtttccaggtagaagaaggtggcgtatagtgttcactacaagaaagtttggtataatacaagaactggaagaaaaaaaaaaaaagttcaagttggctaactaaa

SEQ ID NO: 820467 - DNA, 120 bp, Artificial Sequence
  ENSG00000231028_69 (sequence is synthesized)
aggtagagaatgagactaggggcttttggaggagacaaaacaagagagttaaacaagctatgaagagacccagacagtattggtcagtggaataccactatagaattttatggagtgaaa

SEQ ID NO: 820468 - DNA, 120 bp, Artificial Sequence
  ENSG00000231028_70 (sequence is synthesized)
ttttcaaattttaatatcataaagataactctggctgcagggtggagaacagacaggaaggaagcaaatctagatctgggaataccatttaagatgccgttgctgtaagccatgtaagag

SEQ ID NO: 820469 - DNA, 120 bp, Artificial Sequence
  ENSG00000231028_71 (sequence is synthesized)
acaaaggtggcatggtcaaggctaagaaaaatcagaatggagagaaatggaccaatttgagaaatttttaggaggtaaaaatgtcaggacttagtgattgattggatggaagagtgaatg

SEQ ID NO: 820470 - DNA, 120 bp, Artificial Sequence
  ENSG00000231028_72 (sequence is synthesized)
ataagaaataataaaaaacgatgaccagctgttttgccttccccttggcaagtaaagaggtggcaagcatgaaaggggagtgaggaaataaatatgttgggtctaatgggagccaggttt

SEQ ID NO: 820471 - DNA, 120 bp, Artificial Sequence
  ENSG00000231028_73 (sequence is synthesized)
ctcactgacagagaaggacgttacaaattgagagaggaagaattccacagtgacctttgtggtgatgttgaattggaattgaatatgtcagtgtcaactcatagttttcaatatatacat

SEQ ID NO: 820472 - DNA, 120 bp, Artificial Sequence
  ENSG00000231028_74 (sequence is synthesized)
tgcccatggccaactctctgctgatgactggacttgactacacaagttgttgggctcaacaccatgtggaagctgccagggcttggggctttcaccctctgaagccacgacctgaaccat

SEQ ID NO: 820473 - DNA, 120 bp, Artificial Sequence
  ENSG00000231028_75 (sequence is synthesized)
accttgaccccttttaaccacggctggaatggctgggacacagggcaccaagtccctaggatgtacacagaagaggggccctgggctccacccgcaaaaccattttttcctcctaagact

SEQ ID NO: 820474 - DNA, 60 bp, Artificial Sequence
  ENSG00000231028_76 (sequence is synthesized)
ctgggctccacccgcaaaaccattttttcctcctaagactctagacctatgatgggaggg

SEQ ID NO: 820475 - DNA, 120 bp, Artificial Sequence
  ENSG00000231028_77 (sequence is synthesized)
tctcctcagaaaatgggattttctttcctattgcattgtcagtcctccaaactattccaacttctgtctgttacccaattccaaggtcacttctgcatttttgggtatcttttcaggagc

SEQ ID NO: 820476 - DNA, 78 bp, Artificial Sequence
  ENSG00000231028_78 (sequence is synthesized)
tggttaggcaaaagagagagcttgtgcagggaaactccccttataatatggtcagatcttgtgagacttattcactat

SEQ ID NO: 820477 - DNA, 120 bp, Artificial Sequence
  ENSG00000231028_79 (sequence is synthesized)
ccttataatatggtcagatcttgtgagacttattcactattatgggaacagcacaggaaagacctgcccccattattcaattacctcccaccatatccctcccacaacatatggaattca

SEQ ID NO: 820478 - DNA, 120 bp, Artificial Sequence
  ENSG00000231028_80 (sequence is synthesized)
agatgagatttgggttgagacacagccaaactatatcagtgcattaaggattgtcatgtctttatggggtattgacccttttatcattttgttatgtccctctttatccctgataacttt

SEQ ID NO: 820479 - DNA, 120 bp, Artificial Sequence
  ENSG00000231028_81 (sequence is synthesized)
ccttgttccgaaatttgctttgtatggaattacatagctactcctgctttcttttgattggtgttagcataattatcttcactcgttttcttttaatctatatgtgtctttatatttaag

SEQ ID NO: 820480 - DNA, 120 bp, Artificial Sequence
  ENSG00000231028_82 (sequence is synthesized)
atgagttttttgtagacaacaatagtttggccttcttttttgatccactttgatatatatattttaatcagtgtatttagaccattgagttttaaaatgattgtcaatggatctggactc

SEQ ID NO: 820481 - DNA, 120 bp, Artificial Sequence
  ENSG00000231028_83 (sequence is synthesized)
atatctaccatatttgttaatgttttctattcatttaccttgttcttattttgtcttcttttctgtttctgccttttgtggttttaagtgagcattttatatgatttcattttctctcct

SEQ ID NO: 820482 - DNA, 120 bp, Artificial Sequence
  ENSG00000231028_84 (sequence is synthesized)
tcccgcctccccggccacgcgagcgggaacagtctcctccactcggagcgccactcatcatgccttacctggatgatgcagaagtccctggaaacagaagattatagatccagactcctg

SEQ ID NO: 820483 - DNA, 120 bp, Artificial Sequence
  ENSG00000231028_85 (sequence is synthesized)
cccatggccaactctctgctgatgactggacttgactacacaagttgttgggtactttgactagaacaccaaccaagtcattggaaatataatgctttgttctttctagctccaagatat

SEQ ID NO: 820484 - DNA, 120 bp, Artificial Sequence
  ENSG00000231028_86 (sequence is synthesized)
gaacatgtgacaacccaaacaaacaaaatcccaacaaggttgtcagatatgcaaattacagttgacccttgaacaacagagagggtagaggtgctgatcactggcacagttgaaaattca

SEQ ID NO: 820485 - DNA, 120 bp, Artificial Sequence
  ENSG00000231028_87 (sequence is synthesized)
aaagttttgactcccctaaaacttaattactaataacctactgttgactagaagcctactgataatataaacgatttattaacacatattttatatgttatatgtattaggtactgtatt

SEQ ID NO: 820486 - DNA, 120 bp, Artificial Sequence
  ENSG00000231028_88 (sequence is synthesized)
ataataaagtaagctagagcaaagaaaatgttatggataaaatcataagaaagagaaaagatatttactctccattgaatagaaatggctcatcataaagatcttcattctcaccatctt

SEQ ID NO: 820487 - DNA, 120 bp, Artificial Sequence
  ENSG00000231028_89 (sequence is synthesized)
caaattgggtaggctgaagaggagcaataagagaaggggttggtcttgccatctcaggtgtggcagagacggaaaacaatccacgtataaatatggacccatgtagttcaaacctgtgtt

SEQ ID NO: 820488 - DNA, 120 bp, Artificial Sequence
  ENSG00000231028_90 (sequence is synthesized)
gttcaaaggtcaactgtatttactttaaattacttgtctgacctgagattttcctgaccataatccaagagattgacacctttctaaagtttgttcttatgttttccaaaatgacaactt

SEQ ID NO: 820489 - DNA, 120 bp, Artificial Sequence
  ENSG00000231028_91 (sequence is synthesized)
ctgaggttctcccaaggtctattgagcataagagttttttgccttctagtaaaataaacccatattcgcagagtgtctggaccagaaaatcttccacattatcctgtgttcaagtattag

SEQ ID NO: 820490 - DNA, 120 bp, Artificial Sequence
  ENSG00000231028_92 (sequence is synthesized)
gattgtgcaatacatttcttagaagaattctgcctactactcatgcaaacaccaaacaggacaaatacaaaggcgaccacatctagacatgtcatattcaaactgctgaaaactaacaac

SEQ ID NO: 820491 - DNA, 120 bp, Artificial Sequence
  ENSG00000231028_93 (sequence is synthesized)
aaaaaacaaatcttagaaggaaaagaaacctcgcatggggaaacaatgatctaaatgatagccaactttgcaggccagaagacagtgaaatgatacctttgcagtactgaatgaaagaca

SEQ ID NO: 820492 - DNA, 120 bp, Artificial Sequence
  ENSG00000231028_94 (sequence is synthesized)
aagtcaacatagaattctatgtccaataaaaatatcctaaaaaagaaggcaaaataaaaacatttctagtaggcaaaagctgagagcactagtctttggtagatttgtactacacaaaat

SEQ ID NO: 820493 - DNA, 120 bp, Artificial Sequence
  ENSG00000231028_95 (sequence is synthesized)
gccataaggaggttttcaggctgaagaaaaaaataccagttgcaacctaaatgaagcatgaagagtactagaaacagcgaagattaaagactattttaacatctttatttttaatacata

SEQ ID NO: 820494 - DNA, 120 bp, Artificial Sequence
  ENSG00000231028_96 (sequence is synthesized)
tgtacctataaattttaacttcttcaaaaaattgactttttaagatataaataataacaatgtattgagctgcagcatatgtagaagtaaaatgtgggaaaataacagcacaaggaccag

SEQ ID NO: 820495 - DNA, 120 bp, Artificial Sequence
  ENSG00000231028_97 (sequence is synthesized)
aggaccagaagcatagatacatagaattatatatttaccaggttcttacattgtttgtgaagtaatataatattattttaatgtagattgggataacttaaaggtatatatctttaagat

SEQ ID NO: 820496 - DNA, 120 bp, Artificial Sequence
  ENSG00000231028_98 (sequence is synthesized)
agatatcatatattctatactgagcaatctataaaaaacaaagaagcatatctaaaaattcaatggatgagattaaattaaatactaaaaactactctattaacccaaaataagacaaga

SEQ ID NO: 820497 - DNA, 120 bp, Artificial Sequence
  ENSG00000231028_99 (sequence is synthesized)
ctattaacccaaaataagacaagaaaaaagggatgaaatgagagacaaattttgcaaatagaaaatcaatggtaggttataacccaatcatattaataattacactgaatataaatgaac

SEQ ID NO: 820498 - DNA, 120 bp, Artificial Sequence
  ENSG00000231028_100 (sequence is synthesized)
gaactaagcgctcaccccaaaaaaagtgattgtcagataggaaaaaagaaaaacctatctatatgctctttataagaaacatatttaagacagggtgcagtggctcgcgcctgtaatccc

SEQ ID NO: 820499 - DNA, 120 bp, Artificial Sequence
  ENSG00000231028_101 (sequence is synthesized)
agaaaccttcggtgtagtaagccattgaaatttgggggaaatttgtaatagctgttgctgtaaacctccgcactgcaaaacacacacatcctagataattaaaagacaacttctaccaga

SEQ ID NO: 820500 - DNA, 120 bp, Artificial Sequence
  ENSG00000231028_102 (sequence is synthesized)
acaagttgttggaaaaagaaaaaaacaatttcaaaactcatatgggaccactgatgaccaccaatagctaaagcaatcccaagaaagaaggacaaagttggaggcctcacacttcttgat

SEQ ID NO: 820501 - DNA, 120 bp, Artificial Sequence
  ENSG00000231028_103 (sequence is synthesized)
ttcaaattacattacaacgctgcagtaattaagagtatatactatcataaagatggacatactgcccagtggaacagaatggagaacccagaaataaattcacacatatatggtcaactg

SEQ ID NO: 820502 - DNA, 120 bp, Artificial Sequence
  ENSG00000231028_104 (sequence is synthesized)
atctttgacaagggtgccaagaatacacaacggagaaaggcttttctcttcaacaaatggtactgggaaacacacaaaagaatgaaattgtacctttctattatatacaaaatcaaatca

SEQ ID NO: 820503 - DNA, 120 bp, Artificial Sequence
  ENSG00000231028_105 (sequence is synthesized)
aatatattagaaacttaaacctaagacccaaaactgtaaaactccaagaaaaacatagggaaaaactttatgactttgtcttggcaatgacttcatggatataacacgaaaaacactatc

SEQ ID NO: 820504 - DNA, 120 bp, Artificial Sequence
  ENSG00000231028_106 (sequence is synthesized)
aggaaacaatcaacggagtgaaaaggcaattgatgaaatgaaagaaatatccatgaaccatctatctgataaaggactaatctccaaaatatataaggaacttctataattcaatagcaa

SEQ ID NO: 820505 - DNA, 120 bp, Artificial Sequence
  ENSG00000231028_107 (sequence is synthesized)
aaaaaccacatgacctgatttaaaaatgagctaaggttttgaatagacatttctccaaagaagatacaaatggccaacaaatataagaaaaaatgctcaatgttacaaatcatttggaaa

SEQ ID NO: 820506 - DNA, 120 bp, Artificial Sequence
  ENSG00000231028_108 (sequence is synthesized)
atgcaaataaaaaccaccatgagattttacttcacacctgtccagatggatatcatcaaaaaaaaaaaaaggacaaaatgtactgatgaggatgtggagaaataggaacgctggcacact

SEQ ID NO: 820507 - DNA, 120 bp, Artificial Sequence
  ENSG00000231028_109 (sequence is synthesized)
gttggtggaaatgcaaaatagtgaagctgctacagaaaatactatgaagattcctcaaaaaattaaaaatagaacttccatatatatgattcagctattccacttctggatatttatcaa

SEQ ID NO: 820508 - DNA, 120 bp, Artificial Sequence
  ENSG00000231028_110 (sequence is synthesized)
aagagttgaaaccaggatcttaaagagatatcagcagcactattcgcaatagtcaagatgcagaaataacctaaatgtccattgacagatgaatagatacagaatatgcgatatatacat

SEQ ID NO: 820509 - DNA, 120 bp, Artificial Sequence
  ENSG00000231028_111 (sequence is synthesized)
tgaaatattatcagccttaaaaaggaaggacattctataatatgcaatgacatgatgaacctggaggacatcaagctaagtgaaataagccagtcacagaaagaccaatactgcattatt

SEQ ID NO: 820510 - DNA, 120 bp, Artificial Sequence
  ENSG00000231028_112 (sequence is synthesized)
ccacttatatgaagtatccaaaatagtcagattcatagaatcaaagaatgaaatggtgtttgccagggaatagcaggaggggggaatagagagttatgaatcaacaggcataaggctcca

SEQ ID NO: 820511 - DNA, 120 bp, Artificial Sequence
  ENSG00000231028_113 (sequence is synthesized)
gtcaagcaagatgaatgagctctagagatttgctgtacaacattgtacctagagtcaacaatactgtattgtctgtttaaaatttgttaagcagtaagtctcatgttaagtgtttttacc

SEQ ID NO: 820512 - DNA, 120 bp, Artificial Sequence
  ENSG00000231028_114 (sequence is synthesized)
atttcctgtacctacagccacccgctggcatgggaagaggaccatagtttctgtggcctccctaagatggcctgccacctctcctgatgctggtgacttcttgtgatggtggggcaatat

SEQ ID NO: 820513 - DNA, 120 bp, Artificial Sequence
  ENSG00000231028_115 (sequence is synthesized)
taagtgtttgaaaaaggaagaagttcttattcccaaagttgtattcagttatcaaaacaacaattattttgtataaactgcatcagagacaactgaagatgaaagaactaccatctccac

SEQ ID NO: 820514 - DNA, 120 bp, Artificial Sequence
  ENSG00000287829_0 (sequence is synthesized)
cagtaggtttctgcaaacaaactgaacaccattgaaatccatttctaaaatagaggaaaagatttgtctaaattagaagtgctttagtagccctgctgttgactgcctagcaacaaaagc

SEQ ID NO: 820515 - DNA, 120 bp, Artificial Sequence
  ENSG00000287829_1 (sequence is synthesized)
acaaagcaatggagaggaaagattttctgctgaaaaatcactgatccactggaggcaaaagactcaagatttaatcacatctattaagtaaggctgcaactttacttctgcccttcctca

SEQ ID NO: 820516 - DNA, 120 bp, Artificial Sequence
  ENSG00000287829_2 (sequence is synthesized)
tttaccaaaggacaagggaatgaaaaatggaagctctaatggcttagtttacactcctgctaatttcaaacagatttccagattgcacagcttttaaaatgaaagaacttttcctcagaa

SEQ ID NO: 820517 - DNA, 120 bp, Artificial Sequence
  ENSG00000287829_3 (sequence is synthesized)
tgaccctgtgacagacaaacgctaaagtgactccaacgatccctgctctgctggtattcataacttcttttttttttttttggctggtattcataacttctttttttttttttttttttt

SEQ ID NO: 820518 - DNA, 120 bp, Artificial Sequence
  ENSG00000287829_4 (sequence is synthesized)
acaggcacccagttattcataactttatgtgacccctttcccttgaatgtgggtgggacatggagtacgggacttgcttctaacaaacaactatgtaagattctatgttggtggcagaca

SEQ ID NO: 820519 - DNA, 120 bp, Artificial Sequence
  ENSG00000287829_5 (sequence is synthesized)
gagagatcctccttactggcttaatgaagtggccacgtggaccacaggcagcctctacaacagccagtcagaaactcaagccctcagtgctacagcaatgattactgccaacagcctgag

SEQ ID NO: 820520 - DNA, 120 bp, Artificial Sequence
  ENSG00000287829_6 (sequence is synthesized)
tgagactggaagcagattctcccctgactgaacttgcaattgagatagcagcctggtcaacaccttgattatagccttgtgaggcccagagcagaagacccatctaagccatgcctggac

SEQ ID NO: 820521 - DNA, 120 bp, Artificial Sequence
  ENSG00000287829_7 (sequence is synthesized)
tcctgacacagaaactgagagataagaagtgtgtgttaaactgctatatttacggaaatttgttaggcagcaatataaaactgataccatcaccaacataataattcatgaaaataaaaa

SEQ ID NO: 820522 - DNA, 120 bp, Artificial Sequence
  ENSG00000287828_0 (sequence is synthesized)
cgtttgaaaaggtgacaatagcgtatggcttcccgcaccaagtgcacacagtacactagcgacaggcacaaaggcaacatgaaacgggctgctctgtgctcgggtgtcgcagaagcacgg

SEQ ID NO: 820523 - DNA, 120 bp, Artificial Sequence
  ENSG00000287828_1 (sequence is synthesized)
gccagagagccggtggctgcccaggaccaaagggacccacatcgacctgctgggcactggggcctagagagtgaccagagcgtgattagaagaggccggatcacagggagccccagtcca

SEQ ID NO: 820524 - DNA, 120 bp, Artificial Sequence
  ENSG00000287828_2 (sequence is synthesized)
ctgaaccacatccagaaggtagaaaggttgtttctctcccctggatgcctgtgggggtggggacggcagagcctcggacactgcccggggatcactctcaggctacttttcccaccctgc

SEQ ID NO: 820525 - DNA, 120 bp, Artificial Sequence
  ENSG00000287828_3 (sequence is synthesized)
tcgagacgtcaaaggagaccaggccggtcagcacacaggcttctggtaagtgccgccctccggtctgggagctcagctctccccttctgactcaccgctcggcgctgactcatcgtgacg

SEQ ID NO: 820526 - DNA, 120 bp, Artificial Sequence
  ENSG00000287828_4 (sequence is synthesized)
gcgagtggggctccagctccgcggcatttcatagacagcgcggtcacattcctttccaacagtcgctctggcctcgatgtctaaggctccgtgggcagccggcctgtggatgaggcggcg

SEQ ID NO: 820527 - DNA, 120 bp, Artificial Sequence
  ENSG00000287828_5 (sequence is synthesized)
gaaaccacatcctcttcatcatcctctcacgaggaaggacactgacagcttcggagaaggctgcccagtgtctgcgggtgcccttgggagatggccttgggacacggtgcctgtgcctgt

SEQ ID NO: 820528 - DNA, 120 bp, Artificial Sequence
  ENSG00000234050_0 (sequence is synthesized)
agatgggagcacccagcttcagtgttcagaagcagatttaggccgacttccgtaccttacatcctggagggatccaccctgacttgagcagaaggcatcacacacattcccaagcagcat

SEQ ID NO: 820529 - DNA, 120 bp, Artificial Sequence
  ENSG00000234050_1 (sequence is synthesized)
tgttcccatgagaaactgaaaacgtatttctttgaatctagaatgcatcttccctcttccaggtgtaaccattcagagtttttcctggagcgattccagcttgtttccttttggtgcctt

SEQ ID NO: 820530 - DNA, 120 bp, Artificial Sequence
  ENSG00000234050_2 (sequence is synthesized)
tgcagtttttgggtgggctctggggtgggcagacgatcttcactttgcagaggctgctccttttgtgagtggagctggtggtgagggagtaggagaggcctcgcatcatcctggcattca

SEQ ID NO: 820531 - DNA, 120 bp, Artificial Sequence
  ENSG00000234050_3 (sequence is synthesized)
ggcccttagccatggagaaggacttgaggtggcttcttaaggcaatggggagcgggagcttgtccaccagatgcacaggtgtgcaggacacgatggtgcggcagcagaggtcttgcaagc

SEQ ID NO: 820532 - DNA, 120 bp, Artificial Sequence
  ENSG00000234050_4 (sequence is synthesized)
tcagtaccttgctcggcctcccgagccagttcaacctgtgccgcagcagcactatcctggccagctccgtgaaagactctatgatgttgaaattgcacagagggctgacctcaaagaagg

SEQ ID NO: 820533 - DNA, 120 bp, Artificial Sequence
  ENSG00000231023_0 (sequence is synthesized)
gagaacttcctcctgctggggacaggacagatgaggcagaaggggaggttagggaggtttgaagagtgagaagaacttctgcagtggctgacttggaagatgaaggaggttatgaaccag

SEQ ID NO: 820534 - DNA, 120 bp, Artificial Sequence
  ENSG00000231023_1 (sequence is synthesized)
ggaatgggggcagcctctagaggctgagaacctgctgacacctacccacaaccgctaaggaaatgaagactttaattccacaactgcatgcaactaaactcagccaacaacctgaataag

SEQ ID NO: 820535 - DNA, 120 bp, Artificial Sequence
  ENSG00000231023_2 (sequence is synthesized)
tcggaaaaaggcttctccagagcctccagataagaggccaggctggcgacaccttgattttgaccttgtgagacctagagcagagaaactagccaagatcactcagacttctgatctaca

SEQ ID NO: 820536 - DNA, 120 bp, Artificial Sequence
  ENSG00000231023_3 (sequence is synthesized)
gaactgtgagaccgtaaatttatgttgtattaagccactaattgcgtgggaatttgttacaggagcaatagaaaatgaatacaccttctgatgtagtttaatcagttgacattaggggtg

SEQ ID NO: 820537 - DNA, 120 bp, Artificial Sequence
  ENSG00000231023_4 (sequence is synthesized)
acaccaagatgtgctacactgaacccaacttctgcatgtttaagacaagaatgtgcatctttatttttcctgaatatttctattgtctaaataccttagtaaagtttactgcttctacgg

SEQ ID NO: 820538 - DNA, 120 bp, Artificial Sequence
  ENSG00000231023_5 (sequence is synthesized)
atggcctaaaagttctggcaatgaaagaaacgcaaggtcaaaaatttacatcaggtatctgaatgtgtagcatatacaactgagtgttgaaagaagacaaaatcgttttcatcacgaaga

SEQ ID NO: 820539 - DNA, 120 bp, Artificial Sequence
  ENSG00000231023_6 (sequence is synthesized)
atatgtgctcagtaagaatcagaatgttcaattgtgtgaaggtgggagatgggaagattggtattatggcctggatccagaaatcagtcttccactataggaaatgggaatttaaagatg

SEQ ID NO: 820540 - DNA, 120 bp, Artificial Sequence
  ENSG00000231023_7 (sequence is synthesized)
atcagaagacagttgggagcagagtgagaataagaaccctcaactgctgtctcacctttcagatcacgaagaagttttttacaatgagcagaacactcaacctgaaagcagaatggattg

SEQ ID NO: 820541 - DNA, 120 bp, Artificial Sequence
  ENSG00000231023_8 (sequence is synthesized)
ttacagtttccaaatagagacatcactttgaaataacatggagaacatacatggatgtactgaacgaagaataaagtctgtgttgcagtcctgtctccattgacttttacaaatatggct

SEQ ID NO: 820542 - DNA, 120 bp, Artificial Sequence
  ENSG00000231023_9 (sequence is synthesized)
ttggatgaatcacctaagttttatttttgagaatttacgcttaccatgtataaaatgatattgctaatatgtttgctgcctaccccattgggttttgtgaggaataaatgataatgctaa

SEQ ID NO: 820543 - DNA, 120 bp, Artificial Sequence
  ENSG00000231023_10 (sequence is synthesized)
gaaaaaggcattgagaattataactcattattcaaatgcaagttatttatgtggttattgtcattattattaatactttcactcagctaaaaccttagaaccaaaaacatctgagaactt

SEQ ID NO: 820544 - DNA, 120 bp, Artificial Sequence
  ENSG00000231023_11 (sequence is synthesized)
gcttactattaataactgtcttatttgattcagggactcaagaaagtatcagctcacatgactgagtttcatcaattccaagttgtacattgagaatcacgataaagatcgggaatatga

SEQ ID NO: 820545 - DNA, 120 bp, Artificial Sequence
  ENSG00000231023_12 (sequence is synthesized)
gactttaagcataattctttttcatcaccatctggctatttctacttctccagtcctaacttctaacctgatcttagtcaccagggctaaattgcaaagtagaaaatttcaaggaaggtt

SEQ ID NO: 820546 - DNA, 82 bp, Artificial Sequence
  ENSG00000231023_13 (sequence is synthesized)
ccagggctaaattgcaaagtagaaaatttcaaggaaggtttctttgggttccatactctgcttttatgccttctacataaag

SEQ ID NO: 820547 - DNA, 120 bp, Artificial Sequence
  ENSG00000231023_14 (sequence is synthesized)
ttccttagtagagcctgggaggtcctaactgaaccaaccctgctccctccactggctctgcgccacctgattacctccatgccatgctcccttgtatctcaatactgctcataggtcacc

SEQ ID NO: 820548 - DNA, 120 bp, Artificial Sequence
  ENSG00000231023_15 (sequence is synthesized)
tcatcagagacaccttccctgattacagcatacgaaattagaaaacaaacctgatctcattccattgtccttgctctgcttcacaactctcaatcaccagcagatgtagaatatacttat

SEQ ID NO: 820549 - DNA, 120 bp, Artificial Sequence
  ENSG00000231023_16 (sequence is synthesized)
ttgtttcttatctgtcccctctcctatccatgtgagcaccacaagaatcagacttggttttccattgtaacccctgagcctgccacatggaaagtattcaataaatcattgttgaacaaa

SEQ ID NO: 820550 - DNA, 120 bp, Artificial Sequence
  ENSG00000231023_17 (sequence is synthesized)
gctgtctggaaggtttgaataaataaacctgggtgggaagtatacagttattgtgcatcaccaatgaatgaatcaggttgagttccatcctcttcacctaaaacttccttaagtgagtga

SEQ ID NO: 820551 - DNA, 120 bp, Artificial Sequence
  ENSG00000231023_18 (sequence is synthesized)
caagcgtagtataaatcagaaaaccgagccatcaagaagcttgccttgaccaacgactcaaatcacatcaagcagaaccagaagagaactttacacctgtatcttcagccccacagtaaa

SEQ ID NO: 820552 - DNA, 120 bp, Artificial Sequence
  ENSG00000231023_19 (sequence is synthesized)
acccaatgacacgatgaatgccatttaatctgtgtgatttcaccatgaaatctaaaccatcatttgaaaggctgctgaatgtggtaccagtgacacactttgtgcctaactctcttaact

SEQ ID NO: 820553 - DNA, 120 bp, Artificial Sequence
  ENSG00000231023_20 (sequence is synthesized)
ttttgctcatttgattgccatacaactctagaaatctgattttaaaacaattaccttaggttccagggaataattactttaatgatcttttaaatattttccccctaagagttgaccttg

SEQ ID NO: 820554 - DNA, 120 bp, Artificial Sequence
  ENSG00000231023_21 (sequence is synthesized)
ctgtaaattctttattgcctatttatatggtgataggggattaggcaggcactgttcttgagtctttactgagctaaaggaaagtggccaatagatggcctaaaagaatcatggggaaat

SEQ ID NO: 820555 - DNA, 120 bp, Artificial Sequence
  ENSG00000231023_22 (sequence is synthesized)
gtcgttttctgaatgaggacttagagtgggaagctgtcctttaactattatatatattttaaaataattttattgatatacgaaaactaatttagaaaccacattaataaattaataaaa

SEQ ID NO: 820556 - DNA, 120 bp, Artificial Sequence
  ENSG00000231023_23 (sequence is synthesized)
taaaatgatggtactccatgaatttttaacaagaatattccctatgttacacttacaagaaatcttttttgataacgtaaagtcataatttgcaaaatatttggcactcttgtttgcttt

SEQ ID NO: 820557 - DNA, 120 bp, Artificial Sequence
  ENSG00000231023_24 (sequence is synthesized)
ctgcttcactatctttgagtctgtgacaggtagctgatggtaaacctcataggatttggagttatatttgaagacactatccaagatatttatttgaacttacacaaaaaggctattttc

SEQ ID NO: 820558 - DNA, 120 bp, Artificial Sequence
  ENSG00000231023_25 (sequence is synthesized)
acccttaatattaaaaagctgagatgcatcccaggaggcaaatatcactcatgtacctggaagcttttactaaatgggtgacaccaagatgtgctacactgaacccaacttctgcatgtt

SEQ ID NO: 820559 - DNA, 120 bp, Artificial Sequence
  ENSG00000231023_26 (sequence is synthesized)
gagcaaacatagagtatctgggaccacagtagttcgctctataggtgtgccaatcggtaatgatccatggctgcataccctgctctgtaataccccagccgtcagccaaccagaaagccc

SEQ ID NO: 820560 - DNA, 120 bp, Artificial Sequence
  ENSG00000231023_27 (sequence is synthesized)
cagagacttctccggccatctgaaaacactgccattagagaaggttctgcctggctgttttcttctcttcccgggaaatatggccagattattgctgacctatctggaggcaacaggaac

SEQ ID NO: 820561 - DNA, 120 bp, Artificial Sequence
  ENSG00000231023_28 (sequence is synthesized)
atggtaatctgttcttattctaatggatcttccataacgtttcccacaaagaattactaaccattcatgaccttcatcaaataacgactctgtggctactgaactctgctttcaactggg

SEQ ID NO: 820562 - DNA, 120 bp, Artificial Sequence
  ENSG00000231023_29 (sequence is synthesized)
aggtggttcacagataaggcttccattggaaacatcacataatggattttctccccaagtatgttgcctatcactaggcctgtcaaaggtggatgcacatagaccaaatccagtggagtg

SEQ ID NO: 820563 - DNA, 120 bp, Artificial Sequence
  ENSG00000231023_30 (sequence is synthesized)
actttttcctttgtaatttaccttctgtggaaggtaggtaggatgtcctccaatgatgcccacatcctaattcatggaacctatgactatgttatgttacacaacaaaatggactttgtg

SEQ ID NO: 820564 - DNA, 120 bp, Artificial Sequence
  ENSG00000231023_31 (sequence is synthesized)
atggcctaaaagttctggcaatgaaagaagtaaagtgtgaatgtatccttaataccagctattcagatgtcttcatcaattattatgtgaagtctttccagttctatcctaaactgtaga

SEQ ID NO: 820565 - DNA, 120 bp, Artificial Sequence
  ENSG00000231023_32 (sequence is synthesized)
tggagagaaagagtcatcacaaattttaaaatgagttttctgtgagatatttttctcgcttccaaaattacagtttgctgtttaccaaagccaatccgtagtgatgggagatccactgaa

SEQ ID NO: 820566 - DNA, 120 bp, Artificial Sequence
  ENSG00000231023_33 (sequence is synthesized)
gtcatctcatgatgtgtgttgtcgggctatttaaaggctgctgtttcacttccaaacttcactcccttctgacgtcttcagtgctgttcacttggcaaccttggctactcttcagcagat

SEQ ID NO: 820567 - DNA, 120 bp, Artificial Sequence
  ENSG00000231023_34 (sequence is synthesized)
aatttgtactctacataagcatttagaagaacccagagttaaaccaaggataagagtcatcggtaacatttatagttactgaactcctcactatgtgtcacaaagtgggtcagagggtgc

SEQ ID NO: 820568 - DNA, 120 bp, Artificial Sequence
  ENSG00000231023_35 (sequence is synthesized)
atctttcaggagaaaaagaacattcttttagtgctatttctacttccacattgatacgacaatgattcctacagctaaattaaggtttgacctcatgtgtcaaatgatttttgtttagtc

SEQ ID NO: 820569 - DNA, 120 bp, Artificial Sequence
  ENSG00000231023_36 (sequence is synthesized)
aatagatttttttctaaatgttatcctctccaaaaaaatcagaaatttagcatttaagttatgcatgatcacaagtacatatatatatacacacacatatatatatgcaagaacagcctt

SEQ ID NO: 820570 - DNA, 120 bp, Artificial Sequence
  ENSG00000231023_37 (sequence is synthesized)
ttcttgacaataattcaatgcgagaaaaatttagataaatgtattgaatgtacaaaagtgtaataaaaccccctttagtttaatagataaaagagcattgtggggagttttttctttgca

SEQ ID NO: 820571 - DNA, 120 bp, Artificial Sequence
  ENSG00000231023_38 (sequence is synthesized)
gggttggagtatgtgctctgctcatggaaaccagctgtcatgccacttcccagcactcggagggaacagaaacttgtttcttctctactgttaaagcaaaagggtgtgcccaaggcaaag

SEQ ID NO: 820572 - DNA, 120 bp, Artificial Sequence
  ENSG00000231023_39 (sequence is synthesized)
gcagcactgtgggatgagatatgtacaaggcatcatttccctctaaggcaaataccttcactgctggcaaaccttcagaatttgcaagctcagccagcacctttgacccggccacacagc

SEQ ID NO: 820573 - DNA, 120 bp, Artificial Sequence
  ENSG00000231023_40 (sequence is synthesized)
tgacagcacagttggcagttggtagcttccatttatcctaggtcagctcccgaggcatcggcataaaatgaaataaagatttgagcagtcacttcagaaatgaaaatgggaatgcccaat

SEQ ID NO: 820574 - DNA, 120 bp, Artificial Sequence
  ENSG00000231023_41 (sequence is synthesized)
agtttgcttcagtttgctcaggctgagaaccatttattaagctggtaaaatgggaaagtcatacatgagagtacctgctcaggagaaagaaatagattgatcagacacattatctaaaga

SEQ ID NO: 820575 - DNA, 120 bp, Artificial Sequence
  ENSG00000231023_42 (sequence is synthesized)
tccagaagagaaatccactgatttctaacagtcaacccactgatggcttgagatgtagttgagactaccacacatttcagtaggcagatattgtcaccttcatatcctcagtgcctagca

SEQ ID NO: 820576 - DNA, 120 bp, Artificial Sequence
  ENSG00000231023_43 (sequence is synthesized)
ctgtgcctggtagtttgtgcttagtcagtgaatgtttgcgcaattaatgagtaaagcccatatgtgtatatgtttataataattattttttctagttcatgtaactaacgaatgaaattc

SEQ ID NO: 820577 - DNA, 120 bp, Artificial Sequence
  ENSG00000231023_44 (sequence is synthesized)
ccaagtcattgttctatgaggaacaggatgagaaataaggaactaatatttttcttcctactgtatgctagacataccaaatttgcatagtgagaaatggtcaaaacaagattgaaaggt

SEQ ID NO: 820578 - DNA, 120 bp, Artificial Sequence
  ENSG00000231023_45 (sequence is synthesized)
aggtatgtttcatgctaaagtccatgggtttttcactttacctaaaacttaaatgtcatcagttgcaaagcatttggaggaaacactgtgtataaggagatattcatcaagaattctatt

SEQ ID NO: 820579 - DNA, 120 bp, Artificial Sequence
  ENSG00000231023_46 (sequence is synthesized)
actgtgtataaggagatattcatcaagaattctattttaaattatgattatctttctatatgacagaaaaataccacttaaaatataatggattgaaaagattcttttgaagagatacaa

SEQ ID NO: 820580 - DNA, 120 bp, Artificial Sequence
  ENSG00000234052_0 (sequence is synthesized)
aggagacagatgaatttctcattcttgtaggctaccatttcttttggcttattacaaaacaacaggatgctgcagctttatcaaagtctacttatttgtccactaaaagtttatggctat

SEQ ID NO: 820581 - DNA, 120 bp, Artificial Sequence
  ENSG00000234052_1 (sequence is synthesized)
acgtttccaactagaacatctgaacaccaatatatggaattctgacaaagttaaaaccaggaagagatcctatgaaggctgacattttgtacatctgttttatagaacaataaaaataag

SEQ ID NO: 820582 - DNA, 120 bp, Artificial Sequence
  ENSG00000234052_2 (sequence is synthesized)
cgttgccaacagctagacacaatgaagaaacggctatatagagagataaagaagcttgctcaaggatacacagccagaaagcaaaagagttggagtttgaacttcgacagtctaactcga

SEQ ID NO: 820583 - DNA, 120 bp, Artificial Sequence
  ENSG00000234052_3 (sequence is synthesized)
ggttctttctctgtgtttaatcagtcaaccacactgcctcttcagaagcacgcataatgtatgctctaaaaagtaatgtcaatgtattaggtgtcaaacagtaaatgaaatttctcagaa

SEQ ID NO: 820584 - DNA, 120 bp, Artificial Sequence
  ENSG00000234052_4 (sequence is synthesized)
tttaatcagtcaaccacactgcctcttcagaagcacgcataattaggtgatctcccaccagagtgtaccaacaagtggatcggtcaagataaatcattacagtgtgtcgagaaactatta

SEQ ID NO: 820585 - DNA, 120 bp, Artificial Sequence
  ENSG00000234052_5 (sequence is synthesized)
gaacacctatttaaaggcagtcttaatttttcttaagttctaaaagcataaatgaatgtcaatatttatatgtgtaagctgttaaaaattacaacaaatactctaatgcttatcaacaac

SEQ ID NO: 820586 - DNA, 120 bp, Artificial Sequence
  ENSG00000234052_6 (sequence is synthesized)
cctggtaactaaaacatcagcaatatttctgagtttctcttcaaattcatcttctcttttctgctgtttgtctctttcccaaagtatacattggtaataaaactgaaattttggtcttca

SEQ ID NO: 820587 - DNA, 120 bp, Artificial Sequence
  ENSG00000234052_7 (sequence is synthesized)
catttgcaattctgtaggtcaagaattcagtgtgccagcaggaatggcttgtttctgattcatggtatctggtgacttaacaggcaagatttcaattgctaggagtaactgcaacctaga

SEQ ID NO: 820588 - DNA, 120 bp, Artificial Sequence
  ENSG00000234052_8 (sequence is synthesized)
atcatctggatactttttcatatacatgtctgacaaaaccagattgggaggattcaaagaccaggctcaggccactgtctagaccacaggaaacctggtcaacaacatatgggatgtcac

SEQ ID NO: 820589 - DNA, 120 bp, Artificial Sequence
  ENSG00000234052_9 (sequence is synthesized)
cagattcagactcagaagtttccataatgccgttgccaacagctagacacaagagagtactctatctgtgttcttgagtggagatgatgaagattagaactatacctgagttgtgatgaa

SEQ ID NO: 820590 - DNA, 120 bp, Artificial Sequence
  ENSG00000234052_10 (sequence is synthesized)
actgggaagagtgagagaaggaagagaagccaggaggagagtatgttacgagctgtgaataattgggacttgattccactgagctcctttgaagtatctgagaatttgactgcagaattg

SEQ ID NO: 820591 - DNA, 120 bp, Artificial Sequence
  ENSG00000234052_11 (sequence is synthesized)
tgaacctgaaaatcacagaaaagagaatatttatctattgaaccttctcttcatcttgcattggtcaagagttgtcctacgggatattaagacacttgcactttcaagtttgcagaagta

SEQ ID NO: 820592 - DNA, 120 bp, Artificial Sequence
  ENSG00000234052_12 (sequence is synthesized)
tgggaacgaaagcatccaaaaagccctgaggcaggaagcaagctgagacaaggtgttggtgatgatggtacacctggatgaagctaacttcagcagcaatagttgctgaatgaatttttc

SEQ ID NO: 820593 - DNA, 120 bp, Artificial Sequence
  ENSG00000234052_13 (sequence is synthesized)
atttcatctaagttgccacattcatcagcataaaattgttaatgatattcttttagaacttggagggtggtaggagagagaggagcagaaaaaaataactattggatatgagccttaata

SEQ ID NO: 820594 - DNA, 120 bp, Artificial Sequence
  ENSG00000234052_14 (sequence is synthesized)
cctgggttttgacataatctgtacaacaaacctccatgaaacaagtttacctatataacaaaccttcacatgcacccccaaatctaaaataaaagttgaagcaacaaaacaaactaagaa

SEQ ID NO: 820595 - DNA, 120 bp, Artificial Sequence
  ENSG00000234052_15 (sequence is synthesized)
caacagctagacacagtatatgatcaattctcaccaataccaccaatatcaccaatagataatgaggactggaactctttatctctaaaagatgacctgaaacactatggaaaaggaaga

SEQ ID NO: 820596 - DNA, 120 bp, Artificial Sequence
  ENSG00000287824_0 (sequence is synthesized)
tgtgcggacctccgagctacaccgtctccaaccaacagaagccagcaggaacctgccttagatgtgggaatgagacaacacaacttctcccataggcctggtggtcagagaggctggatc

SEQ ID NO: 820597 - DNA, 120 bp, Artificial Sequence
  ENSG00000287824_1 (sequence is synthesized)
aagaatctccacagcccagcgagaagccacgcgaacacacccctgtgtgggtatccgtgacctggcggcctgcagaactcctgggccagagacgtcctcatcctgttggaatatccaggt

SEQ ID NO: 820598 - DNA, 120 bp, Artificial Sequence
  ENSG00000287824_2 (sequence is synthesized)
atctccactccgaatatcctcatcttcctggaacccctctttttctcctaacattctcttaaatgaaattccatatctgctacaacacagaaagagaggcggaacaagaaaaactggtga

SEQ ID NO: 820599 - DNA, 120 bp, Artificial Sequence
  ENSG00000287824_3 (sequence is synthesized)
tccactaataagaaggccctggagcctctcgatgtttaatcttctcaagggatgagaatgtgtctcgtacttctcagcatctgaaacgcagccttcgctaatgggtcagtttcactggac

SEQ ID NO: 820600 - DNA, 120 bp, Artificial Sequence
  ENSG00000287824_4 (sequence is synthesized)
gtactcccaggatcatagatggcagccggggaaggcagtgagggtggaaatgtctcactaggctgaattgaagtgaggcctacccgttgcctcctttgcatgtgtttaagtattagaaga

SEQ ID NO: 820601 - DNA, 120 bp, Artificial Sequence
  ENSG00000287824_5 (sequence is synthesized)
aagatttgaatcttagctttatttgaaataacagaaaattggaagtcaattcatgtccatcagcgtggggctggccacctgccaattcatgtccatttccctggagggaaatgacccaac

SEQ ID NO: 820602 - DNA, 120 bp, Artificial Sequence
  ENSG00000287824_6 (sequence is synthesized)
catggagagaacgatgttcactgattgcattggcgtggcaagaactccatggcatgttgcatcatgaagaaagctgccccgcaaaatgagatgcgattgacgttgatgtgtctgtacttg

SEQ ID NO: 820603 - DNA, 120 bp, Artificial Sequence
  ENSG00000287824_7 (sequence is synthesized)
tgcaaagagagatttgggaaaggaagtttactgaagtgttaacaatgggttacaagttttgaagtgattttaatttctttttttttaagtttctgttaggctgggattttccccatagat

SEQ ID NO: 820604 - DNA, 120 bp, Artificial Sequence
  ENSG00000287824_8 (sequence is synthesized)
atgcatcatctatgtcagcaatccccaaccttttgggcaccaggacaggtttcgtgaaagacaatttttccacggaccaggagtgggagggacggtttcaggatgattcaagcacattac

SEQ ID NO: 820605 - DNA, 120 bp, Artificial Sequence
  ENSG00000287824_9 (sequence is synthesized)
gtttatcattagattctcacaaggagcatgcaagctagatcccttgcatgcccagttcacaatagggttcgtgctcctatgagaatctgatgttgccactggtctgacaggaggtggagc

SEQ ID NO: 820606 - DNA, 74 bp, Artificial Sequence
  ENSG00000287824_10 (sequence is synthesized)
gagaatctgatgttgccactggtctgacaggaggtggagctcagcttcgctcacttgccccccagtataccagt

SEQ ID NO: 820607 - DNA, 120 bp, Artificial Sequence
  ENSG00000287823_0 (sequence is synthesized)
acaggttgtggctgagctcggggccggggcagcggcgcttgcccttgggagggagaaaacaggcaaaggacaggatgtggtgagcgtcggcccgcgaaaccccgcggccacagcctgagg

SEQ ID NO: 820608 - DNA, 120 bp, Artificial Sequence
  ENSG00000287823_1 (sequence is synthesized)
aagtctgtagacaacaggctcggcacgaaggagaaagagctgacgtggctgtgaggtgccgctggtgggagcagagctgggaagggagcctgggtgtgactgtggggctgggagtgagcg

SEQ ID NO: 820609 - DNA, 120 bp, Artificial Sequence
  ENSG00000287823_2 (sequence is synthesized)
gggagagggacaggagacgggaaggggctgctggagcgcaggaggacggccagaggtgcgcgggcccccaccgcagccccagctcccagatggtgcacggaccaaccactcaacaatcag

SEQ ID NO: 820610 - DNA, 120 bp, Artificial Sequence
  ENSG00000287823_3 (sequence is synthesized)
cctcggaggaattgtcttctcgcacctgtgaagtgctattggattcacccactgtgccagccccttcctacgaacagtcggtctcactctgctactcgtgtctcgaggcttctctacacg

SEQ ID NO: 820611 - DNA, 120 bp, Artificial Sequence
  ENSG00000287823_4 (sequence is synthesized)
cccatcatattgatgctgtcgtactcatggttcttttcttttgtgccagtttttctgttatatgcaagaagatgctctctgcccgcaggaccatacggacactcttctttctcccgtcac

SEQ ID NO: 820612 - DNA, 120 bp, Artificial Sequence
  ENSG00000287823_5 (sequence is synthesized)
gttggaattcttgtttctctgcttagagctttaacctcagtgggatccagttttgtgaatggtgtaaatgagggatttggctcatttactggctgtgagtcctgtgcccagagctacact

SEQ ID NO: 820613 - DNA, 120 bp, Artificial Sequence
  ENSG00000287823_6 (sequence is synthesized)
tcccgtgagcatgtttgccacttaatgccggacaccggccctgctcccggccctgctcccggccttgccccctggtctgccccctgccctgctcccggccttgctccctgccccctgccc

SEQ ID NO: 820614 - DNA, 120 bp, Artificial Sequence
  ENSG00000287823_7 (sequence is synthesized)
tgccccctgccctgctccctgccctgctcctggcctctgccacttttcacagtcttctgtcccaggtctgccacttacctgcccagcaggggtgagatccctcagggagtcggagataga

SEQ ID NO: 820615 - DNA, 120 bp, Artificial Sequence
  ENSG00000287823_8 (sequence is synthesized)
gcctcttcctgtccttccaaggggagcagtgtatggaggctttggaggatgtttctgacaacactggggtgtgcaccgttccagctcccaggttccaaggtggaagtcaccagaaggaag

SEQ ID NO: 820616 - DNA, 120 bp, Artificial Sequence
  ENSG00000287823_9 (sequence is synthesized)
aacagaagcaaagacaatgccaggctaaagcaggagcccacccttcctgtctgggggccgcacccggggctgctgacctggtggctactcagcatggtgcctgagcgttcacagacgttg

SEQ ID NO: 820617 - DNA, 120 bp, Artificial Sequence
  ENSG00000287823_10 (sequence is synthesized)
agtgaccctgagcgttcacgggcactgagtgaccccactgccctctttggaagcgtcctgggggcagatttgccgtggtccttgtgcagccgatgtctgtcccacctggagcgactgacc

SEQ ID NO: 820618 - DNA, 120 bp, Artificial Sequence
  ENSG00000287823_11 (sequence is synthesized)
cacctgtggtgatggggtggatggagacaggccctctgttagaggcaatcggagcaaattatcaaactctaaagccagaggacccttagggcttcactgagtggtggcaggagccacgtg

SEQ ID NO: 820619 - DNA, 120 bp, Artificial Sequence
  ENSG00000287823_12 (sequence is synthesized)
acacagccggaaaccccatccatgccctggggagattttcccttggtgagggaccctgcagtgcggcccagcctttcagcctttctgctttcctttattctgtttctgctgtctttcctg

SEQ ID NO: 820620 - DNA, 120 bp, Artificial Sequence
  ENSG00000287823_13 (sequence is synthesized)
gaccagcaaggtggctaactaggaattcgtatcgcagctgtcacgatctctttcgtgtctatagcatgaactgcgatttccttccctcctgggctgtgttgtggaaaagatgagcccacg

SEQ ID NO: 820621 - DNA, 120 bp, Artificial Sequence
  ENSG00000287823_14 (sequence is synthesized)
gagggtgtctggaataaacggggaatcctcccaccagcacgcccgcctctgctgggagcatgaggcagcacgattctctgggcggcagcttgtctccaccgcggggctctaaccgatctg

SEQ ID NO: 820622 - DNA, 120 bp, Artificial Sequence
  ENSG00000287823_15 (sequence is synthesized)
ccaccagagccactgacgtccttccccagccaggagcctctgcagtccctgctcccaccctcaagggcacacgagttcagagtcattcccaggttgcacggagcagtttgaggagggaat

SEQ ID NO: 820623 - DNA, 120 bp, Artificial Sequence
  ENSG00000287823_16 (sequence is synthesized)
ggatggggtctcctcccgtcgaatggctcccctggctcctctgcaggtcagcaccttggaaaggcacgtgggtgtcagcgcagccgcaggcccagcctgtctgcctcctggaggccccag

SEQ ID NO: 820624 - DNA, 120 bp, Artificial Sequence
  ENSG00000287823_17 (sequence is synthesized)
gcatgctgcctcttcccctgttgccctggccctggggagctctggtgccgtctgcctcatccccgaggcaacgtctctgctgctggaccaaacacggcctgagtccctcgcagcctatgc

SEQ ID NO: 820625 - DNA, 120 bp, Artificial Sequence
  ENSG00000287823_18 (sequence is synthesized)
tctgcccacagacaccagatccacagttagaacaaacgtgtgtgccttggcctggctgtagggcctgccaagcgtctgggactcatgaagggctccgggatttcagctctggtccagtcc

SEQ ID NO: 820626 - DNA, 120 bp, Artificial Sequence
  ENSG00000287823_19 (sequence is synthesized)
actggcctgagccagctgcaatgggctgcaggggagtgggggaggcaggctcgatcagaaccacagcctgggagggcctggctgggaggcccctgctcccagaaactcaccttctcccag

SEQ ID NO: 820627 - DNA, 120 bp, Artificial Sequence
  ENSG00000287823_20 (sequence is synthesized)
aggggtctctgtccagcaggcgagcctggccccaggcctctctgcagcaggcatggactggctgggtgaccctcagggaactgtagctggtgttcagcagcactgccgtgctaggctcca

SEQ ID NO: 820628 - DNA, 120 bp, Artificial Sequence
  ENSG00000287823_21 (sequence is synthesized)
cctcccacctggcgcggcgcctgctccccaactccccttgttcccaaacctccccctgaaccagcctcatgtcccccaaccattgggaccagagtggcagctgactgcaggtcccagcat

SEQ ID NO: 820629 - DNA, 120 bp, Artificial Sequence
  ENSG00000287823_22 (sequence is synthesized)
cccaggacagcccgccacgcgctgggagccacggccgagctccttccattccggttcacacccagaccgtccgagctctgcccatcagccaccacgcgctgggagccacggccgagctct

SEQ ID NO: 820630 - DNA, 120 bp, Artificial Sequence
  ENSG00000287823_23 (sequence is synthesized)
ctctgcccatcagccaccacgcgctgggagccatggctgagctccttccattccggttcacacccagaccatccgagctctgcccatcagccaccacgcgctgggagccatggctgagct

SEQ ID NO: 820631 - DNA, 120 bp, Artificial Sequence
  ENSG00000287823_24 (sequence is synthesized)
cctagggcctgcagatgaaccagttcctgagctggggctggggacgggcaggccaggagccggaacctctcagtgtactgcatgcatctacaccccacagtggggaggagtgaagggtct

SEQ ID NO: 820632 - DNA, 120 bp, Artificial Sequence
  ENSG00000287823_25 (sequence is synthesized)
ttctcttattccctctgggctgctgaatttgttgtattttttatagtttgaagaagagaataggcacagactcccctgccagccagccagacacctcctgccatgtttcacgtgtggcat

SEQ ID NO: 820633 - DNA, 120 bp, Artificial Sequence
  ENSG00000287823_26 (sequence is synthesized)
ctgaccccagctttggttcagcagtcaggagtcaccctggtggctgggaggccagggaccccctacctgggaatcctaagtcctttgctttgggaaggctcattgcctttgaaactggcc

SEQ ID NO: 820634 - DNA, 120 bp, Artificial Sequence
  ENSG00000287823_27 (sequence is synthesized)
ctccattcccacttaatcaaggaggaggagctttgtctgaagtgcggagatggccgtggtcccgatggatgggctgctattggacacagcaatttgtgggcaggagactggactccacga

SEQ ID NO: 820635 - DNA, 120 bp, Artificial Sequence
  ENSG00000287823_28 (sequence is synthesized)
gcatctgagccaggcactgcaggcctgcgtctacccatcctgggctggaggggaggcagggctggtgttcgaaggggtggaaataggactgagggctcttctcggagaaggggatgctct

SEQ ID NO: 820636 - DNA, 120 bp, Artificial Sequence
  ENSG00000287823_29 (sequence is synthesized)
tgcctgctgccttccatgttcgaaggggtggaaataggactgagggctcttctcagagaagggcatgctcttgcctgctgccgtccttggaaaggctccccacctggccagcaccctctc

SEQ ID NO: 820637 - DNA, 120 bp, Artificial Sequence
  ENSG00000287823_30 (sequence is synthesized)
gggggtccagggatctccagcctgtgggcagtcggccaagccccttgggaaaatgagcccctgggcaggaggtgaggaggcacagaggttggtccccctcagaacgtcggccaccatgac

SEQ ID NO: 820638 - DNA, 120 bp, Artificial Sequence
  ENSG00000287823_31 (sequence is synthesized)
tgaggcactgaccggggagggcacttggcctcgggctgttgtccagccccctgcgcttgttcctgcagcagaggctgcagtcactccccttctgactcgcccttccctttcctccatgcc

SEQ ID NO: 820639 - DNA, 120 bp, Artificial Sequence
  ENSG00000287823_32 (sequence is synthesized)
gccctgcgcacggcccctccgaaggtcgggccagaccttcccctgtgaggtctccagggttccgctctggggagggctgtgttctaaggaccactgtccttgccctgccagcacctctgc

SEQ ID NO: 820640 - DNA, 120 bp, Artificial Sequence
  ENSG00000287823_33 (sequence is synthesized)
agttgtgagaggccccttccttctctgcagctcaatgagcatggggacctcagcccagccttctttctccctccggaggccacacatctcttgagccagtcgtggcctcttccacagcca

SEQ ID NO: 820641 - DNA, 120 bp, Artificial Sequence
  ENSG00000287823_34 (sequence is synthesized)
acttgtccttgtggcccagtctggcctggagccagcagtaaatgtgaccccagcttgggaacagagtgcgggccctggagctttggggattgtgagggaacaaggcggccaggccaggtt

SEQ ID NO: 820642 - DNA, 120 bp, Artificial Sequence
  ENSG00000287823_35 (sequence is synthesized)
ctcccagcggttaaaaggcccaccccttcccgggtctcaattctgggctgatttccccaggacagcattcttgtgtcaactcgctgttaccccagctgacggcctcacatctgctgaggc

SEQ ID NO: 820643 - DNA, 120 bp, Artificial Sequence
  ENSG00000287823_36 (sequence is synthesized)
aatgccacctctccagagtgaaaagctcctaagacagagccattctccccgagttgattattcccttgaattgttataaatctccccttgctatttctctctgaacatcatttatgagca

SEQ ID NO: 820644 - DNA, 120 bp, Artificial Sequence
  ENSG00000287823_37 (sequence is synthesized)
ccttgcgtctccgtcgatgagaaagtgcattaaccctgcaggctgtgtctgggaaggctctgccctaatccgttcagaaccaaggcctcggcacctacagcttcgtttctggtccttttt

SEQ ID NO: 820645 - DNA, 120 bp, Artificial Sequence
  ENSG00000287823_38 (sequence is synthesized)
cagaccattcccagtgccttcctctccctcccagccctgggccctcccagccgccctccgcgcaggcagcctggagccacctccaggagggctggccgccactgtaattacaggcgcctc

SEQ ID NO: 820646 - DNA, 120 bp, Artificial Sequence
  ENSG00000287823_39 (sequence is synthesized)
tccgcgccctggggctcggctctgcaaattaaactgttttctgctttttatctccatcttcgcagctctccttctgactaataagtccagcaactggtgatgctcttccaatgcttttac

SEQ ID NO: 820647 - DNA, 120 bp, Artificial Sequence
  ENSG00000287823_40 (sequence is synthesized)
taggaagcctgagctttaattttctgacaatcacaaaggcccctggaacagcagcctgtgcacgctcagccgctcctgaggtcagctgcgagcacgttgatggggaaggctctgaacgtg

SEQ ID NO: 820648 - DNA, 120 bp, Artificial Sequence
  ENSG00000287823_41 (sequence is synthesized)
tttcttctcagagcctctaaatcacatcttcccttcattgtagacgcggacggacggcacagtaatggggtctgtgggaggctgtgctcacacccgcagctgcaggataatcgcctcctt

SEQ ID NO: 820649 - DNA, 120 bp, Artificial Sequence
  ENSG00000287823_42 (sequence is synthesized)
cagcagggctgggggagctcagtcctgcctttctcccagggaacctggggtagagccctcggcacattcataaaacgatgaacaattaccgcgcctgaagacctctatcatcaaccaggg

SEQ ID NO: 820650 - DNA, 120 bp, Artificial Sequence
  ENSG00000287823_43 (sequence is synthesized)
gaaacgactgtttttctgtagcctgtgaattcagcttttatgactaaatgactacttaaacctcagaactctaagcattaccatttgcttcctaaaaatagctgtctcctctggtccata

SEQ ID NO: 820651 - DNA, 120 bp, Artificial Sequence
  ENSG00000287823_44 (sequence is synthesized)
tttagaacagaaaatacactgggaggagggggcccgtcacagcccctgctgccccacctggcagggcctccttaacccttccccactctgaaccagccctataggcttagagaagggagg

SEQ ID NO: 820652 - DNA, 120 bp, Artificial Sequence
  ENSG00000287823_45 (sequence is synthesized)
acgggtgtgtttttccccaagagacaaaagttaacctgaaacacaaaggtcattctcagatgagccagctccttccagacagaaagagcactgggaccacgcacaacacttccaggaagt

SEQ ID NO: 820653 - DNA, 120 bp, Artificial Sequence
  ENSG00000287823_46 (sequence is synthesized)
gcctcatcatcggtcaacgctgcgtcaccctgggcagtcacaacaccacacaaactcacgacagcaccacgcagctcacaacagcaccacacaagctcacaacaccacacagttcacaac

SEQ ID NO: 820654 - DNA, 120 bp, Artificial Sequence
  ENSG00000287823_47 (sequence is synthesized)
agcgccacacagctcccgacagcgccacatagctcacaactgcaccacacagctcacgacaacaccacacagctcccgacagcaccacacagctcacaactgcaccacacagctcacgac

SEQ ID NO: 820655 - DNA, 120 bp, Artificial Sequence
  ENSG00000287823_48 (sequence is synthesized)
aacaccacacagctcacgacagcaccacacagctcacgacaacaccacacagctcacgacagcaccacacagctcacgacaacaccacacagctcacgactgcaccacacagctcacgac

SEQ ID NO: 820656 - DNA, 120 bp, Artificial Sequence
  ENSG00000287823_49 (sequence is synthesized)
tgcaccacacagctcacgactgcaccacacagctcacgacaacaccacacagctcacaactgcaccacacagctcacgacagcaccacacagctcacgacagcaccacacagctcacaac

SEQ ID NO: 820657 - DNA, 120 bp, Artificial Sequence
  ENSG00000287823_50 (sequence is synthesized)
tgcaccacacaagctcacaacagcgccacacagctcacaatagcaccacatagctcgtgacagcaccaaacatgctcacaacaccgcacagctcacaacagcacgacacaagctcacacc

SEQ ID NO: 820658 - DNA, 120 bp, Artificial Sequence
  ENSG00000287823_51 (sequence is synthesized)
accacacaagctcacaacagcaacacacagctcacaacagcgccacacagctcatgacaacaccacacagctcatgacagtaccacacaagctcacaataacaccacacaagctcacaac

SEQ ID NO: 820659 - DNA, 120 bp, Artificial Sequence
  ENSG00000287823_52 (sequence is synthesized)
agcaccacacaagctcacaacagcaccacacagctcacgacagcaccacacaagctcacgacagtaccacgcagctcacgacagcaccacacaagctcacaacagcaccacacagctcac

SEQ ID NO: 820660 - DNA, 120 bp, Artificial Sequence
  ENSG00000287823_53 (sequence is synthesized)
gacagtaccacgcagctcacaacaatgccatgcaagctcacaacagccccacacaagctcataccacacagctcacaacagcaccacacaagctcacaacagcacacaagctcacaacag

SEQ ID NO: 820661 - DNA, 120 bp, Artificial Sequence
  ENSG00000287823_54 (sequence is synthesized)
caacatgaagctcacaacagaaccatgcacttcacaaaagcaccacacagctcccaacagcaccatgcagctcacaacaatgcaatgcaatctcacaatagcactacacaagctcacaat

SEQ ID NO: 820662 - DNA, 120 bp, Artificial Sequence
  ENSG00000287823_55 (sequence is synthesized)
agcaccacacaagctcacaacagcaccacacaagctcacaacagcgccgcacagctcccaacagcgccgcacagctcccaacagcaccacgcagctcccaacagcaccacacaagctcac

SEQ ID NO: 820663 - DNA, 120 bp, Artificial Sequence
  ENSG00000234055_0 (sequence is synthesized)
gaagctcagagctagattcacggctccagcttctgttagattccccgtgcccaccatggggctggaatcctgtaggtgctcaattattgtgtgttgactgagtgagcaggagggaggggc

SEQ ID NO: 820664 - DNA, 120 bp, Artificial Sequence
  ENSG00000234055_1 (sequence is synthesized)
caggcccagctcacccaccctcgccccagacctctcaccgtgacgctggagtcatccatggccttgacaaaggtgtggagagggactgttgtgccaggattgcactggtgaccccggatc

SEQ ID NO: 820665 - DNA, 120 bp, Artificial Sequence
  ENSG00000234056_0 (sequence is synthesized)
cacagaagtgagaggaagtgatttgttccatgtcggagtcaagcttcttagaaatggacgtgcttcttccgggatctctttctccttccaccagctaaatgcagatagcaacaaccacac

SEQ ID NO: 820666 - DNA, 120 bp, Artificial Sequence
  ENSG00000234056_1 (sequence is synthesized)
agtggggacacagagaagtgaagcctggggccctgaatgatcacatggaagagactcacccttctggtttcaatatttgacttatagggaaaaaaaaaatcaccattttgctttctccac

SEQ ID NO: 820667 - DNA, 120 bp, Artificial Sequence
  ENSG00000234056_2 (sequence is synthesized)
tcttgactgtgaagtttaatataaggtatggctcagtctttgtgatgattcataacctggctctaaccaacaaaccattggaccatcctgcgcctcatctctctcccctacagagtctct

SEQ ID NO: 820668 - DNA, 120 bp, Artificial Sequence
  ENSG00000234056_3 (sequence is synthesized)
gtctccccagaaagcactgaggactctgattcatcatgtcaagcggtcaattagaatccgggaaagcctctctctggcctcaccttacttcctgtaccaggagagatgctcatcaatagt

SEQ ID NO: 820669 - DNA, 120 bp, Artificial Sequence
  ENSG00000234056_4 (sequence is synthesized)
gagaaagagttgatgggattagagtctggaagtgacaacctctcctgaacctgaactcattgatttcttcgttttacaaaacagtgttcttgaaaaaaataaacaaaaaaaggaaataat

SEQ ID NO: 820670 - DNA, 120 bp, Artificial Sequence
  ENSG00000234056_5 (sequence is synthesized)
acaactaagaactccaaggtctaaattttaaccagctgtatctcataacaacagaagctgcaatggccaacatacgtcatttataaaacgccaacttatgtggatggggattgggattta

SEQ ID NO: 820671 - DNA, 120 bp, Artificial Sequence
  ENSG00000234056_6 (sequence is synthesized)
gggatttattggcctaatgcaaagagcatataaaaaatgagtagggaaaagactactgtttgtgtatatatgtaattattacatatattcttaaatgatatttaataaataatcaaatga

SEQ ID NO: 820672 - DNA, 120 bp, Artificial Sequence
  ENSG00000234056_7 (sequence is synthesized)
gctgaaggcctacacctgctgaagaagctcatgcccagtttgaacccactcatgactgagcccaaggacagtcttgtctgtgccaagggtcctggcggctgcgttgaaggactgaaggga

SEQ ID NO: 820673 - DNA, 120 bp, Artificial Sequence
  ENSG00000234056_8 (sequence is synthesized)
aggcggatgctgtcaccgttgctggtgatgtcgtttgttgtaggttgaattgtgtcttccaaaagatctgctggagtcgtaaccccaggtccctgtgaatgtgaccttatttggaaatgg

SEQ ID NO: 820674 - DNA, 120 bp, Artificial Sequence
  ENSG00000234056_9 (sequence is synthesized)
ggtctttgcaaatgtaaccaaggtgtaagttaagatgaggtcatactggagtagggtgggcctttaatcaatgtgactagtgtcactctaagaagaggtaaagagacacagacaggcacg

SEQ ID NO: 820675 - DNA, 120 bp, Artificial Sequence
  ENSG00000234056_10 (sequence is synthesized)
cagagggaacataacatctccgcctcagaccgaggcagagattggaaaaatgtgtctcgaagctaatggattccaaagattaaacaactggaagcctggggggaacatggaaactgccca

SEQ ID NO: 820676 - DNA, 120 bp, Artificial Sequence
  ENSG00000234056_11 (sequence is synthesized)
aataccagtgctgtcagctgccacatggcctgtgcccccttggtgcctaccagcattacagggaaaagctcattttgccttttttggtcttctgtggcactccccttgcctagaatccag

SEQ ID NO: 820677 - DNA, 120 bp, Artificial Sequence
  ENSG00000234056_12 (sequence is synthesized)
gtacaaacccatgggaggtgggcaaaggtaatgtcctatgaacttggaacacctcccctctgagctgctcctttactctgcaggctacatggggttgtagctcctcctgggatgggctct

SEQ ID NO: 820678 - DNA, 120 bp, Artificial Sequence
  ENSG00000234056_13 (sequence is synthesized)
tcttaataagcatatatccagaacagctattaactcatagtgaaagctgatgtttggggaaatcaggaatcaaaatatgctaaagaaaacacaagaacttcaatttagctcagggcctag

SEQ ID NO: 820679 - DNA, 120 bp, Artificial Sequence
  ENSG00000234056_14 (sequence is synthesized)
tattctcagacctgtagccctcatgctgctcatcctagcctccagcctcagcttcccaggcaagggggtcacgggaacatgccggcagcattgcatctggtgccaggctttctgcaagga

SEQ ID NO: 820680 - DNA, 120 bp, Artificial Sequence
  ENSG00000234056_15 (sequence is synthesized)
gcgtccacacatttctctcctggcacctgtgcacttcacattgtggtctcagcttccatgaggcccatggagggcaaggacaggcctcagatacaggaagacagtggacagcaggggact

SEQ ID NO: 820681 - DNA, 120 bp, Artificial Sequence
  ENSG00000234056_16 (sequence is synthesized)
ttaagaccagtggctctgagcttttttctgttcatctcataaagaggaacttgggctggacatttgggggttctcactggcagcacagcttctcaagtccaccttggaggataatcccag

SEQ ID NO: 820682 - DNA, 120 bp, Artificial Sequence
  ENSG00000234056_17 (sequence is synthesized)
gtgggaatggacatgagcagggaggtagacatttcagcctggggtgaggtcaggagctggccaagtggtctgcagatgggaggtggtagtctcaactcaggtattatttccaaaccgtat

SEQ ID NO: 820683 - DNA, 120 bp, Artificial Sequence
  ENSG00000234056_18 (sequence is synthesized)
tgatgaaccattatccctttaaagacccacagcaagtttaaggtaaagctagcagcctccttaagcagcaatgctatgacatatgagaagtcccttagcagcagccacacagcagctcaa

SEQ ID NO: 820684 - DNA, 120 bp, Artificial Sequence
  ENSG00000234056_19 (sequence is synthesized)
atatgagaagtcccttagcagcagccacacagcagctcaaagggaagctcctcggtggctcacctaggatagaaaattccacccagtgctgggtgcggtggcttatgcttgtaatcccag

SEQ ID NO: 820685 - DNA, 120 bp, Artificial Sequence
  ENSG00000234056_20 (sequence is synthesized)
gaatttgaaaccagcttggcaaacatggtgaaaccccgtttctacttaaaaaaaaaaattagctgggtttgttggcgtacacctgtgatcccagttacaggcgaggcagaagcaggagaa

SEQ ID NO: 820686 - DNA, 84 bp, Artificial Sequence
  ENSG00000234056_21 (sequence is synthesized)
acctgtgatcccagttacaggcgaggcagaagcaggagaattgcttaagcctggcaggcagaggctgcagtgagcccagcaaga

SEQ ID NO: 820687 - DNA, 120 bp, Artificial Sequence
  ENSG00000287820_0 (sequence is synthesized)
gtgctgtcgtaagagcctgcagtgaaggagctggccttgatgaagcagcagaacgtgaaatgccaaaacagatggagttgcttggatacaaggagaatcttacagaatacaaatgaactt

SEQ ID NO: 820688 - DNA, 120 bp, Artificial Sequence
  ENSG00000287820_1 (sequence is synthesized)
gaaggcattagtaatattttcaaaataatagagaaatgacacaaagagtgaaagaggtgaaatctgtctttgatgggaataatatctaaaaggagtattgtacatatctgctggcagctt

SEQ ID NO: 820689 - DNA, 120 bp, Artificial Sequence
  ENSG00000287820_2 (sequence is synthesized)
taaaaaaattaatgattactgaaattcagaaatgtcaacagtatgaaatgagcaaaattacttccctaacaagattttataagagataaagtagtgggatatttccttgaaataatgttc

SEQ ID NO: 820690 - DNA, 120 bp, Artificial Sequence
  ENSG00000287820_3 (sequence is synthesized)
atcatcaatgctgaagtttacagaggacaaaaatatgaaatcatgtgttcatagacagccccaggacacacacagtggatgcattgtgttctcctgggttgcataactactttgaaagaa

SEQ ID NO: 820691 - DNA, 120 bp, Artificial Sequence
  ENSG00000287820_4 (sequence is synthesized)
gttttcttttctgtgtcataaaagaagactttttggctctgccaggatactctaccatttggccccatagacttcaagcatgcctgaagatacgtgccaatggcttgttggtttttgaag

SEQ ID NO: 820692 - DNA, 120 bp, Artificial Sequence
  ENSG00000287820_5 (sequence is synthesized)
atcattctgatctctgctgagttacccaactggactcagaagggtctgacccacgtgccacattccagctgtttgcttgtttgtttttaatctcaacctagtttaatgggaagaaggtga

SEQ ID NO: 820693 - DNA, 120 bp, Artificial Sequence
  ENSG00000287820_6 (sequence is synthesized)
gtcaccttgtgtgtatgtcagctgatatttatgtcatggaaacttaaaggggatagacttgaaattgaaaagataagattgtgattgaatgggccttgtataaactatgttttgtttttg

SEQ ID NO: 820694 - DNA, 120 bp, Artificial Sequence
  ENSG00000287820_7 (sequence is synthesized)
ttctcttgcttacttaccttgtaaacagattccttgagtcttaaaccaaggatcttaatctttggtatttacagagcctttcttccatgaagcagagttatttaggatgctgccagcaaa

SEQ ID NO: 820695 - DNA, 120 bp, Artificial Sequence
  ENSG00000287820_8 (sequence is synthesized)
tcacacatttgactctatgtatttttccacctcatgatgaggaaacagacacaaaaaggccaaatgattttttcaaggacattcagctaggaaagggcaaagacaggcacagatgaagaa

SEQ ID NO: 820696 - DNA, 120 bp, Artificial Sequence
  ENSG00000287820_9 (sequence is synthesized)
ataatcacaggcacaaacgaggtatctgttaatagagatcctaggaatctgtgactgtcaatatgaattacaaatatgaaaattatttgttgaatcaacaaagtggaaataaaactattt

SEQ ID NO: 820697 - DNA, 120 bp, Artificial Sequence
  ENSG00000287820_10 (sequence is synthesized)
tttcttagctgatttggtaatgactaacagtcaacatacctattaagtggttttggttgaaataatttaatttgttgtcaatactagttcccccctttaaatttaatgatacagttccaa

SEQ ID NO: 820698 - DNA, 120 bp, Artificial Sequence
  ENSG00000287820_11 (sequence is synthesized)
tatctagatgaacaaataaagataggagaaagaattctatattttagtcatttctgcttatggcctcaatttcagattccagaaatccatagctaagtagttataaagcaattacagttg

SEQ ID NO: 820699 - DNA, 120 bp, Artificial Sequence
  ENSG00000287820_12 (sequence is synthesized)
ttagagtagcccaggatggctggacaaagttgaatatttcatgactaaaaacaacaacagccaggcacagtggttcacacctataatcatagcactttgggtggctggcttaagcctgga

SEQ ID NO: 820700 - DNA, 120 bp, Artificial Sequence
  ENSG00000287820_13 (sequence is synthesized)
gttcgagaccagcctggcagtaaactgagaccttgtctctataaaagatacaaaaattagttggtgtggtggtgtctgcttgtagtcccagctactttggaggctgagatgggagaatca

SEQ ID NO: 820701 - DNA, 88 bp, Artificial Sequence
  ENSG00000287820_14 (sequence is synthesized)
caggaggttgaggttgcagtgagctgaaatcgtgccactgcattccgtcgctgcactccagcagcaaaacaaagcaaccaaatcaatt

SEQ ID NO: 820702 - DNA, 120 bp, Artificial Sequence
  ENSG00000287820_15 (sequence is synthesized)
accaaatcaattctcactaaaaataaacatacctaagacatcatcgtatattttaaattctttctaattaaagcaatgttactaaatatattttaaagaggcttgttataaatgaaatac

SEQ ID NO: 820703 - DNA, 120 bp, Artificial Sequence
  ENSG00000287820_16 (sequence is synthesized)
tcatttcctagatgcatgtttctactaaagttgattcaccaattaaaagactcttttctgtccttgggggcttcagagatgcaaatagtgttggaaaagctggctggtcagctgctacac

SEQ ID NO: 820704 - DNA, 120 bp, Artificial Sequence
  ENSG00000287820_17 (sequence is synthesized)
ctagtaactcctcttgattatctaaaaataaaatgactcttgtttaatttttttaaaaactaggtatttctgattcccactgagctgggagttaatactcaaattgagaagacttgcttg

SEQ ID NO: 820705 - DNA, 120 bp, Artificial Sequence
  ENSG00000287820_18 (sequence is synthesized)
aaattgtgaactactgtccttgttataacttgtgattactctttaaattctttaaaaaagattattctgaatgtgtttttaagcatcctattatcacgttatgagatacacagtaatgcc

SEQ ID NO: 820706 - DNA, 120 bp, Artificial Sequence
  ENSG00000287820_19 (sequence is synthesized)
ttgttaactcttcatgtcattcattatgtgaataagaaacagaatgtcatgatgaaagtttaagtagatttttaaaaagcatataaaaaatgtgtgaggatgacacaaaagaaaaattta

SEQ ID NO: 820707 - DNA, 120 bp, Artificial Sequence
  ENSG00000274478_0 (sequence is synthesized)
ggcatgggcaatgtcagcaagggggtctcgtttctgctggagacccccaaggagtgtgcagaacctcctctgagtctgccagctcctgttctttgtgatttggggatgctcctgggtcat

SEQ ID NO: 820708 - DNA, 120 bp, Artificial Sequence
  ENSG00000274478_1 (sequence is synthesized)
tactgtctggatgtccagcctgcttcctgttaagcagggtggtgttggggacctgccccctccagctgtgggggcatccaggtgggccatgggaggcggtgggccccacagcctccttct

SEQ ID NO: 820709 - DNA, 120 bp, Artificial Sequence
  ENSG00000274478_2 (sequence is synthesized)
ctgatgggctttcctggacacattggacactgtcttcccaccaccccacctcccggttagcctggccaccttctcactcaaaatgcgtggtctccaaagtgggtgcttgtgggtcagacc

SEQ ID NO: 820710 - DNA, 120 bp, Artificial Sequence
  ENSG00000274478_3 (sequence is synthesized)
cagaagtgacctccaggagagggaggtaaataacagaacttctacttacatctttttttcatctcaaagtaaaagagaccaagtcttaggaaggcattgacaccatggcatgtattctgt

SEQ ID NO: 820711 - DNA, 120 bp, Artificial Sequence
  ENSG00000274478_4 (sequence is synthesized)
gaggttttcctccatttggaggtgctctattaaaaatgtaagagattttttccctttctgaggagcactcaagagggatagtgaaataaactaaactcagaaccagattcttacatctct

SEQ ID NO: 820712 - DNA, 120 bp, Artificial Sequence
  ENSG00000274478_5 (sequence is synthesized)
gtgttaaaaagtgtgaaagattttcaaaacaacattgtatctgtaatcacagtgcttctgaaaaaaaatgagagcaaaagtttttttactgtttataacataaaatgatacttaattatt

SEQ ID NO: 820713 - DNA, 120 bp, Artificial Sequence
  ENSG00000284738_0 (sequence is synthesized)
cagtctctccaaaccgggattcccctttggccatctctcattctttcaattctaaagatggagactggcgaacggcgatggggtctgcggtgggcggtgtttcgtcgcgacagactctag

SEQ ID NO: 820714 - DNA, 120 bp, Artificial Sequence
  ENSG00000284738_1 (sequence is synthesized)
gaaatttcacgatagaactagctttaggcgcttgagccttgccgtctttttggggtgtggcctgtctccgtctgccaaaggctttgagcttcctggtgttcatcgtacctccgcttggtc

SEQ ID NO: 820715 - DNA, 120 bp, Artificial Sequence
  ENSG00000284738_2 (sequence is synthesized)
ctgtcgtgactaaaccacgacagcaggaaaaaaaaaaaagcagctagccaagttgctgaggaattacggtgtgcagagccctcgcagctccttctcttgggaactcctggtctggttagg

SEQ ID NO: 820716 - DNA, 120 bp, Artificial Sequence
  ENSG00000284738_3 (sequence is synthesized)
ttctcagcgaggaaacagcctcccaccccgcccgattccacctaattaactcaagggccagctccttttgctggcctccctgcttccacggagcagttaggcccgcctaaactcagcgag

SEQ ID NO: 820717 - DNA, 120 bp, Artificial Sequence
  ENSG00000284738_4 (sequence is synthesized)
cgtttctggagcaccttgaggatagggaccaagtaacagagtccgggtgttaaggttatgatagtagttaacgtttttggaaagagactgtgtcaggctctgtgctaagaactttacatg

SEQ ID NO: 820718 - DNA, 120 bp, Artificial Sequence
  ENSG00000284738_5 (sequence is synthesized)
aacatgctcaagacaggataggaaatggtcctctggcttgaaagactcagcatccagaagtagtacctcactctccatccagtggtcaccccccagaaatgtgctctcgccctacccacc

SEQ ID NO: 820719 - DNA, 89 bp, Artificial Sequence
  ENSG00000284738_6 (sequence is synthesized)
tctgctgctgctgctgttgccgttctctcaagggctggcggaactgagcagcccccaggacaacattccggagcttggcccagcgcaga

SEQ ID NO: 820720 - DNA, 120 bp, Artificial Sequence
  ENSG00000284738_7 (sequence is synthesized)
agcccccaggacaacattccggagcttggcccagcgcagacgcccacctggtgtgccagacggccacttgctttccaacacagcctaccaagcacagtgcccatcaggatggcctacctc

SEQ ID NO: 820721 - DNA, 120 bp, Artificial Sequence
  ENSG00000284738_8 (sequence is synthesized)
gacaccctaaccctgcctcatacccactccctgtcttggagccccagggaccgcccttcccctgcagacatcctgtctaggactgtccggccaatggctcagccaggaacaagagcccag

SEQ ID NO: 820722 - DNA, 120 bp, Artificial Sequence
  ENSG00000284738_9 (sequence is synthesized)
aagagacagtaggcagcagctgcctcccaaggggcctagaagaacccagaggcagtggagaaaatttgtacccagaccttgctgcttagaaatataaaatatatggctctgaagaaatca

SEQ ID NO: 820723 - DNA, 120 bp, Artificial Sequence
  ENSG00000284739_0 (sequence is synthesized)
gggggtggggaggccagggatgagaagaagaaggctggcaccccactagggaagagtttgatgggggattctcatctgggcaccacacagtttataggaacccagggcggacttgcctgg

SEQ ID NO: 820724 - DNA, 120 bp, Artificial Sequence
  ENSG00000284739_1 (sequence is synthesized)
agtaagaggaccaagtgtgctcccaatggtaggaattccacagacagcagcagtgtgcagcccacggcgtgaattcaggtgtccaatatcaccttcagaagcatctggaagggtcctggc

SEQ ID NO: 820725 - DNA, 120 bp, Artificial Sequence
  ENSG00000284739_2 (sequence is synthesized)
ttaagcgggtgagtccatggcagctgaagctgtcctgaagacatattcatgagtccaactggcaaccctcttctctgcgatggctccatgatgttcgtctcagtttcttcagaggtaaaa

SEQ ID NO: 820726 - DNA, 70 bp, Artificial Sequence
  ENSG00000230991_0 (sequence is synthesized)
tgtcacccaggctggagtacagtggcgctatctcagctaactgcaccctccacctccccagttcaagcga

SEQ ID NO: 820727 - DNA, 84 bp, Artificial Sequence
  ENSG00000230991_1 (sequence is synthesized)
ccactgcgcttaatagactgaggatggagaaaataagagcaaagtacaataatgagtgtctggagaggttggagtaggagacca

SEQ ID NO: 820728 - DNA, 120 bp, Artificial Sequence
  ENSG00000230991_2 (sequence is synthesized)
tacaataatgagtgtctggagaggttggagtaggagaccaggcagagtagcttgggaaaaaggcagggaaaggtgcaaattggatgccaagataagcttggcttatttctaattttgcct

SEQ ID NO: 820729 - DNA, 120 bp, Artificial Sequence
  ENSG00000230991_3 (sequence is synthesized)
aaagtgacataatataactatgtccccaagcacatgtaacatctgatcacattgagatgagaaattgcctgagaaatacagatggaatttatgcagtaagcaaagttggaaaagcattta

SEQ ID NO: 820730 - DNA, 120 bp, Artificial Sequence
  ENSG00000230991_4 (sequence is synthesized)
tatcattctacagttgcttagtctctctagcctaggaaaccatgggatacttaattcagccatctctatctaggccctgttattaattgtgtattgcatggtgtgcttgcaggatcacaa

SEQ ID NO: 820731 - DNA, 120 bp, Artificial Sequence
  ENSG00000230991_5 (sequence is synthesized)
ctgcatcacaaaaataatctgaccctggctgtgagatttggagatgacaacacaattgtaaatttataaaatttactgcacctactcagggggacataaggcaactgtgttaattcattt

SEQ ID NO: 820732 - DNA, 120 bp, Artificial Sequence
  ENSG00000230991_6 (sequence is synthesized)
actatgaaaaatatcatccaaatcaatagaacacagtgattaggctatctattgtttcaatagtttcatcaattgctgactgaatcttctagtctgcagtttaaaatctagttagtactt

SEQ ID NO: 820733 - DNA, 120 bp, Artificial Sequence
  ENSG00000230991_7 (sequence is synthesized)
tgtccaatatgctataatacatactagcagtctgtagagggtctctataatgaattactgctacattcactgtcccaccaattttctaataattctgtcaaatcaccttctggattccaa

SEQ ID NO: 820734 - DNA, 120 bp, Artificial Sequence
  ENSG00000230991_8 (sequence is synthesized)
ttttctattttttttcaatgagttacatgactataatccaacatttttgtaatttcaacaaaaaacatttgaacatgcagtaaatcactggaggttaccagggaagaaaggacctgcagc

SEQ ID NO: 820735 - DNA, 120 bp, Artificial Sequence
  ENSG00000230991_9 (sequence is synthesized)
cttgaacaaagacggatttagaaatatgttcagcaataccagtgaatagtacaggagaatctaggataaaggaaacagactggaaaataaaccatcctagaaagaaaagttcagagaatg

SEQ ID NO: 820736 - DNA, 120 bp, Artificial Sequence
  ENSG00000230991_10 (sequence is synthesized)
aaaaaaagaaaaaagaaaaaaacagaaacgcgacatgctctaaaaaggaatatttaacctggattaattcataaaataataggagaaaatttttgcagccagaatactatgaatttgagt

SEQ ID NO: 820737 - DNA, 120 bp, Artificial Sequence
  ENSG00000230991_11 (sequence is synthesized)
agaatactatgaatttgagttggttgaagaacaacctcatcttttaaagcagagaagttttctcagatatgttttccagaatgccaaatcgtaagtaaattgatgagaaaactgtggctc

SEQ ID NO: 820738 - DNA, 120 bp, Artificial Sequence
  ENSG00000230991_12 (sequence is synthesized)
aaaagttatgttacttgttagacatcaccagacatttaagtggtaagcacaagatgtgaacacaactcttctctattaaacctattagacctgcacagcccaatatgacagccactaacc

SEQ ID NO: 820739 - DNA, 120 bp, Artificial Sequence
  ENSG00000230991_13 (sequence is synthesized)
acaagtggctgcacacacttgatatatgactagtttgaaacaagaagtgttttaagtgaaaaatagagatgagattttgaaaacttgagatgaattaaaggatgtaaactatctcaataa

SEQ ID NO: 820740 - DNA, 120 bp, Artificial Sequence
  ENSG00000230990_0 (sequence is synthesized)
atgatttagctttgtgaatatggggacagtgatagcccaatttctttgataaattatttcatttcagaagactggcatgtgctaagtactaggaaaaaagacagaccaggtgaggagatg

SEQ ID NO: 820741 - DNA, 120 bp, Artificial Sequence
  ENSG00000230990_1 (sequence is synthesized)
aatggagtgagaagacagcccagtggaatgagaaactaatgaggacctaaatgcctgtgatggagaaaacacaggaaatggagaaacatagacaacctacaagcaagtaaagagacaatt

SEQ ID NO: 820742 - DNA, 120 bp, Artificial Sequence
  ENSG00000230990_2 (sequence is synthesized)
ccagaatgttaaaatctatacgggaatgacagtgtctgcaagccattgatattaaaaaatatagaccagacatgagcagatattactggatcttggacaagtgggtctctaagctgcgtg

SEQ ID NO: 820743 - DNA, 120 bp, Artificial Sequence
  ENSG00000230990_3 (sequence is synthesized)
gccttaggtgacttacttcagagttgtgcttctgcaaaagaagaaaaataataacaactggattgttgtgagcagacaagcatgtttggcccatgtgcacagcaaatgcatcagaaagct

SEQ ID NO: 820744 - DNA, 120 bp, Artificial Sequence
  ENSG00000230990_4 (sequence is synthesized)
acacgttagtgaagaaatgaagaaatagcagcttcctcaccctgcaccatctccctgagttccagcaggatcctcaacagttgcccacaatgagaacttgcttgattacacactcattat

SEQ ID NO: 820745 - DNA, 120 bp, Artificial Sequence
  ENSG00000230990_5 (sequence is synthesized)
tggatttagtcccttccctgtctcactttgctgcttctctgttggtgcctcctgggattatccccgaagtaaatcatacacactacagtccttatcacagggcctgcttctgggagaacc

SEQ ID NO: 820746 - DNA, 120 bp, Artificial Sequence
  ENSG00000230990_6 (sequence is synthesized)
tactgaagacaaaacccgccggcatagtccatgtgggtcagcctcccatggcagagaacaagtgaagagagggtgcctggtctgcttcacacacttcagctagtagtgaacatcaaagac

SEQ ID NO: 820747 - DNA, 120 bp, Artificial Sequence
  ENSG00000230990_7 (sequence is synthesized)
cctgagaagccaaaagttatgaaatgcatcagcagtgggttgaagacaagacctctccttttcctgctgacatttcttccatgagcagtacccagacagccgacagaaagagcccaggag

SEQ ID NO: 820748 - DNA, 120 bp, Artificial Sequence
  ENSG00000230990_8 (sequence is synthesized)
acagacagaggaaaaagggtgataactccagagcacgtcatttttattctccatatctcagaaaatagactccaaaacagaggaattatttttccactttactgaggaatataatgatta

SEQ ID NO: 820749 - DNA, 120 bp, Artificial Sequence
  ENSG00000230990_9 (sequence is synthesized)
agaggtacattcttcttactgtctggttcactccctagacacatgccagcttgaccatcatacagagcagcccccaggatgaaggcaaacttctatctggagtctgatctttccaagata

SEQ ID NO: 820750 - DNA, 120 bp, Artificial Sequence
  ENSG00000230990_10 (sequence is synthesized)
gggctgaatcaacttagctcttttttcttgtggctcattgctgctttccagattgagaatagcctcagatttctttctggcttccatataccatgcatcctattgctttgcttatactct

SEQ ID NO: 820751 - DNA, 120 bp, Artificial Sequence
  ENSG00000230990_11 (sequence is synthesized)
taccccccaatgtcaaaatagtcctgaagtgtataccagatcatgtcacacatatgcagaactgatcatgtcagttcaaccttggctccaagaataaagctgtaagtcctataaccacaa

SEQ ID NO: 820752 - DNA, 120 bp, Artificial Sequence
  ENSG00000230990_12 (sequence is synthesized)
ccacacaggccctgtgtatctgagagttgagttgctgatttcagaggtgtttgtatcattgctctaaatgtgtttctgctcccctcccacccaagatgctggttcaacggaccatttcat

SEQ ID NO: 820753 - DNA, 120 bp, Artificial Sequence
  ENSG00000230990_13 (sequence is synthesized)
taatggttgcatatggcttccacaggaaagaaataataagctaatgttatctattgactcaatcccacatatatttacatttgacaacttaaaaaaaaaaccttcggctcaatgatagtt

SEQ ID NO: 820754 - DNA, 120 bp, Artificial Sequence
  ENSG00000230990_14 (sequence is synthesized)
tagctcaagtcactatgttaggatatatatttctttcatctatgactatttttgtctgcacagtaacctgcctcaagcacacaaatatttgtgtgtctggcctcaagcaattaacgtgtc

SEQ ID NO: 820755 - DNA, 120 bp, Artificial Sequence
  ENSG00000230990_15 (sequence is synthesized)
tcctaacatgagataaagattaaatgaaaattctgtcaccctgaaataaacctggaagcagaattcctgaatgtttgccaaataaggtgactatcagacttaagatgctgaactttgaaa

SEQ ID NO: 820756 - DNA, 120 bp, Artificial Sequence
  ENSG00000230990_16 (sequence is synthesized)
tgactgtcatagaaacaaaggcaaggcatggttggcgcccattcaacctggtcaataacatccttaattacaggacatggcatcattttgattcacagtggaataaaaggcatctatttg

SEQ ID NO: 820757 - DNA, 120 bp, Artificial Sequence
  ENSG00000230990_17 (sequence is synthesized)
aggaaaatcctgtaaaggaaccatatttttctgtgttgcctgccaaaatgagaacatcatttgttaaataatgtgggacacaggtgccccggatgtactatttaatggagaaagaaaaag

SEQ ID NO: 820758 - DNA, 120 bp, Artificial Sequence
  ENSG00000230990_18 (sequence is synthesized)
agagaaacaatggctgccagtatccgggaaaaatgcgactagcttcttaagcttcttcacccagaaattgttacaaatagaagggaatctgactttgagctatgagttgttgcttcccca

SEQ ID NO: 820759 - DNA, 120 bp, Artificial Sequence
  ENSG00000230990_19 (sequence is synthesized)
tgactgaattccccaagaactgagttattactgacctgtgatttgctcatcataaggtctcactgttaattactgctctctgctccgcagaaactttgaattccaccaaagggtgtgccg

SEQ ID NO: 820760 - DNA, 120 bp, Artificial Sequence
  ENSG00000230990_20 (sequence is synthesized)
aaggcttagatgttgagaagcgtgaattcatcctgcacaacaaatatcatagagatgggactggagcgggggacaagaagggggagaatgaacaagatgcatgttgcaaaaccccaaggg

SEQ ID NO: 820761 - DNA, 120 bp, Artificial Sequence
  ENSG00000230990_21 (sequence is synthesized)
gtgctatttgtatggtagcctgagtgaacagcaatttccctgaggggtggttgcagcagatactgtgggtaccatctctacatctcttactccttactcgttcctgccttactccttcag

SEQ ID NO: 820762 - DNA, 120 bp, Artificial Sequence
  ENSG00000230990_22 (sequence is synthesized)
actctttgcctaaggacagtctctggtatctaagtctaggttagccactcatggcaggccagatgaatgattgctaggagtcttgcatatacacccggtttccttgccacttggatagga

SEQ ID NO: 820763 - DNA, 120 bp, Artificial Sequence
  ENSG00000230990_23 (sequence is synthesized)
taaaggtgcttcaccccattttccagcagtctccagcaagtctaggttccacttgctcacagcagtagctgattttgtgaaacatcctttctgggctgccttcctttctctctctccctt

SEQ ID NO: 820764 - DNA, 120 bp, Artificial Sequence
  ENSG00000230990_24 (sequence is synthesized)
tccctctcccatctctgattttcttctacttcccccaatatattaatattatctcagggatggcttttgggaaccccaatcaaagaaaggagcaaactcaattaagaccctctgttttag

SEQ ID NO: 820765 - DNA, 120 bp, Artificial Sequence
  ENSG00000230990_25 (sequence is synthesized)
gtaactttgggaacctggtggagcatcctgacattacatcctgaaccagagtatgtctcaagatatttttggatcctgcttttgtggagacagaatccacaacacagcagagagttcctc

SEQ ID NO: 820766 - DNA, 120 bp, Artificial Sequence
  ENSG00000284734_0 (sequence is synthesized)
gtgcagtctgcgcttgggaatttgttgttgtttgttataacccaaatatacttgaaaggtaaagcttaagagcaaacttacctggtgtgggcactgcagcgtgaagagttctctcaccca

SEQ ID NO: 820767 - DNA, 120 bp, Artificial Sequence
  ENSG00000284734_1 (sequence is synthesized)
ttgctctgtcctcctgcgcctggatcctcgagaaacggactgttcttagaagctgaaagtccagccggatttacagacatccaagtaagagtctgtgagaaccgaaattgaaaggacatg

SEQ ID NO: 820768 - DNA, 120 bp, Artificial Sequence
  ENSG00000284734_2 (sequence is synthesized)
cactttgtggggagttgactgttggggattttcctgtttatcaagacaggaaactaaaggagcttgaaagtgctggttcctccacaccagactcctgaaactcaggtttgttggtggaag

SEQ ID NO: 820769 - DNA, 120 bp, Artificial Sequence
  ENSG00000284734_3 (sequence is synthesized)
tgttggtggaagggacttaccatgtctcagacgaaactttggactgtgaacttttgagttaatactgcaatgagttaagactggtgagtgttcaatagcaaagacttggaaccaacccaa

SEQ ID NO: 820770 - DNA, 120 bp, Artificial Sequence
  ENSG00000284734_4 (sequence is synthesized)
taataataaaaagactggtgagtgttaagaaggcataattgtatttttcaatgtgaaaaggacatgaaatttgggagggaccaggggcagaatggtatggtttgaatttgtgtccccacc

SEQ ID NO: 820771 - DNA, 120 bp, Artificial Sequence
  ENSG00000284734_5 (sequence is synthesized)
catctcatgtcaaattggaggagatgcctggtgggaggtgattggttcatgggggacaatttcctccttgctattctcatgacattgaatgagcacttatgagatctgatggcttaaaag

SEQ ID NO: 820772 - DNA, 120 bp, Artificial Sequence
  ENSG00000284734_6 (sequence is synthesized)
ttgaatgagcacttatgagatctgatggcttaaaagggtgtggcacttcccctttctctttctctctctccgctgtcaccatgtgaagaaggtgcttgcttccccttcgccttctgccat

SEQ ID NO: 820773 - DNA, 120 bp, Artificial Sequence
  ENSG00000284734_7 (sequence is synthesized)
acctcttttcttcataaattacccaggctcaggtagctctttatagcagtgtggaatggactaatacaacaaggttcttgatagacaacctacaaatgttctctattgactaatcacatg

SEQ ID NO: 820774 - DNA, 120 bp, Artificial Sequence
  ENSG00000284734_8 (sequence is synthesized)
cctacaaatgttctctattgactaatcacatgtaaacttattataattcatagtattatttgaatggatctgttattcctgcaggatcgtcaaaccactgatctgttttcagaccaaccc

SEQ ID NO: 820775 - DNA, 120 bp, Artificial Sequence
  ENSG00000284734_9 (sequence is synthesized)
atctatttacagatatgagtctaattggaaacttcagtacatcttatatattatgacatgcataatcttgacattcagttgttatccttattttttattcattatatattttatgagccc

SEQ ID NO: 820776 - DNA, 120 bp, Artificial Sequence
  ENSG00000284735_0 (sequence is synthesized)
cagcgcaccagactcatgcatgcttccatgggtcacctgacttcccaaactatcagctttgcaagagacatggggatttactaagcgtgcaaccctagtgaggattcaatcctacatgct

SEQ ID NO: 820777 - DNA, 120 bp, Artificial Sequence
  ENSG00000284735_1 (sequence is synthesized)
tgcactgattcggggatgatctcccattttaaactgcaagtccagtttcaggaagacgtggcctgacataagccctagagctgacattaactaactttttttttttttttttttttgaga

SEQ ID NO: 820778 - DNA, 120 bp, Artificial Sequence
  ENSG00000284735_2 (sequence is synthesized)
tctaaacatccctcgttcccatccctctttcatccttttatttagctgctttcctccaaaatacttaggaccgatgttgtaaatttgtttaaacattgtcttccccactggaatgggagg

SEQ ID NO: 820779 - DNA, 120 bp, Artificial Sequence
  ENSG00000284735_3 (sequence is synthesized)
gcacaagtgcatgggcttgctttgttggctgctgaattactgcacccagcagcacaccaggcacagggtgggtactcaaatattggttggaacaaatcattgcttttaacctgagggctg

SEQ ID NO: 820780 - DNA, 120 bp, Artificial Sequence
  ENSG00000284735_4 (sequence is synthesized)
ctcctccctcccttcttctgtttctccccaaacacccaggacagtggcccctgctcatgctctgctcgtgatgagggcttgttaaattaaattgacatgttcaacttttcaaatccccat

SEQ ID NO: 820781 - DNA, 84 bp, Artificial Sequence
  ENSG00000284735_5 (sequence is synthesized)
gagtttgagaccagtctggccaatgtgctgaaaccccgtctctactaaaaatattttttgcaactacctgggaggctgaggaaa

SEQ ID NO: 820782 - DNA, 77 bp, Artificial Sequence
  ENSG00000284735_6 (sequence is synthesized)
aactaccagcatgggtgacaagagtcaaactccatctcaaaaaaataattataggttgggcacggtggctcaagcct

SEQ ID NO: 820783 - DNA, 61 bp, Artificial Sequence
  ENSG00000284735_7 (sequence is synthesized)
gaccagcctggccaacacagtgaaacccctctctactaaaaataaaatcagccaggcgtga

SEQ ID NO: 820784 - DNA, 120 bp, Artificial Sequence
  ENSG00000284735_8 (sequence is synthesized)
tttttttttttttttttttttaaagaaacaggttcttgctttgttgcccatgctggccttgaactgctggactcaagcaatcattccacgttagcttccagagtagcagaaggagcaatt

SEQ ID NO: 820785 - DNA, 120 bp, Artificial Sequence
  ENSG00000284735_9 (sequence is synthesized)
aattctgaaaaagcccagaggctatatattctcaccccagaggagtatgcttgtgatgtgctcagaatagctaaaatggtctgtgcagggacaagagttcctaagggaaagtggaatatc

SEQ ID NO: 820786 - DNA, 120 bp, Artificial Sequence
  ENSG00000284735_10 (sequence is synthesized)
aagagttcctaagggaaagtggaatatctccccatccaaccgcaagtggaataacaagaagaaccagatagaaaagcagcgcacgagcccgggccaggcgcagtggcccacacctgtaat

SEQ ID NO: 820787 - DNA, 120 bp, Artificial Sequence
  ENSG00000284735_11 (sequence is synthesized)
aaaaaaaagaaaagaaaagaaatccagtgttcccagatgtaaccacattttctaacagcagttttatcagtaataagggtggtattttggtctcccatctcccatcgtcttattttttgt

SEQ ID NO: 820788 - DNA, 120 bp, Artificial Sequence
  ENSG00000284735_12 (sequence is synthesized)
ttcttaattggttctgaaattgggaaaaattagggtatcccctggctccctcggacttcttacacctttcagttaacaaaacctgtggtccctgctcagtccttcctgtaacctattggc

SEQ ID NO: 820789 - DNA, 120 bp, Artificial Sequence
  ENSG00000220908_0 (sequence is synthesized)
ggcacaggggcggtgcccttcagggaggcgcgcaggagcccatcttgggggagctggagcatggcgggctgcaggtcccagccctaccccatggggaggcggctgaggcccagcgagaat

SEQ ID NO: 820790 - DNA, 85 bp, Artificial Sequence
  ENSG00000220908_1 (sequence is synthesized)
gccctaccccatggggaggcggctgaggcccagcgagaattcgagcactgcgcacgagggacggcagtgctgggggaccgggcgc

SEQ ID NO: 820791 - DNA, 82 bp, Artificial Sequence
  ENSG00000220908_2 (sequence is synthesized)
ctgaccagagcggacgccgaggccgaggaggcgctgagaaggagcgagggccgccagcacgttgtcacctctcaagagttca

SEQ ID NO: 820792 - DNA, 120 bp, Artificial Sequence
  ENSG00000220908_3 (sequence is synthesized)
agcgagggccgccagcacgttgtcacctctcaagagttcagaacgactacagccttgacattaaccctggaaatcagattctgtgctaaaatgggggtgaccaaggaacagatgtacaag

SEQ ID NO: 820793 - DNA, 120 bp, Artificial Sequence
  ENSG00000233928_0 (sequence is synthesized)
ggcgccacaactttccccaacccgtgccaacttccagggcacagcctctgcggagagtagcagggtacagtgaataacccagacactaaaaagcaaggcagcgggggtcctaccagcgcg

SEQ ID NO: 820794 - DNA, 120 bp, Artificial Sequence
  ENSG00000233928_1 (sequence is synthesized)
gcttttgatgacgtcggtgaatccgtcctcagcggcattttctggggtctcctgcagacccctcagctgtgccataaccaaacgccacgtgcctcagcttcctcacgccccaaactttgg

SEQ ID NO: 820795 - DNA, 120 bp, Artificial Sequence
  ENSG00000233928_2 (sequence is synthesized)
aaggcaggtcacatggaatctacacatggaaggacataggcattgcatgcaggtatccggaatcattgatattggtcttaaaatttggaagtttccacttttgctaagccatgtgaggac

SEQ ID NO: 820796 - DNA, 120 bp, Artificial Sequence
  ENSG00000233928_3 (sequence is synthesized)
acaacaagaaggcatcaccaatgaagaataggccttcatcagacatccaatctgcaggcctcttgatcttggacttcctaatctacagaattcacttctccttgctgctaccatgtgaag

SEQ ID NO: 820797 - DNA, 88 bp, Artificial Sequence
  ENSG00000233928_4 (sequence is synthesized)
accatgtgaagaagaatgtgttttcttccccttctgccatgattagacagggtctcactatgttgcccaggatggtcttgaattcaca

SEQ ID NO: 820798 - DNA, 120 bp, Artificial Sequence
  ENSG00000233928_5 (sequence is synthesized)
ccctccttccttgaggggcatagacatctacatctgaggctttgtctccttcatgggtacaattcctgttagagattttctccctctatattaccagaatcaccagcacccattccaatt

SEQ ID NO: 820799 - DNA, 120 bp, Artificial Sequence
  ENSG00000233928_6 (sequence is synthesized)
ttgcttagggaattccctcttgccaaactctgagtagcctccttatccccattttgactctttcgctttgccaatctttgaaaagaaaaggttattgtattaaaatgtgctttctaaact

SEQ ID NO: 820800 - DNA, 120 bp, Artificial Sequence
  ENSG00000233928_7 (sequence is synthesized)
tcctgaagcagaccatccgtccttcctgaactctaattgattagtcccaggaaacaaaccttcaaaataagactacagaattgttgtttatctctttgagcttgaatgtagtaatgacct

SEQ ID NO: 820801 - DNA, 120 bp, Artificial Sequence
  ENSG00000233928_8 (sequence is synthesized)
cagtaccaatgtaaagaaaacaagcacttcttccaaccagtggaagcatgattatttaagttaccaccagtgtttgttttggataaattgccagtcaaataaaatccttttggaggtcaa

SEQ ID NO: 820802 - DNA, 120 bp, Artificial Sequence
  ENSG00000233928_9 (sequence is synthesized)
aagttaattcttcagcttcctttgagtcttgaggtagctacagcctggccagaacttgactaaacttcataagggacactgagccagaaacacctaactaagcaaattctggttttatga

SEQ ID NO: 820803 - DNA, 120 bp, Artificial Sequence
  ENSG00000233928_10 (sequence is synthesized)
aaaactgcagatgcccatgtgaggacacaacaagaaggcatcaccaatgaagaataggccttcatcagacatccaatctgcaggcctcttgatcttggacttcctaatctacagaattat

SEQ ID NO: 820804 - DNA, 120 bp, Artificial Sequence
  ENSG00000233928_11 (sequence is synthesized)
ctactgcattttgtgtaaccatcattcatcaactcatggacatttgagttacttccacttcttggctacagtgaatattgctgcgctaaacactcacataaaaatctttgtgtgaacata

SEQ ID NO: 820805 - DNA, 120 bp, Artificial Sequence
  ENSG00000233928_12 (sequence is synthesized)
ctataaagcatggcttcagcatctgcttctgctgagagcctcagaaagcttccggctatggcagaaagtgaaggtcagcaagcatcacatgaattacaaatctagtttagcccaggacca

SEQ ID NO: 820806 - DNA, 86 bp, Artificial Sequence
  ENSG00000233928_13 (sequence is synthesized)
caaattcaaagaagagctggtaccattccttctgaaaatattccaaacaattgaaaaggggggactcctccctaactcattttatg

SEQ ID NO: 820807 - DNA, 80 bp, Artificial Sequence
  ENSG00000233928_14 (sequence is synthesized)
aaagaaaatcctcaataaaaaactggcaaaccgaatccagcagcccatcaaaaaacttatccaccacaatcaagttggct

SEQ ID NO: 820808 - DNA, 85 bp, Artificial Sequence
  ENSG00000233928_15 (sequence is synthesized)
aattcgacattgatggaacacatttcaaaataataagagctgcttatgacaaacccagaaccaatatcatattgaataggcaaaa

SEQ ID NO: 820809 - DNA, 88 bp, Artificial Sequence
  ENSG00000233928_16 (sequence is synthesized)
ggcattgatggaacacatttcaaaataataagagctgcttatgacaaacccagaaccaatatcatattgaataggcaaaagctgaaat

SEQ ID NO: 820810 - DNA, 90 bp, Artificial Sequence
  ENSG00000233928_17 (sequence is synthesized)
tattattggaagttctgggcaagagaaagaaattgttgcatctgtttgcaggtgacatgatattatatttagaaaaccccatcatctcag

SEQ ID NO: 820811 - DNA, 120 bp, Artificial Sequence
  ENSG00000233928_18 (sequence is synthesized)
agcaaagtctcaggatgcaaaatcaacgtgcaaaaatcacaagcattctcttacaccaacaataggcaagcagaaagccaaatcacgaatgaactcccattcacaatccctacaaagaga

SEQ ID NO: 820812 - DNA, 90 bp, Artificial Sequence
  ENSG00000233928_19 (sequence is synthesized)
aataggcaagcagaaagccaaatcacgaatgaactcccattcacaatccctacaaagagaataaaatacctaggaatagagctaacaagg

SEQ ID NO: 820813 - DNA, 120 bp, Artificial Sequence
  ENSG00000233928_20 (sequence is synthesized)
aaaacattccaccctcatggacaggaagaatcaatatcatgaaaatggttatactggccaaagtaatttatagattcaatgcaattctcatcaaactaccactgacattcttcacagaat

SEQ ID NO: 820814 - DNA, 120 bp, Artificial Sequence
  ENSG00000233928_21 (sequence is synthesized)
taccactgacattcttcacagaattagacaaaaactattttaactttcatgtggaatcaaagaagacccgtatagccaaggcgatcctaaacaaaaagaacaaagcaggaggcatcacac

SEQ ID NO: 820815 - DNA, 72 bp, Artificial Sequence
  ENSG00000233928_22 (sequence is synthesized)
aactatactacaaggaccaatggagcagaacagagacctcagaaagaacaccacacatctacaaccatctga

SEQ ID NO: 820816 - DNA, 65 bp, Artificial Sequence
  ENSG00000233928_23 (sequence is synthesized)
atggggaaaggatctcctattcagttccttacaccttgtacaaaaattaactcaagatagattaa

SEQ ID NO: 820817 - DNA, 84 bp, Artificial Sequence
  ENSG00000233928_24 (sequence is synthesized)
aaaaatgctcaacagagagacaccatcttacgccaatcagaatagcgattattgaaaactcaagaaacaacagatgctggcgag

SEQ ID NO: 820818 - DNA, 75 bp, Artificial Sequence
  ENSG00000233928_25 (sequence is synthesized)
aatagcgattattgaaaatcttttacacggttggtgggaatgtaaagtatttcaaccattgtggaagacagtatg

SEQ ID NO: 820819 - DNA, 87 bp, Artificial Sequence
  ENSG00000233928_26 (sequence is synthesized)
tgaagtagggggtaaagggtgaggggagggaatttataggatgggtcaataggtgcagcaagccaccatggcacacatatacctatg

SEQ ID NO: 820820 - DNA, 120 bp, Artificial Sequence
  ENSG00000233928_27 (sequence is synthesized)
tttctagatgtggcagggttttgtctattggatatggattcctaaccatggactactggtaaagccactgtttgaactgtttaaaggagctaacaataacatctttgactgggagcaaaa

SEQ ID NO: 820821 - DNA, 120 bp, Artificial Sequence
  ENSG00000233928_28 (sequence is synthesized)
caccagcatgcattcaaacaactgaaacataagttaacccccaccctagccctggggctcccaaatcctcataagccatttcaactgtgtatgcatgagagactgggtctagtgctcggg

SEQ ID NO: 820822 - DNA, 120 bp, Artificial Sequence
  ENSG00000233928_29 (sequence is synthesized)
gtccttatgcagaagttaggagaaataagacagctggtggcctacttttctaaacagctggacacagtggctacaggctggcccccctgtctgagagcacttgccaccaactgcctatta

SEQ ID NO: 820823 - DNA, 120 bp, Artificial Sequence
  ENSG00000233928_30 (sequence is synthesized)
ttaaagcaggctgaaaagctaaccttgagaaagcctattacaatctacatgcctcatcaggtactagtgctactttagcaaaagagaggctattgactgacagctgatgggttaggcaaa

SEQ ID NO: 820824 - DNA, 120 bp, Artificial Sequence
  ENSG00000233928_31 (sequence is synthesized)
taccagggcagactcttagatgaccccactatgaaattacaaaccaccagagctctaaacccagctacattactacatcctaccaaggaatcagaggaccccatgcgtaattgtttggaa

SEQ ID NO: 820825 - DNA, 120 bp, Artificial Sequence
  ENSG00000233928_32 (sequence is synthesized)
atcattatcaagtgttttccagctgccctgatttaaaggatacggacttgctgcatgcagactggatattgtttgtggatgggaacagcctggtagccaatgggaaaagaaatgctgcat

SEQ ID NO: 820826 - DNA, 120 bp, Artificial Sequence
  ENSG00000233928_33 (sequence is synthesized)
atgccatggcaaccttttcagaggtaatagaagcaaagattgtaccaatgggaacctctgcacagaaggcagaactgattatccttgtgagagacttgcagttgtcccaagtatacaagg

SEQ ID NO: 820827 - DNA, 120 bp, Artificial Sequence
  ENSG00000233928_34 (sequence is synthesized)
cacatggaataaattggagactacagtcagcatggagaccacaatcttctggacagactaaaagtataaatcaaacactaaaaacaattattgccaaactgcgccaggaaattcaaccaa

SEQ ID NO: 820828 - DNA, 120 bp, Artificial Sequence
  ENSG00000233928_35 (sequence is synthesized)
gataggctcaggtagttggcattgcactgctccaggtaaaagtgaccctcagaagtaggagtaagttaagtccctatgaaattatatattacgagaacctttgccgctaatctgtctctg

SEQ ID NO: 820829 - DNA, 120 bp, Artificial Sequence
  ENSG00000233928_36 (sequence is synthesized)
gttactagggtggtccttaatagaaagtcaactattaagcaggatgttgctcatttgggacaaattcttaacattttgcataagcttgcttccatctggagcattgtctggtgatcaagt

SEQ ID NO: 820830 - DNA, 120 bp, Artificial Sequence
  ENSG00000233928_37 (sequence is synthesized)
actgctaaagaatggagggcccaactcaacaactacaggagaaatgggaaggaccctacaacgtgttgctgaccaccaattcggcactgaaactggtgggcatcaagccaccacatatgg

SEQ ID NO: 820831 - DNA, 120 bp, Artificial Sequence
  ENSG00000233928_38 (sequence is synthesized)
gtaaagaagtttctactagatgaaacatccatgacagaggacaccaaggcccccaaatgggagttggaacccatggaaggcctaaggtttctgttcaaaagatgataagctattctttta

SEQ ID NO: 820832 - DNA, 120 bp, Artificial Sequence
  ENSG00000233928_39 (sequence is synthesized)
taatatttttcttcactgttcctcttgttgtttctgcttacacctctaaccttttcctataatgggcacaagaatatgcagatagcctacagcaagactcttgctggatctattacccct

SEQ ID NO: 820833 - DNA, 120 bp, Artificial Sequence
  ENSG00000233928_40 (sequence is synthesized)
ctctagtaccacaggactgctttggtgggtctccccccatacaaggaaaattgggttacttcctagaaaatcataaaaaatgggcagggtcgcaggtgagggggataactagaaaaaaag

SEQ ID NO: 820834 - DNA, 120 bp, Artificial Sequence
  ENSG00000233928_41 (sequence is synthesized)
atattcccaataactcagaaaacatttatttagctttaaagaatatgaaccaacagattgaagccctctatagctctgcactgtctctcaataaattaatagcatcttggttgggtgaag

SEQ ID NO: 820835 - DNA, 120 bp, Artificial Sequence
  ENSG00000233928_42 (sequence is synthesized)
gaccttcttggtggcagaaaattctggttgtcctagccaccctcttgggcataggcataggcataacaccatgttgtggactatattgttgttgtacgctgttccaaaacattccctgag

SEQ ID NO: 820836 - DNA, 120 bp, Artificial Sequence
  ENSG00000233928_43 (sequence is synthesized)
ctcataaaatcatgtttcaacaggcactggctttgagtccccgaaaccaagaacactaccaatggcaagtagatatttaacactccaatgtctcttgacgatgaccctcttcagtaggaa

SEQ ID NO: 820837 - DNA, 120 bp, Artificial Sequence
  ENSG00000233928_44 (sequence is synthesized)
gtagccagagagaataagtcatccacctgcccttactgctattatattatagcttatactctgtactaacccataatagattaatgcttgaaactaacatgatggaaatcatgcacaaat

SEQ ID NO: 820838 - DNA, 120 bp, Artificial Sequence
  ENSG00000233928_45 (sequence is synthesized)
tgacagtgatgattgtggcaggccgggtctccatcagcaaccagagccgccagcctttactgacaccttactgtaactctgatgaatgtataagttaaacattaaagaaatggagaaact

SEQ ID NO: 820839 - DNA, 120 bp, Artificial Sequence
  ENSG00000233928_46 (sequence is synthesized)
ggtgcattagtacaaaggctaggatataaaaacaagcccgttaagaccccacctgggctttctcagacctttgagtttaattaaaataatggaggcattcttgcacactttgtaccagga

SEQ ID NO: 820840 - DNA, 120 bp, Artificial Sequence
  ENSG00000233928_47 (sequence is synthesized)
cccactttaagtaatttttccaaatctctgaagtaattgtctaaacagaccccagactccagatgaagattacacagagtgaaacactttggctttcagcttgtaggtgcactgaatgta

SEQ ID NO: 820841 - DNA, 120 bp, Artificial Sequence
  ENSG00000233928_48 (sequence is synthesized)
tataaaccataggaaaaacttgtaattttgagttggtatggtgagttactccaaccttctccctgtaactggttgcagaaatgaactcccttctttcccagtctgtctgcatctcgttat

SEQ ID NO: 820842 - DNA, 120 bp, Artificial Sequence
  ENSG00000233928_49 (sequence is synthesized)
tggacttcaagaataagcagtcagaccccattctgtctgggaacaataaggtagaatgccaagatgttttttataaaagaagtataagacaaaaccgaacgtttaagcaagttgtagaag

SEQ ID NO: 820843 - DNA, 120 bp, Artificial Sequence
  ENSG00000233928_50 (sequence is synthesized)
atttgtggaagataaatgtcatgaaagaaattttatgtgtgatcaagatgggtaaaatgagaagggaattatttatgtttctttctagaaattgaatgttaatatcaaaatacactaatg

SEQ ID NO: 820844 - DNA, 120 bp, Artificial Sequence
  ENSG00000233928_51 (sequence is synthesized)
caaggataaagtttgagcccatgtgttggaacaacagaattttttcagagcattgaaacgctctttaagaggaaattttgagaggtctatttttactttttagataactggcctaggagg

SEQ ID NO: 820845 - DNA, 120 bp, Artificial Sequence
  ENSG00000233928_52 (sequence is synthesized)
cagagattctattttttaagataatttattgtgctttgtggctttaaatattttagcagtttggtttgatttcctagtgacctatgatcctattttgatcaaatgttttaaatctttgat

SEQ ID NO: 820846 - DNA, 120 bp, Artificial Sequence
  ENSG00000233928_53 (sequence is synthesized)
atttgacaaacttctcaaaaatcaatgttaaatcattttaatctccaagcaaagttgggacattccagtgatacctggaatttctccaaggatctgtaaaagagagatattaaacctgtt

SEQ ID NO: 820847 - DNA, 120 bp, Artificial Sequence
  ENSG00000233928_54 (sequence is synthesized)
tgttgatttaatgtgatacgttaaattacatgggaagcattgacaaaataaaaaatgatgtttaagcttctacaagttatattaatataaatatgttattaatatgtgttctaaaactgt

SEQ ID NO: 820848 - DNA, 120 bp, Artificial Sequence
  ENSG00000233928_55 (sequence is synthesized)
agttcctagaaatctaatataacttggtagagatgctattagtcataattttgctttagaaataacaaaatgtcttggcaattgtgttattattataatgaactctcatcaggtttttag

SEQ ID NO: 820849 - DNA, 120 bp, Artificial Sequence
  ENSG00000233928_56 (sequence is synthesized)
ccatgtccattgtaattcttgatgtctactgtgaattcctttattcttatgcttttctgaaagcttcttgcaagcaattataatcctgaagttttctgtctttaagcagcttcatggaaa

SEQ ID NO: 820850 - DNA, 120 bp, Artificial Sequence
  ENSG00000233928_57 (sequence is synthesized)
aacacctaactaagcaaattctggttttatgaccttcagaaattgtgtgaaataataaatatttgttgttttcattattcaccatagcaaagtcatggaatcaacctaggtgcccatcaa

SEQ ID NO: 820851 - DNA, 120 bp, Artificial Sequence
  ENSG00000233928_58 (sequence is synthesized)
atactatgcaaccataaaaaagaatgaaaccacatcctttgcagcaacatagttacagctatagagcataatcctaagcaaattaacacaggaacagaaaagcaaatattgcctgttctc

SEQ ID NO: 820852 - DNA, 120 bp, Artificial Sequence
  ENSG00000233928_59 (sequence is synthesized)
acttataagtgggagctaaacattgggtatacatggacataaagatggaaacaatagatgatgaggactccgaaatggggaaagaactggagtaacggttgaaaacctacctgttgggta

SEQ ID NO: 820853 - DNA, 120 bp, Artificial Sequence
  ENSG00000233928_60 (sequence is synthesized)
ctatgttcactatttgggtaacagattcagtagaagcccaaaccctagcattatgcaatgcacccatgtaacaaacctgcacatgtacccactgaatctaaaataaactgtatttgttgt

SEQ ID NO: 820854 - DNA, 120 bp, Artificial Sequence
  ENSG00000233928_61 (sequence is synthesized)
ttcctaatctacagaattgtgctgctctgttggagctctctgtctgtgaggtgcattctaccagcacaggagctatgatgtgggaccccaggaggtcctcctcccctgggcacctgagac

SEQ ID NO: 820855 - DNA, 60 bp, Artificial Sequence
  ENSG00000233928_62 (sequence is synthesized)
aatgctattcccatcaagtaaaagagcctgtatagtcaaggcaatcctaagcaaaaagaa

SEQ ID NO: 820856 - DNA, 120 bp, Artificial Sequence
  ENSG00000233928_63 (sequence is synthesized)
ggacataaaattcggtatttattgaggtttaaaatatccatctatgcttatcaagctaaatacattgacttttacattgtaattataaaatgtgtaaatgtgtatcattgttcttacttg

SEQ ID NO: 820857 - DNA, 120 bp, Artificial Sequence
  ENSG00000233928_64 (sequence is synthesized)
ataataaaatatttggttatctcatttttgttagagcagagtaatgtatttaacattaaatataaattagaatctaaagtctacagtgggaactaaaatcactgttagaatttgaaaaat

SEQ ID NO: 820858 - DNA, 120 bp, Artificial Sequence
  ENSG00000233928_65 (sequence is synthesized)
ctaatctacagaattgtgtgttcctggtgatatgtggtcataaacccttcagacagcaatgtgttgaaaaagaagaagaaagaaagctttcttaaaaattttctcactgatattccattt

SEQ ID NO: 820859 - DNA, 120 bp, Artificial Sequence
  ENSG00000233928_66 (sequence is synthesized)
cttaagagttgattttgtgcatgagtaattagcacaaaatgctcgtagacaataaatatctatgtggataatatcactaagcatatgcaatcaaggcacagtcttttgaagaacatcatt

SEQ ID NO: 820860 - DNA, 120 bp, Artificial Sequence
  ENSG00000233928_67 (sequence is synthesized)
ttgagaagacagtgcctaaagatgacgatttaatatgtacagttgcagagcacttctccttgctgctaccatgtgaagaagaatgtgttttcttccccttctgccatgatttggcactcc

SEQ ID NO: 820861 - DNA, 89 bp, Artificial Sequence
  ENSG00000233928_68 (sequence is synthesized)
tatatacccaaaggaatataaatcatgctactataaagataaatgcacatgtatgtttattagcaacctaaatgcccatcaataatgag

SEQ ID NO: 820862 - DNA, 120 bp, Artificial Sequence
  ENSG00000233928_69 (sequence is synthesized)
atcaaggcacagtcttttgaagaacatcattttgagaagacagtgcctaaagatgacgatttaatatgtacagttgcagagtggcactcctccatctctctgggagatccaacacttgag

SEQ ID NO: 820863 - DNA, 120 bp, Artificial Sequence
  ENSG00000233928_70 (sequence is synthesized)
gacttcctaatctacagaattgtgtgttcctggtgatatgtggtcaattgagaacttattcccagagactccaaacaccaactccactatttttggtatcagggacatggtactttggaa

SEQ ID NO: 820864 - DNA, 120 bp, Artificial Sequence
  ENSG00000233928_71 (sequence is synthesized)
aatgttggtgaagttaataacagttttaaaggatatgacttctctctgcctcagcacatgggcatttgtcagactttaatagtattgcaatataatgtaaacccttcagacagcaatgtg

SEQ ID NO: 820865 - DNA, 120 bp, Artificial Sequence
  ENSG00000233928_72 (sequence is synthesized)
acactaaaagtgacttttttttagactaaataactgctgatctaaatgaatttcactaatttcaattgtcacttttcttgggcatgtacattaaaaattgctgttaatgtgttggcttca

SEQ ID NO: 820866 - DNA, 120 bp, Artificial Sequence
  ENSG00000233928_73 (sequence is synthesized)
ttagcaaaagaaattcatgagtagttaaagaatgacagttttatattatcatcttcagatacttcaaaaggaaatttcattaatttacaaccaataatggttcaattttgtcatccaatt

SEQ ID NO: 820867 - DNA, 120 bp, Artificial Sequence
  ENSG00000233928_74 (sequence is synthesized)
aataaaatcaaagtaaaacctttgcaagttcaatctgtcaaaggtgaaacatctgaccttatgaatggtcttatacattcaatttaaggtttaatattgcatatagaattactactggag

SEQ ID NO: 820868 - DNA, 120 bp, Artificial Sequence
  ENSG00000233928_75 (sequence is synthesized)
aacacaaatgtaatggagcactctgttgtggtgaaaacaatgtgtttaaattaagaaatctactaaacacaaataaatcatggtacagacataatttatatttgataaatccaaataaaa

SEQ ID NO: 820869 - DNA, 120 bp, Artificial Sequence
  ENSG00000233928_76 (sequence is synthesized)
actctacatgtcaaaatttacatatgtagtaaccaaattagaaaacgagacgaagttaatgttgattacaacataaatcttcaatttggctgtatatatcttctttctttgctgtctgtc

SEQ ID NO: 820870 - DNA, 120 bp, Artificial Sequence
  ENSG00000233928_77 (sequence is synthesized)
ttcaattggattttagaaatgtttgatctgctgaaaaactattttgtaaattgtcctgtgctttatagttttattcaactttttaaacaaacaattcctcttatattttggtttcgtatg

SEQ ID NO: 820871 - DNA, 120 bp, Artificial Sequence
  ENSG00000233928_78 (sequence is synthesized)
gttcatatttagttttaaattgttatttaaaaagttaattttaagcagagccataattcatcatcttttcaagattttattgaatagcaatcacaggaaacaagattttcaaaccagtaa

SEQ ID NO: 820872 - DNA, 120 bp, Artificial Sequence
  ENSG00000233928_79 (sequence is synthesized)
actttaataaccatctcgagagaagttagtgaaaaatttaaaatgttaagaaatgacaagtcaagagtgtagaagatttaattttaacacttgataattatactttggaaatattttgcc

SEQ ID NO: 820873 - DNA, 120 bp, Artificial Sequence
  ENSG00000233928_80 (sequence is synthesized)
tttattataaggatcttttgatggagcttcttttttgtacaaatttacgggttacatgtgcaattttgttacatgtatagatggtatagtggtcaattcagggtttataggttacccatc

SEQ ID NO: 820874 - DNA, 120 bp, Artificial Sequence
  ENSG00000233928_81 (sequence is synthesized)
ccgtgaataatatatattgtgcccattagccaattttttgtcatccattcccctcccaatccctcacctttctgagtgtccaatgtctatcattccagcgtgttcatgtgtacacattat

SEQ ID NO: 820875 - DNA, 120 bp, Artificial Sequence
  ENSG00000233928_82 (sequence is synthesized)
tttgactttctgcttccgagttacttcacttatgacaatggcctctagttccatccctgatgctgcaaaagacataatttcattctcttttatggtagaatagtatgccattgtggaaat

SEQ ID NO: 820876 - DNA, 120 bp, Artificial Sequence
  ENSG00000233928_83 (sequence is synthesized)
ataccacattttctttatccattcctccatcgatggacacttaggttgattccatatctttgccattgtaaatagtgctgcaataaacatacttgtgcaggtattgtactgatctctttt

SEQ ID NO: 820877 - DNA, 120 bp, Artificial Sequence
  ENSG00000233928_84 (sequence is synthesized)
cctttggatagataactgtatgggattgctgggctgaaaggtagttctatttttcgttctttgagaaatctccgtactgttctccatagaggttgtactatttaccttcccaccaatcgt

SEQ ID NO: 820878 - DNA, 120 bp, Artificial Sequence
  ENSG00000233928_85 (sequence is synthesized)
gtataagagttcctttttatttgcaaattcgccaatgtctgttatgttttgttattttaaaataatagccagtttgacttgtgtaaaatgatacctcattgtggttttattttgcatttc

SEQ ID NO: 820879 - DNA, 120 bp, Artificial Sequence
  ENSG00000233928_86 (sequence is synthesized)
tatgatgattcgtggtattaagcattttttcataaacctgttggccatttttatgtcttcttttgtcttttttacaacagtttcctttcactaaaaagtgcccacttttaatgggattat

SEQ ID NO: 820880 - DNA, 120 bp, Artificial Sequence
  ENSG00000233928_87 (sequence is synthesized)
ctcttttttgctgtggcgttgtttgagctccttgtaaattctggatattcatcttctgtcagatgtataatttaaaaatatttttctctctttctacaggttgtcttttcgctctgttga

SEQ ID NO: 820881 - DNA, 120 bp, Artificial Sequence
  ENSG00000233928_88 (sequence is synthesized)
ttaatattttctgcttttcagaagctttttagtgtaattaagtcccatttttctacttttatttttgttgcttgtgcttttgaagtcttagtcacaagttcttttcctagcccaatgtcc

SEQ ID NO: 820882 - DNA, 120 bp, Artificial Sequence
  ENSG00000233928_89 (sequence is synthesized)
agaaaatgttttcctgttgtcttttctagtacttgtataattttgagtcttatgtttgtctttaattccatcttgagctaatattttagtatggtgagagatagatatccagtttcattc

SEQ ID NO: 820883 - DNA, 120 bp, Artificial Sequence
  ENSG00000233928_90 (sequence is synthesized)
ttctgtatacgtcaatccaatttatccagtactatttattgaaaaaggtgtcctttctccaatgtatgttcttgtcagcttttgtaaaagattgattgtttttaaatatgtggctgtatt

SEQ ID NO: 820884 - DNA, 120 bp, Artificial Sequence
  ENSG00000233928_91 (sequence is synthesized)
tctgggttctgtattttgttccattgttctatatatctagttttgcctccaagttagcctggtctccaggtctatgtttctcaccattatccatcaccttgtcttgacagagccacaagt

SEQ ID NO: 820885 - DNA, 120 bp, Artificial Sequence
  ENSG00000233928_92 (sequence is synthesized)
taggaaaatacgttgaaagaatagggagctttattttgtatagcttttttattctcagctgtgggctcaatttagtctcctaagcaaagggtaggtcctgacatgtgtttcttaattaaa

SEQ ID NO: 820886 - DNA, 120 bp, Artificial Sequence
  ENSG00000233928_93 (sequence is synthesized)
atttacatccattattaattttccctgtggcaagtagcttacattgtattttgtgatatgactctccagtaggcagaagactttgcttttaatgtttataatatcacattattgtctacg

SEQ ID NO: 820887 - DNA, 120 bp, Artificial Sequence
  ENSG00000233928_94 (sequence is synthesized)
tgataatacacaagccacttaacatatctacatgtaatatggacatttggtgagcagataaaataatatatgtgaacatcttttaaaaatgtaaagcagaaacttttgtgtggctgcatt

SEQ ID NO: 820888 - DNA, 120 bp, Artificial Sequence
  ENSG00000233928_95 (sequence is synthesized)
agatgtaatatctaatactatattgtttttggtctgacagttaccaaaaaatctcatctcagaattttgactatcaggtaaatgtgtaccctttagatcctgccttcccattctctttat

SEQ ID NO: 820889 - DNA, 120 bp, Artificial Sequence
  ENSG00000233928_96 (sequence is synthesized)
gagcaaagagaactatgctttcacagactactggtgtttgaaagtggagcactgcagtattctgttgttttaataatgcctatcttgcctgaagcactaagaaaacaatttgaatctcct

SEQ ID NO: 820890 - DNA, 120 bp, Artificial Sequence
  ENSG00000233928_97 (sequence is synthesized)
agtcaagtgtgtgtgttttctatcaatatgtagttatcatgccaccaagtgttgtagttctgaatggcagtgctctcacagtgagctttaaatcagttaattactacatttgcttttttt

SEQ ID NO: 820891 - DNA, 120 bp, Artificial Sequence
  ENSG00000233928_98 (sequence is synthesized)
ggcgggggaaaaattaccttcatgctaccacaattctgttttcttgaatgtttttgatattgctttaattacatatacattgaatgagtgctcatatgttaataaaggagtatttgctaa

SEQ ID NO: 820892 - DNA, 120 bp, Artificial Sequence
  ENSG00000233928_99 (sequence is synthesized)
gtttactaattgggtgtacctccagatctaattctttcatgtaatcctcatatgataggaagtaatgagatgaatatcattaggcattttcaaatttgaattgaaacatattacgatatg

SEQ ID NO: 820893 - DNA, 120 bp, Artificial Sequence
  ENSG00000233928_100 (sequence is synthesized)
tttatattagagactggacaaaattatcattaagattctaaggttctacttatcattaccatgaatgggttttaaactgctaactagttaaagaactgtaaatgaaaaaagaaaaaacaa

SEQ ID NO: 820894 - DNA, 120 bp, Artificial Sequence
  ENSG00000233928_101 (sequence is synthesized)
tgattgtaaaggagaaaaaaaaaaagatagggacgaaataaacaagaatgaggtgatgtttgcccacattgtgggtcaatgttttcatatatttatctcatgtaattctcaaacaaccat

SEQ ID NO: 820895 - DNA, 120 bp, Artificial Sequence
  ENSG00000233928_102 (sequence is synthesized)
aagtctaccgaacttcaagatctatactctgtttgctacaacaaggtgcttgggataagtagacttcaatgagcagagaaattgattggaacttgcatgaaatgatgacaagtttttctg

SEQ ID NO: 820896 - DNA, 120 bp, Artificial Sequence
  ENSG00000233928_103 (sequence is synthesized)
atcaaaggcctttgctctgctaatgcatcaaattacaggtggtttcctcacaaacactcaatttttgcagagctattcacacttcaggtgaaagtatatttttttttcaaggattaacca

SEQ ID NO: 820897 - DNA, 120 bp, Artificial Sequence
  ENSG00000233928_104 (sequence is synthesized)
ttattattggcttttcatatgttaactaaatccatgctgttgttggaggcagtgctacagtttgatgtgcttgtttgccatgatgcaacttggtcgccctctggaggctatttttaggat

SEQ ID NO: 820898 - DNA, 120 bp, Artificial Sequence
  ENSG00000233928_105 (sequence is synthesized)
tgactagcaagtcttaattttgaagaaaggtcttaacaatttaacaactcattttaaaggtgtggaaattatgtatatatcatacttaattttaaagtttcaaagcattgggtccaaaat

SEQ ID NO: 820899 - DNA, 120 bp, Artificial Sequence
  ENSG00000233928_106 (sequence is synthesized)
attgagagactattttaaaatgttcaatttaacattttatggcacagaatatttggaatttcactttccctttggaaatacagatggtcatgattcccttttcatcatggaaaatctatc

SEQ ID NO: 820900 - DNA, 120 bp, Artificial Sequence
  ENSG00000230379_0 (sequence is synthesized)
tacaaacgtactcccaaggatagtcaaaatctccctgcaagtatgcatcaaagaagagttgtaatgtctggcggcgaagttcaaggggaaaggtggaaataactgagaggatttggtttt

SEQ ID NO: 820901 - DNA, 120 bp, Artificial Sequence
  ENSG00000230379_1 (sequence is synthesized)
acaattcgggaaactaaattttcaatgatggaaggaatggttatatggttaaaaccaaatgctaatgttggatacttttattaattcaataaatgaatattcatttatttatttactgag

SEQ ID NO: 820902 - DNA, 120 bp, Artificial Sequence
  ENSG00000230379_2 (sequence is synthesized)
atgggaccatctagttgcaggaaaaccacctcagggctcccacggactctaccttatggttttccagttaatatgtggaccaaaaaagcacaactggaccaatatataaaataaacacac

SEQ ID NO: 820903 - DNA, 120 bp, Artificial Sequence
  ENSG00000230379_3 (sequence is synthesized)
tttcaggacacatttccacatttctaaagaaagtgacaataaaacatcaacagttcttggatgttgaaacatagccaaaagtgagaccatcaggagaagggcctaagaagaactagatta

SEQ ID NO: 820904 - DNA, 120 bp, Artificial Sequence
  ENSG00000273123_0 (sequence is synthesized)
ctgccaacatttgctggtcaacttgctactttctgaagccccaaggtcctggatccaaatttgcattcaacacatgtttgccttaatcttggatctaccaaatattttccttaggctttg

SEQ ID NO: 820905 - DNA, 120 bp, Artificial Sequence
  ENSG00000273123_1 (sequence is synthesized)
aacatgagctgtattccttagttattacaatgcaaaatgccattccaacagcaattctgattcactccaaaccctgttatactatggaaattcaacagatcaccaattgagggggcacca

SEQ ID NO: 820906 - DNA, 120 bp, Artificial Sequence
  ENSG00000273123_2 (sequence is synthesized)
agcctcctcctttccctaaattccaggattgttaactctggaggattcatcaaagaagagttacattctccctgctgacacgccacacagccccttcccatttccagggggtttgtgcaa

SEQ ID NO: 820907 - DNA, 120 bp, Artificial Sequence
  ENSG00000273123_3 (sequence is synthesized)
gctgtaaatccccggggcatctgaattccccttaaacaaaagtctgtctcctaaccaaacagaaccttcttgaagtcagcaaaatggctactttgtggcattaaaaggatttttcctccc

SEQ ID NO: 820908 - DNA, 120 bp, Artificial Sequence
  ENSG00000273125_0 (sequence is synthesized)
acatttgtcttggcgctctggggaagaagaaaacaaactcaaagaagcaatttttctggaaacacacaattgcagaaagagattcagagaggctgttcctggtttcttggctaaggtcct

SEQ ID NO: 820909 - DNA, 120 bp, Artificial Sequence
  ENSG00000273125_1 (sequence is synthesized)
ttctactatccagactacattggctcagtccaggaggagtcaaagaagataaggacactgcagcccagagaagaaacctgcaaaggccgtgttcacacactcacaagagatatggctgtg

SEQ ID NO: 820910 - DNA, 120 bp, Artificial Sequence
  ENSG00000273125_2 (sequence is synthesized)
ataccatgaagtcttcgggaggcagaattgaagtgaacatgaagtttagcttagagaagaaaagaataaatacatacaaaacatttgatggtgaataaacagaaaatggtgtattcaaca

SEQ ID NO: 820911 - DNA, 120 bp, Artificial Sequence
  ENSG00000273125_3 (sequence is synthesized)
gaatttgactcagcaataaaaatgaaccaaactatggaaaacaacacccaacaacaggaagaaatctcaaaataattatggtgagtgaaagaggccagaccaaaaaaaaaaaaaaaaaaa

SEQ ID NO: 820912 - DNA, 84 bp, Artificial Sequence
  ENSG00000273125_4 (sequence is synthesized)
gattcagagaggctgttcctggtttcttggctaaggtcctttctactatccagactacattggctcagtccaggaggagtcaaa

SEQ ID NO: 820913 - DNA, 120 bp, Artificial Sequence
  ENSG00000273125_5 (sequence is synthesized)
tatatggggcaatcattcctatgattgctttgaaaattaaatatggaagtgtcaacaaagcatatggtggaggatctggtgctcaaagaatattagttatcttccttaaggaacttataa

SEQ ID NO: 820914 - DNA, 120 bp, Artificial Sequence
  ENSG00000273125_6 (sequence is synthesized)
gagtggagggaagggcaccctgaaaagaggtaggaaggaagggatgataaacaggcagaaggaaacttttgagggtggtggatatattcactaccttgatggagatgcttgcaagggtgt

SEQ ID NO: 820915 - DNA, 120 bp, Artificial Sequence
  ENSG00000273125_7 (sequence is synthesized)
atttaaatatgtttagtacaatccacaaatcctatgaagtagaccagtattattgttctactaataacagattgaaaattgtgttcagtatacctataaaacaggtaattttgacaaata

SEQ ID NO: 820916 - DNA, 120 bp, Artificial Sequence
  ENSG00000273125_8 (sequence is synthesized)
gccccttcagcatatctaatgtatactcaatatgtcttaccaatttccaagtagaaattatccattaagtaataacttaggttctattaaaacctaattcaatggaaaaaacctattact

SEQ ID NO: 820917 - DNA, 120 bp, Artificial Sequence
  ENSG00000273125_9 (sequence is synthesized)
aaacctattactaaattctagcttattaaaaaccagtttggccataagaggtcacgaattctaaaaactaataatacttaaataaattacttaaaattacttaagtattaaataatacct

SEQ ID NO: 820918 - DNA, 120 bp, Artificial Sequence
  ENSG00000273125_10 (sequence is synthesized)
aataataatagtagtagtagaagtaatgccatttccttattaagtttcccattttaaaaaataccttaaaaactctgaaatttttcttctgaaataaataagaggatagatagaattatt

SEQ ID NO: 820919 - DNA, 120 bp, Artificial Sequence
  ENSG00000273125_11 (sequence is synthesized)
ctcatttaccagacattaatttttaaattgcccgaaaaatgccttttctacaacttttttttcataactgctttgataagaagaatcacaatctgtttggaagtttgctttgctcaatgt

SEQ ID NO: 820920 - DNA, 120 bp, Artificial Sequence
  ENSG00000273125_12 (sequence is synthesized)
cataagttggtttacaattcaatcgaatgccctggtttgtcacaggagctcaccaataagcaaaacagccaagccttttgaagactaattagaaaaagtacaataaaattaattcacaca

SEQ ID NO: 820921 - DNA, 120 bp, Artificial Sequence
  ENSG00000273125_13 (sequence is synthesized)
agtatcctaacttcttcactcttgtccacatttgtcttggcgctctggggaagaagatttggagcatcctctggctctattgctaactacctgtgtgaccttgaagaaatgcattaacct

SEQ ID NO: 820922 - DNA, 120 bp, Artificial Sequence
  ENSG00000273124_0 (sequence is synthesized)
acagcagtcctagccaatgaatacaggtatattatgaggactttagtcttttacttcttttttctttacaagttttttaaatagaaaagtagaagtaagaaaataaagcagaaaaaaatg

SEQ ID NO: 820923 - DNA, 120 bp, Artificial Sequence
  ENSG00000273129_0 (sequence is synthesized)
aatttgggagcagagggggtagtccccactctcctgtctgatccctccctctcctccccgagttccaccgccccaggcgcacaggtttccgccagatgtcttttcttcttcgcagtcttt

SEQ ID NO: 820924 - DNA, 120 bp, Artificial Sequence
  ENSG00000273129_1 (sequence is synthesized)
gcccgagcgcttccgagagccagttctggactgatcgccttggatgggataccgggggagggcagaaggacacttggcttcctctccaggaatctgagcggccctgaggtccgggggcgc

SEQ ID NO: 820925 - DNA, 120 bp, Artificial Sequence
  ENSG00000273129_2 (sequence is synthesized)
agggaatcccctctcccgccgccgccgccgtgtctggtctgtacgtctttagagggtcgaggaagtcacgtcgggacagactggggcgagtaaggttaagaaaggctgacatgttttatg

SEQ ID NO: 820926 - DNA, 120 bp, Artificial Sequence
  ENSG00000273129_3 (sequence is synthesized)
agtgtacatagctgtaatttatctttgtagctaagttgctttcaacagaagaaatactgttctccgtaccttcaccccctccttgtttcttggaaagagaggcgggaaaggtaaattctc

SEQ ID NO: 820927 - DNA, 120 bp, Artificial Sequence
  ENSG00000273129_4 (sequence is synthesized)
ctcataatactggtcctaagcagttaccctgtaaatagttaatgtgagctccacgggtcaccaatataaagtttcctgccttctgatggacaaaggaagcggcgatggccagaatttgca

SEQ ID NO: 820928 - DNA, 120 bp, Artificial Sequence
  ENSG00000273129_5 (sequence is synthesized)
gggacgctaaatgtccaaaacgtatgccttaaggcatttctctccctgatgcgtggattattttggttactagcccttcataggagatactggtaaaataaattcgagttttaaagttca

SEQ ID NO: 820929 - DNA, 120 bp, Artificial Sequence
  ENSG00000285462_0 (sequence is synthesized)
aggagcagggttgatgatgcagctgtcaaagaaaataatacttggtgtgaactaagcaaatatatctacctcctgtctctctggagaatcactggaattaaagtctagaattagaaaaca

SEQ ID NO: 820930 - DNA, 120 bp, Artificial Sequence
  ENSG00000285462_1 (sequence is synthesized)
aaatagtcaaaacaataaatagaatatgagaggtgtcactgttacaaaaatattttaatacatttctagaagaccataattggatggggaaaagccttagcctaaagtacaatattgatt

SEQ ID NO: 820931 - DNA, 120 bp, Artificial Sequence
  ENSG00000285462_2 (sequence is synthesized)
gctgtaggaaaagttggggttattccatctgaaagagctctggaaaattcctgtgactcagaggcagcagatatgaaagaggacaaacctgtgcggtagagctatggtccactggactgg

SEQ ID NO: 820932 - DNA, 120 bp, Artificial Sequence
  ENSG00000285462_3 (sequence is synthesized)
tctctcactcctgcctacacagtgaagatgacatttacccaactagaccatctggggaagggttatgcttacaggctgacccataatgactagcaatgaatgttttctcacattggcatg

SEQ ID NO: 820933 - DNA, 120 bp, Artificial Sequence
  ENSG00000285462_4 (sequence is synthesized)
gtggtgaggtccaggttgaccctgctctacctgttctccttaaaatgaagccaactaacacacccacagaccccaccgcacccttccactcagagtgtccaggcagaattccacgctcag

SEQ ID NO: 820934 - DNA, 120 bp, Artificial Sequence
  ENSG00000285462_5 (sequence is synthesized)
ggaagaaaccgaccagaagtaaaagcagagaaatcataccagctatgtgtcctgtggaaaccacagattactaacatacgaggacagcaagctgtgtggaagagagacaccatataaaca

SEQ ID NO: 820935 - DNA, 120 bp, Artificial Sequence
  ENSG00000285462_6 (sequence is synthesized)
tatcttctgagatgtttaagaagttatcaggttcataaaacatgaaaagtacacaatcaaaggatcaatcaaaaaacatgaaaagctcttaagacatcaaaatatggaatctgaaattaa

SEQ ID NO: 820936 - DNA, 120 bp, Artificial Sequence
  ENSG00000285462_7 (sequence is synthesized)
aataaaccaacaaaactagaagataataatagcaaaaatttgtatatacttacaatatgccagatcatgttttatgccctttatgtgtgttatcttatttaattttcacaacaatgctga

SEQ ID NO: 820937 - DNA, 120 bp, Artificial Sequence
  ENSG00000285462_8 (sequence is synthesized)
tatagacacactattatccttttttataaataagcctaaagcacacaattgttaaattgttaaaggggcacttattacccagtaaataagtggcagtaatgagatacaagccttagtatt

SEQ ID NO: 820938 - DNA, 120 bp, Artificial Sequence
  ENSG00000285462_9 (sequence is synthesized)
ctgcctccaaaaacctagcagttaggaattaaactatatttcctcccaaaatacatgaatgataaagaaaaaataagtttaataaggttccaaagggagaaagacaaaaaattatctaca

SEQ ID NO: 820939 - DNA, 120 bp, Artificial Sequence
  ENSG00000285462_10 (sequence is synthesized)
aagtaataaaaatcagagaggcatcagacattttgtcaaccatactttatgccagatagcaataaggctcttaaattctgacatcaaatgattttcaattcagatttaatatcaaaccaa

SEQ ID NO: 820940 - DNA, 120 bp, Artificial Sequence
  ENSG00000285462_11 (sequence is synthesized)
gcaggccttttataggattcaaggactgaaacacttgacctctttaatatctcttaggaagtatctggagtatgtgtgccatcaaaatgaagaagtacaacaaaaaagaaggatgcacaa

SEQ ID NO: 820941 - DNA, 120 bp, Artificial Sequence
  ENSG00000235824_0 (sequence is synthesized)
gggccatcttggaaacagtttttgaagttggtagagtctcgggcccgcttaactgctgaaagagtaggaaggggtccgtttcattagcgcgttcaaccaaagagcgctgttaggtgagca

SEQ ID NO: 820942 - DNA, 120 bp, Artificial Sequence
  ENSG00000235824_1 (sequence is synthesized)
aaaacaaaccagttgtgtctgagccaacacccgtttgtctatgggttgtagcagttggtccacctaatcaaggaagtgccgagagcacaggacatgaaaagacacagcgctaaggtttcc

SEQ ID NO: 820943 - DNA, 120 bp, Artificial Sequence
  ENSG00000235824_2 (sequence is synthesized)
tgcaccacaaggttcctttcacttaaaaaaatttttttttatattacaccatctttatttgtaccttaccgtctaaggctatcaatcaaacttcagtaagaacagtttcagcatcaacta

SEQ ID NO: 820944 - DNA, 120 bp, Artificial Sequence
  ENSG00000235824_3 (sequence is synthesized)
acgaacagtagccaaaccagagagcagtcaaaagtgttttaaagggagcagcatcagctgatgttctgccaagtctctgggtgttcaggaccatggtcccccggcacttccaggcccctg

SEQ ID NO: 820945 - DNA, 120 bp, Artificial Sequence
  ENSG00000235824_4 (sequence is synthesized)
tgggctgcaggtggatccccaggagccaaagggccgctcaggaaagggtggaacttggcctcgcaatcagctggcttctgcctattatggtcatcttctttccagaggtcttgctatctc

SEQ ID NO: 820946 - DNA, 120 bp, Artificial Sequence
  ENSG00000235824_5 (sequence is synthesized)
agtggacgtggctgtcatccagccgtcctgggctgttttctcatagaagaggatctccctctgaaaactgtgtcatccttcaattcctgggccaagtctggggacacatcttttcttaaa

SEQ ID NO: 820947 - DNA, 120 bp, Artificial Sequence
  ENSG00000235824_6 (sequence is synthesized)
gcttgctggtatgacgagcagttcccattttcctgcactttacgaagtctctgaggtgcaagcagtagacatccttctccatggactccccctgaggctgcttcatgtgttttcagggca

SEQ ID NO: 820948 - DNA, 120 bp, Artificial Sequence
  ENSG00000235824_7 (sequence is synthesized)
gttcaggcagatcggaaaccactggctgcagcttcgggatgtccctctccagctgtgcccttgaaccctgcagagagacctgctcgctgagcagaccttgggcttgtgctgtgagttctg

SEQ ID NO: 820949 - DNA, 120 bp, Artificial Sequence
  ENSG00000235824_8 (sequence is synthesized)
tactcctttgggtttcttctcacaatcgtatgtctgctttaccagtctttccctcgggacattcgaaggaagcacctaaattaccattgtcatccatgctttcagagggacttgcggcca

SEQ ID NO: 820950 - DNA, 120 bp, Artificial Sequence
  ENSG00000235824_9 (sequence is synthesized)
cgatgctgggggaccaccctgttctgcttccctgttcccctccactgccaagtcctcattttccatgtcgtctttcctggtgcagatgaagggtgctcagcagagcgtgagccaccaggg

SEQ ID NO: 820951 - DNA, 120 bp, Artificial Sequence
  ENSG00000235824_10 (sequence is synthesized)
aagccactcgcctactccagttcgaatattggggacttgaggccatcttgtcttttttgtgtgtgtgtggcgtctgatttacaacttcttggtcgggcagctctgtgggttgctgatggt

SEQ ID NO: 820952 - DNA, 120 bp, Artificial Sequence
  ENSG00000235824_11 (sequence is synthesized)
ccatgctgtcattcacatcgtccgtggtgtgcactggaagatctccatgctgtgaagcgtgcaggatgtgcttcacatcagtcacttggggaagttcaggaggctgctttttcatgcttt

SEQ ID NO: 820953 - DNA, 120 bp, Artificial Sequence
  ENSG00000235824_12 (sequence is synthesized)
tttcagaagctcgcctaggttaggtcctgatcggaagacctgctcatttccattagaaccttcaagcagagtgtttggagcaatcaaggactggccccagcatggataacaggtagctac

SEQ ID NO: 820954 - DNA, 120 bp, Artificial Sequence
  ENSG00000235824_13 (sequence is synthesized)
cactggtgtgggctgctggctgcatcttggcgcaggcctttctgtgggcctcaccttagactgaagccctttgggccagcccttccctccttctcactgcgtgtcgtctcctgaccagag

SEQ ID NO: 820955 - DNA, 120 bp, Artificial Sequence
  ENSG00000235824_14 (sequence is synthesized)
aggccatcacagcggtgcacgcccagctcacccatagtatccctagggtcactggcactggtcccaggattctgtacatcactacttactgctgcccacaggtgggccagcagcagttga

SEQ ID NO: 820956 - DNA, 120 bp, Artificial Sequence
  ENSG00000235824_15 (sequence is synthesized)
ggaggcatttcgtggtgagcagcaggtccttcatggctcttgagggctccacagctcttcctcttttctctactggtatgtgggtcacaactgaccactcagaaccctgcagagtgttcc

SEQ ID NO: 820957 - DNA, 120 bp, Artificial Sequence
  ENSG00000235824_16 (sequence is synthesized)
gggcaaaccatccattatgctgggggaggaaaggcaccgcaaattctagaaaactgtgtccctgattttgctgtgcaaatataaagtgacattacttaacacagtgccttggaagagggg

SEQ ID NO: 820958 - DNA, 120 bp, Artificial Sequence
  ENSG00000235824_17 (sequence is synthesized)
aaagagttcacggcagcccccagctcaggccactgcaggtcccacctggccttacagcatagctagagggtcaaagccagtcaaagccccgtgtccacgcatgatcctctcagggcagcg

SEQ ID NO: 820959 - DNA, 120 bp, Artificial Sequence
  ENSG00000235824_18 (sequence is synthesized)
tgatggcccgtccctggtggggctcattaccctgatttcaagtttccttctgctgcagggaagcctggtcccgcctacaaagagactgtctaccttgctagattgaactataggactatg

SEQ ID NO: 820960 - DNA, 120 bp, Artificial Sequence
  ENSG00000235824_19 (sequence is synthesized)
ttttcttcatctctgtaaccccagaagctctccagagacccttatacactagggacatggtcattgcttgtcttgttttcttgttgactctactctgacttagggcacatcgctttcccc

SEQ ID NO: 820961 - DNA, 120 bp, Artificial Sequence
  ENSG00000235824_20 (sequence is synthesized)
tctagatctccatattcagatctgtgaatgacagtaagtgggtgaaggcccctctagctttaaaacccctccaatacagagagtacactgaaaccggaagcagaagctgagtgtggtgag

SEQ ID NO: 820962 - DNA, 120 bp, Artificial Sequence
  ENSG00000235824_21 (sequence is synthesized)
tggagcattttccctggcatgatggaggggacctatggatctggctatgagggtggcatctggccacttgaatggctctgcagagctggaccctagttttcaaatcagactcaagaatga

SEQ ID NO: 820963 - DNA, 120 bp, Artificial Sequence
  ENSG00000235824_22 (sequence is synthesized)
tctttagtgtgggtggttttgtggggcatatattttttgagaccttgttattgacacaacagcttctgggaagtctttttgacagagagtatgcacaggtgcgggctccatctgctcggc

SEQ ID NO: 820964 - DNA, 120 bp, Artificial Sequence
  ENSG00000235824_23 (sequence is synthesized)
agccgctgtctggtgacggtgagcgctgagagctggatggtcctgttagaaaggcagcatgccagcctccggtgatgagcagagtgacccgaccttgtctctccttccccatggagcact

SEQ ID NO: 820965 - DNA, 120 bp, Artificial Sequence
  ENSG00000235824_24 (sequence is synthesized)
gcaggctctttccccagacctgcttctaggcttcccttcacccgctcccaccaggcagctgaggccactttaggattccatttttagttgtactttttttttaattgatcattttgtgag

SEQ ID NO: 820966 - DNA, 120 bp, Artificial Sequence
  ENSG00000235824_25 (sequence is synthesized)
catttttctctctaatgcaacagaactagcacaagtccttaaagatgtaggatctctcagctcccacaaaaacaaagataatggcctatgtaattctctacatatttaaattgttagctc

SEQ ID NO: 820967 - DNA, 120 bp, Artificial Sequence
  ENSG00000235824_26 (sequence is synthesized)
taaaaatagattcagagaaagggtggacacatgttccaattttctcataacagtcctgggttgtgcctgttatcctggcatagttattaatcctgtcccctttcactctcagactctcct

SEQ ID NO: 820968 - DNA, 120 bp, Artificial Sequence
  ENSG00000235824_27 (sequence is synthesized)
ggtttggaggataatttcattctattcaaagaggaaatctacaaaaaggtgtcatcatctaacctgtattcatataaacattttccagtctcacggttctgtgtacctctccaaacccct

SEQ ID NO: 820969 - DNA, 120 bp, Artificial Sequence
  ENSG00000235824_28 (sequence is synthesized)
caatcttctaatcattttgtgtattatttataggaaaagagcaccagctaaaatatcttgcccttggatttcttcagccagctgctgaagtaatttgtcttagtctttactgaagactga

SEQ ID NO: 820970 - DNA, 120 bp, Artificial Sequence
  ENSG00000235824_29 (sequence is synthesized)
attgtatcattaagactttcttctaagtcctgttattttgactttttgactcactctgtgccctctgatacataaagtagcaataatttgtacaatgagccattgtatttgttcacgaga

SEQ ID NO: 820971 - DNA, 120 bp, Artificial Sequence
  ENSG00000235824_30 (sequence is synthesized)
aattcttcctgttcctcacatttctattcattttcctaaaggtatgtatttgaaaacttgaaaaattgcctggcccagttatagtttaatgggagcatttaaacatacttttcctacaaa

SEQ ID NO: 820972 - DNA, 120 bp, Artificial Sequence
  ENSG00000235824_31 (sequence is synthesized)
gcttatcagttagttacttaacctttatgaataggttaaatattttccacagtatttatataaatatgatacttggtttcaagttaaatctaataaaaaggaagttattcttgacttaaa

SEQ ID NO: 820973 - DNA, 120 bp, Artificial Sequence
  ENSG00000235824_32 (sequence is synthesized)
ttactcccatttcttttcatttgtttttatcttcctcttttttatgaccacttgactaagaaagaaattcacaaggcagatgtggaaatgtcgctttataaatacaagattcagccagta

SEQ ID NO: 820974 - DNA, 120 bp, Artificial Sequence
  ENSG00000235824_33 (sequence is synthesized)
actcctgggctcaagcaatcctcccgccctggcctcccaaagtactggaattacagatgtgagccatcaagcccagccacagcagttcttaaaaggaaaatcacataatcatatttgtgt

SEQ ID NO: 820975 - DNA, 120 bp, Artificial Sequence
  ENSG00000235824_34 (sequence is synthesized)
gttcttaaaaggaaaatcacataatcatatttgtgtgttagataattataacaacatagaggattcattgaagagagagaggagatgagaaaaacaatttcatcctttgtttatcaagga

SEQ ID NO: 820976 - DNA, 120 bp, Artificial Sequence
  ENSG00000235824_35 (sequence is synthesized)
cctattatgtgtacttgatcatgcatcaggcactacagattcaaagatgaataagagtccagcaagggaaataataagtacctttatgggacttggggagactcaaactctggcctcggg

SEQ ID NO: 820977 - DNA, 120 bp, Artificial Sequence
  ENSG00000235824_36 (sequence is synthesized)
tcagaaatgaaatgaaccaggctgagttttggagtggaagtagaagttgagagcagtgaaaaccaaaactgaggtctttatcctgggcaactacacagatagtgctgctaataggaaaat

SEQ ID NO: 820978 - DNA, 120 bp, Artificial Sequence
  ENSG00000235824_37 (sequence is synthesized)
gaggcaagaaatgagacgggaaaggtggcctaggaccaggtcgtgaatgacatgataactaagttttgactttttctcgtaggtcagtggttctcaaccagcggcaattttgccttccag

SEQ ID NO: 820979 - DNA, 120 bp, Artificial Sequence
  ENSG00000235824_38 (sequence is synthesized)
ggaacatttgtcaaagtctagagacatatttggttgtcttcaccaaggggaggagggagggaagtgctactgacatccatgggttgaagcaaaggatgctgctgaacatcctgtaatgca

SEQ ID NO: 820980 - DNA, 120 bp, Artificial Sequence
  ENSG00000235824_39 (sequence is synthesized)
caggacggcctcccccaccaaggaattacctgggccaaatagtagtactgaaattgagaaaccctgctgtaggcagtgagacactagcaacaattcttctttttttttttttttttttta

SEQ ID NO: 820981 - DNA, 120 bp, Artificial Sequence
  ENSG00000235824_40 (sequence is synthesized)
ggagaagcaacagacttagaggactgtcttgcagggttttctttctgagagagagtaaatatcaaattcctataggacaggtacaagcaactcacataaaaattgccaacagccaaaaaa

SEQ ID NO: 820982 - DNA, 120 bp, Artificial Sequence
  ENSG00000235823_0 (sequence is synthesized)
tccgtaaaactaccctcctagcgacctccaacgcctcggtcctcacccagaacatcacattaaacttttcaacagtcacagataggaaggggctcggtgtggaaggtgccagctctggct

SEQ ID NO: 820983 - DNA, 84 bp, Artificial Sequence
  ENSG00000235823_1 (sequence is synthesized)
tttcttcacacggatgcatgtgacatttggtgctgaagacccaggacaggaggactcctttgggagaccagtgccctgttgtcg

SEQ ID NO: 820984 - DNA, 120 bp, Artificial Sequence
  ENSG00000235823_2 (sequence is synthesized)
ggtgctgaagacccaggacaggaggactcctttgggagaccagtgccctgttgtcgccctcactccgtgaggagatccacctatgatctcaggtcctcagaccaaccagcccaaggaaca

SEQ ID NO: 820985 - DNA, 120 bp, Artificial Sequence
  ENSG00000235823_3 (sequence is synthesized)
tcggctctccccgatctgcccaacaatttcctgttaaagagatggctgactatcctgacttcatcagagcaggctggtgcctggccttcctggaatgagtgggtgttctgacaggccccc

SEQ ID NO: 820986 - DNA, 120 bp, Artificial Sequence
  ENSG00000235823_4 (sequence is synthesized)
agtttgtcccatctgcaccgccaagaggtctccgggtggccagaggagcaaagttgccttccaagtgcctgttggtgcctgggagaacacagcaggagtgtcgtgcggcccacagcgcag

SEQ ID NO: 820987 - DNA, 120 bp, Artificial Sequence
  ENSG00000235823_5 (sequence is synthesized)
gtcactcctctctggacacccagttactaaagtcagcaaagaagatgcggtaatcaccgcctgatctccacatggtgaacacaacactctcactaacacctccttgaccagtcagtcttc

SEQ ID NO: 820988 - DNA, 120 bp, Artificial Sequence
  ENSG00000235823_6 (sequence is synthesized)
agcactgggggtggacaggcaggttttctgtgtttaccagaatcgcacaggctaagcacaaacatggaaccagagttccaggtgaggaaacctcactcgcagaagcccaggctgcacccc

SEQ ID NO: 820989 - DNA, 120 bp, Artificial Sequence
  ENSG00000235823_7 (sequence is synthesized)
accaggtgatgcagtgcgcctaggctgtgggtgctaggagccaagtgctagggactcgtcatgagtgggaatccccacgttcctgtcactgctgtcaaacagaaggtaaacagtcttacg

SEQ ID NO: 820990 - DNA, 120 bp, Artificial Sequence
  ENSG00000235823_8 (sequence is synthesized)
aatgtaattccttaggaagacttgtacaaacttttattaggatatctatttatttaatactgaactttggcctactttgtgataagactataaacaaattgaggaaatcactatttctca

SEQ ID NO: 820991 - DNA, 120 bp, Artificial Sequence
  ENSG00000235823_9 (sequence is synthesized)
cttctgtatttctcaaaaaataattttgttacagagttcaatatactgtgtactactgatcttctattgtgaaagcaaagcatttcatcaaaacaaagtattttaaattatgagtgaaaa

SEQ ID NO: 820992 - DNA, 120 bp, Artificial Sequence
  ENSG00000235823_10 (sequence is synthesized)
ggcgcggtccttccagcctcttgctcctgtgaatcacaggtcggcgggagccttttttcctttttttttttttcccggggagtcggcctcggggctctgctctcctacctcagtctgccc

SEQ ID NO: 820993 - DNA, 120 bp, Artificial Sequence
  ENSG00000235823_11 (sequence is synthesized)
taccctggaatggggaaaatgcggacatgccactcagtccggccgcgaacagtgctccagaactcagagagttttccagacgggtggagatcgcgttccctgcccgccgaggtcccatcg

SEQ ID NO: 820994 - DNA, 120 bp, Artificial Sequence
  ENSG00000235823_12 (sequence is synthesized)
cttccctgctgggaagacaaatgaggcgctttagccgtctccacggccagcccctccctcataacccgagattctttgtgggctcttagtccatagctgcctttgaggtggtgtagacct

SEQ ID NO: 820995 - DNA, 120 bp, Artificial Sequence
  ENSG00000235823_13 (sequence is synthesized)
tgctaaccaggacggcccagtaggcagagctcatttttattcctgtctgcaatcgtgcaaaaacgcctcttatggaaaagccagagcgccaggagtcagcaaaacacactaaagattggg

SEQ ID NO: 820996 - DNA, 71 bp, Artificial Sequence
  ENSG00000235823_14 (sequence is synthesized)
gaaagctaactgataccatatattcttcccccgcccttgagaatgtactttgtacacctatcccaaaccta

SEQ ID NO: 820997 - DNA, 120 bp, Artificial Sequence
  ENSG00000235823_15 (sequence is synthesized)
acccttcaatcttcctctctcactacccttcaatctccctgtccttccaattcccgttctttttcctctctagtagagataaggagacacattttatctgtggacccaaaactccagcgt

SEQ ID NO: 820998 - DNA, 67 bp, Artificial Sequence
  ENSG00000235823_16 (sequence is synthesized)
aaggagacacattttatctgtggacccaaaactccagcgtcgcctgcctgattattcacccacactc

SEQ ID NO: 820999 - DNA, 75 bp, Artificial Sequence
  ENSG00000235823_17 (sequence is synthesized)
tgccccccgctgccccacccgccttctccgtgcctctaccctctcttttctcgggtttacctccttcactatggg

SEQ ID NO: 821000 - DNA, 63 bp, Artificial Sequence
  ENSG00000235823_18 (sequence is synthesized)
ctcaatgccccccgctgccccacccgccttctccgtgcctctaccctctcttttctcgggttt

SEQ ID NO: 821001 - DNA, 69 bp, Artificial Sequence
  ENSG00000235823_19 (sequence is synthesized)
ccaatacaaactcgacaatgattccaaatagccagaaaacggcactttcgagttctccatcctacaagt

SEQ ID NO: 821002 - DNA, 120 bp, Artificial Sequence
  ENSG00000235823_20 (sequence is synthesized)
ctcccaatgtgactcatcccaaatctttcttctttctctcctttctgttccttcggtctccaccccaagttccgagtcctctgaatccttcttttctatggactcatctgacctcccccc

SEQ ID NO: 821003 - DNA, 90 bp, Artificial Sequence
  ENSG00000235823_21 (sequence is synthesized)
ctgaatccttcttttctatggactcatctgacctccccccttctccccaggctgctcctcgccaggctgagccaggtcccaattctcact

SEQ ID NO: 821004 - DNA, 120 bp, Artificial Sequence
  ENSG00000235823_22 (sequence is synthesized)
gagaagcttcctccaatctccagcctgagagttcaggcctggttaccagcattctagaagctgaaagaggagaagttcttggaagactaagaagtccaacattcggtatacaaatattag

SEQ ID NO: 821005 - DNA, 120 bp, Artificial Sequence
  ENSG00000235823_23 (sequence is synthesized)
tctttagcctttgctctttttttctataataccgtgtagtttctgtctcctgaatggacccagactgatgctataactcagcctttaactgattctggtattccccagtcaagagatcct

SEQ ID NO: 821006 - DNA, 120 bp, Artificial Sequence
  ENSG00000235823_24 (sequence is synthesized)
tgatttcactctttctgatgaatcgacctccagtgttttacctggagtcaggagaactaacaatttcttcaacaattattctattcttagccataccttcccctttctcctccccttcca

SEQ ID NO: 821007 - DNA, 120 bp, Artificial Sequence
  ENSG00000235823_25 (sequence is synthesized)
aaggtagctggggccaccaaatcttgaacctttgtgggttctttggtgtaaactactttgcttttggctacccccgctgcctgctgaagcttcagctttccaggttctactaagacagct

SEQ ID NO: 821008 - DNA, 120 bp, Artificial Sequence
  ENSG00000235823_26 (sequence is synthesized)
attactcataatctgttttccaccttccaaaattttattgtggtctcttccccattcttttgtccttgtgggattatacctctcaaaaaccctttactgttattttactatagtttgggg

SEQ ID NO: 821009 - DNA, 120 bp, Artificial Sequence
  ENSG00000235823_27 (sequence is synthesized)
agggagcaaatgcatgtgttcaaaatgtcttctttatcctgaatctctctctcagaacctatttatcctgcacatatttactgggtgcctcatcagggtaggtactattcaaatatttgg

SEQ ID NO: 821010 - DNA, 120 bp, Artificial Sequence
  ENSG00000235823_28 (sequence is synthesized)
atacattagggaacagaatagaatatccttacacttgtggggtttacattctagtgtgtgtacgcacaacagaggaacagattataaaaattaaatctaagtatgtagattaaaaaaaaa

SEQ ID NO: 821011 - DNA, 120 bp, Artificial Sequence
  ENSG00000235823_29 (sequence is synthesized)
agactaagaagtccaacattcgatggcacacaaggagattatatcccgcacctggcttggaggatcctacgcccatggagcctcgctcattggtggcacagcagtctgagatcaaactgc

SEQ ID NO: 821012 - DNA, 69 bp, Artificial Sequence
  ENSG00000235823_30 (sequence is synthesized)
tgacccacaagtagcggcactcctctgagacaaaacttccacaggaatgatcaggcagcaacatttgct

SEQ ID NO: 821013 - DNA, 90 bp, Artificial Sequence
  ENSG00000235823_31 (sequence is synthesized)
tccctgggatgcaaggctggttcaagatacgcaaatcaataaatataatccatcatataaacagaaccaacgcagaagacctttgacaaa

SEQ ID NO: 821014 - DNA, 82 bp, Artificial Sequence
  ENSG00000235823_32 (sequence is synthesized)
gaaatctctatttctttctccccagcctggtaattaaatgaataattcaataaaaggaaaatatattggtcaagctttttgt

SEQ ID NO: 821015 - DNA, 120 bp, Artificial Sequence
  ENSG00000235823_33 (sequence is synthesized)
taattcaataaaaggaaaatatattggtcaagctttttgtgacgtcagtaaaaggcatactttccaaccttttgtattcatccaaacaaagctaatgcacttttaaaaatcctatacttg

SEQ ID NO: 821016 - DNA, 73 bp, Artificial Sequence
  ENSG00000235823_34 (sequence is synthesized)
tccaaacaaagctaatgcacttttaaaaatcctatacttgttttttttcagacctactgcaacctccgcctcc

SEQ ID NO: 821017 - DNA, 120 bp, Artificial Sequence
  ENSG00000235823_35 (sequence is synthesized)
cctctcaaagtgttgggattacagacatgagccactgcgtccggcctaaaaatcctatatttgcaatctatgtgaccacaactgatttaaacccagatgaagataaggtatcaaaataaa

SEQ ID NO: 821018 - DNA, 120 bp, Artificial Sequence
  ENSG00000235823_36 (sequence is synthesized)
cctcaggcagactgagctgtgccacaattttaacactaactgatgaaggcaggatgcttctcctgctcagctgagcatcctgtctcccaaactcaaaaaactaaaatcctggaatcttag

SEQ ID NO: 821019 - DNA, 120 bp, Artificial Sequence
  ENSG00000235823_37 (sequence is synthesized)
aactggaagtgacccttgtctttgtgactgtccttgagctctgctacccatgagttttgcctccaaaattgtcccttttatatgaagtaggactctgcgcagccagaattttttgtgtta

SEQ ID NO: 821020 - DNA, 120 bp, Artificial Sequence
  ENSG00000235823_38 (sequence is synthesized)
cctctttgtaatcagatagggcacaactggctgagattgttgtcagtatgtgggtgtggctggaaaaaaataccctctgtgaccaatagttctttcttcactgtacacagctttcatact

SEQ ID NO: 821021 - DNA, 120 bp, Artificial Sequence
  ENSG00000235823_39 (sequence is synthesized)
agattgggcagtcactggggagaacgcatggtggcgggcgcctgttaattccagcttctcgagaggctgaggtaggagaatggcttgaacataggaggcagaggttgcagtgagctgaga

SEQ ID NO: 821022 - DNA, 120 bp, Artificial Sequence
  ENSG00000235823_40 (sequence is synthesized)
ggctgacgcaaccggcgcaggaaggtggtgtgtggtgggagagtgggaggagacagtggaaagtttagacttgcttctgtaagtgataagaagtcatcagatattttcaagcaggagagg

SEQ ID NO: 821023 - DNA, 120 bp, Artificial Sequence
  ENSG00000235823_41 (sequence is synthesized)
gaagctattgttaccactctggtgaagagtcatgggacctcaaaagctgggatagtcacggtgggaatggaaaggaagggcacaagctgagaggcatttgggaggagaatcaatagcact

SEQ ID NO: 821024 - DNA, 120 bp, Artificial Sequence
  ENSG00000235823_42 (sequence is synthesized)
ttattgactggatgtgtgagatgagtgaggacagcaatcagaagaggactttgaggtttctagcctgagtggctggaaggacaccacttcccctacctgaaataggtagcaaaaaggaga

SEQ ID NO: 821025 - DNA, 120 bp, Artificial Sequence
  ENSG00000235823_43 (sequence is synthesized)
gagaaagagagaagcagagggattttgcaaagggaataggagttcagtttttgacatgtggcatttgaattgcaagaagtacatccctgtggatgtaatacccagtagacagttgggaat

SEQ ID NO: 821026 - DNA, 120 bp, Artificial Sequence
  ENSG00000235823_44 (sequence is synthesized)
taggatctggtgtcgagaagaaaagtagagatgagatccaaagggtttatagtggatcgggagagaaattgatgacctaaagagaaattatagaataagaagatttgggcagggcacggt

SEQ ID NO: 821027 - DNA, 61 bp, Artificial Sequence
  ENSG00000235823_45 (sequence is synthesized)
gccggattaccaagtcaatcctaagccaaaagcacaaagctggaggcatcatgctacctga

SEQ ID NO: 821028 - DNA, 77 bp, Artificial Sequence
  ENSG00000235823_46 (sequence is synthesized)
catcttgccaatttcaaatcgggatctcgctctgttgcccaggccccaggctggagtgtagtggcgtgatcgtgcct

SEQ ID NO: 821029 - DNA, 120 bp, Artificial Sequence
  ENSG00000235823_47 (sequence is synthesized)
agtgtcagctctgtgtggtaaacgattgagaaaaaaagagtcatgaagaagctacagaacttgcttaagagcacatggtgggaccctcttagaaatgggaagaaaaggcagggaagaaaa

SEQ ID NO: 821030 - DNA, 77 bp, Artificial Sequence
  ENSG00000235823_48 (sequence is synthesized)
ggagtcagcaaaacacactaaagattgggcagtcactggggagaactgcaattaacctttaagatactacgtgtcgc

SEQ ID NO: 821031 - DNA, 120 bp, Artificial Sequence
  ENSG00000235823_49 (sequence is synthesized)
ccaggctgtttcaaactcctgggcttgcgtggacacggtggctcacgcctgtaactccaacacttcgggagattgaggcaggtgaatctgagatcaggagttcgagaccaacctggccaa

SEQ ID NO: 821032 - DNA, 67 bp, Artificial Sequence
  ENSG00000235823_50 (sequence is synthesized)
caacctggccaacaaggtgaaagcccgtctctattaaaaatacaaaaaattacttgcatcacttgag

SEQ ID NO: 821033 - DNA, 84 bp, Artificial Sequence
  ENSG00000235823_51 (sequence is synthesized)
aaaagaaaaaccaaacaaacaacaacaacaaaaaaacccattttggaaaagtttggcagcttcttaaaatgttaagcatacacc

SEQ ID NO: 821034 - DNA, 74 bp, Artificial Sequence
  ENSG00000235823_52 (sequence is synthesized)
agaacgtgagtaaaagcacaggaacagcaaagcgttcaggaacgttcgaggctgacgcaaccggcgcaggaagg

SEQ ID NO: 821035 - DNA, 120 bp, Artificial Sequence
  ENSG00000235823_53 (sequence is synthesized)
aatgacttctgtgaccacatctgagctgtatcctcagtgcatacagcagtgtctagcacaccacagacactcacatgtttgttgaatgaatgaatgggtgaccttcaagcagtctggaaa

SEQ ID NO: 821036 - DNA, 120 bp, Artificial Sequence
  ENSG00000235823_54 (sequence is synthesized)
gagagcagccagttctctacttaaatgttttcagaaaagattccaccatttttctgacaataaaaatgaagtccagtgtccaataatatttagttgtcagaatggttctcctaatatcca

SEQ ID NO: 821037 - DNA, 120 bp, Artificial Sequence
  ENSG00000235823_55 (sequence is synthesized)
acctaatccttcccaaagcaatttctgtcctgtctcttctcatttgtctggtgctcaatggaataattaaattagcttaccatggtcaataataaatgtaccaggccttctcaacaataa

SEQ ID NO: 821038 - DNA, 90 bp, Artificial Sequence
  ENSG00000235823_56 (sequence is synthesized)
aatctgagaggcctcccctcatgtatcacttcttcagaaatgacttctgtgaccacatctgagtagagacggggtttctccatgttggcc

SEQ ID NO: 821039 - DNA, 120 bp, Artificial Sequence
  ENSG00000235823_57 (sequence is synthesized)
tgatcctcccacctcggcctcccaaagggttgagattacaggagtgagccaccactcccggccaaggtgttgaaaaagttgccttttaaatacccgaagaataaaaaaaagaaagaaaaa

SEQ ID NO: 821040 - DNA, 90 bp, Artificial Sequence
  ENSG00000235820_0 (sequence is synthesized)
tttccctacatacctagaattttgtttacgatgaacagaatgttgggtaagagtctcttgagctgaaacagttacacccccgcagctggg

SEQ ID NO: 821041 - DNA, 120 bp, Artificial Sequence
  ENSG00000235820_1 (sequence is synthesized)
cccctcctggatgtcacagagaaggatttaaaaatgactcccggccagcatggtgtctcatgctcagcacattgggaggcctagacgggaagattgcttgagggcagcagttcaaggcaa

SEQ ID NO: 821042 - DNA, 120 bp, Artificial Sequence
  ENSG00000235820_2 (sequence is synthesized)
gcctgggcaacatagggagaccctgtccctattatttttttttttgatgttaaaaaaaatttaatttaattaaataaaaatggttcccaagtcaaagagaataaagaaccacagaagtta

SEQ ID NO: 821043 - DNA, 120 bp, Artificial Sequence
  ENSG00000232197_0 (sequence is synthesized)
aggtgggcggcccttccgggggcgtgggcaggtgggcgacccttggggggcatgggcagtggagcagccaccggccctgacctggaccacgtgctgggcgcctcctggcagcccgttctg

SEQ ID NO: 821044 - DNA, 120 bp, Artificial Sequence
  ENSG00000232197_1 (sequence is synthesized)
ggcgcctcctggcagcccgttctgctcccgaatgccccggcttagtcagtctgggatgcggccctggacaccgggctttatgcagctctgaagtgatcccagcacacagcccgggtcaag

SEQ ID NO: 821045 - DNA, 120 bp, Artificial Sequence
  ENSG00000232197_2 (sequence is synthesized)
ctcagcgctcggcaaccataggcacccaacaacgggctgcagccatcagtaacaacggcagctccaacgcccagagaactcacggagcagacacacatcaggtactccaggtacaccagc

SEQ ID NO: 821046 - DNA, 120 bp, Artificial Sequence
  ENSG00000232197_3 (sequence is synthesized)
ctgaaggattttttcccactctcctcagatgaagacgcggaggcctgagcgctgggggtcgcccggggctgcacagcgggtcagaggccaaccctgggcggagccaggccacaccctccc

SEQ ID NO: 821047 - DNA, 120 bp, Artificial Sequence
  ENSG00000232197_4 (sequence is synthesized)
tcaaggattcacagtctccccaaagtaaccgcaacgagggaccctcccgtcaccaaacttcctttcagtcacttccgcttgtactaattctggcccaaccgttcattatatttttacaat

SEQ ID NO: 821048 - DNA, 120 bp, Artificial Sequence
  ENSG00000232197_5 (sequence is synthesized)
tcttatcttggtgtgtattttttgaccctaaaaatcctaactccattccatcaatattttgtatatgcagatttctagcacagtaagtcataaaatgtgcctctcctggcaacacaaaaa

SEQ ID NO: 821049 - DNA, 120 bp, Artificial Sequence
  ENSG00000248428_0 (sequence is synthesized)
cgcgtgttctcactcataagtgggaggggcttcaggctgaaaatgtaatttctttccacgtatttatcttcacaccataaccctttggatgtggaagttattaaaaaggaattttacatg

SEQ ID NO: 821050 - DNA, 120 bp, Artificial Sequence
  ENSG00000248428_1 (sequence is synthesized)
agtgatgatcaagaactgattgatccttaggggcttcggggtgaaaatgcgatttctttccatgtatttatcttcgcacataacactttggatgtggaagttattaaaaaggaattttac

SEQ ID NO: 821051 - DNA, 120 bp, Artificial Sequence
  ENSG00000248428_2 (sequence is synthesized)
tggcagagagaacatgggagagaagaggcaaatccttactcccttaggctggagaagtggtggtgtgaacagccagaaatacccaatcaggcagacatttatccctgcgggctatttgtt

SEQ ID NO: 821052 - DNA, 120 bp, Artificial Sequence
  ENSG00000248428_3 (sequence is synthesized)
gggtgcacatgggttgaagactcaggttcagacaggatagaatccttgtttcccttaggtctttgatgcctgatatgctcaagatgctctgtgtttcacttcttcccatatgtgaacttc

SEQ ID NO: 821053 - DNA, 120 bp, Artificial Sequence
  ENSG00000248428_4 (sequence is synthesized)
aagatctaggcttgaaattataaaaggtggtaagaggtctctgtgttcgctaccaatcccaagatataccctacaattcaactttgcaaaggaataaaatgggtaacaaattttaactca

SEQ ID NO: 821054 - DNA, 120 bp, Artificial Sequence
  ENSG00000248429_0 (sequence is synthesized)
agcccaagtagatggcacacgcagtgcccagcagaaggtttctccgggtccttggacgccggctgctccagagcttacgcacccgcgggacgcacagggagcagatgaaccagtttatga

SEQ ID NO: 821055 - DNA, 120 bp, Artificial Sequence
  ENSG00000248429_1 (sequence is synthesized)
gctgccccggcttgtctggacaggtcatttctctgccgcatccacatgttgaacggagtttaaagtctgcagttggctcctgctaatgtgatgcatggtttcctgacttcagctgccgcg

SEQ ID NO: 821056 - DNA, 120 bp, Artificial Sequence
  ENSG00000248429_2 (sequence is synthesized)
cacggcacagaagacagaggcagaagcagctttattgaaaaacagagcatgagtagaacgacttcaaatcccatatggcaccacagtgagaagtaacttcctctgagcttcttagagaat

SEQ ID NO: 821057 - DNA, 120 bp, Artificial Sequence
  ENSG00000248429_3 (sequence is synthesized)
ccaacaatgtcctgcttccttggggagctgcagccatgggcacatgggaatagggcttccaccaagagtcccgtcagtcacagcaacaggaggtcttcctcagacaactttgatgatagt

SEQ ID NO: 821058 - DNA, 120 bp, Artificial Sequence
  ENSG00000248429_4 (sequence is synthesized)
ggttgttagccagagcaagctagaaccagaaagaaaaactatgaagatgccacagtgggagtctgagcaccttgaggcctcctgttggaaactggcaaacctaactgtgggacacttgga

SEQ ID NO: 821059 - DNA, 120 bp, Artificial Sequence
  ENSG00000248429_5 (sequence is synthesized)
aaaataaactttaattttaaattcggaaaaaagaaatgccgtagagaatcagttttcattcaaataaatttccacttatttttaacccctgggagccctctagtgtcctgttcgcaaaca

SEQ ID NO: 821060 - DNA, 120 bp, Artificial Sequence
  ENSG00000248429_6 (sequence is synthesized)
gactcagaaatgtcagtctcatgaagttcaaaagatcgagaatgtttgctatcttggtggagcagccgcagccaagcaagtaacttgtaaaatgaggaatgccatcacccctcgagtgtc

SEQ ID NO: 821061 - DNA, 120 bp, Artificial Sequence
  ENSG00000248429_7 (sequence is synthesized)
catcccacataacttggggttagagcacaagcgttcccaggaactactcaccttaccatcttggccgtttcatttgtcttccaccagttctggaaagagaaggcctagaagttcagaaaa

SEQ ID NO: 821062 - DNA, 120 bp, Artificial Sequence
  ENSG00000248429_8 (sequence is synthesized)
actggtcttacaagtctgtgaagtaacactatgtgccagcctaatcactcatatatgacctcaagagaacaccaaataagcatatttccagcaggaaatgaccagtgctttggttaagaa

SEQ ID NO: 821063 - DNA, 120 bp, Artificial Sequence
  ENSG00000248429_9 (sequence is synthesized)
tgcacattatactgcagttctttggggaatgaagccacccttgactgaggtaatcatcagttcaaaggcaactccttgttttatctttgcactaattgcttagagaaataaccagacaat

SEQ ID NO: 821064 - DNA, 120 bp, Artificial Sequence
  ENSG00000248429_10 (sequence is synthesized)
ataatttatgacaacaaatctgcatttaactgagttaacgaatttgtaaacaaaaagattcctatctcaggtaggtgcttttggcaagatatttaattttgcccagtttcctcatctgaa

SEQ ID NO: 821065 - DNA, 120 bp, Artificial Sequence
  ENSG00000248429_11 (sequence is synthesized)
gtagatcctaatgttgctctccctggagctgggctgcaggaagtctgggcccccggctcgcactcccggaccccgcaccaacctccagggtcgctctccaatcttaaccaggtttgctcc

SEQ ID NO: 821066 - DNA, 120 bp, Artificial Sequence
  ENSG00000248429_12 (sequence is synthesized)
ctgagcgtacccaggtgctacagcatcagcttcccttgccgcttcctgcggctgaagggatggtccgaccaaagcctcctgccctggggcagccgatgccactgcatgctttttcctgcg

SEQ ID NO: 821067 - DNA, 120 bp, Artificial Sequence
  ENSG00000248429_13 (sequence is synthesized)
cttgggcttcacggtgccacggatattggccggcttgctgcgcttggagcgtagggtaatgtacaccacattgggctgcagagtggacccattgccctgggactctggaggggccagggt

SEQ ID NO: 821068 - DNA, 120 bp, Artificial Sequence
  ENSG00000248429_14 (sequence is synthesized)
cttcgggattcagctgaaagaaaataaaagcatctctagttctgttttttcactattaaaaagaaaaagaagaaactcgtaagcaaccttacttacacagctggccccatgcttggctcc

SEQ ID NO: 821069 - DNA, 120 bp, Artificial Sequence
  ENSG00000248429_15 (sequence is synthesized)
aggaagaatgtaatccttgactctaatgcaaagaacttttaaaggctgaggcatgaaatgaccagtgctttggttaagaatgcacattatactgcagttctttggggaatgaagccaccc

SEQ ID NO: 821070 - DNA, 120 bp, Artificial Sequence
  ENSG00000248429_16 (sequence is synthesized)
cacctcctggtatccgcgccatgatgcaatctgcttacagcctaaatcaggatgaaccatatgactcatagaacactgcagaaggcatgatgtgtgacttcagatgtgaagtcatagagg

SEQ ID NO: 821071 - DNA, 120 bp, Artificial Sequence
  ENSG00000248429_17 (sequence is synthesized)
acaaggacacagccaccttcttggatttctcactctgtggaagggcagtgacattccatgagacaagcagtcctgtggtgaggcccatgtcaagaaggcctgagatctcccaccatcagc

SEQ ID NO: 821072 - DNA, 120 bp, Artificial Sequence
  ENSG00000248429_18 (sequence is synthesized)
tacagccaatttgtcagtcacgtgagtaaaccacctgggacgtgaatcctctcgacttaaccacctcttcaggtggccagagccctagcccaggtctgactgcaacctgatgagaaaccc

SEQ ID NO: 821073 - DNA, 120 bp, Artificial Sequence
  ENSG00000248429_19 (sequence is synthesized)
tgagtaggaagacctgcttgagctgctcccaaattattgatccacagacactatgagagataatacgtacttagtgttcttttaacccactacattttggttggctgtatttattaccct

SEQ ID NO: 821074 - DNA, 120 bp, Artificial Sequence
  ENSG00000248429_20 (sequence is synthesized)
gtaacagatgactaatacatctcctgtgatcaaaacacttcagaggttccccatttctctcagagaaatatccaaagtccataaggcctgtgaggcccctcacattcttcccacccccat

SEQ ID NO: 821075 - DNA, 120 bp, Artificial Sequence
  ENSG00000248429_21 (sequence is synthesized)
tacctctctaactccattttctaccactctccttctttccacctcaaccacagctacagtgacttctttgccctttctcaaatctgcctcagggcctctgtactggacactctctcccca

SEQ ID NO: 821076 - DNA, 120 bp, Artificial Sequence
  ENSG00000248429_22 (sequence is synthesized)
ggacactctctccccactcccactccctcctccaggccttcactgaaatgtctccctctcagtgaggacttcctttcctaaactgcagtacccccaacctacacacacacacacacacac

SEQ ID NO: 821077 - DNA, 120 bp, Artificial Sequence
  ENSG00000248429_23 (sequence is synthesized)
agagtctctagtcttcctagctccttaatttttttttccttagcacatatcactatttcatataccatatttgtcatctattttctggtttccctttctcagatgtaagctaagttggtg

SEQ ID NO: 821078 - DNA, 120 bp, Artificial Sequence
  ENSG00000248429_24 (sequence is synthesized)
caggggtttttgtctgttcccaatgtctagaagagtgtctgatttacagtagacactccatgaaatttgtcaaatgaatacaccagtgttaagagtataagagtgtaatagtacctttaa

SEQ ID NO: 821079 - DNA, 120 bp, Artificial Sequence
  ENSG00000248429_25 (sequence is synthesized)
aaatgcctcaaagataaatcttttgatttatctttatttttagatctctacccccactttagccacttctgaaatttactactagaaaaaccttttctttcgtgaagaactgtctcacaa

SEQ ID NO: 821080 - DNA, 120 bp, Artificial Sequence
  ENSG00000248429_26 (sequence is synthesized)
aaatagcagttaaataggaagctatcctaacccactgtttgccttttcccttgtgaaactcagaccaaaattgaaagtcatctattgtaactatgtgttcttggcatctaaactctgttt

SEQ ID NO: 821081 - DNA, 120 bp, Artificial Sequence
  ENSG00000248429_27 (sequence is synthesized)
gttttgtttcatcttgactttcttaatttcctaggttttttcctttgttcctattattttattgtttttattctatattgcttcaaagactttatgaaattaagtaaattataaatacaa

SEQ ID NO: 821082 - DNA, 120 bp, Artificial Sequence
  ENSG00000248429_28 (sequence is synthesized)
gtgtgtcacttgctgtgactgtgtggcagcttgcccatctcctgagagcccttgggaaagtgaaggacaatatataaggactccaatcacttaaaagctaagtattaagtttttccttgc

SEQ ID NO: 821083 - DNA, 120 bp, Artificial Sequence
  ENSG00000248429_29 (sequence is synthesized)
cactgctgacccaggtttgttgcatagattgcagacctggagatggataccttgttcttggttcagtgctgcacagactcctccactgggggaccctatcccttgctcctcatagtcctg

SEQ ID NO: 821084 - DNA, 120 bp, Artificial Sequence
  ENSG00000248429_30 (sequence is synthesized)
atttctaggacccataaccctattataattaaaatcccagcattagcataggttcctggctacaacctttgtcctacttattgtatggaatttgctaatacctttgctatccattccaac

SEQ ID NO: 821085 - DNA, 120 bp, Artificial Sequence
  ENSG00000248429_31 (sequence is synthesized)
accaggcctggacagcaccaagctgccctgcctgcagctgaaaaacttttaacttaatagtctttgaagttttgtcatagaagtgttaaatagtactctatactgtatctgtcttttgaa

SEQ ID NO: 821086 - DNA, 120 bp, Artificial Sequence
  ENSG00000248429_32 (sequence is synthesized)
ctgtatgtaaaagaagttacattgaatatattttatagaaatatgtgcactttttatctggcactttattgctcacccctaaggacatcattcctgttgacctaaactagtacatctatt

SEQ ID NO: 821087 - DNA, 120 bp, Artificial Sequence
  ENSG00000248429_33 (sequence is synthesized)
tctttatgtgtcttgactcagattacctaggaagggacagtgacctattcatcaatgtttagaattagagtaagttatagaatatagtctgagaaaattacttggaccaagaaagcaatg

SEQ ID NO: 821088 - DNA, 120 bp, Artificial Sequence
  ENSG00000248429_34 (sequence is synthesized)
tccctgacattcatcaatctagaaccagagctgcagattaagctaggtgcaaatttatcagaaaacaatatttttcccaaatacatattgcagccataaaatgccctaaaaacccagttc

SEQ ID NO: 821089 - DNA, 120 bp, Artificial Sequence
  ENSG00000248429_35 (sequence is synthesized)
ttagagggactattgcttacttactgagaaattgtattctctgaaatcatagactatgagatgcattgctgtttaaaattattgcaataagaatgaaacatctcactcttatctggagga

SEQ ID NO: 821090 - DNA, 120 bp, Artificial Sequence
  ENSG00000248429_36 (sequence is synthesized)
gttaagtcattgtgatcagtgaagccttgatttaagctcctgtgcaaagcttcagagaatgggtctcaggacacaacatttgacatctattttgacttcatttccaagaaaataggactg

SEQ ID NO: 821091 - DNA, 120 bp, Artificial Sequence
  ENSG00000248429_37 (sequence is synthesized)
ctatggtttgaatgtttgtctccctcaaaccaaggtgtcggaggtggggcctaatgggagacgtttgggttatcagggagggtccctcatgaatagattaatgctctccctgggggtagg

SEQ ID NO: 821092 - DNA, 120 bp, Artificial Sequence
  ENSG00000248429_38 (sequence is synthesized)
gaacagttagtgagttcttgctttattcattctcaagagagctggttgttaaatagagcctggcgcctccctcctccctccttgctttctctctcaccgtatgatcttagcacattacac

SEQ ID NO: 821093 - DNA, 90 bp, Artificial Sequence
  ENSG00000248429_39 (sequence is synthesized)
cttgctttctctctcaccgtatgatcttagcacattacacctcccctcaccttctgccatgagtggaagcagcctgagcctctcaccagg

SEQ ID NO: 821094 - DNA, 120 bp, Artificial Sequence
  ENSG00000248429_40 (sequence is synthesized)
agattgcgcagcctcagatgttcctctagagcaacacaaaatggactaagacaagaaccataggtccatttcacagtacagagctgaggttgaccccttttatacacaaccatactttct

SEQ ID NO: 821095 - DNA, 120 bp, Artificial Sequence
  ENSG00000248429_41 (sequence is synthesized)
tagagcccatagaatatcatttcatttacatcacacctaaattccactctttagcaaaatcttatgttaaccctatattttcctttgtttgatgagataccccacaattgctctgttgtg

SEQ ID NO: 821096 - DNA, 120 bp, Artificial Sequence
  ENSG00000248429_42 (sequence is synthesized)
cagtccccacactgcaatgagtcagtaaactcaattggtttgtttacaggttgtccctggtggttttaggctgattgggctaagacaaaccacatcttattttttaaatgtctcctttaa

SEQ ID NO: 821097 - DNA, 120 bp, Artificial Sequence
  ENSG00000248429_43 (sequence is synthesized)
gcaaatgttattatctgtattttactctattccataagcagaagtgacaaagtagtctaattttaccaaaagatgcttatagcataaaactttctatgctgtaaacatagaaagtacttg

SEQ ID NO: 821098 - DNA, 120 bp, Artificial Sequence
  ENSG00000248429_44 (sequence is synthesized)
catttctctgccgcatccacatgttgaacggagtttaaagtctgcagttggctcctgctaatgtgatgcatggtttcctgacttcagctgccgcgtccgcttcgggattaggaaaagtgc

SEQ ID NO: 821099 - DNA, 120 bp, Artificial Sequence
  ENSG00000248425_0 (sequence is synthesized)
aagtgagctacagtgaggactgcctccggagacttgcaactgacctgcagccattcccaggcacatgactagttggaagcatgcacctgctattcttgtgtttcactcaaaaagaaccat

SEQ ID NO: 821100 - DNA, 120 bp, Artificial Sequence
  ENSG00000248425_1 (sequence is synthesized)
ggatgctgtgccagcttccataaaactggtaaagaaatgacgttgagtctccctgagcaaggtctcctttgagccagctgaaacagagctgctgaagtccctgcaatgaaaccagtaaaa

SEQ ID NO: 821101 - DNA, 120 bp, Artificial Sequence
  ENSG00000248425_2 (sequence is synthesized)
aagacaagagggaactagccaattactcattcatcctttctttttaaaacaaactctaagacaggcctttgttttcgtatgagatgtccaagggcctaagtaaggagcaacatttattgt

SEQ ID NO: 821102 - DNA, 120 bp, Artificial Sequence
  ENSG00000248425_3 (sequence is synthesized)
attgctgtgggcagtgggcagcttgagttgctctcctttcttccccactgcatgtcctgtgtttttcttactcttgtttccctgggatgaagtgctcaaataaagcattgatgtataaga

SEQ ID NO: 821103 - DNA, 120 bp, Artificial Sequence
  ENSG00000285873_0 (sequence is synthesized)
agttgctcgcggcggctgagaagacggcgaagacgaggaggcgcagcgaacgcagataaagaatccgaggcgcagagaggtggcactgctggaaggaacagagccagatccacaagatcc

SEQ ID NO: 821104 - DNA, 120 bp, Artificial Sequence
  ENSG00000285873_1 (sequence is synthesized)
ttcattccgacaataaatattcactgaagatctgccacatgtcaggccccagcccagatcaggaaattgaggtccagtgaggtgtcttggccaggacactcagtcaggacgtgacatgaa

SEQ ID NO: 821105 - DNA, 120 bp, Artificial Sequence
  ENSG00000285873_2 (sequence is synthesized)
cacaggactgtctgacttcaaatccagtgctccttcccctgcagtccccaccccactgactgggggacagtgctccaggcagctggaatgggacacggtttgtgtggcagcgagatatcc

SEQ ID NO: 821106 - DNA, 120 bp, Artificial Sequence
  ENSG00000285873_3 (sequence is synthesized)
gagaagatgcccctctctctgcctgcctgaatcttctccgtccacaaaggcctgctccatcctccctcctccaggaagctttccctgactgtccccgggcccagccagggtgtctggggg

SEQ ID NO: 821107 - DNA, 120 bp, Artificial Sequence
  ENSG00000285873_4 (sequence is synthesized)
gctggagagacccacagagccctgatcaccgtggctggcccgtaagtgtggcgactgagtcccagtctggaggcacagctggactttcccagagagaactgaggcattgtgggaatttcc

SEQ ID NO: 821108 - DNA, 120 bp, Artificial Sequence
  ENSG00000285873_5 (sequence is synthesized)
cagctgtgaccccaggaccctgattgcccagaatggctccaagttcacatatctagggaccgtcaccaagactcctgtatctatattaaactcggtaaatgtgatgaccctggaaatgtg

SEQ ID NO: 821109 - DNA, 120 bp, Artificial Sequence
  ENSG00000232192_0 (sequence is synthesized)
gcagaaacgggaggtgcacccaggaagccctgaggcctgggagacccatctccatggagcaccccacgaggcaagcacagcactcaggctcacctggggctgtgccccctgacaggtcat

SEQ ID NO: 821110 - DNA, 120 bp, Artificial Sequence
  ENSG00000232192_1 (sequence is synthesized)
gagggccctgagctcagcactgctgctgcccctcgtggggaacgctgctgactgcatggatcgttgtgaagatgaagcgagatcatggacatcaatcactaagcacaatttcctgcacac

SEQ ID NO: 821111 - DNA, 120 bp, Artificial Sequence
  ENSG00000232192_2 (sequence is synthesized)
aatacatcagatgttgcaaggagcttatttaaagaaatggaagtttatcgtcatgtcaatgctgtatctttgaagtttttgtgtgtgtgtgttttttttttttaaagcaagtaattccca

SEQ ID NO: 821112 - DNA, 120 bp, Artificial Sequence
  ENSG00000232192_3 (sequence is synthesized)
ggtcactgaggagcaaagaagcaaaatggaacagaggtggcctacggtcagagagttcatggaaatttgctggtcctgccttgaacactcagacctgaagcacacattcctttgcatggc

SEQ ID NO: 821113 - DNA, 120 bp, Artificial Sequence
  ENSG00000232192_4 (sequence is synthesized)
tgcagtaaacagcagcatcaagatccagggttggagaccactctccagtattctcccggcctccttcaatagtgatgcatcttattcctcaaagcagccatgacggttcattcttcagat

SEQ ID NO: 821114 - DNA, 120 bp, Artificial Sequence
  ENSG00000232192_5 (sequence is synthesized)
caataactgcctgcatagctatgtgcaactgtgtcttaggctactccacagactacagttgttctcttaatgtcaagaacacattcttgcatgattattggattaaacaattgtcttcta

SEQ ID NO: 821115 - DNA, 120 bp, Artificial Sequence
  ENSG00000179028_0 (sequence is synthesized)
aagcagaggatggtggatggcagaacaaggactatcatcaatgacattttcttcactgagcccaccccagaaatgagctcccttcctgtgcgctctcacagctccttgtcgttgaatctc

SEQ ID NO: 821116 - DNA, 120 bp, Artificial Sequence
  ENSG00000179028_1 (sequence is synthesized)
gtatcactgatggtaatttgcagaggaataattaagttggtgattcactttaggatgtactgccctccgaggctgaaagctaaacacatagagcccacgttacgcccagtaccacttaag

SEQ ID NO: 821117 - DNA, 120 bp, Artificial Sequence
  ENSG00000179028_2 (sequence is synthesized)
gaactgcggattagtcactggcccaatgaatgcatcagacactcagcttcagttcccatggcaacaggggctaatggcctagagactaaagatgagacaaagagaaacgcagagaaatgt

SEQ ID NO: 821118 - DNA, 120 bp, Artificial Sequence
  ENSG00000179028_3 (sequence is synthesized)
gcgtgttctgtcttcctctgaggtacgcaagcccctattcagggattgaaaagaacattcgctttagttctaccctgccctcccctcaatgctgggtggaggagggcagaaacgcagacg

SEQ ID NO: 821119 - DNA, 120 bp, Artificial Sequence
  ENSG00000179028_4 (sequence is synthesized)
ggcctgacatgaatccagaatttctacatcctctcaatgcacctgcacggtttggagacaggcttctttgtccccgagccatcatgttaccaacaatgtattgtacctgcaaaccatgcc

SEQ ID NO: 821120 - DNA, 120 bp, Artificial Sequence
  ENSG00000179028_5 (sequence is synthesized)
tgtggaacctaggattcctgctaccccaactcaccttcctctttaccaccctctagcctctatcacagtaggggagttttttcagtcattcctattttctgacagaaagttccagccagc

SEQ ID NO: 821121 - DNA, 120 bp, Artificial Sequence
  ENSG00000179028_6 (sequence is synthesized)
ccaatttcagaagcgctgtctcaggagggctccctgatccttcctgccagagtcacacaggacacacctcctccctcttctcctctgtggcctgggagacctctgcccagaccatgggac

SEQ ID NO: 821122 - DNA, 120 bp, Artificial Sequence
  ENSG00000179028_7 (sequence is synthesized)
aagttcctagggctcccccttcctgccacactcctgttccgccagggccttggggagactcagacgagggaggtttctgatagtctcccacttctggaagcagccaaactaatgagaggc

SEQ ID NO: 821123 - DNA, 120 bp, Artificial Sequence
  ENSG00000179028_8 (sequence is synthesized)
ctcttgcctgcccctcttcctgagaagcccaccacctcctgtgtattgactccccttaccagaggctggacaaacagcgtgccaggcccgacatgagacgtcccacactataaatttgtg

SEQ ID NO: 821124 - DNA, 120 bp, Artificial Sequence
  ENSG00000179028_9 (sequence is synthesized)
ccagctgcactctcctctcctgggacccagctgccctccatttcccatgtcctggaacccctcagtccaaaatacctaagtaaactcgtcttcactgcaatgtgcaacccacacccacag

SEQ ID NO: 821125 - DNA, 120 bp, Artificial Sequence
  ENSG00000179028_10 (sequence is synthesized)
ccatgccctacgccagaaggaaccacatgaagttctgcccatcttcctgacctccacggatgttgcgcgacatccagtctcctctgggtcagggggtttgtctcatatgcactcctgagt

SEQ ID NO: 821126 - DNA, 120 bp, Artificial Sequence
  ENSG00000179028_11 (sequence is synthesized)
gcccacctgccagtgactcccctgtgtttcacacccctctcgggggatctcagatccactcggctcctggtctctgtctggatgaccacgaccagtttcccttggagaaggaccaatggg

SEQ ID NO: 821127 - DNA, 120 bp, Artificial Sequence
  ENSG00000179028_12 (sequence is synthesized)
gaatggcaatgccaggaaggcaacgcttcgcttgactgctctgctccttaaatccccaaaagcaccactcacaggactgtagacgctatgccagttacagacttcagcgaagggtcaata

SEQ ID NO: 821128 - DNA, 120 bp, Artificial Sequence
  ENSG00000179028_13 (sequence is synthesized)
gtgactacatgaaattatagtggaacaaactactagtgagcgatggctaagcatccatgctgctagaatccaaaaagaatcacccatcccctgcctcccacggaaaagataaggtcttct

SEQ ID NO: 821129 - DNA, 120 bp, Artificial Sequence
  ENSG00000179028_14 (sequence is synthesized)
gaggacattccatttccggtgaattcccgttcatggcttttcttcctgttttgagcactgcccttttctctccctggaaagaaggaagtccctccattaatctgcttcattgtagggatt

SEQ ID NO: 821130 - DNA, 120 bp, Artificial Sequence
  ENSG00000179028_15 (sequence is synthesized)
tctttatctctcagtaatgggatctgtctatgtctccacctccctgtgaacatgtgaacacccagagacaatcaccaaacactaaggagctatgagtgtcacatcataatccctcaccta

SEQ ID NO: 821131 - DNA, 120 bp, Artificial Sequence
  ENSG00000179028_16 (sequence is synthesized)
gctctgcgcagtggctcacacctataaccccagctatgcaagacaccgaggcaggaggattggttgaggccaggagttggacacgagcctggtcaatgtagcgagacctcatctctaaaa

SEQ ID NO: 821132 - DNA, 120 bp, Artificial Sequence
  ENSG00000179028_17 (sequence is synthesized)
gcgagacctcatctctaaaattataaaaatagaaaaaattagccttatatggtggcacgcatctgtggtcccagctactcgggagactcatgcaggaggatcacttgagcccaggagttt

SEQ ID NO: 821133 - DNA, 120 bp, Artificial Sequence
  ENSG00000179028_18 (sequence is synthesized)
cagcaccactgcacagagctttgggaggctgcactttgaaggcaggagttcaagaccagcttgggcatcacagcgagaccccaactgcagaaaaaaaataaaattaaatttaaaaaaatt

SEQ ID NO: 821134 - DNA, 120 bp, Artificial Sequence
  ENSG00000250905_0 (sequence is synthesized)
tccctgtgagaccaatgcagaagtactgtgattagtctgtttactcggagaagcaactttcccaagatcctttaacctggaaggtacagagccaggactccattattttttactgtgctc

SEQ ID NO: 821135 - DNA, 120 bp, Artificial Sequence
  ENSG00000250905_1 (sequence is synthesized)
atcagtaaaagtgggtaatttctgccttgtttacttcagaagaacacatctgtgaggacctgctgaaaatgacacagacacttggggacatctttggaagaagcaggaaagtactcaatt

SEQ ID NO: 821136 - DNA, 120 bp, Artificial Sequence
  ENSG00000250905_2 (sequence is synthesized)
gctacaggatataactggcaataggataatttattatctaagaataatgttgggcactttaaatgccacctttcttctgaaagcttatagttcttcatgaaaataaaagtttttccaagc

SEQ ID NO: 821137 - DNA, 120 bp, Artificial Sequence
  ENSG00000256128_0 (sequence is synthesized)
ggaaccgctgggagttggaagctttcttcccactgaggggcaaaccttctaggtatctgaagatgttgaagaccatttcctggaacagcagaggtaaatgcccagaggatgagaacacat

SEQ ID NO: 821138 - DNA, 120 bp, Artificial Sequence
  ENSG00000256128_1 (sequence is synthesized)
acaagctggagagttttagatctcaatggcgggaacaccttcatggcccctttatagctggatgatcatttcctgttctctccaccatggccacctggtccaagccaccatcttcatgca

SEQ ID NO: 821139 - DNA, 120 bp, Artificial Sequence
  ENSG00000256128_2 (sequence is synthesized)
cctggatacctgccataacctcagctgacctttcctgtgtccattcttgttcctttgggcccagtctcctcgctcatagcagcagaatgagtctattaaaaagtgaaacaatttctgtca

SEQ ID NO: 821140 - DNA, 120 bp, Artificial Sequence
  ENSG00000256128_3 (sequence is synthesized)
agggagtttaagctctagcttcagcctgatgtttttaaccaactaggcccgccaacccacaagcagatagaaaataagctgattctataggacagaaaaaggaagagggcaggggtcata

SEQ ID NO: 821141 - DNA, 120 bp, Artificial Sequence
  ENSG00000256128_4 (sequence is synthesized)
aggggatgtaagcataagatacccaagccagaaacagcaacccttccaggtccccttcccccacgtggaagctttcctttcactttcgctttaataaatcttgccgcagcacactctcta

SEQ ID NO: 821142 - DNA, 120 bp, Artificial Sequence
  ENSG00000256128_5 (sequence is synthesized)
ggaagaagacttctcgtctcagtaacaataacaagaaaaacagcctagactagacgcacatcaggaagacaggtagtaacaaaatattttgttgtttgtacttttagtgttgtctctaag

SEQ ID NO: 821143 - DNA, 120 bp, Artificial Sequence
  ENSG00000256128_6 (sequence is synthesized)
acagctttgcctaacccaggcaacaaaaatttaatcctatactttcatctaagagtattacaattttaactctttaattgaggtctgtggatcatttggagttaatttttgtgtgtggtg

SEQ ID NO: 821144 - DNA, 120 bp, Artificial Sequence
  ENSG00000256128_7 (sequence is synthesized)
taaggaagggatccaaaacatacttgtcagcagcagttgtggaaaagactatttttcctatttttttcctcattcaactgtctggaatttttgttgaatatcaattgactataaatgtaa

SEQ ID NO: 821145 - DNA, 120 bp, Artificial Sequence
  ENSG00000256128_8 (sequence is synthesized)
tccctgggacctggagaggaacacagcaggctgccatgcccactgcacctgcagccgcagaataaacatgtggagaaggtcattgatcaccttgactgaagcactgcagacaagataaag

SEQ ID NO: 821146 - DNA, 120 bp, Artificial Sequence
  ENSG00000256128_9 (sequence is synthesized)
acagcctgatgcagaggaagattgaggactaaggggcttcatccacagttaatcccgtcatgtattgacccggaaacatcatctcatttgcctataagacagagagagagaatgatagaa

SEQ ID NO: 821147 - DNA, 120 bp, Artificial Sequence
  ENSG00000256128_10 (sequence is synthesized)
aaactgcaaaacacaagctggagagttttaggtaagagtcatatcacaaaaagccattaagcattttaaaatgcttagcctttatccaaagactaatggaaaggcactgacatgacctaa

SEQ ID NO: 821148 - DNA, 120 bp, Artificial Sequence
  ENSG00000256128_11 (sequence is synthesized)
tcatgaatgagaagatttgattaaatatatctctctacaatgatggagaatggaccaaaagcaggcggggacaaggacagtaaactctgctagggactgctagaatgaccctgaaagaat

SEQ ID NO: 821149 - DNA, 120 bp, Artificial Sequence
  ENSG00000256128_12 (sequence is synthesized)
agccctgaagatagaaagaagtagatagttgccaaagatacctgtggaatacaaaagtaccagtgcccaccagatcaaactacacatggatctgaatctcagaaaagggctccgagctag

SEQ ID NO: 821150 - DNA, 120 bp, Artificial Sequence
  ENSG00000256128_13 (sequence is synthesized)
ggaaagagatttagaagccttcagcagagagatgatgttttaagccttaggagtgaatgaaattacccagagaacatgcatgatgagaagagaacctggaacagcaggggccaagattta

SEQ ID NO: 821151 - DNA, 120 bp, Artificial Sequence
  ENSG00000256128_14 (sequence is synthesized)
ggatctgtcagacaacgaggagcccaagactgagacctgttaatccaaaatgcaccattttgtaagctccctgccaatatgcagaccttggtcaaagtgaaacattccacgagggttcgg

SEQ ID NO: 821152 - DNA, 120 bp, Artificial Sequence
  ENSG00000256128_15 (sequence is synthesized)
gccatgagaacctgcctgcccaaccgcctgactttaacacattctgctgagaaaaagtccaaggaacatcattattacattctgtgggaacaaggccccaactgcctcattgtgggaacg

SEQ ID NO: 821153 - DNA, 120 bp, Artificial Sequence
  ENSG00000256128_16 (sequence is synthesized)
tgtaagcagtggtgggcactggcattaagctggtcctccacctcggcaggtttacctggacataaatacctgcatttgctgttgagccgccctctcgctctatgtgtgtctttaaccctc

SEQ ID NO: 821154 - DNA, 120 bp, Artificial Sequence
  ENSG00000256128_17 (sequence is synthesized)
accttcccttggaaacctaacaagaagcaggagccaggaaggtaggaggaagacagaagcccatggtgttaaaaacagccacaggaattatgtagaacagtgattctcaaagtgaggtcc

SEQ ID NO: 821155 - DNA, 120 bp, Artificial Sequence
  ENSG00000256128_18 (sequence is synthesized)
acaaactctcggggctcccatgacccttgtaggaggtccacacaagccaaaatatctctatatggatactaaggtgttatttgttgatttcattctcatgagcacatgaatgcagaatgg

SEQ ID NO: 821156 - DNA, 120 bp, Artificial Sequence
  ENSG00000256128_19 (sequence is synthesized)
agatttccggaggctaccggaaaggtgatattgcaacaaactggagaaacaacatcatgaaatttctccattttaatttctaataaatatcaatgtttataagcaaaatggtttttttgg

SEQ ID NO: 821157 - DNA, 120 bp, Artificial Sequence
  ENSG00000256128_20 (sequence is synthesized)
tggggtggttttcaacaatgtaaggataaacagatcctgtgatcaaagagtgagaacacagccatagagagctttacaaagggcatcagtattaatgtcaaatgttactgaggcctcgag

SEQ ID NO: 821158 - DNA, 120 bp, Artificial Sequence
  ENSG00000256128_21 (sequence is synthesized)
ggaactaaccagtcagaagcaaccatcgaatttagtaatggacttcactcacttggtgaaagctgttccgtgtcatggtggcagagacacagcacagtggctgagagtgagcaggagctg

SEQ ID NO: 821159 - DNA, 120 bp, Artificial Sequence
  ENSG00000256128_22 (sequence is synthesized)
tggaagttgaataatgcctgaagggaccattctttctagagactgtggaatggaatgactctccagagctgcagattgaaggcatattttcatctgactttggtgattatgtttccaatc

SEQ ID NO: 821160 - DNA, 120 bp, Artificial Sequence
  ENSG00000256128_23 (sequence is synthesized)
tctctgggaataagatctcaatggcgggaacaccttcatggcccctttatagctggtatgttttcttcttatggacaatgagaaacatgtaataaactgtgtttccttctcgctaggaaa

SEQ ID NO: 821161 - DNA, 120 bp, Artificial Sequence
  ENSG00000256128_24 (sequence is synthesized)
acagggtggctctctctgttagcgggcaggaccttctgttacttggatcattctataacaacatttagaagcagtggaataaaattgcaaaatgaaaccaagtccatttattcagcggaa

SEQ ID NO: 821162 - DNA, 120 bp, Artificial Sequence
  ENSG00000256128_25 (sequence is synthesized)
tcgaattgcaagatgaaaccacgtctgggaagcatatttttttacagaagaatctgcagtttagttttgtttattgcaacacaggtgcaaagggtcaacctcacctcatttatctttcag

SEQ ID NO: 821163 - DNA, 120 bp, Artificial Sequence
  ENSG00000256128_26 (sequence is synthesized)
ggcatgttattattattggtctgtgaaagaatccttttttgttcactcattatgttgaactatgtaaaattaccacttttgtaagataaaaaagcaatcaaatattaatgatttcaagtg

SEQ ID NO: 821164 - DNA, 120 bp, Artificial Sequence
  ENSG00000256128_27 (sequence is synthesized)
ctggaagaacgagccttggggcggtatcgcccagatctgaatccacacagcagctgcttcggtccctgtaactcaaggcttcctcttaatcctctgtcctccatcaacacctggctgagc

SEQ ID NO: 821165 - DNA, 120 bp, Artificial Sequence
  ENSG00000256128_28 (sequence is synthesized)
atggcgggaacaccttcatggcccctttatagctggtatgttttcttcttatggacaatgagaaacatgtaataaactgtgtttccttctcgctaggaaaccctgagttaaagctttact

SEQ ID NO: 821166 - DNA, 120 bp, Artificial Sequence
  ENSG00000256128_29 (sequence is synthesized)
tccctctcaggaaccatcaaagagccataatctgtacaccctggtgcaacatttcccctggatttgatcccctttcaattgttttagccttattttacatttcttaaatctatttctcta

SEQ ID NO: 821167 - DNA, 120 bp, Artificial Sequence
  ENSG00000256128_30 (sequence is synthesized)
ttaaagccagaaagtttaattttttcatttacagaagtgatatcaagtttctgttttaggtaaattcatgtaaataagcatatgagttgatttaagggaagatattgattgaacaatatt

SEQ ID NO: 821168 - DNA, 120 bp, Artificial Sequence
  ENSG00000256128_31 (sequence is synthesized)
gaggtttgcagctgctcagtccctgagggcaggagtcccccgggttggacacatctgttccatcttcaccactaacaactcatgggacttccaggaatggaagccacaaacaaaacaggc

SEQ ID NO: 821169 - DNA, 120 bp, Artificial Sequence
  ENSG00000256128_32 (sequence is synthesized)
tttcaaacaaattaaaggaaaatgtaagatgtgtaaaatgaaaacgcacacatttacactttctaatctctgcctcacacacagacatgtacactcacacacattttcaaagtggaaata

SEQ ID NO: 821170 - DNA, 120 bp, Artificial Sequence
  ENSG00000256128_33 (sequence is synthesized)
tgtctgtagtaaggccatgggtggttcatcgctgaaacacattatcccgtttcatgaacaatgttaccccagtgaatttaatgtgatttcttgtcataaccatccagcaacctcacattg

SEQ ID NO: 821171 - DNA, 120 bp, Artificial Sequence
  ENSG00000256128_34 (sequence is synthesized)
acacggcaatgtgaagttttcgaagtctccttcattggttggatctctacggatctgatggtctggttcctgtttgacagataagaacctagagctctgtgaggcaaaaggatttcgcaa

SEQ ID NO: 821172 - DNA, 120 bp, Artificial Sequence
  ENSG00000256128_35 (sequence is synthesized)
aagtcacacagatttaggaccaggtctctgcatgcccaaccccgatgtggcttctctttccactgtcccatctataaattgtaagaagatggtaagactgtctcttgttcctgttcttgt

SEQ ID NO: 821173 - DNA, 120 bp, Artificial Sequence
  ENSG00000256128_36 (sequence is synthesized)
ccattgctgcattatcatttctcctgggaacatcactctaaataaaaacaggtataagggaacattctatactatctttgcaacttctctttaaatttaaaattattcagaaataaaaaa

SEQ ID NO: 821174 - DNA, 120 bp, Artificial Sequence
  ENSG00000256128_37 (sequence is synthesized)
attttcatctgactttgatctcaatggcgggaacaccttcatggcccctttatagctggtatgttttcttcttatggacaatgagaaacatgtaataaactgtgtttccttctcgctagg

SEQ ID NO: 821175 - DNA, 120 bp, Artificial Sequence
  ENSG00000256128_38 (sequence is synthesized)
tgtgaggcttccccagccatgtggaaatgtacccagcataaccccattgaagagctgttccctgggacctggagaggaacacagcaggctgccatgcccactgcacctgcagtgtcggcc

SEQ ID NO: 821176 - DNA, 120 bp, Artificial Sequence
  ENSG00000256128_39 (sequence is synthesized)
atgaaaatgggcccttaggtagtaggaggtggcaggtctcagttcagtgtttacacatggctccacgcagagctacagactgagttccttagcagcttccgtaggaggtcctttgaagaa

SEQ ID NO: 821177 - DNA, 120 bp, Artificial Sequence
  ENSG00000256128_40 (sequence is synthesized)
gggctgctctgcattcgatatgtagaaacttgtggagaagatgaggaaactgaggaaaaccaccaatgcaatccacaatccaatcccttgactctctgcaaccgcacaaaaaaaggaaaa

SEQ ID NO: 821178 - DNA, 120 bp, Artificial Sequence
  ENSG00000256128_41 (sequence is synthesized)
gcaaagaaatagtaattaacacaatgcatacaaactgaggtctacccatcacttccaatacctgttttccccaacagtgaaaattcgtgtacagagtattccccaatgacttctctcagg

SEQ ID NO: 821179 - DNA, 120 bp, Artificial Sequence
  ENSG00000266588_0 (sequence is synthesized)
aggtgaggaagccatggtttaaagcagagatcaccaactgctggaccacagacctgcacgagttcacggcctgttaggaaccgagccacacagcaggagcacatgctcctctgcagaaag

SEQ ID NO: 821180 - DNA, 120 bp, Artificial Sequence
  ENSG00000266588_1 (sequence is synthesized)
tgatggggctgccttgccagctggagcctgaaactgtgcccaggtagacagaactgcgagtcccaggacagcctgggaagtgttggctgcctggtaatggaagaatgtccaggatggaaa

SEQ ID NO: 821181 - DNA, 120 bp, Artificial Sequence
  ENSG00000266588_2 (sequence is synthesized)
atttcaggggtctgctttcctggtctgcccctccccacctctgtagctccctcacagtgacagcagagctgtgaacccaggaacaaaccccaccattgcccctgtcctctctcatctcta

SEQ ID NO: 821182 - DNA, 120 bp, Artificial Sequence
  ENSG00000266588_3 (sequence is synthesized)
ctttccacattgaaaaataataaaagaggccaggcatggtggctcaaaacagctataataccagcactaggatgccaagatgagagaatggcttgaggccaggagttcaagacctgcctg

SEQ ID NO: 821183 - DNA, 120 bp, Artificial Sequence
  ENSG00000266588_4 (sequence is synthesized)
gggcctgatggcagtcctgggagtgggtgagatcacgaagcaggaaggagagaaaacaagaggccaaagggcaagagtctcgaggatgccaacacttacgggaagagaacaagcaactgt

SEQ ID NO: 821184 - DNA, 120 bp, Artificial Sequence
  ENSG00000266588_5 (sequence is synthesized)
tggagagagaaaaggaaaatggggaaagttcaggatccctatcgccaaggaggagggtttcagcagggccagatgcttccaagatcaagcccgagaagagcctgcaatccagcagcaata

SEQ ID NO: 821185 - DNA, 120 bp, Artificial Sequence
  ENSG00000266588_6 (sequence is synthesized)
ggaggtcacaggagttctcagaggatccacggactgtgacgtgctgagggcggatccagattgtgccgattaagaaagaagtgggtggtgagatccggaagccgccagtaaaacactctt

SEQ ID NO: 821186 - DNA, 120 bp, Artificial Sequence
  ENSG00000250906_0 (sequence is synthesized)
tttatcaccaagaacttattttaatggaaatgggtctaatgtcccttcatgcaacaagacagatgaacaaaaaacaatggtgacagtgtgacagtttgattcaagacaaggcgtgagagt

SEQ ID NO: 821187 - DNA, 120 bp, Artificial Sequence
  ENSG00000250906_1 (sequence is synthesized)
gcccaagtactgcacgtggaacttctggaccagctcagtctttggtgttggaaaatctactacagggaacaaaagcaacacatctttctcagtggttccaacacacatgtacacaacagc

SEQ ID NO: 821188 - DNA, 120 bp, Artificial Sequence
  ENSG00000250906_2 (sequence is synthesized)
cgtggctctgcatcatctgaatgctcaggacacgccctgtgccataacgccctatgtttctggatgtaaatgtaacaactattctacaagagcagcattactccagatattggggctctg

SEQ ID NO: 821189 - DNA, 120 bp, Artificial Sequence
  ENSG00000214188_0 (sequence is synthesized)
cgcggaggaagagctgcgccgcgcacagcccgcaaggcgggccgggccgggccggcagccgccctgctgcgtcgctggtggtcgggagacggagaagaacgggtgtcgcgggcgaaggag

SEQ ID NO: 821190 - DNA, 120 bp, Artificial Sequence
  ENSG00000214188_1 (sequence is synthesized)
ggagttcccaggacaccccctcgggtgtctgcgccggaactccgagggttccccggagttagaccgagtccttcctcacgccctcccggctctacatatgctcagcaagtgccgcgtgcc

SEQ ID NO: 821191 - DNA, 120 bp, Artificial Sequence
  ENSG00000214188_2 (sequence is synthesized)
tcccatccttggtcggtggtaaatgcaggaggtaattaacaggatcttcacaaacttggagccagcccactgagtcgttaaaaaaacacccgcaaagaaaacacacgagccttaacactc

SEQ ID NO: 821192 - DNA, 120 bp, Artificial Sequence
  ENSG00000214188_3 (sequence is synthesized)
cagagagttccgaaacacaaagtaaatttcgagctaagggttacagtcctttaaatctggaaatttcaagtatccctcgggatcgtgtccctgggaggcggataggattcagcactctag

SEQ ID NO: 821193 - DNA, 120 bp, Artificial Sequence
  ENSG00000214188_4 (sequence is synthesized)
aattgtctcaccatttgaataggtgctgctcagcccttttgagtctgtcatcggaaagaccatggctttctcgcttttcatctttttggatggctgcttgtcgcaatattgtcttcttcg

SEQ ID NO: 821194 - DNA, 120 bp, Artificial Sequence
  ENSG00000214188_5 (sequence is synthesized)
ctttagacaaccctgtggtgcttactcttcctgtgatgaaggcaagtgtgttcctggagaggttactgaatctggagctgcttttagggagttgcagatggcgcaggcctcccttcctcc

SEQ ID NO: 821195 - DNA, 120 bp, Artificial Sequence
  ENSG00000214188_6 (sequence is synthesized)
caccatcacaatcaggcagccaggagccagggcttccataggcccagctctgtacctgtagggggatggaatctgctaaaagtgttctggagtcattcttggatatctgcttggtatctt

SEQ ID NO: 821196 - DNA, 120 bp, Artificial Sequence
  ENSG00000214188_7 (sequence is synthesized)
ctcaatatcttgaccatctgtgacaattttaatcctcatttgatcatattttatgcaatgttcacagcatcttcaccaggagtagattctatctcaaaacactttctttgctcatcaaaa

SEQ ID NO: 821197 - DNA, 120 bp, Artificial Sequence
  ENSG00000214188_8 (sequence is synthesized)
gaaacagctctttatccgttcaagttttacaaggaattacaacaattcagtcacatcttaaagcttcagttctaattctagttattttgctgtttatggcatgcctgcagttactttatc

SEQ ID NO: 821198 - DNA, 120 bp, Artificial Sequence
  ENSG00000214188_9 (sequence is synthesized)
ttatatgaattatggtatatgtgtgtgatatatgtgggtcagtgtttgtgtatatatgcatctttttttgtatatgtatgttttattacttcttctagattctagttcttcatcttccag

SEQ ID NO: 821199 - DNA, 120 bp, Artificial Sequence
  ENSG00000214188_10 (sequence is synthesized)
tgttaattccttgtacaaagtaggtccttatcattcactggatgaatgaatatccaagttacggtgtatttagtgagctgggattggaacaatacaattgatcaaatgcattactgagta

SEQ ID NO: 821200 - DNA, 120 bp, Artificial Sequence
  ENSG00000214188_11 (sequence is synthesized)
tgtgccccatctaagtttgcagctttagattgtggtcagaggctgttacaagatcttatatattctatgatgggccatatgcatctaaagcatggtggttcagtttatgaatatataaaa

SEQ ID NO: 821201 - DNA, 120 bp, Artificial Sequence
  ENSG00000214188_12 (sequence is synthesized)
ggacaattttttgattaatgtcagctttgagtttagaatgtatcccagacatcttagttgcccttaattatttttggagatatttttctcagccattaataaagcaatccgaatgatgca

SEQ ID NO: 821202 - DNA, 120 bp, Artificial Sequence
  ENSG00000214188_13 (sequence is synthesized)
gctgcagaaaagacaggcttaccttggagatattgcaagtttggttcccggccactgcaataaatgtcttactatgttgaccgtgctggactcgaattcctgggctcaagcaatccttct

SEQ ID NO: 821203 - DNA, 120 bp, Artificial Sequence
  ENSG00000214188_14 (sequence is synthesized)
gcctcaaccttctgattatttcgactacgggtgtgcgccaccatgcctggcttagaaaaggactttatgttgaacctcttttctcttacaatcaaataataaattcattgagtcatacta

SEQ ID NO: 821204 - DNA, 120 bp, Artificial Sequence
  ENSG00000214188_15 (sequence is synthesized)
cctccgtggcccggagttgcgtcttgccgggcgtggggctgtctctctggttgggtagtggggagaggggttcccgaaggcactcttgggagtgtatggatgacgtgtcaggtcaccaaa

SEQ ID NO: 821205 - DNA, 120 bp, Artificial Sequence
  ENSG00000214188_16 (sequence is synthesized)
tggattgtcgaagggaccggagggaagaggggagagctggaatttctgagggtttcggttgcagttttcagtgatctttgctcgtctcccttccctgtaaagctacatatgctcagcaag

SEQ ID NO: 821206 - DNA, 120 bp, Artificial Sequence
  ENSG00000214188_17 (sequence is synthesized)
gatatctgcttggtatcttctcaatatcttgaccatctgtgacaattttaatcctcatttgatcatattttatggtaaatgagcttaactcgatttttttttaatttagatgcctcctaa

SEQ ID NO: 821207 - DNA, 120 bp, Artificial Sequence
  ENSG00000214188_18 (sequence is synthesized)
ggctgtgagagcttctcttgaattgagcctaagaggatgaggagaattccatgattgaggactcagaggtggacctcccaaacaaagggacaaagttgtgaaagtgcaggtcagattcag

SEQ ID NO: 821208 - DNA, 120 bp, Artificial Sequence
  ENSG00000214188_19 (sequence is synthesized)
agaagagctaatcgtggaatttaatttaaaataataaaagaaaaggactttgatgaacaaccataccgtttttagctcttacatcgtgtagttttccaagtaaaaatgctttgaatgctg

SEQ ID NO: 821209 - DNA, 120 bp, Artificial Sequence
  ENSG00000214188_20 (sequence is synthesized)
gctcaggacagatgccaaagcctttccctctaatgacatcaaagccctacttctaaaaccagactggatgtgattcccttctacaaacagattcagtaaagaaatgtgaatactcccaca

SEQ ID NO: 821210 - DNA, 120 bp, Artificial Sequence
  ENSG00000258354_0 (sequence is synthesized)
cggaggcttcaccctccgctccacagggtcggcagcagggcggggcctccggaagctccgccccacgctttcccggggcgcatgcgacgtggggcggagcgtctggaagctccgcccgtc

SEQ ID NO: 821211 - DNA, 120 bp, Artificial Sequence
  ENSG00000258354_1 (sequence is synthesized)
gcactgtagagtcggccgaggcgcacgaggtatttttcacgctccgcccctctgcaggctaaagtgcgtgggcgggaagcggtgggcagggtgccatctggctccgcccttctcctgtgg

SEQ ID NO: 821212 - DNA, 120 bp, Artificial Sequence
  ENSG00000258354_2 (sequence is synthesized)
tgtgggccaggcggcggcttcctcctcctgcagcagccacaggctccactctgatccttctcccgcggcatggatccttctcccgcggcgtggatccttctcccgcaatctccgtgcgcg

SEQ ID NO: 821213 - DNA, 120 bp, Artificial Sequence
  ENSG00000258354_3 (sequence is synthesized)
tccccagtcagtacccgcagcctcccgacgcacccgctggctccaagcctccctaccccaggtttcctggctaagagagagacagagggagagagggggaagagagagaacaggcaatgg

SEQ ID NO: 821214 - DNA, 120 bp, Artificial Sequence
  ENSG00000258354_4 (sequence is synthesized)
gaggttgatggtgagagcttattgaaagacaagagggaggaaacccacatccttcattccccatccattcatttattgccttatttattccattgaatcttcacagctctagaaaaagtg

SEQ ID NO: 821215 - DNA, 120 bp, Artificial Sequence
  ENSG00000258354_5 (sequence is synthesized)
tgctacaattattccctttattaaatgaggtcactgaggcacagtttaagaaatttgccagcagggcacagtgggtcactccggtaatcccagaactttgagagggggaggaaggtggat

SEQ ID NO: 821216 - DNA, 120 bp, Artificial Sequence
  ENSG00000258354_6 (sequence is synthesized)
ccagcctggccaacatggcgagaccccgtttctacaaaaattagccaaaattagccaaactggctcacacttgtagtcccaggtactcgagaggctgaggccggaggagcgtgtgagccc

SEQ ID NO: 821217 - DNA, 62 bp, Artificial Sequence
  ENSG00000258354_7 (sequence is synthesized)
tcccaggtactcgagaggctgaggccggaggagcgtgtgagcccaggaggcagtggctgcgg

SEQ ID NO: 821218 - DNA, 120 bp, Artificial Sequence
  ENSG00000258354_8 (sequence is synthesized)
cactccagactgggcaatacagtgagactccgtctcaaaaaaacaaaaaaaatcctaccacatgtgctccaccaagctctgtctccaaggtggccttggaagccacatggggaaggtggc

SEQ ID NO: 821219 - DNA, 120 bp, Artificial Sequence
  ENSG00000258354_9 (sequence is synthesized)
agagactctaggagcctgagcagaaacccagatgattatgaaaaatgcagacctacccatccttattcacctgggaccaccgtgaactatatcataagaaataaacccctattgtacata

SEQ ID NO: 821220 - DNA, 120 bp, Artificial Sequence
  ENSG00000214184_0 (sequence is synthesized)
gggaggctggcgcaaacgcagcgggtggctggggtaggggctcattgggagcccacggagcgcggcggcggctcgggggccgagttccctacaacaaggatggcggtgacgggcgcaggg

SEQ ID NO: 821221 - DNA, 120 bp, Artificial Sequence
  ENSG00000214184_1 (sequence is synthesized)
agcggggcccggctctccttgcctcgaggctcctctgattccactcgcgtggctgcgcggccctggcagcggccttcgtcccgggggtgggagctacacagggttccgccccgtcctggc

SEQ ID NO: 821222 - DNA, 120 bp, Artificial Sequence
  ENSG00000214184_2 (sequence is synthesized)
accgctgggtgcctgagctccgcatggagcctgcagcctttgtttaacttataaagaaatgggggctccgagcagtcaagaagaacatgccccaagttattcgtcagtgaggcggaaatt

SEQ ID NO: 821223 - DNA, 120 bp, Artificial Sequence
  ENSG00000214184_3 (sequence is synthesized)
gaggcggaaattgtggtgtacttgttccagaccaactatgaagataggatgcccatccagaagaacgggaagcattttcttcctcacctttggaaagtaaaacaaaaaaaaaaagaaaaa

SEQ ID NO: 821224 - DNA, 120 bp, Artificial Sequence
  ENSG00000214184_4 (sequence is synthesized)
taagttcacattttatactttaccattatactgtgctccaaattatctgatatttactttcaaagcatgtgtagaaagtttactatgatgatgcagagacattgtacagaatccagtccc

SEQ ID NO: 821225 - DNA, 120 bp, Artificial Sequence
  ENSG00000214184_5 (sequence is synthesized)
ttgactctcaggtccccagaacactcacttcacgattttgttgacctcttctgtcaacttaaacctggcactctcttggctggctttctctgctctttctgggcactccaaagcttctgt

SEQ ID NO: 821226 - DNA, 120 bp, Artificial Sequence
  ENSG00000249771_0 (sequence is synthesized)
agaggcatgacgggaagtgtggtttttttctcctaatttgagccccacctgtccttccgccgattggcccagtgagctaagaaatcaggatgggggagcaacttttgcattaaatacagc

SEQ ID NO: 821227 - DNA, 120 bp, Artificial Sequence
  ENSG00000249771_1 (sequence is synthesized)
tcacaaatgatctttcctgcccattctcaaaccatgaaatttccgcacttcctgatatagaggcctcagaaacatctttgattcctttctccaggggcttactaagcccgttggttctac

SEQ ID NO: 821228 - DNA, 120 bp, Artificial Sequence
  ENSG00000249771_2 (sequence is synthesized)
gtctattattaattctttcaataagtatttatgaggcctgctatgtgacaggctccatacttggcacggcggataaaaagaggaatatgacacagattgcaaaagagaaacaagtaaacg

SEQ ID NO: 821229 - DNA, 120 bp, Artificial Sequence
  ENSG00000249771_3 (sequence is synthesized)
gaaatcagagcatagtgattgtgtaatatgtgtagaggctgatttaatcacagggagcacagaggacggtacctaaatcagaagggatctggggaggtttcctggaaaaggtttcaacca

SEQ ID NO: 821230 - DNA, 120 bp, Artificial Sequence
  ENSG00000249771_4 (sequence is synthesized)
aagccataaatgctgatgtggatatcaggacagtgtttcaagcaatttagatacaatataaaatatactgatgccatagtagaagaagttgaagccactttgccaagatatttggttctg

SEQ ID NO: 821231 - DNA, 120 bp, Artificial Sequence
  ENSG00000249771_5 (sequence is synthesized)
ccccaagagagatgcaaattaccagctgtattccctcatgtcaggaaaaagagggtcccatatatttcttgtctaatacaaaatcgcagaaggctgaaacacattaactagaaaagagaa

SEQ ID NO: 821232 - DNA, 120 bp, Artificial Sequence
  ENSG00000249771_6 (sequence is synthesized)
tgcaatttggattcaactacctgctgtcatgaaagctaggtgacactgaagtggtcatttataactacgttactatggagacaggaaagatatatatttatccaaacctggggatgaatt

SEQ ID NO: 821233 - DNA, 120 bp, Artificial Sequence
  ENSG00000249771_7 (sequence is synthesized)
aatcttaaaaagatgagtacaagtacttcaacagatgaggacgatctgaaggttagctgtttgcttcatgtgaataggagcaaagcccaaggagaggacaccttcaccctccaacccttc

SEQ ID NO: 821234 - DNA, 120 bp, Artificial Sequence
  ENSG00000249771_8 (sequence is synthesized)
tgagtaaaacggagatcctatccctaaagcaaggctccaagtcaatgggcctgtgcacaatagaagaacatctggcctcggggacacgtttacctctaggcaaagagcaggagcgcagta

SEQ ID NO: 821235 - DNA, 120 bp, Artificial Sequence
  ENSG00000249771_9 (sequence is synthesized)
ttgagtattgttgtaaacaataccatttggaaacctggttccgctcctgtgagtccagcaaacgcctcaaagacgcccttttaggatttctttaaattaatctgagacaacgtgggaata

SEQ ID NO: 821236 - DNA, 120 bp, Artificial Sequence
  ENSG00000249771_10 (sequence is synthesized)
ctctctatatagtatctagcctactggatatgtggtttttgttgttgttgttgtttgttttatttttatttttggcacggcactgaagtctgtgtaaataaaaggcccagataaactcgg

SEQ ID NO: 821237 - DNA, 120 bp, Artificial Sequence
  ENSG00000249771_11 (sequence is synthesized)
aaatcgctggtagggaaacattttaatttagtaggcaccttatttttaccgagatgcttaaggctgtcacgagctactactcttgatggtagtaggaaataaacacgagcgatgaaaaca

SEQ ID NO: 821238 - DNA, 120 bp, Artificial Sequence
  ENSG00000249772_0 (sequence is synthesized)
actacttgtcaggcactggccaagacactgagggtatggagcttgttacacagatccacgcgtgggttatcgacattctcttctaccgttcccgggctttgctctggagaagagaggcct

SEQ ID NO: 821239 - DNA, 120 bp, Artificial Sequence
  ENSG00000249772_1 (sequence is synthesized)
ctgctgagatccagtggtatctgaccagtgtgtggtggtggagacgcagcgggactctgggtggtggtggtgggactgctggaagttgtcaggtccaatgctcctatctttgagttcaag

SEQ ID NO: 821240 - DNA, 120 bp, Artificial Sequence
  ENSG00000249772_2 (sequence is synthesized)
aatttgcgacacagacgtggggatttgccatccaccaaatgttcacctctgttgttctggctggtagcaaaaaacaattccaatgacctaaaaatgagagcaaaagtggctaagagattg

SEQ ID NO: 821241 - DNA, 120 bp, Artificial Sequence
  ENSG00000249772_3 (sequence is synthesized)
tagccaagtgaaatgaattcccagatgtcattcaagaacatgttcccttcatttataggtcacaatctcattgcacttctattgctggacttccgttaatctaaatgctacatgtatacc

SEQ ID NO: 821242 - DNA, 120 bp, Artificial Sequence
  ENSG00000249776_0 (sequence is synthesized)
agataaagtcgttgaatactagcgtgttgtcatacactttttctcagagtttttaaagagtacttcgctgaaatgatgccatcaggaaagagatatttttacctctatcacctatcaatg

SEQ ID NO: 821243 - DNA, 120 bp, Artificial Sequence
  ENSG00000249776_1 (sequence is synthesized)
gttgggactacaggcacgtgtcattacacccaggctatctgcaatacatgactctggaagctagggtgctctatgctgtgatgctatcaaatcttcatggatttttccaggatcctcaaa

SEQ ID NO: 821244 - DNA, 120 bp, Artificial Sequence
  ENSG00000249776_2 (sequence is synthesized)
atctgaaacgaagccaagcaaagcaacatcaccttctggaaagtgcagaaactgcaatcaagatcaacaaagaaaagcacccttcccatagattcatctctttggcgtttaagtgtttgg

SEQ ID NO: 821245 - DNA, 120 bp, Artificial Sequence
  ENSG00000249776_3 (sequence is synthesized)
tcatttaactagatgttccaggtcacagagatattctactaaggcaattttcaaaagaccataaaaccaccacatcaatttatgcttgcagctgcttctacttcaacaaatacaagtgct

SEQ ID NO: 821246 - DNA, 120 bp, Artificial Sequence
  ENSG00000249776_4 (sequence is synthesized)
gtcattacacccagacagggtatcactctgttgcccaggttggattccagtggcatgatcatggctcagtgcagtctcgacttctggggttcaagcgattcccccatctcagcctcctca

SEQ ID NO: 821247 - DNA, 120 bp, Artificial Sequence
  ENSG00000233058_0 (sequence is synthesized)
gcagccggatttccaaatcgcgggtttgattttcgctgcgtcctctccgcgacgcgcgcagggagcgcgcccggccacctgcagcctctggctgcggccatctttccgcctggggccacc

SEQ ID NO: 821248 - DNA, 120 bp, Artificial Sequence
  ENSG00000233058_1 (sequence is synthesized)
tggcctgcgccctttgtgcccggcccgctccgtgactgttcttcttgccgctacttacagaactcagccgccttagcgtcttagagaagaggacggcatgcatgcggaccccgtccacca

SEQ ID NO: 821249 - DNA, 120 bp, Artificial Sequence
  ENSG00000233058_2 (sequence is synthesized)
cacctggagagcagggagcccttagtccctggacacttaccagggccgccacccctggtccacgcacgtgatgacatctcaccaggggcagcacaccgcccgagtccgcgacactgataa

SEQ ID NO: 821250 - DNA, 120 bp, Artificial Sequence
  ENSG00000233058_3 (sequence is synthesized)
cacctcctgcgggcaggagggcgccacagccacccctggtcccctagattgtgtgaggctagcatttctgcccgcctcttggcgtggacagcacgctggaccgagatggaaccacagctt

SEQ ID NO: 821251 - DNA, 120 bp, Artificial Sequence
  ENSG00000233058_4 (sequence is synthesized)
gtgttgaaatgattaaatgagattaaggggtgtgtggtagtgttgggcaaaccacaagaaaacggtctgggtggggtctggccctaaaatcttcctcccccacctcccaggcttccttgc

SEQ ID NO: 821252 - DNA, 120 bp, Artificial Sequence
  ENSG00000233058_5 (sequence is synthesized)
cttgctgcttcctctcagcctttaaacaggttggcctctccaagtcctaaaaacaaaattatcaagccaacctcctcctgaagtgctccctccaactagcttccaagtgtttcatgcgga

SEQ ID NO: 821253 - DNA, 120 bp, Artificial Sequence
  ENSG00000233058_6 (sequence is synthesized)
cctcaaacaatggtcttccctggctgcctctgcttcctcatttctcaacacttggcattctggcttctcctccccaactctaacccttcaccttgctcaggcaagagcaactcatgactt

SEQ ID NO: 821254 - DNA, 120 bp, Artificial Sequence
  ENSG00000233058_7 (sequence is synthesized)
tcattttgccaaaccttgcaggcattcctcaggccttatctctctggttctttctgctacatttgacaccttgggatgactctcaccttctggaatctctctactaccttggtttcagaa

SEQ ID NO: 821255 - DNA, 120 bp, Artificial Sequence
  ENSG00000233058_8 (sequence is synthesized)
gagtgaaccctctggattatcacatgaagatgttttgagaatggtgaaaaaaggaatttggacactggctttagaggaagtgctgagtcaccaggaaaggcttgagcatgtttatgggtt

SEQ ID NO: 821256 - DNA, 120 bp, Artificial Sequence
  ENSG00000233058_9 (sequence is synthesized)
tacttcctgtgagcagcccagggatggccagtcacttgtgacctactttcagagctggcagttctgacttctagaacaaactcggaacaagcccatctacagctggttgactgagtttcc

SEQ ID NO: 821257 - DNA, 120 bp, Artificial Sequence
  ENSG00000233058_10 (sequence is synthesized)
tttgggctcctggcaccagaaagaattgctcactggaaggatcataggtggcactcatgtctcactgccccactcagggagatggggccccatggttgtgctttaaggatgctgtggact

SEQ ID NO: 821258 - DNA, 120 bp, Artificial Sequence
  ENSG00000233058_11 (sequence is synthesized)
ccctacaatgtcagcaactgctgtgtgcacctgtagctctccatttctctcgagagaagtcctgtagttcttcgcaaatccttttcaaaggggactcgtgattccagaagcatcgaagcc

SEQ ID NO: 821259 - DNA, 120 bp, Artificial Sequence
  ENSG00000233058_12 (sequence is synthesized)
ttgaggcttgcctggagattttaggtctggtggctgcagatgcatatgagatgtggactgcaagatatttctctactgttcaaatcacgtgttggaggcgactccctaaagtcataggat

SEQ ID NO: 821260 - DNA, 120 bp, Artificial Sequence
  ENSG00000233058_13 (sequence is synthesized)
ctcaaaattgaaaggagccttaggaataacctagttttcagcaccgaagcgaagctctcaagactttgtcaaaggtcaggcagttaacttaatggccgcaggaaaagcaaagtccaggtc

SEQ ID NO: 821261 - DNA, 120 bp, Artificial Sequence
  ENSG00000233058_14 (sequence is synthesized)
accctcgaacgggcaaaagaaagaaagaggcaggtaaggggaggcgaggccgtccaaaaacgctgggtgtcagcccggggtggctaatggagggcggcttttctggtgggatgaaatgga

SEQ ID NO: 821262 - DNA, 120 bp, Artificial Sequence
  ENSG00000233058_15 (sequence is synthesized)
acggcaaatcccacttcatcccctttgggctatgacaacatcatagtccaatctcccattttatgaacagggaaactgaggctcagtgactagacagacgttgcccagagtcatggtcat

SEQ ID NO: 821263 - DNA, 120 bp, Artificial Sequence
  ENSG00000233058_16 (sequence is synthesized)
ggaggaagcttgtgctagaatggtggagaggaaaccagagcccagctcctaatgcaaggctctttcattcctttagccaccctcgcccccgccaaaacaaacagacaaaaaactgtcatt

SEQ ID NO: 821264 - DNA, 120 bp, Artificial Sequence
  ENSG00000233058_17 (sequence is synthesized)
ctcatatgaccacggactctgcgccccggccgcaggcggaggacagggaggagcgcacacgagaaagctcccacgcgcccgcgcctcgcctccgacgggaaggcgcctcttccgaccgtc

SEQ ID NO: 821265 - DNA, 120 bp, Artificial Sequence
  ENSG00000233058_18 (sequence is synthesized)
tgcctgtgtggactcctgcctgctctctgtgccaggatcccgtgacatgaaacagaataagtgcttcataaacgggagtgacactaggcgtggtggcatgcatctggagtcctagctacg

SEQ ID NO: 821266 - DNA, 89 bp, Artificial Sequence
  ENSG00000233058_19 (sequence is synthesized)
ctaggagttggaggctctaatgcacttggatagcacctatgaatagccagtgccctccaacctgggcaacatagtgagctcttgtcacc

SEQ ID NO: 821267 - DNA, 120 bp, Artificial Sequence
  ENSG00000233058_20 (sequence is synthesized)
tcccctctgcttctgcaaagaaccggttctgttggtccagtcgcttgagttcctacatgaacccaaaaaaaccagtgaacatccttctgcaggctacaaagcactacgatctgcttccct

SEQ ID NO: 821268 - DNA, 120 bp, Artificial Sequence
  ENSG00000233058_21 (sequence is synthesized)
ccctacctccttctcctgacatcccctcctcctgtcctgcccaggttcactcctcgcccaccacgtggtctgcttagggctcccacacagcaagcatgtgcccccttagggcctgcgtcc

SEQ ID NO: 821269 - DNA, 120 bp, Artificial Sequence
  ENSG00000233058_22 (sequence is synthesized)
tggctgctccctctcctcgctgctcttcctcccagtactcggttggttactgccccatcttcgtcaagctgcccacgtctcacctactccatgtgatttaccctgaccgccctgttcaac

SEQ ID NO: 821270 - DNA, 120 bp, Artificial Sequence
  ENSG00000233058_23 (sequence is synthesized)
taggtggcactcatgtctcactgccccactcaggcggagtgcggtgactctcgcctataatcccagaattttgagaggccaaggtgggcagctcacttgagctcagatgttcgagaccag

SEQ ID NO: 821271 - DNA, 120 bp, Artificial Sequence
  ENSG00000233058_24 (sequence is synthesized)
tggcaccagaaagaattgctcactggaaggatcataggtggcactcatgtctcactgccccactcaggcaacatcatgcacgcggatgatcaacagtcagttcctggtcaacataagtaa

SEQ ID NO: 821272 - DNA, 120 bp, Artificial Sequence
  ENSG00000233058_25 (sequence is synthesized)
tgtacctactccttgccctctgccccagggttatagaacagctgctttctgctattctccccccaggctctgcagaaccttctgacctttcagaaggtttgcatcctttccctatagttt

SEQ ID NO: 821273 - DNA, 120 bp, Artificial Sequence
  ENSG00000233058_26 (sequence is synthesized)
ttccaccgctctgaccagtcccccacaatatatagccttgtatgcaaagccaggcctgtccatgcagggtgaccatccaaggtagacagtggcaaaatctggtggaggcatcagagatag

SEQ ID NO: 821274 - DNA, 120 bp, Artificial Sequence
  ENSG00000233058_27 (sequence is synthesized)
tgccatcagtttgctggaacaagcatatcaaggagcctggcagatctacacttcaccagacggtgcctgtagccaacagggcaggcccttgctccagggaaacactcagaaatcaaaact

SEQ ID NO: 821275 - DNA, 120 bp, Artificial Sequence
  ENSG00000233058_28 (sequence is synthesized)
ccttgctctgctgccagggaactctccaggagatcctcagtgtcatcagaagctgaaaaaaacagtgctgagaaacgtggcctgccgtctttccagctaagggagatggcccattcgacc

SEQ ID NO: 821276 - DNA, 120 bp, Artificial Sequence
  ENSG00000233058_29 (sequence is synthesized)
ctgggttgtcctctgcaaacgcgctgctgcaggttgcatggcaccatctcctgattgcaatttgctttcctgagggagtgaactgactgaaattggatggtaataagttgctaggttatt

SEQ ID NO: 821277 - DNA, 120 bp, Artificial Sequence
  ENSG00000233058_30 (sequence is synthesized)
ttccactttttagtttatgaggcttattcattttgctttaacattaaccactgccttccttttaaggagctggtgaggcagcgcatggcaacaggttcagggtgaggagtggcaccacct

SEQ ID NO: 821278 - DNA, 120 bp, Artificial Sequence
  ENSG00000233058_31 (sequence is synthesized)
cctttcagtgaggatttgggaagggtgaaaagcaccctaatcttctcagccgcatgtgaacaaaccacctgtcaaggtgggtccttcctatagggaggttgatgtcagcccttcagggag

SEQ ID NO: 821279 - DNA, 120 bp, Artificial Sequence
  ENSG00000233058_32 (sequence is synthesized)
gtctcagttttcttcctccacttcctaatcccttcattataattccttccacaacagaataagtttcttgagcaatgcagcaatatccagcaattttagatagacatttaccttttgacc

SEQ ID NO: 821280 - DNA, 120 bp, Artificial Sequence
  ENSG00000233058_33 (sequence is synthesized)
tagaaatctcacttctacgaatccatcctaaagacacactttcagctggatgtggtcgctcatgcctgcgatcctaacactctgggaggctaaagtggaagaatctcttgggctcaggag

SEQ ID NO: 821281 - DNA, 120 bp, Artificial Sequence
  ENSG00000233058_34 (sequence is synthesized)
cagcctgggcaacataggaagaccctatctctaaaaaaaataaaaataaaaacggcacacagtcaaaaattcaaaaattaatatacataaggctatttattacagaaacattggtagtag

SEQ ID NO: 821282 - DNA, 120 bp, Artificial Sequence
  ENSG00000233058_35 (sequence is synthesized)
caatagggaacggagtaaataaactaagatacctacacataatggagtgccatgcagctttgaaaggaaatgaggcatatttctatgttatatgttgtgatcaccagaatataacctaat

SEQ ID NO: 821283 - DNA, 120 bp, Artificial Sequence
  ENSG00000233058_36 (sequence is synthesized)
gagtaaaaagccaggtgaagaaaattctgataatatgctatcattggagaggggaatatgaatataccatacatcacataggaggagagaggaaataaagtgagaggattgggatagaag

SEQ ID NO: 821284 - DNA, 120 bp, Artificial Sequence
  ENSG00000233058_37 (sequence is synthesized)
ctagacttttctaaatatatcttgttttatagatttatgttggaagtttgtggatatagtactttagaaaagtataaaaccaaattagacttgacaaaatgaaacaagtcaatctgttga

SEQ ID NO: 821285 - DNA, 120 bp, Artificial Sequence
  ENSG00000233058_38 (sequence is synthesized)
gttgatggtgtaactacacagtgagaaactattgcaaatgaccttaacactcaggaattccactgtatattcctaatgggagatcccctaatgaccaaacttaaacccagtccaaccaaa

SEQ ID NO: 821286 - DNA, 120 bp, Artificial Sequence
  ENSG00000233058_39 (sequence is synthesized)
ccaaaaaaccttgtaaaatatctgaaaccatttttagtaatgaaatgagaaatgtggtcgtgttggtgatatggtttggctgtgtccccaccccgacatcatcttgaattgtaactccca

SEQ ID NO: 821287 - DNA, 120 bp, Artificial Sequence
  ENSG00000233058_40 (sequence is synthesized)
caattcccacatgtcatgagaggaacccagtgggaggtgattgaattatgggtgtgggtctttcctgcgctgttcccatgatagtgaatgacaagatctgatgattttaaaaacggtttc

SEQ ID NO: 821288 - DNA, 88 bp, Artificial Sequence
  ENSG00000233058_41 (sequence is synthesized)
atagtgaatgacaagatctgatgattttaaaaacggtttccccgcacaacctccctctcttgcctgccaccatctcgctgtgatcgtg

SEQ ID NO: 821289 - DNA, 74 bp, Artificial Sequence
  ENSG00000233058_42 (sequence is synthesized)
catcagcagcatgaaaataaactcatacagtaaattggtaccaataaagtggggtgctgctgaaaagataccca

SEQ ID NO: 821290 - DNA, 73 bp, Artificial Sequence
  ENSG00000233058_43 (sequence is synthesized)
gtctaagcaacaaagtattcaagaggtgacttgggcgttcttaaacacattcagttttataagggaagcagag

SEQ ID NO: 821291 - DNA, 77 bp, Artificial Sequence
  ENSG00000233058_44 (sequence is synthesized)
cttgggcgttcttaaaccttgcagcctgacaatgtaatagaaaagaaaattctattttctgaggagaaattcaagct

SEQ ID NO: 821292 - DNA, 120 bp, Artificial Sequence
  ENSG00000233058_45 (sequence is synthesized)
gggaaaatgtctccagggcatttcagaggtcttcatggcagcccctcccatcacgggaccagaggcctaggaggaaaaaaatggtttcttgggccaggcccagggtctccgtgctgtgtg

SEQ ID NO: 821293 - DNA, 120 bp, Artificial Sequence
  ENSG00000233058_46 (sequence is synthesized)
ctagggacttggtgccctgcatcccagctactccagccatgattaaaagggcccaaggtacagctcgggccgtggctgcagagggtgcaagcctcaagccttggaagcttctatgtggaa

SEQ ID NO: 821294 - DNA, 120 bp, Artificial Sequence
  ENSG00000233058_47 (sequence is synthesized)
tcgggccgtggctgcagagggtgcaagcctcaagccttggaagcttctatgtggaattcaacctgtgggtgcacagaagtcaagaactgaggcttgggaacctctgcctagatttcagag

SEQ ID NO: 821295 - DNA, 120 bp, Artificial Sequence
  ENSG00000233058_48 (sequence is synthesized)
tggatatccaggaagtttgctgcagggacagggccctcatggagaacctctgctgggacagtgtggaaaggaaatgtggagttggagtccccacacagagtcccaactggggcaccacct

SEQ ID NO: 821296 - DNA, 120 bp, Artificial Sequence
  ENSG00000233058_49 (sequence is synthesized)
agaatggtagatccaccgacagcttgcacatgtgcctggaaaatcggcagacactcaacaccagcccatgaaagcagccagaagggagggtgtaccctgcaaagccacaggggctgagct

SEQ ID NO: 821297 - DNA, 79 bp, Artificial Sequence
  ENSG00000233058_50 (sequence is synthesized)
aaatcggcagacactcaacaccagcccatgaaagcagccagaagggagggtgtaccctgcaaagccacaggggcgtgac

SEQ ID NO: 821298 - DNA, 88 bp, Artificial Sequence
  ENSG00000233058_51 (sequence is synthesized)
ccggatgcatttaagacttaactgccctgctggatttctgatttgtatggggaccagagcgcctttgttttggccaatttctcccatt

SEQ ID NO: 821299 - DNA, 73 bp, Artificial Sequence
  ENSG00000233058_52 (sequence is synthesized)
atggctgtatttacccgatttacaagctcctaggcgaaaggaatgtgccttgtctcagatgagactttggact

SEQ ID NO: 821300 - DNA, 120 bp, Artificial Sequence
  ENSG00000233058_53 (sequence is synthesized)
ttgggaaggcatgactggttttgaaacgtgagaacatgagatttgggaggggccagaggcgggatgatatggtttggctgtgtccccaccgaaatctcattttgaattgtaactcccaca

SEQ ID NO: 821301 - DNA, 120 bp, Artificial Sequence
  ENSG00000233058_54 (sequence is synthesized)
gtaactcccacaactcctgtgtgtcattggaggaacccagtgggaggtgatcgaattatgggggcaggtctttcctgtgcggttctcatgatggtaaatgagtctcacaagagctgatcg

SEQ ID NO: 821302 - DNA, 120 bp, Artificial Sequence
  ENSG00000233058_55 (sequence is synthesized)
ttttaaaagtgggagtttccctgtacaagctgtctctcttgcctgctgccattcatgtaagatgtgacttactcctccttgccttccacaatgattgtgaggccgtcccagccatgtggg

SEQ ID NO: 821303 - DNA, 120 bp, Artificial Sequence
  ENSG00000233058_56 (sequence is synthesized)
ccttacggtaattgctttaaaaggtggggcaccgtggctcacatgggacctcgtctctaaaaaataaaaaaattagccatgtgtggtggcgtgcatctgtagtcccatcccagctactca

SEQ ID NO: 821304 - DNA, 90 bp, Artificial Sequence
  ENSG00000233058_57 (sequence is synthesized)
gaggcagaaggatcgcttgagcccaggagatcaaggctacagtgagctgtgatgatgtcactgcattccagccccaacaaaacaaaacag

SEQ ID NO: 821305 - DNA, 120 bp, Artificial Sequence
  ENSG00000233058_58 (sequence is synthesized)
tgttttgttttgttttgttttgttttcctcagagcagagatgcctcactgtgataggtaaattaaggtgatactgattgccagctccagtgtggaagtcccgaggtgaaggaatttcttt

SEQ ID NO: 821306 - DNA, 120 bp, Artificial Sequence
  ENSG00000233058_59 (sequence is synthesized)
gtcccgaggtgaaggaatttctttcataaacatttcaaaagtgagtcgatccagaatacacctccaccatgagattacctgtaatctaattcaacctagaagatggagtccaaacagctt

SEQ ID NO: 821307 - DNA, 90 bp, Artificial Sequence
  ENSG00000233058_60 (sequence is synthesized)
gtaatctaattcaacctagaagatggagtccaaacagcttgaggttctgcagatttcacaacagcagccacaaaatgaaagtgaagaagg

SEQ ID NO: 821308 - DNA, 74 bp, Artificial Sequence
  ENSG00000233058_61 (sequence is synthesized)
gaggccgaggcgggtggatcatctgaagtcgggagtgtgagactagcctgatgcgtggtggcgcattcctgtaa

SEQ ID NO: 821309 - DNA, 65 bp, Artificial Sequence
  ENSG00000233058_62 (sequence is synthesized)
gaaaaaaaaaaaagaaagtgaacaaggctttaaggtggagcacactagaaacatcttgctatttc

SEQ ID NO: 821310 - DNA, 120 bp, Artificial Sequence
  ENSG00000233058_63 (sequence is synthesized)
ggctttaaggtggagcacactagaaacatcttgctatttccacgtgtctctttgtcactacactccttaaatacacttaaatagctcatattaacaacagacacaaccaatgtaaaacct

SEQ ID NO: 821311 - DNA, 120 bp, Artificial Sequence
  ENSG00000233058_64 (sequence is synthesized)
cttggggctttataagaagtttcctaaagttaatgctgtagattcctcatgatcatttcaaaactaatgtgatttctttagggtacctttaattacacttatgaccttggtttcatttta

SEQ ID NO: 821312 - DNA, 120 bp, Artificial Sequence
  ENSG00000233058_65 (sequence is synthesized)
aaaatatacatacatttaaagaagactgaggaccctaaggatctcaaatatcccttcgacgggtacctaatagctgtttttgattcctgagatacttggttttatctctcctttagaaac

SEQ ID NO: 821313 - DNA, 120 bp, Artificial Sequence
  ENSG00000233058_66 (sequence is synthesized)
aaaaattatgctcagctgtaacctcgtccagctctaccaactcagatattcacaggctgatttcaagctccaagagaaaaagtagagtcacgtttacctttttatccccaacaacatgta

SEQ ID NO: 821314 - DNA, 120 bp, Artificial Sequence
  ENSG00000233058_67 (sequence is synthesized)
gccatgttccctccctagttctgcatcctcagatcaaccaaccagggatcaaaaatatttatgaaaaaaataacaataaaacaataaaaaatacagttgacccttaaacagtgtgggtgt

SEQ ID NO: 821315 - DNA, 120 bp, Artificial Sequence
  ENSG00000233058_68 (sequence is synthesized)
acagttgacccttaaacagtgtgggtgttgagggagccagccgccatgcattaaaaactctgagtataagtttcaacactcaggcctggcgaggtggctcacgcctggaatcccagcact

SEQ ID NO: 821316 - DNA, 85 bp, Artificial Sequence
  ENSG00000233058_69 (sequence is synthesized)
ggtaccaactacttggtaggctaaggtgagaggagtgcttgagcccaggagatcaaggttgcatcgagtcgagatcgaaccatta

SEQ ID NO: 821317 - DNA, 120 bp, Artificial Sequence
  ENSG00000236022_0 (sequence is synthesized)
tggggttcatcctttcctagggagcttccaagggcccacacagcctgctccccgcaccccatggaggcgcaatgatagcagaattactggcactgttaacctgctggagtgggaacctgg

SEQ ID NO: 821318 - DNA, 120 bp, Artificial Sequence
  ENSG00000236022_1 (sequence is synthesized)
gtgattccgaagtccaggttcttccacctgcaactgcagtttccagaattggtcccaccccaggaggatcagccagatgcaacgccaggagcagcatcagccacgctgtaaacaaggggg

SEQ ID NO: 821319 - DNA, 120 bp, Artificial Sequence
  ENSG00000236022_2 (sequence is synthesized)
aaacgccaagcgcattacagaggacgtcagccctgccatcactgggctggggaaacaatgccagccatggctggtctccgggttcacagtgataggggaaataaacccttatttgtctaa

SEQ ID NO: 821320 - DNA, 120 bp, Artificial Sequence
  ENSG00000236022_3 (sequence is synthesized)
aaaggcttgaggtgcacttccacagtggagctgtcttcttggcttctgctgtgagaagattgtccccctgaatggctgccggcccttcagcctcgccccgccaagagacacatggaacag

SEQ ID NO: 821321 - DNA, 120 bp, Artificial Sequence
  ENSG00000236022_4 (sequence is synthesized)
ccagagcccagcctagagcctgtatcccagcctagcctgaggcagagccacccagccaagaccaactgaccttcagctaacctgcagatgcatcagggggaattaaatgattgttctaaa

SEQ ID NO: 821322 - DNA, 120 bp, Artificial Sequence
  ENSG00000236021_0 (sequence is synthesized)
cacggaaagaacctagaagctccgagcggttgcagacagcactgcattgagccaacgactcctgctctactgatggtgattccacagctttgtgaggaataagttaagatgaattacagt

SEQ ID NO: 821323 - DNA, 120 bp, Artificial Sequence
  ENSG00000236021_1 (sequence is synthesized)
ttcccctggacttctttctctctcctgccgccttgtgaagaaggtgcctgcctccccttccaccacgattctaagtttcctgaagtctccccagccatgctgaactgataaggtccatct

SEQ ID NO: 821324 - DNA, 120 bp, Artificial Sequence
  ENSG00000236021_2 (sequence is synthesized)
tggcaaatggtctgtgtgcacaagaaagaatgtgaattctgcagttgttggaatgttatcttatctggaagaagaggaataggaaagaaaaggagtcaggaatggatcttactcagaagg

SEQ ID NO: 821325 - DNA, 120 bp, Artificial Sequence
  ENSG00000236021_3 (sequence is synthesized)
ctgactagacacagccaggtggaagagctcccactgcgggaccaagatgactggaatgcccctaacagatcttcagagggaagaaaccaggagtggacagagagaagacacagaagctgg

SEQ ID NO: 821326 - DNA, 120 bp, Artificial Sequence
  ENSG00000236021_4 (sequence is synthesized)
gctgaaggtagtgaaagctgggaatgtggcacaggactactgcacaccaggttttgttcctggcccacaatggctctgggggatcaggttgaaggaaaattaccctggatggaagatcag

SEQ ID NO: 821327 - DNA, 120 bp, Artificial Sequence
  ENSG00000236021_5 (sequence is synthesized)
aggtatagaaagaaatggagagcaaagaaagaggtctgcaggctcagaagtccaagatcaaggagctggcattggatgagggacttcttgctgcatcatcccatgacagaaggacaaaga

SEQ ID NO: 821328 - DNA, 120 bp, Artificial Sequence
  ENSG00000236021_6 (sequence is synthesized)
ttgataatggcattaattcattcacttggccctcatgtcctaatgaccgttcattaggccccatctcccaacactgttgcattgggatcaagttttcaacacatagaatttgggagacac

SEQ ID NO: 821329 - DNA, 120 bp, Artificial Sequence
  ENSG00000236021_7 (sequence is synthesized)
attcaaaccatagcacgcattattaacagcctccattagagtggtacatttgttacaaatgatgaaactacattgacacctcattataacccaatattcatagtttatactatgttcact

SEQ ID NO: 821330 - DNA, 120 bp, Artificial Sequence
  ENSG00000236021_8 (sequence is synthesized)
cttgctatatttcatgggatttgacaaatgtataatgacatatatccaccattaggtatcaaacataatattttcagtgccctaaaaatcctgtgttttgcccagttatccctctcattc

SEQ ID NO: 821331 - DNA, 120 bp, Artificial Sequence
  ENSG00000236021_9 (sequence is synthesized)
ccctgactcctggcaaccactgaccttttacgcctctatggttttgcctttgccagaattttacatggctgaaaatatatagtaagtagccttttcacaatggcttctttcacttagtaa

SEQ ID NO: 821332 - DNA, 120 bp, Artificial Sequence
  ENSG00000236021_10 (sequence is synthesized)
tatgcatttaacttttctccatgtctcttcatggtttgatagcttccatctttttactgctaaataatattttctgctgaatatgccacagttaatttatgcacctagtgaagaacatct

SEQ ID NO: 821333 - DNA, 120 bp, Artificial Sequence
  ENSG00000236021_11 (sequence is synthesized)
tggttgtttccaagttttggcaattatgaatgaagctgacataaacatctatgtgcaggttcttatgaggatatattttcaacttttttgggtatatgtcaaggagagtgattgctggat

SEQ ID NO: 821334 - DNA, 120 bp, Artificial Sequence
  ENSG00000236021_12 (sequence is synthesized)
aaatggagagcaaagaaagagaatatgagctcctccagggcccagacctctttcctgtaacaaggctcagaagtacactattgtgatgaaacttagtaaaactgcctacatggaattaca

SEQ ID NO: 821335 - DNA, 120 bp, Artificial Sequence
  ENSG00000236021_13 (sequence is synthesized)
ctggaagccctgtagtaagtggactatgaccaaccaaagctggaatggagatgtttgagagggactcacttcctgcgtcatcaaaccccatgggctgaggaacttttgtctaggctgcca

SEQ ID NO: 821336 - DNA, 120 bp, Artificial Sequence
  ENSG00000236021_14 (sequence is synthesized)
cagaagccttccctgttatgtcctgtgtgtgactgcttgttcccatcttcagtgccctccctctcctcttcaggaagaagttccaggcaggcggtacctcactgaggccgtgcatgaagc

SEQ ID NO: 821337 - DNA, 120 bp, Artificial Sequence
  ENSG00000236021_15 (sequence is synthesized)
cttgacacccctccctcccttggtcttgagcctgttagaagaatgctgaggttttgggcctccacccggaggtacccagcagtaacttcaaggagctaatgagtaaagcacagtaatgag

SEQ ID NO: 821338 - DNA, 120 bp, Artificial Sequence
  ENSG00000236021_16 (sequence is synthesized)
actgaaccacaactttggcaagggcaggaaccattgtctggaacttgtttgtccatttgcagagtattgtagcatgcctttgtatatcccctcaccctttcagaacagagagattagcaa

SEQ ID NO: 821339 - DNA, 120 bp, Artificial Sequence
  ENSG00000236021_17 (sequence is synthesized)
caaaagacagatttttcaaagctacacacagccgtgatttatatcccgctctagagactgttgggatggcttctttggattgaaaagggtaccagccgatctctgttttaatgggccacc

SEQ ID NO: 821340 - DNA, 120 bp, Artificial Sequence
  ENSG00000236021_18 (sequence is synthesized)
tgggactttagctgtagtgtgtgtgtaaagcagaagaactctgatccaacctccatcttttttggaaaggcttctttgtaattgctttggactttgtgaaattcttctctcaacaaaagt

SEQ ID NO: 821341 - DNA, 120 bp, Artificial Sequence
  ENSG00000236021_19 (sequence is synthesized)
aaaaaatggtttcaagtgctataaccattttatcctgggagtatgtataaccaacaacatgaaatccccaggttgccttttttcattgctggggtaaagataatgtttgcagagcatctc

SEQ ID NO: 821342 - DNA, 120 bp, Artificial Sequence
  ENSG00000236021_20 (sequence is synthesized)
ccagggttaaggtacttttgggaactttagataattaatattcttggaggacttgcatccttaggagaagggggctgcagttgcgtagtctctaactggttagttccatacaagttccat

SEQ ID NO: 821343 - DNA, 120 bp, Artificial Sequence
  ENSG00000236021_21 (sequence is synthesized)
gttaattacaccaaggttagagggtgaaaaatcacagacaaaaattacaagtgaaaataccaccttgcagaagtgtttggtgttatctactgtggttgaatacatgctcatactatgacc

SEQ ID NO: 821344 - DNA, 120 bp, Artificial Sequence
  ENSG00000236021_22 (sequence is synthesized)
caacattcgtacttctgagtgtgtacccaacagaattgcaccaaaagatgtgtacaagaatgttcacagcagcattattcataatagccaaatcccagaaactacacaaatgaccattga

SEQ ID NO: 821345 - DNA, 120 bp, Artificial Sequence
  ENSG00000236021_23 (sequence is synthesized)
tagtagaaacaataaacaaattatggcatttttacacaatggaataatatagagcagttagaataaaggatctgcagctaaatacaatggcatggataaatctcaacaaatattgttgag

SEQ ID NO: 821346 - DNA, 120 bp, Artificial Sequence
  ENSG00000236021_24 (sequence is synthesized)
caaaagaagccaagcacaaaaaatttcacactgtaggatcccatttatataaagtccaaaaacaggctaaactagtctatggtgttagaagtcaggagagtttttactcttgggagaggt

SEQ ID NO: 821347 - DNA, 120 bp, Artificial Sequence
  ENSG00000236021_25 (sequence is synthesized)
gcagttcctagaaaagagcacaagggaggctcctggggtagtgattagagaggttcagtttgtgtgttcaacttgtgaaaattcactgagctgtgcacttatgtgcactttttgcatata

SEQ ID NO: 821348 - DNA, 120 bp, Artificial Sequence
  ENSG00000233052_0 (sequence is synthesized)
caagtgctcactattcacttgtcaaccaatgcttgttgaactcttggccggcgtggggtagggcacacccctgccttctgcctctcgggaagccattcattcattttcaagtacttgtgg

SEQ ID NO: 821349 - DNA, 120 bp, Artificial Sequence
  ENSG00000233052_1 (sequence is synthesized)
gtctcctgccacctcctctgagaagccccaccacccatggtctggggcgtgtcccccgtcgctgggataccttgctcacccagctgagcctgccactcttctgttgaatctgttaagcag

SEQ ID NO: 821350 - DNA, 120 bp, Artificial Sequence
  ENSG00000233056_0 (sequence is synthesized)
cctctccctgccgacacctccttatcctctcaacatcataactgtcttgcaggcacagacgtgtttatcggccaaactgaccctcacaaaaagctaccaccgaagtggacaggcccctac

SEQ ID NO: 821351 - DNA, 120 bp, Artificial Sequence
  ENSG00000233056_1 (sequence is synthesized)
actgtgatactcagcacaccaactgcagtgagagtccgaggactccccaactggatccatcgcaccagggtcaagctcacccccaaggcagcttcttcctccaaaacattaacagctaag

SEQ ID NO: 821352 - DNA, 120 bp, Artificial Sequence
  ENSG00000233056_2 (sequence is synthesized)
tgtttgtctgggccaatttctcctaccaagtttaaattaaccaacatttttttcttaaaaccaaaacacaaggaagactaaccacgtgcttccaggaatggcctgtatctacccaaccac

SEQ ID NO: 821353 - DNA, 120 bp, Artificial Sequence
  ENSG00000233056_3 (sequence is synthesized)
tttctatacctctcttccaaccaaaagtcttaatatgggaatatccctcaccacgatcctaatactgtcagtagctgtcctgctgtccacagcagcccctccgagctgccgtgagtgtta

SEQ ID NO: 821354 - DNA, 120 bp, Artificial Sequence
  ENSG00000233056_4 (sequence is synthesized)
tcagtctttgcactacagaggggagatgcaacaatactttacttaccatactcatatagaaagatcctgttatggaaacttaatcgaggaatgtgttgaatcaggaaagagttattataa

SEQ ID NO: 821355 - DNA, 120 bp, Artificial Sequence
  ENSG00000233056_5 (sequence is synthesized)
agtaaagaatctaggagtatgtggcagtcgtaatggggctatttgccccagagggaagcagtggctttgcttcaccaaaattggacaatggggagtaaacactcaggtgcttgaggacat

SEQ ID NO: 821356 - DNA, 120 bp, Artificial Sequence
  ENSG00000233056_6 (sequence is synthesized)
aaagagagaacagattatagccaaagccaaagcctcaaaaccaacaactccccctgaaaatcgcccgcggcatttccattcctttatacaaaaactataagcagatgcatcccttcctaa

SEQ ID NO: 821357 - DNA, 120 bp, Artificial Sequence
  ENSG00000233056_7 (sequence is synthesized)
gccaggaaaaaatctgtttgtagatctaggagaaccattgtgcttaccatgaatgtgtccaattgttgggtatgcgggggagctttatgagtgaacagtggctgtgggacgggatagaca

SEQ ID NO: 821358 - DNA, 120 bp, Artificial Sequence
  ENSG00000233056_8 (sequence is synthesized)
aatgcccgcagtcctggacacttaccaacccagtatgagggacggtgtgcatatcccgcaagtggactgataaaacccatcgcgccgtaggtgaaaacccgtcaccaaaccctaacagtc

SEQ ID NO: 821359 - DNA, 120 bp, Artificial Sequence
  ENSG00000233056_9 (sequence is synthesized)
aatgcctccatagctgagtggtggccaaggttaccccctggagcctggtctccttctaacttaagctacctcaattgtgtcttgtcaaaaaaggcctggtactgtacgaacaccactaac

SEQ ID NO: 821360 - DNA, 120 bp, Artificial Sequence
  ENSG00000233056_10 (sequence is synthesized)
ccttatgccgcatacctccgcctaagtgtactatgcgacaatcctaggaacaccagctgacaatggactgccactgacggattcctgtggatatggggaacccaggcttactcacagcta

SEQ ID NO: 821361 - DNA, 120 bp, Artificial Sequence
  ENSG00000233056_11 (sequence is synthesized)
ccttatcactggcaaggtacttgcttcctaggcacaattcaacctggattctttttacttccgaagcaggcgggcaacaccctcagagtccctgtgtatgataaccagagaaaaatgatc

SEQ ID NO: 821362 - DNA, 120 bp, Artificial Sequence
  ENSG00000233056_12 (sequence is synthesized)
cttggaggtaggagggagccaaagattgtgagaggacgagtggcctctgcaacggatcattgaatactatggtcctgccacttgggcagaggatggttcatggggttatcgcactcccat

SEQ ID NO: 821363 - DNA, 120 bp, Artificial Sequence
  ENSG00000233056_13 (sequence is synthesized)
atatatgccaaatagagcgattagactacaagctgttctagagataatcactaaccaaactgcctcagccctagaaatgctcgcgcaacaacaaaaccaaatgcgcgcggcaatttatca

SEQ ID NO: 821364 - DNA, 120 bp, Artificial Sequence
  ENSG00000233056_14 (sequence is synthesized)
aaacaggctggccctagactacttattagcagaagagggtgcgggctgtggtaagtttaacatctccaattgctgtcttaacataggcaataatggagaagaggttctggaaatcgcttc

SEQ ID NO: 821365 - DNA, 120 bp, Artificial Sequence
  ENSG00000233056_15 (sequence is synthesized)
aaacatcagaaaagtagcccgtgtaccagtccaaacctgggagggatgggacccagcaaaccttctaggagggtggttctctaatttaggaggatttaaaatgctggtggggacagtcat

SEQ ID NO: 821366 - DNA, 120 bp, Artificial Sequence
  ENSG00000233056_16 (sequence is synthesized)
tttcatcactggggtcctcctgtttctcccctgtggtatcccattaaaactcttgttgaaactacagttaacctcctgacaatccagatgatgctcctgctacagcggcacgatggatac

SEQ ID NO: 821367 - DNA, 120 bp, Artificial Sequence
  ENSG00000233056_17 (sequence is synthesized)
cccctcctcacttggggctgatgccattctaggcctcagtctgtctgcatccaggtgcttattaaaacagtgtgttgctccacaccgcctcgtgttgtctgttggcgcgctctccgggtt

SEQ ID NO: 821368 - DNA, 120 bp, Artificial Sequence
  ENSG00000233056_18 (sequence is synthesized)
ccaaccaatgcaagagccttggggctggccctgaaacctgcgaggggcttccgtccacgtccccagtggacctaccacccctccatctgggaaagcaggccacagcagccggacaaagga

SEQ ID NO: 821369 - DNA, 120 bp, Artificial Sequence
  ENSG00000233056_19 (sequence is synthesized)
attgagaaagtcgtccctttccccttttctataaccaaatagacaggaatggaagattctcctcggggcctgaaagcttgcgggatgaataactcctcctcctcaggcccagtcccaagg

SEQ ID NO: 821370 - DNA, 120 bp, Artificial Sequence
  ENSG00000233056_20 (sequence is synthesized)
tacaaacttgcaccagcagcaagatagcagaggcaggaagagagctggctggaagacacgtaccccctgaagatcaagagggaggtcgccctggtactacatagcagtcacgttaggctg

SEQ ID NO: 821371 - DNA, 120 bp, Artificial Sequence
  ENSG00000233056_21 (sequence is synthesized)
gctgggacaattcctgtttacagaggactataaaacccctgccccatcctcacttggggctgatgccattttaggcctcagcctgtctgcatgcaggcgctcattaaaacagcatgttgc

SEQ ID NO: 821372 - DNA, 120 bp, Artificial Sequence
  ENSG00000234884_0 (sequence is synthesized)
gcacagtcccagcggcctcgctgggccggcgcctcccgaccaagtctctacggtcgccctcccctcggggtggccacgagggactcctcctcctcttcctcctcccctccctccccctcg

SEQ ID NO: 821373 - DNA, 120 bp, Artificial Sequence
  ENSG00000234884_1 (sequence is synthesized)
gtctccgcctcctccttctcctcctccttcactgccccgacctcccgccccaggttccacgcgctctgatgcccgccccgctcacccagagaagccctgggccagacgtccacaacccaa

SEQ ID NO: 821374 - DNA, 120 bp, Artificial Sequence
  ENSG00000234884_2 (sequence is synthesized)
ggggttatggggaggcctctgctccctggacacagtagttctcaaactggacagtgtcaatcagcatcctccgggaggtctggggtggccccggaaatacatgtgtcccacctatcccag

SEQ ID NO: 821375 - DNA, 120 bp, Artificial Sequence
  ENSG00000234884_3 (sequence is synthesized)
caggtaatgatgaaactcctgctctggtccgggctaccggtgaacagcgcccagcgggccgggcccccaacctcgctcctgagcctgaacatccccccaaccccaccgtgagaattcagc

SEQ ID NO: 821376 - DNA, 120 bp, Artificial Sequence
  ENSG00000234884_4 (sequence is synthesized)
tggggtgacggctccccggctaggaacagagatgcccttagggagccctctgatggaagagctctccgcttaagaaggtcaccactcccttacactcagcccccctcaatctgattccct

SEQ ID NO: 821377 - DNA, 120 bp, Artificial Sequence
  ENSG00000234884_5 (sequence is synthesized)
gctatgcctgccatcaccactggccagttttaccacatgcttctcaagacccaaggcacaataggcataaagttgtcctgaaaaggacaagaggagtgtcagaagtaggaatggcagttg

SEQ ID NO: 821378 - DNA, 120 bp, Artificial Sequence
  ENSG00000234884_6 (sequence is synthesized)
aaggagcttcgtctgccagcagaaagctgaaatgacaggcaagcacaaaatatattaaggagacaaagctatgcatgagcgaaatatcaaactttcatcttctacccacttttttttttt

SEQ ID NO: 821379 - DNA, 120 bp, Artificial Sequence
  ENSG00000234884_7 (sequence is synthesized)
ttttttgcttaaaaacaggaagacagaatgtcttgtcaagggtcaccccaggaggaggagtaaattccccaaaaagcggaacatatttttatgatttaattaatacaatttctctcaatg

SEQ ID NO: 821380 - DNA, 120 bp, Artificial Sequence
  ENSG00000234884_8 (sequence is synthesized)
ttcccccagcagcacagtatattaagtttggaacaagacacacctgaaatcaaatccctgctctgtgctgggtgatcttagaggcagtcttttacctctttctactttattgttctcata

SEQ ID NO: 821381 - DNA, 120 bp, Artificial Sequence
  ENSG00000234884_9 (sequence is synthesized)
ttctcataggaaaagtggaaatgaggccttttaccccagggttgttgagaagacagaggagaaaaagcacataaaaatgcaccttgtcgggcgtggggctcacacctgtaatcccagcac

SEQ ID NO: 821382 - DNA, 120 bp, Artificial Sequence
  ENSG00000234884_10 (sequence is synthesized)
agaaagctgaaatgacaggaagacagaatgtcttgtcaagggtcaccccaggaggaggagtaaattccccaaaaagcggaacatatttttatgatttaattaatacaatttctctcaatg

SEQ ID NO: 821383 - DNA, 120 bp, Artificial Sequence
  ENSG00000234884_11 (sequence is synthesized)
attaaagtttaggctttccagagtttatattgctaacaacttgaaaggaaaaaagctaactagagaactgactggtcttatttgttttagattctgggctttactaagacttcctactct

SEQ ID NO: 821384 - DNA, 120 bp, Artificial Sequence
  ENSG00000234884_12 (sequence is synthesized)
cagaatctctggactataaacgctgggtggggtgggagctgggaatgttattctggaaaattaatcacaaatgaaaagaaaatcaactctaagactccagttagaagatttttgaaaatg

SEQ ID NO: 821385 - DNA, 120 bp, Artificial Sequence
  ENSG00000234884_13 (sequence is synthesized)
gcagaacatgactggccttcattcaagtcagaatatttaaagcaatccttgctaagaagaacttgattttgtataagcagtcccttaaatacagttgcttctcaagaaaaccacacacaa

SEQ ID NO: 821386 - DNA, 120 bp, Artificial Sequence
  ENSG00000234884_14 (sequence is synthesized)
tctgctccctggacacagtagttctcaaactggacagtgtcaatcagcatcctccgggaggtctggggtggccccggaaatacatgtgtcccacctatcccagcaggagatgttgctgag

SEQ ID NO: 821387 - DNA, 120 bp, Artificial Sequence
  ENSG00000234883_0 (sequence is synthesized)
tacacacacgcaatgacccacgagaaagggaaaggggaaaacaccaactacccgggcgctgggctttttcgacttttcctttaaaaagaaaaaagtttttcaagctgcgcgggcttcctg

SEQ ID NO: 821388 - DNA, 120 bp, Artificial Sequence
  ENSG00000234883_1 (sequence is synthesized)
tgcgcggccgagcccgggcccagcgccgcctgcagcctcgggaagggagcggatagcggagccccgagccgcccgcagagcaagcgcggggaaccaaggagacgctcctggcactgcaga

SEQ ID NO: 821389 - DNA, 120 bp, Artificial Sequence
  ENSG00000234883_2 (sequence is synthesized)
taacttgtctgcatttcaagaacaacctaccagagaccttacctgtcaccttggctctcccacccaatggagatggctctaatggtggcacaaaccaggaaggggaaatctgtggtttaa

SEQ ID NO: 821390 - DNA, 120 bp, Artificial Sequence
  ENSG00000234883_3 (sequence is synthesized)
attctttatgcctcatcctctgagtgctgaaggcttgctgtaggctgtatgctgttaatgctaatcgtgataggggtttttgcctccaactgactcctacatattagcattaacagtgta

SEQ ID NO: 821391 - DNA, 120 bp, Artificial Sequence
  ENSG00000234883_4 (sequence is synthesized)
tgatgcctgttactagcattcacatggaacaaattgctgccgtgggaggatgacaaagaagcatgagtcaccctgctggataaacttagacttcaggctttatcatttttcaatctgtta

SEQ ID NO: 821392 - DNA, 120 bp, Artificial Sequence
  ENSG00000234883_5 (sequence is synthesized)
atcataatctggtcactgggatgttcaaccttaaactaagttttgaaagtaaggttatttaaaagatttatcagtagtatcctaaatgcaaacattttcatttaaatgtcaagcccatgt

SEQ ID NO: 821393 - DNA, 120 bp, Artificial Sequence
  ENSG00000234883_6 (sequence is synthesized)
taattgcaggttttggcttgttcattataatgttcataaacacctttgattcaactgttagaaatgtgggctaaacacaaatttctataatatttttgtagttaaaaattagaaggacta

SEQ ID NO: 821394 - DNA, 120 bp, Artificial Sequence
  ENSG00000234883_7 (sequence is synthesized)
ctaacctccagttatatcatggattgtctggcaacgttttttaaaagatttagaaactggtactttcccccaggtaacgattttctgttcaggcaacttcagtttaaaattaatactttt

SEQ ID NO: 821395 - DNA, 120 bp, Artificial Sequence
  ENSG00000234883_8 (sequence is synthesized)
atttgactcttaaagggaaactgaaaggctatgaagctgaatttttttaatgaaatatttttaacagttagcagggtaaataacatctgacagctaatgagatattttttccatacaaga

SEQ ID NO: 821396 - DNA, 120 bp, Artificial Sequence
  ENSG00000234883_9 (sequence is synthesized)
taaaaagatttaatcaaaaaatttcatatttgaaatgaagtcccaaatctaggttcaagttcaatagcttagccacataatacggttgtgcgagcagagaatctacctttccacttctaa

SEQ ID NO: 821397 - DNA, 120 bp, Artificial Sequence
  ENSG00000234883_10 (sequence is synthesized)
gcctgtttcttcctccatatggggataatactttacaaggttgttgtgaggcttagatgagatagagaattattccataagataatcaagtgctacattaatgttatagttagattaatc

SEQ ID NO: 821398 - DNA, 120 bp, Artificial Sequence
  ENSG00000234883_11 (sequence is synthesized)
caagaactagtcaccctactttattagagaagagaaaagctaatgatttgatttgcagaatatttaaggtttggatttctatgcagtttttctaaataaccatcacttacaaatatgtaa

SEQ ID NO: 821399 - DNA, 120 bp, Artificial Sequence
  ENSG00000234883_12 (sequence is synthesized)
ccaaacgtaattgttagtatatttaatgtaaacttgttttaacaactcttctcaacattttgtccaggttattcactgtaaccaaataaatctcatgagtctttagttgatttaaaataa

SEQ ID NO: 821400 - DNA, 120 bp, Artificial Sequence
  ENSG00000275278_0 (sequence is synthesized)
aatcaatatggctggcaatgagacccataatccaaactctgtgatcacacagcacaccctcgtctgaaaatattttatgacagcagtaacagagccaagcaccaggtctcgaaggtctta

SEQ ID NO: 821401 - DNA, 120 bp, Artificial Sequence
  ENSG00000275278_1 (sequence is synthesized)
ttttctgactctacgttccatggaaatacctggactagctattccaaaatctccccctatgctgtggcagctacttatgaaagccctggggatcctcacgccaaagattctgattcagta

SEQ ID NO: 821402 - DNA, 120 bp, Artificial Sequence
  ENSG00000275278_2 (sequence is synthesized)
actaccactattcatataaaagtgtgcattaataataaaaaaagattggcttcattattgaaataaaaatcagaggcgactactcataggaaatccaatctgctcagaggtaataaaata

SEQ ID NO: 821403 - DNA, 120 bp, Artificial Sequence
  ENSG00000275278_3 (sequence is synthesized)
aaacagttaagttatattagatttaatttcccccttacctctggatgccgtagttttatttatctgagtgcctatcctgtatatatgagttcaaatgtttgaataaaatttacaagtgat

SEQ ID NO: 821404 - DNA, 120 bp, Artificial Sequence
  ENSG00000258265_0 (sequence is synthesized)
tagtttgcattacctccaagagaatagccatgtttgcttttctctgctgccacaccagcatgttatgttttgacttaggacaaatggccactctgaccagcgtgtgatggcaccggtacc

SEQ ID NO: 821405 - DNA, 120 bp, Artificial Sequence
  ENSG00000258265_1 (sequence is synthesized)
gttgagcattccccacgcctgttggaatggcaatcccttggaaatgtcttctcaatagttactacccatagtttggtttgttgcaggctttcacactactaatctgggctgaatccttga

SEQ ID NO: 821406 - DNA, 120 bp, Artificial Sequence
  ENSG00000258265_2 (sequence is synthesized)
attactttgtctaccaagggtttcaaagaacttgataaacttgttctaattagccaacatattcatccatgttgtccgtataccaggtgtaaaaataaaacgtttcttaatgcacacagg

SEQ ID NO: 821407 - DNA, 120 bp, Artificial Sequence
  ENSG00000258260_0 (sequence is synthesized)
atagtccctggccaaatgcaaggaaactgttcctcagtgccttttctccccctccccatccagttcgtggatccccgtaagagccctaacttgggactgagcacggagtacgagtctgac

SEQ ID NO: 821408 - DNA, 120 bp, Artificial Sequence
  ENSG00000258260_1 (sequence is synthesized)
acttgggactgagcacggagtacgagtctgacacaagctcagactaactgacttgggaaatgctagctatacttaaagaataaccctgtcaggtcggtgcggtggctcacgcctgtaatc

SEQ ID NO: 821409 - DNA, 120 bp, Artificial Sequence
  ENSG00000258260_2 (sequence is synthesized)
ttgcccaccgatgataccctgacattcttgcctggacagggttatttggagggaaaagggaggtgcaaggatgcaaggcagagaatgcttaccccatgattctacgctccgagtaagcct

SEQ ID NO: 821410 - DNA, 120 bp, Artificial Sequence
  ENSG00000258260_3 (sequence is synthesized)
ttcgcttgttggtgaagggagcagcaaatcccatgaaggaacggctcgaaggtaagccagcctcagccgccaagatctgggcagcccgaggcaagaggaggctgcaggaggtcagaaacc

SEQ ID NO: 821411 - DNA, 120 bp, Artificial Sequence
  ENSG00000224635_0 (sequence is synthesized)
tttttttaattactcctttataccagtaagcaaacttggagaatctattcccaaaaattttacagggatgtggagtagacacttttgtctaccattaaggcttagctggagtcagaaaga

SEQ ID NO: 821412 - DNA, 120 bp, Artificial Sequence
  ENSG00000224635_1 (sequence is synthesized)
ttgtctaccattaaggcttagctggagtcagaaagaaagatataattaggggtcacaaaaggtttttacctgatgctcttttttttgttattgttgttgttttgtttttgtttttgtttt

SEQ ID NO: 821413 - DNA, 120 bp, Artificial Sequence
  ENSG00000224635_2 (sequence is synthesized)
agagaagcagatgacaagaggctcacatgggtgtcccaatttcccttctctggactttgacttggagagggtgcaagtacattagagagaacactgagaacaagagaggagacattgact

SEQ ID NO: 821414 - DNA, 120 bp, Artificial Sequence
  ENSG00000224635_3 (sequence is synthesized)
ttgcttcccatttaacactgtgcaagaggccacctcttgaattgccccctgccctaaactgtagtatagccatggcaactggacagcttggtgtggttgggcagagggacgtatcttcgc

SEQ ID NO: 821415 - DNA, 120 bp, Artificial Sequence
  ENSG00000224635_4 (sequence is synthesized)
catcttgggctgccataacaaaattccatagattgagtgatttaaacaacagaagttaattttctcaaagttctgggggccaggaagtccaagatcaaggtgctggctgattcaatttct

SEQ ID NO: 821416 - DNA, 120 bp, Artificial Sequence
  ENSG00000224635_5 (sequence is synthesized)
gatgagagctctcttcctggcttgcagatggctgccttgctgtgtcctcatatggtggagagcgagggaatggcctccctggtgtctcttcttataagggcactaattctatcagattat

SEQ ID NO: 821417 - DNA, 120 bp, Artificial Sequence
  ENSG00000224635_6 (sequence is synthesized)
ttatggctccacccttatgacctcatttaactttaattacctccttaaaggccctatctgtaaatatagttacattgagggttaggctttgtgttagtctgttctcacgctgctaataaa

SEQ ID NO: 821418 - DNA, 84 bp, Artificial Sequence
  ENSG00000224635_7 (sequence is synthesized)
gtcatggtgaacggggaatgaggagcagtcacgtcttactaacggtggcaggcaagacagcttgttcaggaaaattcccgttta

SEQ ID NO: 821419 - DNA, 120 bp, Artificial Sequence
  ENSG00000224635_8 (sequence is synthesized)
gtggcaggcaagacagcttgttcaggaaaattcccgtttataaaaccatcagatctcctgagactacaatgagaacagtatggaggaaaccacccccttgattcagttatctccatctgg

SEQ ID NO: 821420 - DNA, 87 bp, Artificial Sequence
  ENSG00000224635_9 (sequence is synthesized)
ggcttcaatatgtgacttttgggggtacaaagttcagtccatagcaattcagtcctttggaatttagcatcctggagctgccctggg

SEQ ID NO: 821421 - DNA, 120 bp, Artificial Sequence
  ENSG00000224635_10 (sequence is synthesized)
ttcagtcctttggaatttagcatcctggagctgccctgggatcctgaatggtctacgtcaacccagaggtggctgaggatgtggctgaagagtttcctagcaggggccacagtaccagag

SEQ ID NO: 821422 - DNA, 120 bp, Artificial Sequence
  ENSG00000224635_11 (sequence is synthesized)
tttgcatgtgtaataggagtgtcccttgttctccagccttcaggagtcaccctttccttgaacgtcctctgaatatcagccccagatctgtaggaagtccacttgagtcttcagtaaatg

SEQ ID NO: 821423 - DNA, 120 bp, Artificial Sequence
  ENSG00000224635_12 (sequence is synthesized)
acttgagtcttcagtaaatgctgatatgttctttttctttgagacggcgtctcgctgctgactcccaggctggaatactctggcgtgatctttgctcactgcaacctccaccgcctgggt

SEQ ID NO: 821424 - DNA, 120 bp, Artificial Sequence
  ENSG00000224635_13 (sequence is synthesized)
agcctcctgagtaactgggactacagcatcccccttgggaggatgaggaagaaggtcacattctcaggatggtggagaaaaaagctagaaggagactgggtacctgatgtccgtggtgct

SEQ ID NO: 821425 - DNA, 120 bp, Artificial Sequence
  ENSG00000224635_14 (sequence is synthesized)
tacctgatgtccgtggtgctgccctgttagctctggactgcctttcttcaaattccttattaagaaaaacaacctctgtcttgactgatatgcttttatttgtttttttgtttgtttgtt

SEQ ID NO: 821426 - DNA, 120 bp, Artificial Sequence
  ENSG00000224635_15 (sequence is synthesized)
atttaattcccaactgatataattatgtttagtgcaaaggctcaactgggtatgattgtcatgagatcacttcagccaataaacagaaattatgataatttttttttttaatttttttgc

SEQ ID NO: 821427 - DNA, 120 bp, Artificial Sequence
  ENSG00000224635_16 (sequence is synthesized)
tgagccaccacgcccagccagaaatcacttttcataatttacacacattgactttcttagatgacagacacaggccaagctcaaatccagaggagcagctggagggaaatggtgcatgtg

SEQ ID NO: 821428 - DNA, 120 bp, Artificial Sequence
  ENSG00000224635_17 (sequence is synthesized)
aaatgaacaggcattacttttcactggtgcatgctgggaggaggtgatccatggccaggttgtgtagctgccagcccatcacattcatcaggaagctcatctgcaactccgatacacaga

SEQ ID NO: 821429 - DNA, 120 bp, Artificial Sequence
  ENSG00000224635_18 (sequence is synthesized)
gtcaaggctctggggtcagaaggacagctgagattctctagacaataagtatcatttggactcacaaacctcttgaatcattgtaatgatcctctggcactttgcagaaaataagttcta

SEQ ID NO: 821430 - DNA, 74 bp, Artificial Sequence
  ENSG00000224635_19 (sequence is synthesized)
ttgtaatgatcctctggcactttgcagaaaataagttctaccctctgtacataaaaaggtgtgttcggccaggc

SEQ ID NO: 821431 - DNA, 120 bp, Artificial Sequence
  ENSG00000235597_0 (sequence is synthesized)
attgtgagaagtttttatgctgctctgggtcatggcttggagactgcctcctcagagcttaaatgggcagatttcatattcttcccatccttgggaatacttcataaaacagaattacaa

SEQ ID NO: 821432 - DNA, 81 bp, Artificial Sequence
  ENSG00000235597_1 (sequence is synthesized)
cttcccatccttgggaatacttcataaaacagaattacaagagtccatgtttttttcggagcaccgtgcagtgggagagcc

SEQ ID NO: 821433 - DNA, 120 bp, Artificial Sequence
  ENSG00000235597_2 (sequence is synthesized)
tttactttttatttcctctttaaagaaaatgattggcagcactcaacctcaaggaactgatctatcaaaaccaagctgggataagtatttctttgagaaataatatatatttaccaacag

SEQ ID NO: 821434 - DNA, 120 bp, Artificial Sequence
  ENSG00000235597_3 (sequence is synthesized)
gctctattctgcccccttgtttcacagcaccttgaatatcacttccttttcctgcccaaagcaggaggtaaccctgtattaaaagcatagtaggtgtgtgtgtgtacaatacacacatac

SEQ ID NO: 821435 - DNA, 120 bp, Artificial Sequence
  ENSG00000235597_4 (sequence is synthesized)
agcacacatgtctctatttagagattccatgatatgtgttctatatacactttacagtcccttttcttaatgtcaaaaatataatttccagcgtctaaagagtgttttcaaagacttttg

SEQ ID NO: 821436 - DNA, 120 bp, Artificial Sequence
  ENSG00000235597_5 (sequence is synthesized)
ccctattttttaaaatagtgtctaaatatgattaagtgtcttcccagagaaaagtcaaagaggctcctagtgttaatttccatattgcttaagacttaagcttttaatttattttatcaa

SEQ ID NO: 821437 - DNA, 120 bp, Artificial Sequence
  ENSG00000235597_6 (sequence is synthesized)
ggttgagggagtatagtaattgttggaacaacgcccttccaaaagaaatcgcctgcacttgtttttaagttcaatttgttttctcacacagatttttgatacactcttaaataaactaga

SEQ ID NO: 821438 - DNA, 120 bp, Artificial Sequence
  ENSG00000235597_7 (sequence is synthesized)
acaattattttaatgtggcagagttgtaaccaggaaattgcatatattttcataaactaggctgttatagatttattaatatttattaataacattattttaagaaatttttttaacgtc

SEQ ID NO: 821439 - DNA, 120 bp, Artificial Sequence
  ENSG00000235597_8 (sequence is synthesized)
cgtctttcaaccctgaaagggcctgcttgaaacatacacggcagcaaaatcactggagtccagggtttttgtcacacacacacacagcacagatttttttgattatgtagatttcttttc

SEQ ID NO: 821440 - DNA, 120 bp, Artificial Sequence
  ENSG00000235597_9 (sequence is synthesized)
ctactgcagtttcatatgcaaagcatgcatcagccacatccatgctatctcctaaagcagtcattctgaaacccaatctggggacagtgcagactaaataaaatttcattttgatttggc

SEQ ID NO: 821441 - DNA, 120 bp, Artificial Sequence
  ENSG00000235597_10 (sequence is synthesized)
ctcccgctgcgaatgggactgctttgtctcagccgacagaaccagcaagccagaaagggaatgaagacatttggagaagaagcgtttactgaaaggagattcctgggctggaggaaaacc

SEQ ID NO: 821442 - DNA, 120 bp, Artificial Sequence
  ENSG00000235597_11 (sequence is synthesized)
atgatctacagttcatgttgacagatattgtatttttggtcctagatctgacttttgaaatgacttatcacaaattcaaatttagcaatcatgagtgaagtacccacgatgtgctaagca

SEQ ID NO: 821443 - DNA, 120 bp, Artificial Sequence
  ENSG00000235597_12 (sequence is synthesized)
tctacctctgcagatagaagaacacttactgttcctgagcatgggagggaatagaagttcctgggtcctggcctcacctcatcaggcactgccaaatttgacacctccttcctgttcacg

SEQ ID NO: 821444 - DNA, 120 bp, Artificial Sequence
  ENSG00000235597_13 (sequence is synthesized)
gcagtcctttgcgatagggtattagatgccaccaagtagctgcataactcacccatttggtcagagcctgggtctaagccaggtctgacagactccaaagcaagccctgtttacagcatg

SEQ ID NO: 821445 - DNA, 120 bp, Artificial Sequence
  ENSG00000235597_14 (sequence is synthesized)
actgggatccagtgggtaagaccaacctgtcaatgcccaagtgcagatgcaataatagtgcttcaactgattgttgcaaacccctcatgagggatgccaaatcccagtgcagatggtaac

SEQ ID NO: 821446 - DNA, 78 bp, Artificial Sequence
  ENSG00000235597_15 (sequence is synthesized)
ttttttgagatagagtctcctctgtcacccaggctggagtgcaacagcatttctctcgcctcagcctcccgagtagct

SEQ ID NO: 821447 - DNA, 120 bp, Artificial Sequence
  ENSG00000235597_16 (sequence is synthesized)
ccggccccaatattctttcttactagacactgtgtaagctaattattcagcaagtattttgcactgaactctaaataggtaagtattttgtgtccattttacagacaagagaaataaaat

SEQ ID NO: 821448 - DNA, 120 bp, Artificial Sequence
  ENSG00000235597_17 (sequence is synthesized)
aggtaaagtatttccccaaagctatgataaatgaatcccatagctagaaatggcagaaaacccatggaaacttctatggggagtggatgtctgccttaccttggcacaatgcttggttct

SEQ ID NO: 821449 - DNA, 120 bp, Artificial Sequence
  ENSG00000235597_18 (sequence is synthesized)
cagatatcatttcagtgacattgccaaatgggagaaaccatgtctggtacacgggactcaagctgcctcaaaatatcctgaatgcattttttcaggggagaaaatccatttgaataagaa

SEQ ID NO: 821450 - DNA, 120 bp, Artificial Sequence
  ENSG00000235597_19 (sequence is synthesized)
tagctagttatagcttattatgtgccagacactattcaaagtgtttaatgtgtattaacttctcaaaaccactctataagttaggtactatgatttccatctccattttacagacgaggg

SEQ ID NO: 821451 - DNA, 120 bp, Artificial Sequence
  ENSG00000235597_20 (sequence is synthesized)
aactgagctgtcaaaactaagtgacttgattgaggccatgcagctggcgaggggaggaccaggatctgaacccaactgggtctcccaagcctgggccactgaaccatttcacctcttgga

SEQ ID NO: 821452 - DNA, 120 bp, Artificial Sequence
  ENSG00000235597_21 (sequence is synthesized)
aaaacttaatggtcagagtggcccacccagtccatggacagcatggagtggtatggtggaagaggagggaagaaaacctgtgtattgtaagtcatattcttctatggtgtgaaggttaac

SEQ ID NO: 821453 - DNA, 120 bp, Artificial Sequence
  ENSG00000235597_22 (sequence is synthesized)
gtaagttttaagaaagtttttttttttaattttattatatgatcttgctctaaagggatgtaaattcagatgctgaattgcacacatcctttctctttcatattttcaatattgaacgta

SEQ ID NO: 821454 - DNA, 120 bp, Artificial Sequence
  ENSG00000235597_23 (sequence is synthesized)
atttcaatatttaacataaaacaatgagtacattgtctccacctcattgtttttgggtggtgtttgtgaggagcctgcgttctttggaaggaagacctttcagatgacctgaccagtcct

SEQ ID NO: 821455 - DNA, 120 bp, Artificial Sequence
  ENSG00000235597_24 (sequence is synthesized)
cctcttcagaacccggatgctggcgaagcagtttgaattttatgcttgtgaaagggctccgttgatgattttgatgtctgcagctttccacccgtatgaccagacacattctcaccagct

SEQ ID NO: 821456 - DNA, 120 bp, Artificial Sequence
  ENSG00000235597_25 (sequence is synthesized)
ccatatatcaagataaggaggggaaacctggtagcttttccttctgttaactgctggcatcagctgagtgatgcagacatttctctattaagaactgagctgagactgaagcttcatttt

SEQ ID NO: 821457 - DNA, 120 bp, Artificial Sequence
  ENSG00000235597_26 (sequence is synthesized)
gtatgagactgtgcagaggtcgtctaaagtctctcccaggtgtggttattaagatcctggatttgaaactgtgacctactggtttgccagatgccaagaacaaatgctctgaaattgatt

SEQ ID NO: 821458 - DNA, 120 bp, Artificial Sequence
  ENSG00000235597_27 (sequence is synthesized)
tgccaaaagacatgatgagctgctctaacttgcctgggaagagtggaatatttaacctgtgggtgagactccctcttgctacctatcagctttgccactgctctgatagagaaacatctt

SEQ ID NO: 821459 - DNA, 120 bp, Artificial Sequence
  ENSG00000235597_28 (sequence is synthesized)
gggagcagagttggtaagagtgaatcagacgtatctgccggaataggactcgtggcacctgcttgttcgatccctcatttccaccccctctatcctttgcctattgtcagtcattgtggt

SEQ ID NO: 821460 - DNA, 120 bp, Artificial Sequence
  ENSG00000235597_29 (sequence is synthesized)
tggtccattcagaagaatcgtgaatattcatagccaccctaatttaccaatatatattcaataatgtcagagatctgtacatgtgattcctgagcttattacagtaacaagtttctccaa

SEQ ID NO: 821461 - DNA, 120 bp, Artificial Sequence
  ENSG00000235597_30 (sequence is synthesized)
ggctttccctttggagccgggaatataaagacgtggggccatcgggctgaccccgagggccttctgtcaatcatggcctcgccatctctgctccctttcacaccaggcagctggacccat

SEQ ID NO: 821462 - DNA, 120 bp, Artificial Sequence
  ENSG00000235597_31 (sequence is synthesized)
ggaggataaactgcttccctagaaatcctctccagcattcttgccaccacgactttgggacacattgaccatgaggaggagctggtcaatgatggacaggagtccagattagcagagatg

SEQ ID NO: 821463 - DNA, 120 bp, Artificial Sequence
  ENSG00000235597_32 (sequence is synthesized)
tggtaataaggacaccgatgcctaaatacttgaaatatccaataggaagcattccacctttgtgcaaatgcgaaccacatctcaccaagttcaggccaaggctgccaccggtgacgtttt

SEQ ID NO: 821464 - DNA, 120 bp, Artificial Sequence
  ENSG00000235597_33 (sequence is synthesized)
ggaaaagaaaaaaaaaagcggggggagaggagagaaacagagaagcaaggaatgcagaagagagcagaggccacaaaaacagcagcaacgtgtcctgtgtattctgtttccttgtaaaac

SEQ ID NO: 821465 - DNA, 120 bp, Artificial Sequence
  ENSG00000235597_34 (sequence is synthesized)
tatgaagcatgttaaggagatacttcattttttgaggattcatactcttgtttatattataataaaaacaacccatgttctttctaaaaatttaggcaatgccttcgtgcacataaaagt

SEQ ID NO: 821466 - DNA, 120 bp, Artificial Sequence
  ENSG00000235597_35 (sequence is synthesized)
aaaacaaaatcacctgtaatcctaccacacgcagatcagcacttgctaatcttttcacagggatcctaagaatatcctattctctatagaatatagttgatttatgttacctaataacta

SEQ ID NO: 821467 - DNA, 120 bp, Artificial Sequence
  ENSG00000235597_36 (sequence is synthesized)
actgttaaccattttaaaattcttcagttttacattatgctagaaaaaaggagccgtcactctacgtgacatttctgtatattggtttattcattcaataaacattttttaagtacctac

SEQ ID NO: 821468 - DNA, 120 bp, Artificial Sequence
  ENSG00000235597_37 (sequence is synthesized)
tgctttgtctcagccgacagaaccagcaagccagaaagattgaagaacaaaatgaaagttagttaaagaagacgttgaagaaacaatagtgtgaaaacagcacgaaatgtcatttggtaa

SEQ ID NO: 821469 - DNA, 120 bp, Artificial Sequence
  ENSG00000235597_38 (sequence is synthesized)
atatgccacagcctcacataaggaagaggaaaatggcagtgtgggccatgattggcaggtctggatccatagactgtgatttccaggatcacccaacaggaatgaagacatttggagaag

SEQ ID NO: 821470 - DNA, 120 bp, Artificial Sequence
  ENSG00000235597_39 (sequence is synthesized)
gcatggagccctctgaccaagaatctgcggaggtcatccctcacctccagagttggtcttgtccctagcacccacgtgtgctctgtggctcagaatggtctacaggatcttccaaatcca

SEQ ID NO: 821471 - DNA, 120 bp, Artificial Sequence
  ENSG00000235597_40 (sequence is synthesized)
agaaaggcaaagagtggaagactttgctgccgcctggggctcttccccagctcctgagttcctgctctggcagcaattcagctgaaacaagaagagtattggcgagtcagcggatgggag

SEQ ID NO: 821472 - DNA, 120 bp, Artificial Sequence
  ENSG00000235597_41 (sequence is synthesized)
cctctctgtcactgccccatgtgatagcagcgtgggcactggccaaattcttctccacagctcctttattctctgaatccccactggccaggagtcagagaaccaagcagggacaagaac

SEQ ID NO: 821473 - DNA, 120 bp, Artificial Sequence
  ENSG00000235597_42 (sequence is synthesized)
actgtaggagaatctggccccatttaatccgcagtaccctgccagaaaaagaaggagaggctgatccccagtaagagggaacagagtggcacccacaaatacggaatgaagacatttgga

SEQ ID NO: 821474 - DNA, 120 bp, Artificial Sequence
  ENSG00000235597_43 (sequence is synthesized)
ctactcccaacgcaggccacctgtcttgaagatgtgtatctatagtcagagggaggagccatgtgcaagcgtttggctggatcactacaaatctatcatgactctgggaaatcaaccgct

SEQ ID NO: 821475 - DNA, 120 bp, Artificial Sequence
  ENSG00000235597_44 (sequence is synthesized)
gtatgagatcccggcgattgatgagggaactcactttcatttaaaagggacagcaagcataattctcaatgcacacatagtctcaatggagtggattttcatggactgactcaaggtata

SEQ ID NO: 821476 - DNA, 120 bp, Artificial Sequence
  ENSG00000235597_45 (sequence is synthesized)
ctgctctaaatcctactgtaaggcttcctcatcaagttacctaccttctaattgagtctcctcatcggctgaaatgtttactcacatggagttaatgacagtgtctgcattagaggattt

SEQ ID NO: 821477 - DNA, 120 bp, Artificial Sequence
  ENSG00000235597_46 (sequence is synthesized)
agtcaagatcaaattagatattgcaatggagtgctgaggacaacagctggcatgcttaaaatgcttgctaaatgtgtacaagtgcacaagttctgttttattaataaaaaccaacaccta

SEQ ID NO: 821478 - DNA, 120 bp, Artificial Sequence
  ENSG00000235597_47 (sequence is synthesized)
gtgcctgtgcatcctctccagctcctccaggggcctgtgaggttgataagaaacgcctcactcctttcgctcgaggtgcccatttctggctactctgtgaccacttgcactggctttgat

SEQ ID NO: 821479 - DNA, 120 bp, Artificial Sequence
  ENSG00000235597_48 (sequence is synthesized)
tttattcttttaagacaatatgtttggatgtctttggttgtacagaattcaaattattaataatgttcacaaaagttgccctgtatttttatgctgaaatacaacaaaatgtcaacttgg

SEQ ID NO: 821480 - DNA, 120 bp, Artificial Sequence
  ENSG00000235597_49 (sequence is synthesized)
ttccagtgacctttataccgtacatattatgtttattgtagttctgtattgtagctaaatttattatctaacttgttgatgccaataagctgatgcatatgaaaggtacctgcaaaaaaa

SEQ ID NO: 821481 - DNA, 80 bp, Artificial Sequence
  ENSG00000235597_50 (sequence is synthesized)
ggagattttgttcaagccatggatcacctctggttcgtgtttggtggtggagggaagatcttaattactaaccctacgca

SEQ ID NO: 821482 - DNA, 120 bp, Artificial Sequence
  ENSG00000235597_51 (sequence is synthesized)
aagaagccataaaagtattatgataaaatatcagaggaagatataaaattggggggaggtgaagttatactttgcagcatttgctcacgatatttgagagagtaaacttttctgtctttt

SEQ ID NO: 821483 - DNA, 120 bp, Artificial Sequence
  ENSG00000235597_52 (sequence is synthesized)
ggcaaattgtgcgcagagatgttatttattaatgagttaactttctgcattctcatcgtctttcctttctagaggatgctgcaagcccagggaatgaagacatttggagaagaagcgttt

SEQ ID NO: 821484 - DNA, 120 bp, Artificial Sequence
  ENSG00000235597_53 (sequence is synthesized)
atgtaaatgatggctgagtaacacagaatccatctcccagtcaccatcattgagaccagttttactcaatgataataattttcgtgattgcagacttcagagtgatcagaaatatgcttt

SEQ ID NO: 821485 - DNA, 120 bp, Artificial Sequence
  ENSG00000235597_54 (sequence is synthesized)
agctgttgcatttatctactgctggtacttgacccttaattaaattctgaaacttttttatataataaagtaaaatacagctgacacttctgttcaaacaaagaggctcaaacacagatc

SEQ ID NO: 821486 - DNA, 120 bp, Artificial Sequence
  ENSG00000235597_55 (sequence is synthesized)
aagttctgtgggttctttaaactttccatcttaatatctagactattcaaagtgagtcttcaaaactatgccacttatgaagatccacacagcttagtaagctattgcatcgagttttgt

SEQ ID NO: 821487 - DNA, 120 bp, Artificial Sequence
  ENSG00000235597_56 (sequence is synthesized)
aaaggaatattttcgtcataaatttgttcttgtcttaaaaagagaaagccaaggcaaattttaaagcagcattttgactttaatgaaaaattgattggctaaaacagatgtcagactgaa

SEQ ID NO: 821488 - DNA, 120 bp, Artificial Sequence
  ENSG00000235593_0 (sequence is synthesized)
aattctaaacagcttgctctagccacaaaaaggatcattcatgtaaatcagagataaaaaccaaactgcgtttggtaaggatactttcttctcaataccctggaggttgtctcattcccc

SEQ ID NO: 821489 - DNA, 120 bp, Artificial Sequence
  ENSG00000235593_1 (sequence is synthesized)
aggggtgtgttttttttaaaggcaatatgcagatgaggtaggtgagcatgtgacagaacaatcaaaattcatgcatgatgagaaggatcgaatgcctgcacttggaattaattttggaag

SEQ ID NO: 821490 - DNA, 120 bp, Artificial Sequence
  ENSG00000235593_2 (sequence is synthesized)
atatctcagtctgaccactgccagcttgaccttctcattatttagtatgaaaatcccagggcttctgagagccacaccccacccaaggaagtttaacattggagttcacgacatgatttc

SEQ ID NO: 821491 - DNA, 120 bp, Artificial Sequence
  ENSG00000235593_3 (sequence is synthesized)
cattctatggaagaattatttatgctcagttaaatgctgcaagatgttctgtacatattacagccaatgtgtactgccacaaatcaatcactttgtatacctccaaacacattttcaact

SEQ ID NO: 821492 - DNA, 120 bp, Artificial Sequence
  ENSG00000235590_0 (sequence is synthesized)
gaagaggtgctgctggggtggttggaagccggtggggggcgggtgtatggcggctaggcctggaagaccacgaggaccgctagcgccgtggggtcactcttcctcatgccacaggttgcc

SEQ ID NO: 821493 - DNA, 120 bp, Artificial Sequence
  ENSG00000235590_1 (sequence is synthesized)
gagcctcgggggagaggtggggtcccaggggccaacccttgggtgtgttgatggcggcaggctaacccagccaacggggtgccactgccgggcaaggtgaggagcaagaagatttccagg

SEQ ID NO: 821494 - DNA, 120 bp, Artificial Sequence
  ENSG00000235590_2 (sequence is synthesized)
gagttgaggccccagggatgctgagcctgcacaagtggaagtgactggctaccagactctgaaaaacctaagtcctttagacttcagtgtgctgaaagttctcccattgagagcacttat

SEQ ID NO: 821495 - DNA, 120 bp, Artificial Sequence
  ENSG00000235590_3 (sequence is synthesized)
gcagttgggtgaactatctgcatgaaagtgacatttgctcatctgtctttctcgctgaagtcatcgtctaaaggatatgttgaagccgacctcttcctccccaaagagagcgtgtcagga

SEQ ID NO: 821496 - DNA, 120 bp, Artificial Sequence
  ENSG00000235590_4 (sequence is synthesized)
cgccttcccttccgaaggtgcgttaccagattgctgccgtttttgtgctgggtcatcagagcagattcccctccaggttacagattaaacttaactctacccgtgctgaaaatggccgga

SEQ ID NO: 821497 - DNA, 120 bp, Artificial Sequence
  ENSG00000235590_5 (sequence is synthesized)
gcacgccgcctcgcctcccctccccaaggctgccggagccgccggcccctgcctccttttcgacgactgatcgtccaaggactggcgccggatccaacacctttccccagctctgcgcgt

SEQ ID NO: 821498 - DNA, 120 bp, Artificial Sequence
  ENSG00000235590_6 (sequence is synthesized)
accgcgctctttggaaacgaattggtccctgtctgcttccaagggtccctggaaccttctgcagctgtgcctctccagagctccgcctcattagtgccacgttcctggtttgaaaaccat

SEQ ID NO: 821499 - DNA, 120 bp, Artificial Sequence
  ENSG00000235590_7 (sequence is synthesized)
agtacttcaacctcttctagatgggagttaacctttgccctctgaaagaaaggtttgataagcaaagagagtttggtgagcaagatccttgaggtaagagctgatctctgacgtccgctg

SEQ ID NO: 821500 - DNA, 120 bp, Artificial Sequence
  ENSG00000235590_8 (sequence is synthesized)
ggaactggctgctctgcaggtttctgtatcacattttctgcacatgtccattagaattggagatggggcgtatctagtgttgaataaaggcccggcaggccctcccagatgcaccctgtc

SEQ ID NO: 821501 - DNA, 120 bp, Artificial Sequence
  ENSG00000235590_9 (sequence is synthesized)
gggcgggcacaggtcgttgtaattatggcgagctcggcgccactgctgagcccgggacctccgatccatcctcttaggcacacaccgagaagccggcctgccctctggctctgcagagag

SEQ ID NO: 821502 - DNA, 120 bp, Artificial Sequence
  ENSG00000235590_10 (sequence is synthesized)
ttagtgacgccggatggggatgggtccctttttggaaggggactccggggacgcgtcacggcgggtgggcttctttggcttgcagcgacgccgctgcttctcctccttgggctccttcga

SEQ ID NO: 821503 - DNA, 120 bp, Artificial Sequence
  ENSG00000235590_11 (sequence is synthesized)
ctcttcggggtcccttggatctttgtcctcgggcttgagctcctccccttccctggggctctggggctcctgagtgctgggcggcgcgcgacttggggaggcgtcggggcttcgcaactt

SEQ ID NO: 821504 - DNA, 120 bp, Artificial Sequence
  ENSG00000235590_12 (sequence is synthesized)
gagagcgtgcagacgctgggtgagggactggccgaaggtggagtgcttgggcaccaccgggccgcgatcgtcttcaggctcggtctcgggctcagtggtgggggcggtctcaggctcggt

SEQ ID NO: 821505 - DNA, 120 bp, Artificial Sequence
  ENSG00000235590_13 (sequence is synthesized)
ctcgaagtcggtctcggactcgatttcggactcggtctcgctctcggtctcgtagtcgaactcttcctcgtactctaggcactcggggagggacagctcaaggtctgcctcctcgtgctc

SEQ ID NO: 821506 - DNA, 120 bp, Artificial Sequence
  ENSG00000235590_14 (sequence is synthesized)
gtggtcagattccgattcgggggactcagggaatacctgggcgccggagcggtggtgggcgttaaggaagctccggcgctgttgggcagccgcgcgctgctgggcacgggcgttggaggt

SEQ ID NO: 821507 - DNA, 120 bp, Artificial Sequence
  ENSG00000235590_15 (sequence is synthesized)
gtgagaagctggcccggaggtcccagcctcacctccttgtgaggagaaaaagggaagcacctaccttcctgaccacttaagaactttctaaagctccgcgccttgcttgcctctctgagc

SEQ ID NO: 821508 - DNA, 120 bp, Artificial Sequence
  ENSG00000235590_16 (sequence is synthesized)
aagaagaagggatgggaaaaaaggggaaagttctgtctcctcccgggctcctctcgctgagtcttagattccgcagcctaagactcgagagaggtgcctccgccggtcctcttgcctggg

SEQ ID NO: 821509 - DNA, 120 bp, Artificial Sequence
  ENSG00000235590_17 (sequence is synthesized)
ccggacttctgccgggcatgtgcagtaaggaggtgggggccacctccccgcgagctgcgtggtggcgccgagcctgtggcgcagaccctagtgggccggcaggtggcaggagggaacctt

SEQ ID NO: 821510 - DNA, 120 bp, Artificial Sequence
  ENSG00000235590_18 (sequence is synthesized)
gtttgaaaggatttgggcgaagcgatgggcggggggcctggcgggtggcaaggagcaagcggcaagctagccccaggtccagtacttgggcaggtgggcgcaggctcccgtggggtcgtg

SEQ ID NO: 821511 - DNA, 120 bp, Artificial Sequence
  ENSG00000235590_19 (sequence is synthesized)
cccctccccagtttccccagttattggggaaataaacacagcctgggagcagctaaaaacccagaaccccaaatagcaaatattcaggggaatgagggtctgtctatacacgagtattaa

SEQ ID NO: 821512 - DNA, 120 bp, Artificial Sequence
  ENSG00000235590_20 (sequence is synthesized)
gcctctagcattttccaatggcttaatagtttgaggatggtaacttcgggcagccattaatcatgaaactacctttagcagatctgttatagtgactgtaattagaaaagtttccaaaca

SEQ ID NO: 821513 - DNA, 120 bp, Artificial Sequence
  ENSG00000235590_21 (sequence is synthesized)
atacgtgctcaaacagtctgaattggctaattacctcatcttcttcaacaagggcccccacggttgaggtagtagtttgcaagtctgcaagcccatctgaggactgccctgagctcgatt

SEQ ID NO: 821514 - DNA, 120 bp, Artificial Sequence
  ENSG00000235590_22 (sequence is synthesized)
gagctgagaaggtggtgctggaagtggactggagctgagagcatgggtaaagggaagtctttcctgcgctctcagttcacacaaccacttctctcctgcggggcagttcagggtgacacg

SEQ ID NO: 821515 - DNA, 76 bp, Artificial Sequence
  ENSG00000235590_23 (sequence is synthesized)
acaaccacttctctcctgcggggcagttcagggtgacacggaatcctcactggaggccccttacagccatttccta

SEQ ID NO: 821516 - DNA, 76 bp, Artificial Sequence
  ENSG00000235590_24 (sequence is synthesized)
tagctcggctaatttttgtagttttagtagagaggggtttcgccatattggccaggcagatcacttgaggtcagga

SEQ ID NO: 821517 - DNA, 71 bp, Artificial Sequence
  ENSG00000235590_25 (sequence is synthesized)
cactacgctcggctaatttttgtagttttagtagagaggggtttcgccatattggatgaaacaccatctct

SEQ ID NO: 821518 - DNA, 120 bp, Artificial Sequence
  ENSG00000253572_0 (sequence is synthesized)
ggaccctgcacaaccgaggggaaaaggatatattaatggaatcctaagctgcaaacactgaagtgaaaattaaggaagtttatttcacattttatccttatgaaaacaaaagacggaaaa

SEQ ID NO: 821519 - DNA, 120 bp, Artificial Sequence
  ENSG00000253572_1 (sequence is synthesized)
tgaaaagttttctgttttttcatgcacagcaccagaggagcacatttacatttttaaaaaagtgattgtttccaaatgctgttatgtgagtgattaaaaaatctcctctgctctttttct

SEQ ID NO: 821520 - DNA, 120 bp, Artificial Sequence
  ENSG00000253572_2 (sequence is synthesized)
tattttcaatatttaagagagtttgaagggcttagcatggtttcagtgttccttttctggaagaatgaacaaaggccattgttgacagtcgtcagcttctcctgcgagggcagccttcca

SEQ ID NO: 821521 - DNA, 120 bp, Artificial Sequence
  ENSG00000253572_3 (sequence is synthesized)
cagctggactggctgggctgggagctgtccagtgatgaatgaatcttccttggactgacctccagctatcctggaacctggagacaagaggtgacctgagagctttgccctcatcaacgg

SEQ ID NO: 821522 - DNA, 120 bp, Artificial Sequence
  ENSG00000253572_4 (sequence is synthesized)
ccctcaggaacctcatgtgtagggccactaccctgctctggccacctggctctgtccaccccagaccctgggctgaggtcacattggagctgcagaggtggcttatccttcttgcccttg

SEQ ID NO: 821523 - DNA, 78 bp, Artificial Sequence
  ENSG00000253572_5 (sequence is synthesized)
acattggagctgcagaggtggcttatccttcttgcccttgatgttaccaatcaccatatgtcttcaacagagcatgcc

SEQ ID NO: 821524 - DNA, 120 bp, Artificial Sequence
  ENSG00000258843_0 (sequence is synthesized)
caagaggttgtcctgaagtaatgtctgctgcagcactggggccacctcctccaagctcaacatgtggcaaagttcatttttaacgtgctggattttccgatgaaagcctgaaacctgcac

SEQ ID NO: 821525 - DNA, 120 bp, Artificial Sequence
  ENSG00000258843_1 (sequence is synthesized)
tgccaaacacgacatacacccttgggacggtgacctcagccatctgcaacaaggctctcagaaccagtcctttgactataaaaaaagcagcagctttcactaaccaagcatctttaatcc

SEQ ID NO: 821526 - DNA, 120 bp, Artificial Sequence
  ENSG00000258843_2 (sequence is synthesized)
aagccaaattacagaactctctaacttagaggtgatcgtccatacggcagatcattacaacatgaaaaacgtaagctaagatgttgaacacagccagaactgaaaataaaagagctttct

SEQ ID NO: 821527 - DNA, 120 bp, Artificial Sequence
  ENSG00000258842_0 (sequence is synthesized)
gtacaggcggaagcggacagcacaggcagccacatctctgggctccagcttggcaaaggcaactgaaggagctcctcacttgggtactgttaataccactaatccatctgaccttcctgc

SEQ ID NO: 821528 - DNA, 120 bp, Artificial Sequence
  ENSG00000258842_1 (sequence is synthesized)
tgtggacagctcttcgtcatccccaaagctgttgactgggagtaaacaagagccatgagtctcctgtgtggcctatatgctcgaatacagagatagactctccaggaaaacagaagagaa

SEQ ID NO: 821529 - DNA, 120 bp, Artificial Sequence
  ENSG00000258845_0 (sequence is synthesized)
aggttttcaaaagtactgcttcccttctcatccatctcttctggaattggcaaatgccctcaggggtcaagcaaccaccaataacgggtttacttttctgggagctgaacttctgatgtg

SEQ ID NO: 821530 - DNA, 120 bp, Artificial Sequence
  ENSG00000258845_1 (sequence is synthesized)
tggatgggaggggagatggcatatggcctggtgaaataggtaagtagcttttttggcgggggttcatgcaggcttctggcttacattaagagctataaaaatattgcctggttttctggc

SEQ ID NO: 821531 - DNA, 120 bp, Artificial Sequence
  ENSG00000258845_2 (sequence is synthesized)
ttatttagaatattatcctggggataaatgctagtattaccctcaaatattctgttcttcaataattacctggtaggaccccatggccctctcctgtcttcagctccccagcccatgtct

SEQ ID NO: 821532 - DNA, 120 bp, Artificial Sequence
  ENSG00000258845_3 (sequence is synthesized)
gtatccttctcacaatttctatggttggctgggaaaacgacctcaattggaagttccctcttgtcagttgtgtgtagtcatgggtttttagtcattggatttgcccattaatttattctc

SEQ ID NO: 821533 - DNA, 120 bp, Artificial Sequence
  ENSG00000258845_4 (sequence is synthesized)
atttgttatatattttccaggaattcttcattgttttttctagcattcatttggttacttccagtgttttaaaataaaatatttgtcacaaacaaatgaaaaaacattccatgctcatgg

SEQ ID NO: 821534 - DNA, 120 bp, Artificial Sequence
  ENSG00000258844_0 (sequence is synthesized)
aatatcctaaaaataaaaatatgccttacttttatgtccaggaactttttattatttctgacttagaaaatgttatttctaaatttttaatgctagttatacttctttcttttggtcacc

SEQ ID NO: 821535 - DNA, 120 bp, Artificial Sequence
  ENSG00000258844_1 (sequence is synthesized)
ataaggctttctagcactttcctcaaaggaagggaaattaaataaatgggtataactcagtccactttggtgacagcttgtttgtgagctcgagtttggagacagaataaattggactat

SEQ ID NO: 821536 - DNA, 120 bp, Artificial Sequence
  ENSG00000258844_2 (sequence is synthesized)
ttgctaaaatggggttttaggattattcaagaggaaacaatttcatgtatggcttttcactctggttagtctttgattgtagatcctacatttattactgtgtagtcagtatgcttacaa

SEQ ID NO: 821537 - DNA, 120 bp, Artificial Sequence
  ENSG00000258844_3 (sequence is synthesized)
ctgggcatcccaatggctaggagataatgtgagtctctggacaaacactcctgctgagccagaaatgctgtcagaatttcctcaaagaatgatctcagtgtttgtctttattctgatttc

SEQ ID NO: 821538 - DNA, 120 bp, Artificial Sequence
  ENSG00000258844_4 (sequence is synthesized)
aatcacacggtgatttgtcagggctttataaatgcaatttaatcctgttcaatttccaaggaggggtgaacatgcaacaaaatgaattaactaggccaatcataatcaaacactgcagaa

SEQ ID NO: 821539 - DNA, 120 bp, Artificial Sequence
  ENSG00000258844_5 (sequence is synthesized)
agccaggcagaacccaccatatgccaagggtgtatagatctcatcctgcctgggaaaacttgacactccgcctggtgcagggattgggagggtaactgagggaggtaaggaggtaggata

SEQ ID NO: 821540 - DNA, 120 bp, Artificial Sequence
  ENSG00000258844_6 (sequence is synthesized)
tcccttagggaaggagcatcactcctctcaggagatctgttcctatgactttcaacaaagcaccaccgaattgtcattgtattttgtgagtagctaaattcttctgggaattaaggaaaa

SEQ ID NO: 821541 - DNA, 120 bp, Artificial Sequence
  ENSG00000258844_7 (sequence is synthesized)
aatttgaagttgccatgaaggtagcctcttcccaattacaccttagctaaaggtagcactctgattctctgaggataattggtccatctaataaaatcacattgaatctggagcaatcct

SEQ ID NO: 821542 - DNA, 120 bp, Artificial Sequence
  ENSG00000258844_8 (sequence is synthesized)
gagtgttttctaagctcaagctaagaaatgctgctttcaaggggcagcagtacagcattaagaacatggtatggccctgcgggctggttttactactgattacttatgtgaccttgggtg

SEQ ID NO: 821543 - DNA, 120 bp, Artificial Sequence
  ENSG00000258844_9 (sequence is synthesized)
ttaacttcaatgagcttttgttttttttttttttcatttgtaaaatgcagataataccctcatggtgttgatgttgaaattaagggagacaatgaaagtaaagtgcttagtacactgcat

SEQ ID NO: 821544 - DNA, 120 bp, Artificial Sequence
  ENSG00000258844_10 (sequence is synthesized)
ggcatgtggtaaatgctccataaacattcatgttattgttttcagtataagcagtcaaaaataccaaaatttttcttcatgcaacaaatatttattgtgcgtttactatatgccaaactt

SEQ ID NO: 821545 - DNA, 120 bp, Artificial Sequence
  ENSG00000258844_11 (sequence is synthesized)
gccaaatactggagaatatttgaaaaataccttattcagtgaccaaagtaagaatctgcatctctgttgttggctgtagatggcaatttctgcttcctggccttacttctttaaagaaaa

SEQ ID NO: 821546 - DNA, 120 bp, Artificial Sequence
  ENSG00000258844_12 (sequence is synthesized)
aaatttcccatgcattagtcacttagatcaacccattgccacatttttttagtgttgaaagctaatatattttagtaatgcttcaatgaactgtggtagcaacaaataaagaaattgact

SEQ ID NO: 821547 - DNA, 120 bp, Artificial Sequence
  ENSG00000258844_13 (sequence is synthesized)
tctgtcccaaaatatggggagtagagttgtaatcaggattacaaaaaaaaaggggccagtattacaagctgctaaaatgcttttgcgtggattattgttttatttggaccccctccaccc

SEQ ID NO: 821548 - DNA, 120 bp, Artificial Sequence
  ENSG00000258844_14 (sequence is synthesized)
tttaaatctgatacatgctaagattttcatgggcacagccacctcctaatatgtggttttgcttctctgcaagcatggaatcccctctgcagttatgtttgcctgtgcatctccggcagc

SEQ ID NO: 821549 - DNA, 120 bp, Artificial Sequence
  ENSG00000258844_15 (sequence is synthesized)
tggaggacgaatcacatcaggctgatgagtgtgtcacgctcttcatcccccaagagctgtgatgaagaccaagacaaacagtagattaacagtgctaccttttataaggctgattagttc

SEQ ID NO: 821550 - DNA, 120 bp, Artificial Sequence
  ENSG00000258844_16 (sequence is synthesized)
gttcctaaaatatgctgaaaggaaacaaaaccaaaaagaaaaaagagtggaaaggggggtgagacagaaacctttgtcgagtctcattccatcacccaggctggagtgcagcggcgtgat

SEQ ID NO: 821551 - DNA, 120 bp, Artificial Sequence
  ENSG00000258844_17 (sequence is synthesized)
gcaacctccacctcccaggctcaagaaatcctcccacctcagcctcccaatagctggatctacaggcgtacaccaccacaatcagctgtattttttgtagagactgggtttcgccatgtt

SEQ ID NO: 821552 - DNA, 61 bp, Artificial Sequence
  ENSG00000258844_18 (sequence is synthesized)
atcagctgtattttttgtagagactgggtttcgccatgttgcccagggtggtcatgaactt

SEQ ID NO: 821553 - DNA, 73 bp, Artificial Sequence
  ENSG00000258847_0 (sequence is synthesized)
aggatgctcggtgctggcatctgctaggcttctagggaggcctcaggaagctcacaatcatggcagaagatgc

SEQ ID NO: 821554 - DNA, 120 bp, Artificial Sequence
  ENSG00000258847_1 (sequence is synthesized)
tcactgcaaccaggtgaggaaccaggccctgggagaagaaaagcgaggtgctccaggtcatggtgccagccagatcaggtctttttactcctggagcggatgtggcaagaggaagaggaa

SEQ ID NO: 821555 - DNA, 120 bp, Artificial Sequence
  ENSG00000258847_2 (sequence is synthesized)
gagagaggagacttcggaaggagtggagtcattctgggaagagggaatgttgagaagggcacagctttgagaagcctgtgcaagggctaggggatggggcagggacaagagataggggtg

SEQ ID NO: 821556 - DNA, 120 bp, Artificial Sequence
  ENSG00000258847_3 (sequence is synthesized)
gagacgcaggcttgggagaagatggacacttcagttgttgatgtgttaagtgggaggtgctgtttataccactgaatggacttctcaagggagcaagtaggtaaacagttggccctccgt

SEQ ID NO: 821557 - DNA, 120 bp, Artificial Sequence
  ENSG00000258847_4 (sequence is synthesized)
atccacaggttccatatctatgaattcagccaacctcagatcacacaaataaaaaacaatacaatgaaacaactatttatatagtagcatttacattgtattaagtattgtaggtaatct

SEQ ID NO: 821558 - DNA, 83 bp, Artificial Sequence
  ENSG00000258847_5 (sequence is synthesized)
atagtagcatttacattgtattaagtattgtagatacagcttgtatgcaaataccatcgagggaagagagagaccctctcata

SEQ ID NO: 821559 - DNA, 120 bp, Artificial Sequence
  ENSG00000261526_0 (sequence is synthesized)
agtggagacggcggcggcggtggctggcgtcaggctgtggacgaagaggcggcctcggtggtaagtggcggccgctgggacccagccaggtaccggtccggctcggccctgcccctttcc

SEQ ID NO: 821560 - DNA, 120 bp, Artificial Sequence
  ENSG00000261526_1 (sequence is synthesized)
ggccgctctcactccttccctcggcctcgagttcctcgtaggcccgtgggggccgccgcggggtcggggctgcgaggcagcgcccgccgttccatggtaagcggtgctacgggacgttcg

SEQ ID NO: 821561 - DNA, 120 bp, Artificial Sequence
  ENSG00000261526_2 (sequence is synthesized)
gaaggaaacctcgctagagcaggggacgcctgggctcctggctgaccacggggcctttgcacggccagggctttgcgaccgcagtgtcttccttctgtccccggtcgtgcgccgtgcccc

SEQ ID NO: 821562 - DNA, 120 bp, Artificial Sequence
  ENSG00000261526_3 (sequence is synthesized)
tcagcgcggctcacgtttcggaacacgtctgcctttcatgcctcccgaagagcctccccgcatcccgtgccccctgctcgctgctgccgctgacccttgggcgctgcgctggtccagagc

SEQ ID NO: 821563 - DNA, 120 bp, Artificial Sequence
  ENSG00000261526_4 (sequence is synthesized)
gtgttgtcctctgacgccgtcagaacctgagctccctgcgagctgggactccgccgtgtcttcattgcctccagtgcaaagcaactgcttgcaagagaacaaaagtgtgttcaggtgcac

SEQ ID NO: 821564 - DNA, 120 bp, Artificial Sequence
  ENSG00000261526_5 (sequence is synthesized)
gggaaacccgtttcttacgggtctgcaaagaaagtctatgcaggaacatctacgtgcgtttctgcaaaaggtcagttactttacttggggctcttatacttaacgtagctcggagagcgc

SEQ ID NO: 821565 - DNA, 120 bp, Artificial Sequence
  ENSG00000261526_6 (sequence is synthesized)
cccatgcattcagatacaggtgggattcctccggaaacggagttttatagcaccagactttatcccctttcctgtagaaatttagggtttttgctgtcttttataacgaacaatgctagc

SEQ ID NO: 821566 - DNA, 120 bp, Artificial Sequence
  ENSG00000261526_7 (sequence is synthesized)
ttgactattgcttgtacaaaccgttttttgcccaagtcggactattttcttaggttaaattccttggtgcagaagtgcgagggctgtatttaggcccctaaaggggtggtaccaaatcgc

SEQ ID NO: 821567 - DNA, 120 bp, Artificial Sequence
  ENSG00000261526_8 (sequence is synthesized)
cctcccccaccagcataagagggggccggcgacacccttgcccaagctggattttgcagacctggtaggcgtgagatagtatttcactgtagcttgtgtttcctgtaagtatagtcgaac

SEQ ID NO: 821568 - DNA, 120 bp, Artificial Sequence
  ENSG00000261526_9 (sequence is synthesized)
gtcgtgatgttcctgttacatctatgttacgttgatcattgttaccactgacagtcgtttcgagattggaaaatatgtttattataaacgtttgactatttaaaagccatttgtatttta

SEQ ID NO: 821569 - DNA, 120 bp, Artificial Sequence
  ENSG00000224358_0 (sequence is synthesized)
gaacggtgtggccacgagagtctagaggaaaccaacccgcaactcactggagctgaagggctggtagtcaggccgaatctcgcgagaattggaactatttcagagccagaggaggatagt

SEQ ID NO: 821570 - DNA, 120 bp, Artificial Sequence
  ENSG00000224358_1 (sequence is synthesized)
ggcggcggcgaactttgcccggtagattttactgactggggtgctggcgcgcgcctttttctcggccagaatccagttattgggatagtcttgacttctacctcagcccaacttctgtgg

SEQ ID NO: 821571 - DNA, 120 bp, Artificial Sequence
  ENSG00000224358_2 (sequence is synthesized)
tcgtaatattagtttagcttgggtttgccgtgaagtaagaagactgacttccgcaaaggtactgaacgactgggtgtaggtgccagggcatggacgtgaagctggaaccgcgaaatgagt

SEQ ID NO: 821572 - DNA, 120 bp, Artificial Sequence
  ENSG00000224358_3 (sequence is synthesized)
tagttgtgggccgctggcctcaaggagcgaacgtcagcgcgaagaggagaagcttgtgcatacgctctgataagggttttaatagagagatggaatctcgctgtgtcacccaggctggaa

SEQ ID NO: 821573 - DNA, 120 bp, Artificial Sequence
  ENSG00000224358_4 (sequence is synthesized)
tgcagtgactcgatcataactcactatgacctcgaactcccaggctaaagcagtcctcaagcaatccttccacctcagccttctgagtagctgggagtagctgattaactaatgcgtgtc

SEQ ID NO: 821574 - DNA, 120 bp, Artificial Sequence
  ENSG00000224358_5 (sequence is synthesized)
gggagtagctgattaactaatgcgtgtcaccacgcccagctaatttgtgtatgtgtgtgcacaggtgtagagctaggggtcttgctatgttgctcaggctagtcttgaactcctggcctc

SEQ ID NO: 821575 - DNA, 120 bp, Artificial Sequence
  ENSG00000224358_6 (sequence is synthesized)
agtgggactgtaggtgtgagccattgctcctggctgagcactgttttttttaggacagactgtattcattgttgcaatcttcagcttttggaacatcgtctaggacagagaagctgcaca

SEQ ID NO: 821576 - DNA, 120 bp, Artificial Sequence
  ENSG00000224358_7 (sequence is synthesized)
atatgtatttatcgaatgagtgaatgatacttttgggagagaagacagtgggttggagaaatatcttggaagaattggaaattttaggtggaccttgaagaaagggtaaaattcaattag

SEQ ID NO: 821577 - DNA, 120 bp, Artificial Sequence
  ENSG00000224358_8 (sequence is synthesized)
gaaagagattatgtgtttaatagaaataggattgactaaagtgaatccacgttgtatctgtaagaggtccatcgttgaactttatttttttttgttttgtttttgagacagggtctcact

SEQ ID NO: 821578 - DNA, 71 bp, Artificial Sequence
  ENSG00000224358_9 (sequence is synthesized)
tacaggcctgagccactgcacccagccacctgtatttatttttgagacagggtcttgttctgtcgcctcag

SEQ ID NO: 821579 - DNA, 74 bp, Artificial Sequence
  ENSG00000224358_10 (sequence is synthesized)
gatggtgtttcgccattctaggcctcctacagtgctgggattacagggttgagccaccacacccagcctcatgg

SEQ ID NO: 821580 - DNA, 120 bp, Artificial Sequence
  ENSG00000224358_11 (sequence is synthesized)
ctgggattacagggttgagccaccacacccagcctcatggttgaattttaggagagccgtacatctcctcctgataatacatgcaaaacttcatgtgtccatttttttctgagttgaagt

SEQ ID NO: 821581 - DNA, 120 bp, Artificial Sequence
  ENSG00000224358_12 (sequence is synthesized)
ttcatagttttcatccaattctcaaaggtgtttataaaccaataaaggttaagaatcatgttgtgcatttgaaagactaatagaaaggcttaagcttaatgctgtagcaaattagtcttc

SEQ ID NO: 821582 - DNA, 120 bp, Artificial Sequence
  ENSG00000224358_13 (sequence is synthesized)
aaaagttttctaccatagcattcattaggaacagaagagggggaatgagaccctaagatttagagatgaagtctgaaacttaggactttatatttatctgaacatcatatgtaaatttta

SEQ ID NO: 821583 - DNA, 120 bp, Artificial Sequence
  ENSG00000224358_14 (sequence is synthesized)
ctattatgggactggtattaatgcttccttataaaaatatatttagcctcatcagtgatcagggaaccatatttgggaccagtctgttcagttggcaaaaattaaaaaggccatcatatc

SEQ ID NO: 821584 - DNA, 120 bp, Artificial Sequence
  ENSG00000235047_0 (sequence is synthesized)
tttttctgcacacaccaagcaagaaatcagttccgcagcagacaccagctggaagtcctccgattcaattcggctaccatctacctggagatagcgtcagatcccacagggctcagttcc

SEQ ID NO: 821585 - DNA, 120 bp, Artificial Sequence
  ENSG00000235047_1 (sequence is synthesized)
ttgaaatcccgagaaacaattttctgaagaaatgaaatcatatgccctcctgaactctttgggggaaaatagcctctctgtttgctcagaatatgaaacagtaaaacagtacaagtaaaa

SEQ ID NO: 821586 - DNA, 120 bp, Artificial Sequence
  ENSG00000235049_0 (sequence is synthesized)
agacaggcgcgtggccccgcgccagctagcagcccaagctgtgcagcccaggcttctgagggaggcagaagaaagaaatccaagcctcggacaagttaactaagggcacggcaggaagga

SEQ ID NO: 821587 - DNA, 120 bp, Artificial Sequence
  ENSG00000235049_1 (sequence is synthesized)
ggtgtcgtcctcatcgccatgtgcacgtgtcatccgtcagtgctccatgcagtgctccaccacggcatccgccactctgccaccagctccgcggggatggacgcacaggccccagtcatg

SEQ ID NO: 821588 - DNA, 120 bp, Artificial Sequence
  ENSG00000235049_2 (sequence is synthesized)
gccctgccctgaggagatgctggtcgtcttcctgctcattcactcccctgtgctgcactgctggggtcagacaaggctccatccaagaacccatgacttcaaaagaaagaaacctttgtc

SEQ ID NO: 821589 - DNA, 120 bp, Artificial Sequence
  ENSG00000235049_3 (sequence is synthesized)
ctcaaatttggtaacaggcaaacggtctgcgtggaagccctgtctgcagcctctgctcactccaggacgtgctgccctcactgctcctctgatgtgcccccggctcaaggctgagcattc

SEQ ID NO: 821590 - DNA, 120 bp, Artificial Sequence
  ENSG00000235049_4 (sequence is synthesized)
ccgtatccacgcaggaaggccgggggactggctcccaaacagcggccaggaccttgggggcacccagggagactggggccctgcacctcagggctttggatccaggtctgggacgagccc

SEQ ID NO: 821591 - DNA, 120 bp, Artificial Sequence
  ENSG00000235049_5 (sequence is synthesized)
tgggaatcagcatgggagcagtggcagccatcctgtggccctgaggggagctggctggaggacaacctgaaatgctgagggcagcaggaggaaacacagaaggaacctgcgtcctgggtg

SEQ ID NO: 821592 - DNA, 120 bp, Artificial Sequence
  ENSG00000235049_6 (sequence is synthesized)
acatcccggacctgctgcactcgccggccctggagccacctgcctctggcttcatgtgagctgtcacactgttattattatttcgttcctcaagtaggggtttcctgctccttgcagccg

SEQ ID NO: 821593 - DNA, 120 bp, Artificial Sequence
  ENSG00000235049_7 (sequence is synthesized)
gaagcagtaagtggtagccaccccacccctgcagggcagtcttctgatggctctgagctccctgaggtgggggcgaggcagggtctgtgctccactctgagggcccagtggagcagcagg

SEQ ID NO: 821594 - DNA, 120 bp, Artificial Sequence
  ENSG00000235049_8 (sequence is synthesized)
tgttcgaacacatagggtttaccccaggcagaaaccaccctcataagggcatgagacccaggcagagtgagctctctggcctcttggtattttcttttgtgtctgtcttctcagcagcct

SEQ ID NO: 821595 - DNA, 120 bp, Artificial Sequence
  ENSG00000235049_9 (sequence is synthesized)
cagggacagagtgggcaggtaacgaaggcttgctgggcaccgtgggagagaagggaacggaggcattgaggggcaagagaaaaggagaagtggaaggccagacaggcagagaaggaaagg

SEQ ID NO: 821596 - DNA, 120 bp, Artificial Sequence
  ENSG00000235049_10 (sequence is synthesized)
ttcgtggagagcagtctcttcatggggacccaaggaggccccaccagagaggaactgaggctgtgaaatggaaggatggaggcctgagggatccaggccagtggacaagtgagcccgagc

SEQ ID NO: 821597 - DNA, 120 bp, Artificial Sequence
  ENSG00000235049_11 (sequence is synthesized)
agacggaaccatccccatgcctatctggttgtctcctcctcctcctgctcctcacccccttcctcctcctccacctcctccttctccccctcctcctccttctccccctcttcctcctcg

SEQ ID NO: 821598 - DNA, 120 bp, Artificial Sequence
  ENSG00000235049_12 (sequence is synthesized)
ccctctccctccccctcttcttcctcctcctccctctcttcctcctcctccccctcttcctccccctcttcatcccactcttcctcctcccctcttcctccccctcttcctcctcctccc

SEQ ID NO: 821599 - DNA, 120 bp, Artificial Sequence
  ENSG00000235049_13 (sequence is synthesized)
cctcttactcctccccttcttcttccccctcttcctcctcccctcttcctcctcctcctcctcccccttccttctcctcctcttcttcctcctccttccccttcctcctcctcctccccc

SEQ ID NO: 821600 - DNA, 120 bp, Artificial Sequence
  ENSG00000235049_14 (sequence is synthesized)
tcttcttcctccttctcctatcctctttttcttcctcaaccttttcctcctcctcctcctcctccttccccgccttacccctccttccccacactctgaaatgagcacatggctcagact

SEQ ID NO: 821601 - DNA, 120 bp, Artificial Sequence
  ENSG00000235049_15 (sequence is synthesized)
gagaggacaaacctccagctgaatttagttgtagctgtggttccccaaaatgctttgaggattcatcagaaccagtagctgcctctctgcttcctcatctacacacctaattttgtagct

SEQ ID NO: 821602 - DNA, 120 bp, Artificial Sequence
  ENSG00000235049_16 (sequence is synthesized)
tcagaacaggtgtgactcaggcagaggaagggctacacaggtgtcactgtgcccacccctagggagactgctacagacagacttcccggtgggacccggcccccacccatgcatggtggc

SEQ ID NO: 821603 - DNA, 120 bp, Artificial Sequence
  ENSG00000235049_17 (sequence is synthesized)
cacgggcatgaggagggtgataatgacaaggggagccacgatgaccacagggtttatagagatctcgccatttgctgagcaatgtggaggaacgttacacacaccatgtcgcctcccccg

SEQ ID NO: 821604 - DNA, 120 bp, Artificial Sequence
  ENSG00000235049_18 (sequence is synthesized)
atgcctgcagggcaggtatcattgccctgcattctattgaggaggaaattgagttggaagtgcccaagatcacgtcgttaataaatggcagggcctaaacaagcccttagccgctacaac

SEQ ID NO: 821605 - DNA, 120 bp, Artificial Sequence
  ENSG00000273203_0 (sequence is synthesized)
gctgggaggcgtgagccactggcctagaaccgtattttgactgtgccttttatatgtttagctatgcttagatacctgaatacttaccactgtgttgcagcggcctacagtattcagcac

SEQ ID NO: 821606 - DNA, 120 bp, Artificial Sequence
  ENSG00000273203_1 (sequence is synthesized)
agtcccataccgtgcaggtttgccaccggggagcagtaggctatgctgtctagccggggtggagtaggctctaccatctaagtttgtgaagtacatgctgatattcccacaacagcaatg

SEQ ID NO: 821607 - DNA, 120 bp, Artificial Sequence
  ENSG00000273203_2 (sequence is synthesized)
catttttcagaacctatccctgccgttaagcaatgcgtgacagcacttcaactcctctggcctgtttgctcttctataaaatgcccacctcacagggggttgtaaggattaaacaagaca

SEQ ID NO: 821608 - DNA, 120 bp, Artificial Sequence
  ENSG00000273203_3 (sequence is synthesized)
accaggacctggcatttggtcggtgctcagcaaatactgggttcctctcctcccctgtcacctgggcttcaggtttcctgagcttatctgcaaacctgtgctgaacaaacagagctacag

SEQ ID NO: 821609 - DNA, 120 bp, Artificial Sequence
  ENSG00000273203_4 (sequence is synthesized)
cctgagtggctaaaaaacatgaagagaggacaagaatgtgatgtgtgggaggcagaggaaagggtcatggccacgcaaaactctactcagaattgcaagggggttcctctgctgcccctt

SEQ ID NO: 821610 - DNA, 120 bp, Artificial Sequence
  ENSG00000273203_5 (sequence is synthesized)
cgagcccccacactgaaactggcttttctgctatttttaagatttgttaagtcaggcctgctttgcatgggagctccacctccacaatagccactttctccttgggatctgacttggatc

SEQ ID NO: 821611 - DNA, 120 bp, Artificial Sequence
  ENSG00000273203_6 (sequence is synthesized)
cccacctcagcattgtcaaaggccccgtggagcctctgaagctctccctcctgtggccttttgagtctagtgcctgtgctgtgcatggctcatcacgctccataagtatttgtgaaatca

SEQ ID NO: 821612 - DNA, 120 bp, Artificial Sequence
  ENSG00000273203_7 (sequence is synthesized)
aaatgtctccttcttgcccaacacacacccatggctcctcacagcccaactcccctgctgtaacccatcagccaatccagtcacattagacctcttgcatcccctgaaaaaactctatgc

SEQ ID NO: 821613 - DNA, 120 bp, Artificial Sequence
  ENSG00000273203_8 (sequence is synthesized)
ctttcctttgcctaaaatgcccttctcccccttcacccactgtctcattcctcaggacccttctcaaaagtcactccatcaaaaagcctttcagattccagcaaacacaagggaacttcc

SEQ ID NO: 821614 - DNA, 120 bp, Artificial Sequence
  ENSG00000273203_9 (sequence is synthesized)
agcctttcagattccagcaaacacaagggaacttccgcttatccccattcctcaaatcactttgattgtgaattaattaattaattaattaatttatttatttattttgagacggagtct

SEQ ID NO: 821615 - DNA, 120 bp, Artificial Sequence
  ENSG00000273203_10 (sequence is synthesized)
agttctttaaaaggtatttaacatctgtttttggaagatatgttaatgaaattggataactgggtttcctgggcacgtcaaaccatagtcatcaacataatgtaccctaccttctcatca

SEQ ID NO: 821616 - DNA, 120 bp, Artificial Sequence
  ENSG00000273203_11 (sequence is synthesized)
aagtcctaataagacaagctttcgtttctttatgacagaaccaccctaagcgtttaaattccttacccagaacttaagtcttaatttaaaattttcataaatcaaattatttggaaaaat

SEQ ID NO: 821617 - DNA, 120 bp, Artificial Sequence
  ENSG00000273203_12 (sequence is synthesized)
actatttcaaattaatatcacaatcataatatgccagattctctaacatgacattctccaaaatatttcagatgccttaagaaacaaataatacatacaaattaccatgatgatttcagt

SEQ ID NO: 821618 - DNA, 120 bp, Artificial Sequence
  ENSG00000273203_13 (sequence is synthesized)
ttttttctaaacctaatgcaaagtagtaatatcacggatttggtagacatttttcttatcacaatgcttatttctacaccttcacagcattttcctatgcttaccactttaaggagatca

SEQ ID NO: 821619 - DNA, 120 bp, Artificial Sequence
  ENSG00000273203_14 (sequence is synthesized)
gaattactgtctcagtttggctggggctgctcagtccaaaatttggaactgagatgagttacagatttcagtttagttagagtttctgaattgcatcagaacagctgggtctacttccag

SEQ ID NO: 821620 - DNA, 120 bp, Artificial Sequence
  ENSG00000273203_15 (sequence is synthesized)
agtggtccctcctgaggtttattttgactcatggttctacaggttgtaagggaagcatggcaccagcatctgcttctgatgagggcctcaggaagcttcccatcatggcatatggcaaag

SEQ ID NO: 821621 - DNA, 120 bp, Artificial Sequence
  ENSG00000273203_16 (sequence is synthesized)
agggagcaagcaaatcatggtgagaaaggaagcaagagtgagcgggaggaaatgccaggctcttttgatcagccggatctcgcatgaagtcatagagtgagaactcattcattactgcag

SEQ ID NO: 821622 - DNA, 120 bp, Artificial Sequence
  ENSG00000273203_17 (sequence is synthesized)
tgaagtcatagagtgagaactcattcattactgcaggacaacaccaagtcatttgtgaagattccatccccgtgacccaaacacctccgggtaggcccacctccaacactggaggtcaca

SEQ ID NO: 821623 - DNA, 120 bp, Artificial Sequence
  ENSG00000273203_18 (sequence is synthesized)
ccatatcaagatttttcatttatttgtctaaattgattcctatgtatttcatatttttgtagctattgtaaatgagattgctttcttgatttcttttttcagattattcaccattgacat

SEQ ID NO: 821624 - DNA, 120 bp, Artificial Sequence
  ENSG00000273203_19 (sequence is synthesized)
atataaatgctactaatttctgtatgttgagtttgtatccagcaacttactgaattagtttaccagttctagcagttttttggtggagtctttaggtttttctaagtgtaagttcatgtc

SEQ ID NO: 821625 - DNA, 120 bp, Artificial Sequence
  ENSG00000273203_20 (sequence is synthesized)
atctgtgaacaaggctatgatttctttctttccaattttagtactctttatttttttcccttgcctaattgctcttccaggacttccaatattatgttaaataaaagtggtgaaaagtga

SEQ ID NO: 821626 - DNA, 120 bp, Artificial Sequence
  ENSG00000203987_0 (sequence is synthesized)
atacactttctgccttcctgcctgttgcctcatgccccagggtggctgtcatagcacagggcatcacaccgctacaccagcatctcaaacgggaaggaagtggcaggtgtacaaaggatg

SEQ ID NO: 821627 - DNA, 120 bp, Artificial Sequence
  ENSG00000203987_1 (sequence is synthesized)
accactttgtgaatcaggttacgattttcttttctaacaaaggaaaagcttctcagaggctccccctgcaagtgtctctttaaccccgttaggccatgggccatgtggccggccctgact

SEQ ID NO: 821628 - DNA, 120 bp, Artificial Sequence
  ENSG00000203987_2 (sequence is synthesized)
ttaacagggtgggaaagtgaacatgtgtcaaagtggaccaggatggccagcccccactaggcgagcacatagttgccccaaacaaaatcagggttcgcttagctgggaagcaggtgctaa

SEQ ID NO: 821629 - DNA, 120 bp, Artificial Sequence
  ENSG00000203987_3 (sequence is synthesized)
ggctgtcggggaggctgccaactggcctgtcacagagaaaaatcagagcccagggaggggttttgacagcagcacagagagagatgatgtggtttgaacatgggggccatgagcagtgcc

SEQ ID NO: 821630 - DNA, 120 bp, Artificial Sequence
  ENSG00000203987_4 (sequence is synthesized)
tctttctcttagagagagtgcgtccagtgtaaatgtgaaggagagatagaaacacaggctcttcatttttggtctgagtgactgagtcgagggggatgccctttgccgagatggggaaga

SEQ ID NO: 821631 - DNA, 120 bp, Artificial Sequence
  ENSG00000203987_5 (sequence is synthesized)
cagagggaagagcttgttagtcacagggtggaaattaagaattgcctactggggacagaagtggagatgctatgcaggggtggagtttctcgagggatgccaagacgagaggccactgct

SEQ ID NO: 821632 - DNA, 120 bp, Artificial Sequence
  ENSG00000203987_6 (sequence is synthesized)
gcagccctgcgcctggaggctgggctcgccacatctgctctgcccttccctccgtgctgcgtgacgctggagctggcctttgaaagccacatcagcctgttccttgacctgtggtttctg

SEQ ID NO: 821633 - DNA, 120 bp, Artificial Sequence
  ENSG00000203987_7 (sequence is synthesized)
ccttgagggaaggaaagagcaaggccaaggtgtctactattcccctgacttcctcctgccaggtcaccgagggttggctgtgcacctcaattgaagctccggccctgtcaggcacccacc

SEQ ID NO: 821634 - DNA, 120 bp, Artificial Sequence
  ENSG00000203987_8 (sequence is synthesized)
actctcctttctctctctccagttccagttcctgcgtcctccccttgttcctgccagcgggggatggcatcacgcaggcatggtgaatcctggcccttgggacttccctgcgccttgcac

SEQ ID NO: 821635 - DNA, 120 bp, Artificial Sequence
  ENSG00000203987_9 (sequence is synthesized)
agatcgcacagattgtggtagatggtcccttgcaagtgtcatcctgcctgatgcatcaccaccgaggaagcgaccgaagtcagagacagaggatgctgccactccccaagaatgaagccg

SEQ ID NO: 821636 - DNA, 120 bp, Artificial Sequence
  ENSG00000203987_10 (sequence is synthesized)
gtaggggatattattggacttcgtatgtgatggcaatgactcaacagaaagaaaaattgctgatgcaagaaaaagagtgtcttgcctcgtccaggcaagagggcatcagacttgggacag

SEQ ID NO: 821637 - DNA, 120 bp, Artificial Sequence
  ENSG00000203987_11 (sequence is synthesized)
gacttgggacagctcactcgaggcagggaaagaaaagcgggtcgcacgattgcaggcacagggcttcattcccatcacctaggctgcagtacaggggcatgatctcggctcactgcaacc

SEQ ID NO: 821638 - DNA, 120 bp, Artificial Sequence
  ENSG00000203987_12 (sequence is synthesized)
actcaagcaaccctcccattccagcctcccaggtagcaaggactacaggcacacaccaccatgccaggctaatttttgtttgtttgtttttgttgagacggtgtttcaccatgttgccca

SEQ ID NO: 821639 - DNA, 120 bp, Artificial Sequence
  ENSG00000203987_13 (sequence is synthesized)
agtgcagctgtgttgtcaggcccagaggctgatgacagagaagcgtgagaaaggacccacagtcagaggaaagggggagaactatggcggattctgcagacatcaaaccatctaaccatt

SEQ ID NO: 821640 - DNA, 120 bp, Artificial Sequence
  ENSG00000203987_14 (sequence is synthesized)
tcacgatgcaatgatgcaccagcaacagccacatggccacagtggaccccgcaggcctggccctgcatcccgcctgccccagggtctggggtccatcggatcagcaccgcccaccacaag

SEQ ID NO: 821641 - DNA, 120 bp, Artificial Sequence
  ENSG00000203987_15 (sequence is synthesized)
aaggcagtcatctgccagccaggaggagaggcctcgccagaaaccaatcctgccaacaccctgatcttggacctccagcctccaggactgagaaggaaatgtctgctgttgcagcgcccg

SEQ ID NO: 821642 - DNA, 120 bp, Artificial Sequence
  ENSG00000203987_16 (sequence is synthesized)
gctgtgctgctttgctccagcctccccagcagaccagtgtccagtcgttcaagggaatgagcctgtcagtagaggctgggctttgtggtgagccagcagggaaacttctcggggagggag

SEQ ID NO: 821643 - DNA, 120 bp, Artificial Sequence
  ENSG00000203987_17 (sequence is synthesized)
gagggcaaagagaggccagcctggtggggaagaaggggtgggagtggagaagacacagaggccgcacactgagtgaggaggaccaaggcgcaaggcccttttcaccaggctcctgtgctc

SEQ ID NO: 821644 - DNA, 120 bp, Artificial Sequence
  ENSG00000203987_18 (sequence is synthesized)
tcaggggagacagggagggtggcattggctagaagggcctgcccagccctggagaaaggagctcacagcagggtcgtgaagagggcagggactgggtggggggtgctaccatgtgacctg

SEQ ID NO: 821645 - DNA, 120 bp, Artificial Sequence
  ENSG00000203987_19 (sequence is synthesized)
ctaggaatgaatctgcgttagcgtccgtctggctggagtagagatgcttcagcacgtgtggggctgcacacaggcacgcagggtggaggcccctccactctacagccccacagccagcac

SEQ ID NO: 821646 - DNA, 120 bp, Artificial Sequence
  ENSG00000203987_20 (sequence is synthesized)
ctgccttctcacctcttctagtccagggcccgagaagccattagcaaccatcctcacctcagtgtgaatctgcaactctgccgctccagtgtgaaggaggagaaggagagcaggaagggg

SEQ ID NO: 821647 - DNA, 120 bp, Artificial Sequence
  ENSG00000203987_21 (sequence is synthesized)
tgtccaccaccacgtgcccacaggagcaaggctcccaccctcccggggtatgaacttgaacccctgtgacctctgtgggtgcatctgcacagaatgcaggtcccctgtcccccagccacc

SEQ ID NO: 821648 - DNA, 120 bp, Artificial Sequence
  ENSG00000203987_22 (sequence is synthesized)
gcaccacaccagcctagccatcctcgcgagccgccacaggcctgggaccccccagggcactggaacacagcagccccagtgagcacctggagcccgagcctggaccggaggccacggacg

SEQ ID NO: 821649 - DNA, 120 bp, Artificial Sequence
  ENSG00000203987_23 (sequence is synthesized)
gcttcgaacaggccagcccccaggaggggcggctcttctacagccagcccggcactgcccgcccagcctcccagatccagaggcagctgctccagagagagtgggggctccagggacttc

SEQ ID NO: 821650 - DNA, 120 bp, Artificial Sequence
  ENSG00000203987_24 (sequence is synthesized)
tcccaagcaagatgaaaacacaggtttttgcgtgaaagttccttcttaaatactgacagcaagtttagagcccatctcagatccctggctgtgctccatcagcccaacagccacagaccc

SEQ ID NO: 821651 - DNA, 120 bp, Artificial Sequence
  ENSG00000203987_25 (sequence is synthesized)
aaaatttaaagtagccatgcgccctgagagcccaacctgcctggccacgcacaggccagccatggtcccaggagtgggcgtgtgcccccgacaccacacagctgtgtccctcccttccat

SEQ ID NO: 821652 - DNA, 120 bp, Artificial Sequence
  ENSG00000203987_26 (sequence is synthesized)
ccgaactgtcccctcagagctgggtcctgggctgagactccccaaactgtgaccttcaaggcttctcacacagctcaccccagcctcacggcctccagctctgccgctcactgtccccac

SEQ ID NO: 821653 - DNA, 120 bp, Artificial Sequence
  ENSG00000203987_27 (sequence is synthesized)
cacactctccctggacccccacccctccagctgctggggcaggaaatcaagcctccgactgaccctcctggtgggacccctgaagagaaaggcgtgtaagggggactctgtgcacacctg

SEQ ID NO: 821654 - DNA, 120 bp, Artificial Sequence
  ENSG00000203987_28 (sequence is synthesized)
cgtaagggggactctgcacacctgcagaaccgcccatccctggagcccggcctgcagtcaccgtcgagaggagaggcctggagcacagagtggatcctgtggcatggggactttgccgtt

SEQ ID NO: 821655 - DNA, 120 bp, Artificial Sequence
  ENSG00000203987_29 (sequence is synthesized)
ggcagaacacgcaccctggggggaagggccctggctccatcgtgcccagcaagtacctggcccatatcagggacatatgagtaaaggacagaccacctggtccagtccccacttgcctga

SEQ ID NO: 821656 - DNA, 120 bp, Artificial Sequence
  ENSG00000203987_30 (sequence is synthesized)
ggacagcagcccagacccccatgaatgatgaaagtccttctctgggttgagctgaaacctcccttccttatctcccacccatgtcccccgtccccctgggaaagtctgcggtatccaagg

SEQ ID NO: 821657 - DNA, 120 bp, Artificial Sequence
  ENSG00000203987_31 (sequence is synthesized)
gcagccctgggctccttcagctctccagtccccatggtgaaagatccgcagagaggccaaccctcccttgggtcggctatgccaggcgggcatatgagaggccccagacgtctgcaacgc

SEQ ID NO: 821658 - DNA, 120 bp, Artificial Sequence
  ENSG00000203987_32 (sequence is synthesized)
tggcccgatgcccatccagtgagccagccccgcgctgcttctatccagggagtctctggatttgggctcctcaggcagcagagcacacatggagacgcggagaccccagagaagacccca

SEQ ID NO: 821659 - DNA, 120 bp, Artificial Sequence
  ENSG00000203987_33 (sequence is synthesized)
caggactggagcccaaggccaggggctgtgaggggaccccagtgaggggactgcagctgccccagctccacggcgcaactgagcttcagagagcacacgcccgggcctcacacgctgggc

SEQ ID NO: 821660 - DNA, 120 bp, Artificial Sequence
  ENSG00000259418_0 (sequence is synthesized)
cacttattaaactttcactccaacctcacccttggtgtccatgctccttaattttcttggtaatgagacaaagaactctggataacacctcagacaaagagactgctacactgaccctag

SEQ ID NO: 821661 - DNA, 120 bp, Artificial Sequence
  ENSG00000259418_1 (sequence is synthesized)
actgcttcacctgtagggggtcatctgggatatgtcagaagggacacaactggagaaactagttgttttaccaaggctttgactggaacagtatgcttccctttaaaaaatcaagctgga

SEQ ID NO: 821662 - DNA, 120 bp, Artificial Sequence
  ENSG00000259418_2 (sequence is synthesized)
gtacaggattcctaaactgtgacagagtctccctctgtcgcccagactgtagtgcaatggcaggatcttggcttactgcaatctccacctccccggttcaaccaattctcctgcctcagc

SEQ ID NO: 821663 - DNA, 120 bp, Artificial Sequence
  ENSG00000259418_3 (sequence is synthesized)
ctcccaagtagctgggattacagcaagagacgagagtgcaagcagaatgctgcttcagggagaaaagctgttaccaggagccaagcttgtactctgtgtccaagacagccctcgtttggc

SEQ ID NO: 821664 - DNA, 120 bp, Artificial Sequence
  ENSG00000261449_0 (sequence is synthesized)
aaagggctggggcggtcgccgcgctcgcgtgtttgcggagtgcgcctggagggggcgctggagtatgtgtgtgccggggcggggtggcttccgggcacgagttgctgacagcgcctcgcg

SEQ ID NO: 821665 - DNA, 120 bp, Artificial Sequence
  ENSG00000261449_1 (sequence is synthesized)
gttgataaatcctgagggcggcggctaccctgcactccatcggtgcctttgggaagcgccgccttctctgttgtacccggccgtgggtcaggtcggcgcggctggcggtggagtctcgga

SEQ ID NO: 821666 - DNA, 120 bp, Artificial Sequence
  ENSG00000261449_2 (sequence is synthesized)
caccgagccctggaccccgactctggaagcccccagccccactgggccgcggcagggcgcccaccctccacaatctcagttcccagccggggagtgaggggctgggcgggtctctccacc

SEQ ID NO: 821667 - DNA, 120 bp, Artificial Sequence
  ENSG00000261449_3 (sequence is synthesized)
gctttggagacctcaggacttggatacgcttttgagtggtcccagtcgtcctgatccacgaaggcgtggagtggaagtcaggaccaggggtcgccccagtgacgcaggaagtcaagccca

SEQ ID NO: 821668 - DNA, 120 bp, Artificial Sequence
  ENSG00000261449_4 (sequence is synthesized)
gcagtgggcgctggtgacagtggcgacctcgccgatgagaggttcgccctccctagcattagttgtcactttggtgaaatggagcgtgggtggcagctcctccacacacaagccctttgc

SEQ ID NO: 821669 - DNA, 120 bp, Artificial Sequence
  ENSG00000261449_5 (sequence is synthesized)
tgaggtggtgcggggggttctctccacgcttgctaagggcaggtagttggctgactttgaactatgaagaaaagccagaaacaaaatggcagaatggtatgactctgggtgggcttaggg

SEQ ID NO: 821670 - DNA, 120 bp, Artificial Sequence
  ENSG00000261449_6 (sequence is synthesized)
acgctggtgccagaggacttggcttgaacccgctccaacacttacaacctgagtgaccgtgagaaagaactgtaactcctctaaacttcaagttcctcacttctcaaataagaacgtgaa

SEQ ID NO: 821671 - DNA, 120 bp, Artificial Sequence
  ENSG00000261449_7 (sequence is synthesized)
tagtacctccctcctagagttgtgaggattgagttagaaaatgctagcaattgttatgccctaaggaacagcacaagatacaataacacgtgataatgtgtgtcgaaggtgcagaaatgc

SEQ ID NO: 821672 - DNA, 120 bp, Artificial Sequence
  ENSG00000261448_0 (sequence is synthesized)
acgtctcggcccgtcgaagacccaggcgggcaaaggagtggtacaaggtgtggggagggctggaggaagaagccaccatgctggcttggagggagcagagcaggaaggggtgcccatctt

SEQ ID NO: 821673 - DNA, 120 bp, Artificial Sequence
  ENSG00000261448_1 (sequence is synthesized)
ggggccaagcactctcagggctcatgccaggtttgggcaccatgtgataagatgacctgcaggtctggccttggatttctgcagaggtttgttgggaaggcatcacttaggaggctggca

SEQ ID NO: 821674 - DNA, 120 bp, Artificial Sequence
  ENSG00000261448_2 (sequence is synthesized)
ggcttgaagtcattgggggagcagccgcaccagtccacgatgtgcttgtactggcacttgcagcccagcttgcgattccagttggtgatgcgcaggttgttgtccaccatggtgtcgcag

SEQ ID NO: 821675 - DNA, 120 bp, Artificial Sequence
  ENSG00000261448_3 (sequence is synthesized)
tgggggctgttctccaggaccgtatggaagaaggactgcaggggagagagggacccagcctgagacctctcccagcctcccacagatgaactggggtgggaaatggtgaacccttgctct

SEQ ID NO: 821676 - DNA, 120 bp, Artificial Sequence
  ENSG00000261448_4 (sequence is synthesized)
cttgctctgagttcatgtaagaactggttgtttaaaagaatgtggcatctcatcagaagctgggcggcttcctgtacagcttgcagaactgcaagccaaataaacctcttttctttataa

SEQ ID NO: 821677 - DNA, 120 bp, Artificial Sequence
  ENSG00000261441_0 (sequence is synthesized)
agtaaccacgcccagcaagtccctgcgagattgcccgcctacgtgtctcagcggaggcacatttctaaaatgtaccaggtctctcgcaccccgacgcaggtgcttcaacagctctcagcg

SEQ ID NO: 821678 - DNA, 120 bp, Artificial Sequence
  ENSG00000261441_1 (sequence is synthesized)
ctcggtggttggtgaactgtggtaaagtgcacgcagaataaggtctacgtgattaagcaccgcctgggggttggggtctggaggcccagctgcacagatgaaagggaggctcagagacgt

SEQ ID NO: 821679 - DNA, 120 bp, Artificial Sequence
  ENSG00000261441_2 (sequence is synthesized)
gagatcacacagctgattaggaataaaattcaggtcaagctgaaagtcggccgccaccgtccagcgtggatcccaggacaccgtgaacggactacagaagttgactttcgcgtttttaag

SEQ ID NO: 821680 - DNA, 120 bp, Artificial Sequence
  ENSG00000261441_3 (sequence is synthesized)
gagtggggtgcagggaaacaatcctccgccggccctgcgggctgatgccgaccctcacctgctcccgccacgtggagaggtagagagaagccccgggccaagcagcattgagccctggtc

SEQ ID NO: 821681 - DNA, 120 bp, Artificial Sequence
  ENSG00000261441_4 (sequence is synthesized)
ccttctatttaaatatgaaatattttgcatacacttttctagatgtacttaatatacacaatgttttaatgtttgtgatttttttgttttgccaaaaaaatacaatcaatcagaaattca

SEQ ID NO: 821682 - DNA, 120 bp, Artificial Sequence
  ENSG00000261441_5 (sequence is synthesized)
agagacggtaacaaccgacgggccgcgtggcctaatggataaggcgtctgacttcggatcagaagattgcaggttcgagtcctgccgcggtcgaagggaggttatgattaacttttagtt

SEQ ID NO: 821683 - DNA, 120 bp, Artificial Sequence
  ENSG00000261441_6 (sequence is synthesized)
tattcctccctcaggaacgaagtattgggacaatgtgaacgtagtcgccgccgattcccaccgcacttcaaagatgtgggaacgccaagatccgcggaagtaaccacgcccagcaagtcc

SEQ ID NO: 821684 - DNA, 120 bp, Artificial Sequence
  ENSG00000261441_7 (sequence is synthesized)
ctgcgagattgcccgcctacgtgtctcagcggaggcacatttctaaaatgtaccaggtctctcgcaccccgacgcaggtggaggaaagtggagagggaggggcatcctgtacagaaatct

SEQ ID NO: 821685 - DNA, 120 bp, Artificial Sequence
  ENSG00000261441_8 (sequence is synthesized)
caatttatactcaattgatggttggcaagagttggggctcgcagccaaagcgaggctccctccctcgcccatccggtgctgcctcctcgtccagagcaattctgaggggtaaaaatgttg

SEQ ID NO: 821686 - DNA, 120 bp, Artificial Sequence
  ENSG00000261442_0 (sequence is synthesized)
ggaaccaacacactcaaggacccagggcctcagggcagtcctcgaacaccactaaaacaaaggcatccttctcccctggtttactgtcacccccagggggactggagcccagcagttcac

SEQ ID NO: 821687 - DNA, 120 bp, Artificial Sequence
  ENSG00000261442_1 (sequence is synthesized)
tgcctccctgcccgagggattcggactctgggtggcttgcaggtgtccgggcaacctgcacagggagacaacagccacagaaatgaaaactgcaaaatcccttccgtgggaggcctcgag

SEQ ID NO: 821688 - DNA, 120 bp, Artificial Sequence
  ENSG00000261442_2 (sequence is synthesized)
gcattccccgaacagcctcaatgctctccacacatgcctccaggcaggaggatacatacgtttgtcatctctacagctgagaaaaaccaaaaccacaaggccacaggtcagaggctgtct

SEQ ID NO: 821689 - DNA, 120 bp, Artificial Sequence
  ENSG00000261442_3 (sequence is synthesized)
tggggatggccaggggagggggacagccctgtcccttccatacaggccacagagtgagccaagaagccttctgggcccgtcttgtgtctcttgcaccttgtcaatatcttgtggtacaca

SEQ ID NO: 821690 - DNA, 120 bp, Artificial Sequence
  ENSG00000261442_4 (sequence is synthesized)
gtgtgcaatgaacgccaccagacatctgcgagaggaaaacagggacattccgaatcactgaaacaagccaaccttggaagggcgggaggcccgggacgcggcaaggcctcccaagaacgc

SEQ ID NO: 821691 - DNA, 120 bp, Artificial Sequence
  ENSG00000261442_5 (sequence is synthesized)
gggcgaaaggcgaagcacaggccatctgagtgcacagacggactcaacgcagcagaggagccgcagcaaacaccgtcggagccgcggagcgtggagggcagatgagtaaagtagggtctt

SEQ ID NO: 821692 - DNA, 120 bp, Artificial Sequence
  ENSG00000261442_6 (sequence is synthesized)
ggcccaccgggtcagagaaggctccctgggagtctgggctctcagagacatcacagagagcatctgttccgcggggcgagagccctgttagaagaaagcttcagttatgtgagcagtggc

SEQ ID NO: 821693 - DNA, 120 bp, Artificial Sequence
  ENSG00000261442_7 (sequence is synthesized)
gccagtgctgagccctggggagccaatgcaaccttctgcccacctcagggatgccaggccccgctgaggccacatacccaagaccacgtgagaggacccaagtcccccgcgagctggatg

SEQ ID NO: 821694 - DNA, 120 bp, Artificial Sequence
  ENSG00000261442_8 (sequence is synthesized)
aaaggactgagcaaacggtgtttcttctaacggcctcaggtcttgatttcagtcactcctcaaacctctcgcttcttcgcccaggtctatggaaaggcaaatgaccgaacactcgctcag

SEQ ID NO: 821695 - DNA, 120 bp, Artificial Sequence
  ENSG00000261442_9 (sequence is synthesized)
gatccagggacccctccaacactgctccaggtcagcttctccacaaacaagcagagggacacaggccgctcctcttccagcccctcctagggcgcagcaaagggctgagctccgggtaat

SEQ ID NO: 821696 - DNA, 120 bp, Artificial Sequence
  ENSG00000261442_10 (sequence is synthesized)
tctacagctgttcagcgagcacaagtcaggcactgcagggatggtgcagacgacaccacgccgtcgtccactggacaagatgaccccaaagcgcaaagctagagagcctcacgggacaca

SEQ ID NO: 821697 - DNA, 120 bp, Artificial Sequence
  ENSG00000261442_11 (sequence is synthesized)
gcggaagggcgcggggaaagccaggcaatgtcggacccaggcggcaccgggtctgggaggtgggcaggcaggagtggtcaccacttcagggtcatccaggaaatacagaacattttccag

SEQ ID NO: 821698 - DNA, 120 bp, Artificial Sequence
  ENSG00000261445_0 (sequence is synthesized)
actcaaccacagggggaacactaatatatccctggctcagtattcagctgatgagactctcctgcctggttctactcacaggagtcagaaaatgtgtgggactgtgaatctcatccctgg

SEQ ID NO: 821699 - DNA, 120 bp, Artificial Sequence
  ENSG00000261445_1 (sequence is synthesized)
actttcctatgaggtctcactatgttgcttaggctggagtgcagtagctagtcacaaacacaatcatggtgcgttatagcctggactcaaaggatccttctgccttagcctcctgagtag

SEQ ID NO: 821700 - DNA, 120 bp, Artificial Sequence
  ENSG00000261445_2 (sequence is synthesized)
ttttgactctcaagaaaaaagtacttggtggcacattaaagaatgagtgaatgagtttacaaaacacaagaggcagggtacagttattccaaaatgataggaaacaacattgtgcctttg

SEQ ID NO: 821701 - DNA, 120 bp, Artificial Sequence
  ENSG00000261445_3 (sequence is synthesized)
cttttgtttgaagagaaataaactgtttccattcaagttttaagtgccaaaatagctaattactgttaaaatatcaccacgattagtaacattactcagagaatcactatttccaacaga

SEQ ID NO: 821702 - DNA, 120 bp, Artificial Sequence
  ENSG00000261447_0 (sequence is synthesized)
ggaaaatgcagctgcatccccgaggggactgacgggggcctccaccctcctcggtggcaacccaggtggtccccagtttcctagccagcagctgtggccaacctctgcgcgaagcaacgg

SEQ ID NO: 821703 - DNA, 120 bp, Artificial Sequence
  ENSG00000261447_1 (sequence is synthesized)
gccacgctgcaggaccacgaagccaggcagccgcgtcgactcctgcagggtgttctctccggagtgactcccgagctttcccgcttcccaggccccttagatatcgcctgcgcttcaaat

SEQ ID NO: 821704 - DNA, 120 bp, Artificial Sequence
  ENSG00000261447_2 (sequence is synthesized)
tcggagattgacggcgtctccggaatgcgtcgcagtcctgcgagttctccgccagggggagagccgcgcgggcttgggcctgagcgaagacagccgggctgcagccctccaggggaactg

SEQ ID NO: 821705 - DNA, 120 bp, Artificial Sequence
  ENSG00000261447_3 (sequence is synthesized)
ccgagtcccgccggggacagcggagagcctgcggattgtgaagccgaggaaggctcggcttggttttcctacccgctcctcagttctggttgatcggaacttaagtgtctttgagcctag

SEQ ID NO: 821706 - DNA, 120 bp, Artificial Sequence
  ENSG00000261447_4 (sequence is synthesized)
gccatccgccctagatatggctcctaactcgagaggccaccctttgcggcagggaccaggtggcaagtgctgtgcattaatgaaaagctgtgggctagacaggccccgggaggcctgggc

SEQ ID NO: 821707 - DNA, 120 bp, Artificial Sequence
  ENSG00000261447_5 (sequence is synthesized)
tctggcgccagccccacctgtaattggcaatgcaatagctaaatcattccccctcttagaaacacagatttttccataataatgttataatgcacaaagccttgtagtttgcaaagccct

SEQ ID NO: 821708 - DNA, 120 bp, Artificial Sequence
  ENSG00000261447_6 (sequence is synthesized)
ctccgcacatgtattctccagtaaaatgaagataagcgctggttatccagatcccttgggaaatggatcttttaccacaccgtgtttccatattattttaagcacgtctctagagaagtc

SEQ ID NO: 821709 - DNA, 120 bp, Artificial Sequence
  ENSG00000261447_7 (sequence is synthesized)
tgggggtgtagcctaaagcattctgaaagtcttgttttagctttaaaattcatatgaattttgcattgtactttgtaatttttttttgctttaataaaacaatagctaccttctcaaaaa

SEQ ID NO: 821710 - DNA, 120 bp, Artificial Sequence
  ENSG00000261446_0 (sequence is synthesized)
ggtgtccttgtaagaaggggaaatttgaacatagacacatacatagatagggaaggaaatgcgaagacacacagaaagatgaccatcttacaagccaacaagagaggtcttaagcagatc

SEQ ID NO: 821711 - DNA, 120 bp, Artificial Sequence
  ENSG00000261446_1 (sequence is synthesized)
ctctcacaatctcagaaggcaccaacactgccaacatttcactctctgacttccagcctccagaagtagatcaggatagaattgctgtttgacatctctcccaacttccttatgctctcc

SEQ ID NO: 821712 - DNA, 120 bp, Artificial Sequence
  ENSG00000261446_2 (sequence is synthesized)
ggagcagaacacttcacagcagttatcaatcccagggggaggatccaaacacttcttcctattgcatcttggaactggagtcactaagaaaaatgcaacatggtcaagcactgggtagaa

SEQ ID NO: 821713 - DNA, 120 bp, Artificial Sequence
  ENSG00000261446_3 (sequence is synthesized)
caacacactttacttacagagagaagaaacagaacaagataagcttaatagagtgctgtgatcccttatggctagcacgtcacccaggcaggtcacccaggcaggtggctgagaatgggc

SEQ ID NO: 821714 - DNA, 120 bp, Artificial Sequence
  ENSG00000261446_4 (sequence is synthesized)
aattggcctacacgcacccctgtcgggctgaagcagaagaacccaacccctcctccatggagtctgaaatagtaaaaactgggtatgttcctgaggaccattgacttacgagcttaaacg

SEQ ID NO: 821715 - DNA, 120 bp, Artificial Sequence
  ENSG00000261446_5 (sequence is synthesized)
atcaaggcccatttttatgcagtcaactgggggtggaaagaccccacaaactacctttcccaacagcctgtcttccttgttgagaaaattctctcaaggtatttaccagcagtaagttgt

SEQ ID NO: 821716 - DNA, 120 bp, Artificial Sequence
  ENSG00000261446_6 (sequence is synthesized)
ttgatcctctagaatgtctaatgtcatcttgatgttggattattgtgttaccaagctaacacaagtgatgccaagaatagcctgagaaatgcagcagtaagatggggatttatgactgac

SEQ ID NO: 821717 - DNA, 120 bp, Artificial Sequence
  ENSG00000261446_7 (sequence is synthesized)
ccacccccttgctggcgggtgagaggatgccatctctgttggaaggaagaaaggcctgcagatacaatagaaaagccttcacacaaatctgctggagaagtagatccgggtgaaacagca

SEQ ID NO: 821718 - DNA, 120 bp, Artificial Sequence
  ENSG00000261446_8 (sequence is synthesized)
ggaaaactgtcgtaaaaatgcatatctcagatctcctactagtagggtcataagcaacccatgactccagctgctgaggtctaaatctgtcactacttatgctcggagactatttcctgt

SEQ ID NO: 821719 - DNA, 120 bp, Artificial Sequence
  ENSG00000261446_9 (sequence is synthesized)
ggaggaagtattcttaaccaattactgcatttggctgtgatatgaaagttggctcagtcctgtaagtttccagattcttctaagagtgaactgcattgtaatctgagaatttatgttttc

SEQ ID NO: 821720 - DNA, 120 bp, Artificial Sequence
  ENSG00000261446_10 (sequence is synthesized)
ccttcctttcattcttctctttcaaagggtttagtactacattgtagttcgatggttttccagcctcctctggtttctcaatacacaaaagttcttccagtaaatcttttacatacataa

SEQ ID NO: 821721 - DNA, 120 bp, Artificial Sequence
  ENSG00000261446_11 (sequence is synthesized)
agaacttacaggacttgctaatagtctacagaaccagccatcatgccaaagtgactttcagcattgaactacacctcacaatacctgcattctcttttttactacaacttgctgcagatt

SEQ ID NO: 821722 - DNA, 120 bp, Artificial Sequence
  ENSG00000261446_12 (sequence is synthesized)
tcttttttttttttttttctggtagcagaaatccccatttgatgccaattcctcatcatcataagggaatgtaatcaaggattctttcctaataatgtgaatagatgtgcagtgactgac

SEQ ID NO: 821723 - DNA, 120 bp, Artificial Sequence
  ENSG00000261446_13 (sequence is synthesized)
agaggtggtacagcgggtttattcttcttatggcagtgatcttctgactgtaacccaagggtgaaagctcatgcactcttagcaacaagtaaattgtacgaacatgccccagatatttct

SEQ ID NO: 821724 - DNA, 120 bp, Artificial Sequence
  ENSG00000261446_14 (sequence is synthesized)
aacatgccccagatatttcttcatttatttgtaaattatatacagtttagtctattctgaaaatatacagttttttaaaaattgtaaaacaaatatgtttttctttactgtgtaaaatta

SEQ ID NO: 821725 - DNA, 120 bp, Artificial Sequence
  ENSG00000261446_15 (sequence is synthesized)
gcgttgaagagaagttgcctggcttgatatgtagttgaaaagtagaacttacaggacttgctaatagtctacaggtcaatagagcatggaggaagtgagattttgaccatccaaagccta

SEQ ID NO: 821726 - DNA, 120 bp, Artificial Sequence
  ENSG00000261446_16 (sequence is synthesized)
agtctcaagaagctttgtggttttccactgtgctcttttgaaacacagtcctaatgtggccatttaaaggagcacaatctagtgcaatccagcctactggaggatataagatctgtagac

SEQ ID NO: 821727 - DNA, 120 bp, Artificial Sequence
  ENSG00000261446_17 (sequence is synthesized)
tctcaagccagcagcaagtgacacttccaggcacaaccagccatcatgccaaagtgactttcagcattgaactacacctcacaatacctgcattctcttttttactacaacttgctgatt

SEQ ID NO: 821728 - DNA, 85 bp, Artificial Sequence
  ENSG00000261446_18 (sequence is synthesized)
gcctgattaataataatttgttgcagcagccacggcaaacggaaacatttgggtttctaaagacggaagcagctgggcgcggaga

SEQ ID NO: 821729 - DNA, 82 bp, Artificial Sequence
  ENSG00000261446_19 (sequence is synthesized)
ggcgcctgcctgtagtctcagttactctggaggctgacgcaggagaatcacttaaaccagggaggcggaggttgcagtgagc

SEQ ID NO: 821730 - DNA, 90 bp, Artificial Sequence
  ENSG00000261446_20 (sequence is synthesized)
cactccagctagcattaataataaaataaagaaggatgctctgaaaagggaaaggagaaaagggaggcatttgtggagtaggtgctcatc

SEQ ID NO: 821731 - DNA, 120 bp, Artificial Sequence
  ENSG00000261446_21 (sequence is synthesized)
aaaggagaaaagggaggcatttgtggagtaggtgctcatcactttctcaaggatatttacaaatgtaatcatatttaccgcacagaatcctcgtaaaagtgacttaacttcctgacagag

SEQ ID NO: 821732 - DNA, 120 bp, Artificial Sequence
  ENSG00000261446_22 (sequence is synthesized)
catgagcaccatcatctctgacaaacactccctttctagcctcacgcatttcaaggaaatcacttctaactacaagcagccagaaaagagcagacagtaaaacacagagatcaggataga

SEQ ID NO: 821733 - DNA, 120 bp, Artificial Sequence
  ENSG00000261446_23 (sequence is synthesized)
tgccagttggtgttagccagtgtcaaaggacaagactacaatacatttagttaatgatataactggctttctttcatgattcatgaattggggtagcattctattctgtagaataagagc

SEQ ID NO: 821734 - DNA, 120 bp, Artificial Sequence
  ENSG00000261446_24 (sequence is synthesized)
cttcataggcagaaaaagactgaagaaagaaataatgaatggaaagtgaattgcttgttccagggttactttccttacagaattaaaacgaggggacttccttattatgctaaattgaat

SEQ ID NO: 821735 - DNA, 120 bp, Artificial Sequence
  ENSG00000261446_25 (sequence is synthesized)
tgactggaatcttgcttgtttttcttcttgaaattttgcccatttcaaagttcagtttgattaagtggcacttatcaggagtgactccattctggtttggtctggtctactgaggcctag

SEQ ID NO: 821736 - DNA, 120 bp, Artificial Sequence
  ENSG00000261446_26 (sequence is synthesized)
tgcaggaaggcagttcaagacaatgacctcccataaaatttggttaacatcatgctttattatcagtcacatgaaaactgcctgaattgtcacagaatggagtggcaaagttggagacta

SEQ ID NO: 821737 - DNA, 120 bp, Artificial Sequence
  ENSG00000261446_27 (sequence is synthesized)
catgtggatctaagagcttagacgcttaattataatagctgatctagctactcctgcctctgaaagaccaacttgtcaacctttaatatgaatatcccttaaaggaacctaaaggacact

SEQ ID NO: 821738 - DNA, 120 bp, Artificial Sequence
  ENSG00000261446_28 (sequence is synthesized)
tggtggtaaattgactatattgagcttctcccttccacgaaggtcgtggatacccattctggttataagtctgctttgccacccttgagtctgagccaaaatccttcactggtgcttatg

SEQ ID NO: 821739 - DNA, 120 bp, Artificial Sequence
  ENSG00000261446_29 (sequence is synthesized)
gtatgcctgatacacagcgtagcttctgatcaggaaaccctcttgacagtgaaggatgtgaggggcaaagcccaaacccatgggcttcaatcattgtatcacacacagacccatccataa

SEQ ID NO: 821740 - DNA, 120 bp, Artificial Sequence
  ENSG00000261446_30 (sequence is synthesized)
gcagctggtatcacaaggtgttggaagagcttctaaatgcaccctcctcaagtctcaggtgtaagacaataatcaaaaaggatgtggtatttcataggaagaaaaaagttgttcatcatt

SEQ ID NO: 821741 - DNA, 120 bp, Artificial Sequence
  ENSG00000261446_31 (sequence is synthesized)
agaaagaacagaaggtcttgaaaccaaggaggagaaaaacgagtaactccacttactacacttcctattgatttaatgaaggatttgcttcccatctctgcaaatctgggttcatcagct

SEQ ID NO: 821742 - DNA, 120 bp, Artificial Sequence
  ENSG00000261446_32 (sequence is synthesized)
tgaaggtcctgttcctcaaagctggtgtattttggtgactagaagcagcaagtgtcccaatggactaccatttatgactaccagggaagttcagactccttgtgcccaaagtttaccagg

SEQ ID NO: 821743 - DNA, 120 bp, Artificial Sequence
  ENSG00000269275_0 (sequence is synthesized)
ggactctttggacagggcgactggcacgctgcccgtggacggcgtcttcttggtccctcggtgcttggagagcagcgagacggacttggacatgtcacacggacccgccaggaaaccggg

SEQ ID NO: 821744 - DNA, 120 bp, Artificial Sequence
  ENSG00000269275_1 (sequence is synthesized)
catatgcagcacgtcccggcgcttggcccacctgcagggagcggacggctcagcccccgccctccgccggaccctccccctgggggtgcaggcgcccgccctatcccaggcccactcgcc

SEQ ID NO: 821745 - DNA, 120 bp, Artificial Sequence
  ENSG00000269275_2 (sequence is synthesized)
cttcctccgcacgttttctggacaagggaggcagggttaagacccggggctcccgaccgccagacccacgccccagggacctggggccaggagccctcaccgtctggacgctggtggtag

SEQ ID NO: 821746 - DNA, 120 bp, Artificial Sequence
  ENSG00000269275_3 (sequence is synthesized)
cagaccccattgcggtagcagcaccggagacgcaggcagaggttggggctatcgatggccgcctggcccccacagctctcccggtcccatatgtcaccctcacagcctggggaccaacca

SEQ ID NO: 821747 - DNA, 89 bp, Artificial Sequence
  ENSG00000269271_0 (sequence is synthesized)
gaaatacatttaaccaaagagatgcaatacgtatacattgacaattttaaaatactgctcaaagaaataacaaaagacctaaatgagga

SEQ ID NO: 821748 - DNA, 120 bp, Artificial Sequence
  ENSG00000269271_1 (sequence is synthesized)
aaatactgctcaaagaaataacaaaagacctaaatgaggaaaaagtcatcccagtatcataaatcaaaaggcttaaaattagttatctccctctagggaacctagactaatacactcacc

SEQ ID NO: 821749 - DNA, 120 bp, Artificial Sequence
  ENSG00000269271_2 (sequence is synthesized)
ccgtctccttgttcggaggctctcctgcctatcagcttttctcctctgtgctttccatgtccctgtggttctctggtgagccccatcatgctgtcctagaagatccacttagaatttcgg

SEQ ID NO: 821750 - DNA, 120 bp, Artificial Sequence; identical to SEQ ID NO: 773174
  ENSG00000269271_3 (sequence is synthesized)

SEQ ID NO: 821751 - DNA, 120 bp, Artificial Sequence; identical to SEQ ID NO: 773175
  ENSG00000269271_4 (sequence is synthesized)

SEQ ID NO: 821752 - DNA, 120 bp, Artificial Sequence; identical to SEQ ID NO: 773176
  ENSG00000269271_5 (sequence is synthesized)

SEQ ID NO: 821753 - DNA, 120 bp, Artificial Sequence; identical to SEQ ID NO: 773177
  ENSG00000269271_6 (sequence is synthesized)

SEQ ID NO: 821754 - DNA, 64 bp, Artificial Sequence
  ENSG00000234318_0 (sequence is synthesized)
cttgaattttggctaaacatgttcgggctctcagcattctttcacccctcccttcagaggaaac

SEQ ID NO: 821755 - DNA, 120 bp, Artificial Sequence
  ENSG00000234318_1 (sequence is synthesized)
atgccatcactaacaggcaatggaagcttcagcaagtccctccactggtctgtgcctccattccccatctgtaaagaggatcgctggtccctatcacccccctgggatgtagtgaggctt

SEQ ID NO: 821756 - DNA, 120 bp, Artificial Sequence
  ENSG00000234318_2 (sequence is synthesized)
gtcatgtggcaagggaaagcacctgggacaaagcaaggtcttatgccaatgctttctgtagcatcatcctggagcctcaagtcttgtttgaaattgaataaaggagaaacatagggacga

SEQ ID NO: 821757 - DNA, 120 bp, Artificial Sequence
  ENSG00000234311_0 (sequence is synthesized)
ggaccctgggccactgcaccccaccaggacggcaggactgaaaaggccactgacctgctcatctgacacctgagggccgctggagacccagggacactcctgctgcggctcatgtttgga

SEQ ID NO: 821758 - DNA, 120 bp, Artificial Sequence
  ENSG00000234311_1 (sequence is synthesized)
agctgtccggaggcgggacttcctcttcctccaggggccgccgtccggaggcgggacttcctcttcctcggggacaactgtctttttctcttaaggccttggactgcctggatgaggcta

SEQ ID NO: 821759 - DNA, 120 bp, Artificial Sequence
  ENSG00000234311_2 (sequence is synthesized)
taatatggtcagtactctgctctacccaaagtctcctgattgaaatattaacctcatccaagaaacaccctcacagcgacgtctacactggtgtttgaccaaatagctggggaccgtggc

SEQ ID NO: 821760 - DNA, 120 bp, Artificial Sequence
  ENSG00000234311_3 (sequence is synthesized)
ctggtcgagctgacacaaaagtaaccatcacagctgctgctatggtctgaatgttgatgtcacccccagattcatttgttagaacttaagccccaaggcgatggcatcactggtgggctt

SEQ ID NO: 821761 - DNA, 120 bp, Artificial Sequence
  ENSG00000234311_4 (sequence is synthesized)
gtcctggttgcccttccccaccctcccgtccctgccactgggtgaggacacagcaagaagccgccgtcctgggagcagagagcagaaagcagccctcaccagacgctgaatctgctgggg

SEQ ID NO: 821762 - DNA, 120 bp, Artificial Sequence
  ENSG00000234311_5 (sequence is synthesized)
cctcggtcctggacgtcccagcctccagaactgagcgatgaaattctggttacaaattgccccctctgaggtattttgttttagcagaaggaacagacgaggatgaccaccgaggccctt

SEQ ID NO: 821763 - DNA, 120 bp, Artificial Sequence
  ENSG00000234311_6 (sequence is synthesized)
ctcaggctgccgcgggtctccaggatggggacagtcagctggggccaaccgagctgcatgtggtcaagggcccatgcatgtgaccagggcccgcctcccacgtcacccagtgcaccctca

SEQ ID NO: 821764 - DNA, 120 bp, Artificial Sequence
  ENSG00000234311_7 (sequence is synthesized)
gcatgggacacggacctagacactgccggggtctccgtccttgcaggcactgccaggcgcccctccctgggagaagctgcagctctgaggctacggtcttgcaggtcagccaccacctgg

SEQ ID NO: 821765 - DNA, 120 bp, Artificial Sequence
  ENSG00000228630_0 (sequence is synthesized)
aggcgagagccgcggctgacagggtctgggacagaaggaaagccctccagcctccaggccctgccttctgcctgcacattctgccctgatttccggaacctggaagcctaggcaggcagt

SEQ ID NO: 821766 - DNA, 120 bp, Artificial Sequence
  ENSG00000228630_1 (sequence is synthesized)
ggggaactctgactcgcctgtgctctggagcttgatccgaaagcttccacagtgaggactgctccgtgggggtaagagagcaccaggcactgaggcctgggagttccacagaccaacacc

SEQ ID NO: 821767 - DNA, 120 bp, Artificial Sequence
  ENSG00000228630_2 (sequence is synthesized)
cctgctcctggcggctcccacccgggacttagaccctcaggtccctaatatcccggaggtgctctcaatcagaaaggtcctgctccgcttcgcagtggaatggaacggatttagaagcct

SEQ ID NO: 821768 - DNA, 120 bp, Artificial Sequence
  ENSG00000228630_3 (sequence is synthesized)
tttttaaggccccaaagagtctgatgtttacaagaccagaaatgccacggccgcgtcctggcagagaaaaggctgaaatggaggaccggcgccttccttataagctcgttggggcctaag

SEQ ID NO: 821769 - DNA, 120 bp, Artificial Sequence
  ENSG00000228630_4 (sequence is synthesized)
ccagtaccgacctggtagaaaaagcaaccacgaagctagagagagagccagaggagggaagagagcgccagacgaaggtgaaagcgaaccacgcagagaaatgcaggcaagggagcaagg

SEQ ID NO: 821770 - DNA, 120 bp, Artificial Sequence
  ENSG00000228630_5 (sequence is synthesized)
cggcagttcccggaacaaacgtggcagagggcaagacgggcactcacagacagaggtttatgtatttttattttttaaaatctgatttggtgttccatgaggaaaagggaaaatctaggg

SEQ ID NO: 821771 - DNA, 120 bp, Artificial Sequence
  ENSG00000228630_6 (sequence is synthesized)
aacgggagtacagagagaataatccgggtcctagctcgccacatgaacgcccagagaacgctggaaaaacctgagcgggtgccggggcagcacccggctcgggtcagccactgccccaca

SEQ ID NO: 821772 - DNA, 120 bp, Artificial Sequence
  ENSG00000228630_7 (sequence is synthesized)
ctaatcaatccaaaaggaaaaagaaaagagaggggtgggaaggcatggggtgaaaaacttcaggtgacacaaagcaaaaagattccagtcaccaaaaacaaaaacaaaaaaaaatctttt

SEQ ID NO: 821773 - DNA, 120 bp, Artificial Sequence
  ENSG00000228630_8 (sequence is synthesized)
tggccaagcacctctatctcagccgcgcccgctcagccgagcagcggtcggtggggggactgggaggcgctaattaattgattcctttggactgtaaaatatggcggcgtctacacggaa

SEQ ID NO: 821774 - DNA, 120 bp, Artificial Sequence
  ENSG00000228630_9 (sequence is synthesized)
tatctgttgggcgtgagtgcactgtctctcaaataatttttccataggcaaatgtcagagggttctggatttttagttgctaaggaaagatccaaatgggaccaattttaggaggcccaa

SEQ ID NO: 821775 - DNA, 120 bp, Artificial Sequence
  ENSG00000228630_10 (sequence is synthesized)
acagagtccgttcagtgtcagaaaatgcttccccaaaggggttgggagtgtgttttgttggaaaaaagcttgggttataggaaagcctttccctgctacttgtgtagacccagcccaatt

SEQ ID NO: 821776 - DNA, 120 bp, Artificial Sequence
  ENSG00000228630_11 (sequence is synthesized)
taagaattacaaggaagcgaaggggttgtgtaggccggaagcctctctgtcccggctggatgcaggggacttgagctgctccggaatttgagaggaacatagaagcaaaggtccagcctt

SEQ ID NO: 821777 - DNA, 120 bp, Artificial Sequence
  ENSG00000228630_12 (sequence is synthesized)
tgcttcgtgctgattcctagacttaagattcaaaaacaaatttttaaaagtgaaaccagccctagcctttggaagctcttgaaggttcagcacccacccaggaatccacctgcctgttac

SEQ ID NO: 821778 - DNA, 120 bp, Artificial Sequence
  ENSG00000228630_13 (sequence is synthesized)
acgcctctccaagacacagtggcaccgcttttctaactggcagcacagagcaactctataatatgcttatattaggtctagaagaatgcatcttgagacacatgggtaacctaattatat

SEQ ID NO: 821779 - DNA, 120 bp, Artificial Sequence
  ENSG00000228630_14 (sequence is synthesized)
aatgcttgttccatacaggagtgattatgcagtgggaccctgctgcaaacgggactttgcactctaaatatagaccccagcttgggacaaaagttgcagtagaaaaatagacataggaga

SEQ ID NO: 821780 - DNA, 120 bp, Artificial Sequence
  ENSG00000228630_15 (sequence is synthesized)
acacttaaataagtgatgcatgtagacacagaaggggtatttaaaagacagaaataatagaagtacagaagaacagaaaaaaaatcagcagatggagattaccattcccaatgcctgaac

SEQ ID NO: 821781 - DNA, 120 bp, Artificial Sequence
  ENSG00000228630_16 (sequence is synthesized)
ttcctcctgctattaagattgctagagaattgtgtcttaaacagttcatgaacccagaagaatgcaatttcaatgtatttagtacacacacagtatgtatataaacacaactcacagaat

SEQ ID NO: 821782 - DNA, 120 bp, Artificial Sequence
  ENSG00000228630_17 (sequence is synthesized)
atattttccatacattgggtaggtatgcactttgtgtatatataataatgtattttccatgcagttttaaaatgtagatatattaatatctggatgcattttctgtgcactggttttata

SEQ ID NO: 821783 - DNA, 120 bp, Artificial Sequence
  ENSG00000228630_18 (sequence is synthesized)
tgccttatggagtatatactcacatgtagctaaatagactcaggactgcacattccttgtgtaggttgtgtgtgtgtggtggttttatgcataaataaagttttacatgtggtgaatata

SEQ ID NO: 821784 - DNA, 89 bp, Artificial Sequence
  ENSG00000228634_0 (sequence is synthesized)
gagacagggtctccctctgtctcccaggctagactgcagtggcatagtctcggctcacttcagccttgacctcccaggctccagtgaac

SEQ ID NO: 821785 - DNA, 89 bp, Artificial Sequence
  ENSG00000228634_1 (sequence is synthesized)
gcctcctgagtagctggaactacaggttcataccactatgcctggctagtttttgtattttttgtagagatgttgtctctatgttgttg

SEQ ID NO: 821786 - DNA, 120 bp, Artificial Sequence
  ENSG00000228634_2 (sequence is synthesized)
taaaacaaaacccaacaacaatcaatctataaataaatttccttatctgtaaagctaaaagaatactacttacaggattattgagtttcaaatgagacaatacatgatttggcgtaagaa

SEQ ID NO: 821787 - DNA, 120 bp, Artificial Sequence
  ENSG00000228634_3 (sequence is synthesized)
aggaatgtggaaacctaaaccctgaaagggtaatattgaactttaccagtaccccaagatctctaccatcaccctattcgataaacataactaagtccaccatgttaaaactatggatcc

SEQ ID NO: 821788 - DNA, 120 bp, Artificial Sequence
  ENSG00000228636_0 (sequence is synthesized)
ttgtgagaagagagagcaacaccagcaatgcacatgcaaagaggaaaggccctgcaaggatgctaagaacgaggacggccatccgcccaccaaggagagaagtatcaggaggaacaaacc

SEQ ID NO: 821789 - DNA, 120 bp, Artificial Sequence
  ENSG00000228636_1 (sequence is synthesized)
aaagcgactacatgctgaaggagatggtgcggggactcgctagtacctattggcaggacctggggaactttggtgggtgcttgataatggggactggaataaaaactggctaagcaaaaa

SEQ ID NO: 821790 - DNA, 120 bp, Artificial Sequence
  ENSG00000228636_2 (sequence is synthesized)
tctggcgcctgcattcaatgaacgtttgtaatgttagcaggtgtggaccttgaggagattttctctccctggctgcccaattatcatttttagagaggcaatgcgataattgctgaacga

SEQ ID NO: 821791 - DNA, 120 bp, Artificial Sequence
  ENSG00000228636_3 (sequence is synthesized)
tgtcacctgacattcctagcgggtgggagagagccctctcctgccccgctcattgcctaactacctgtaacaggtgtgtgggtgagtgctccctgtgatggaacggtgtcctgttcagga

SEQ ID NO: 821792 - DNA, 120 bp, Artificial Sequence
  ENSG00000228636_4 (sequence is synthesized)
ggcaccttgagctgccaggaccggctcgggctgctcgcgatcccaaactagaacaaatggaaatgttcagttgtctagctcacagggatatccacaagccagacccagaaagcctttgct

SEQ ID NO: 821793 - DNA, 120 bp, Artificial Sequence
  ENSG00000228636_5 (sequence is synthesized)
accattgatgaagatgccaagtccacagcccaacagccagaagacccttggtctagtccgcagcttgggctaccttccagcataaagtcactaaagatgtgccgggcatgatgaaggaag

SEQ ID NO: 821794 - DNA, 120 bp, Artificial Sequence
  ENSG00000228639_0 (sequence is synthesized)
aagttgcagactgcgctcagcaagacctcacaacatggaggaaaattaaagagataagtggtccatggagtatccccttaccccaccataaattggcataattttgtgcacaatccaggg

SEQ ID NO: 821795 - DNA, 120 bp, Artificial Sequence
  ENSG00000228639_1 (sequence is synthesized)
ccaaatcctacagaagtataacaaccatagaacagacaaacaccaacagcatcaacaacagagaaactcagtccaggaggatatgaaaccctttgtaataaagaaagcaacatccatgaa

SEQ ID NO: 821796 - DNA, 120 bp, Artificial Sequence
  ENSG00000228639_2 (sequence is synthesized)
agcggttgattgcgaggagcagcggaaggaaggatgtatcaaaccgaaagaagaaagaacccctgccagtcgcccccatgacatccgactctgaacggcagcgatctagaggctgtggcg

SEQ ID NO: 821797 - DNA, 120 bp, Artificial Sequence
  ENSG00000228639_3 (sequence is synthesized)
tgttgcagattaacagcagcgagggcaggaggcaaatcagatgccgcaggagctgactgttttctttagccctgagagctgactgtaggcacaggttgcatatcaaaggcaacgggaatc

SEQ ID NO: 821798 - DNA, 120 bp, Artificial Sequence
  ENSG00000228639_4 (sequence is synthesized)
gaccatttcagtagagccttttaagacacatgttttggaatacagtcaaatgcgtgctgctgtatgaccagcctatttgaactacttaagcatcaactaattaatctgcaagtgaagaat

SEQ ID NO: 821799 - DNA, 120 bp, Artificial Sequence
  ENSG00000228639_5 (sequence is synthesized)
acttccagcattactctataattagacaatctcaggaggaaacaagaggatttcaaaggggagtcagatggtttcgcagaccgctacatcatttattttttcatcactcagattatgcct

SEQ ID NO: 821800 - DNA, 120 bp, Artificial Sequence
  ENSG00000239593_0 (sequence is synthesized)
agagccaagacccggccctcaagtcctcctattagggcagcactagggctacctctttgtcagcagaacctttggatagccgctgatggggtgagtcagctttctgggcccggcagacct

SEQ ID NO: 821801 - DNA, 120 bp, Artificial Sequence
  ENSG00000239593_1 (sequence is synthesized)
tttgggaatccctggcttttggggcacaacatcctggggaccaccaaaaagccctttcacctgagctttgggaaagaggaacagctccggctgtgggtggctcatgtcaccatctggaag

SEQ ID NO: 821802 - DNA, 120 bp, Artificial Sequence
  ENSG00000239593_2 (sequence is synthesized)
ccagctgggccacagcagacgcgctgtaagctccttggaggcaaggattctgtctgcttcacctctaaagcttcagcatggcatgtgccctgcaaatggcagtgccagtggacatatgct

SEQ ID NO: 821803 - DNA, 120 bp, Artificial Sequence
  ENSG00000239593_3 (sequence is synthesized)
atctacattcagagggaagctgagcaaactggctcctgcccacactggaaaatttctctgcctaaaccagcttccctaagccgaggggagagtccaagatcccgaagatggcagggccgt

SEQ ID NO: 821804 - DNA, 120 bp, Artificial Sequence
  ENSG00000239593_4 (sequence is synthesized)
gcaggctcctgggattaagacacaaacaagccctgttctcaggctgacagtaaatggttcagacagtcctgatgacttgtgcattgtgactgacacgggacacagccacggaagtggagt

SEQ ID NO: 821805 - DNA, 120 bp, Artificial Sequence
  ENSG00000239593_5 (sequence is synthesized)
cacggtacccaaaaccagagaggtcagaggccagacacttatctgggctgcaggacctggtgcccacctctgtgggtctttctcaaagactatggcagaaacttcctggttccaagggac

SEQ ID NO: 821806 - DNA, 85 bp, Artificial Sequence
  ENSG00000281756_0 (sequence is synthesized)
ccgccactgcactgcagcctgggcttgaacagaaaaagaagaaaggaatttggacacaaagacacaggtagtgggtctcctatct

SEQ ID NO: 821807 - DNA, 120 bp, Artificial Sequence
  ENSG00000281756_1 (sequence is synthesized)
gaatttggacacaaagacacaggtagtgggtctcctatctatataagagaacagcatgtaatgacacagaggcacacacagaaaagaaggcgagttgaagacagaggcagagaatgggtt

SEQ ID NO: 821808 - DNA, 120 bp, Artificial Sequence
  ENSG00000281756_2 (sequence is synthesized)
aaggcaggaaagaattcttcccaagagccttctgaggaagcacggccctgccaacaccttgatttcagacttctaacctccagaactgtaagaaaaagaaattctgtgttctaagccacc

SEQ ID NO: 821809 - DNA, 120 bp, Artificial Sequence
  ENSG00000281756_3 (sequence is synthesized)
caggtttgtggtagtttgactctcttcactccaccctgtgaggggcatgatgacccctattttatggataaggaaactgaggggcaccagtatttttctgcttcactcctgtgggttatc

SEQ ID NO: 821810 - DNA, 120 bp, Artificial Sequence
  ENSG00000281756_4 (sequence is synthesized)
tcactacctttctgtggagaccactgttctagatgatgaattcctggaaagtaagacctcagcctttccatctttgctgtcgcccagccccagcacagtgtcccaacagtgcttgtggaa

SEQ ID NO: 821811 - DNA, 120 bp, Artificial Sequence
  ENSG00000283445_0 (sequence is synthesized)
aatgatttcccttcaggttgtgcaagcaggaaagtttaaaatcacataagaatgacttgagggaaaagaacacccctttctgctcccggtaaacacaatcagctttgctggtctgggttt

SEQ ID NO: 821812 - DNA, 120 bp, Artificial Sequence
  ENSG00000283445_1 (sequence is synthesized)
tttaatgatctgcatttacaggagtatccatgacccagagagagtatcagtgtcaagaatctgccagtgagaaagtgatttgaagcagctctggagttcagatggccacgggtgcaagtg

SEQ ID NO: 821813 - DNA, 120 bp, Artificial Sequence
  ENSG00000283445_2 (sequence is synthesized)
cctgctctggtgtgctttgcctctggaaagatgccaagtctttgagaatctttgctgcatcagccatgctacatcctgaggacttggagcttttcccaggtgaggccattaatgcctcca

SEQ ID NO: 821814 - DNA, 120 bp, Artificial Sequence
  ENSG00000283445_3 (sequence is synthesized)
cccataggcttaaccctgccctgtttctgagccaactctaaagtgagtaacattggaagccatatgatgagatagtagtgtcacgagatagaagaaaatgggatctctaagtcactggat

SEQ ID NO: 821815 - DNA, 120 bp, Artificial Sequence
  ENSG00000283445_4 (sequence is synthesized)
gtaggaggattcccactgacttgactttggtgagttccctgagccaagcactccgcagctccatcgcagcgtgggcctcttggaaattcggtgctagttctcaaggcctcctacctgctg

SEQ ID NO: 821816 - DNA, 120 bp, Artificial Sequence
  ENSG00000283445_5 (sequence is synthesized)
aaccttagtcttcattgctgaaataagagctgtcctgcaaacagagtttggcgctcgctttctggcctccggctggtggagcaaggacgtttccagcacataagattccccactctgtta

SEQ ID NO: 821817 - DNA, 120 bp, Artificial Sequence
  ENSG00000283445_6 (sequence is synthesized)
aaaaaaaatgtgtttatacttggtcccctctgaaggcggacgacacccatacttttgtcccagcccaatttgctggctgggatttttctcatcctttaaatcccgggaagcaaggaacct

SEQ ID NO: 821818 - DNA, 120 bp, Artificial Sequence
  ENSG00000283445_7 (sequence is synthesized)
gccctctggcgccatctaccggcactgtttttcgagtccaaggagccccctgcggagttgggatgtgtttagtaattgattggatgaatcctgccacttcgttagtagattcttattttc

SEQ ID NO: 821819 - DNA, 120 bp, Artificial Sequence
  ENSG00000283445_8 (sequence is synthesized)
ttcacggactctttactaattagtaaagagattatatagcaaatatattatcttactttaaagagaccagagtctcctatctctcgcttcccccaccccatcagttgtggcattccttca

SEQ ID NO: 821820 - DNA, 120 bp, Artificial Sequence
  ENSG00000283445_9 (sequence is synthesized)
tctttaatttcttccttcgaaaaatatttattttgttattgtatagagatcagggcatgggccacacagctgcacacctgagcaaacagaggggctgactgatttgctgttgtaatgaaa

SEQ ID NO: 821821 - DNA, 120 bp, Artificial Sequence
  ENSG00000283445_10 (sequence is synthesized)
aacattagttttgggttcattactgtgattccacaatgggcaccaaatcccacttaagacccaccgaagaagtcttcaaagggacacggtttcaggtctgtgcctggtgagcgtgctgcc

SEQ ID NO: 821822 - DNA, 120 bp, Artificial Sequence
  ENSG00000283445_11 (sequence is synthesized)
ggcctccagaccttgaaacaagtcaaaacagtgaaccttactcatccgttttcaaaatatggcctgttttctttacaaaatgcagcaaagcctctcagatgggcgctggctgcaatattt

SEQ ID NO: 821823 - DNA, 120 bp, Artificial Sequence
  ENSG00000283445_12 (sequence is synthesized)
gatatattagggagaatcctgactccttccaggtttctgcccatctgttttaaatccaaatggcttggcagaggatggtttttagttatgtatttttttcatttcaaatggaatttaaaa

SEQ ID NO: 821824 - DNA, 120 bp, Artificial Sequence
  ENSG00000283445_13 (sequence is synthesized)
cagcaggggcagaaagcccagatatggatgagagagaaaataaaaaggcccctgtaattccccattcgccttctacatgaaggaaaaaatatcggcatttgttgtaaacctactatgtgt

SEQ ID NO: 821825 - DNA, 120 bp, Artificial Sequence
  ENSG00000283445_14 (sequence is synthesized)
caaggtatcactagggagtgtgatgttgctgagccattggaattttataaaattttaaatgtttttcattttcttcttcagaggtggtttgatttcatgatcaagagcttgaacttaaag

SEQ ID NO: 821826 - DNA, 120 bp, Artificial Sequence
  ENSG00000283445_15 (sequence is synthesized)
tcaaatccttctcctgcctcctgcagtcatggggccttagctattctctgtaatgactctaggtctcagtttccttgcctgagaacaggcctgtgataattaccttgatgggctattgtc

SEQ ID NO: 821827 - DNA, 120 bp, Artificial Sequence
  ENSG00000283445_16 (sequence is synthesized)
gcctgtgataattaccttgatgggctattgtcagttttaaataaggtagtgcagaggcaactaccacaggaatggttctgccttaagaatgaactacgtgtgcatgtgtctttatagcag

SEQ ID NO: 821828 - DNA, 120 bp, Artificial Sequence
  ENSG00000283445_17 (sequence is synthesized)
ataaaactgctcgtagctgcatattatctaccgaacttaggtggattctcagaaagaaaaaggtgatgttcactggcatgaacagtgaatggtggagtggaacgtgaacaggctggagct

SEQ ID NO: 821829 - DNA, 120 bp, Artificial Sequence
  ENSG00000283445_18 (sequence is synthesized)
catgctacatcctgaggacttggagccaaactccttgcagtatttgtctacacaacctgtctctacttcctcacctcccactcaatcctcctgatggtgcagcctttaaaaaccgtgttg

SEQ ID NO: 821830 - DNA, 120 bp, Artificial Sequence
  ENSG00000283445_19 (sequence is synthesized)
aatacttggagtctggaagaagcaaggtaaagagagcaaaggttattttcaccctgaagagacagcctttagagaagtacagccagggagtgatcgagtcccctaacaaagacactttgg

SEQ ID NO: 821831 - DNA, 120 bp, Artificial Sequence
  ENSG00000283445_20 (sequence is synthesized)
tgaaccaagaatgggatggccccgactagagttggtcttcactgccagatgtccaatctatcttcacagcacattgggcagaacccacagttctctcatctcatgacatacatgcatgca

SEQ ID NO: 821832 - DNA, 120 bp, Artificial Sequence
  ENSG00000283445_21 (sequence is synthesized)
gatccctcctgaattatgagcccttttcctggcagcaccagactccagatcaagcctagtacagccagagccagtctctctgtgcccttccaatcaacagccttctctgcaataaggagg

SEQ ID NO: 821833 - DNA, 120 bp, Artificial Sequence
  ENSG00000283445_22 (sequence is synthesized)
ggacccatggcttcagtgaggcccaagcaataccaagaagagaagaaggatatgaagaaaaacaccataaataggatttctgatgtccattttatagatgaagaaggaaggtttagcaag

SEQ ID NO: 821834 - DNA, 120 bp, Artificial Sequence
  ENSG00000283445_23 (sequence is synthesized)
gccattcaaggatacacagctagaggacgagatggaattgaagtccctttgtcagcatccttttcattcttgatgccatttcatttcccctcctggaaagccttcccactccaagagaaa

SEQ ID NO: 821835 - DNA, 120 bp, Artificial Sequence
  ENSG00000283445_24 (sequence is synthesized)
caaagaaaatacaagaaaaacatgaacagtaataatcttatccaaatgttactgagatatttttggagtacttaatttcaatctttttcctatatgcaaacacacacaacttttctctaa

SEQ ID NO: 821836 - DNA, 120 bp, Artificial Sequence
  ENSG00000283445_25 (sequence is synthesized)
caaaaatcagatcatactgtactagcaaacaccctacctgaaatctgtatatccattgcctattgattatgcccattgcttaacatactatgttttatttaatcattatttaattgttga

SEQ ID NO: 821837 - DNA, 120 bp, Artificial Sequence
  ENSG00000283445_26 (sequence is synthesized)
gtatgcaagttatttctgagttttcactcaagctgtttacgcttatttctgtctgggtgtgaatgaatctttggcacattcctctagcaagttgatcaacatctggtctaagatattctt

SEQ ID NO: 821838 - DNA, 120 bp, Artificial Sequence
  ENSG00000283445_27 (sequence is synthesized)
cggtgttgggtttgtgctgtccacatcagcttagcaatgtctgcacaaagactccttccccctcaaaagtgccattcagacttgctgtgggtataaggggaacaatctcattgaggagaa

SEQ ID NO: 821839 - DNA, 120 bp, Artificial Sequence
  ENSG00000283445_28 (sequence is synthesized)
agttgtcattgtggttgagaacatgaactttggaattggatagagctgtgtgaatttggcctaaactccgagtctgcttccacatctgtaaaatgtagacacaaatagttactcataagg

SEQ ID NO: 821840 - DNA, 120 bp, Artificial Sequence
  ENSG00000283445_29 (sequence is synthesized)
ttctggtggggattaaatgtggttatacctgtaaagtccttagcattatgcccagcacatagtgaagatgttcgataaatgataactaaacaaacattgtgtcccctcccactacaacca

SEQ ID NO: 821841 - DNA, 120 bp, Artificial Sequence
  ENSG00000283445_30 (sequence is synthesized)
cactgctctccctcaccttacagactttgctgcttgacaatcttggggtggggctgctgaaaactgaatctcaatttaggaagccatgttgtcccaggattagggttattggcctcacat

SEQ ID NO: 821842 - DNA, 120 bp, Artificial Sequence
  ENSG00000283445_31 (sequence is synthesized)
aagaatctccaaatctgcagaatctcaggccccacccaaaaactattcaatcagaaactacattttcaaaagatatcccagatgatttgtatgcatagtaaagtttgagaaggttttagt

SEQ ID NO: 821843 - DNA, 120 bp, Artificial Sequence
  ENSG00000283445_32 (sequence is synthesized)
ccaggtattcaggaagtgatgctggttgtgtatggaggacaggggcccaggaactgatgaaatctctagtttggaattctcgatagcatttgcattctttttttttttttttatctcaaa

SEQ ID NO: 821844 - DNA, 120 bp, Artificial Sequence
  ENSG00000283440_0 (sequence is synthesized)
aggaggaggtcctctgagccctgaggcagagatctctcacctggaagatgggtctaatgactgcgccccacacacaccagagaggactgcagatagtgcgggatgagaggaagatctctg

SEQ ID NO: 821845 - DNA, 120 bp, Artificial Sequence
  ENSG00000283440_1 (sequence is synthesized)
gccctggagacagcatcatcaagcgaaaacgtatgaggaagaaaatagcagatgagaagaatcaaccaaattccggaagctggaaggcagatgcaagaaggcccttgaatgatgccagca

SEQ ID NO: 821846 - DNA, 120 bp, Artificial Sequence
  ENSG00000283440_2 (sequence is synthesized)
ccttgatattggactttccagcctccagaaccatgagccaatacatttctgttccataaaaattacccagttccaggtattctgctatagcagcacaaaatggactaaaacaatgttggc

SEQ ID NO: 821847 - DNA, 120 bp, Artificial Sequence
  ENSG00000283440_3 (sequence is synthesized)
acaagactcagtgctgggcctggcatgcaacaggtccttggagtggcgtgctgtgtggataatgaatattggggaaggcatctctctccagcccctctcaagctttctgtagtcactggt

SEQ ID NO: 821848 - DNA, 120 bp, Artificial Sequence
  ENSG00000283440_4 (sequence is synthesized)
tcactcggggtcctggcaggaaccaggtgccacactcaaactgagtaattgaagagggtttaatatgggagttatttacataggtgtgggctggtgtagctgcccatatgccctcaaaat

SEQ ID NO: 821849 - DNA, 120 bp, Artificial Sequence
  ENSG00000283440_5 (sequence is synthesized)
cacctctacatggcaatagctacttactgctaacagagtctctctctcattgctgcaaatattttctagccatgcaagaaactcagccggtcatgttgaacaaactaagagtgccaggaa

SEQ ID NO: 821850 - DNA, 120 bp, Artificial Sequence
  ENSG00000283440_6 (sequence is synthesized)
gttaatgtcctggaagcattgccagaggggagggggcagttagattccccagcttcctcgctcctctgctgggttaagcctgcaacatattcatcatctcccagagtgctgcccagggat

SEQ ID NO: 821851 - DNA, 120 bp, Artificial Sequence
  ENSG00000283440_7 (sequence is synthesized)
agagctccaggtgctcagtgtggtgacctgctcatgtcagcttcttcccctttcctgtcttgtttcgcacccacatccttcccatgtttcctcttcccaaataaactacttgcattgaaa

SEQ ID NO: 821852 - DNA, 120 bp, Artificial Sequence
  ENSG00000250453_0 (sequence is synthesized)
ttagctctggccaggggcgctgcaacgggctcagccttctaggggtggcgggtgaaggcctacacctgccccaggacggccaggtccaccagcacctgcaacagacggagaactgaagga

SEQ ID NO: 821853 - DNA, 120 bp, Artificial Sequence
  ENSG00000250453_1 (sequence is synthesized)
cgttgctggtagggctcctgcacgctcagagtggccttggccaggaagtccagggtttccgcaggcagagtgtatgaacaagatgccacagacatgtgagaaatggaacttttgacaaga

SEQ ID NO: 821854 - DNA, 120 bp, Artificial Sequence
  ENSG00000250453_2 (sequence is synthesized)
tctgtgaaaagaatggtattttattgtattaggattctccagagggacagaactgatcggatatatgtgtatatgaaaaggagtttattagggagaattggctcacatgatcataaggca

SEQ ID NO: 821855 - DNA, 120 bp, Artificial Sequence
  ENSG00000250453_3 (sequence is synthesized)
tggtcctggcataaccttctaagctgttttattcagattacaataaatcatgccattcacacaagttcttacagggatttaattgcatctttgaaaggtttggcagatacatcaagccag

SEQ ID NO: 821856 - DNA, 120 bp, Artificial Sequence
  ENSG00000250453_4 (sequence is synthesized)
aaatgtcaaggcagttattacacacaaaaagcataaaatggcaaccatcaaaagattcatagccaaaagggacttgccttatctcagttgaggctttggacttggaactttgagaataac

SEQ ID NO: 821857 - DNA, 120 bp, Artificial Sequence
  ENSG00000250453_5 (sequence is synthesized)
cagcaatgttccagaaattatctgctctctcgccctggtctcaacttgcagaagatgggaagcagagctcccagcctgcccaagatgaacatgtggtatagacaagaaatacacctctgt

SEQ ID NO: 821858 - DNA, 120 bp, Artificial Sequence
  ENSG00000250453_6 (sequence is synthesized)
tcttttaagcttctgagattttgtatatgtttgtttcttaccaaaccacatatccaaagttactaattgatgtaatttgtatttggaaagaaactcatttacaactatttttattctaaa

SEQ ID NO: 821859 - DNA, 120 bp, Artificial Sequence
  ENSG00000250453_7 (sequence is synthesized)
ggaaagaaactcatttacaactatttttattctaaatgatttctaaaatgtccactttattaattttgatatatccaacatataatctagataccaagtttgaatcatttttattttgtc

SEQ ID NO: 821860 - DNA, 120 bp, Artificial Sequence
  ENSG00000250453_8 (sequence is synthesized)
aaaacctggtcctggcataaccttctaagctgttttattcaggtttggcagatacatcaagccagttcattaatgcacagatgattccttcacattaagaaagacacgttggagcaccat

SEQ ID NO: 821861 - DNA, 120 bp, Artificial Sequence
  ENSG00000250453_9 (sequence is synthesized)
ctgaggaaggaagaaaccagtggtggctcagtcccagtccaaaagcctcaaaagtagggaagccgacaatgcagccttcagtctggccaaaggcccaaaagccactggcaaaccgctggt

SEQ ID NO: 821862 - DNA, 120 bp, Artificial Sequence
  ENSG00000250453_10 (sequence is synthesized)
ataaatccatgtgttcaaaggcagaagaacctggagtctgatgtccaagggtagaaggaatggaaagaagcatccagcatgtgaaaaaggagaaagccagaagactcagcgagtgagatt

SEQ ID NO: 821863 - DNA, 120 bp, Artificial Sequence
  ENSG00000250453_11 (sequence is synthesized)
atcccaccttcttccatctgctgtgttctggccacactggcagaccactggatggtgtccacccacatgaggatgggtcttcctcttccagtccactgactcaaatgtcagtctcctctg

SEQ ID NO: 821864 - DNA, 120 bp, Artificial Sequence
  ENSG00000250453_12 (sequence is synthesized)
gcaacaccctcacagacccacccagaaacaatactttaccagctgtataagcatccttcaatccaatcaagttgacacctgttattaaccatcacatttatataatgtgtatataacaca

SEQ ID NO: 821865 - DNA, 120 bp, Artificial Sequence
  ENSG00000250453_13 (sequence is synthesized)
tttatataacataaactgatttccatttatgaagcatattacgtgcttactacaaaaacataaaaaagaagagaatgtataattgaattcctataaagggcatagaggtaccgaaagaaa

SEQ ID NO: 821866 - DNA, 120 bp, Artificial Sequence
  ENSG00000250453_14 (sequence is synthesized)
tagtttggctgtgtacctacccaaatctcatcgtgaattgtagttcctataatccccacatgtcatgagtgggaccaagtggagttaactgaatcatagaggtggtttcccccatgctgt

SEQ ID NO: 821867 - DNA, 79 bp, Artificial Sequence
  ENSG00000250453_15 (sequence is synthesized)
cgtttcctaaggtcttcccaaccttgtggaacgctgagtcaactacaccattttctgtttttaaattacccagtctcag

SEQ ID NO: 821868 - DNA, 87 bp, Artificial Sequence
  ENSG00000250453_16 (sequence is synthesized)
acgtttcctaaggtcttcccaaccttgtggaacgctgagtcaactacaccattttctgtttttaaattacccagtctcagaccacat

SEQ ID NO: 821869 - DNA, 120 bp, Artificial Sequence
  ENSG00000250453_17 (sequence is synthesized)
tttcttatagtgatgaataactgacttttataacaaagaagtggttcatgctcaattgtacaaaagcataaactaagcaatacatacattcttcatattactttgcccttgtccctcaat

SEQ ID NO: 821870 - DNA, 120 bp, Artificial Sequence
  ENSG00000250453_18 (sequence is synthesized)
acactatttaagtacttttgactttgtcctaagtatactgccgtgtaatgacttaagatgacttaattttcagaatatttgttcctatttaaaccactaagtaaatgttctttgtacagc

SEQ ID NO: 821871 - DNA, 120 bp, Artificial Sequence
  ENSG00000250451_0 (sequence is synthesized)
ggcttttttttccttgccttcttttccccctctcccacccccttctctctgctgctccccgcgacctgcgatttcctgggggtccggaactctggacccaaggcaccggtcaccccctca

SEQ ID NO: 821872 - DNA, 120 bp, Artificial Sequence
  ENSG00000250451_1 (sequence is synthesized)
ggacggctcctagctcatctgagaagcccctgtgcccatgtccacccataagcagatggcctccccccaaccatgaggattttttaatggggtgaaaatgccagtccccgaagccagggt

SEQ ID NO: 821873 - DNA, 120 bp, Artificial Sequence
  ENSG00000250451_2 (sequence is synthesized)
gaagtgtaggagagatctacacaacttaagtggggcgtccccatcccatcttcctgcgcaccctcctttgcccccaactccatctctgcgacacttccccacccccactccccccaaaaa

SEQ ID NO: 821874 - DNA, 120 bp, Artificial Sequence
  ENSG00000250451_3 (sequence is synthesized)
gtcgctcccgggctctgtctgcagagagccagggtgagagcgggcaaggcaaaagagcgacctcggtcgtgggcaagtagcttgtttttacgtccctcaataaaatttttatgaggatca

SEQ ID NO: 821875 - DNA, 120 bp, Artificial Sequence
  ENSG00000250456_0 (sequence is synthesized)
gggagatggggatgcatgtattgaaattctgccacatggtagatggggctgtctttgaagatgaacatatttgaggtcaatctcactgcccctcctccaatctcaccctccagcgttttg

SEQ ID NO: 821876 - DNA, 120 bp, Artificial Sequence
  ENSG00000250456_1 (sequence is synthesized)
atccaagtgcccacagttctgatgaatgtcaaaggcaagcttgaggagggaagaggaaatgattagtcctttacactccaggtcaatttactaaggatgaattctccaaatgatcagccg

SEQ ID NO: 821877 - DNA, 120 bp, Artificial Sequence
  ENSG00000250456_2 (sequence is synthesized)
gattttcaaatggtgtcagaagcggtatccgaagtggagcttctagcgaccactaggagggctgagtgaacacgcaagctacctgcaggacccacttgtctcagattttggagctccgtg

SEQ ID NO: 821878 - DNA, 120 bp, Artificial Sequence
  ENSG00000250456_3 (sequence is synthesized)
gatttgtgttttgagctctccgagtttctttgaacaaatttctgatccaaactgggtttggagtcgcaacagaaactggactgggtccaggaatggatttgatccagaaattaactggct

SEQ ID NO: 821879 - DNA, 120 bp, Artificial Sequence
  ENSG00000250456_4 (sequence is synthesized)
tggatcaagttagaggcctcttacgtctgactgggtgagaaaggaacaggtggattttgaacattcacagggatttttgcattatatccctttgtttcatttttcttgcacgcttaggta

SEQ ID NO: 821880 - DNA, 120 bp, Artificial Sequence
  ENSG00000250456_5 (sequence is synthesized)
ggggaaaaaaatcattggctaagttaatcaagagaacctgagcataaagccaatatttgaggtaaaaatgggatccttaatttctggaaaaccgagttccttctggcttatactttaggc

SEQ ID NO: 821881 - DNA, 120 bp, Artificial Sequence
  ENSG00000250456_6 (sequence is synthesized)
ctgggaggcagtgaagtcttacagaaacagcaaaatcttactaaagataccttacagtggaacattcccaaagaacaacaatgcattgaagtacatttaaaaaatgagggctcttggtaa

SEQ ID NO: 821882 - DNA, 120 bp, Artificial Sequence
  ENSG00000250456_7 (sequence is synthesized)
aagtacatttaaaaaatgagggctcttggtaaagtcccttttagctgagaaagggtttggcactccagcatgtcaattgctgttctctttggcataatctgccttgcactctttgctgat

SEQ ID NO: 821883 - DNA, 120 bp, Artificial Sequence
  ENSG00000250456_8 (sequence is synthesized)
atcgtgggacatgggaagctttttcttccctaaaaggggaaactttagagatgatgggaccgttggaaaagatccatttggtaccaagaagcagcggcctgaacttttcagtgtcgctgc

SEQ ID NO: 821884 - DNA, 120 bp, Artificial Sequence
  ENSG00000250456_9 (sequence is synthesized)
aggcaatgcttttctctctctcctttccctttcttatgttttctattactcagggagaccaccttgcccagagaccacaggttgaaactcctggtcggaggttggattaacaatgatggg

SEQ ID NO: 821885 - DNA, 120 bp, Artificial Sequence
  ENSG00000250456_10 (sequence is synthesized)
gcccaaccaggggcaaatttgagccttgctggtttgacattgggtgccaaccacagtggctaatgtctatgtttttgtcacacatattttactctggccaggacaaaaaaaagataattt

SEQ ID NO: 821886 - DNA, 120 bp, Artificial Sequence
  ENSG00000250456_11 (sequence is synthesized)
tcctttatgatgtggctttgccccagtgcgatggtgtggcaagctgagtcactaggggcgctcatggaaagcgtacccagaagcctggcatcccggcaaaaagttaagaatttcttacca

SEQ ID NO: 821887 - DNA, 120 bp, Artificial Sequence
  ENSG00000250456_12 (sequence is synthesized)
gttagatttcaggcttctctctctctctgtgcaaatggttgaatgaacggtaaaaattgctgtttatctccattttgttttacgtccttgggagcttgaccttgtaaccatgtggcggta

SEQ ID NO: 821888 - DNA, 120 bp, Artificial Sequence
  ENSG00000250456_13 (sequence is synthesized)
ctttctcttggtttccgccttccagggaacaggaattttagggcttatgtcatagttagctctaaaaattatctcgagtagctaaaagcctttgcaagctcaaaattaactactctagat

SEQ ID NO: 821889 - DNA, 120 bp, Artificial Sequence
  ENSG00000250456_14 (sequence is synthesized)
tcctcctgggagaggtcataaaagattgccccatgttggagctcagtagctaaggctttgctctttcatactggtggtctgggttcaattccctgcctatgaagtaagttgcgtttagtt

SEQ ID NO: 821890 - DNA, 120 bp, Artificial Sequence
  ENSG00000250456_15 (sequence is synthesized)
taatatttgtatgaccttgtctagtctcttctccatgtactatctaattttcctttctctgagcacctgggaggttacctttggtagagttcaaaagccagaaataccagccgtttggcc

SEQ ID NO: 821891 - DNA, 120 bp, Artificial Sequence
  ENSG00000250456_16 (sequence is synthesized)
tggctaaaattgggtaataaaaaattttaaaaggactttattaaagagtgctatggttaaaagtcagcttaattaaaagtggatattgaagctctaactgcctggacttcttgggaaaaa

SEQ ID NO: 821892 - DNA, 120 bp, Artificial Sequence
  ENSG00000250456_17 (sequence is synthesized)
cagaaggcaccagaaatccctttctggccctcttcttccaagggctccacccaaaagccaataaccagttaagaaacataaaaactggcaaaataaaaaatcttacaactactgtggtaa

SEQ ID NO: 821893 - DNA, 120 bp, Artificial Sequence
  ENSG00000267133_0 (sequence is synthesized)
agaattgcagtttcagccaccagcagctctccgatgggcacaggctccacttatggctggtttggaatggcaaatccatcactctctttgcctgtaaaatgccaaggagactgatctaag

SEQ ID NO: 821894 - DNA, 120 bp, Artificial Sequence
  ENSG00000267133_1 (sequence is synthesized)
cagggggttcccatccatggcctgctctaggcctgaaggaacacagatggcatttgcaggaagatgacatctcaccatccccatctgagcaaagcctgcccatcaaacaaccaaaggata

SEQ ID NO: 821895 - DNA, 120 bp, Artificial Sequence
  ENSG00000267133_2 (sequence is synthesized)
gccagtcccctgcacagtgtaaagtgacttgcagtgatcctcttccccaaggccagccccagctctcagacctccagtcccaacaagtctttttttgcaaaggaggctcaccctggaaca

SEQ ID NO: 821896 - DNA, 120 bp, Artificial Sequence
  ENSG00000267133_3 (sequence is synthesized)
tggctctcccaaggggagacaggaacggatgttgacttcatcccagcagcttctgacacaatgccactatctttcaactttctccaccaacagggtcaggctgttgattggcctcgactg

SEQ ID NO: 821897 - DNA, 120 bp, Artificial Sequence
  ENSG00000267133_4 (sequence is synthesized)
cagttagcctgacacggctagcagcctcaaaacaaattaaacgaggcagggatgccgtgcagtgatcgttccattatgtcccctctgcttccacacgtgactcacactatcacttttaga

SEQ ID NO: 821898 - DNA, 120 bp, Artificial Sequence
  ENSG00000267133_5 (sequence is synthesized)
ggtgaagcatcttattgaatcaacacctaatctgcacacagtgtcacggaggaggggcgaggggacagcgggagcattttctctgatccttttctttcctgaagacttcgctggagacag

SEQ ID NO: 821899 - DNA, 120 bp, Artificial Sequence
  ENSG00000267133_6 (sequence is synthesized)
gctgggtgggggcgaagatgaattgtgaggaaccctgaccctatttcaggagctgttctcggcctcgggttttcctgcctgttagaaccctcaaaactacagctctccagacagctacct

SEQ ID NO: 821900 - DNA, 120 bp, Artificial Sequence
  ENSG00000267133_7 (sequence is synthesized)
ctgaaggctcctgaagcttagaaacagagaggaaaacacccctttatctgcacgtgtctccaccactgcaattgctggaagctccacgagtgccctcggtgcacagatgtgctttacaac

SEQ ID NO: 821901 - DNA, 120 bp, Artificial Sequence
  ENSG00000267133_8 (sequence is synthesized)
agagtgactgtaaatgagaaaacactaagttaggctctgacggccaatgctggatgtatccgtttgccctataaataagcactgatcacctccattttattgaactcattttctaggcaa

SEQ ID NO: 821902 - DNA, 120 bp, Artificial Sequence
  ENSG00000267133_9 (sequence is synthesized)
gcaaagaccacaagattcttctgcacattttctctttacaccctctagtactgctgctactgtcagctccgacagatttatagcccattcattcatgggaacaaaaaccctgccacggct

SEQ ID NO: 821903 - DNA, 120 bp, Artificial Sequence
  ENSG00000267133_10 (sequence is synthesized)
ggtcatgggacacgcaatagcagttagttcaaaagataacagctgcaatacctcacctctccattcagcactacagagccagcactacttcggaggtaataaatgcttcttgttagtgtg

SEQ ID NO: 821904 - DNA, 120 bp, Artificial Sequence
  ENSG00000267133_11 (sequence is synthesized)
acccaacacaagctgggttgctgaacctttgcaactcaagcacttaggcaacgctgaaaagccgagcttcctcgtggtaagtggcaatgtgggtatatacattctccttgcaaactgatc

SEQ ID NO: 821905 - DNA, 120 bp, Artificial Sequence
  ENSG00000267133_12 (sequence is synthesized)
agaaacagagctcgggcatgagtcctgtcccgacaagaagaggcagctggtctgactagtccaccaccatcctcagagcctggacacacacaacaagcatgtattaaaagaatccatgga

SEQ ID NO: 821906 - DNA, 120 bp, Artificial Sequence
  ENSG00000267133_13 (sequence is synthesized)
ttttttttaagtagtgaatgacctggggaggaatagaggatcggttccaccccgctcactcagagcaggaaaaggtttaatgcaagaagcaatatagtggtgaagcgttctgcctcattt

SEQ ID NO: 821907 - DNA, 120 bp, Artificial Sequence
  ENSG00000267133_14 (sequence is synthesized)
tgaagtcggcctttcccacccacaggcctcagtttactcatcttaaaatggggatgttaactgtaccgattctaccaacaaatcagggatttgttgctagaattaaacataaaaagtaaa

SEQ ID NO: 821908 - DNA, 120 bp, Artificial Sequence
  ENSG00000267133_15 (sequence is synthesized)
caaataaattaattagtttagttggagaaatcagatatgcacacaagaaacttaaaggaagatcactagaagacaaggtcattgacgatcaaactttagggaaatgtcttccatttttga

SEQ ID NO: 821909 - DNA, 120 bp, Artificial Sequence
  ENSG00000267133_16 (sequence is synthesized)
gacacatacacctgcccccacctctacctccaccagcgctctgtggcctatattttgcagagatgtgttattgtcactgttagtctgatgtcccgacaattaaactgcaaagagaaaaag

SEQ ID NO: 821910 - DNA, 120 bp, Artificial Sequence
  ENSG00000267133_17 (sequence is synthesized)
gccagtcatgcagaaatccaacagcctggcctctgggatccgcccaccctagcaatgggtccaggtgggagatgggtcatggagatatggctggcccaggtcaggcagttgaaatggaag

SEQ ID NO: 821911 - DNA, 120 bp, Artificial Sequence
  ENSG00000267133_18 (sequence is synthesized)
ttgagagcctccaggctccagaaggcaccagagagagaagcaaagtcaaactccccatgaagacacacagttcagtggggaaagagtagactgtgaaacgcatagaaaaagacactgggc

SEQ ID NO: 821912 - DNA, 120 bp, Artificial Sequence
  ENSG00000267133_19 (sequence is synthesized)
attagttgctatcagtacattcctccctaatcaatcagctttattgtgacgcctctagctcggctcataaggcctcagctcataaggccggaaagccgcttcggcagcagtttaaaatgt

SEQ ID NO: 821913 - DNA, 120 bp, Artificial Sequence
  ENSG00000267133_20 (sequence is synthesized)
ttccagtttaataatccctgctaattgaaagcagctcagaaaagcggggaagatgggggttggaagcaaaccagcaccgtttatggcaacagtgctgttcctaggggaaacaaaataacc

SEQ ID NO: 821914 - DNA, 120 bp, Artificial Sequence
  ENSG00000267133_21 (sequence is synthesized)
tttgatgctgcagggggaacctgcctccccgtccccaaacaaactaattcccacaactgtcttctttggcacgagagctgtttcttcttacgttttaattgtataatgttatagcagccg

SEQ ID NO: 821915 - DNA, 120 bp, Artificial Sequence
  ENSG00000267133_22 (sequence is synthesized)
aattgctgtgaaatctgtttttaatctgtggccccctgctgcaaaaactggattattttttcttcaacagagaattacattcatttttataattgttctttcctttcaaatcacctaata

SEQ ID NO: 821916 - DNA, 120 bp, Artificial Sequence
  ENSG00000267133_23 (sequence is synthesized)
tgacaaatgctggacaaccttacagctcatctgctgaagagtgtctttatgagttgaggcttcaatgctttcatggagaaattgcctgatttaagtaaatcatgtcactttcacccttgc

SEQ ID NO: 821917 - DNA, 120 bp, Artificial Sequence
  ENSG00000267131_0 (sequence is synthesized)
cggcgggccgtggcgcgtggaacgggtgttggagctcagagaagttatggcccaagatggaagagcaagtctgtggcagacgaggtccaagaactcgctctcctgatgcctcagttgaga

SEQ ID NO: 821918 - DNA, 120 bp, Artificial Sequence
  ENSG00000267131_1 (sequence is synthesized)
aaaaacaaaacaatctgtctaggacggcagagagagctggtctcatccaggacactaattcctgcccttggacactggtactcctggttctcaggcctttgaacttggaccgggacttac

SEQ ID NO: 821919 - DNA, 120 bp, Artificial Sequence
  ENSG00000267131_2 (sequence is synthesized)
accatcagctcccctggttatataccaccagccttcttggttcttcaccttcagacaacagacagtgggacttcttgacctccatttccaattcccaaaataaatcttcttatatctatg

SEQ ID NO: 821920 - DNA, 120 bp, Artificial Sequence
  ENSG00000267130_0 (sequence is synthesized)
attaaagtgagatgatgtcatatgggtagggtcctaatttgataggattggtggccttatcagaagaacaatgtcatgggcatgcacagaaaggaggtggccgtctgcaagcagggaaga

SEQ ID NO: 821921 - DNA, 120 bp, Artificial Sequence
  ENSG00000267130_1 (sequence is synthesized)
cttgggcatccagcctccagaaccatgagaaataaatgtttatggtaggtctatgatggcagcctgcttggactgaaccggcggtgagacagggcttcatgcaggagcagacctttgagc

SEQ ID NO: 821922 - DNA, 86 bp, Artificial Sequence
  ENSG00000267130_2 (sequence is synthesized)
tgggccttcgtttgaggctgaggtgagctatgatggcaccactgcactccatcctgggtgataaagcaagatcctgtctctaagaa

SEQ ID NO: 821923 - DNA, 120 bp, Artificial Sequence
  ENSG00000267137_0 (sequence is synthesized)
aaggggagtacctcccagcctcgcctcccctgcccaccaattcccctctacctaaggcagcagcgctcagaagccgagggacagggacgtaggatgtctggtctgaatggggagttcaaa

SEQ ID NO: 821924 - DNA, 120 bp, Artificial Sequence
  ENSG00000267137_1 (sequence is synthesized)
agccctctgctgtggcctgaactgcctcagggagttccattgccttcaatgcaacagatgtctaggtcttggcagggtctagttgggggactgcttctgagccatgcagaacccactctg

SEQ ID NO: 821925 - DNA, 120 bp, Artificial Sequence
  ENSG00000267137_2 (sequence is synthesized)
agcgttgggaaagggctgcctgtgaaagtgaggccccctctgtcccctccattggcttcctgcccaggtcgaggggagaattcaaggccccttgggcatctgcccttgggttcttgaagg

SEQ ID NO: 821926 - DNA, 120 bp, Artificial Sequence
  ENSG00000267137_3 (sequence is synthesized)
gactaaagttggtgcctagacgcctgacttgggggtgttccccagcgtggcatgcctcaggcgacagaggccagggtctctagggcagagccacaatccacactgaataggaccccgtaa

SEQ ID NO: 821927 - DNA, 120 bp, Artificial Sequence
  ENSG00000267136_0 (sequence is synthesized)
tttacaaacttcgtacatacatttaagataacactatcaaatatttgcaaaaagctgacaatgaatttctgactaaaatccccccccaagccccaaaacaccctaggatttactgctggg

SEQ ID NO: 821928 - DNA, 120 bp, Artificial Sequence
  ENSG00000267136_1 (sequence is synthesized)
tttttaagtgttaggttcatttaaaagagtagaaaacacattcggcttagataaaaaagacagagctaaacattccagatatggcttttgtgtctgatgccatatcattctagtcctttt

SEQ ID NO: 821929 - DNA, 120 bp, Artificial Sequence
  ENSG00000267136_2 (sequence is synthesized)
tttgtagcatgtaagcttctacctggatgacacaggacaaagactgttgaggatttcaagcaggtgccatgttccaggacatgaagcccagcaagtcagtcacatctctgaaaacagatc

SEQ ID NO: 821930 - DNA, 120 bp, Artificial Sequence
  ENSG00000267136_3 (sequence is synthesized)
acatttgcagtttaaacaaacaaacaaccccttaggaccactcagtgcagatacgagatatgcagactagcccttccaaggacctgcaggggaaagatatgtaaaaggcatgctcttaag

SEQ ID NO: 821931 - DNA, 120 bp, Artificial Sequence
  ENSG00000267136_4 (sequence is synthesized)
caacattatacgatgagggtacagtgcaatgctacacaaatattaaaaaaacaaaaaacaaaaaaaggtctgttgtaggagattttctagaatcatgtataatgttccactttcaagggt

SEQ ID NO: 821932 - DNA, 120 bp, Artificial Sequence
  ENSG00000267136_5 (sequence is synthesized)
ctgcctggatagcaggaggagaggtcctttggttctagaaaacagcaaggctacaggctaatagagaattatgcagcttgtccagagagcaagaagtcagcctggccagccactgctaaa

SEQ ID NO: 821933 - DNA, 120 bp, Artificial Sequence
  ENSG00000267136_6 (sequence is synthesized)
aagcaaggcaatggaatgccacagcatttatcaccttaaacaaaagaaacagatgggaaatattttccagttttcaaaatactgctttaggggaaaaaaatgataaaaacaaacatgttc

SEQ ID NO: 821934 - DNA, 120 bp, Artificial Sequence
  ENSG00000267136_7 (sequence is synthesized)
aacaagtagcatttgttaactaagagcttcacgtgaattacttcaccataaccctgcaaagtaagcactagtgtccttagcccacctgcagacaggagaccagggcactgcatgttcagc

SEQ ID NO: 821935 - DNA, 120 bp, Artificial Sequence
  ENSG00000267136_8 (sequence is synthesized)
cacttgccatggagacaaaaccaagtcttggagctgattactcaccagccttagagaaaacagagacggctactagatttcaaattacagtgccagtaatgtctattactctttgtataa

SEQ ID NO: 821936 - DNA, 120 bp, Artificial Sequence
  ENSG00000267136_9 (sequence is synthesized)
tttccttatttttccatatatctcattctcatcttacaagagtgcccatatttaagataatttttgtatgccaaaacagagcaggtcaccaacatggctgagagaaagctcagatgactc

SEQ ID NO: 821937 - DNA, 120 bp, Artificial Sequence
  ENSG00000267136_10 (sequence is synthesized)
ctcgtcacgtgctcatggaacagaccccgtgacaacttcagtttccaaatcaaatgcagcaactgctcccttcttcctcctcacgccactcatatcacaaaagagagcaatgacagagga

SEQ ID NO: 821938 - DNA, 120 bp, Artificial Sequence
  ENSG00000267136_11 (sequence is synthesized)
tgactgtcatcttgtgggtttgtaccacctcccaagttattccactggcaatccatccagcacaggtactcagagaggacattaataaggcaatctgtcatactttcaactctcctggtt

SEQ ID NO: 821939 - DNA, 120 bp, Artificial Sequence
  ENSG00000267136_12 (sequence is synthesized)
tgttttgctctatcccatctctaatgagagcaagtgcaaaagctcctaatgactccagatcttccacaacaggctgatttttacacctgtagcaaatcacaaaatagtctaatcatgtaa

SEQ ID NO: 821940 - DNA, 120 bp, Artificial Sequence
  ENSG00000267136_13 (sequence is synthesized)
atatgcttaacaagaaggtaattaatcttctcaaccaaattttgcaaacaaatattcatggttaagacacagaacaattcccaagtgttcaggtcctcatagcttgcaaagccaggctgc

SEQ ID NO: 821941 - DNA, 120 bp, Artificial Sequence
  ENSG00000267136_14 (sequence is synthesized)
acgagtgccagcgatcaagagtcggttgggtcagcctctcccaaactgcccttcatgggacatatgtgttctgcaagctgctaatgggtctttttctaaaaacaaaaaggactccaaggc

SEQ ID NO: 821942 - DNA, 120 bp, Artificial Sequence
  ENSG00000267136_15 (sequence is synthesized)
tacaacagtagggagactgactcattaagcaaagtctaacgggctttctgactctgcaaggcattcactaggctacctccaatggcgagtcttcaggaagacgaattccagtggcctgtc

SEQ ID NO: 821943 - DNA, 120 bp, Artificial Sequence
  ENSG00000267136_16 (sequence is synthesized)
caagaggtgccgagggtggggatgtattctccaacagcaacatcccttgcattctctgacaaagactttcctgtcctgtcttcttaatctcaagtgaatgtgagggctttttttttttca

SEQ ID NO: 821944 - DNA, 120 bp, Artificial Sequence
  ENSG00000267136_17 (sequence is synthesized)
aatgtgagggctttttttttttcagacagtctcgctctgatgcccaggctgaagtgcagtggcacaatcagggctcactgcagcccctaactctcaggctcaggtgatcctcctgcctca

SEQ ID NO: 821945 - DNA, 120 bp, Artificial Sequence
  ENSG00000267136_18 (sequence is synthesized)
cctcctgcctcagcctcctgagtaggtaggaccacagacacctgccaccatgcccagctaattttttaatttttagtagagacgaggtctccctatgttgcccaggcttgtcttgaactc

SEQ ID NO: 821946 - DNA, 120 bp, Artificial Sequence
  ENSG00000267136_19 (sequence is synthesized)
gagtctcccatcctaaagaacagctgccccgagcacttcctatgtggacattccaggcagctgggccgtgtacacgatgtcctcccgctctgtctgaatatgtcacttcctttgtcaaga

SEQ ID NO: 821947 - DNA, 120 bp, Artificial Sequence
  ENSG00000267136_20 (sequence is synthesized)
gacatctattaatatctcagcaaacagagcactaaagatatgtaaagtacaatttaggaagaatcaccctagagtctagggtgatggttattctataccccactgctactattcaaggtt

SEQ ID NO: 821948 - DNA, 120 bp, Artificial Sequence
  ENSG00000267136_21 (sequence is synthesized)
ctccctcctctcgatcagaggatgccaacagggccaactttcaggggaagctgaagacaggctttagcagacttgggaagctgcctccaactaaacggtgaaaattcgactcatccccat

SEQ ID NO: 821949 - DNA, 120 bp, Artificial Sequence
  ENSG00000267136_22 (sequence is synthesized)
gaattcttctgaagaattaccagcaacatttcattgcccaatcccctaacaagtgtgtgataaaaaagaactggcaaattatagggtctatagaggattcttatggttgagaaaattcct

SEQ ID NO: 821950 - DNA, 120 bp, Artificial Sequence
  ENSG00000267136_23 (sequence is synthesized)
tgttctcaagggcacacacaggtctaccctctttttcatgtgtattcattacctaaatgcacctgtagctagtgcatattttacgtagcaaattccaagtatgttttaaactttaagctt

SEQ ID NO: 821951 - DNA, 120 bp, Artificial Sequence
  ENSG00000267136_24 (sequence is synthesized)
ttgtacttaacagcatagacttgaggcaacaggacttagttataaaatatcctcagaaaatttgaagctcatgaaaatgaaaaatcaatatgagctggtaaaccagcactttttgggtat

SEQ ID NO: 821952 - DNA, 120 bp, Artificial Sequence
  ENSG00000267136_25 (sequence is synthesized)
ttacctgagataacatgaggtatggtggaaaatttcatttccacttttttgttttttagagacacagtctccttctgtcacccaggctggaatgcaatggctcaggcctgtaatcccagt

SEQ ID NO: 821953 - DNA, 120 bp, Artificial Sequence
  ENSG00000267136_26 (sequence is synthesized)
aggccaggagttcaagaccagtctgagcaacatggtaaggtcccgtctctacaaaaaaaaatttttaattagccaagcatggtggcatgtgcctgtagtcgcagctacttgggaagctga

SEQ ID NO: 821954 - DNA, 120 bp, Artificial Sequence
  ENSG00000267136_27 (sequence is synthesized)
ggtgggaggatcccttgagcccaggaattcaaagctgcagtcagctataattgtggcactccaggttgcactccagcctgggcgacaaagaaagacactgactcaaaacaaaatgaaacg

SEQ ID NO: 821955 - DNA, 120 bp, Artificial Sequence
  ENSG00000267136_28 (sequence is synthesized)
agaaagacactgactcaaaacaaaatgaaacgaaacaaaacaaaaaatttcaggttgcttaagaaattccccataaaatgcaaataaatacctcaagcagtagtgatcgtaatataattt

SEQ ID NO: 821956 - DNA, 120 bp, Artificial Sequence
  ENSG00000267136_29 (sequence is synthesized)
agaaatgtttcagctctccaaatcttgtgtcattgtctgacttatttattaggtccttaaaaaggtaaaataaagaaccattgttaaatgatgaaacataaacgtgaatttgtaagtcta

SEQ ID NO: 821957 - DNA, 120 bp, Artificial Sequence
  ENSG00000267136_30 (sequence is synthesized)
ctgagattccttcaagaggctggcaaaacagcaggaacctttcaccagtgctatacatctgatcagtcacttgcattacatgacaatttagcatttgctcatctgtgttggtgtctatgt

SEQ ID NO: 821958 - DNA, 120 bp, Artificial Sequence
  ENSG00000267136_31 (sequence is synthesized)
gctgtagttttagtttttgttttttaagacaactgtcctataaccataagccatctaggacaacctggcttcaaagttacattcaaagtgacatgcaagaaccaccaccactccttgttt

SEQ ID NO: 821959 - DNA, 120 bp, Artificial Sequence
  ENSG00000267136_32 (sequence is synthesized)
gtctcctgttctttgctccacatttggaagcttttcaaaaagcaaagtcagaaatactcatccttccttccctcatgcctacaggcagctcaccaaggattttggtttctttaaaaccaa

SEQ ID NO: 821960 - DNA, 120 bp, Artificial Sequence
  ENSG00000267136_33 (sequence is synthesized)
tgtaataacagaggcaggcagaagaaagaatgcacgccagtgttgtgcacaaggaaggcctattcgggagacgaacagaacccaagcctatcgagaccatatgctccaccgcttacattt

SEQ ID NO: 821961 - DNA, 120 bp, Artificial Sequence
  ENSG00000267136_34 (sequence is synthesized)
gtcttctctaaaggctgaccctttaacagttatgtaattcagttacttcacaaccatttaaatatagcaaaatgtccacaaagaaaaaaagttgcccacccacctaaataccttccatgc

SEQ ID NO: 821962 - DNA, 120 bp, Artificial Sequence
  ENSG00000267136_35 (sequence is synthesized)
tttgcccacagtggtaatgtgggggtgggggtgggcaaacatgcctttcagtgaaagcatggagagatgttacagtccagggcttgaaagagcctctgtcaatggcttgctcacctacaa

SEQ ID NO: 821963 - DNA, 120 bp, Artificial Sequence
  ENSG00000267136_36 (sequence is synthesized)
atagtgtagggtgggtttgagcagagacgttgaacctacaactctcacctgtgcaccaggatgtttgcagaggctgggcagcaacaccagcctgggtttcaccagggcttctgcatgagc

SEQ ID NO: 821964 - DNA, 120 bp, Artificial Sequence
  ENSG00000267136_37 (sequence is synthesized)
ttagctcatcaagctgcattgcattaagcctgtgatcctgggattagctcagagacacagctgtccaaggtggaagttacaagaccaagcgaacccacggcttctttaaataaatataca

SEQ ID NO: 821965 - DNA, 120 bp, Artificial Sequence
  ENSG00000267136_38 (sequence is synthesized)
catagacacaaatatggaatttaaatagtcttaagacagtgttaacaagtagtccccagagagggctaccacggcctatgatgtcagcctttcccattacctcgtctgtctctatttggc

SEQ ID NO: 821966 - DNA, 120 bp, Artificial Sequence
  ENSG00000267134_0 (sequence is synthesized)
ggatataggtggtacctacatgggaacacattgtctaataccacccagaatgggtagcaaagttcatagtgaagtttccactgtgagcggcaggtggcgggctcttctgagaaagaagct

SEQ ID NO: 821967 - DNA, 120 bp, Artificial Sequence
  ENSG00000267134_1 (sequence is synthesized)
tctagatgcatattgtggggagcagatgaaactctgaggctttcagggacgtgaggtacggtgccaaggccacaccactgagacaggggtctcactatgttgcccaaactggccttgatc

SEQ ID NO: 821968 - DNA, 120 bp, Artificial Sequence
  ENSG00000267134_2 (sequence is synthesized)
tcaagcaatcttcccacctcagcctccgagtcgctgggattgcagataaggaaattgaggctcagtgttggcaggtaacatgttcaagatcttgaaactagcaggtggcagagctggggt

SEQ ID NO: 821969 - DNA, 120 bp, Artificial Sequence
  ENSG00000267134_3 (sequence is synthesized)
gctggggttcatctgtctccatgtgctcagaattctgagaggaattgctgaaaaggatggggactctgagctacatatgcatagcattgatttcagtgagaaaactacatatttttgacc

SEQ ID NO: 821970 - DNA, 120 bp, Artificial Sequence
  ENSG00000267134_4 (sequence is synthesized)
atatgaaaaaaaatctgttcttgaattttgatgatatttgcatagtttttaaattacctctggcagaaaaattatgtcaaagatgaacctaaacaaaagggaatgacatgttgtttggat

SEQ ID NO: 821971 - DNA, 120 bp, Artificial Sequence
  ENSG00000267134_5 (sequence is synthesized)
tactgagccagagaagccgctggaccattgagatttagtaggcaatatgtttgccagcctttttgaaaattggaatgttatttttgaactttatcgaagaacatgctgcatctctaaggc

SEQ ID NO: 821972 - DNA, 120 bp, Artificial Sequence
  ENSG00000267134_6 (sequence is synthesized)
ctgcaagattattctgtgcccatcccatttatggactgcaaacttacttgattcctgatagcagagttgagatatagggttcatccatgttgctgcatgtgtcagaatttctttccgtct

SEQ ID NO: 821973 - DNA, 120 bp, Artificial Sequence
  ENSG00000267134_7 (sequence is synthesized)
gtctattcatttgtctgtcgatggacacgtagactgcttcttccttttggcaactgtgataaccctgctatggacatggatgtgcaaataacaagtagcccctgtgtctgctgttctcct

SEQ ID NO: 821974 - DNA, 120 bp, Artificial Sequence
  ENSG00000267134_8 (sequence is synthesized)
ctatgtgttcttgtgaagagaatgcttctctagcacgagttcaatatgatctgggaatttgaactggatcggctaaatactttatcagtaggaagaaaactctctttacagactgaaaat

SEQ ID NO: 821975 - DNA, 120 bp, Artificial Sequence
  ENSG00000267134_9 (sequence is synthesized)
cattctgcacagaagcacatatgcgcatactcacacacacacagatgccttcaagtgaggatgcctgaagtaattaaaggtaatgtgtatcaagcgttaattacaaaatcactgtgctct

SEQ ID NO: 821976 - DNA, 120 bp, Artificial Sequence
  ENSG00000267134_10 (sequence is synthesized)
tctgaattgtacacaattatcagagaagcagcacaaatatcatcatgccacaaggctgcatttcctaccatgagctttaacaatttattttcagaacttcacttatccattagttatgca

SEQ ID NO: 821977 - DNA, 120 bp, Artificial Sequence
  ENSG00000267134_11 (sequence is synthesized)
tgcatctctacacattccctatatgcctggattattaggtatacgccatatcatgaaggctgtgaaagtgattacaagaaagtcaaagatacccagataggatctttcctcagaaccatt

SEQ ID NO: 821978 - DNA, 120 bp, Artificial Sequence
  ENSG00000267134_12 (sequence is synthesized)
tacttatgcacattcacccacatttgtaaacataatattgcagcaaaaggcttgggctccagtcattcagagtagccacactgcccaggaatatataactttatgtacttttttttttta

SEQ ID NO: 821979 - DNA, 120 bp, Artificial Sequence
  ENSG00000267134_13 (sequence is synthesized)
tcatggaacataagggactattcattctgtaaatccagatcttgtaatttcagtgtctgatataagtcagactactggaaagaaagaaatttaattaaaattagaaaggaaaaaaaaaaa

SEQ ID NO: 821980 - DNA, 120 bp, Artificial Sequence
  ENSG00000267134_14 (sequence is synthesized)
attttccaggttgcacagaatacaaaaagtggaaggctgaataaaaaacaagctcctgttcaagtgacctcactgctttctgatgacccccactggctatgccacatttctggtgctgaa

SEQ ID NO: 821981 - DNA, 120 bp, Artificial Sequence
  ENSG00000267134_15 (sequence is synthesized)
tcatctgggcttcgatgcagttgttcaatttgaaaaatgatggaatgaacaatcctgcgtatggcttccaaactgaaaactcagaacttaaggctctggtctgaagtggccacagttcat

SEQ ID NO: 821982 - DNA, 120 bp, Artificial Sequence
  ENSG00000267134_16 (sequence is synthesized)
ctctggccttgacaagccatttgttggccgtggaactcattacttgaaagagatttgctacagctcccgttatggtgcctttagaagaaataaagatctcctgcctcacttccaatactt

SEQ ID NO: 821983 - DNA, 120 bp, Artificial Sequence
  ENSG00000267134_17 (sequence is synthesized)
ggtagtacaatctcagccttattcattcccttcagaaaatgaaaactcatagatatctttaaactaattggataccttataaagattatagcaaatgggtgtggtatttttatgtggcaa

SEQ ID NO: 821984 - DNA, 120 bp, Artificial Sequence
  ENSG00000267134_18 (sequence is synthesized)
cataagaattttagccatcaaactagcactattctacagtaatgttgaaggtggatgaagtatatcgaatgagtttatgtgagttaaagtattgaatacatttacataaatttgcatgta

SEQ ID NO: 821985 - DNA, 120 bp, Artificial Sequence
  ENSG00000267134_19 (sequence is synthesized)
tgcacaacacgtccgtactcatctgggcttcgatgcagttgttcaatttgaaaagtaaagcagtactttaatggtcccttcagttctcacactcagtgtttcaatatttgtcctgttcta

SEQ ID NO: 821986 - DNA, 120 bp, Artificial Sequence
  ENSG00000267134_20 (sequence is synthesized)
agaaacagacatttatttctcatggttcttgaagctggaagcctgagattaggatgccagtatagttgggttctggtgggagctttcttccagtttgcagaatgctggctcctccctgta

SEQ ID NO: 821987 - DNA, 87 bp, Artificial Sequence
  ENSG00000267134_21 (sequence is synthesized)
agctttcttccagtttgcagaatgctggctcctccctgtatcctcacacagtaaaaagagcactagctagtcctctggcctcttctt

SEQ ID NO: 821988 - DNA, 63 bp, Artificial Sequence
  ENSG00000267134_22 (sequence is synthesized)
cagcctcctgagtagctaggattacaggagctcaccactttggcctcgatctcctgacctcaa

SEQ ID NO: 821989 - DNA, 82 bp, Artificial Sequence
  ENSG00000267134_23 (sequence is synthesized)
tactggatctggccaggcctcttataagtgcactaatcccattcatgagggttcagttttcataaacgaattacctcccaaa

SEQ ID NO: 821990 - DNA, 120 bp, Artificial Sequence
  ENSG00000267134_24 (sequence is synthesized)
tcatgagggttcagttttcataaacgaattacctcccaaatgccccatgtcctaaaatcatcacttaggattaaggttttaacatatgaaattggtggggggacaaaaacattttgtcca

SEQ ID NO: 821991 - DNA, 120 bp, Artificial Sequence
  ENSG00000267134_25 (sequence is synthesized)
gaacgctgtggaaccaataaggagatcctagggactgcccaatctgtggtctgtcggctgcagagttgatgcttccaccctcatgatatcacagatgacatcaacggtgctgcggtgaaa

SEQ ID NO: 821992 - DNA, 120 bp, Artificial Sequence
  ENSG00000267134_26 (sequence is synthesized)
ttcccagttagcatttaccaacactttctgccattgacttatgaatgaagcaggactgacaagaaaaggagatgaaactctgaggctttcagggacgtgaggtacggtgccaaggccaca

SEQ ID NO: 821993 - DNA, 120 bp, Artificial Sequence
  ENSG00000267139_0 (sequence is synthesized)
caggtccttcttgttgaggaagaggatgacggaggagttctggaaccagggggcagggcccacctcgttgtccgactccaccaggacttggtcgtattcgctgagggcgacgagaaacat

SEQ ID NO: 821994 - DNA, 120 bp, Artificial Sequence
  ENSG00000267139_1 (sequence is synthesized)
ggactcagccacctggcgccccaaggcccaatctgcaatcccaggacggctcccacccaagcccctcctgccacaccagactgacatcggctggagcaggaagagcccccactcttagaa

SEQ ID NO: 821995 - DNA, 120 bp, Artificial Sequence
  ENSG00000267139_2 (sequence is synthesized)
cgggcaaggacgctctcagagagcggccgcaccgcctccaggggtgaccaccgcagacccttccctcactggcaaaggggcctgagaccactgggcccagggaagcgggcgctagtgtgg

SEQ ID NO: 821996 - DNA, 120 bp, Artificial Sequence
  ENSG00000267138_0 (sequence is synthesized)
gcgattctctcgcctcagcctcctgagtaactggaactataggcatacgccaccatacctggctaagaaattaactttaataacattttaattaagctaacatatttaaaatattatttc

SEQ ID NO: 821997 - DNA, 120 bp, Artificial Sequence
  ENSG00000267138_1 (sequence is synthesized)
agctgagatcacaccaccgagctccagcctgggcgacagagcgagaccgtgtctcaaaaaagcaggagtgggactgtctggttccggcctgatcatggaattctggggacacggggtgaa

SEQ ID NO: 821998 - DNA, 120 bp, Artificial Sequence
  ENSG00000163597_0 (sequence is synthesized)
ttcttttcgaggtcggccgcgtggctggaagacatggccactccagtcggtgttgagcacggcgagcagtctcaggcctttagtgatgatgggtggttaggagggttaaaagtactggat

SEQ ID NO: 821999 - DNA, 120 bp, Artificial Sequence
  ENSG00000163597_1 (sequence is synthesized)
gagaaaatgctttccaaacgttgagaaaatgttactatgtgaagggagagagctcaagcccgtcctcggcgtcatagggccggcttctgcgggggagagcgcctaacaacctgggcagcc

SEQ ID NO: 822000 - DNA, 120 bp, Artificial Sequence
  ENSG00000163597_2 (sequence is synthesized)
ccgtgcgcctccgccgcgcgtgtgctgagcgtcatgcccaggggtcttcggtgcccgcgcacgggcagactctgacgatggtggttcttaattcagcatcaggagtgttaacgtgtgaag

SEQ ID NO: 822001 - DNA, 120 bp, Artificial Sequence
  ENSG00000163597_3 (sequence is synthesized)
acgtgattccgcttggagtgtcttgaggacggccccaatcggtagttcatatttagctttacagataggagtcaataggattgtaaacttctggaaagccgtagttttaacaacgagcct

SEQ ID NO: 822002 - DNA, 120 bp, Artificial Sequence
  ENSG00000163597_4 (sequence is synthesized)
tttttcctcccccagaggcctttctttgtttggcatctgcagagacggtgaaaagcagagctccaggttgaaggatcagagtaatagatggagcccttaacatgagtaagagtgggtgca

SEQ ID NO: 822003 - DNA, 120 bp, Artificial Sequence
  ENSG00000163597_5 (sequence is synthesized)
ggcagggcctgagtggtcactagaaatgagaaagcacagttggtgccatcacatacattcacctcctgctttattctgaagttcaagtatgagaatacgtgttgacatacaagccagcta

SEQ ID NO: 822004 - DNA, 120 bp, Artificial Sequence
  ENSG00000163597_6 (sequence is synthesized)
tggtgcagtcagcctcagtttccaaagccggaaaaggatcctctagtagccacggtgtggcagctgctctgaaccaggacctggacccggacccaaagtgccatgtctttaatgttagct

SEQ ID NO: 822005 - DNA, 120 bp, Artificial Sequence
  ENSG00000163597_7 (sequence is synthesized)
cccagcgatgccagatgggatcagcacagccctgcctctgctgctaattgttcctctaaagtaatcgccatgcgttctttgggcttcatctttaaaggaatgaagcaactgagattattc

SEQ ID NO: 822006 - DNA, 120 bp, Artificial Sequence
  ENSG00000163597_8 (sequence is synthesized)
tggaaaaccttttggcagttagtgaaattagagtacaactaagaacattttcagacctccactgtggatgacctgggtataatctcacaaatcgatgggactgcaaggattgtaaactga

SEQ ID NO: 822007 - DNA, 120 bp, Artificial Sequence
  ENSG00000163597_9 (sequence is synthesized)
aatgaacatgattatactctgttggaagagcctaagaggaaactgatgccatgagtttcagagagtaatgcttaaccccagttacacaggatgccgtcttgtgtttcctcttgtttagtt

SEQ ID NO: 822008 - DNA, 120 bp, Artificial Sequence
  ENSG00000163597_10 (sequence is synthesized)
acccactacagtgattttgtgatctgctaatgggttgccacccacaaccattgctttagcacttttacttcaaatcaatgaaggattgataaaagttctcctggtgtctccgcagagtgc

SEQ ID NO: 822009 - DNA, 120 bp, Artificial Sequence
  ENSG00000163597_11 (sequence is synthesized)
cttccaggaacagatctttgcatagaatatcagtggtttccttttttgtttcaaatagtggtcagaaaatacccagtgttgactcaccaaggcaatcagcttcctttttccctttttttg

SEQ ID NO: 822010 - DNA, 120 bp, Artificial Sequence
  ENSG00000163597_12 (sequence is synthesized)
caaagtgctgagatgacaggtgtgagccatcagacccagcatttttttttttaatttaaatttaaattttttttcatttttttgagaggttttttttgttttgttttgttgttgttgttg

SEQ ID NO: 822011 - DNA, 62 bp, Artificial Sequence
  ENSG00000163597_13 (sequence is synthesized)
gttttttttgttttggagtgcagtggcatgatctctgcaacctctacctcccaggttcaagc

SEQ ID NO: 822012 - DNA, 78 bp, Artificial Sequence
  ENSG00000163597_14 (sequence is synthesized)
gctaccacacctggctgattttttttgttttagtagagacagggtttcaaccatgttgcccaggttggtctcaaactc

SEQ ID NO: 822013 - DNA, 120 bp, Artificial Sequence
  ENSG00000163597_15 (sequence is synthesized)
acaggtgtgagccaccacacccagctattttttctttcgttttttaattttaaagttgggggggggtctcaatttgttaccctggctggtctcgaactcccggacttaagcgatcctctg

SEQ ID NO: 822014 - DNA, 120 bp, Artificial Sequence
  ENSG00000163597_16 (sequence is synthesized)
cggacttaagcgatcctctggctccaagcccactaccagtctcaggtttctttactaaaagatcactacctttttttctcttatctgctgccatgtgagatgtggctttcaccttccgcc

SEQ ID NO: 822015 - DNA, 120 bp, Artificial Sequence
  ENSG00000163597_17 (sequence is synthesized)
atgattgtgaggccttcccagccatgtagaactgtaagtccaataaacctcttttgtaaattaaaaaaaaaaaatcactatttaagatactaggatggattgtgactgttgaggagtact

SEQ ID NO: 822016 - DNA, 120 bp, Artificial Sequence
  ENSG00000163597_18 (sequence is synthesized)
tacatatcctacatttgactacattatttccaaaccaagtattccatccaaaggaacatactgctatcatagagaccaaggagggactgtttaaggttgccaaggtgaagcgagctgaga

SEQ ID NO: 822017 - DNA, 120 bp, Artificial Sequence
  ENSG00000163597_19 (sequence is synthesized)
ggctttgtcctcgtgccagtaactctgaaatctctcttaattcctgctgtccaggcagcagaatgccatggtttccccaagtaggtagctgctttagcagttaaagcccaaatgtctgtt

SEQ ID NO: 822018 - DNA, 120 bp, Artificial Sequence
  ENSG00000163597_20 (sequence is synthesized)
ctgttgatcagaggtctctgaatttctgaagtggtgtttcgtttctggtgactgagttaatcctttacaatccctcttgtaaagtgtgctaatagaaagaatccacctttcaaagctgca

SEQ ID NO: 822019 - DNA, 120 bp, Artificial Sequence
  ENSG00000163597_21 (sequence is synthesized)
gaaccagaccgtgccctaaattgaccaacgtaactgatgtgcctcaggaagtctcttgccagctgtccctgtgaagacccccctcctcccccccagctgctgccttgcacactgaagcat

SEQ ID NO: 822020 - DNA, 120 bp, Artificial Sequence
  ENSG00000163597_22 (sequence is synthesized)
ctcagactgtgcaaagccgtgtagtcatcaagacagtaaatcccagggcttggttaagtgctgtgtgataacttgtttggatgagacttaacttaaaaccacttacaataaacttgggaa

SEQ ID NO: 822021 - DNA, 120 bp, Artificial Sequence
  ENSG00000163597_23 (sequence is synthesized)
gttcttttcgaggtcggccgcgtggctggaagacatggccactccagtcggtgttgagcacggcgagcagtctcaggcctttagtgatgatgattaaaggtggtggctgtggccttgaaa

SEQ ID NO: 822022 - DNA, 120 bp, Artificial Sequence
  ENSG00000163597_24 (sequence is synthesized)
cttttcgaggtcggccgcgtggctggaagacatggccactccagtcggtgttgagcacggcgagcagtctcaggcctttagtgatgatggtaaggctgcctgggtgggaaaacggggtct

SEQ ID NO: 822023 - DNA, 120 bp, Artificial Sequence
  ENSG00000163597_25 (sequence is synthesized)
ttactcaaaattcagaatgctaattattttaatgataaaaatgagtagcgtctttgcccgtgtgatttggggccactaggtgtcattgtaaccagcgtggatcctcgttagggcatgcag

SEQ ID NO: 822024 - DNA, 120 bp, Artificial Sequence
  ENSG00000163597_26 (sequence is synthesized)
ggatgaaagagacatggcaaatgaattttggatcgctaggatttaggaatctttgttattggctgagctgaggatgatttaaagttatccctgtctgaaatggtatcttttgtgaggagg

SEQ ID NO: 822025 - DNA, 120 bp, Artificial Sequence
  ENSG00000163597_27 (sequence is synthesized)
tctgacttgctgaggctcagctgtttaatacaaatctggagaataaaccttaaggtggtttctgttagaatgaagcctgttatccttctcttttagattaaaggtggtggctgtggcctt

SEQ ID NO: 822026 - DNA, 120 bp, Artificial Sequence
  ENSG00000163597_28 (sequence is synthesized)
gaaaacagtcatgtgaaaactcatcaccttaaggtgttaagtgtaaggatcttcatgatgaaatttctgtaaatggtgagatttttagtactttcatagacttgaatatgcttatggtcc

SEQ ID NO: 822027 - DNA, 120 bp, Artificial Sequence
  ENSG00000163597_29 (sequence is synthesized)
tggggatgtgttggtcttccagggttacgattgcccagataatggaagtagtatggaattccttttgatagggtccttgccaagcactctcataaagagcattttttgtttgtttgtttt

SEQ ID NO: 822028 - DNA, 120 bp, Artificial Sequence
  ENSG00000163597_30 (sequence is synthesized)
gcgtgagccaccttgcctggccataaatagtatttctaatatcaaccccatatgaggtaaatttttttccccactctgctgctgagtaagtaaaagtgaggcgtaaagagttcttttgcc

SEQ ID NO: 822029 - DNA, 120 bp, Artificial Sequence
  ENSG00000163597_31 (sequence is synthesized)
caaagttatacaagcagttactgagttagactggcagttctgaactggggagcgatggtgttcctggcatctggtgaatgctactattaataaataccctggctgggcctggatatttat

SEQ ID NO: 822030 - DNA, 83 bp, Artificial Sequence
  ENSG00000163597_32 (sequence is synthesized)
ctacttgggagactatgcagtgagctgagatggcaccattgtactccagtctaggcgacaagagcgaaactctgtaaataaat

SEQ ID NO: 822031 - DNA, 120 bp, Artificial Sequence
  ENSG00000163597_33 (sequence is synthesized)
ctccagtctaggcgacaagagcgaaactctgtaaataaataaataaataaatatcctacaatgcatacaacagcctgcatgaggaataattgatccacccagtatgtcagtagagctgag

SEQ ID NO: 822032 - DNA, 120 bp, Artificial Sequence
  ENSG00000163597_34 (sequence is synthesized)
gttgagaaactcctgtataccacacgttaggctaactagagatctgagctctagtctcagcctattttctcaccagagtcttgtttcttcatttgtgaaacagggttagtgatttccaaa

SEQ ID NO: 822033 - DNA, 120 bp, Artificial Sequence
  ENSG00000163597_35 (sequence is synthesized)
cttgattattacatcagagccacctacaaagtgttaaaatatacacattcctgggcctcacctccaggcatgggtgagaatggctctggagtggagtccaggaatcatgtggccagtcca

SEQ ID NO: 822034 - DNA, 120 bp, Artificial Sequence
  ENSG00000163597_36 (sequence is synthesized)
agagcaagtgggtagtaactagatcaggggtgtcaatcttttggcttccctgtgccacattggaagaattgtcttgggtcacacataaaataaactaacactaatgatagctgatgagct

SEQ ID NO: 822035 - DNA, 120 bp, Artificial Sequence
  ENSG00000163597_37 (sequence is synthesized)
cattttgttgctaggtgtctgcaataagagacgaaactgaactgctttgccggaaacaagtgaaatgattgctttcctgtttgtaagatttgtttacatctttcgtatccgtaagaagtc

SEQ ID NO: 822036 - DNA, 120 bp, Artificial Sequence
  ENSG00000163597_38 (sequence is synthesized)
ccacaagcctatgatggttagttatccctgtctgaaaatctggactgagggaaataatctattctgaggcttaagggtttggctccatggttttttttttgtttttgttttttttcccct

SEQ ID NO: 822037 - DNA, 80 bp, Artificial Sequence
  ENSG00000163597_39 (sequence is synthesized)
caccaaggcaatcagcttcctttttccctttttttgttttttttttaacattttatatttttgctttattttattttatt

SEQ ID NO: 822038 - DNA, 80 bp, Artificial Sequence
  ENSG00000176753_0 (sequence is synthesized)
ctctccagccacactccgacccggcgcggccacccggccccagctcgcaggccccactgctgcgccctctcggggacgcg

SEQ ID NO: 822039 - DNA, 120 bp, Artificial Sequence
  ENSG00000176753_1 (sequence is synthesized)
gctccagggacgcggagctccagatgcctgcgcccaaggcccctcgcctggcgccggctggtcccgaacttcggggcatgggcacccaggaagggggctgcgcgtgttgggaggcccgtc

SEQ ID NO: 822040 - DNA, 120 bp, Artificial Sequence
  ENSG00000176753_2 (sequence is synthesized)
ctctcgccgcgaacctccggggcagccggggaacccacctgcggagcgggaagcccaggaacgctcgaagaggtcgtgggagccgggcccgccctccgcgggagggacctcggcgcggga

SEQ ID NO: 822041 - DNA, 120 bp, Artificial Sequence
  ENSG00000176753_3 (sequence is synthesized)
acgccgaggaggggccgcgcttacacgttggtgcagcgccggcttcacctgaccgcgattttgatttcagggtgtggcctcaggtaggacgcggcggcgaacccagagcgcgggagaagt

SEQ ID NO: 822042 - DNA, 120 bp, Artificial Sequence
  ENSG00000176753_4 (sequence is synthesized)
ggccctggcctggccacagccgcggggacctgcctgcggctccacggcccagtggccgcctcgcggagacccgacctggagaatcagctgagcgccggctgtgtgtaatcacctcgttca

SEQ ID NO: 822043 - DNA, 120 bp, Artificial Sequence
  ENSG00000176753_5 (sequence is synthesized)
ctggcatcgcagatgcacgctccagagccgcgggccgactctcccggacctgagcgggccgcgtgtgcccacccacacatcctggagagcccacgcgggagtcggaaaacctgtcacctt

SEQ ID NO: 822044 - DNA, 120 bp, Artificial Sequence
  ENSG00000176753_6 (sequence is synthesized)
ggatgatctgtcccatgtggacagggccccaagactgtgctggggtagccccttgcgcaggcaggaaagcgggatttaagggattccagttcccttgtcagcccttgcgcagtcctgagt

SEQ ID NO: 822045 - DNA, 120 bp, Artificial Sequence
  ENSG00000176753_7 (sequence is synthesized)
cctgaggactttctagcctgagagtcctagggcaggagacccgcacccccagagcggctagggcctgtttcggagcccctccgcctgtgattttgtcccagagtcggcatcctctgcttg

SEQ ID NO: 822046 - DNA, 120 bp, Artificial Sequence
  ENSG00000176753_8 (sequence is synthesized)
tcctcagcagtccctgcctaagatcagaatggccattccaaggggctcactcctggctgcccctgtgccatgtttcttttggggtacagggtgttttctatactgggggaagggacagga

SEQ ID NO: 822047 - DNA, 120 bp, Artificial Sequence
  ENSG00000176753_9 (sequence is synthesized)
gaagacctttgctctccttgtcttgggcccccagagaaaggctgtgttctggctgagtgctgaggaagttctggcttggaaactcagtacatgtggactccaaatggctgccgtcaagtg

SEQ ID NO: 822048 - DNA, 120 bp, Artificial Sequence
  ENSG00000176753_10 (sequence is synthesized)
gtggctgggtgactgccagtgtcacagagcggggaccaaggacagtgcagggattttaaaaatcattgttgggcacctcagacttcaatgattaactgaggtcactatggccacttattt

SEQ ID NO: 822049 - DNA, 120 bp, Artificial Sequence
  ENSG00000176753_11 (sequence is synthesized)
ttgttcactgattctttagacgcatcaatctactcacggctcaatcttttgcattataggctgtattggtttcacacaatttactctaaggcgcccacctaatagagctcaggcaacccg

SEQ ID NO: 822050 - DNA, 120 bp, Artificial Sequence
  ENSG00000176753_12 (sequence is synthesized)
tgggaacctgacagtcccaaacaggtctgtaccctgtgtggctgcaccacaagcccaatgccctcggctttcctagggaaagcatggtgccaggtgcagatgctggccctctgtgctgtg

SEQ ID NO: 822051 - DNA, 120 bp, Artificial Sequence
  ENSG00000176753_13 (sequence is synthesized)
ggacagtggtgtgggagccagccagctaaccataccctgctgccatccccaacatccccaacacatatttatatttagtttctgttctcctccccttactctgtcgcctcctcctcctcc

SEQ ID NO: 822052 - DNA, 120 bp, Artificial Sequence
  ENSG00000176753_14 (sequence is synthesized)
tctttgtgtctttcccacgcggattctttctctttcctctgagtggacaatactgtaggcctgacccgcttagacaaactctgacctcctgtggtcacccaggaagctgactgctaggcc

SEQ ID NO: 822053 - DNA, 120 bp, Artificial Sequence
  ENSG00000176753_15 (sequence is synthesized)
ttggatgagggggcagtgggagggggaccaggtgataccagaatggctccccccacagattcgttacccaaggacatgggtacactggtcgaatgctggctgcagaagcagaatgtgctg

SEQ ID NO: 822054 - DNA, 120 bp, Artificial Sequence
  ENSG00000176753_16 (sequence is synthesized)
cgtggaggtggcagagattggttgctgaggatttgaaatgaaccatgaaccaaagctagaatgaaagcattatattgtctaacctagaatcgacaccctaaattatttttactgattcat

SEQ ID NO: 822055 - DNA, 120 bp, Artificial Sequence
  ENSG00000176753_17 (sequence is synthesized)
gaatgcatatgtgaattattttctttgactacaaatgccttatatacccaaatcacagctccaagcagtacttttgaacagaactacaataaagtatgaatgttagattattaccagaaa

SEQ ID NO: 822056 - DNA, 120 bp, Artificial Sequence
  ENSG00000226567_0 (sequence is synthesized)
atcatgaaggcagaggctgcctcgggacggctctgccccagggagcgtggggccatctgagccaaacagaatagagggcttggacacagccccggatgtgagttgagctctgaatgtcaa

SEQ ID NO: 822057 - DNA, 120 bp, Artificial Sequence
  ENSG00000226567_1 (sequence is synthesized)
gaccagtcctggacctatgaccacccagctgggagggagctgacagataaggaaactgaggcccagagtggtgctggaggtctctgagccaggaagtggcccgtcgggactggaatgcag

SEQ ID NO: 822058 - DNA, 120 bp, Artificial Sequence
  ENSG00000226567_2 (sequence is synthesized)
ggccctgagcctgacagcactctccgggaaggggctagagccccgagggatgagcgaaatgatcatgatcatctttgtcccatgcttgcaagttctagaactgctacaaaggagcagcca

SEQ ID NO: 822059 - DNA, 120 bp, Artificial Sequence
  ENSG00000226567_3 (sequence is synthesized)
cgagtgtcccccgctcccagaccactccaagctgcttctagagggactggacatcctggagcagaaacagtcccattttccactgctttggtcagggagtgagtcccctgatgtcatccg

SEQ ID NO: 822060 - DNA, 120 bp, Artificial Sequence
  ENSG00000226567_4 (sequence is synthesized)
aggatatgaggcatcgctaaatctggccatcccctgaagcacccagcctcaccgacttcctgaagcgtggatgaacgctgctgccacaaatgtgctgtgacaaccgctgacaaggagagt

SEQ ID NO: 822061 - DNA, 120 bp, Artificial Sequence
  ENSG00000226567_5 (sequence is synthesized)
gagtgatgtttgtgccatcctgctgagcacgagggagctgcttggggaagccaggggctggggcatctcaatagcactgagggcagcctcgggggggcttcacagcacacccacccccag

SEQ ID NO: 822062 - DNA, 120 bp, Artificial Sequence
  ENSG00000226567_6 (sequence is synthesized)
atcactgctgattctgggggatgcatgacagagctttctgaccttgcacttccctttggctgctaaactgaatgaagcctccttcttagacccaaccccctactgagtgtctctctcttc

SEQ ID NO: 822063 - DNA, 120 bp, Artificial Sequence
  ENSG00000226567_7 (sequence is synthesized)
tgttctttgccatccctgcccccaaacctggaaacttcctctgcacctccacatgcagttggtgccaaatgtctcccacctacctgcctgggtctctgcccctcagcttctcacaagtgg

SEQ ID NO: 822064 - DNA, 120 bp, Artificial Sequence
  ENSG00000226567_8 (sequence is synthesized)
ctgtgttcttccactcacctgctgggacacacactggctcaccagcccccatcctctccacaccgtctcacctgcctggctcgccttcttccccgtcacctgtagacaggtcatttccca

SEQ ID NO: 822065 - DNA, 120 bp, Artificial Sequence
  ENSG00000226567_9 (sequence is synthesized)
gacatacctgccctactctgactagttggcatggtgaggccgtcactcccttctctccagggtcccatgtgctctccaggcacaaattcacccagacatttcttgatctagctctgtccc

SEQ ID NO: 822066 - DNA, 120 bp, Artificial Sequence
  ENSG00000226567_10 (sequence is synthesized)
agaaagcgttacctttgcaatggcaaatacctgtattaattgccgtgcaagtgacacatacttatcatgtgctcgcctgttccaggcaccgatggctgtcttttttattttgtgtcaggt

SEQ ID NO: 822067 - DNA, 120 bp, Artificial Sequence
  ENSG00000226567_11 (sequence is synthesized)
tgtcccaatcactgtgccaggagatttacctgcatgggctcacaaactctttgcagtattcttgaaagagaggcaagtatgttcctctattttgtagatgagaaaactgggctcagaaaa

SEQ ID NO: 822068 - DNA, 120 bp, Artificial Sequence
  ENSG00000226567_12 (sequence is synthesized)
tgaagtcattttgccccaggtcacccaaccagcgagtggcagaactatgtttaaaagtcaggattatctattccagagaccctgtgctgcccaccatggcacactgcttctccagtcaag

SEQ ID NO: 822069 - DNA, 120 bp, Artificial Sequence
  ENSG00000226567_13 (sequence is synthesized)
gaaaggtagcttaaagatatctgctttccaaaatgcttgaacatttgttagaatatggaagaagataatatatggtcctgtccttgaagaattgatactctatttggggaaacaaagcag

SEQ ID NO: 822070 - DNA, 120 bp, Artificial Sequence
  ENSG00000226567_14 (sequence is synthesized)
ctgacattgccagccaatatttatttaaatttcatctcagaaaaatagcaaaagagattttatttaacctttcaacagtgattatctgattatgtctgtttgagtattctgtaggataga

SEQ ID NO: 822071 - DNA, 120 bp, Artificial Sequence
  ENSG00000226567_15 (sequence is synthesized)
cagctaaggcagtcatggactcagtgggaaaaagttcagcaatccattattaatgtctgtttggggcgcaggcatgggtagtggaggtagatgtgccaccaatttcatttttcctatata

SEQ ID NO: 822072 - DNA, 120 bp, Artificial Sequence
  ENSG00000226567_16 (sequence is synthesized)
gtagaaaacacgagagtttctaataaattcctaactatataaagcagacaagagaggaaagagaaagatacctgtgtgattgggagaggctgcctgaggaaggtaagatatgacctgttt

SEQ ID NO: 822073 - DNA, 120 bp, Artificial Sequence
  ENSG00000226567_17 (sequence is synthesized)
ggggtcattgtacccctggggcatgaggcatcatcaaggccagattgaattttctaaggtatgataaaaagtttggttcttccatgtgccttggttcctcttctctaaaatggctaattc

SEQ ID NO: 822074 - DNA, 120 bp, Artificial Sequence
  ENSG00000226567_18 (sequence is synthesized)
tgtccaattaagatctagaaggccctttctgatgccaatgtttctaaataaagatatctaataagggtggaacacgtcacagctctcaacctcctctcagaccccccaacaagcccatga

SEQ ID NO: 822075 - DNA, 120 bp, Artificial Sequence
  ENSG00000226567_19 (sequence is synthesized)
tgcagccattttagagatgaaaaactgaggcccagagagctgacacccatgttagcagaagttagtggaacccagttctgttaactctaaccattctctaatccaaaagtatatttacag

SEQ ID NO: 822076 - DNA, 120 bp, Artificial Sequence
  ENSG00000226567_20 (sequence is synthesized)
attttcaaataattaggaaatgttagtaatatttagaagctcctcagatgattctagttttcagccatggttgagaatgttgctaaaaagtagtgttatggctgatttccgagaaggaaa

SEQ ID NO: 822077 - DNA, 120 bp, Artificial Sequence
  ENSG00000226567_21 (sequence is synthesized)
cagaggttcagagtggttaagcaacttgtccaaagtcacacagccagaacatagtggagtgggaactccactgaggcaggctgactgcttaacccatgtgtctgttgtgccccaggcact

SEQ ID NO: 822078 - DNA, 120 bp, Artificial Sequence
  ENSG00000226567_22 (sequence is synthesized)
gtcacatattatttcatttaattctctcaacaactttgtttttttaactctgaaaactaatccagaaaagttaaataaccagcccaaaattgcagagctaataaaaggcagctaacagtg

SEQ ID NO: 822079 - DNA, 120 bp, Artificial Sequence
  ENSG00000226567_23 (sequence is synthesized)
tctatttgggtggacaagtgtgtgtacttgtcaatagtcatttgatgggtcacttaagatctgtacatcacactatatgttgattttacttttaaaaggcacaaataaactgccctctgg

SEQ ID NO: 822080 - DNA, 120 bp, Artificial Sequence
  ENSG00000226566_0 (sequence is synthesized)
tgtgtgtcaactaggtgtgttctaaacatcatttttccagttggaggaatgctgagtttggagatggctgataaatgtgtcatctggataacattctgagattgatataggaatgccttc

SEQ ID NO: 822081 - DNA, 120 bp, Artificial Sequence
  ENSG00000226566_1 (sequence is synthesized)
ttttgcttctttagctgccttgaccaatgtagtgatgctgacagaggctataaaaaatgtggctctccaatcttgggcactttatgtaaccttgctcctgggaggccgagcacatattca

SEQ ID NO: 822082 - DNA, 120 bp, Artificial Sequence
  ENSG00000226566_2 (sequence is synthesized)
atcaaagaatgctgctaatgaatcacaaaaggtggagaatgctaaacagcaatgcttctgtcactctgttgtggctattaatcaagatgatgcattgctaagacagctgcctgggtatga

SEQ ID NO: 822083 - DNA, 120 bp, Artificial Sequence
  ENSG00000226566_3 (sequence is synthesized)
caggaagcaaattgctgtgtctgcctgtcagaagtttatttgctactttgagtatatggaacatgaatgtcaactgaatgtatttaaagaaagtgcaaattaaacatgaagatcttcaaa

SEQ ID NO: 822084 - DNA, 120 bp, Artificial Sequence
  ENSG00000280936_0 (sequence is synthesized)
acgaccctacactggacaggctgcggctgccccaggccagggaacagagatgccaccccgtgacctgccagagcccttacacgagtcctgtctccaatctgcccgacccacagaacctcg

SEQ ID NO: 822085 - DNA, 120 bp, Artificial Sequence
  ENSG00000280936_1 (sequence is synthesized)
gggcccgggagagggaaccaggctaagcacctgcacccttggcccactttgaccttggcaaacagggagaggaggccagccagaatctccacccaggggcgtgagacagagaggatgtcc

SEQ ID NO: 822086 - DNA, 120 bp, Artificial Sequence
  ENSG00000280936_2 (sequence is synthesized)
atgctccagacactctggacccagagcagcgggaaggccagaggcccacttggagctttcaccccagccggcgtcgactcagggcccacggaggcagctccgagagggaagagggactcc

SEQ ID NO: 822087 - DNA, 120 bp, Artificial Sequence
  ENSG00000280936_3 (sequence is synthesized)
atggggcgggggcctctgctcttctgacctgggggtctctacccctccacatttacagacactcattttaatcagaaccacaccaatattaataaagttccaaaaagcacgtgtttgctg

SEQ ID NO: 822088 - DNA, 120 bp, Artificial Sequence
  ENSG00000229278_0 (sequence is synthesized)
accgaggctccgcctgcagggcccgcggagagctcacaggtgagtggcgctgggcggccctgtgcccgcttccctccctggggcgcgaactctcggctggttgctttctccacggccgct

SEQ ID NO: 822089 - DNA, 120 bp, Artificial Sequence
  ENSG00000229278_1 (sequence is synthesized)
cctgggacagagtagctccgggcaagctggcagctgtctgactggacctgatgccactgggcctggtaggaagacagaatatctgttttggaccttaacaggactttgcggaatcagaaa

SEQ ID NO: 822090 - DNA, 120 bp, Artificial Sequence
  ENSG00000229278_2 (sequence is synthesized)
agaacctgctgttgtacctggaaaaacaaaaggaagctctttatgtacacacatgataagaacgcagagaaatattaatgagtaaaaactgacagtgacaaaaaaaatctaacatcactt

SEQ ID NO: 822091 - DNA, 120 bp, Artificial Sequence
  ENSG00000229278_3 (sequence is synthesized)
caaaagcaagatacacactcacacaccaaaagaaaaccttaataaattggtctccattgaaactaagaactaggccaggcatgatggctcatgcctgtaatctcagctctttgggaggct

SEQ ID NO: 822092 - DNA, 120 bp, Artificial Sequence
  ENSG00000229278_4 (sequence is synthesized)
gaggtgggaggagttcacggccagcctgagcaacacagtcagactctatctttaaaaaaagtttaaaaataaaaatatatgccaggcatggtggcatggacctctcatccgagttactca

SEQ ID NO: 822093 - DNA, 120 bp, Artificial Sequence
  ENSG00000229278_5 (sequence is synthesized)
ggcatggtggcatggacctctcatccgagttactcaggaggctgaggtgagaggatcatgtgagcccgggagttcaaggctgcagtgagctatgaatgtgccactgcactccagcctggg

SEQ ID NO: 822094 - DNA, 120 bp, Artificial Sequence
  ENSG00000229272_0 (sequence is synthesized)
ctgtgagtcctgggatctgctggggaagtccaaggcatatcgcaccagctgcccctagctgctgcctgcagctggaggccacaggccccccatgttgaagaagtgtcaccttcaaaggga

SEQ ID NO: 822095 - DNA, 120 bp, Artificial Sequence
  ENSG00000229272_1 (sequence is synthesized)
cagctgtcgggcggccttcattccgggagggggcgggcgaggcgccgcctcgagccgtggcgctcattggctgcagaccagagccccccggcgcctcgggcgccgctccggacgctgatt

SEQ ID NO: 822096 - DNA, 120 bp, Artificial Sequence
  ENSG00000229272_2 (sequence is synthesized)
cccccggcgcctcgggcgccgctccggacgctgattggtgggaacacggggagggggcgtgttctccgcgcagctgggaggagtctggaatgaaacagatggaaacagccagtctgtgaa

SEQ ID NO: 822097 - DNA, 120 bp, Artificial Sequence
  ENSG00000229272_3 (sequence is synthesized)
cgtttcttcaggtatccggcagagacagctgggaagggaaacttattccttggcatctgcacaaaggcctccctggggcttggtgctccccatccccgccacacacatacagcatggatt

SEQ ID NO: 822098 - DNA, 120 bp, Artificial Sequence
  ENSG00000229272_4 (sequence is synthesized)
tgattctcctgggccagtgagaagagcaacgccaagatgtaattaaagattttgagatgaagtggtcatcctgattatccaagtgagcctgaaatccaatgacacatgtcctgataaagg

SEQ ID NO: 822099 - DNA, 120 bp, Artificial Sequence
  ENSG00000229272_5 (sequence is synthesized)
acacacagaggaaaagacagaaacatggatgaaaaggcaaagtgaagacagagcaaagccgtccaagccaaggaatgctgatggcactagaagctggaagaggcaagaaaggagcctctc

SEQ ID NO: 822100 - DNA, 120 bp, Artificial Sequence
  ENSG00000229272_6 (sequence is synthesized)
ctagggccttcagagggagcgtggccctgctgacactgccgacacctggatttcgacttctggcctccagaactgtaagagaacaaatttctattgttttaagtggctgaatttgtagta

SEQ ID NO: 822101 - DNA, 120 bp, Artificial Sequence
  ENSG00000229272_7 (sequence is synthesized)
atttgttatgacagttgtagaaaactaatgggacataggactagagtcctaaagcccagtccatggtcagggaagtggagagggagctgaggatatcctccccaggggccacagactcat

SEQ ID NO: 822102 - DNA, 120 bp, Artificial Sequence
  ENSG00000229272_8 (sequence is synthesized)
atatcctccccaggggccacagactcatgtgaatataaagccttttttggtttcttttgagtaaatcactcgcaatcccatagatttctgattttttttttttttttgagacagattctt

SEQ ID NO: 822103 - DNA, 85 bp, Artificial Sequence
  ENSG00000229272_9 (sequence is synthesized)
agacagattcttgatctgttgcaggctggagtgtagtggcctgatctcagctctctgcaccctctgccccctgggttcaagcaat

SEQ ID NO: 822104 - DNA, 61 bp, Artificial Sequence
  ENSG00000229272_10 (sequence is synthesized)
ttggccaggctggtcttgaactcctggccacaagtgacccatttccaattttatataagac

SEQ ID NO: 822105 - DNA, 120 bp, Artificial Sequence
  ENSG00000229272_11 (sequence is synthesized)
accgcgcccagccagatttccaattttatataagaccaagccctacttaccagatacttttatataaactattcagttgctactaacattgggcataaggcattgttttacactttaata

SEQ ID NO: 822106 - DNA, 120 bp, Artificial Sequence
  ENSG00000229272_12 (sequence is synthesized)
aacaaagcaattatactttcctaatcttttaatgttcagaagatgatactttcaaggatcatttctatcatttgttactagaaaagtttctctgaatgtgtagaacaccaaaaagtatta

SEQ ID NO: 822107 - DNA, 120 bp, Artificial Sequence
  ENSG00000229272_13 (sequence is synthesized)
aacaaaaattttaaaaacccacaaagcacaaaacggactcagcttgacagtcatagctttcctcagaggctcctttgccacccatggcacaggtgcagccttgaatgctctgtgatgtgg

SEQ ID NO: 822108 - DNA, 120 bp, Artificial Sequence
  ENSG00000229272_14 (sequence is synthesized)
gggccggtgctggtaacctcaccacctgcacatcaacactcaggggaatctgagatagtttggtctattcgcaagtgggtagatggatttataaactacacaacctaggccattttttgt

SEQ ID NO: 822109 - DNA, 86 bp, Artificial Sequence
  ENSG00000229272_15 (sequence is synthesized)
agatggatttataaactacacaacctaggccattttttgtttttgtttttaaagagacaggatctggccctgtcccccacagcctc

SEQ ID NO: 822110 - DNA, 89 bp, Artificial Sequence
  ENSG00000229272_16 (sequence is synthesized)
agagatgaggtctttttgtgttgcctaggctggtctcaaattcctggcctcaaaagatccacctgcttcagcctcccaaattgctagga

SEQ ID NO: 822111 - DNA, 120 bp, Artificial Sequence
  ENSG00000229272_17 (sequence is synthesized)
tcaaaagatccacctgcttcagcctcccaaattgctaggatttatagatgtgaggcactggacccagcccatgatctagttttaccaaaattgatctttacaaaatgaaaatgttttaat

SEQ ID NO: 822112 - DNA, 120 bp, Artificial Sequence
  ENSG00000229272_18 (sequence is synthesized)
agattattatagattgaagattaaagataatactaatagtataagtcccagaaaaccataagaaattggcagagcttatgtggctagtatcagctctatatcagcacattatgaggtaaa

SEQ ID NO: 822113 - DNA, 120 bp, Artificial Sequence
  ENSG00000229272_19 (sequence is synthesized)
atgaaatctgccaagaagtcagcctctttgccccccaaactaaaatgatcaagagggtcccttgaaagatggatttatgtccactgtcattcatgagctcacccttagtgtgtattgtgc

SEQ ID NO: 822114 - DNA, 120 bp, Artificial Sequence
  ENSG00000229272_20 (sequence is synthesized)
acccttagtgtgtattgtgccttgcaatattatttattaataaaaaaatgccatcaaaattaacactaaaatattacatctttaactcatctttaaaaaatttttaatgtaatgtatata

SEQ ID NO: 822115 - DNA, 120 bp, Artificial Sequence
  ENSG00000229272_21 (sequence is synthesized)
atgtattggagctgcaaatgtcttaaaaaatagagatttctatggactgaactgtgttccaacaaatacatatgttgaagccctaatccccagtgtgactgtatttggacatggggcttt

SEQ ID NO: 822116 - DNA, 120 bp, Artificial Sequence
  ENSG00000229272_22 (sequence is synthesized)
taggaggtaattaaggttaaataaggtcataagggtggggtcctaatcaattgaattggtgaccttgtaagagagggatgagagagatattgtgctctctctccctgtgcatacatccag

SEQ ID NO: 822117 - DNA, 120 bp, Artificial Sequence
  ENSG00000229272_23 (sequence is synthesized)
gaaggaccatgtaagaacatagcaagaaggcagccatctgcagaccaggaagagagaccccaccacaacccaaccataccagcaccctgatcttgggtttccataactatgaaaaaataa

SEQ ID NO: 822118 - DNA, 120 bp, Artificial Sequence
  ENSG00000229271_0 (sequence is synthesized)
gcagaactccttttctgagagttcttacttctaacaaggaagaagactttcctgcttccgtgatggcagagagcagttttcagcttgtgccccatctccagaatacagaatctaaagggg

SEQ ID NO: 822119 - DNA, 120 bp, Artificial Sequence
  ENSG00000229271_1 (sequence is synthesized)
ttgtctccaagaagaatggctggagcagtagctaccactttgtgaccaagaaggaaaggctgagagaatcacagagaccttaactctggtgtcattgaactacccgctttcagactcctc

SEQ ID NO: 822120 - DNA, 120 bp, Artificial Sequence
  ENSG00000229271_2 (sequence is synthesized)
actatgtgagaaaaatgactccccaatttgcctgagcctctgtttcttaggtttctaaatagacagccaaatgtaattctgaatcaatacaaataaaaatgttaaaacctctcagaggta

SEQ ID NO: 822121 - DNA, 120 bp, Artificial Sequence
  ENSG00000229276_0 (sequence is synthesized)
aaaaataccccctaagcacagtaatgcattttgttattaaggaatagaaatgcaaattttgagtgtgaaaatttgatctagtaaacaaaaatcaacctctaagacccttttaacctaaaa

SEQ ID NO: 822122 - DNA, 80 bp, Artificial Sequence
  ENSG00000229276_1 (sequence is synthesized)
agtcttcatgtcttttcatatgttcagtgttttttgtttttttttgttttgtttgagacatagtctcactctgtcaccca

SEQ ID NO: 822123 - DNA, 120 bp, Artificial Sequence
  ENSG00000229274_0 (sequence is synthesized)
ctctctctttctcctgccaccatgtgaagaaggtgcttgcttccccttggtgttctgccataaattttatcatttctggattgctgtctgtcattttgggaagaaaatcaaacaagcatc

SEQ ID NO: 822124 - DNA, 120 bp, Artificial Sequence
  ENSG00000229274_1 (sequence is synthesized)
tgccctgctcagtcctgggtggagaagctaccagaaccacatctcctgtctgtcccaccataagtctctgcttcattcacgctttcatgtgtcgtgcatcaagcaagcatttgcctgtag

SEQ ID NO: 822125 - DNA, 120 bp, Artificial Sequence
  ENSG00000229274_2 (sequence is synthesized)
gcttggggagctctgagaggggttgagagtgaacaaaattaatcaaatcgtataacagaagaggaagtcccatcctgccgaggatcctggatgtgagaacctgctgctggcctggtggga

SEQ ID NO: 822126 - DNA, 120 bp, Artificial Sequence
  ENSG00000229274_3 (sequence is synthesized)
ccagatcccctgcaggcctggaacagcctgatcagcagcctcctaagccccatggctgccacagtgggcctcattgtccttccctatcacctagccggggtgttcccagctgccagacag

SEQ ID NO: 822127 - DNA, 120 bp, Artificial Sequence
  ENSG00000229274_4 (sequence is synthesized)
tgccaactggtggtgcctgcccatcagtgccccaagacagccactacttttcgaagaatgagaccaccagctgctttgtggccagctccagcttactggtgagtatttttaggtagaatg

SEQ ID NO: 822128 - DNA, 120 bp, Artificial Sequence
  ENSG00000229274_5 (sequence is synthesized)
ttccagactagtgaagtctttgagattttctgcttcttgttcactgcttccttctgatgtggaccatgcggaaagaggcagaacacaggaacccacacatgggagaatagcaggcatttg

SEQ ID NO: 822129 - DNA, 120 bp, Artificial Sequence
  ENSG00000229274_6 (sequence is synthesized)
actggactgtgccaaaagagttgttcaagtacaatatcaagcaagactgtagttgcaaaaagacataaccaacaacttggtttcaatttgagcaccttaataaacaaactgatttaactg

SEQ ID NO: 822130 - DNA, 120 bp, Artificial Sequence
  ENSG00000229274_7 (sequence is synthesized)
agcatttgctgacaccgtcctggagatgaacaaggagtgcacccttagtgtgggggcagagagagagagagcacattgtctgcaggagtcagctgaatgatctcacagaccccacctgct

SEQ ID NO: 822131 - DNA, 120 bp, Artificial Sequence
  ENSG00000229274_8 (sequence is synthesized)
gggctcttccattttatcacaattattccgcctgttcacgtgcagagagaacacttggggcagattttaagaccttagagagtaacttgtttacaaataaaatatctctttgatgatgta

SEQ ID NO: 822132 - DNA, 120 bp, Artificial Sequence
  ENSG00000286194_0 (sequence is synthesized)
tttccagaaacttggctgtgaaatggagaagaggagagctggttccagggaggctcaggtcaaaggtgattttattttattttttaatttttaatttttttgagactaggtctagctcct

SEQ ID NO: 822133 - DNA, 120 bp, Artificial Sequence
  ENSG00000286194_1 (sequence is synthesized)
tagctccttccccaggctggagtgaagtggtgtgatcacagctaaccacagtcttgacctcctgagatctcatggctcattacagcctccacctccctggctcaagcaatcctcccacct

SEQ ID NO: 822134 - DNA, 89 bp, Artificial Sequence
  ENSG00000286194_2 (sequence is synthesized)
cccgccagtgatttcattttttaagttggaagatctgagcatgtttaagtgtttagtatcatgcccgttttacagaaaaaaagaggctc

SEQ ID NO: 822135 - DNA, 120 bp, Artificial Sequence
  ENSG00000286194_3 (sequence is synthesized)
tgtttagtatcatgcccgttttacagaaaaaaagaggctcttagaaactacgattttactccgatgcggagattctagaacaagatccaggactgggatgcgaagtgagtgagtgagtga

SEQ ID NO: 822136 - DNA, 120 bp, Artificial Sequence
  ENSG00000254365_0 (sequence is synthesized)
acaggatacctccaattcaaaaggaggatccagcataatagaggccagacaggtgatttgcatactcaagagaagaagccacaatagaagaaggcagaggaggattctgtgttgaaagca

SEQ ID NO: 822137 - DNA, 120 bp, Artificial Sequence
  ENSG00000254365_1 (sequence is synthesized)
agcaaagatgggcacaatttgaccgagcttccgtaaacttctcatgggaacacctggctcatttctcctgctgggagatggcaggttcttgcatttgatacttgaatgggccagctgggg

SEQ ID NO: 822138 - DNA, 120 bp, Artificial Sequence
  ENSG00000254365_2 (sequence is synthesized)
gctggcaattcttttccaccctgagcatctgtagagtcatccaactgtgtttgcaaaacttggttgtatgtgagaagtgtgtttgttttatgatcagtgtcttgggttttaaataagaat

SEQ ID NO: 822139 - DNA, 120 bp, Artificial Sequence
  ENSG00000254365_3 (sequence is synthesized)
actgcaagagatgatcccactatgatccttgttaatgtacctctaggctaataagtacggagatgatcctgctctttgatttcatgaataagaaaataaaatgggaaatgcatgacattt

SEQ ID NO: 822140 - DNA, 120 bp, Artificial Sequence
  ENSG00000254366_0 (sequence is synthesized)
gttcaagcgattctcctgccttagccgtgatgttcagtttctaatactaatcacctattttaccgtcttttacaacttcgttgtaggaggtgtgaaagaggagggaaattgtgttggaag

SEQ ID NO: 822141 - DNA, 120 bp, Artificial Sequence
  ENSG00000254366_1 (sequence is synthesized)
aaagaggagggaaattgtgttggaagaggagattaggacatcaagagacaccaagagtaaccatgtacagagaaaaacatcatatgaagacacagcaagaaggtggccatctgtaagcca

SEQ ID NO: 822142 - DNA, 120 bp, Artificial Sequence
  ENSG00000254366_2 (sequence is synthesized)
agaacagtagaaaaccccaggcagagctgaagacagtgacagaagggattattgcttctgaagaagaaaaaaaatgattacaaaatcacctattttaccgtcttttacaacttcgttgta

SEQ ID NO: 822143 - DNA, 120 bp, Artificial Sequence
  ENSG00000254366_3 (sequence is synthesized)
ggaggtgtgaaagaggagggaaattgtgttgtttgatggagagactcaaattaacaaagaactgtggaatatttctagccaaaagccactggggaactgattcctgccaacaaccactga

SEQ ID NO: 822144 - DNA, 120 bp, Artificial Sequence
  ENSG00000254366_4 (sequence is synthesized)
gcagagcacctagttaagtcaaactcagatcgctgactcccagaaactgtaagcactctcctgcatacctgtcaccaaacctccaggtcaatctcacatttactcttgaagaaatggagt

SEQ ID NO: 822145 - DNA, 120 bp, Artificial Sequence
  ENSG00000254366_5 (sequence is synthesized)
cgaagatgaaatagaaaataattagataatgaaatgctaatataggaattgaatgtcagctgcagtgctcagaagcataagattgtgataaatgttttggaggaaaatagaaagaaggct

SEQ ID NO: 822146 - DNA, 120 bp, Artificial Sequence
  ENSG00000254366_6 (sequence is synthesized)
gtggtttgaaacgtctcaacaaacttccaatcatgcaaaacttgagggaacgaggaacagcaaagcttggcactttggaagcttgataacatcacagcatggaagaaaagtggaaggaag

SEQ ID NO: 822147 - DNA, 120 bp, Artificial Sequence
  ENSG00000254366_7 (sequence is synthesized)
agaaggaaatagctgcctgttccctggcagctcttgctctagcctgctcttgcttggctaaaagtaattttcagttaaaagggtggccgtgacttgttattagtgaacacagaatcttgg

SEQ ID NO: 822148 - DNA, 120 bp, Artificial Sequence
  ENSG00000254366_8 (sequence is synthesized)
caaaagccatgcatcagtgtggtgaatgcatcccctactgaaaacagccagtgaggcagaaagggagagttgtacagagagcacctgattgtagcggatcagaaggactgtgtttgaccc

SEQ ID NO: 822149 - DNA, 120 bp, Artificial Sequence
  ENSG00000254366_9 (sequence is synthesized)
tacttgaaaagaatagaaaaaaaataaagacaaaagttgaataaataaaaatatgattaccaaactgcaaactgttatcgatcaatgaatgcattcagcgagtatttatttctgtatgtg

SEQ ID NO: 822150 - DNA, 120 bp, Artificial Sequence
  ENSG00000254366_10 (sequence is synthesized)
tgtgatgtttgacgtatcctgaaaggaacaggaactatccaaagtttacctttaagctatattctttggtgactgccacaaagtttcacttgtgtcactaaattactgaaagtgttgaag

SEQ ID NO: 822151 - DNA, 120 bp, Artificial Sequence
  ENSG00000254366_11 (sequence is synthesized)
gaaagaaaactggggatagccacaaatgcttgcagttttcaatttgctgacttgaatgtttgcaaccggttatttaacacatatatgattttggtcgattatttttatatatactttcaa

SEQ ID NO: 822152 - DNA, 120 bp, Artificial Sequence
  ENSG00000254366_12 (sequence is synthesized)
tcagtatttcccataattaaaaatacatttgcattttttctattatctgttttgggttaggtcaagtacttataccctatatttgtattgctgatctttatattaaaaatattttctcct

SEQ ID NO: 822153 - DNA, 120 bp, Artificial Sequence
  ENSG00000286197_0 (sequence is synthesized)
agtgcgccctcctcaacatggatgttgaattcaaggggtacacgtgcaggtttgttacatggatatattgtgtaatggtgaaatttgagcttctggtgaatccatcacccagtcaacatt

SEQ ID NO: 822154 - DNA, 120 bp, Artificial Sequence
  ENSG00000286197_1 (sequence is synthesized)
ctacccaaaaggtcctggatgtcttccctcagtttttcatgtggatcatgacctgctggaggatgatagccttgtggagcagagttctgcatggctggcaagacctcaggaaacttgcaa

SEQ ID NO: 822155 - DNA, 120 bp, Artificial Sequence
  ENSG00000286197_2 (sequence is synthesized)
gcaatcatggcagaagatgaagagaaagcaaggcaccttctttacaaggtggcagaaaggagaagtgccaagcaaaaggggaagaactccttatgaaaccatcagatctcataagaactc

SEQ ID NO: 822156 - DNA, 120 bp, Artificial Sequence
  ENSG00000286197_3 (sequence is synthesized)
actatcatgagaacagcatgagggaaaacacccccatgattcaatcacctccacctggtctctcccttgacatggggggttacggggattacaattcaaggtgagatttggctgggacac

SEQ ID NO: 822157 - DNA, 120 bp, Artificial Sequence
  ENSG00000286197_4 (sequence is synthesized)
tatcaactaaatgcagaatctggatttcagaagggatttaggttcagatccagatttttatttcttagtagttgtgtgatcttgagtacgttatttaaataaacctcatattgtaaagat

SEQ ID NO: 822158 - DNA, 120 bp, Artificial Sequence
  ENSG00000286197_5 (sequence is synthesized)
gggaagtaggatgtaaaagaaataataaagagatcaggatgcctggaagggaaggtttggacagaagaaatacggattaaaaaagatagattggaattcatagagggtttttgtcatttg

SEQ ID NO: 822159 - DNA, 120 bp, Artificial Sequence
  ENSG00000286197_6 (sequence is synthesized)
tggctgcctgctatgtttgaacatttctctatacagtgtgaaagtttctaactttatatgtccttttcaaggacatattcagggcaaaaacacatctctggactcccttgtacctgggat

SEQ ID NO: 822160 - DNA, 120 bp, Artificial Sequence
  ENSG00000286197_7 (sequence is synthesized)
gcaggtgtgtggcttaggttctgccagttgggaccacccatataagacttgattcagaggataaaaatgtcgtcacatgtgggagtttgccctacttaagggagagtcagtcttctgggc

SEQ ID NO: 822161 - DNA, 120 bp, Artificial Sequence
  ENSG00000286197_8 (sequence is synthesized)
atggcgggggcaatggtgtccacttcatctggggcattggcagaagagtttctggcgtctagtcccaaggaggattgatgctgaatggtggtggtagtgacatttcactagagaatccaa

SEQ ID NO: 822162 - DNA, 120 bp, Artificial Sequence
  ENSG00000254361_0 (sequence is synthesized)
agatcccagcctgcatctgcctctgaagcctccttcctcactctctcctgctcacaatctttcctccagccacacagctgcaagcttcttaggctgctcctttagcccgaactagcccct

SEQ ID NO: 822163 - DNA, 120 bp, Artificial Sequence
  ENSG00000254361_1 (sequence is synthesized)
ccgtttacacaataatttctgtcctactcatgccttgctttgcccagttgtgcttgatgcttgaaaccctctgtaacaaccctgaacagtagaactttctactggatgatataaagtgtt

SEQ ID NO: 822164 - DNA, 120 bp, Artificial Sequence
  ENSG00000254361_2 (sequence is synthesized)
gacttctagaatccagaagtttaagccctagaccagcgtttttcaaagtgtggttcccagaccagcagcggcggtgtcacctggaacttatcacaaagacaagcttccgagccaacttca

SEQ ID NO: 822165 - DNA, 120 bp, Artificial Sequence
  ENSG00000254361_3 (sequence is synthesized)
gacctactcattggaagctcaaggtggggttatgatgggatcagatacctgagtgataacaagcttttcagatgagtttatgcaggcttgagcttgaggatcattgatctatactgtgtt

SEQ ID NO: 822166 - DNA, 120 bp, Artificial Sequence
  ENSG00000254361_4 (sequence is synthesized)
accttcccaaataacaagaacactcaaaagcctgtgtttaagtattgcacataccactgagttatgctgtgatctcatttgcctgtttggaaaatgaatttaataaactgtcccattgaa

SEQ ID NO: 822167 - DNA, 120 bp, Artificial Sequence
  ENSG00000254361_5 (sequence is synthesized)
gagttaagactttgggggactgttggaaagccattattgtgttttgaaaggttttgaatgacttcatcagtgacatctatcaattcaccacttttctctccaactgtgttttggaagtct

SEQ ID NO: 822168 - DNA, 120 bp, Artificial Sequence
  ENSG00000254361_6 (sequence is synthesized)
tttctctccaactgtgttttggaagtctactgctttcctctctatcgtgtattttatttcactggctttttccccttgaattatgttttcctatccttgcttttgtatttaatttttgcc

SEQ ID NO: 822169 - DNA, 120 bp, Artificial Sequence
  ENSG00000254361_7 (sequence is synthesized)
tgattttgtgtcctttttaaaaatggaagttataacctatatttttgaacacctcaaacatattttatctgactaaaatatatttgtaatcaaattactgactatgtcagcctgctttaa

SEQ ID NO: 822170 - DNA, 120 bp, Artificial Sequence
  ENSG00000254361_8 (sequence is synthesized)
acaatgtggaggtgggagtggccatgctgcgcacaggggctgactcagagcctagaggatgaagctggatcaggaatgtggtaaaacgctactcaaagggtgcttaggagccattgaaag

SEQ ID NO: 822171 - DNA, 120 bp, Artificial Sequence
  ENSG00000254361_9 (sequence is synthesized)
ttctgaaaggacgggagaatgagaatctgttcttaagagacgaccactctgagtaactcggctgaatgcatcctatccatttatcaataactctagttcgcttccttggaatggagaagt

SEQ ID NO: 822172 - DNA, 120 bp, Artificial Sequence
  ENSG00000254361_10 (sequence is synthesized)
gtcagcagtgttgattaaccaggatcacagacccattttaataacatgacaaaaagtgcagaccttttactcaccagaaaaatgtacccacaaccaaattttgaacataatgtattaagg

SEQ ID NO: 822173 - DNA, 120 bp, Artificial Sequence
  ENSG00000254361_11 (sequence is synthesized)
tttatgcatcctgtgaagtccatctatgaccaaagactggtgttaaaatctgtaaagtataatatacaataacggaagagtaagaaaaaaatagttttggaaaattagatcctgtgtgag

SEQ ID NO: 822174 - DNA, 120 bp, Artificial Sequence
  ENSG00000254361_12 (sequence is synthesized)
tcacaagatatgtataagtgacaaaatgtgtggggaagtgaagagatgcttgagaaacagtttggaatttgaaaccgaactccgctgcctattcaatgtattggcttaactaagacatct

SEQ ID NO: 822175 - DNA, 120 bp, Artificial Sequence
  ENSG00000254361_13 (sequence is synthesized)
taacactctgagccacatttggtgcagaaagaatgataatgtcatttgcagcataaagggaatgcctatagaaagcccagcacaaggtctgccagataggacttagtgcatttgtttaat

SEQ ID NO: 822176 - DNA, 120 bp, Artificial Sequence
  ENSG00000254361_14 (sequence is synthesized)
aaatcagcaattattttctgaatatattttatgtgcctagctatatgatagtcataaaaagaggcttgcaccaaataccagatgtggtaagcattgaatgtgtcattgaactgatctcag

SEQ ID NO: 822177 - DNA, 120 bp, Artificial Sequence
  ENSG00000254361_15 (sequence is synthesized)
ccaaacatatacatcattgttcttgctttaaaaatgcttgagaagatagaataaaagcatggcagtgcttaaagagacaatagtactttcctccatttatactggagtttcagagctgga

SEQ ID NO: 822178 - DNA, 120 bp, Artificial Sequence
  ENSG00000254361_16 (sequence is synthesized)
gctgggatgacaacaggggtatccaggccctctgtattctttccattccagtattttatgaagaagctaaaaattcaatgtgtttccattggatgagataaaaataaaagcctcagggaa

SEQ ID NO: 822179 - DNA, 120 bp, Artificial Sequence
  ENSG00000254361_17 (sequence is synthesized)
cacaactgcgatcctggaccaggagagattctgcaacatactgctgtaagagaagcctggagacaagagctgccatttccaaccaagccataaacctctcctcagaggtaaagagaaaat

SEQ ID NO: 822180 - DNA, 120 bp, Artificial Sequence
  ENSG00000254361_18 (sequence is synthesized)
agcaatgggacttatgagtagtccgctgtggagtccagatgcttgcttgtttttaaatcgatgttcccagctttgtcatgaaacattacctgtgttaacctttgcaacttttcaaaaaag

SEQ ID NO: 822181 - DNA, 120 bp, Artificial Sequence
  ENSG00000254361_19 (sequence is synthesized)
ttgtatgttattattggttaaagaaacaatgataactcttttacctactcacaaggccatagtggggagtaaatgagactcccagataaaatatgttttatggagtgactggcatataat

SEQ ID NO: 822182 - DNA, 120 bp, Artificial Sequence
  ENSG00000254361_20 (sequence is synthesized)
agggtctcaaaaatacattagtgtcatccctctcccaggtgctcctgtctccagctcctggtgtggcatcctccaatccacatccctggatggaacacatgctagatactctcagtccct

SEQ ID NO: 822183 - DNA, 120 bp, Artificial Sequence
  ENSG00000254361_21 (sequence is synthesized)
cataactggaaaacgaaccattgtcaatcaagtgggtgctcccctgtcctgcaggaatcttcatcaacatgcaaacccactatctccagaaacactttagcagtatgaattattgcaaag

SEQ ID NO: 822184 - DNA, 120 bp, Artificial Sequence
  ENSG00000254361_22 (sequence is synthesized)
tgccacagctggttacctgataacattgggtctgggaacagggcagattattcatgggaaagaaacagatgtgaaaagagagggagttcacatcttcctcaggaactggaggcatagaag

SEQ ID NO: 822185 - DNA, 120 bp, Artificial Sequence
  ENSG00000254361_23 (sequence is synthesized)
tctccttatgtactctaaggaaatgaatagagtctacccagctttgagctaaagatgttccttttgtgagaataaatgtgaaattagactatgttgtctacaatttaagatacataaaca

SEQ ID NO: 822186 - DNA, 120 bp, Artificial Sequence
  ENSG00000254362_0 (sequence is synthesized)
tctcttttcttctttttctaaaatgaatctgggagtttcctttagcccctgttttgtggtcgcctcccatacacgttttatctgtccgtggcattttcttttatttattgaaagcaccgt

SEQ ID NO: 822187 - DNA, 120 bp, Artificial Sequence
  ENSG00000254362_1 (sequence is synthesized)
gtcttagatcaagtcttgagaaacagaacctgagacaaacatgaatgtggttaattgaacgagcgctgtgcaggaaaagctgtactggagagaggcctggcctggtgttcagaacacaaa

SEQ ID NO: 822188 - DNA, 87 bp, Artificial Sequence
  ENSG00000254362_2 (sequence is synthesized)
gagattcttagcataccatagcagcttgtgcctgagacctcgacaaatatctgggggatagattggcttgcagagcacattctgcct

SEQ ID NO: 822189 - DNA, 120 bp, Artificial Sequence
  ENSG00000254362_3 (sequence is synthesized)
tatctgggggatagattggcttgcagagcacattctgcctatagaaatgagttagcaagtttagtcagccattgtagatttcaaagggtgagaagcctagccagaggttataatatagca

SEQ ID NO: 822190 - DNA, 120 bp, Artificial Sequence
  ENSG00000286193_0 (sequence is synthesized)
aggcgacgctgggaggctggggtaggcccagagcgaggacgggcccggactgggtagtggggatgtaccagggccgggtgcggcgggagacggcccgggaggcggaaggtcgcggacctg

SEQ ID NO: 822191 - DNA, 120 bp, Artificial Sequence
  ENSG00000286193_1 (sequence is synthesized)
cccgacagaagagtagatgaggggagaccgaggacgcccgggtccggggagcttacgaggaggccaggatcgcgggttcacgtgggcaccttggaacactgaagaaggcattttccgaac

SEQ ID NO: 822192 - DNA, 120 bp, Artificial Sequence
  ENSG00000286193_2 (sequence is synthesized)
tcactgtcctacggacttattctccgcactgttttcgcctccttcgccctgttctcgtgactgacaggagcaggggtcacaagcaggcagcccgagagctctgctcacctggaaaagcat

SEQ ID NO: 822193 - DNA, 120 bp, Artificial Sequence
  ENSG00000286193_3 (sequence is synthesized)
ttttgtgtagcttaaatgtgaaggcctcaggcagtggcctgttgtcctcctccacatgcgcccatcttcactctttcatgtgactggcctgtttttgaaggcaggaccctgtcacccttg

SEQ ID NO: 822194 - DNA, 120 bp, Artificial Sequence
  ENSG00000286193_4 (sequence is synthesized)
gctaggccaggtatgttctgcaccgaaaatggccctgccctctgcattggatggctagctcttaggttggtttattttagcaaataagcgttacagggtaggcgaactggctgcatcaga

SEQ ID NO: 822195 - DNA, 120 bp, Artificial Sequence
  ENSG00000286193_5 (sequence is synthesized)
accacaattacccctgtgtctctgggtgggataaatggcggatggcattctggcagctcagccccacttatctcagaggttatagatctgaggtggtttagatccacccccaaatcacga

SEQ ID NO: 822196 - DNA, 120 bp, Artificial Sequence
  ENSG00000286193_6 (sequence is synthesized)
acattttacataagccgtgctagagttagcataaaagtctcacagaaaaatttggaaactgagaaatcctaacctattcccacaatcctgtgttcccatttttaggtcttaagatatgaa

SEQ ID NO: 822197 - DNA, 120 bp, Artificial Sequence
  ENSG00000286193_7 (sequence is synthesized)
gacaatgggataactgaggctgattttgctgtgtggccattagacctagaaatattggtgtgattctggagttgattgctccacacgtttatttatttattttcctttttttccctcctc

SEQ ID NO: 822198 - DNA, 120 bp, Artificial Sequence
  ENSG00000286193_8 (sequence is synthesized)
ttcctcctcctctattctttaaaaacgtatggaaatgtatccggcaatgtttactgtaaaaaataatgtatggaaatgactacaatttgctaaaataaaaatcattgagcacttatgtgt

SEQ ID NO: 822199 - DNA, 120 bp, Artificial Sequence
  ENSG00000286193_9 (sequence is synthesized)
gtcagacactatgctaggtataaagaggggaagatggtgtccctattcaaaagagagtcacacacacttaagttacagtgcagtcataaataccatgatcgcagtatgcacaggtccatt

SEQ ID NO: 822200 - DNA, 120 bp, Artificial Sequence
  ENSG00000286193_10 (sequence is synthesized)
ttctctatctgggtgatgggaaggttcaaaactaagctaggttttgaatgaggaatagtttcattttgaagcacatccattttgcgatgcctctggagctatctagtgaacaatttagat

SEQ ID NO: 822201 - DNA, 120 bp, Artificial Sequence
  ENSG00000286193_11 (sequence is synthesized)
gcgtggttcagaagctcgatgggaggcttgggaacacagaatgtgtaaaataagcatcagtctccctttcaccctctctgcactttttaagggtcatctgtctttagtatatattggtaa

SEQ ID NO: 822202 - DNA, 120 bp, Artificial Sequence
  ENSG00000286193_12 (sequence is synthesized)
ccgggattacaggtgtgagccaccgtggcctgccagcataccaattcttatgagagaatgtcaggggtagaagagatccaaggaaatggttgaccaggtaaaaaactgataaaggtcaaa

SEQ ID NO: 822203 - DNA, 120 bp, Artificial Sequence
  ENSG00000286193_13 (sequence is synthesized)
tagaaataagcctgagaattgccccatcagatttggtttagtgtttagtaggtatagttatagtgccagatatataataactgagttccttttgaaagcatatagtaaaatcaaatctga

SEQ ID NO: 822204 - DNA, 120 bp, Artificial Sequence
  ENSG00000286193_14 (sequence is synthesized)
ttagcctaagtaacagaggtgatttattgtaatgattctggggtatctgacagattgtagatattctctctagggtgctcctatccaatataaatttctgtaatgatgaaaatgttctat

SEQ ID NO: 822205 - DNA, 120 bp, Artificial Sequence
  ENSG00000286193_15 (sequence is synthesized)
gtctgctgtgtcttaatatggtaaccattagccaaaagtgctactgagcatatgaaatgtagctagtgcaactgagaccctgtaaactaagattccagtcaaagagaagggaaaaaacag

SEQ ID NO: 822206 - DNA, 120 bp, Artificial Sequence
  ENSG00000286193_16 (sequence is synthesized)
tgagctttgcccacagtctttaagacctgtgcccagaaatagtacataatatttctgcttacattccactggaaataacttagtcacatgatcacacctaactgcaaggaagcctgggaa

SEQ ID NO: 822207 - DNA, 120 bp, Artificial Sequence
  ENSG00000286193_17 (sequence is synthesized)
atgtagattagcagtgtacccagaaagactgagaaaatggttttggtgaacaactagcagtggtcagaatacaaaaagtaataatacagatttcctgctttcaagaatatcacaggttta

SEQ ID NO: 822208 - DNA, 120 bp, Artificial Sequence
  ENSG00000286193_18 (sequence is synthesized)
gtgggagacagatgagtattttactagcaatgaataaagaacatgctatacaaacccaaagaaaacagtagatatagcctggatatttgttcctacctaaatctcatgttgaattgtaat

SEQ ID NO: 822209 - DNA, 120 bp, Artificial Sequence
  ENSG00000286193_19 (sequence is synthesized)
gtgggaggtgattggatcatgagggtgaatttcttgtgaatggtttagcacaattccttggtgctgtcctcatgatggtgagtgagttctcatgagatccggttgtttaaaagtgtgtgg

SEQ ID NO: 822210 - DNA, 120 bp, Artificial Sequence
  ENSG00000286193_20 (sequence is synthesized)
tgatggtgagtgagttctcatgagatccggttgtttaaaagtgtgtggcaccttgggaggctgaggcatgagaatcgtttgaatctgggaggcagaggctgcaatgagctgagatcatgc

SEQ ID NO: 822211 - DNA, 120 bp, Artificial Sequence
  ENSG00000286193_21 (sequence is synthesized)
aagcaagactctcttttaaaaaaaagtggcacctcccccctgcctgtgttcctgcttttgccatgtgacttacgcgctcccactttgccttccgtcgtgagtaaaagcttcctgaggccc

SEQ ID NO: 822212 - DNA, 120 bp, Artificial Sequence
  ENSG00000286193_22 (sequence is synthesized)
ccgccagaagcagatatcagtgctatgcttcctatacatcctgtagaaccatgagacacgtaaacttattttcctgtaaattacccagtctctggtatttctttataacaatgtaagaac

SEQ ID NO: 822213 - DNA, 120 bp, Artificial Sequence
  ENSG00000286198_0 (sequence is synthesized)
gctgtaatttgcaaacatatatccaggaacctactctcagccgaaaggacatgacttttccatgcttgccagtagccaggatggcgttgcactgagacagccacgcttttgatcagcctt

SEQ ID NO: 822214 - DNA, 120 bp, Artificial Sequence
  ENSG00000286198_1 (sequence is synthesized)
gtgacaattagcaacatagattagatgattgattggacatcaacagaataatctgtgattatgaaataaattctctttggaaagtaagaaagtctttcctaaattcaaatgatcattctt

SEQ ID NO: 822215 - DNA, 120 bp, Artificial Sequence
  ENSG00000286198_2 (sequence is synthesized)
attttagctccttcttttaaaagtctgagacaactgaacgaaactcagctttcaaaaagccaaggacgtctttgaaatttcattctacattcctggattactgatgctgcctctctatca

SEQ ID NO: 822216 - DNA, 120 bp, Artificial Sequence
  ENSG00000286198_3 (sequence is synthesized)
gagctctttatccttccttccctttttgcagacttcaaatcagcctcagttttcttcaattatccttttgcctctccttgcctagaagaaactccgaaaattttttgcatatttgatgga

SEQ ID NO: 822217 - DNA, 120 bp, Artificial Sequence
  ENSG00000286198_4 (sequence is synthesized)
taagatggaaaggacggtaggtgaggaaatacagcagctaagatgacaagccagctctccactgaccacacaggcacatctctagcaagggacaggaagacagaagaatgaatgcaacag

SEQ ID NO: 822218 - DNA, 120 bp, Artificial Sequence
  ENSG00000286198_5 (sequence is synthesized)
gaccgctaagaagtaaagacagtcttcagctatgcaagaatagcagctagaaatagacaaactgaagaagagtttatggaaggaggagctgttttgtccagagagcagcctggtagtttt

SEQ ID NO: 822219 - DNA, 120 bp, Artificial Sequence
  ENSG00000286198_6 (sequence is synthesized)
ccgttttcaaatgcttggctttcagggctctgatgtttccctgcacagttgtgtccaatcatgacagagacaagggaaacagccaaggctacaatatcagggtgcctcagctgatggaaa

SEQ ID NO: 822220 - DNA, 120 bp, Artificial Sequence
  ENSG00000286198_7 (sequence is synthesized)
tttctatctgcaatgaaaatcaacttcggaaaacgtcacagcaagggactttttttcctggctgccccaagattgatctggtccataggatgccccagatcattgcattcggtaatttca

SEQ ID NO: 822221 - DNA, 120 bp, Artificial Sequence
  ENSG00000286198_8 (sequence is synthesized)
ttctgcttatgatctatttcttatacgatcaatatgataaatgcgctggagagcaaagtgggttacggcccgacgccggtgaagtgaggaggagaaaggagcactgggctgccgcgctgt

SEQ ID NO: 822222 - DNA, 120 bp, Artificial Sequence
  ENSG00000286198_9 (sequence is synthesized)
gtgtttcatgaagcagaaaagcaattcagtcagactaaaggctacagacaaggaggcatattctcctgataaatgcaaatgatgtgactacatttcccccagcacaaatgggatggggag

SEQ ID NO: 822223 - DNA, 120 bp, Artificial Sequence
  ENSG00000286198_10 (sequence is synthesized)
gggcaagaggagaccagtcccgctgtctgtatcacagcattctcctaggaacccatagcacatctgcacacagcacattggaggtttgagagcaggatgcgggaggaaagaacgggagtt

SEQ ID NO: 822224 - DNA, 120 bp, Artificial Sequence
  ENSG00000286198_11 (sequence is synthesized)
tgcttaaataatcaggactaatggcaagctccctcttcctgactccactgtgactctgaacattgctgtttttaaagcacagtacaagagaatcaggcatccagtgagcggagaaccaca

SEQ ID NO: 822225 - DNA, 120 bp, Artificial Sequence
  ENSG00000286198_12 (sequence is synthesized)
attgtgattttgtgccagggccttctgttttcccacataagcccacatgtctagctatccttgggccagccatggaattctctgccttaaagctgcatcatctgtaaatgggggtcaatt

SEQ ID NO: 822226 - DNA, 120 bp, Artificial Sequence
  ENSG00000286198_13 (sequence is synthesized)
acatcgctgctgctgctgctgctgctgctgctggaaagtaatcttatgaggaaaaaatgcaataatgtaaataacttctaaaagtatataatgtgctgaaagtataaggtattagctttg

SEQ ID NO: 822227 - DNA, 120 bp, Artificial Sequence
  ENSG00000286198_14 (sequence is synthesized)
gtaggcaccatgaagctctaaaaggagaagaagaggtcactgcccttagatagtttagaaattaatagaaaacatgggtcagatgtttgaaaaggagaagcaagacaaatcaacacagag

SEQ ID NO: 822228 - DNA, 120 bp, Artificial Sequence
  ENSG00000286198_15 (sequence is synthesized)
ggaagggttctggactcggaggggtcagcgctgagttgtaaccagggatctacccctccctcaatgcatgagttgtacaagttctttccttaccctgggcctcagtttccccaaaggaac

SEQ ID NO: 822229 - DNA, 120 bp, Artificial Sequence
  ENSG00000286198_16 (sequence is synthesized)
ataaggcagttgggtaatctattaaggccacctctggctctggctttttgtgaagcttagataaattgagccctaatatggatgcaaatgttaaccagtgatctgagctccagaaggaga

SEQ ID NO: 822230 - DNA, 120 bp, Artificial Sequence
  ENSG00000286198_17 (sequence is synthesized)
tgaaatagagcaagattttagaagaggggaaggaaatattggcaggatattctaaatgtagaaatcaaccttgctaagtccccagtttggagtgagcaagtcccaatcaagcatgttcca

SEQ ID NO: 822231 - DNA, 120 bp, Artificial Sequence
  ENSG00000286198_18 (sequence is synthesized)
agaggaacctagggaaacatagaaaggcaaagggtgaggaggcagggaaggtgacttttgttcagagcccttgtccaagttgagagaagatggggaagaaggagtggatattgtcatcgg

SEQ ID NO: 822232 - DNA, 120 bp, Artificial Sequence
  ENSG00000286198_19 (sequence is synthesized)
gctgggtgagatcttcatatcacattcaggggagactgactgctgcccccacatcctcccatctgcatcaagcagaccgtagctttcagggccccttctccatggtgggggtggttggca

SEQ ID NO: 822233 - DNA, 120 bp, Artificial Sequence
  ENSG00000286198_20 (sequence is synthesized)
aggtactctgtcactgcacactgccgttgctcttgtccttccaggaaattaaatttgaagttgctcagctctgccagtgcttgatcccttccagacactttccactcccgctgcagaaag

SEQ ID NO: 822234 - DNA, 120 bp, Artificial Sequence
  ENSG00000286198_21 (sequence is synthesized)
cttgaggatggctgggaaaggtgggagaggagggaatgccatgggtgggactgtcatggagagatggatcccagcaactctgcattggtgattctttgcacggaagcctagtatgtggac

SEQ ID NO: 822235 - DNA, 120 bp, Artificial Sequence
  ENSG00000286198_22 (sequence is synthesized)
ctctagtctgtggagaagggcagacagaaggccccttctattttctcatcgagatggcagaggctgtgatgagactgtcattgggaatattgattacatggctactgctccaaggacagg

SEQ ID NO: 822236 - DNA, 120 bp, Artificial Sequence
  ENSG00000286198_23 (sequence is synthesized)
gctgggaactctgatacaactgacagccaagccattcatggctcaggtggaagtggtcaggagaacagctcacctggacatttccaatttgcaaagggaccaaggaaattgtgttctggc

SEQ ID NO: 822237 - DNA, 120 bp, Artificial Sequence
  ENSG00000254369_0 (sequence is synthesized)
cacatctcaccgcagcccgggtcagatgggggctcccctcccgaggcccccttcccctgagcctctccctcctgaccccgaccctcgaacccaggcccagccccggcccacctcccgcgc

SEQ ID NO: 822238 - DNA, 120 bp, Artificial Sequence
  ENSG00000254369_1 (sequence is synthesized)
ctcccaagcggcgccacgtaccggcgctgacatggatcttcttcatccagggaattccacccacgcacctattccccctcccagcgcttcagacacctctctcatcgaaaaaccgggcga

SEQ ID NO: 822239 - DNA, 120 bp, Artificial Sequence
  ENSG00000254369_2 (sequence is synthesized)
tgggcagcccgagagaagaattgtcctctttcctggtgccagaggacgcaggaaattagccaggttgcgagttgcaaagctgctgccgcggcgccgggaacggagcgcgcccaatctcca

SEQ ID NO: 822240 - DNA, 120 bp, Artificial Sequence
  ENSG00000254369_3 (sequence is synthesized)
gcgggagccgccaggcctggcctggccggggcttcccttcgctcgccatctccggacaaagcacagccgagcccggctggaaggcagagctccgaagcaggcaggacggagcggagcaaa

SEQ ID NO: 822241 - DNA, 120 bp, Artificial Sequence
  ENSG00000254369_4 (sequence is synthesized)
cgaggcgccactgaggtccttatcagaatagaaacacgaggccccgtactcgtaggacgcccggttgcaggccaggaccgagttggactgttggtagaaacaagaattccacccacgcac

SEQ ID NO: 822242 - DNA, 120 bp, Artificial Sequence
  ENSG00000254369_5 (sequence is synthesized)
ggctctattctcgcaagggaaattataaaaaagttcatgttcacggttctcatccacatgaccgacagcggccaatggaagggccgaacaactcataaagttgtattgcaaagttgtaaa

SEQ ID NO: 822243 - DNA, 120 bp, Artificial Sequence
  ENSG00000254369_6 (sequence is synthesized)
aaaaccctattcatttggcacccaaatgtcatatagccggaactggggcttataaagtttactgttttataacttttaaaaggaaagacggcatcagtgtaagcagtcggtaaatgtgca

SEQ ID NO: 822244 - DNA, 120 bp, Artificial Sequence
  ENSG00000254369_7 (sequence is synthesized)
attatatttctagcttctataggcactaagatggaaaaacatatattacattggaatctttacatgttagccaaggctagtgcatatcatttctccaaccagatattctctctctctctc

SEQ ID NO: 822245 - DNA, 120 bp, Artificial Sequence
  ENSG00000254369_8 (sequence is synthesized)
tctctctagagagagagggctattccggcaagaataggcaccccagaccctccaaagggcctctcctgcgatggtgagaatggccaccccagggctctctctcctccctgccaaagccac

SEQ ID NO: 822246 - DNA, 120 bp, Artificial Sequence
  ENSG00000254369_9 (sequence is synthesized)
gcagaaagcgacttacctttcagtttctctccaaggggggcaggacggcgagctgggccccactgtctgcccttgccctgggctgcccattgaacagctccacctctgccagcctggagg

SEQ ID NO: 822247 - DNA, 120 bp, Artificial Sequence
  ENSG00000254369_10 (sequence is synthesized)
gtggtctgggagtatgtaggtgtgggaccttgaaggccacctcggtccagccagctcgctagcccagaccagagcccaaagcacacaggtgcggcctctgcccttcacagccctctcctg

SEQ ID NO: 822248 - DNA, 120 bp, Artificial Sequence
  ENSG00000254369_11 (sequence is synthesized)
gagccaaagccgtccttctttgccatagccaatcctcctcagagcagccaggcctacaggcctcaggactacaggtagtctctccgattgcagaatcccaaagccagagtgttccctgaa

SEQ ID NO: 822249 - DNA, 120 bp, Artificial Sequence
  ENSG00000254369_12 (sequence is synthesized)
ccagcgtgcgcccccagaacgccttgggacgcgcagtttggacagaagcagccatgacgtgccaggcggcctgtgcaaccagtctccatggtgctggagtgggggtgggggaggacccga

SEQ ID NO: 822250 - DNA, 120 bp, Artificial Sequence
  ENSG00000254369_13 (sequence is synthesized)
gtctataacggcgtccagctccggtcaggggtagccgaggcggggagatttcccggccatataggctctgggtgatcgccccccaggtccccttgcgtccccctctaccctgcttgctgg

SEQ ID NO: 822251 - DNA, 120 bp, Artificial Sequence
  ENSG00000254369_14 (sequence is synthesized)
gaaatctctgaggggccagtacagcagtcgcgccaggctgcaagaggcgggctgcagctggcgccggtcccggcgacggccacggcgtggcagcagcgagcgccagcacggtcgcaataa

SEQ ID NO: 822252 - DNA, 120 bp, Artificial Sequence
  ENSG00000254369_15 (sequence is synthesized)
gtcaggaaggcggcggacctaggatgcaaatgcgccgctttatccgccccgagcgcacgcagagcacgggctaacgtcctaaacatccacagccccttcctatttatcgaatccatacca

SEQ ID NO: 822253 - DNA, 120 bp, Artificial Sequence
  ENSG00000254369_16 (sequence is synthesized)
agatattgtctcaagttggggaaacaacaacccaaacaaaaaacaaacaaaaagaacctcggactcttttcttgtcgctgtccgaggagttctcggggcaaatctggtctgatgtgcact

SEQ ID NO: 822254 - DNA, 120 bp, Artificial Sequence
  ENSG00000254369_17 (sequence is synthesized)
taggccgagctacagttcgagccaccgcgctacgcaaagccaccgccagcagcacgctctgcgcttcctcccgggcagctccaccatcctctccccgctcgcggaaggtggggagtgcgg

SEQ ID NO: 822255 - DNA, 120 bp, Artificial Sequence
  ENSG00000254369_18 (sequence is synthesized)
tcgccagtccgttgcgccaaggtggattggggggtccccctatcgcccagactcggtttgcgtccttccttcaaccttagctgcgggaccctgccacgcgcgctaacagcattatgtcct

SEQ ID NO: 822256 - DNA, 120 bp, Artificial Sequence
  ENSG00000254369_19 (sequence is synthesized)
ttctcttttaagaagccaaagaaactttgctggttctttcatcctttctttctctctattcctctttctactctgtttcctccttctttctttcttttcctgcctcctttcccctctccc

SEQ ID NO: 822257 - DNA, 120 bp, Artificial Sequence
  ENSG00000254369_20 (sequence is synthesized)
tccactgtcttgggatatgtcttacccgcgcaggagttcatccgctgcatccaagggtaaaccgggctcgtgtacttccggtcggcgccttcgtcatggagtgctttgccctgcccgctg

SEQ ID NO: 822258 - DNA, 120 bp, Artificial Sequence
  ENSG00000254369_21 (sequence is synthesized)
cttaccaccgaggccgccccgacttggggcctcaggttttacagacccttttgggccaggttttactaaaagagccataagaagcgggcccagcccaggcaggagactggagacgaggtc

SEQ ID NO: 822259 - DNA, 120 bp, Artificial Sequence
  ENSG00000254369_22 (sequence is synthesized)
ttgcaggcggaactcaggatgctctgagctgcccgcacaacccctggaccttcacccctcgccccttccccgcatccagctgccccagcccctgcccaggctgcgtagcctagcgggggt

SEQ ID NO: 822260 - DNA, 120 bp, Artificial Sequence
  ENSG00000254369_23 (sequence is synthesized)
ctgcggtcctagcccctccccgcgccacctactgcagtgccggaccctggggccccctcgcctggtctgcaggcggggtggggaccttaaatcccatttcctagcctggggctgggttca

SEQ ID NO: 822261 - DNA, 120 bp, Artificial Sequence
  ENSG00000254369_24 (sequence is synthesized)
gggcgcatgcgaatccggaatcagctctgggtaatgcccctttccaagcccactgctcagccttagaggaaagtgtggatttgaaatttcctcatggaattgatggaggtttttaggtag

SEQ ID NO: 822262 - DNA, 120 bp, Artificial Sequence
  ENSG00000254369_25 (sequence is synthesized)
attcatagaatataacgtatctaccaaagattccgttttcaagggatctagaagatgttagtgcacacgcaaaaaccagacaaacgtctctacacggataaaggcacatatacaattatg

SEQ ID NO: 822263 - DNA, 120 bp, Artificial Sequence
  ENSG00000254369_26 (sequence is synthesized)
cacacagggaagggcatacactctattgtgggcacagaatgacatgcaattatggacacacaaaaacacatgcacccaattatggacaccaaaatatatacaattgtggaattaggtaaa

SEQ ID NO: 822264 - DNA, 120 bp, Artificial Sequence
  ENSG00000254369_27 (sequence is synthesized)
aacacacacacagaaatacatacacagaaaaataagcacatactcatacaaatacacacataaaaatacattaaaaagatacatgacaccaatacatgggtacccaacacttggaccatc

SEQ ID NO: 822265 - DNA, 120 bp, Artificial Sequence
  ENSG00000254369_28 (sequence is synthesized)
acaaggacagccaccccacttttgcttccccactgccccctgccctccagccatactcacctcccctttcccagtcccctctggataaggcagtccacatttttctttgtcaccacgcat

SEQ ID NO: 822266 - DNA, 120 bp, Artificial Sequence
  ENSG00000254369_29 (sequence is synthesized)
ctttattttcggttacataaaacacagctgggctgggaagtgtgccttccctgaaccccaggatggagctgagcagggtacaggacaacacaggagatgaagggcattgcggagggcatt

SEQ ID NO: 822267 - DNA, 120 bp, Artificial Sequence
  ENSG00000254369_30 (sequence is synthesized)
caacataccatgctacaaagtcaccccattaacacatcctttccaagtcaagacactgccttacaaatgaactccaagactatagaaatgataaaaaaaaatcttgttcaaatatacagt

SEQ ID NO: 822268 - DNA, 120 bp, Artificial Sequence
  ENSG00000254369_31 (sequence is synthesized)
atctgctattataggaaacatcagggcgtacatatttaacacagctgaacagtaagatacaggagccagaggaaaggacagcgaagctggaagcatctccacagtcctgctaagcagaag

SEQ ID NO: 822269 - DNA, 120 bp, Artificial Sequence
  ENSG00000254369_32 (sequence is synthesized)
ctaacccacagatctgcagccagctcaggaacattcccctccagaagtgggggttgatgggcctgagctgtgggtgccaagccagagaaggagggattgattctagggtgcaagcactta

SEQ ID NO: 822270 - DNA, 120 bp, Artificial Sequence
  ENSG00000254369_33 (sequence is synthesized)
ggatgctttttggaataaatatattatttttcgatttaaatagatgccaataccctgatcctggacctcagcacattctcagggcagcctcagggaccccaaaagctgcgggctgtaagc

SEQ ID NO: 822271 - DNA, 120 bp, Artificial Sequence
  ENSG00000254369_34 (sequence is synthesized)
agcaggggacttgcctgggagcagtcggcactaggtagcaggcaagccagccagcacaaaataggtagttttaggggagtaggtagtagtgagattcactttcttgcgggtctgggaggg

SEQ ID NO: 822272 - DNA, 120 bp, Artificial Sequence
  ENSG00000254369_35 (sequence is synthesized)
tggtgctgggtgtctgccagtgttgggatacatagggacttcctgggaatggaggccctctggggctggatacataggtagtttgggggtgcctcgagcagaggcctgtgctaggtagta

SEQ ID NO: 822273 - DNA, 120 bp, Artificial Sequence
  ENSG00000254369_36 (sequence is synthesized)
ttttggacgcgccagagcagggccggctggcctggggttgggggtgtcttttggggtcctcggaggcagagggaatccaaggcgacccagtctctgcggccgctcagtccacaaaagttg

SEQ ID NO: 822274 - DNA, 120 bp, Artificial Sequence
  ENSG00000254369_37 (sequence is synthesized)
ggagctggagtaggtgatgggggtgggtagagtgcaggttggggactgggttgcttttttgtttttgtttttgttttttacattttcttttatttttcccatttttgtaagtaaaaccag

SEQ ID NO: 822275 - DNA, 120 bp, Artificial Sequence
  ENSG00000254369_38 (sequence is synthesized)
tgagtctcttaaagacgcttttccgactgtccggtgcagagagggccccggatcggcccctcattcctcctcgtcttcctcttcttcatcatcgtcctcctcgtcggccttgtccgcggc

SEQ ID NO: 822276 - DNA, 120 bp, Artificial Sequence
  ENSG00000254369_39 (sequence is synthesized)
agcagtggcggcggcagagggcacggcgccctcgggagctgcggcggcagtcggaccttcgtccttatgctctttcttccacttcatgcggcggttctggaaccagatcttaatctggcg

SEQ ID NO: 822277 - DNA, 120 bp, Artificial Sequence
  ENSG00000254369_40 (sequence is synthesized)
ctcggtgaggcagagcgcgtgggcgatttcaatgcggcggcgccgcgtcaggtagcggttgaagtggaactccttctccagctccagcgtctggtagcgcgtgtaggtctggcggccccg

SEQ ID NO: 822278 - DNA, 120 bp, Artificial Sequence
  ENSG00000254369_41 (sequence is synthesized)
cttcctgtcaggtcctgagaacagacatgcagacacatgaacacaaggacagacaagtagacagggcactcgttaggctgctgtcccagagcccgcaccttcctcctggcctagtcccca

SEQ ID NO: 822279 - DNA, 120 bp, Artificial Sequence
  ENSG00000254369_42 (sequence is synthesized)
gcgagcatccccctctgccccaggccccgaactgagctaggggaggagggggagtgttagggaaagaccccaactgcagtgccagacgcgcaggcagctctgtaatgagcaaaggcacag

SEQ ID NO: 822280 - DNA, 120 bp, Artificial Sequence
  ENSG00000254369_43 (sequence is synthesized)
aatctcaactttacaaccgacctttccagccggctaagcttccacaatgtcctgcttcctctgacaaaggaaaactgtaaatatagagtgtgagcaagtgggaaacgctgcacttttgcc

SEQ ID NO: 822281 - DNA, 120 bp, Artificial Sequence
  ENSG00000254369_44 (sequence is synthesized)
attcaaagatgagcccggccattcccctgccttgctaggcaagtgggcgactcttcccagcagcctgagccctcatccccaggaccttcctagggcaccccgaccctctgtcctcattcc

SEQ ID NO: 822282 - DNA, 120 bp, Artificial Sequence
  ENSG00000254369_45 (sequence is synthesized)
ctcgcccccatcttgaaatggaccctggcacagggtcgggtgagaggccctggagggcttggctctcctagcttttgagaaagaaatgtcaggcagcaaggaaaatgaggagagagagaa

SEQ ID NO: 822283 - DNA, 120 bp, Artificial Sequence
  ENSG00000254369_46 (sequence is synthesized)
gaagaaagggagggagggtgacagaggagggagaaagagagacagaatagcgaacaaacttaatgttaaaattccaagacaaatggagttaaataaatttacgaggatcgaacccattaa

SEQ ID NO: 822284 - DNA, 120 bp, Artificial Sequence
  ENSG00000242902_0 (sequence is synthesized)
attcgttcaacaagcgctttggacctgacgctgttagacgccgagaccccagagaagagacgcagttactcatctcaagggcagggtctgggtctttatcgtactgcaggctccacccag

SEQ ID NO: 822285 - DNA, 120 bp, Artificial Sequence
  ENSG00000242902_1 (sequence is synthesized)
aatgggcaccgatgtgtgtagtgaccactaacaaaaatggctcagtgggaggagcgggggcaccacgggacaggcggtctggaaaattccctaaggtgatctctgccttggatgggccct

SEQ ID NO: 822286 - DNA, 120 bp, Artificial Sequence
  ENSG00000242902_2 (sequence is synthesized)
cactggctcctctgtggcctgcagcaggtgagagggaacagtcagtgactggggaaggcccaggagtttgacccatgctatgactgaagctggagagtgaggaaagaacaaggtagttaa

SEQ ID NO: 822287 - DNA, 120 bp, Artificial Sequence
  ENSG00000242902_3 (sequence is synthesized)
tcatgaaaccagcgtggcaggagaggtgcgtcagctgcaagagaaggagtgctgtgcccaagtggggttccatctgcccagcctaactcttgcctgctccccaagaggcccccagaccat

SEQ ID NO: 822288 - DNA, 120 bp, Artificial Sequence
  ENSG00000227388_0 (sequence is synthesized)
agggtctcactatgttgcccaggctgaatttgaactcccagtctcatcagatcctcctgccttagtcttccgagtagctgaaactacaggcacacaccacccctctcagctgaaaacacc

SEQ ID NO: 822289 - DNA, 120 bp, Artificial Sequence
  ENSG00000227388_1 (sequence is synthesized)
ggcacacaccacccctctcagctgaaaacaccccatttctaatgccaagctttactcttcacagaatatggatatggtggggaaagacaggaagccccattcctttaagacactttgatt

SEQ ID NO: 822290 - DNA, 120 bp, Artificial Sequence
  ENSG00000227388_2 (sequence is synthesized)
caccttcacaagtttccccagaccaatacttgatttatatatcctttttcttggtgctccaaaggtttttacaccctaaaataattcatcataataaaatttggcttggggtagggacat

SEQ ID NO: 822291 - DNA, 120 bp, Artificial Sequence
  ENSG00000227388_3 (sequence is synthesized)
gcctttctgttgtaaactgggagggttgttgtcagcacaactgttgtgagcacaggtcattctcaggcagaacagttttgggactgagtacataaggaagttcagggtctggagatggat

SEQ ID NO: 822292 - DNA, 120 bp, Artificial Sequence
  ENSG00000227388_4 (sequence is synthesized)
tcccttaaagccatctggacaaacatagtccttggaaagcctttttgtgctactactgtttgaaggctgctgcgcagaggttccctgaaggtgcctcaggggttctgtttgagaatgagg

SEQ ID NO: 822293 - DNA, 120 bp, Artificial Sequence
  ENSG00000227388_5 (sequence is synthesized)
tgaaggcgaggggtttctgggcccacccccactgtttcatctggagcagctgggcttttttttttttttttttctgttttacatgtacattttcatttgaaggaatggttttgctgctaa

SEQ ID NO: 822294 - DNA, 120 bp, Artificial Sequence
  ENSG00000227388_6 (sequence is synthesized)
aaataacagtgtgaaaaacatagcctccaagggggaccatttaaagattttaagcagtgatgtgacataattaggtttttgtttcaaaaggtcgctttgacacctgaacacatcgtggag

SEQ ID NO: 822295 - DNA, 120 bp, Artificial Sequence
  ENSG00000227388_7 (sequence is synthesized)
gctggactggagggaagtgagactggagagacccagagagaaggcagagcaagaactggctactctgggctccatcccagggtcagcatccactttagatggcgccggggttcacggctt

SEQ ID NO: 822296 - DNA, 120 bp, Artificial Sequence
  ENSG00000227388_8 (sequence is synthesized)
gccagtctccacctagctgcttctcccattcatatttcctgcctggcccatgaccacctttgcctttgcaacccctgcctttgactgtttttcgtcttgtatatccagtcggccaccaaa

SEQ ID NO: 822297 - DNA, 120 bp, Artificial Sequence
  ENSG00000227388_9 (sequence is synthesized)
ttctgttgtttcttccctcagattacctcagatttgttcctctctccattactatcccatcatcctagattagacacttcaggcttgggtttctccaggaacctcttcacggttcttctt

SEQ ID NO: 822298 - DNA, 120 bp, Artificial Sequence
  ENSG00000227388_10 (sequence is synthesized)
gctttcagtctgtctgcccaccaatcttacatcgccactgcttagcttctcttggttcttcatgacatattgcagtacagttttgtacatttttgtttcagatttctcctcttcttccca

SEQ ID NO: 822299 - DNA, 120 bp, Artificial Sequence
  ENSG00000227388_11 (sequence is synthesized)
gtctttggcttctgtagaaaattctaagcagagcagaagattaaaatagtgactagtgcatttccagtctctagaagcagtgataaccatgtttcctttgcctctttttatgccagatat

SEQ ID NO: 822300 - DNA, 120 bp, Artificial Sequence
  ENSG00000227388_12 (sequence is synthesized)
ttgtagagttagcaggacttaaaaggcaaggggacacctttccctcttgccacttgcctcttgccactttttcctcagtgaaagattttgtgaagaagtggaatttcaagttgagtgggt

SEQ ID NO: 822301 - DNA, 120 bp, Artificial Sequence
  ENSG00000227388_13 (sequence is synthesized)
aagattatttcagggaatattatatttgagacttcatgctatcggatgctcccaaagggtggtaaataactactggggttggtaataatgatgaagggtggtaataggaaaatagggaaa

SEQ ID NO: 822302 - DNA, 120 bp, Artificial Sequence
  ENSG00000227388_14 (sequence is synthesized)
agagggcagagaagaactggggccttcctgggcactcacagaggtgctggtccaggcccagatggagcagacaggtgaaatatggttcacgtggagcttgaatcatcaaggaaataaatg

SEQ ID NO: 822303 - DNA, 120 bp, Artificial Sequence
  ENSG00000227388_15 (sequence is synthesized)
tatgtggttgcttctcctgacaattcttaaatttctctcttaggaatctttggccatctatgaaacaatttccatgggaaaatgacttgtttggactgtattttcacaaagctgatattt

SEQ ID NO: 822304 - DNA, 120 bp, Artificial Sequence
  ENSG00000227388_16 (sequence is synthesized)
tgatatttctggcccttagaatatgatacctgtttgtctaaaaaacatatatctattcaggtaagttggaaactgagatctgatttgaaaacattttgggctgggcgtggtggctcacgc

SEQ ID NO: 822305 - DNA, 87 bp, Artificial Sequence
  ENSG00000227388_17 (sequence is synthesized)
gcaagagaatggtattatgagccactgcactgtagcctgggcgacagtgtaagactctgtcaaaaaaaaaaatttttttttttaaat

SEQ ID NO: 822306 - DNA, 120 bp, Artificial Sequence
  ENSG00000227388_18 (sequence is synthesized)
cctgggcgacagtgtaagactctgtcaaaaaaaaaaatttttttttttaaataataaattaaaaaaaataaaaaagaaaatattttgaacttacaaagatgtatatgaattcaaagtaaa

SEQ ID NO: 822307 - DNA, 120 bp, Artificial Sequence
  ENSG00000227388_19 (sequence is synthesized)
cttgaccctttaaacaatcacagcagcgcccaccgctgccccctttttttttgagatggagactcactctttcccccaggctggagtgcagaggtgcagtctcggctcactgcaacctcc

SEQ ID NO: 822308 - DNA, 73 bp, Artificial Sequence
  ENSG00000227388_20 (sequence is synthesized)
acagcagccctttgaggctgttgaatatctgtgagaagatgaactggatcttagatctacaaccatactgtgc

SEQ ID NO: 822309 - DNA, 120 bp, Artificial Sequence
  ENSG00000227388_21 (sequence is synthesized)
agaagatgaactggatcttagatctacaaccatactgtgcactgctgcgtggctgggagggaagtaggagttggaggggaactggaggtttgacctaatttcaggattctgtctctccct

SEQ ID NO: 822310 - DNA, 120 bp, Artificial Sequence
  ENSG00000227388_22 (sequence is synthesized)
tatggggctaaaataaagaatgcagaatttgagtaaagtctctatttgctttctatatactttgctacatttctttttctacattactttctccttttctattgagatgtgttgtgaagt

SEQ ID NO: 822311 - DNA, 120 bp, Artificial Sequence
  ENSG00000227388_23 (sequence is synthesized)
gtatctttcctgccttatttgatctacctttctatggctgttctctgccctctgttggcaggttctcttggacctgtccgtctgtgtgcaggggacaattgcatggagtcaaagcccatt

SEQ ID NO: 822312 - DNA, 120 bp, Artificial Sequence
  ENSG00000227388_24 (sequence is synthesized)
tctgctagtcaggtcagcagagaagatattttgttttctggaattctgtaggcctgggaggcatgatctggtgtagaacaaacctgaggatccagattcagctgcacaaatagataggac

SEQ ID NO: 822313 - DNA, 120 bp, Artificial Sequence
  ENSG00000227388_25 (sequence is synthesized)
aaaattccttttcactgcagtattgggagcctggaactagagttaccaacccctctgcgttaaagaaggagctgtcctgaggcttccatctctactgggcttgaggcaagaacattgtta

SEQ ID NO: 822314 - DNA, 120 bp, Artificial Sequence
  ENSG00000227388_26 (sequence is synthesized)
gggacggcctgctcttggcctctgtgccccagggattgcaaatgcatgttcctcaaaggtaagggctgtatcattcggctttctttgtattcacaggtacagcttgtgctaggcagccgg

SEQ ID NO: 822315 - DNA, 120 bp, Artificial Sequence
  ENSG00000227388_27 (sequence is synthesized)
ttatatgcatcaaggtgacaggtgacggcatggttatggattaactcaccaaggaaatgagtgtggaaagaagaatgcagaaatctgaggactagagcctggagatggggagcttcgagc

SEQ ID NO: 822316 - DNA, 120 bp, Artificial Sequence
  ENSG00000227388_28 (sequence is synthesized)
tcagaggaagaagaggatcttcatcacggggagacatcagctggatattgagatggaaggatgactatgagtatgagctattatagaaaccatggttccttaagccatggcttaagatga

SEQ ID NO: 822317 - DNA, 120 bp, Artificial Sequence
  ENSG00000227388_29 (sequence is synthesized)
ggagcagagtgttatggactctgaccatgatgttgtgaagaggtacaaaggagacatttgtcatggcacagatgaagactgatgggtggcaggttatgtttatacctgaccaagctcaat

SEQ ID NO: 822318 - DNA, 120 bp, Artificial Sequence
  ENSG00000227388_30 (sequence is synthesized)
gctcaacagataagttaaatttatccgtcacgaaatctatccctgaatccattgttccacctttccctgcagtctcagaggaatttctttttcttttaaagtgaatccctggctgggcac

SEQ ID NO: 822319 - DNA, 81 bp, Artificial Sequence
  ENSG00000242908_0 (sequence is synthesized)
acgcccatcccaacgtttcctgaggaataattttggtcgtgttcctgctactcagcttttcgtggttcctgctcattttca

SEQ ID NO: 822320 - DNA, 120 bp, Artificial Sequence
  ENSG00000242908_1 (sequence is synthesized)
tgctcattttcagagtctaacattccagcttttccggaaattctaagtctgcagtggggagaagtggtgaggtggtcacacacattctggtccatgtccctaccaagtttctactcttct

SEQ ID NO: 822321 - DNA, 120 bp, Artificial Sequence
  ENSG00000242908_2 (sequence is synthesized)
tcccacaaggctgcctctgacttgagggttcaagagaagaagaggaaagagatactttgatgtaaaagttttcaaagaaatgctttgggcagaagagactcatggaaactggacactata

SEQ ID NO: 822322 - DNA, 120 bp, Artificial Sequence
  ENSG00000242908_3 (sequence is synthesized)
tgctttgggcagaagagactcatggaaactggacactatatctggagccaggaataataggatccgagaaacagtaacaagtataaaacaaagtggtcttgaactcctggcctcaagtaa

SEQ ID NO: 822323 - DNA, 120 bp, Artificial Sequence
  ENSG00000282478_0 (sequence is synthesized)
gcctgggcgacagagtgagactccatatcaacaaaacaaaacaaaacaaaatttacctttgaatccgtctcaaaagtgaaggtccagcctagcagagtgccagacatcatgagtctttag

SEQ ID NO: 822324 - DNA, 120 bp, Artificial Sequence
  ENSG00000282478_1 (sequence is synthesized)
tccagcaaatgtgcatttggtgtttcacgctgagtactgtatgtgtattctgcatgtcccttccagcaaatacacatttggtgtttcatgaagaatttcgtctctgggaagtcctgactc

SEQ ID NO: 822325 - DNA, 120 bp, Artificial Sequence
  ENSG00000275963_0 (sequence is synthesized)
cttcttctgagccctccacactcttccaacatctgcctgttacccagtttcaaagctgcttccacattttcaggtatctttatagaaataccccacttctggtaccaattttctgtatta

SEQ ID NO: 822326 - DNA, 120 bp, Artificial Sequence
  ENSG00000275963_1 (sequence is synthesized)
gtctgttctcacattcctataaataaatacctgagactggataatatataaagaaaagaggttcaattggctcatggttccataggctgtatggaaagcatggcagcatctgcttttggg

SEQ ID NO: 822327 - DNA, 120 bp, Artificial Sequence
  ENSG00000275963_2 (sequence is synthesized)
ggggtggggaagatgttacacactttttaaatcaaccagatcttgtgagaactcacactatacagtaccaaaggggggatggtgcaactctgccctcatgatccagtcacctcccaccag

SEQ ID NO: 822328 - DNA, 120 bp, Artificial Sequence
  ENSG00000275963_3 (sequence is synthesized)
gagatttggtggggacacagatccaaatcatatcaggagccaaagcaaagatgaaagctggcaatgcctgttttcttgttggagtaacctcacctttttgccactccagacaaaaaaaga

SEQ ID NO: 822329 - DNA, 120 bp, Artificial Sequence
  ENSG00000275963_4 (sequence is synthesized)
taacctcacctttttgccactccagacaaaaaaagaaaaacccatgtgcccatgagccttttgaaccaggcagagtaagaaatctacctagcaataaccaataaaatgtctttaaagctg

SEQ ID NO: 822330 - DNA, 120 bp, Artificial Sequence
  ENSG00000226387_0 (sequence is synthesized)
gagacaagccctatcagcacatcccagaaaatgggaaaccgaatcacccaggggatggcaaggaatgaccagagggaaagttccagttctgtccaacatgcactaccagccccattttgg

SEQ ID NO: 822331 - DNA, 120 bp, Artificial Sequence
  ENSG00000226387_1 (sequence is synthesized)
aaaagaacagatttaatagacctcaccaagacaagaattgtttttcgtcaaaggaaatcaaaggaacaaacaagaggcagtgaccaccagagacttcaccttttggtgtaggaaaaccca

SEQ ID NO: 822332 - DNA, 120 bp, Artificial Sequence
  ENSG00000226387_2 (sequence is synthesized)
agcagacagtgtctacatccatcaaagcccaatgtattaaatatttattgaataagaacccacggactcttccttaccagagccttagattgccatgtgcgtctgattgctccaaagaca

SEQ ID NO: 822333 - DNA, 120 bp, Artificial Sequence
  ENSG00000226387_3 (sequence is synthesized)
agactattgtgattttggccccatatgcattttagagtaacaagtcttaccagaaaaataatagccagccccagcttaattcctagagaaactcaaaccaccttgttaagaacaatccca

SEQ ID NO: 822334 - DNA, 120 bp, Artificial Sequence
  ENSG00000226387_4 (sequence is synthesized)
gaggagagtttatactaaggagcactacacaatgctgtttgccatctctgggccctctaaaagcaagcccaaccttggaaaaggaatgtctgccaccagggaaacgtggctgcactgctg

SEQ ID NO: 822335 - DNA, 120 bp, Artificial Sequence
  ENSG00000226387_5 (sequence is synthesized)
atcattgtcacaggccatgttttttctctgactatctcttggaatttcagagtgactaagtgattactacaattagagcaagaggcggtgtcttccagaagtcggtgtgggcagcaccaa

SEQ ID NO: 822336 - DNA, 120 bp, Artificial Sequence
  ENSG00000226387_6 (sequence is synthesized)
accatccaccatgcatcagagaaaagccagacagctggaaggctctattcccaggccactctccagtcctcaaacatgtcaccatctctcatgcctccttactgggcccatgctgtctcc

SEQ ID NO: 822337 - DNA, 120 bp, Artificial Sequence
  ENSG00000226387_7 (sequence is synthesized)
ttgaccaggaatgtcctccaccccgatcccatccccatagcccccttcactgtaagatctgggcccagcaaattgcccagctcctcttctctgaatgcttctttaatgtctctgagaagg

SEQ ID NO: 822338 - DNA, 120 bp, Artificial Sequence
  ENSG00000226387_8 (sequence is synthesized)
agttccttcctcctttactgtccatctcttccaccacatgaggggtttgggggaggtctttgaagacaagggacccttcctcattcatatttgaatactgagcccaagcacacgccccta

SEQ ID NO: 822339 - DNA, 120 bp, Artificial Sequence
  ENSG00000226387_9 (sequence is synthesized)
gcatctgcaatacacacatgtcaaggtgaatggggagatagatgccaagatccttgagcgctgcaaatcttcactgccaacttcaactactccaaaataaagtcaaaattttaaaagtaa

SEQ ID NO: 822340 - DNA, 120 bp, Artificial Sequence
  ENSG00000226386_0 (sequence is synthesized)
ggcgctcccggggaaagcagtttgtgctcagtgcgttctgcagcataaggaatcctaacgcgaatccgtgaacagtctattccgacggcgcagagaaatctcacgcggggatccccacga

SEQ ID NO: 822341 - DNA, 120 bp, Artificial Sequence
  ENSG00000226386_1 (sequence is synthesized)
catgcgggcttgagacgttctaaaggaacgtggaccgagttagggaacgtaactgaagctcattttgtcttagttatggactatgagtccttaataaatgtatgtcattatgtttaaaga

SEQ ID NO: 822342 - DNA, 120 bp, Artificial Sequence
  ENSG00000226383_0 (sequence is synthesized)
gggtgggagtgacccgattttccaggttgatttttgagtagtgaaccagctttgcattcctgggcaatgcttccacacaggacatagttcagaaggcattagaaggcatagagtaaaaag

SEQ ID NO: 822343 - DNA, 120 bp, Artificial Sequence
  ENSG00000226383_1 (sequence is synthesized)
acttcaaaaaatcggggaagattttcatcataaggtccaagcaaaggcatgagtataagatgtgtattcctgagcctgagtctactgacaaatataccacatccccagagtaagttggag

SEQ ID NO: 822344 - DNA, 120 bp, Artificial Sequence
  ENSG00000226383_2 (sequence is synthesized)
tctcttaaaattgtcttgctggcatctagcggagattgtccccacaagcatgttccttatgacggatgcctgggtcagaacacataatacattcctttttataagcacaaagattctgag

SEQ ID NO: 822345 - DNA, 120 bp, Artificial Sequence
  ENSG00000226383_3 (sequence is synthesized)
aagcactgcccctcccacgtgtcacactctggggagagattattggaatgcctcttggatcaggtatctttggtgatcattccacctagttaagatgaagctggtgatagcctttggctt

SEQ ID NO: 822346 - DNA, 120 bp, Artificial Sequence
  ENSG00000226383_4 (sequence is synthesized)
aacaggctaaaaactagttttcagtttctggagaagggttcccaatctcatttgaggctattggaggaaaaatcccttcagaaaataaagcatgacagtaagattttagtatgcaggaag

SEQ ID NO: 822347 - DNA, 120 bp, Artificial Sequence
  ENSG00000226383_5 (sequence is synthesized)
gaaattgagtgtagggttataggtgataagatgaggagaggcactcccctcaggagttaagatgcaggaaatttggtttgcactttagccagtacaaggcatttcaccaggatggagaat

SEQ ID NO: 822348 - DNA, 120 bp, Artificial Sequence
  ENSG00000226383_6 (sequence is synthesized)
atgtgctctcttgcacagaaatccgtgccagcagtaagtgatgtggaaggatttagtgaaattttgccaataaccccaggcttactgcttaatgaacagaacattctcctgggacttgaa

SEQ ID NO: 822349 - DNA, 120 bp, Artificial Sequence
  ENSG00000226383_7 (sequence is synthesized)
gaggtcctatgaaataagggacataaatgatgtactttcttttctgttaggcttaagaaattctgttctgagtgcaaatagagggaatgatttccgactttcctattagatagcagatat

SEQ ID NO: 822350 - DNA, 120 bp, Artificial Sequence
  ENSG00000226383_8 (sequence is synthesized)
ctttgcatcttggatacatttagaaagaatagaaatgtgaatgattgaaacctagtcagtcaattgatttattagaattcctggaagaagtctgagtaaacacaatctcattctctttct

SEQ ID NO: 822351 - DNA, 120 bp, Artificial Sequence
  ENSG00000226383_9 (sequence is synthesized)
ttttctctctgtcagttcttcttcttgggttcctatactatgggatataaatgaaacagtgcaatgtaaaactagtataatgatggtcgagagtaggtccccaataaatcttggttatta

SEQ ID NO: 822352 - DNA, 120 bp, Artificial Sequence
  ENSG00000226383_10 (sequence is synthesized)
ctgttattggagagaatgatgaaatttaaagctagtgggggaaaaagaatcgtacaaactggaaatgaattggaatgagtgttgcttcaggttgccctcaatttggtatcagtaccctca

SEQ ID NO: 822353 - DNA, 120 bp, Artificial Sequence
  ENSG00000226383_11 (sequence is synthesized)
gtaaatcagagttgctgtgacctgggctttgatgtaagggtagcagaatgatttagaaaaaacagcattagattaaaagccagagacatattatagtcctagttctttcgcttactagag

SEQ ID NO: 822354 - DNA, 120 bp, Artificial Sequence
  ENSG00000226383_12 (sequence is synthesized)
atttgaccttgaaaagcttaatttgtttaaatcccgtttcctcatctgaaaaatgaagactgatgatatctgtcctaactccatcttgtgatgatccaatggaataaagtgctgtcaaaa

SEQ ID NO: 822355 - DNA, 120 bp, Artificial Sequence
  ENSG00000226383_13 (sequence is synthesized)
tcaacaaactctgtaataacagaaataagtgaatactactgttatctctgtcttacaggttgatttttgagtagtgaaccagctttgcattcctggggatggaagaagatacttggaaaa

SEQ ID NO: 822356 - DNA, 120 bp, Artificial Sequence
  ENSG00000226383_14 (sequence is synthesized)
atcagggaagagtgaagaagatacttcaaaaaatcggggaagattttcatcataaggtccaagcaaaggcatgagtataagatattcctgagcctgagtctactgacaaatataccacat

SEQ ID NO: 822357 - DNA, 83 bp, Artificial Sequence
  ENSG00000226383_15 (sequence is synthesized)
cctcacacttcagcctcctgagcaactgaaactacagtgaataagaatggtcttcttacataatgcagggatggaagaagata

SEQ ID NO: 822358 - DNA, 120 bp, Artificial Sequence
  ENSG00000226383_16 (sequence is synthesized)
ttgtggcacccaacccaggaactgactcagcgcaagaggacagcttcaactccctatgattttatctccgacccaactgatcagcactcttgactcactggccttcccccatctgttgtg

SEQ ID NO: 822359 - DNA, 120 bp, Artificial Sequence
  ENSG00000226383_17 (sequence is synthesized)
ggacttttccttagttcacctaaaaatgcggtccttgtcacacagccatgaaaatttaggctcacagacgatttgaagagtgagaaaaaatgggatttcttggttgaaaaggaaaaaaaa

SEQ ID NO: 822360 - DNA, 120 bp, Artificial Sequence
  ENSG00000226380_0 (sequence is synthesized)
atcagaatttctcaagatcaaaacgaaaccttctctttaaaaaggaaagaaagtactatcgatacagaaagcaaaagtatttccagtctcctactgaactgtcacggcagacctctctgt

SEQ ID NO: 822361 - DNA, 120 bp, Artificial Sequence
  ENSG00000226380_1 (sequence is synthesized)
atctatatttagagctgtatgtccatatatttgcctgaatgtgtgagttcttggaagtatggattcattgccaggagctggtgatttcctaagcagaggtcgctaactacaagaaatgtt

SEQ ID NO: 822362 - DNA, 120 bp, Artificial Sequence
  ENSG00000226380_2 (sequence is synthesized)
aatatctgttaacagactgcttttacacctacgtaagtagaggcttctgcttataagtcaacctcaagggagttttattttgtccctggatgattcctcagtacatttttctttttcttt

SEQ ID NO: 822363 - DNA, 75 bp, Artificial Sequence
  ENSG00000226380_3 (sequence is synthesized)
tgtccctggatgattcctcagtacatttttctttttcttttttgaggtcaactcactgcggcctcaacctcccag

SEQ ID NO: 822364 - DNA, 120 bp, Artificial Sequence
  ENSG00000226380_4 (sequence is synthesized)
cagaaaaattaaatgatttgcccaggatcacatagttagtaagcagcccagccagatcctgtgttaacttgttcatccgcttcctataagaaaacatccattcaaggcacatggggcaac

SEQ ID NO: 822365 - DNA, 120 bp, Artificial Sequence
  ENSG00000226380_5 (sequence is synthesized)
aaagaaggacttagagctgtgtggcccctcgtcagggcagtaccagttgcacccatagtccggcctgaatactcagcttaggactattgtgtccaatgtcccaaacattttgaagctaca

SEQ ID NO: 822366 - DNA, 120 bp, Artificial Sequence
  ENSG00000226380_6 (sequence is synthesized)
tcttaaagaagtgtcctgctcagatgcagttctccttgtgaaatccgcaggccccaaggaaagtgactttaatccagtttgctcatgcaagaacagactggcatttcacatccaggaaaa

SEQ ID NO: 822367 - DNA, 120 bp, Artificial Sequence
  ENSG00000226380_7 (sequence is synthesized)
tacctatttggtgctacttctactcctcatgaccaaagctggctttcatggtttactcatgtacttactgatgaaaccctgagacttggggccagtgactgttcagaggtccatgtgaag

SEQ ID NO: 822368 - DNA, 120 bp, Artificial Sequence
  ENSG00000226380_8 (sequence is synthesized)
atgcgctgaatggtataaaggacagagcagtaaagagtgctggctgaatgcctgggctggcaatcaggcatgttggagtttgagtcccagtctgccactccagctctgtgaccaagagga

SEQ ID NO: 822369 - DNA, 120 bp, Artificial Sequence
  ENSG00000226380_9 (sequence is synthesized)
agtgaagtcatgtaccctttctaagtctctagcccctcttctgaaagacgaagatgccaccaccaaccatgttagtggttgtgaatgccaagaaagtccatgtgaagcacatagcatagt

SEQ ID NO: 822370 - DNA, 120 bp, Artificial Sequence
  ENSG00000226380_10 (sequence is synthesized)
gtctgccatgcgttaagtgttccaaaaatggaagctatgactatttcacagagtacacttcccatcacttttcagttcattttggccttctccctcaaaagcactccagtgttctgatcc

SEQ ID NO: 822371 - DNA, 120 bp, Artificial Sequence
  ENSG00000226380_11 (sequence is synthesized)
agctgataaaacaccaaacattcacatagtgctttaaaagtgacccactgtttttacagactgcattacatatgaccctaacaaccactgcaatatagaaattcgcatctccattctcca

SEQ ID NO: 822372 - DNA, 120 bp, Artificial Sequence
  ENSG00000226380_12 (sequence is synthesized)
gaaaaaagttacaaagaaaggcagcttgctgagaaacagcggaagcatgacggtacagactgggttttgaaatggagacacattctcatggcttgtgggctgagagacactgagaaagga

SEQ ID NO: 822373 - DNA, 120 bp, Artificial Sequence
  ENSG00000226380_13 (sequence is synthesized)
ttttgttcttgaaagatgattgttttaatgctggagatggagagttttgacaattttaagtgcatgttctgtgtgtaagaaagagtcattacgttttttttttctttcagatgttgccat

SEQ ID NO: 822374 - DNA, 120 bp, Artificial Sequence
  ENSG00000226380_14 (sequence is synthesized)
gccttaaaattgctgatgattaaaatagaacatcctgagttacagaaattcagccctagtgtatcctggcctaaaaatacagaacaatcaagttgattgttggaaatgagaggctaggca

SEQ ID NO: 822375 - DNA, 120 bp, Artificial Sequence
  ENSG00000226380_15 (sequence is synthesized)
gggttggaaacatgctaatgtttactgagtgaaatctttccttctcagtagagttgcccttgcagctgaaagtcactgaaagactcaacaaaataagcagatcccacttgtctcactctg

SEQ ID NO: 822376 - DNA, 120 bp, Artificial Sequence
  ENSG00000226380_16 (sequence is synthesized)
ttctcctatgcatgccctggaaagagaatgaatgagccctttttaatttatcaactggttttcttccatctctttactagtgagccatgggggttttttgccgttaactgggtagccagt

SEQ ID NO: 822377 - DNA, 120 bp, Artificial Sequence
  ENSG00000226380_17 (sequence is synthesized)
ctcttcatggagacttattttcaggaaactagcctcttgctttatgtgaaaacaaggacccaactcaagatgtcttatcacagtgtgttctgttgcgtaacagttgcatctgtagtccag

SEQ ID NO: 822378 - DNA, 120 bp, Artificial Sequence
  ENSG00000226380_18 (sequence is synthesized)
cctcaatactcaggttgggactgttttgtcctgatgtctcgaacatttcaaagctacgttcttaaagaaatgtcctgctcagatagagctctccttgtgaaatcctcaaaccccagggga

SEQ ID NO: 822379 - DNA, 120 bp, Artificial Sequence
  ENSG00000226380_19 (sequence is synthesized)
agtgaccttaagccagtttgctggcttttcatgtcacagaaaacaatcgactgccactactcagctgttgccacacaggagtacctggcgtggtcactacttgccaactcagtaccccac

SEQ ID NO: 822380 - DNA, 120 bp, Artificial Sequence
  ENSG00000226380_20 (sequence is synthesized)
tttctccccaaggacataaaagcaatgtgggaagatataccaaatgaccttgtcacactgggctaatatgaagagcccacagatgcaaaataatgtatcatacctttattcttctgattt

SEQ ID NO: 822381 - DNA, 83 bp, Artificial Sequence
  ENSG00000226380_21 (sequence is synthesized)
gcaaaataatgtatcataccgagacagtctcactcttttgcccaggctggaatccagtggcgcgatcttggctcactgcaacc

SEQ ID NO: 822382 - DNA, 88 bp, Artificial Sequence
  ENSG00000226380_22 (sequence is synthesized)
aggcaattctcctgcctcagcctcccgcccagctaatttttgtattattaattagtagagagagggtttcaccttctgatacacctgc

SEQ ID NO: 822383 - DNA, 73 bp, Artificial Sequence
  ENSG00000226380_23 (sequence is synthesized)
cctcctgagtagctgggattgcaggcatcccatacccggctaatttttttgaaacagagggtgcaacctccgc

SEQ ID NO: 822384 - DNA, 90 bp, Artificial Sequence
  ENSG00000226380_24 (sequence is synthesized)
gcacgatctcagctcagtgcaacctccgcctactgggctcaagcaactctcctgcctcggcctcagcctcgtttggttttttttttttgt

SEQ ID NO: 822385 - DNA, 78 bp, Artificial Sequence
  ENSG00000226380_25 (sequence is synthesized)
ttagccttctgctgaatttttgagaagcatacataaagacaatgtaaaaaacttagcatatttgtttggccctgctaa

SEQ ID NO: 822386 - DNA, 120 bp, Artificial Sequence
  ENSG00000226380_26 (sequence is synthesized)
acaatgtaaaaaacttagcatatttgtttggccctgctaagggcatggttgaatatatagtgtgtgtgatgtatttggtgtatgagatatatatgatcttatcagacataagtaaaagaa

SEQ ID NO: 822387 - DNA, 120 bp, Artificial Sequence
  ENSG00000226380_27 (sequence is synthesized)
attcattcttcaggaaaaattttccccataactgaagtgtcaatcatttgaaaaaacttctaggcagtaggcaaacactgtgactagttatttatcaaaaataagcagactttagagttt

SEQ ID NO: 822388 - DNA, 120 bp, Artificial Sequence
  ENSG00000226380_28 (sequence is synthesized)
tgtaactgatgagaataatctggctgcttcttttgtacttcagtcactgatactgcgaattagagtagcatatacagaaggatgcagggggtccctaaaggaatcacagaattagtgaaa

SEQ ID NO: 822389 - DNA, 120 bp, Artificial Sequence
  ENSG00000226380_29 (sequence is synthesized)
ccattatttgagagttgcagtgattcttctgtcctggcacttttcccagttttggtgcttaaatttactatccacttgaaatgtgtcactgcctgtcacttcacaaagtatgtgcctttc

SEQ ID NO: 822390 - DNA, 120 bp, Artificial Sequence
  ENSG00000226380_30 (sequence is synthesized)
actgcagtcaacaagctgtttacatctttgatgaaatgattgccacgcatctccatagccctggtgttctattcccttattcacagagattttttttaaaaaccagcctagcagcaatag

SEQ ID NO: 822391 - DNA, 120 bp, Artificial Sequence
  ENSG00000226380_31 (sequence is synthesized)
gtatgtgctgtggatgcttctccatgatgataaaggatgagtttgtgctgggatctccttatgaaaagataactggccaagcccatgaggaacaagaatgttatgctaatcagacccaag

SEQ ID NO: 822392 - DNA, 120 bp, Artificial Sequence
  ENSG00000226380_32 (sequence is synthesized)
gtaaacagcctgcagtgcacctcctgactgattagcactgaacccacttggaatcatcaaccacaggcacgtggtaattggatgttcttctaatacacatagtgagattgtaaaatgagg

SEQ ID NO: 822393 - DNA, 120 bp, Artificial Sequence
  ENSG00000226380_33 (sequence is synthesized)
atgatatatgaggaaagtcagacggagaaactaaagttcagttcttaaatacaagccaagggaacagactaagtgaatggtacagccaggattggagcctggttttcacaaggtggtatg

SEQ ID NO: 822394 - DNA, 120 bp, Artificial Sequence
  ENSG00000226380_34 (sequence is synthesized)
tcatgataaaacaagccaaagaaaaggttgggtagtgttttgaggctaaaagagaccaaagagtcttagtgaatcaaccttgatgcgatctgggtttgaaaaacctataaaaaacctttt

SEQ ID NO: 822395 - DNA, 120 bp, Artificial Sequence
  ENSG00000226380_35 (sequence is synthesized)
gtttggagaaagtgggagaagttggatgtaggctggatatttgtgggtaccaaggaattgtttgttttcttaggtatggtaagattttgtggttatgtagaagagtgtcttcattttata

SEQ ID NO: 822396 - DNA, 120 bp, Artificial Sequence
  ENSG00000226380_36 (sequence is synthesized)
gaacgacctcaaagtagttaggagcagtgtatgtatgggtggttatcaatttactttcaaacaatgcagcaaaaaatatgtatctatattacatataattaaagcaaaacatgataaaaa

SEQ ID NO: 822397 - DNA, 120 bp, Artificial Sequence
  ENSG00000226380_37 (sequence is synthesized)
ggaatagttattgaatttagatagtatggatttaggaattcattgtattgtcattccaatttaatgtataaaattttttataacagtttataaaaacagtgcacacccctttaattaggt

SEQ ID NO: 822398 - DNA, 120 bp, Artificial Sequence
  ENSG00000226380_38 (sequence is synthesized)
ggcctgggtacatgaagtatctttttggatgcctagaacacaaaaagggacgacaacaggccacctaataagatgataccaagaactataccatgacggcgaaaaagaactgctgcaaaa

SEQ ID NO: 822399 - DNA, 120 bp, Artificial Sequence
  ENSG00000226380_39 (sequence is synthesized)
aataatttgccaaggagaactcagagtacaaagccttacctttggagtagagggaaggagagtcttaagtaaagctcacaaaaacccctaactcatagatgcagtctaaggaattcattc

SEQ ID NO: 822400 - DNA, 120 bp, Artificial Sequence
  ENSG00000226380_40 (sequence is synthesized)
cggaagcgacattagcatctcattagtgccattatgtgacttacttggcctctgagctagtctattttcttccctagaccccaaaatctcagtaatcctttggatccaagttatctccaa

SEQ ID NO: 822401 - DNA, 120 bp, Artificial Sequence
  ENSG00000226380_41 (sequence is synthesized)
gtgaaaataataggtttaggaaagcgtttttcttcaacttctatggagcacttgcttgctttgtcctatttgcatgtccgacggacggttctccagcaccactgctagtcgtcctccgcc

SEQ ID NO: 822402 - DNA, 120 bp, Artificial Sequence
  ENSG00000226380_42 (sequence is synthesized)
tgcctgggtacttgatcacaggatgcctctgacttctcctgcctttacccaagcaaaggattttccttgtcttcccacccaagagtgacggggctgacatgtgcccttgcctctaaatga

SEQ ID NO: 822403 - DNA, 120 bp, Artificial Sequence
  ENSG00000226380_43 (sequence is synthesized)
tgaagctgaacctttgtctgggcaacttaacttaagaataagggagtcccaggcatgctctcccatcaataacaaattcagtgacatcagtttatgaatatatgaaatttgccaaagctc

SEQ ID NO: 822404 - DNA, 120 bp, Artificial Sequence
  ENSG00000226380_44 (sequence is synthesized)
tgtttagaccactgagtaactcacagctaggtttcaacttttcctttctaggttgtcttgggtttattgtaagagagcattatgaagaaaaaaatagatcataaagcttcttcaggaagc

SEQ ID NO: 822405 - DNA, 120 bp, Artificial Sequence
  ENSG00000226380_45 (sequence is synthesized)
tggtttcatatggtggtttagatttaaatagtgattgtctagcaccatttgaaatcagtgttcttgggggagaccagctgcgctgcactaccaacagcaaaagaagtgaatgggacagct

SEQ ID NO: 822406 - DNA, 120 bp, Artificial Sequence
  ENSG00000226380_46 (sequence is synthesized)
ctgaagtatttgaaagcaacagcaggatggctgtgagaacctgcctcacatgtagctgaccccttcctcacccctgccaacagtggtggcatatatcacaaatggcagtcaggtctctgc

SEQ ID NO: 822407 - DNA, 120 bp, Artificial Sequence
  ENSG00000226380_47 (sequence is synthesized)
actggcggatccaactgtgatcgaaagttttccaaaaataagttgtgtctgtattgaacatgaacagactttcttcttgtcattattctctaacaatactgcataacaattatttgcata

SEQ ID NO: 822408 - DNA, 120 bp, Artificial Sequence
  ENSG00000226380_48 (sequence is synthesized)
catttgcattgcattaagtattctaagtaatctagagacgatttaaagtatacgggaggatgtgtgtaggttgtatgcaaatactacaccattttctatcagagacttgagcatctgtgg

SEQ ID NO: 822409 - DNA, 120 bp, Artificial Sequence
  ENSG00000226380_49 (sequence is synthesized)
attttggtatccaaggggctttctggaaccaatccctcaaggataccaagggatgaatgtaattgtacaggatatcgcattgttggaattttatacttctttgtggaataaacctatagc

SEQ ID NO: 822410 - DNA, 120 bp, Artificial Sequence
  ENSG00000226380_50 (sequence is synthesized)
acttaatagatagtacagactcattccattgtgcctgggttaaagagcccaatgtatgctggatttagtaagatttgggccctcccaaccctcacgaccttctgtgaccccttagaggat

SEQ ID NO: 822411 - DNA, 120 bp, Artificial Sequence
  ENSG00000251460_0 (sequence is synthesized)
gaagaaatagtggcgtatctatgccagggagtattattcagccacagacaggaatgaaagcactgatcctgctacaacatggatgaactctgaaaacgtgtgcagtgaaagatgccagac

SEQ ID NO: 822412 - DNA, 120 bp, Artificial Sequence
  ENSG00000251460_1 (sequence is synthesized)
gcaaagccacggggtagaggattccttcactatggaaaatccggagcaggcaaatccatggagacagaaagcagaggaggaggtcgaggctcagagaggcgaggggggcctacccaaggc

SEQ ID NO: 822413 - DNA, 120 bp, Artificial Sequence
  ENSG00000251460_2 (sequence is synthesized)
catgtcattgagagaatgaggagccaggatccaaagaaggcaggctggatgctacctcctgggaagactccatgggccatggggacaatcggggacatttgtggctgagcccctgcaggt

SEQ ID NO: 822414 - DNA, 120 bp, Artificial Sequence
  ENSG00000251460_3 (sequence is synthesized)
aattaactgcatcctcagctcaccggctccctgtcaacagccctcctcccacacccaacgcacagacacaggaaaaggaagggtcgcagagctcctagtgagctgggggcagagacggaa

SEQ ID NO: 822415 - DNA, 120 bp, Artificial Sequence
  ENSG00000251460_4 (sequence is synthesized)
gccttccacgctgtacacgccacggcctggcccatggcacagaggagcagcctggggtctgagaagtcacacagcagagttagagccaagtctgagccagtgccagctctgcaccctttc

SEQ ID NO: 822416 - DNA, 120 bp, Artificial Sequence
  ENSG00000251460_5 (sequence is synthesized)
cagtgatggcacagccgcgtggccaggggcagccggcaccctcactcacagttcgggccactcataaagtatgagagtcaacagccaaacccttacattttaaggacgctccatgttctg

SEQ ID NO: 822417 - DNA, 120 bp, Artificial Sequence
  ENSG00000251460_6 (sequence is synthesized)
gaacaatccacccatggtggaggggcagggctggagggcctgtgtcttcaggctctgaggaacaccacggggccgtcaagtggacggagcaaatgtgcctgccggtgctcaggcctgtcc

SEQ ID NO: 822418 - DNA, 120 bp, Artificial Sequence
  ENSG00000251461_0 (sequence is synthesized)
aaacccgaccccatggcgaagccaggcagccggcgaggggcagtctcccgctctggggtcctttagtaaatccagacccgacctccctgtggtcagggctgtgactgaggtggtcctgtg

SEQ ID NO: 822419 - DNA, 120 bp, Artificial Sequence
  ENSG00000251461_1 (sequence is synthesized)
ggctcagagaggtcaaggtgacactggccagcaaatgtcactacactgtgcagcctgttcctgcttgccaggaaaaaaacaagcgtcaaaggatggagactcctagaattcaaaacactc

SEQ ID NO: 822420 - DNA, 120 bp, Artificial Sequence
  ENSG00000251461_2 (sequence is synthesized)
atccagcttattttatgaagtttctggagatggggaggattcaggcatttaaaaaggtataggggaggagaggaaaggtggaaatggatggggtgcagaagttttacactaacatggagt

SEQ ID NO: 822421 - DNA, 120 bp, Artificial Sequence
  ENSG00000259678_0 (sequence is synthesized)
acttgctgagtaaaggggcctttgggccctgaataatcagcagtggtcgccaggtagtacatgtcgtgggccttgggtgaacctctgagacttactggcttcaggaaagaatggaaacgg

SEQ ID NO: 822422 - DNA, 120 bp, Artificial Sequence
  ENSG00000259678_1 (sequence is synthesized)
cctctcacagcagagaactggtcactgcgcactgctccacagctaagaaagttttccaggtggtctagcgctcctaacaaacaccttatgattatccttcattcaacagaggaggagact

SEQ ID NO: 822423 - DNA, 120 bp, Artificial Sequence
  ENSG00000259678_2 (sequence is synthesized)
gacaaggaatttggatcttggtgctcctgtatttgtgtatctgaaaaaaaggcatcatcttcttcatcactatgaatgctttcatcagaatcatatataacaccactatcagacaaagga

SEQ ID NO: 822424 - DNA, 120 bp, Artificial Sequence
  ENSG00000259678_3 (sequence is synthesized)
agaaatggctgcaataaaagataatgctacatctacaaaagtcaagatgacaaggctctaaatcaatatcatccgttggtatatcctggatttgaaacagctctgaatactgatcctctg

SEQ ID NO: 822425 - DNA, 120 bp, Artificial Sequence
  ENSG00000259670_0 (sequence is synthesized)
gtacaaacgtgatcattttattgttctttgctctaatatcattttataaaaattaataagaaataaaacaactgctgaaactaaaatgataggaagcatatgtctcaaacttaatactat

SEQ ID NO: 822426 - DNA, 120 bp, Artificial Sequence
  ENSG00000259670_1 (sequence is synthesized)
ggcctcaactgactagtcatggatcctactacattctttctgcatattgaaccaaccttctggggagacagtggacctaccagacacctaccggactgcaacaagtgggcacactgcttt

SEQ ID NO: 822427 - DNA, 120 bp, Artificial Sequence
  ENSG00000259670_2 (sequence is synthesized)
tgactctcctctagacttcttgtcaacttattaatgatctcagtcttttctaacttgattgcttcttgattcctttccagttgtttcacgtgatctttcagacgagagcaaatgtcttcc

SEQ ID NO: 822428 - DNA, 120 bp, Artificial Sequence
  ENSG00000259673_0 (sequence is synthesized)
aaaaaatacagcaggacctgcagctcatatattcaaaccatgcttgtgaaaataccaggacggtaaattagtgaattccaaagtcaggatttttgttggatctggcacagtcacaggaaa

SEQ ID NO: 822429 - DNA, 120 bp, Artificial Sequence
  ENSG00000259673_1 (sequence is synthesized)
tcaccgtcagaggagagtaaaactcattctgaaacggttccaaatgcccatgcctgctctgtggttttcagcaaagcggacctttccaaaagacctccaacagggacttcctggatgtga

SEQ ID NO: 822430 - DNA, 120 bp, Artificial Sequence
  ENSG00000259673_2 (sequence is synthesized)
gaacactaaccaattctcgttcctctcatcttttgctttattccttccttccatgctgttattgcgaaaaactggtagttaaattcaattgattcaaaatattcgggatccatatggccg

SEQ ID NO: 822431 - DNA, 120 bp, Artificial Sequence
  ENSG00000259673_3 (sequence is synthesized)
ccactgaggtctgaggcacggtggtaccagaggagatgaaggggctttcagcatgaagctggtcccctgtcgacagcacgctgattttcccgttgggctctatcagcatgtccactgtga

SEQ ID NO: 822432 - DNA, 120 bp, Artificial Sequence
  ENSG00000259673_4 (sequence is synthesized)
gtgttttccagagtggattctatgaacactgcgagagatatagctcttcttgtgcagaaaatcctatggactatagaaagtttagtgttcctggcccataaaggccagcagtgctccaaa

SEQ ID NO: 822433 - DNA, 120 bp, Artificial Sequence
  ENSG00000259673_5 (sequence is synthesized)
gaaggccactatattaaattccacgtggaaagggatcatgctgtattatatatctctgcattccagagctgggcacagtgaatggcacaaatttgacactcaaagtttgttgaataatct

SEQ ID NO: 822434 - DNA, 120 bp, Artificial Sequence
  ENSG00000259673_6 (sequence is synthesized)
gaactgtctcacaaactgccttcacaatttaattgccttcaaaattacaaaataaaatctccaagaattctttcaacactgaaattattaggttaagcgtaaagccttgtatgatatgtg

SEQ ID NO: 822435 - DNA, 89 bp, Artificial Sequence
  ENSG00000259673_7 (sequence is synthesized)
ccgggcgggcttcaccgcgtgggcgcggcagtcgccactcaccgaggttgacgaccttgagcgccgtgaagaagcggttctgccgggcc

SEQ ID NO: 822436 - DNA, 120 bp, Artificial Sequence
  ENSG00000259673_8 (sequence is synthesized)
tcccaaagtgctgggattacaggcgtctgtttctcctctccagctcaactctgcttctcttcttactaaggaaagagatcaaggggattcttgtgagcaaggttcttcctggtacctgat

SEQ ID NO: 822437 - DNA, 120 bp, Artificial Sequence
  ENSG00000259673_9 (sequence is synthesized)
aaggggattcttgtgagcaaggttcttcctggtacctgattgggcaactggatgaagaagagggaaaggaaaaagctgcctgagccccccaagacatcaggtgccctccttatggtgact

SEQ ID NO: 822438 - DNA, 120 bp, Artificial Sequence
  ENSG00000259673_10 (sequence is synthesized)
gcagagatcctgggaagagtcaaaggttattcaaatccagactggacccaaaggggttcacagagaggcaggagaccgcttggaaaagagacaagatcttgttgcccaggctggtctcaa

SEQ ID NO: 822439 - DNA, 120 bp, Artificial Sequence
  ENSG00000259673_11 (sequence is synthesized)
actcctgcgttcaaatgatactctcgccttggcctccaaaagtgttgggattgcagacctgagctactatgcctggctgaattctatttctattggattggttgtaaagaagtgcattgt

SEQ ID NO: 822440 - DNA, 120 bp, Artificial Sequence
  ENSG00000259673_12 (sequence is synthesized)
agcctgcaaaggagcagggccagtggggtggagagggcagaagtgctacagaggcccctgctctccactgccctgactgctactgtgctggatgccgtgtgaaccacagctgcatctgga

SEQ ID NO: 822441 - DNA, 120 bp, Artificial Sequence
  ENSG00000259673_13 (sequence is synthesized)
agcgcctcactgctgttttcaagcatttgcctctcctccagtccccagatggtgggagtaacatttaaacctccttttctctgccttgtacaatagaccttggcaccatttcaactgttt

SEQ ID NO: 822442 - DNA, 120 bp, Artificial Sequence
  ENSG00000259673_14 (sequence is synthesized)
actccggtaattaacagctctgataccacaacaattacaactcctacactctcaccacaataatgctatgaattagtgagagctaatggctggaaggtagagtgtttccagactgtggga

SEQ ID NO: 822443 - DNA, 120 bp, Artificial Sequence
  ENSG00000259673_15 (sequence is synthesized)
tctgtgcatttttagaataaaataaaaggtacaaacagcacgcttgcagtagacaatgattacctagtaattagtttacacaaagcttcctatttaatggcaaaacgctgtaattaacgt

SEQ ID NO: 822444 - DNA, 120 bp, Artificial Sequence
  ENSG00000259673_16 (sequence is synthesized)
gtgacagaaaatcaaagggtactttgtaagcatattaaaaattaacactgcaggcccatagctttatgtactgattagaagcatattaaatcaataggacacacaaaccaacagcttggg

SEQ ID NO: 822445 - DNA, 120 bp, Artificial Sequence
  ENSG00000259673_17 (sequence is synthesized)
tagctgattattataggtcctcagaaggggtaccctggctttcatttcacttggggaggcaattttccttctcctgtcatcttcctcaggcacagagaaacacctcaaactcaaccctgg

SEQ ID NO: 822446 - DNA, 120 bp, Artificial Sequence
  ENSG00000259673_18 (sequence is synthesized)
cagcttcatgaaaataaccactgaactggaagaaaacattctaagtcattctcagagatgaagacaaatatgtaaatgattaagactttccaatgattgtggtgacgtgctgctacacta

SEQ ID NO: 822447 - DNA, 120 bp, Artificial Sequence
  ENSG00000259673_19 (sequence is synthesized)
attagaaaatacaccaactggaaccagaaaataaagccactgggttgcaatcttccggtcagaataatctctactttgtcaagcctctttattcaactcatagaaagttcaaataaatgg

SEQ ID NO: 822448 - DNA, 120 bp, Artificial Sequence
  ENSG00000259673_20 (sequence is synthesized)
aactgttttatatttctaaatgataagaaagcaggctgctatgaagacttattctttccaaggcactgtctgggtaaagcataggctgggaacaactggatcaaccaacattctgtatct

SEQ ID NO: 822449 - DNA, 120 bp, Artificial Sequence
  ENSG00000259673_21 (sequence is synthesized)
tcaacagccacaaccccatataatgatggctgatggacatagacagcaatatcctggaagcctaccagagcctaaagaaccttctgaatcaccaaagaaagattaagttgtatgtacttg

SEQ ID NO: 822450 - DNA, 120 bp, Artificial Sequence
  ENSG00000259673_22 (sequence is synthesized)
ttcaatgttacctgtattttgttataatacaattttatggtaataataacaacaataataataggtagcatttcttaaagtcttattatgtgctaagcacactgctagccaattcataga

SEQ ID NO: 822451 - DNA, 120 bp, Artificial Sequence
  ENSG00000259673_23 (sequence is synthesized)
attatctcatttacttgtcaccacttccccatgagacaggtactaatctctctttacagatagagaaagggagacttggagagctgaagtaatttgcctatagttatcccccagggagca

SEQ ID NO: 822452 - DNA, 120 bp, Artificial Sequence
  ENSG00000259673_24 (sequence is synthesized)
tgggagtctaacctaggtgtccctggctatggaaccccaggaagccaaactacctcttagttaccctgaatgactagcctgttccaacactcattctgcttaaaaggcagtttactatgt

SEQ ID NO: 822453 - DNA, 120 bp, Artificial Sequence
  ENSG00000259673_25 (sequence is synthesized)
ccaggctggagagtggtggtgcagtcatgactcattgcagcctcaaactcctgggctcgagtgatcctctttcttcaggctcctaagtagctggaactacaggcacacacctaattttta

SEQ ID NO: 822454 - DNA, 87 bp, Artificial Sequence
  ENSG00000259673_26 (sequence is synthesized)
tggtcttgaactcctggcctcaagccaactaaatattacaggagtgatcgactgcactgggctaaaaacaagggttttaaatgctta

SEQ ID NO: 822455 - DNA, 120 bp, Artificial Sequence
  ENSG00000259673_27 (sequence is synthesized)
tcgactgcactgggctaaaaacaagggttttaaatgcttaccatatttttaatgctacatctgattgtgaaggtgggctactcaaagctttttgggaatttacaggctcactaaaatgat

SEQ ID NO: 822456 - DNA, 120 bp, Artificial Sequence
  ENSG00000259673_28 (sequence is synthesized)
cacgatagtgtattaaattgagaaaggcattgaaaatctgtcattcccatgaacaaccaaagggtgatgtctaaaattctctctcatcacccatgcacataaccaggtatatgaggcagt

SEQ ID NO: 822457 - DNA, 120 bp, Artificial Sequence
  ENSG00000259673_29 (sequence is synthesized)
tgggttgcaagagctgaatcctagaaactcctaggcagggctcctcctctccagctctgaggtgtgtgtattgatggccccctacacctcccagtttgctgccttgtgggaaaaggagac

SEQ ID NO: 822458 - DNA, 120 bp, Artificial Sequence
  ENSG00000259673_30 (sequence is synthesized)
cagctcttctgttatctaggaaagggaagaaatttgagagcagtggcctctgtgttccaggaatatttgcgtttcccacaaatctctggaaagcagaaagcttgccacaagggcagcaca

SEQ ID NO: 822459 - DNA, 120 bp, Artificial Sequence
  ENSG00000259673_31 (sequence is synthesized)
cggtatgagtcacaaaggcaaggacctgagggagaacacttcccaggactttcaaataaggtctttcctaaatgtacttggctcagtgtggcaaaagcactgggctagcagcagtcagat

SEQ ID NO: 822460 - DNA, 120 bp, Artificial Sequence
  ENSG00000259673_32 (sequence is synthesized)
gtgggttcaaagcaaggcacaatcatttattagctataaatttgggcaagtcacttcttgagaataagtttcttcatctgtaaacagaagtaataccttccttatatcttaaattggtgt

SEQ ID NO: 822461 - DNA, 120 bp, Artificial Sequence
  ENSG00000259673_33 (sequence is synthesized)
ggaagtaaatgagtaaaaacctcagggtttttctgagtttaaatgagacaattcatgtaacgtgcttagcacaatacctggtacccagtaggtactctgcagtatttattgatgatgatg

SEQ ID NO: 822462 - DNA, 120 bp, Artificial Sequence
  ENSG00000259673_34 (sequence is synthesized)
atgatgatgatgatgatgatgatgatgacaaagaaatacaaggaaatgtcaacaccttaacagtgcattcatagatctacaaaatgcttaatctcagtgttctggcaaccactaaataca

SEQ ID NO: 822463 - DNA, 120 bp, Artificial Sequence
  ENSG00000259673_35 (sequence is synthesized)
atctaagacatcaagatttcaacatataaaaataaatataaaaacaagtgaacaataatcatttatatgtagtttcatgactggaaaaaataataacctagattttttcttaacctagaa

SEQ ID NO: 822464 - DNA, 120 bp, Artificial Sequence
  ENSG00000259673_36 (sequence is synthesized)
acctagaaaatctagattaaaaaataaagatcttgcatttttgatataaaacacaaataataaggacatgaaaaaagaatatcccttgctagtaatcaaataatagcaatgagaagctgg

SEQ ID NO: 822465 - DNA, 120 bp, Artificial Sequence
  ENSG00000259673_37 (sequence is synthesized)
attcttatatctaaaataaaagtgcaaatagttcataatatccattggtggtaaggttgtggtaaaactagtattcttattctctgccagttgctttggaaattggtactatctttttag

SEQ ID NO: 822466 - DNA, 120 bp, Artificial Sequence
  ENSG00000259673_38 (sequence is synthesized)
gaatatggcaatatgtaacaaaagccataaaatattctactcctgggtctttctcctcgggaagtaactcaacagaagcaaaaagaggtgtatacaaaaaccaaatataaaaacaaacaa

SEQ ID NO: 822467 - DNA, 120 bp, Artificial Sequence
  ENSG00000259673_39 (sequence is synthesized)
atctttcctccctctttcctcccactgccaaaaaatgaaagctgggaatagcctaaatttccaacttagttgaattgttcaatatattagagttcatcaatatgagagaatattatgcat

SEQ ID NO: 822468 - DNA, 120 bp, Artificial Sequence
  ENSG00000259673_40 (sequence is synthesized)
ctaataattgtgacgactatgtataaacatggaaaatatttaagatctgatgtttaactagcatatacactattattgtagctatgagaaagaaatactgcatatttagaaattaatata

SEQ ID NO: 822469 - DNA, 120 bp, Artificial Sequence
  ENSG00000259673_41 (sequence is synthesized)
caaaaatgaaaacaactatgtttggggacagtgattatgtacttttaaattttttttaatcttgttatctttaaacttttctaaaaatgatgtgattacaagcaatggctctttgggatc

SEQ ID NO: 822470 - DNA, 120 bp, Artificial Sequence
  ENSG00000259673_42 (sequence is synthesized)
acctaataaatacctactaaattctagacgggacaacgagctctgccatcctgcaatggctcctgtgacctagttccagggccattctgaatggacagaggtcttcacaatggaggtgga

SEQ ID NO: 822471 - DNA, 120 bp, Artificial Sequence
  ENSG00000259673_43 (sequence is synthesized)
gatgcagggagctctatggcatgaaatggttaatgattctcttttgtaattgtgttttctgtttgctgccttagttctaaaaggaggcaaaacaactgtggtttattctaccttttccag

SEQ ID NO: 822472 - DNA, 120 bp, Artificial Sequence
  ENSG00000259673_44 (sequence is synthesized)
gcatagttcttctcctacctttgtgatccccaaattaatatcaaatgtctaattagtttttttctccattggtgatccccaaattaatatcaaatgtcagacaaagtaaatcaaagtaca

SEQ ID NO: 822473 - DNA, 120 bp, Artificial Sequence
  ENSG00000259673_45 (sequence is synthesized)
aataaaggtaaaactgctcttgcaaagggctaaaatagcaatgtttactagaagcattcaagagccagttcaatttcctatttctcattaagtggtaaaatagtaatgccaagaccacat

SEQ ID NO: 822474 - DNA, 120 bp, Artificial Sequence
  ENSG00000259673_46 (sequence is synthesized)
cccagaatctccagggtaacagaggcccaacgaagggctgcagagaaacttgaaagtaaactggcttagttctttacacacagaaattgttctacaaagatctcttgcaaagcagtgtca

SEQ ID NO: 822475 - DNA, 120 bp, Artificial Sequence
  ENSG00000259673_47 (sequence is synthesized)
ccagtagcatcactgccactaagccaatgtcccaggaattgaggaaaggaagacacccttaaagaaaaaaatggaaaaaagccacaaggactggtaccacagtaaatgtctgcctgggtc

SEQ ID NO: 822476 - DNA, 120 bp, Artificial Sequence
  ENSG00000259673_48 (sequence is synthesized)
tccctaaactgtcttaggtgagcttacccaggaatgtttctcccctacatgtttgccttcctttgtttaagcctttattcctcctaaatgaaaataaatacccccgactggggaacgtgg

SEQ ID NO: 822477 - DNA, 120 bp, Artificial Sequence
  ENSG00000259673_49 (sequence is synthesized)
atcaatttgggcctgaggaaaattcaggtggaagacaattaaataactaaccacctccgcaaggtgcagaactcaaacccaagtctccctcccacgccctgggctccagggaagcccttg

SEQ ID NO: 822478 - DNA, 120 bp, Artificial Sequence
  ENSG00000259673_50 (sequence is synthesized)
ggtgttgttgttgaaacaggacgaggcgtgaccccgggtctgcgttgtttggcgtgggttctcactatgttgcttaagctggtccagaactcaagccagtctctcacttcagcctcttga

SEQ ID NO: 822479 - DNA, 120 bp, Artificial Sequence
  ENSG00000259673_51 (sequence is synthesized)
gacattgtctgcaggtgggaatgcttcgatcacaccccctggtgggaaaaacatggagtaggtgaaaggacacatgcattttgtttgacttgggctcagattctgcatctgccatgtctt

SEQ ID NO: 822480 - DNA, 120 bp, Artificial Sequence
  ENSG00000259673_52 (sequence is synthesized)
gctcggtggctgaggggccgtcccggccgggcgggcttcaccgcgtgggcgcggcagtcgccactcaccgaggttgacgaccttgagcgccgtgaagaagcggttctgccgggccaggtc

SEQ ID NO: 822481 - DNA, 120 bp, Artificial Sequence
  ENSG00000259673_53 (sequence is synthesized)
gcgacccgcccctccctaggcccgaggacgcgcccgcagcaggcgaacggcttcgggtgccaggagctcagcaagctggggaccccctgggcgaggagtacaaaggaccccaggcgaagc

SEQ ID NO: 822482 - DNA, 120 bp, Artificial Sequence
  ENSG00000259673_54 (sequence is synthesized)
actttttttcctttttccatcacctgaagcttttatttggtaaaagccagatcaccatgctcctcaagaaacaagaggctacaatctaaaaaactattgatattggtaggaaatgttcaa

SEQ ID NO: 822483 - DNA, 120 bp, Artificial Sequence
  ENSG00000259673_55 (sequence is synthesized)
ctaaattctatgataattaatgaaccttatatctattcaatttcctgtgaaatataaagaacaatgtgtgtttttttttaacttttaagttcggggtacgtgtgcaggtttgctacacag

SEQ ID NO: 822484 - DNA, 84 bp, Artificial Sequence
  ENSG00000259673_56 (sequence is synthesized)
acttttaagttcggggtacgtgtgcaggtttgctacacaggtaaacttgtgccatgggggtttgttgtacacggagttattttt

SEQ ID NO: 822485 - DNA, 90 bp, Artificial Sequence
  ENSG00000259673_57 (sequence is synthesized)
attctctccctcctcccaccctccaccctttgataggcctcagtgcgtggtgttcccctctatgtgtccctgtaggaacatgcagtattt

SEQ ID NO: 822486 - DNA, 120 bp, Artificial Sequence
  ENSG00000259673_58 (sequence is synthesized)
gacctccagctacatccatgtccctgcaaatgcaggacatgatcttgttctgaaagaattttttaatttgggaattttcatatagagcatctttgccaatctatttgtttagagactttt

SEQ ID NO: 822487 - DNA, 120 bp, Artificial Sequence
  ENSG00000259673_59 (sequence is synthesized)
atatgaggaacaggaatgggagaattgctatataaatgtatatttacttgaggtgaatccaacatgatatttgtaagacttagatcatcatttttatccatatgtgttctgtgctttttc

SEQ ID NO: 822488 - DNA, 120 bp, Artificial Sequence
  ENSG00000259673_60 (sequence is synthesized)
ccaccactctttcccaccaagtgagcctgtttctcacttggaatacactctttcttaccctcctcatatcctaattttctttcggctcaaatcccaccttctctgcaaaacctttcttga

SEQ ID NO: 822489 - DNA, 120 bp, Artificial Sequence
  ENSG00000259673_61 (sequence is synthesized)
ttgctcccaacagaagggatctttctcttgtctgaatgcatgtagaaaaatcatttggccgttaaactgatattacctttttgatgtctcttttattgttctacgtagttgtcacttaag

SEQ ID NO: 822490 - DNA, 120 bp, Artificial Sequence
  ENSG00000259673_62 (sequence is synthesized)
cctttccttgctactcatttttcaagcctatcttcccaactagaatgtgaactccctaagggcaggcacttccatgtcttttgcatctttgtagcttctctagcacctagcattatggct

SEQ ID NO: 822491 - DNA, 120 bp, Artificial Sequence
  ENSG00000259673_63 (sequence is synthesized)
tatacataatagatgctcaataaacacttgttttttttagagtttccccaaagtgagtaattaactacaaaagatctggatcatctagaagttccaaaagtccataaatcaacaaataat

SEQ ID NO: 822492 - DNA, 120 bp, Artificial Sequence
  ENSG00000259673_64 (sequence is synthesized)
aatcaggtggctggccaaatatgaccatcattgtgttagacattatgaagaggtaaaaaaaattcaaggcctagtacattttctaaaggattaaaaaaatctcatggaggcaatatttat

SEQ ID NO: 822493 - DNA, 120 bp, Artificial Sequence
  ENSG00000259673_65 (sequence is synthesized)
acctatgaatcaatacaagtataaaacaattgtgtgcatgtatagcaaataaaatgggacgatggatatgaaataagctttgtcatgatacagaagatgtcttgtttatttccacagcac

SEQ ID NO: 822494 - DNA, 120 bp, Artificial Sequence
  ENSG00000259673_66 (sequence is synthesized)
ctaacaggaagccagagtaggtcctctgaaggtgtttgttcaatgaacttgtcatcctcctcaacttaaagcctttagcttttccaatttggaggcacaaataagtgagaacttggggat

SEQ ID NO: 822495 - DNA, 120 bp, Artificial Sequence
  ENSG00000259673_67 (sequence is synthesized)
ctatctatagtattcagcccagcgcttggtatattgtagggctcaatgaatggtaattttgattctgattataatttgaagacactgtgaggatcactgggtctatgcccacttattaaa

SEQ ID NO: 822496 - DNA, 120 bp, Artificial Sequence
  ENSG00000259673_68 (sequence is synthesized)
atagtccacagttgacatcttgattaccagtgtgctctttttggtaaacttcactgctttttgaaggtttgacaggtttgggctttttgtgggcagagagaacattgaccatcatgtcag

SEQ ID NO: 822497 - DNA, 120 bp, Artificial Sequence
  ENSG00000259673_69 (sequence is synthesized)
ccaaaggacttctatataaagccagttataaaacatttttaaaaatatagaaccaagagatattgccgtgtttgaagaacacatatgctctctctgctgataatgagagctttataattt

SEQ ID NO: 822498 - DNA, 120 bp, Artificial Sequence
  ENSG00000259673_70 (sequence is synthesized)
attacattttaccctttgctttgaatgccaaaaatcatagaggcaagtctggtgttcaagcacagcaataacatctttctggctaatttgtgggctatctcagtggtgtccacaaaaatt

SEQ ID NO: 822499 - DNA, 120 bp, Artificial Sequence
  ENSG00000259673_71 (sequence is synthesized)
acatagccccaatcttctgtttttaggcccaacttacaaatcttactgtatatgtcctctttgtagagaaaaactttaagatattatttgtaaagagttaaataatttaaaagtaaaaac

SEQ ID NO: 822500 - DNA, 120 bp, Artificial Sequence
  ENSG00000259673_72 (sequence is synthesized)
aacaaagtgttccatagatagggtgccgtctagaacctgacagcactaagagaaacttggcctgtatttcacaaatttgctgggggctgggagaagtgtgacctctgcctacaggtgtaa

SEQ ID NO: 822501 - DNA, 120 bp, Artificial Sequence
  ENSG00000259673_73 (sequence is synthesized)
gccacagactttgaatagcatacaaagaaaaaaatgagcagttttcaaatgcagtcatctgttacttcatctaaaaagcactttccttaaatgtctataaatttggtcagaggtagtcct

SEQ ID NO: 822502 - DNA, 120 bp, Artificial Sequence
  ENSG00000259673_74 (sequence is synthesized)
aacaaacaccaagtttcaaaaggaaaaccgattttggagtgtacatattcaaatcctaatttttctatttggtttgtttgagacatgcttttcttcaaatgaggcctactcgtgtgtgct

SEQ ID NO: 822503 - DNA, 120 bp, Artificial Sequence
  ENSG00000259673_75 (sequence is synthesized)
acacctaaataccagttgctggggatttagcaaggtaaatgcaacaaaacaacaatgacaaaaatctacagaagtaaaaaacctagtgagtctctatgctttggttaactttgtgccttt

SEQ ID NO: 822504 - DNA, 120 bp, Artificial Sequence
  ENSG00000259673_76 (sequence is synthesized)
agccgtcacctatgttttgaaagatagtgcttcagtggaaacacactatcattcataacttacaagattacttgggtattttatttcaaagtagcttacttgcactatcttctcagcatc

SEQ ID NO: 822505 - DNA, 120 bp, Artificial Sequence
  ENSG00000259673_77 (sequence is synthesized)
atgaccacaaccttttcactgttactttttttccactcaaagcaattaattcctcctctgaaaaaggtattgccacaaagttagaccctgtctctacaaaaaaattgtgaattgtaaaca

SEQ ID NO: 822506 - DNA, 120 bp, Artificial Sequence
  ENSG00000259673_78 (sequence is synthesized)
aacaataaattagctgggcgtgggggtgtgcgcctgtagtaccagctactcagaaggctgagatgggagtattgcttgagcctgggaggccaaggctgcagtgagctataattgtgccac

SEQ ID NO: 822507 - DNA, 120 bp, Artificial Sequence
  ENSG00000259673_79 (sequence is synthesized)
ctccagtctgggtgatagagcgagaccctatctcaaaaaataaaaattaaaatgaaaaagtattgcttctgatataatcctatgacaatttagaaatcaaaccctagcacattttgtggc

SEQ ID NO: 822508 - DNA, 120 bp, Artificial Sequence
  ENSG00000259673_80 (sequence is synthesized)
cataagcacactggagagaacataaatggaatgaaacaggcaatggtggaagctggagggagggagatggtgaccttagagttgggaaacctgggagacaccctggctcagttagggacc

SEQ ID NO: 822509 - DNA, 120 bp, Artificial Sequence
  ENSG00000259673_81 (sequence is synthesized)
attgatgcagggcctgctgtatgcactgggtcgagagaaaggcagaagctttgaaaacacatgactttcaagaaccaggttttttaaatgtactaaaattgtaggatctaactttgtgtt

SEQ ID NO: 822510 - DNA, 120 bp, Artificial Sequence
  ENSG00000259673_82 (sequence is synthesized)
ccatttaccacttatttgtggtgtgattttccccaagtcccctccaatctctgagcttcagtgtcttcatgaagaaaattaagttaacaaggcttgtactgctctccataaataagcatg

SEQ ID NO: 822511 - DNA, 120 bp, Artificial Sequence
  ENSG00000259673_83 (sequence is synthesized)
gctgagaaagcaggataaagatgaacaggaggtagaggtgaagccttagcttgtggttatacagctcagatgagacagtcgctgggaaagcctttctcatctacaaaactcacatgaaaa

SEQ ID NO: 822512 - DNA, 120 bp, Artificial Sequence
  ENSG00000259673_84 (sequence is synthesized)
gaaatagtttagagggaggcttttgcaggcagatgctggaagatctggaaatttcctaatgacctggacgggcctggagatcatcatggtcttcccccgataacttaaaaaaaaaaaaaa

SEQ ID NO: 822513 - DNA, 120 bp, Artificial Sequence
  ENSG00000259673_85 (sequence is synthesized)
ccaactgtaagttcaaattttttatattaactttatagataaaaaacaaaacaatgaaacttcagtgtgttgttgtcttggattttcttttgttttgagcagaaaggggattcattggag

SEQ ID NO: 822514 - DNA, 120 bp, Artificial Sequence
  ENSG00000259673_86 (sequence is synthesized)
gaaaattaggtagcccaaatagtaaacaagaagtctagagaaccaggctcagaaaatgggaaggaacgaggagagtccgaacagcaaagacatagataagaccaacaggaactagtctgg

SEQ ID NO: 822515 - DNA, 120 bp, Artificial Sequence
  ENSG00000259673_87 (sequence is synthesized)
ccactgccacaggactcttgatcctgttgcttgcaaaatgttgaagctgggggttgtggttgtgaaagtggatcctttgaattgagttgttcttatccccagctaaaacagtggaaaagc

SEQ ID NO: 822516 - DNA, 120 bp, Artificial Sequence
  ENSG00000259673_88 (sequence is synthesized)
gttcttatccccagctaaaacagtggaaaagccagggggagaaagcactcaggacatatgacattactttagaaatgtagttctcggccgggtccagtgactcacgcctgtaatcctagc

SEQ ID NO: 822517 - DNA, 120 bp, Artificial Sequence
  ENSG00000259672_0 (sequence is synthesized)
cccacccgacccaaaagcccagccggcttcacctctcaatagaatcaaaagcagtaaagttcagagctgggtggtcatatatgaatcacttaacctttctttcttttttccttaaaatag

SEQ ID NO: 822518 - DNA, 78 bp, Artificial Sequence
  ENSG00000259672_1 (sequence is synthesized)
cagattacaggcctgagccaccgctcccggcctgaatcagttaacctttctgggcattcatatcattgactataaaat

SEQ ID NO: 822519 - DNA, 120 bp, Artificial Sequence
  ENSG00000259672_2 (sequence is synthesized)
agttaacctttctgggcattcatatcattgactataaaatgggggtagtgttagtttatgcttcccagattgcagatgagaatctaaatatctgcccacaacccccaatgggaggtacag

SEQ ID NO: 822520 - DNA, 120 bp, Artificial Sequence
  ENSG00000259672_3 (sequence is synthesized)
gccagaaggttcctcagcagcctttgctcataggctggcttaactatgatcctgctgtgggaagataaaaaaactgaccgaaggagataggctgagtaatggctccctcaagatgtccat

SEQ ID NO: 822521 - DNA, 120 bp, Artificial Sequence
  ENSG00000259672_4 (sequence is synthesized)
atttcatccctggaacctgtgaatacatttctttatgtggcaaaagggactttgtggctgtgattaaactaagaaccttgaaatgaggagattctccgggatcgtccagatgcatcaaat

SEQ ID NO: 822522 - DNA, 120 bp, Artificial Sequence
  ENSG00000259672_5 (sequence is synthesized)
gtaacaagaaggagtcagagtcaggctggaagccgctatgctgctggctttgaaggcagatgaaggggccaaggaattagggtggtctctagaatctggaaaaggcaatgaaattgattc

SEQ ID NO: 822523 - DNA, 120 bp, Artificial Sequence
  ENSG00000259672_6 (sequence is synthesized)
tcccctagagctttcagaaggaatgcagccttgcccacaccttcattttagaccagtgaaactgattttagacttctgactgccagaactgtaagataataaatgtatattgtttgaagc

SEQ ID NO: 822524 - DNA, 120 bp, Artificial Sequence
  ENSG00000259672_7 (sequence is synthesized)
agctaaaattcaagtaatggactatttggatgatagcgtgcccggaattggttccttccgatattcttggtctcgctgactttaacaatgaagcctcagaccattgcgcacagtccagtg

SEQ ID NO: 822525 - DNA, 120 bp, Artificial Sequence
  ENSG00000259672_8 (sequence is synthesized)
ttaagacagggcatgaggaccagctccactggaaacaccagccagcgtcttaaccggggaggaaggaaggtgtgtgctgggcaagtggggcatgtgacaaagtggaactgaagtggccgt

SEQ ID NO: 822526 - DNA, 120 bp, Artificial Sequence
  ENSG00000259672_9 (sequence is synthesized)
agacggaggaggatgccacccagcctggccgcacagggcccaaggtgactgggaggaccccggcttccctctcaccccaccccaggggctccgggcaaatgacctcagcctgaagcagcc

SEQ ID NO: 822527 - DNA, 120 bp, Artificial Sequence
  ENSG00000259672_10 (sequence is synthesized)
agtgaggaggcgtttgtagggccactggggtttgccagctcctcactggcagatgacctgggggaagcagtttaataggtgtgtgtgcccttctatcatgcgtgtcagtgaccagaaagg

SEQ ID NO: 822528 - DNA, 120 bp, Artificial Sequence
  ENSG00000259672_11 (sequence is synthesized)
gagcaggcatggccctccttccctgagacccgtccccagccttcctactccctccatgacagagcacacacatggccactgtggttttcataataatgaactcataaagaactaaaattc

SEQ ID NO: 822529 - DNA, 120 bp, Artificial Sequence
  ENSG00000259672_12 (sequence is synthesized)
acctagcactttccggctcccagagagcatttccattttatttgatagtgacagtgatgctgggaacaaagcaggacagacatcagcactgtccccatgtaatcagtgacaacacggttc

SEQ ID NO: 822530 - DNA, 120 bp, Artificial Sequence
  ENSG00000259672_13 (sequence is synthesized)
cagggtgcactggcttggccagtgttccgtggctaagatgtggacaagcccagtgacattcaaacctgggtcttctgactccaagacccatagtgagcgggcttcaaccctaagaaccaa

SEQ ID NO: 822531 - DNA, 120 bp, Artificial Sequence
  ENSG00000258108_0 (sequence is synthesized)
atctactctgcaccaataggcatactgcatgcaccgtgtgcacatctccatgatcacccatgctggcaatgtgtgctaaacccgtgcatgcctgccgagcacacccacagagtgaacaca

SEQ ID NO: 822532 - DNA, 120 bp, Artificial Sequence
  ENSG00000258108_1 (sequence is synthesized)
catgggcacacacatgcacatacataagaatgtcactatagtagctaacattaattgaatgtttactacatgctagggacttttctatgaaataccttctctagtcctcaccacaactca

SEQ ID NO: 822533 - DNA, 120 bp, Artificial Sequence
  ENSG00000258108_2 (sequence is synthesized)
taagtaacttgcccaagatcacacagctagaaagtgacagagatgagaagactgaatgcagagaagctcaaggtcaaaagcaaggtcagcctgtactgagtatgagcacacacacatccc

SEQ ID NO: 822534 - DNA, 120 bp, Artificial Sequence
  ENSG00000258108_3 (sequence is synthesized)
atgttctatttcttgtgctcagtctgcaaagctggaacatgttcctaattcccacgcactctggctgagtgctcacatggaatgcacgtgtgcccatgagctcacgtttacatctgagtg

SEQ ID NO: 822535 - DNA, 120 bp, Artificial Sequence
  ENSG00000258108_4 (sequence is synthesized)
atagttcacgatgttttcccctggagagctaattgttaagcatttaccagcacactgcacctttgcgtcgttagtaaaaatacatctctaagaagatcttgggtgccacagttggaggat

SEQ ID NO: 822536 - DNA, 120 bp, Artificial Sequence
  ENSG00000258108_5 (sequence is synthesized)
atgcagtattttaacactcactagcccaacggtcacttgctggggaaactgagacccagaagagacaggatgtcagctccatgaggttggggaccttgcctgttgtattcacttctatct

SEQ ID NO: 822537 - DNA, 120 bp, Artificial Sequence
  ENSG00000258108_6 (sequence is synthesized)
cctagaacagcggctggcacagaagcaggtcaatgcagaggagaacactgaggctcagagaagttcagtaacttggccaaggtcacacttccctatttccacttttggactagtagtcaa

SEQ ID NO: 822538 - DNA, 120 bp, Artificial Sequence
  ENSG00000258108_7 (sequence is synthesized)
catctccaaaggcccgggagaagaagctggtgggcagagctgccccaattcaatccagttgaacttccatctgcctttgcaaggactcagggctcaaaggcaaaacactggtaagctcct

SEQ ID NO: 822539 - DNA, 120 bp, Artificial Sequence
  ENSG00000258108_8 (sequence is synthesized)
gaagctggggcaaggacaaaagagagctaattaagactgaaagcaagacaaggaccccaagcactgcctccttttactttagagagaccagatagtcttacatttcagtcatttatttgc

SEQ ID NO: 822540 - DNA, 120 bp, Artificial Sequence
  ENSG00000258108_9 (sequence is synthesized)
agacatctataatggcatcttcaagagacctgtgtgcaccttgtctgagttgaagtacacaccctgaagaggagccagttatgaaggaccaaatgcacatattaaaattaaacatcacac

SEQ ID NO: 822541 - DNA, 120 bp, Artificial Sequence
  ENSG00000258108_10 (sequence is synthesized)
agatcttgggtgccacagttggaggatatgcagtattttaacactcactagcccaacggtcacttgctggggaaactgagacccagaagagacagatgccacatgtttgaacactcacaa

SEQ ID NO: 822542 - DNA, 120 bp, Artificial Sequence
  ENSG00000258108_11 (sequence is synthesized)
ggaaacacagagagccagaagacagtgaaatgaacgggctgtcatgtcccccagctaccacggattggctcagtgaagagaggctgtggtcacctctgcatggtttcctggtacaaacac

SEQ ID NO: 822543 - DNA, 120 bp, Artificial Sequence
  ENSG00000258108_12 (sequence is synthesized)
tgccagcaagatgagaagactgaatgcagagaagctcaaggtcaaaagcaaggatgtcagctccatgaggttggggaccttgcctgttgtattcacttctatctcctagaacagcggctg

SEQ ID NO: 822544 - DNA, 120 bp, Artificial Sequence
  ENSG00000275965_0 (sequence is synthesized)
tcattgcatacttggaacttgatgcctcgtgtagtcattggccctggggcaggactgatggctgaccctgggagaaagctccggaggctctgtcttcagccctagccctgcctcatggga

SEQ ID NO: 822545 - DNA, 120 bp, Artificial Sequence
  ENSG00000275965_1 (sequence is synthesized)
tgaatccctgacacctataaaatcactttccttctctataatcttatcattcacgtatatagagtcttacaataagaaaatgagcctgctgagctaaaataaggcccttgaaccccaacc

SEQ ID NO: 822546 - DNA, 120 bp, Artificial Sequence
  ENSG00000275965_2 (sequence is synthesized)
cataggagaaggaggaaaactacgctagcatccagaacactgtggcccatgatgctttaatgccagcctctgcagccaagcaaccccaggaaataaaaaatcccaagattatataccaaa

SEQ ID NO: 822547 - DNA, 120 bp, Artificial Sequence
  ENSG00000258107_0 (sequence is synthesized)
cattttctttgtgcttttggtaaggacggatctggcgctttggatactaaataggcaactaattcaattggtgctttctccgagggtctccttgcaaaccggtgccagactcactggtcc

SEQ ID NO: 822548 - DNA, 120 bp, Artificial Sequence
  ENSG00000258107_1 (sequence is synthesized)
tttgtgtactgcccgccctgcatgtgtctgggctcccctggccagtccgtttttttgtctctgatggttaataagctttgagcctagtagtcaaatgtggtgggaacggggacaagacga

SEQ ID NO: 822549 - DNA, 120 bp, Artificial Sequence
  ENSG00000258107_2 (sequence is synthesized)
gggtccttagtgaaggtgtttgttgttaaatagaacaattcagctgtctctttagaaaacttgacaaaaggaaatgctccctgctgaaaattttcttagcctgttgcacaaaagatgaag

SEQ ID NO: 822550 - DNA, 120 bp, Artificial Sequence
  ENSG00000258107_3 (sequence is synthesized)
aaattgagctgattcggacactagaagagccagctaccttctgttttattttagctttgttgtttcatcttcgtcatatcgtatccaagtaaaattggaggaaaatgtcagaagaagctt

SEQ ID NO: 822551 - DNA, 120 bp, Artificial Sequence
  ENSG00000258107_4 (sequence is synthesized)
acaggtcctggctatggaggagggttccattcttacctgttgctctacaatgtacagctgatgttttacaataaaaacatggagtcatgctaactcccacatgccctaccattcactctc

SEQ ID NO: 822552 - DNA, 120 bp, Artificial Sequence
  ENSG00000258107_5 (sequence is synthesized)
cccaagccagtaacaaagcaggcaacgcagctaatataatatttagactaaccgtgaagaaaaagatctttctcccttctgtactctgaataaataaattagtctgaccaaatgaagaaa

SEQ ID NO: 822553 - DNA, 120 bp, Artificial Sequence
  ENSG00000258107_6 (sequence is synthesized)
agtggaagttgaacactgcttccacgtgctcctgaactaaaaatggggtctggacagtccaacagaggcaaactaaactgtctgcactctacaactaagaaaactttgtatctggaaact

SEQ ID NO: 822554 - DNA, 120 bp, Artificial Sequence
  ENSG00000258100_0 (sequence is synthesized)
gtgtcgataaatatacactataaaaacaagacctggcttcctagattctgaatctgccgttaaattttcttgttaaaatattagagcgcctcaattatttataagtaaaatcatgtgtat

SEQ ID NO: 822555 - DNA, 120 bp, Artificial Sequence
  ENSG00000258100_1 (sequence is synthesized)
gtaaaatcatgtgtatcatcaatcaaaagtttccaactatctaggagtgtctatcaagtaaatcaaattttcacactctttcttgttttcgttttctttcctttttcttttctttttttt

SEQ ID NO: 822556 - DNA, 120 bp, Artificial Sequence
  ENSG00000258100_2 (sequence is synthesized)
actaggaaacacactcgcttcagcctgcaccaaccaaaatgactgctcaaaggccattcagcccctttatcactgtggctcaactttgattttcttcccagttcatccatgattcagact

SEQ ID NO: 822557 - DNA, 120 bp, Artificial Sequence
  ENSG00000258100_3 (sequence is synthesized)
tcttctgtttcaggagctttgcccatgcgttctgccaccttctgccaggaattacacctgtcccatcccgtcgtctcctgaatgtccagagacaggggtctccccgtgttgtccagaacg

SEQ ID NO: 822558 - DNA, 120 bp, Artificial Sequence
  ENSG00000258100_4 (sequence is synthesized)
gtgctgggattacaagtgtgagccaccatacccggtcatagcgctcttataaaatgcatcatcacatttattttataaattcagaaacaaaagtctgtatagagaagttttgaagttact

SEQ ID NO: 822559 - DNA, 120 bp, Artificial Sequence
  ENSG00000258100_5 (sequence is synthesized)
tactagggacctgaaaatcatactgaagatgtctgcaactaaaaactcgaagagttccgaggctagaggggtcaggagatgaataaaaacgttagccccagctgatcacaatgaggttaa

SEQ ID NO: 822560 - DNA, 120 bp, Artificial Sequence
  ENSG00000258100_6 (sequence is synthesized)
tcacaatactaattaaaaatactacagatcctaggacaatggtcagaagagtgactatactttcctgtttgcccttggaaaatcgagggctgacttttctacgtgctcagataacctaaa

SEQ ID NO: 822561 - DNA, 120 bp, Artificial Sequence
  ENSG00000258100_7 (sequence is synthesized)
ttgatagagagaaagctagcagaggataagataaactagttaactgtaaataagattttgctgttggagaatcttcttgttgctctggttttagatagcggaggaagccaaaaaatatct

SEQ ID NO: 822562 - DNA, 120 bp, Artificial Sequence
  ENSG00000258100_8 (sequence is synthesized)
gctttaagttaccaggagttgaagttcatccctgctgaagttaacaggttgcttccctttttctggtgtattcttactttactggcaaagagaaaataaattaataccttattgttaaaa

SEQ ID NO: 822563 - DNA, 120 bp, Artificial Sequence
  ENSG00000258100_9 (sequence is synthesized)
ggggttctgtactatggaaaactgatcttgaagactgagatgcctatgaaatgagaaagactaaatagataacatccatggagaaataggaggatggttttcttcactatcctctggcat

SEQ ID NO: 822564 - DNA, 120 bp, Artificial Sequence
  ENSG00000258100_10 (sequence is synthesized)
tcagagaattgctttgtagacatattgattgacggccatctatccacacatcaggcattctaaatggctcccttctggactatctcagaagaagaaatattcattagcccttcaaaacac

SEQ ID NO: 822565 - DNA, 120 bp, Artificial Sequence
  ENSG00000258100_11 (sequence is synthesized)
gatagaacaagccatcaaatctagctttctcctatttggaaaaaagacaggggtctccccgtgttgtccagaacggtcttgaactcctggtcttcaagcaatcttcctgccttggtctct

SEQ ID NO: 822566 - DNA, 120 bp, Artificial Sequence
  ENSG00000258100_12 (sequence is synthesized)
agtacttagagtagaaaaccagagaagcaaatccatttattttactagaaagaaaattcttacttgttttatctagaaccatgaaaaagaagtggtatcacaaatctgcttagttttttt

SEQ ID NO: 822567 - DNA, 120 bp, Artificial Sequence
  ENSG00000258100_13 (sequence is synthesized)
ggacttgaagcgtagagtcgaaggcttttgagattccacaatgcttgggagaaaatgtggatgtctccagggaggccatacctaatgaggagctcccaacaaatggcaactgatgttacc

SEQ ID NO: 822568 - DNA, 120 bp, Artificial Sequence
  ENSG00000258100_14 (sequence is synthesized)
atggaaaactgatcttgaagactgagatgcctatgaaatgagaaagactaaatagataacatccatggagaaataggaggatgggagctttgcccatgcgttctgccaccttctgccagg

SEQ ID NO: 822569 - DNA, 120 bp, Artificial Sequence
  ENSG00000235246_0 (sequence is synthesized)
tatagatgaccaaggctgcgaagagagtgtccaggagaaaccagtcaaatcagcagaatgggtccgcagatgctgggattctaaacagcaatggaggtcacaattttataagataacaac

SEQ ID NO: 822570 - DNA, 120 bp, Artificial Sequence
  ENSG00000235246_1 (sequence is synthesized)
ccttcatccagtcaacaacctgtagcggtatccggaatacgcacagcactatgagctacaacaaagcacacggcagcacacagaacacagtaaaaaccttgggaagcttgggctgctcat

SEQ ID NO: 822571 - DNA, 120 bp, Artificial Sequence
  ENSG00000231221_0 (sequence is synthesized)
atctggttacctctgcacaacacagaagacaggttgaggaagacggaaagctgaggggcttcttcagggaaaaataatctcagcgtagcatccctgtaagcctgtctccatcttacttga

SEQ ID NO: 822572 - DNA, 120 bp, Artificial Sequence
  ENSG00000231221_1 (sequence is synthesized)
atcgtttgtgttgtgccaggccatgactatttctctctgtgataaatacttaatgcaaatggcaagccatcctgagggaggctggcatccgtacctactgagaaggccagcaaacagtgt

SEQ ID NO: 822573 - DNA, 120 bp, Artificial Sequence
  ENSG00000231221_2 (sequence is synthesized)
gtgaagcaccgacgtcaaaggccattaatgcaaatgcaaattgacatttttcatcaaggtctaacagtacaccaacagatcattaaaaagctcgatattcatttcttcagtgatgaggtt

SEQ ID NO: 822574 - DNA, 120 bp, Artificial Sequence
  ENSG00000231226_0 (sequence is synthesized)
ggtctggggaataaagaatgggatgaaatggtgagagtccagaggggttgagcaaagaactcactatcacacagcaaggcactaatttgaaatgcctgggagaagtagaagctgcatttg

SEQ ID NO: 822575 - DNA, 120 bp, Artificial Sequence
  ENSG00000231226_1 (sequence is synthesized)
actctcatattcttattggaccaggaaggcaggaggagacaccagtgtgcaccagagaaggagaagtcagagatgacagtccctgcctgaggccatctctggtccaccagacaactcatc

SEQ ID NO: 822576 - DNA, 120 bp, Artificial Sequence
  ENSG00000231226_2 (sequence is synthesized)
agggccgtttggacaggctgtgcctggagatttctggcctcataaaatcctcctggtctcttaggagagctggtgacactctccaggtccttggtggagcctgatgattgacatcttaag

SEQ ID NO: 822577 - DNA, 120 bp, Artificial Sequence
  ENSG00000231226_3 (sequence is synthesized)
caaattctctggagaagtcgatgctcctgatggaggctcacacattgataacccctggtttagagacactactaattgttccagctcatccagctaataaatgacagatctcagacttaa

SEQ ID NO: 822578 - DNA, 120 bp, Artificial Sequence
  ENSG00000231227_0 (sequence is synthesized)
gcacgctactttgttggcccctggggaggtggtgcagccaggcgggtaaggaggactcgcgccatcagcggggtctgagacatggtgtgcccagtgggcagagaataggcctgtggtttt

SEQ ID NO: 822579 - DNA, 120 bp, Artificial Sequence
  ENSG00000231227_1 (sequence is synthesized)
gttccaggcattttacatccacagtctctttcaatcaacacgtccatgcggaggagagcttcttgtcgcccattataaaggctggggagagaccgggaagagcgagaagctacacgctgg

SEQ ID NO: 822580 - DNA, 120 bp, Artificial Sequence
  ENSG00000231227_2 (sequence is synthesized)
gctgcagattgggccctagcgggcttggagcgtggatatgctggctggcccccctccccgggagtcacagctctcgccggtctcgccactcaggctctgccgggtacccaggaggcttgc

SEQ ID NO: 822581 - DNA, 120 bp, Artificial Sequence
  ENSG00000276384_0 (sequence is synthesized)
ctgcccgccccacctcccagccagggcctgtgccagcacctgctgaatgtccgaggccaccaagaggaagggcccctgctcctcccagccaggaagggatttccccgcaggaggaagtct

SEQ ID NO: 822582 - DNA, 120 bp, Artificial Sequence
  ENSG00000276384_1 (sequence is synthesized)
gtgtgccttcctacctctgctcccacctgggggctggaggcatggaggtccccgcccccaagcctgaacatcatcccggagttccagctgtgccgctccgcaacgccccccttcacgtgg

SEQ ID NO: 822583 - DNA, 120 bp, Artificial Sequence
  ENSG00000276384_2 (sequence is synthesized)
cccccagctaccctgagagtgtcccctgagccccaataaagagagagactatgacttattctatttaatatccatttatcaacattttgtcacaataataataaaaataatatctgtttt

SEQ ID NO: 822584 - DNA, 120 bp, Artificial Sequence
  ENSG00000250338_0 (sequence is synthesized)
tttctgttagcttgaggcttgggccgagagaaaagaggctgctgaaaaccgtctgcgtctgttttcttcatgctattgtgaacggcctgtgcaactgtgatcagcagccctgactggagg

SEQ ID NO: 822585 - DNA, 120 bp, Artificial Sequence
  ENSG00000250338_1 (sequence is synthesized)
aagactcattccaaatgctgtggcagatgaaggctcacaaggaactgaaataagaagtggtaaaactgccctcggttatggctacagtattcgatgagtgtaaaggtacagtccatttcc

SEQ ID NO: 822586 - DNA, 120 bp, Artificial Sequence
  ENSG00000250338_2 (sequence is synthesized)
tcgaggcatccaccaaactctacaaaatctagttaattgctcccttccctcttccaccaaacttggactctctccttgtttctataaaccaaaaggtatctgagacaggtctcaatcaat

SEQ ID NO: 822587 - DNA, 120 bp, Artificial Sequence
  ENSG00000250338_3 (sequence is synthesized)
ttttttcaaagttaagaatctgcttgtgacacagccttggaaggtcctgacaacatgtacccaaggtagtcagacacatcttgcttttatgcattttagggagacacgagacatcaatac

SEQ ID NO: 822588 - DNA, 120 bp, Artificial Sequence
  ENSG00000257105_0 (sequence is synthesized)
gtagctataaaatttaggaactatatgttctcccccactgctttagagtaacctctggatttttcccaagccatgacagaatggcattagacttactctccaatcaaaatacaacacatg

SEQ ID NO: 822589 - DNA, 120 bp, Artificial Sequence
  ENSG00000257105_1 (sequence is synthesized)
gcaagacacacaaggcagctattttcaggaacacacaggcagcattgtgatccttgagagaatacaaagactgaaagtctaagatcaagatgccagcagagttggtgtttggagagtgct

SEQ ID NO: 822590 - DNA, 120 bp, Artificial Sequence
  ENSG00000257105_2 (sequence is synthesized)
gacttctcactatatcctcaagtggcttttcctcagtgtgtgcacaagggaagaaagagagagggctctggtctctcttcttacaagaacattaatcctatcagatcagggccccaccct

SEQ ID NO: 822591 - DNA, 120 bp, Artificial Sequence
  ENSG00000257105_3 (sequence is synthesized)
tgtaacctgatttaaccttaattacttccttaaacactccatctccaaatacagtcacactgaggattagggcttcaatatgtgaatctgggggagacaaacattcagtccataataata

SEQ ID NO: 822592 - DNA, 120 bp, Artificial Sequence
  ENSG00000250334_0 (sequence is synthesized)
cccaaccccctggactctgcccaggaaaatttgtcgtctttggaaattattacaaagttcagctggaagtctccttctccctgtggaccttccccaattccactggctgccctcctcaag

SEQ ID NO: 822593 - DNA, 120 bp, Artificial Sequence
  ENSG00000250334_1 (sequence is synthesized)
gacccctgtgagataaattcagaaatggctatccttggcttccctggggaacaagagtgcctgcagttcttttcccacttcttttacttttctatttcactgggctctctaaattcattt

SEQ ID NO: 822594 - DNA, 66 bp, Artificial Sequence
  ENSG00000250334_2 (sequence is synthesized)
cttttacttttctatttcactgggctctctaaattcatttcagctctagggatttggaaaggattc

SEQ ID NO: 822595 - DNA, 120 bp, Artificial Sequence
  ENSG00000250334_3 (sequence is synthesized)
aacatttgaatcagtgagctgggagacacaaacccatactcaatcttgggggacaccatctaatcagctgccagtgcaactaggataaaatcaggcagagaaatttggaaagactagact

SEQ ID NO: 822596 - DNA, 120 bp, Artificial Sequence
  ENSG00000250334_4 (sequence is synthesized)
cttctggccttcatctttctcccatgctagatgcttcctgacctcgaatatcagactccaagttctttagcttttggactcttggacctttggccacagacggaaggctgcacttttgaa

SEQ ID NO: 822597 - DNA, 83 bp, Artificial Sequence
  ENSG00000250334_5 (sequence is synthesized)
cagcttaatttcaaaccttctgggtttcttcccagcgctaaatcctgtcgactggattcactaggatgaatagagaaagaagt

SEQ ID NO: 822598 - DNA, 120 bp, Artificial Sequence
  ENSG00000250334_6 (sequence is synthesized)
tggattcactaggatgaatagagaaagaagtgttacattttaagataatttcttttctaaacacacagaaaggtgacccaagtctggatgtaaatgtgtttttaggcaacttccacgtgg

SEQ ID NO: 822599 - DNA, 120 bp, Artificial Sequence
  ENSG00000250334_7 (sequence is synthesized)
aaagaggtactcatcaagtttagctgaatagtcttgtgattcacagcttgtcttttgagaagagtggaggaaatcgtgtcatttatcatgggtaattccagtatggctcacactatcaat

SEQ ID NO: 822600 - DNA, 120 bp, Artificial Sequence
  ENSG00000250334_8 (sequence is synthesized)
ctctctgacaatctcctcaacaactcgaagaccaatctgtggctggaaactgtccaggtgataagcatcaggatgctgtgggccaggcctgctacaacacctgctctaaagtcagatgta

SEQ ID NO: 822601 - DNA, 120 bp, Artificial Sequence
  ENSG00000250334_9 (sequence is synthesized)
ccatctgcagtgaatgtaacccaacttatgaagaggaatccaacagtgtaacaatgttacaatatgcacgtaagaagggacttagtgatgtccccagtgggttcacctctctctttgaac

SEQ ID NO: 822602 - DNA, 120 bp, Artificial Sequence
  ENSG00000250334_10 (sequence is synthesized)
tgagcaattttatgattataggaacaactgttttcttctttcataacatgagtaaaaaagcctgatcaacttctggtggtataaaatattcagattcttagtaaataagaagtttagaga

SEQ ID NO: 822603 - DNA, 120 bp, Artificial Sequence
  ENSG00000250334_11 (sequence is synthesized)
tggaaataaatgctttatggatttgttgtctcagctagacacaggcttcgagaatttagaatatttttctttaatattcactatctgaaaaataaataagaatggatttttagttttaaa

SEQ ID NO: 822604 - DNA, 120 bp, Artificial Sequence
  ENSG00000250334_12 (sequence is synthesized)
tttgaaaccaatggagagatcaacacaagctttggagaggagatcaaaatatctgcttcactggaaggagttttggattgctcaacaaggttcagatctgtggcataatcaggcttccta

SEQ ID NO: 822605 - DNA, 120 bp, Artificial Sequence
  ENSG00000250334_13 (sequence is synthesized)
atcctgaaccaaagttgttgttgtatctcgtagttgtcacctgagagctgactgacctgtttcaagcatatgtgagatgccttctggaaatgcccggaagcatatagctaatgggatgag

SEQ ID NO: 822606 - DNA, 120 bp, Artificial Sequence
  ENSG00000250334_14 (sequence is synthesized)
gcatttcaaggttgaacttcagcaagagcaagtgggataaagggcaaaaagcagcacattcctttcaaaatgtccccattttaaactgcaggctagagtagacaatggaaatatatgaca

SEQ ID NO: 822607 - DNA, 120 bp, Artificial Sequence
  ENSG00000250334_15 (sequence is synthesized)
tataaagaaactggtgagattattaagcagagggccttctggggagcattaaagagtgagcaagaaaaatttctcagacatggtgattctagaattgaaaaatcatagactctttctctt

SEQ ID NO: 822608 - DNA, 120 bp, Artificial Sequence
  ENSG00000250334_16 (sequence is synthesized)
ctctctcctttgagagtttccagatgaattcttggatctggctactgagcaaatatatgaataataacctaggatcagctgggtataagaggtttccaccagaagtccatgaaaaccaat

SEQ ID NO: 822609 - DNA, 120 bp, Artificial Sequence
  ENSG00000250334_17 (sequence is synthesized)
taagcatctattgggcaactaccataaacaatcagcaagatgtttaaacagttgattctgccggcggcccaaccagtttttaactgtatcacgaaaactggcctgggggtacagtctgag

SEQ ID NO: 822610 - DNA, 120 bp, Artificial Sequence
  ENSG00000250334_18 (sequence is synthesized)
attattccagccctgcttttacaccgccagaaattccctttctgttacaaatttctaccccagagaggtttgcatattcttggcattttcactgtgcatcagtgaatcagctagcctacg

SEQ ID NO: 822611 - DNA, 120 bp, Artificial Sequence
  ENSG00000250334_19 (sequence is synthesized)
ggccaaggagaggggaaaaaaatcccaaataaaactcaacccagttaggatgtcttcatctatttttcagtgggaaaaaatacagctggactcagtgacttcagtcaaaagcaaacatta

SEQ ID NO: 822612 - DNA, 120 bp, Artificial Sequence
  ENSG00000250334_20 (sequence is synthesized)
ctagttgcttcatttttctaatttttatttttgactctcaagttttggagggcataataaagacatagcctcagcaaagtcacttagaagattgagttcgttattttgcaaagcttgggt

SEQ ID NO: 822613 - DNA, 120 bp, Artificial Sequence
  ENSG00000250334_21 (sequence is synthesized)
agtgacacttctgcaaaatgcacaagcacatgagcagagagatgtgtgaattcaggaaagcagccaaatgcacatcagagctgaggaatgtcacagcgaaatgaagaaaacttgtaaaca

SEQ ID NO: 822614 - DNA, 120 bp, Artificial Sequence
  ENSG00000250334_22 (sequence is synthesized)
cctatctgtatttttaggtagagaatgttctaacatattgccaatgggtgctgcctgtgtgttccttcccctaagctttaaactcaactgatattaaaggtgatttgaaaacaatgaaaa

SEQ ID NO: 822615 - DNA, 120 bp, Artificial Sequence
  ENSG00000250334_23 (sequence is synthesized)
ttgcccttccaggcttccagctcctgtgttccagactgaagaagaggaacagaaaaagggtcagacatctttctcctagtgcagctttgtttgattaggaagagagaattccccctcacc

SEQ ID NO: 822616 - DNA, 120 bp, Artificial Sequence
  ENSG00000250334_24 (sequence is synthesized)
gtcccccttgagatttctgccagcatctcattgacctgaactgtgacacctagctatttctgtttcactctctaacaaatgtagaaagtgttagtaaggaagactggagtagcatactta

SEQ ID NO: 822617 - DNA, 120 bp, Artificial Sequence
  ENSG00000250334_25 (sequence is synthesized)
gaaatggcaacaagcagtgcctcccacagctgcacagtatcccagtttgtcagaatcttccatgtactccttcaggtctactctatgcccttctcactctgttctctactccggaggctg

SEQ ID NO: 822618 - DNA, 120 bp, Artificial Sequence
  ENSG00000250334_26 (sequence is synthesized)
atttccagggctacattccacaggccaccaggctttcccaggccaagttctctagaaatagatcctgacgtgggtatttgagtacacatgatgtattgagagagtgctcccaggagcaac

SEQ ID NO: 822619 - DNA, 120 bp, Artificial Sequence
  ENSG00000250334_27 (sequence is synthesized)
cagacatggaatgaaaaggaactatggaaaaatgtggtttcaggtgaaatctagctttggcatgatcccatggaaagttctgtagtgtaaattctgatgcagagtcttttccaacgtggg

SEQ ID NO: 822620 - DNA, 120 bp, Artificial Sequence
  ENSG00000250334_28 (sequence is synthesized)
acaaggaaacagggactttgcagcacctctccagtcagttctgggccattggcccctagatggggaaagaatgtataattcccaggcacctccaggtaaggcgacctcagtcacctaagg

SEQ ID NO: 822621 - DNA, 120 bp, Artificial Sequence
  ENSG00000250334_29 (sequence is synthesized)
gcaagccttctgagaaggatgcaggtgtaagtctatagcagaagcacctgcagcaactgaggaattagcacaccaaccatatcattgagagggatctcagggctctgggttgcataacaa

SEQ ID NO: 822622 - DNA, 120 bp, Artificial Sequence
  ENSG00000250334_30 (sequence is synthesized)
cagcttctatctgtgctttctggcttccactaaccttggccaatggagagctagaacaggccatgaaggcatttcccttaactcgctccctgctgggtttcttcccaaggattcttggac

SEQ ID NO: 822623 - DNA, 120 bp, Artificial Sequence
  ENSG00000250334_31 (sequence is synthesized)
atgagaggaaatgtcgtttcatgaatgttaaactaatttgacttaacttataaaagatatgaggcatatcagaatacttgagctaaataacaaaagatcatcaagtaaagagtaaatcat

SEQ ID NO: 822624 - DNA, 120 bp, Artificial Sequence
  ENSG00000250334_32 (sequence is synthesized)
ggtctttcatggaaaagaaaatttattaagaatttgttctattcacagttattgaatacaaaaaaactccaagcagatataagtttgagtatttcactttttaaaaattgattttttagt

SEQ ID NO: 822625 - DNA, 120 bp, Artificial Sequence
  ENSG00000250334_33 (sequence is synthesized)
aaaaatctggaaaataaatgttttcctaaatcataaaaaatttcaaataaaccgagtaacaaacatgacattattttaaaatatgtagaagtaagaagcacatgaaaacgtttatatgag

SEQ ID NO: 822626 - DNA, 120 bp, Artificial Sequence
  ENSG00000250334_34 (sequence is synthesized)
tgtgaagagaagaatcagatacaaattatttggggataccccaaataatttctctacagactattttcttgacatcgtatatcaagtgtattcttgaattaaagagaaatttgaaaaaga

SEQ ID NO: 822627 - DNA, 120 bp, Artificial Sequence
  ENSG00000250334_35 (sequence is synthesized)
aatagctgtatactacattttataattttctttataatattccagtgtttaaaaattttaaagtcaaacttaaatactctgtgaacctagttattgctttaagaggaggtgaaattgctg

SEQ ID NO: 822628 - DNA, 120 bp, Artificial Sequence
  ENSG00000250334_36 (sequence is synthesized)
cataggtgatagtgactcatacgatacatttaaaatgttttgcaataaattctatgataatcatgcatccaattctaccctattgcaatgaataaacataatttgtaaaattcatggtta

SEQ ID NO: 822629 - DNA, 120 bp, Artificial Sequence
  ENSG00000250334_37 (sequence is synthesized)
atttcggaatataatgaatgtttttaaaatgtcattaaaaaatcccaagtgttactttgctaacaaaatgaagtttctctaaatgaaaacttattaaaacaaaccatcaaagagctacaa

SEQ ID NO: 822630 - DNA, 120 bp, Artificial Sequence
  ENSG00000250334_38 (sequence is synthesized)
ggacttcaccttgtgattgtatcgtggtcaccagatggctgttgcccttccaggcttccagctcctgtgttccagactgaagaagaggaacagaaaaaggtgctacttgaaggggcacca

SEQ ID NO: 822631 - DNA, 120 bp, Artificial Sequence
  ENSG00000250334_39 (sequence is synthesized)
aaaaatcatgagcccaggacaggacagaggtggaacttattctccaggtgctctactttgaagtcaaggacatcttaccatcatcctggagagctggatcctcccagagtaatgctcagc

SEQ ID NO: 822632 - DNA, 120 bp, Artificial Sequence
  ENSG00000250334_40 (sequence is synthesized)
gccttcttgcagagggaagagtgagcctgtgtcgcttctccatgtcctggaggagacagtctgcactcagactctgaccatgtgctggtgtcctggcttacctccattaagagttcattt

SEQ ID NO: 822633 - DNA, 120 bp, Artificial Sequence
  ENSG00000250334_41 (sequence is synthesized)
ctgctccataaaactacaggtcacgagtgctctcattcctttctttttatattattcaattttatttctgacatttgccagggcacagggaaataaaccagtgttagttaatatcaacaa

SEQ ID NO: 822634 - DNA, 120 bp, Artificial Sequence
  ENSG00000250334_42 (sequence is synthesized)
cctctagagaaccctgactaatacagatacacagaaagttcaattttctaaattttaagcattttaaaacttacttgggtctatttttctctcatcatctatgaacagagtaaaacagta

SEQ ID NO: 822635 - DNA, 120 bp, Artificial Sequence
  ENSG00000250334_43 (sequence is synthesized)
atgaacagagtaaaacagtaactattatcattcacatccctccagctcagatgctacatttggcataattttcacattactatttttccttcacactgttttgctgatataatctcagat

SEQ ID NO: 822636 - DNA, 120 bp, Artificial Sequence
  ENSG00000250334_44 (sequence is synthesized)
ttcagatccaggttattattaattattagcttaatattttgtatttttatcttgtaagtactacatttgaaattttaaagctaatcactctatagagctaagaattctatttgctgagtt

SEQ ID NO: 822637 - DNA, 120 bp, Artificial Sequence
  ENSG00000250334_45 (sequence is synthesized)
atttatatttatttcttagttgacttaagtgactagtcaaatagtttttttcacaaagaattttatatgacattgcctctcagtctagtgtatctaaaaacaactttctgtcgctctagc

SEQ ID NO: 822638 - DNA, 120 bp, Artificial Sequence
  ENSG00000250334_46 (sequence is synthesized)
atataaatatgagcttttctaactaaaatgccttggatctcaatcttttctgcccaaagctctgtaaacctttgtttttcttagcatttaatattgcaaataaagtctgatctacagaca

SEQ ID NO: 822639 - DNA, 120 bp, Artificial Sequence
  ENSG00000250334_47 (sequence is synthesized)
tttcagctctaggtaaggttaaactcttctcccgtcttctggattttcaggttctccagggccgatgtatgtttggagatggatttccccctctcacacttcaggcactcagttttttgg

SEQ ID NO: 822640 - DNA, 120 bp, Artificial Sequence
  ENSG00000250334_48 (sequence is synthesized)
ggtggcacttttaagagagcatcagctgcggtagtagaagggggatacaggcttgccctaagttggccagggtaaatattcagtcgtctcaggtaataggtgaggccatagagctcccac

SEQ ID NO: 822641 - DNA, 120 bp, Artificial Sequence
  ENSG00000250334_49 (sequence is synthesized)
aagtttatatcttttgtctctggttaccaggaagggtagagaaaaccatcaggtgggggcagggttaggcaggtctcagcctagactctccttgggcttgcagtggccactttgagggat

SEQ ID NO: 822642 - DNA, 120 bp, Artificial Sequence
  ENSG00000250334_50 (sequence is synthesized)
atggggtgtgtctcaggccaatggagttatgttccatgggagattatggctgcctctgctgcttcctacaggttgccaggttctccagggccgatgtatgtttggagatggatttccccc

SEQ ID NO: 822643 - DNA, 120 bp, Artificial Sequence
  ENSG00000250334_51 (sequence is synthesized)
gtcgtctttggaaattattacaaagttcagctggaagtctccttctccctgtggaccttccccaattccactggctgccctcctcaaggacccctgttctccagggccgatgtatgtttg

SEQ ID NO: 822644 - DNA, 120 bp, Artificial Sequence
  ENSG00000250333_0 (sequence is synthesized)
acactcagcatttggcatttgatgggtgttatatacgcaatggaggcagatttggggcacagagatggagaaaactgaattgtgccacacaattgagttggaattctgactccccagagg

SEQ ID NO: 822645 - DNA, 120 bp, Artificial Sequence
  ENSG00000250333_1 (sequence is synthesized)
caatccaggagacaggggtttcccagggagcaggaagaaacactgatcccactatccatgtgagaataggatacacagcattaagaaactctctggctcacactaaccacctgccttgag

SEQ ID NO: 822646 - DNA, 120 bp, Artificial Sequence
  ENSG00000250333_2 (sequence is synthesized)
ccaaggttttgtccactgctgggggtcagacaggtctgggaatgtctaatggactagaagggtagcccaacaaaggaatgtttgcatggaagctggtagcctcattgctgaatctgaaga

SEQ ID NO: 822647 - DNA, 120 bp, Artificial Sequence
  ENSG00000250333_3 (sequence is synthesized)
tgaacatacattgtgacttggcaactgacatccttcaagtcaactttcatgggggctaaagaaactcacggatggtcatttattacaaggagacaaagaggaaagcacaacaaacaggtc

SEQ ID NO: 822648 - DNA, 120 bp, Artificial Sequence
  ENSG00000250333_4 (sequence is synthesized)
tggcaacaaagccagggatgtgagcgttgattgcaaatatattactggagcaattagtcaaacatctgtggactggacccatggacatgtctgggctctagtttagatagataaagattt

SEQ ID NO: 822649 - DNA, 83 bp, Artificial Sequence
  ENSG00000250333_5 (sequence is synthesized)
aaaaaaaaaagcatggtgtcctggcctgtgtgtcacactcagcatttggcatttgacttcttcacactcttaaaagctattga

SEQ ID NO: 822650 - DNA, 120 bp, Artificial Sequence
  ENSG00000250333_6 (sequence is synthesized)
tggcatgaggcctacttgtctgcactaagtgtctcaaggggcatggcttagtcaaaccacaactccatggaacttaatgaagcagagcactttagtgaaaagagaaaagaagaaagaaaa

SEQ ID NO: 822651 - DNA, 120 bp, Artificial Sequence
  ENSG00000287721_0 (sequence is synthesized)
gggatacatcagtgaagaaacagacaaaaacctctgccctcatggagcccccattctagtagacagacaataaacatacaaataaatcaattacatagagtgctagaaagtggtaagtcc

SEQ ID NO: 822652 - DNA, 120 bp, Artificial Sequence
  ENSG00000287721_1 (sequence is synthesized)
tagggaataaacagggcagataaggagaattgggagtgttggggttcagggctggatatatttattaacacgaaatgatgtctgccatatactgttgaatgcacttcctaaactgtgatt

SEQ ID NO: 822653 - DNA, 120 bp, Artificial Sequence
  ENSG00000287721_2 (sequence is synthesized)
tcatatgacttcctggtattccaggggaaactcatccagtaaagttcagccctttatgaagaattcccctgtggtcacattccaattcctggacctgctgccaccctcagagctgcatgc

SEQ ID NO: 822654 - DNA, 120 bp, Artificial Sequence
  ENSG00000287721_3 (sequence is synthesized)
tccttcttcagactttctaagaatgactcaggtcattggtggagtgaagccaagatttccaactcagtcacctgaagagatggagataccattcatggagctggagatccctgaagatat

SEQ ID NO: 822655 - DNA, 120 bp, Artificial Sequence
  ENSG00000287721_4 (sequence is synthesized)
gggaattcagaaaacaagctaagataaggatgtcagccccccaacccccagacatgtctcatgaccactgagtcatgcatcaatgatgggtgtgggtgtgtggatggatgtagccaagcc

SEQ ID NO: 822656 - DNA, 120 bp, Artificial Sequence
  ENSG00000287721_5 (sequence is synthesized)
cattgaccgaggactgagacatactccccactaatcaacaagttaacaagctctctgatgaggaggcagtgattaatgaaccaatcggcttgccctggtgagcacctgtcttttgtcttt

SEQ ID NO: 822657 - DNA, 120 bp, Artificial Sequence
  ENSG00000287721_6 (sequence is synthesized)
tcccccatgatacagccatgtcctttctttgagactggagttcttgaaggacagggccgtgccttgccccctggatgaggggtccctaagaagaatgatttttctccttccttcaaagct

SEQ ID NO: 822658 - DNA, 120 bp, Artificial Sequence
  ENSG00000256278_0 (sequence is synthesized)
aaaaaaaaagaactaatacttaaagataaaacctgtaaggatataagaacatgtgaaagttacaccatgggccaacaaaaactaacccagggtggctaacagtaagaccagtggacaaca

SEQ ID NO: 822659 - DNA, 120 bp, Artificial Sequence
  ENSG00000256278_1 (sequence is synthesized)
gcaaaaggatcaaatcacttacaaggggaaagaaaatcaactggtttcagatttctctatattcaggctgggtgtggtggcacgtgactgtaatcccaactactccggaggctgaggcag

SEQ ID NO: 822660 - DNA, 85 bp, Artificial Sequence
  ENSG00000256278_2 (sequence is synthesized)
ctatctcaggaaaaaaaaaagatttctctatattcgacaaaactgtccttcaagtataaacctataggcaaacagctttgaacat

SEQ ID NO: 822661 - DNA, 120 bp, Artificial Sequence
  ENSG00000256278_3 (sequence is synthesized)
tccttcaagtataaacctataggcaaacagctttgaacatacacaaattaatggactgctagaggggtgaacacctaataaatttaactttagaatgaagactaaaactaccatggcaac

SEQ ID NO: 822662 - DNA, 120 bp, Artificial Sequence
  ENSG00000256278_4 (sequence is synthesized)
aaaactgggctgggaagaataagggatccctggccccctccaggctccctgagaaaggctggcccctatgagatccagagcacacagcagagcacgttcaagggcaggtgagtccctcct

SEQ ID NO: 822663 - DNA, 120 bp, Artificial Sequence
  ENSG00000256278_5 (sequence is synthesized)
ttatttattggtggccaattaagaaaatgaaaactcagaaactggttttggtcagatacaaaaataatattcttaccacgttgtgaatggagatgagaggagatggtggcagctgggaat

SEQ ID NO: 822664 - DNA, 120 bp, Artificial Sequence
  ENSG00000256278_6 (sequence is synthesized)
taaaaaaaaatttttttactgatagcaatggctttggctactccaggatgccaagaggagcacattctgtggatatgagtagatgtagggaggcggcttctaaggaagcaggcttatgag

SEQ ID NO: 822665 - DNA, 120 bp, Artificial Sequence
  ENSG00000256278_7 (sequence is synthesized)
taaggaagcaggcttatgagtaagaggctggatggcccagacatccacttttttgttgttcttgcttttctgttttgttttgtgttttttgagacagtctcgctctgtcgcctaggctgg

SEQ ID NO: 822666 - DNA, 120 bp, Artificial Sequence
  ENSG00000231597_0 (sequence is synthesized)
tggggccatttcatctctttcaatggcccggcatcatcatcgctgtatgcaggcctgacctcaggcagaagggagtgaggcagcatgacataggatgaagcagaaaggcactggggtgag

SEQ ID NO: 822667 - DNA, 120 bp, Artificial Sequence
  ENSG00000231597_1 (sequence is synthesized)
tgggccggcgtctgaatgcccactctctagctgtgtgatcttagggatcatgactgcttcccagaccttagtctcaggatgccacaccggaagagctggaccccacatttgaagacagat

SEQ ID NO: 822668 - DNA, 120 bp, Artificial Sequence
  ENSG00000231597_2 (sequence is synthesized)
agatcggagagtacatacatctccctggggcttgctttcctctcccataaaatttaggagttggggatgatcttatccctctacctagactgtagactcctgggagcgggaggcaaggca

SEQ ID NO: 822669 - DNA, 120 bp, Artificial Sequence
  ENSG00000231597_3 (sequence is synthesized)
ctcacaagcaagggcatcagagtgacatcaagacacaaacagccatggaatcttgggaacagatcaaggagtccacctcttaaaatattgtaaaaaataaaatctgagtacgaatgttgg

SEQ ID NO: 822670 - DNA, 120 bp, Artificial Sequence
  ENSG00000256271_0 (sequence is synthesized)
gacttgggatgagagctcttccttctacgttccaagagagaagcttctttggcttggtactggacttgggatgacagctctgcttctctgagggccgtcctgaccagggcaaacagggtg

SEQ ID NO: 822671 - DNA, 120 bp, Artificial Sequence
  ENSG00000256271_1 (sequence is synthesized)
gcattgaacatgactgtcccgtcgctgttcagaggcatgttcatggagaccaggcgctgcaggcgaagagaagcaaagctggtgatgatggcaggcggtgcttaggggaccgcagaacac

SEQ ID NO: 822672 - DNA, 120 bp, Artificial Sequence
  ENSG00000256271_2 (sequence is synthesized)
atctcatgttgaattgtaatccccagaattggaggtggggcctgatggaaggtgattgcatcatggggtggatttctcataaatggtttggtaccatccccttggtgagtgagtactcat

SEQ ID NO: 822673 - DNA, 120 bp, Artificial Sequence
  ENSG00000256271_3 (sequence is synthesized)
tggtaccatccccttggtgagtgagtactcatgagatctgcttgtttaagtaagtgtgtggtccctcccccttctctcttgctccctgtctgtccatgtgacgtacctgcctcccctttg

SEQ ID NO: 822674 - DNA, 120 bp, Artificial Sequence
  ENSG00000256271_4 (sequence is synthesized)
ccttccaccatgattgattggaagcttcctgaggcctccccagaagcagaatgctagtgccatgcttcctgtacagcctgctgaactgtgggccaattaaacctgttttcttataaatta

SEQ ID NO: 822675 - DNA, 120 bp, Artificial Sequence
  ENSG00000256273_0 (sequence is synthesized)
gacaagaatgggagcaggtagaccctcccagtccaggcaaatattaccagtggctaagagtaaggtagtatcagtgaagaagtgatcctattattgatagatcttaaagcagagtagaca

SEQ ID NO: 822676 - DNA, 120 bp, Artificial Sequence
  ENSG00000256273_1 (sequence is synthesized)
caagctgccatttagcaagctgccatgaagatagccatctccatctgattcatttggggctacaattcatgtattaaggttaaatccatatcttttatccaccttgggtgaagaacatga

SEQ ID NO: 822677 - DNA, 120 bp, Artificial Sequence
  ENSG00000256273_2 (sequence is synthesized)
aagatcctatacaactggtctaacacctgtgtgttctctctcctaaaagttaatacccaattcagcttggtgcaggttttaaaatttaaataaaaaaataaagttaatattcaagttaaa

SEQ ID NO: 822678 - DNA, 120 bp, Artificial Sequence
  ENSG00000276898_0 (sequence is synthesized)
ttttgtagcagccgtaccctcaagaactgcaccttccaaccacccttatatgagcctgctccaaaaccttgccagccagcacttccaggttacgactattgacctccagctcccagtttc

SEQ ID NO: 822679 - DNA, 120 bp, Artificial Sequence
  ENSG00000276898_1 (sequence is synthesized)
agagagttctcccagtctcctggatcacactggtctgaaagctgtttggtagacaaccttcgagtctttctgccttcatactgtgggtataccgttctcccaactgaaaacccgtttttt

SEQ ID NO: 822680 - DNA, 120 bp, Artificial Sequence
  ENSG00000276898_2 (sequence is synthesized)
ttcttatctgtctactcaaagcctaaccaacaccaaatggcctagaaatgccacgtacctaccagttgcctctttcctcctccagcccttgtgaatgtgaattcacatctctgttctctg

SEQ ID NO: 822681 - DNA, 120 bp, Artificial Sequence
  ENSG00000276898_3 (sequence is synthesized)
ttccttgtggtaggtatttttttttcatatttctattcttatagcatctagcatagaacaaacagcctagtatctagtgggtatccaataacaacttatgcaggtgattaggcaagaaaa

SEQ ID NO: 822682 - DNA, 120 bp, Artificial Sequence
  ENSG00000276898_4 (sequence is synthesized)
agaaataaagcctattcaaattggaaaggtggaagtcaaattgtccctatttgctggcaacataatcttatatatagaagaacttaaacactctgccaaaaatccattagatgtgataaa

SEQ ID NO: 822683 - DNA, 120 bp, Artificial Sequence
  ENSG00000276898_5 (sequence is synthesized)
caattcagtaaggttgtattgtatgtatcaaaacatccctatgtaacccatagagatgtataattattttatgttgatcaaaaataaaataataaaagctcttaataaaacagtcatctc

SEQ ID NO: 822684 - DNA, 120 bp, Artificial Sequence
  ENSG00000246379_0 (sequence is synthesized)
cggcggcgcggacctccttgtcaatgggagcgcggggccgggctgcccgcaggacggtcaggtgggccccccagctcgctgccagcgcggcctctgtccctctcgggccggctctccatc

SEQ ID NO: 822685 - DNA, 120 bp, Artificial Sequence
  ENSG00000246379_1 (sequence is synthesized)
tctcgggccggctctccatcttgtcgcccgtagcccgccttctccgtggctctccagccgctggggccgcagagccgaggccgggttacctcaggaaacgcgatgtggtagtgggtcgga

SEQ ID NO: 822686 - DNA, 120 bp, Artificial Sequence
  ENSG00000246379_2 (sequence is synthesized)
ataaacccgcgcgccccagaattcgccttgggggcgtaaggacagattcggacttttcgtttcctatgtccacatttattgagcacctaatatgtgacacccgaggctgtaagaagagga

SEQ ID NO: 822687 - DNA, 120 bp, Artificial Sequence
  ENSG00000246379_3 (sequence is synthesized)
acgcagcgggcggagaaaagccagagctttttctctgtgagccgctgcctccagggccatagccgaccctgctccgagatcccagccgccgctctccgtgcaggaggggtgcccaccctg

SEQ ID NO: 822688 - DNA, 120 bp, Artificial Sequence
  ENSG00000246379_4 (sequence is synthesized)
gggaggccagggtgcccggagtggagggacagggcttcaagcgaccgggagtttccagcaaacccctgatccctgagcagtttattttaaaagcttttgcaaatgttggacggtttcgtt

SEQ ID NO: 822689 - DNA, 120 bp, Artificial Sequence
  ENSG00000246379_5 (sequence is synthesized)
tggtggaggccgtctttgcactaaattctcctgtcctcccccttcgaaacgcacaaaatgaattttgaacagattttggatgagaggttttcttccttttttcatcttctgaaacatttc

SEQ ID NO: 822690 - DNA, 120 bp, Artificial Sequence
  ENSG00000246379_6 (sequence is synthesized)
cccctcatttcttctcagataaagacccagaaacccgggacagttactcggtgtacagctagtcaaatactgaggaaaccagtcgatatttgccaaagattgggcatgttctgggtggtc

SEQ ID NO: 822691 - DNA, 120 bp, Artificial Sequence
  ENSG00000246379_7 (sequence is synthesized)
tcagattttgaagaaacgacttttttactgcacaaaatagttttacaatcagttccatcagacagccccaggggctctcctagggaaaggggccaataggcaaggttgcatggggataag

SEQ ID NO: 822692 - DNA, 120 bp, Artificial Sequence
  ENSG00000246379_8 (sequence is synthesized)
agaggcaagcggccagtggaaaacggttttttgttttttttttcctaacagttgggcatttctgtagctctgaaagcaaacttgtttgtttcatttcaacgatagaaaaaaaacactcct

SEQ ID NO: 822693 - DNA, 120 bp, Artificial Sequence
  ENSG00000246379_9 (sequence is synthesized)
gttttggaaatgtaacccagcataaaaatacatttgcaatggggaaaaagaaagcagtttagggccacccagaagaaaatattttttccctgatttttttttaatttggtatttcccagt

SEQ ID NO: 822694 - DNA, 120 bp, Artificial Sequence
  ENSG00000246379_10 (sequence is synthesized)
tgacaaaagaatcctatagagaattgttttataaagtgaataactgcttctctacctacccgcccctctcattcttcttttctgtgcgtgtttttggggggctgttatgggataaatctt

SEQ ID NO: 822695 - DNA, 120 bp, Artificial Sequence
  ENSG00000246379_11 (sequence is synthesized)
gtttggcttaaaaatcactaaaacgcagcctttcaaatccaaaacagagagcttaggtacccaacattctatagaatgtattatttcctcaagaggttgctaggaacagttatgtagatc

SEQ ID NO: 822696 - DNA, 120 bp, Artificial Sequence
  ENSG00000246379_12 (sequence is synthesized)
taccaggtgcagggaagcactccacaccctcacccaggtcctgtatccctgcaagactgcgttggaaagactgaagaggcattgctgtgctgggaaggaatgcttaaacctgccacagcc

SEQ ID NO: 822697 - DNA, 120 bp, Artificial Sequence
  ENSG00000246379_13 (sequence is synthesized)
atgttgtgattatgaagggagccaacctgaggacaaatcacattttctgaggatggcaaagcaaacagatgcaaagatcctgggtctttgatggcattgtggagttgctggacagcttcc

SEQ ID NO: 822698 - DNA, 120 bp, Artificial Sequence
  ENSG00000246379_14 (sequence is synthesized)
ctacttttcacgttcctatgacacaatgttatcatcgtccttgttgtatcagccaggagctgacaagccatagcaggacggctatcccctgagagataggagaggaggagaaacagcctg

SEQ ID NO: 822699 - DNA, 120 bp, Artificial Sequence
  ENSG00000246379_15 (sequence is synthesized)
acaggggcctggagcagctggctggcgtcagtaatttcctgcaggagactctgctggccgagcacacatcacccttctgttgctcctctgtattctcccttgtgctactaaaatacgcta

SEQ ID NO: 822700 - DNA, 120 bp, Artificial Sequence
  ENSG00000246379_16 (sequence is synthesized)
atgtaactcctgggctgtgctaagctaaatgcagttatttaacctcatttctatggaacccaggtctaaagcagcaacatctatttggaacaagatggggaggagcaagagtgaattcat

SEQ ID NO: 822701 - DNA, 120 bp, Artificial Sequence
  ENSG00000246379_17 (sequence is synthesized)
gagtgaattcatgctcttcttcatggaggtggatgtttctggaaggaggtttgtgatgtcctttgcagggacatggatggagttggaagcccttatcctcagcaaactaatgcaggaaca

SEQ ID NO: 822702 - DNA, 120 bp, Artificial Sequence
  ENSG00000246379_18 (sequence is synthesized)
ctgcatgttcttacttataagtgggaactgaatgatgagaacacatggacacataaggggaaatgacacacactggggcctgtcagagctgaggggttgtggggagagggagagaatcag

SEQ ID NO: 822703 - DNA, 71 bp, Artificial Sequence
  ENSG00000246379_19 (sequence is synthesized)
tgtcagagctgaggggttgtggggagagggagagaatcaggaataatggctaatgtatgctgtgcttaata

SEQ ID NO: 822704 - DNA, 120 bp, Artificial Sequence
  ENSG00000246379_20 (sequence is synthesized)
aatttaggatagctagagaatcccacagggatgcctttggcttgaatagagtgaaaagttggagggggccaagactagtgctttcacattgacaataaaatggaccaagagctgaaattg

SEQ ID NO: 822705 - DNA, 120 bp, Artificial Sequence
  ENSG00000246379_21 (sequence is synthesized)
aagtcagaagcttggcttaatatgaaagcgttacctaaagtcatggattccaattggaattttcttggaaaacttttcattagaaactaagattcttatttgttttgatgggagtaatag

SEQ ID NO: 822706 - DNA, 120 bp, Artificial Sequence
  ENSG00000246379_22 (sequence is synthesized)
tccttttcaacctacctgggctggagttgacagaaaagattagcaggaacatatttgtaaaatatttatttaatacttattatatcctccagaagacaggagctttcctgacacaaagca

SEQ ID NO: 822707 - DNA, 120 bp, Artificial Sequence
  ENSG00000246379_23 (sequence is synthesized)
gtctcaataggtttggacaaataataaatgaaagtaattttcaaaactgaagggaagtaataccaagaaagtcagcagagtgaaaagaacactggatagaatgaagagacaagactctta

SEQ ID NO: 822708 - DNA, 120 bp, Artificial Sequence
  ENSG00000246379_24 (sequence is synthesized)
gtctctggccaactttgggagacttaattcactttccaggcctcagtttcctcaatcaagaaattggattttaggcatcttttatccgtaattctaaatccgagttgcgaggacagagaa

SEQ ID NO: 822709 - DNA, 120 bp, Artificial Sequence
  ENSG00000246379_25 (sequence is synthesized)
cctggaggactgacactgggaagattacagaaggcagagctccagagggcaaagcaagaaaatgttacaaatctatttattcagtccttgaatctgagtatatctgttccactatcaaaa

SEQ ID NO: 822710 - DNA, 69 bp, Artificial Sequence
  ENSG00000246379_26 (sequence is synthesized)
gttcaagagattctcatgcctcagcctcgcgagtagctggaattacaggtgagcgcccatgcccagcta

SEQ ID NO: 822711 - DNA, 120 bp, Artificial Sequence
  ENSG00000246379_27 (sequence is synthesized)
ttagggagaatggtaggtcactagaaattttgggtttctgcactaagtgtttctgttataaaattgataactcacaatccaacttagtggtgaatatgatttagaagaatgtctggtttt

SEQ ID NO: 822712 - DNA, 120 bp, Artificial Sequence
  ENSG00000246379_28 (sequence is synthesized)
ggctaagagatgacttttcttttttttccagtttgtatctggcattaatgagggaaggtgctgatcaatttttttatgtccctaaaagatgagtcttctattcagcatttccctaactca

SEQ ID NO: 822713 - DNA, 120 bp, Artificial Sequence
  ENSG00000246379_29 (sequence is synthesized)
tacttgtgcacatctctcagacctaccagagtggtggttctcaaatgttgtgcacaagaattacccaagatgctttttaaagagcagatttctgggtttaatccctagaatttctgaatc

SEQ ID NO: 822714 - DNA, 120 bp, Artificial Sequence
  ENSG00000246379_30 (sequence is synthesized)
ctcaggtgatccacccgcctcagcctttcaaagtgctgggcaggcgtgagccacgacgcctggctgatgataatctttactcataatattatgaagcaaatatatgttattcatatatcg

SEQ ID NO: 822715 - DNA, 120 bp, Artificial Sequence
  ENSG00000246379_31 (sequence is synthesized)
gaagcaaatatatgttattcatatatcgttttactataaatattttggttaacttttgaatttatgctagtctatcataaatcttcaactaactgtgttatttaaaggatacacacagta

SEQ ID NO: 822716 - DNA, 120 bp, Artificial Sequence
  ENSG00000246379_32 (sequence is synthesized)
tcttgatccaaagggggagaaatgattttattttgttatgttttagtctttatgtttgttttaactcttctttctgaccacattatgtacttttaaaaaataaagattctagcaacatta

SEQ ID NO: 822717 - DNA, 87 bp, Artificial Sequence
  ENSG00000246379_33 (sequence is synthesized)
gcgagtagctggaattacagagctgacaagccatagcaggacggctatcccctgagagataggagaggaggagaaacagcctgacag

SEQ ID NO: 822718 - DNA, 120 bp, Artificial Sequence
  ENSG00000246379_34 (sequence is synthesized)
ttgaagaaaaaaaaaaaagaaaaagttttgtgaagtctggaggtgtaatggacagacacaggcttaggagtggaatgccttttcttctcctgcccttgggcatcagactccaggatcttt

SEQ ID NO: 822719 - DNA, 120 bp, Artificial Sequence
  ENSG00000246379_35 (sequence is synthesized)
ggcctttggactctgggacttgcaccagtggctcccctaggattctcaggcccagggcctcatgctgcagactgcactgttagctttcctaattttgaggctttcagacttggactgagc

SEQ ID NO: 822720 - DNA, 120 bp, Artificial Sequence
  ENSG00000246379_36 (sequence is synthesized)
cacgcagctaggttttctcattctccagcctgcagacagcctaccatgggactttgcctttgtaatcatgtgagtcagttctccctaatacattcatatgtatatgtatattctcctctg

SEQ ID NO: 822721 - DNA, 120 bp, Artificial Sequence
  ENSG00000246379_37 (sequence is synthesized)
cagaactatgactaatacagccatgtcctcttagtctttcttcgtttattcagccttttccccccatgtgtatcagactgaatagtttttactgccctgtcttcaagttcactgatcttt

SEQ ID NO: 822722 - DNA, 120 bp, Artificial Sequence
  ENSG00000246379_38 (sequence is synthesized)
tcttctgcactatctaatctgatcttagtcctatccagttaattttttattgcagatgttgtattttgagctctagaagttctatttggatttttaaaagtagtttccatttctcttctc

SEQ ID NO: 822723 - DNA, 120 bp, Artificial Sequence
  ENSG00000246379_39 (sequence is synthesized)
aaaaggaattcatcatatgaaggaatgaagatgttcaaaagaaaaccttcaacctcatgccagaagatgttcccagctgtataaatgcctaactcagcttctagtccttggaaattaagc

SEQ ID NO: 822724 - DNA, 120 bp, Artificial Sequence
  ENSG00000246379_40 (sequence is synthesized)
gcctggcttttcagttaattctcagcgagcccttcctttccctctgtagtggttggtgtggcatttataatataactcctttatgtacactgtaaaccattccttctcagggcagatgga

SEQ ID NO: 822725 - DNA, 120 bp, Artificial Sequence
  ENSG00000246379_41 (sequence is synthesized)
agtatgaaatctatctatttcagtctataaaattatatttagagcgttaggtaatgaatgtcctagtaaagtcggcagaggacaggtaggttaaatgacaagtaaggaatgacaggcagg

SEQ ID NO: 822726 - DNA, 120 bp, Artificial Sequence
  ENSG00000246379_42 (sequence is synthesized)
tagtagatgataagagttgcagaacagtttggggagaaggactttatttttaaatgcctttagtaacactactactactaatatagcagtaaagtactttttacccattaataaatgggt

SEQ ID NO: 822727 - DNA, 120 bp, Artificial Sequence
  ENSG00000246379_43 (sequence is synthesized)
aaaagtaatttcaagttagcaaatttctcatttatatgcagtgtttcatataacaatggctcaatcctgatccttgtaggaaactaccttaaccattgtgtattttttcagcttttaatg

SEQ ID NO: 822728 - DNA, 120 bp, Artificial Sequence
  ENSG00000246379_44 (sequence is synthesized)
agaacagatcatgaatacttctaatgcacacgatctgaaagccggaagtctgagatcagagtgacagcatggtcagcctctgctgaggactgtcttcagggttgcagactgcagacttct

SEQ ID NO: 822729 - DNA, 120 bp, Artificial Sequence
  ENSG00000246379_45 (sequence is synthesized)
gagcaagataactttctgcggtctcctttagaagaacactaatttcattcatgatgcctcctctctcatgacctaattatcttccaaagtccccacctcctaataccatcacactggggt

SEQ ID NO: 822730 - DNA, 120 bp, Artificial Sequence
  ENSG00000246379_46 (sequence is synthesized)
atggatttcaacatgtaacttttggtggggagtgggagaggagtacaagcattcagtccataataactacataataaaaatatttaaaaaatgaaattattaaacaggaacacagtacaa

SEQ ID NO: 822731 - DNA, 120 bp, Artificial Sequence
  ENSG00000246379_47 (sequence is synthesized)
ataatatgataggacaaagaccaaatatattttatatgttaataaaagtaaatattcattaagataattttcagaatggatcacaaagcaaatccaactttgttatatgtaagaaataca

SEQ ID NO: 822732 - DNA, 120 bp, Artificial Sequence
  ENSG00000246379_48 (sequence is synthesized)
tgtaaacaaagatattcacaaagtttaagagttaaatacacaccagagaaatacaaatgcaaagaaagcagtgacggatatcttaatatcacacaacatagaattcaagacaaatatcat

SEQ ID NO: 822733 - DNA, 120 bp, Artificial Sequence
  ENSG00000246379_49 (sequence is synthesized)
ctgggcccttgcttgagaccactgacttttacttaacacctaggtctagttagcttggtgaactgctttctgacacctgaacaggttggaagcagggaatcgaaggtgaggaaagactgc

SEQ ID NO: 822734 - DNA, 120 bp, Artificial Sequence
  ENSG00000246379_50 (sequence is synthesized)
cacaaacaggagccaagaattaagagccaaaccaaggaggtgacattcacgacgacaactgtggatggaaatcctgcccaaagggggatgttggatgaatggctcctaagtccccttcca

SEQ ID NO: 822735 - DNA, 120 bp, Artificial Sequence
  ENSG00000246379_51 (sequence is synthesized)
gtttgattgtgatggtaaaggcagataagagggcgagggagacctccgtggagagctggtgcccagcaggaggtgtggccctgtgttttagtgctcaggaatacttgcctgcttttgctg

SEQ ID NO: 822736 - DNA, 120 bp, Artificial Sequence
  ENSG00000246379_52 (sequence is synthesized)
tttctttatcatattgtagttcagttcctgtagtttcaggttacttattgttagggatgggtgctgacatttcgggtcccctggctggcagccaagattcaagagcactgttttcttgct

SEQ ID NO: 822737 - DNA, 120 bp, Artificial Sequence
  ENSG00000246379_53 (sequence is synthesized)
gtcaaatcacattgcaccaacatcaagttggatataaaagtccccacaagtatcaataaaagactgatggtgccttttattattctttgggctgaagtgagaaactggaaggctaaaaga

SEQ ID NO: 822738 - DNA, 120 bp, Artificial Sequence
  ENSG00000246379_54 (sequence is synthesized)
catgcggataaatgtgacaggccgagtatgctctgtagtgtcagctccttcccaaaaccccgctaacactatggcaaagaaaaggtataaacttacaagaacgaagaaaaatggagagaa

SEQ ID NO: 822739 - DNA, 120 bp, Artificial Sequence
  ENSG00000246379_55 (sequence is synthesized)
gaagaaagatcagcagaacttgggaacgtgaaaagtggaaggctgagtgctgtcttggcagaagggaaagctgagaggcagcaggccagctcacatccaagaacctcggaagagctcagg

SEQ ID NO: 822740 - DNA, 120 bp, Artificial Sequence
  ENSG00000246379_56 (sequence is synthesized)
acattagaattagctggggtgcttgttaaaaattcagttatccatcttacttttaccaactcagattcttcagccatttgcattgatagccactccccaggcattgctgtgctgggaagg

SEQ ID NO: 822741 - DNA, 120 bp, Artificial Sequence
  ENSG00000246379_57 (sequence is synthesized)
ggaacagttatgtagatctaccaggtgcagggaagcactccacaccctcacccaggtcctgtatccctgcaagactgcgttggaaagactgaagagcatctgctccctcaaaggtgaaaa

SEQ ID NO: 822742 - DNA, 120 bp, Artificial Sequence
  ENSG00000246379_58 (sequence is synthesized)
ggttccctttacttttttcttccctttaagtcaagcatgaatttttcatatttcgtatagtgtttgctttagaaatataacaccttgtaaacgtaacaagccaatagtatgaaaagacta

SEQ ID NO: 822743 - DNA, 120 bp, Artificial Sequence
  ENSG00000246379_59 (sequence is synthesized)
atcatgaatacttctaatgcacacgatctgaaagccggaagtctgagatcagagtgacagcatggtcagcctctgctgaggactgtcttcagggttgcagactgcagacttctcattcaa

SEQ ID NO: 822744 - DNA, 83 bp, Artificial Sequence
  ENSG00000246379_60 (sequence is synthesized)
gactgtcttcagggttgcagactgcagacttctcattcaatggggaaaggactccctattcaatgaaaggggctgggataaac

SEQ ID NO: 822745 - DNA, 120 bp, Artificial Sequence
  ENSG00000246379_61 (sequence is synthesized)
aaactataaaaaccctggaagacaatctagacaacaccattcaggacataggaacaggcaaagattttatgacaaggatgccaaaaggaattgcaatgaagcaaaaatggacaaatagga

SEQ ID NO: 822746 - DNA, 120 bp, Artificial Sequence
  ENSG00000246379_62 (sequence is synthesized)
aattgcaatgaagcaaaaatggacaaataggatctaattaaagtaaagagcttctgcacatcaaaataaactatcaacagagtgaacaggtaacctacagaatgagagaaaatttttgca

SEQ ID NO: 822747 - DNA, 120 bp, Artificial Sequence
  ENSG00000246379_63 (sequence is synthesized)
gacaaaggtctactatctagcacctataagaaacttaaatttacaagaaaaaaccaaacaactccattaaaaagggggcaaaagacatgaacagacatttctcaaaaggagacatacatg

SEQ ID NO: 822748 - DNA, 67 bp, Artificial Sequence
  ENSG00000246379_64 (sequence is synthesized)
ggtcagaatggtattaataagtcaaaaaataacagatgcggctgggcacggtggctcacgcctgtaa

SEQ ID NO: 822749 - DNA, 72 bp, Artificial Sequence
  ENSG00000246379_65 (sequence is synthesized)
tacaaaaattagccaggagtggtggcgtgtgcctatggtcctagctactaatgaggcttgaactaaacacca

SEQ ID NO: 822750 - DNA, 89 bp, Artificial Sequence
  ENSG00000246379_66 (sequence is synthesized)
ccgtctcatcccccaaaaaacaaacaaaaaacaaaacagatgctagcaaggttctggagaaaaaggaaagcttatacactgttggtggg

SEQ ID NO: 822751 - DNA, 69 bp, Artificial Sequence
  ENSG00000246379_67 (sequence is synthesized)
cccccaaaaaacaaacaaaaaacaaaacagatgctagcaaggttctggagaaaaaggaatagtgtgcaa

SEQ ID NO: 822752 - DNA, 120 bp, Artificial Sequence
  ENSG00000246379_68 (sequence is synthesized)
ctaaagacagaaatatcattaaactcagaaattctgttcctgggtatatacctaaagtaatataaatcgttctatgataaagacttatacatgtgtatgttcattgcagcactgttcaca

SEQ ID NO: 822753 - DNA, 120 bp, Artificial Sequence
  ENSG00000246379_69 (sequence is synthesized)
gaccatcaatattagactagataaggaaaatgtggtacatgtataccatggaatactctgcaccgtagaaaagaacaagataatgtcttttacaggaacacagatgaagctggaagccgt

SEQ ID NO: 822754 - DNA, 120 bp, Artificial Sequence
  ENSG00000246379_70 (sequence is synthesized)
aaaaccaaatactgcatgttctcactaataaatgggagctaagtgatgagaacacatggacacataaaaaggaacaacagacactgggcctatcagatggcggagggtaggaggagggag

SEQ ID NO: 822755 - DNA, 120 bp, Artificial Sequence
  ENSG00000246379_71 (sequence is synthesized)
tcagatggcggagggtaggaggagggagaggatgaggaaaaacaattaatggatactaggcataatacccgggtgatgaaataatctgtaaacaaatccctgtgatccaagtttacctat

SEQ ID NO: 822756 - DNA, 120 bp, Artificial Sequence
  ENSG00000246379_72 (sequence is synthesized)
accaactcagattcttcagccatttgcattgatagccactccccagcatctgctccctcaaaggtgaaaaccagaaattggcagtagatgatatgcaactattaaatataatgtgaagct

SEQ ID NO: 822757 - DNA, 120 bp, Artificial Sequence
  ENSG00000246375_0 (sequence is synthesized)
ggatctccgaagcaagcagtcaaagcggccactgccttgcctgctggaaattctcgaaaatttttctcccgcagttgaccagatggagagggagaagtctgttcccgctgactgacagca

SEQ ID NO: 822758 - DNA, 120 bp, Artificial Sequence
  ENSG00000246375_1 (sequence is synthesized)
gatccggccagtccgcactcggcgagacggctggccggccgcccgggccctcgatcgcagccagtcacagatgccgatgggaacgagcctccccgcggctgctatttgacttcgcaggct

SEQ ID NO: 822759 - DNA, 120 bp, Artificial Sequence
  ENSG00000246375_2 (sequence is synthesized)
tccagctgcgcggcggagcgacgtcaccctgtgccagtggtggctcgcggcggcgccccgccctcccgagccactcgatgtcttttgattggagagtttaatcaaacagaaggagtcttc

SEQ ID NO: 822760 - DNA, 120 bp, Artificial Sequence
  ENSG00000246375_3 (sequence is synthesized)
cattgtggccaccacagctgggaatgagctaaggtcttgctatgttgcctagactggttttgaactcctgggctgaagcaatcctcccacttcggcctctcaaagtgctgggatatcaga

SEQ ID NO: 822761 - DNA, 120 bp, Artificial Sequence
  ENSG00000246375_4 (sequence is synthesized)
catgagccacctgccatgcttggcctataatcatgaaaagatcaaccccaagaaagaaaaggaaacatggaaggacctggactggagtcacgccagtacaaggaggatactggcaaagat

SEQ ID NO: 822762 - DNA, 120 bp, Artificial Sequence
  ENSG00000246375_5 (sequence is synthesized)
gaggctagtcaagtggagcagtgggagtgaagatggaataaagaaatccataactggttgtgattaagtagttgtaaacaccaactgcactcagaccaacccatatatatatttttaatt

SEQ ID NO: 822763 - DNA, 120 bp, Artificial Sequence
  ENSG00000246375_6 (sequence is synthesized)
gtaagcatagtatatataaaacttcaattcctgcttttttttacctaacattatatcatatgcattttccatactgtttcacaattccttgtattcgtaattgtttaatcctgcaaaata

SEQ ID NO: 822764 - DNA, 120 bp, Artificial Sequence
  ENSG00000246375_7 (sequence is synthesized)
cgaatgaacatatgatcatttccttaagtattcccctactattagaagtgaagtttcttccagcatttttctctttgctgtgatgaatatttttaagtatagagatttttcagtttggtt

SEQ ID NO: 822765 - DNA, 120 bp, Artificial Sequence
  ENSG00000246375_8 (sequence is synthesized)
atgagtttttgaaaatctactttaccaaaaacaaagaaaacccatgtctttctttagtacctttgccaagatattacttttacttgacattcaacaagtataggatgaaagtacacaagt

SEQ ID NO: 822766 - DNA, 120 bp, Artificial Sequence
  ENSG00000246375_9 (sequence is synthesized)
ctgcaagggaccttggaagtaacttgtttctgtctaatttctataaaatttccaggagatagtcatacagctttaatttgatcgcatccactagttttggcattggtattgccatattga

SEQ ID NO: 822767 - DNA, 120 bp, Artificial Sequence
  ENSG00000246375_10 (sequence is synthesized)
ttatggacacataaaactgtaactcctggagccaacctctcaggctttcctacatgaaaccaatgccaccatcccacccgcactctagcaccttctatccactgattttagtcattgact

SEQ ID NO: 822768 - DNA, 120 bp, Artificial Sequence
  ENSG00000246375_11 (sequence is synthesized)
tgctctcttcctctttctgtttgttgtcttccagtttgtctctttcattcctcccctcccttctctatcctgctctctgacccaagaggctgacctgtatgaaccacatcagtgattggc

SEQ ID NO: 822769 - DNA, 120 bp, Artificial Sequence
  ENSG00000246375_12 (sequence is synthesized)
tggtggggccccccagcaaagaggatggagtgaagtgagggtatttacttgcttaattgcctccaggctgggtcactcacagctggccatgtccttccatcaaagatcagagctctcctc

SEQ ID NO: 822770 - DNA, 120 bp, Artificial Sequence
  ENSG00000246375_13 (sequence is synthesized)
aaggtagccctctccacaaactttcttgagtttctctttctgggttttgttaaccattttctcaacttgtcccttcatgcctagaggtaatagcaggtggggaatgctgtgctattccat

SEQ ID NO: 822771 - DNA, 120 bp, Artificial Sequence
  ENSG00000246375_14 (sequence is synthesized)
ttggttttcctgcacccttcccatgtttgtatgtagtccctttcatcaaagtactgggactgtcctaattcgaatgtgccatcttttttgtttcctgctaagaactgttcaactcactct

SEQ ID NO: 822772 - DNA, 120 bp, Artificial Sequence
  ENSG00000246375_15 (sequence is synthesized)
tagagtttgaaaggcatctgatttcactgccatgtctttgaacagcagtgcacagtgcagtcttcttcgtggctgaacagccactcgatgtcttttgattggagagtttaatcaaacaga

SEQ ID NO: 822773 - DNA, 120 bp, Artificial Sequence
  ENSG00000246375_16 (sequence is synthesized)
tcactggctccataagtaagagtgttatctaggccagccttagaggagtaacaaattctcctggccacaataattggttcagaggtgtttccacaaaccaagctaagacagagtggtcaa

SEQ ID NO: 822774 - DNA, 120 bp, Artificial Sequence
  ENSG00000246375_17 (sequence is synthesized)
agaggtgtttccacaaaccaagctaagacagagtggtcaatcctggcactaggataaacttctgttggtaaggtatggtagcacatgcctgcaatcccagtgctttgggaggctgaggca

SEQ ID NO: 822775 - DNA, 120 bp, Artificial Sequence
  ENSG00000246375_18 (sequence is synthesized)
cacacacacacacacacacacaccctccttctgttggacttgctgcactagaatcataagcttgaagtcaccacgtagctgcctgggaatggaactgccacagaagaaagacagcctagg

SEQ ID NO: 822776 - DNA, 120 bp, Artificial Sequence
  ENSG00000230176_0 (sequence is synthesized)
gtagaagttcacaggagaggaaagttctttcctgcaccaggttctatggagaattggttgcatggtttctcgtgctgtgggcatcagggacttcaggtgaaggtatttagctgtggcttt

SEQ ID NO: 822777 - DNA, 120 bp, Artificial Sequence
  ENSG00000230176_1 (sequence is synthesized)
gtgcaaacctcagaactgtgtcctccaagggcctggggtatttggcaggcgctgtctcttgctgcctttgctgctgtatgacagaatgaataagcaagggattgaagaagccaagataaa

SEQ ID NO: 822778 - DNA, 120 bp, Artificial Sequence
  ENSG00000230176_2 (sequence is synthesized)
tggtggaaatccggaggacacccctctccaccatcatttgtcaataggcaatttggtctcttgcttcatagacaaaatagaagccacctggaggcaacttcctcacccatcgacaagctc

SEQ ID NO: 822779 - DNA, 120 bp, Artificial Sequence
  ENSG00000230176_3 (sequence is synthesized)
gcacagcagcattttctacacttgctctggcggcatcctcactgtcatgcactagcggttgttggtgaggttcttcaggctgcagatggagacatgggaagggctggactggctcccctt

SEQ ID NO: 822780 - DNA, 120 bp, Artificial Sequence
  ENSG00000230176_4 (sequence is synthesized)
ctcactgtggctgggcagggtagggggtaccccggcttccaggatctctggaagcaaggacaacctcaagggctgatccacatcctctggtgccatctgccgcccagatggggacacagc

SEQ ID NO: 822781 - DNA, 120 bp, Artificial Sequence
  ENSG00000230176_5 (sequence is synthesized)
cctcttgctgcaccgagaaaatgtgtgtcctggattctccgtgagcttttctgaattaaaacaaacaacataaaatcatgggagtgcctttaattactgttgaataagtgaataaaataa

SEQ ID NO: 822782 - DNA, 120 bp, Artificial Sequence
  ENSG00000230174_0 (sequence is synthesized)
ggattccagggctgctcaggagacgcctccatcctggcgtggatgacctcaggatcagccccgtctgccccactcagcccgcagcctggtccccgaaagcgctcagtcagaatccgagag

SEQ ID NO: 822783 - DNA, 120 bp, Artificial Sequence
  ENSG00000230174_1 (sequence is synthesized)
cactgtggcggcgcccccgtgtggccacaggactgaagacagaggaccccgctcccctttctccccagccaggacgtcccaggctctccccctgttccccgcacctggacgggactctgc

SEQ ID NO: 822784 - DNA, 120 bp, Artificial Sequence
  ENSG00000230174_2 (sequence is synthesized)
acagaagagagtctcccggtctcgtgtcaggctctgagttcatccagcttcccaaaatccatgttgatatgaacgttttctcccacaactgattgactggacttttgtctcagggcagag

SEQ ID NO: 822785 - DNA, 120 bp, Artificial Sequence
  ENSG00000230174_3 (sequence is synthesized)
ggaggcctccagaccaaaacagcaggatcaggtctggagctgactcaaccccaaacccttgctaatgcacgacccagtcccccagcctccaggatgggaccttggcctcctgtcccctcc

SEQ ID NO: 822786 - DNA, 120 bp, Artificial Sequence
  ENSG00000230174_4 (sequence is synthesized)
cttgttcctgccactgctcctgcaggtggaggctgctcatcccaggaatcagtctgtgagctccaaccttggggcctcggtccaggaaggagggaggctccagagagcagaagggagatg

SEQ ID NO: 822787 - DNA, 120 bp, Artificial Sequence
  ENSG00000230174_5 (sequence is synthesized)
aaatggatcataagagaagaaggaatcataccaaacactggaactgacctttgtgatgctcaggaatgtcctgatgtcagcggagatgaaggaaaaccagagattcaaaagtcaaaggaa

SEQ ID NO: 822788 - DNA, 120 bp, Artificial Sequence
  ENSG00000230174_6 (sequence is synthesized)
agggccatttaccataattcatatcatacatatttcctggaaaaaaaaagaaaaattccttggggaaaaagcatcaaaatcatcaggaagtcttccacacagaaatgacttcattaattt

SEQ ID NO: 822789 - DNA, 120 bp, Artificial Sequence
  ENSG00000230174_7 (sequence is synthesized)
gatctctgtcattctttcttttcattcatgtattattatccatagagatttctatcctgtgggttttttatttaatttttgtttgtttggttttttcagacacagtgagaccctgtctca

SEQ ID NO: 822790 - DNA, 120 bp, Artificial Sequence
  ENSG00000230174_8 (sequence is synthesized)
tagctgaaactacaggaacatgccaccatgcccaactaattttttaaaaaatttttttgtagagatgaggtatcactatgttgccgaggctggtctcaaactcctgggttcaaacaattc

SEQ ID NO: 822791 - DNA, 120 bp, Artificial Sequence
  ENSG00000230174_9 (sequence is synthesized)
acccaccttggctccccagaatgctgggattacaggcctgagccacgtacccagcctctatcccatgttttgattcatcatcatctcctaagccctttcccagcatcgatagtctactaa

SEQ ID NO: 822792 - DNA, 120 bp, Artificial Sequence
  ENSG00000230174_10 (sequence is synthesized)
acatgccatgattaaattatatctctataccttgatataaacaaaaaattatatgagcagtaaagacaaatatgaaaaagtaaaattactgccaaagttattaggaggataacctaaatt

SEQ ID NO: 822793 - DNA, 120 bp, Artificial Sequence
  ENSG00000230174_11 (sequence is synthesized)
aattatttgggtaggaaaatctttcttttttattttatttttttttccagccagggtctcattctgtcactcaggctaaattacagtggcccgatcatggctcactgcagccttgacctc

SEQ ID NO: 822794 - DNA, 120 bp, Artificial Sequence
  ENSG00000230174_12 (sequence is synthesized)
ctgcagccttgacctcccaagattcaggtgatcctcttgcctcagccccctgagtagctgagacaacaggcatgtgagacaatgcctggctcctttttatatttttagtagagatggggt

SEQ ID NO: 822795 - DNA, 89 bp, Artificial Sequence
  ENSG00000230174_13 (sequence is synthesized)
gcactgtgccagccttttttttttttcacatctgctggaatggaaaatatttcttaaatgagacacaaatgtatcaaattgaaaatgtt

SEQ ID NO: 822796 - DNA, 120 bp, Artificial Sequence
  ENSG00000230174_14 (sequence is synthesized)
tttcttaaatgagacacaaatgtatcaaattgaaaatgtttaaacttcaaaggacttacatacatatacagtcattcttcgctcaatggtgagatagcttctgagaaatgagtccttagg

SEQ ID NO: 822797 - DNA, 120 bp, Artificial Sequence
  ENSG00000230174_15 (sequence is synthesized)
tgattttgtcatgtgtggacatcatagagtgtccttacatgaacctagatggtataacctacttcacacttaggctacgtgataagcccattgcttctaggctacaaattatatagcatg

SEQ ID NO: 822798 - DNA, 120 bp, Artificial Sequence
  ENSG00000230174_16 (sequence is synthesized)
ttaccgtatggaacattgcagccaattctaacacaatggtaagtatttgtggatctaagcatgtgtaaacagagaaaaggtacagtaaaaatgtgattaacaaaaagatctttaaaatgg

SEQ ID NO: 822799 - DNA, 120 bp, Artificial Sequence
  ENSG00000230173_0 (sequence is synthesized)
agcttagatacttttggccatccatgaaccaattctcttggcttctaccttctaacccaaatatatctgggaagcccaactgaaaccccagaagtagtcatgacatcaggcccactgtac

SEQ ID NO: 822800 - DNA, 120 bp, Artificial Sequence
  ENSG00000230173_1 (sequence is synthesized)
aagtactgaaatggctgatgacagaggatgttcgacccagatgagtcatcttgttcacttagttttgaagtacctcttttgaatgaggctttaacatgacacaaaaacaaatctgcattt

SEQ ID NO: 822801 - DNA, 120 bp, Artificial Sequence
  ENSG00000230173_2 (sequence is synthesized)
gtgtccactcctatacctccatcagcacgccacttctcctgaactcttacttagcctctggacctttctctcttcctcctttcagacctctcaccaacaaaccaaatcattgccacttct

SEQ ID NO: 822802 - DNA, 120 bp, Artificial Sequence
  ENSG00000230173_3 (sequence is synthesized)
caagtttgcaagcatacctttacctctgatgacttcttccatgaaactaagaatgagtcggcaatgtataatggaacaaattgactcttggctgactggctaagtcgtttagcctctctg

SEQ ID NO: 822803 - DNA, 120 bp, Artificial Sequence
  ENSG00000230173_4 (sequence is synthesized)
agccacatttcccttaactataaaatgaggtttaaaaaaagaagtccactctgaaggcttgtgatgtggataaatgcttttaacttcttacttgagcccattgaaggtatgagagagccc

SEQ ID NO: 822804 - DNA, 120 bp, Artificial Sequence
  ENSG00000230173_5 (sequence is synthesized)
tgtgagtgctgaaggcatttttctacctaatgatgactctagtactggaggaagcaaaattggaaaaatcttagaaaaacggacatctaaccttgaccaaacatgcctgaaggctttctt

SEQ ID NO: 822805 - DNA, 120 bp, Artificial Sequence
  ENSG00000230173_6 (sequence is synthesized)
ccctacctgaattatgatatatttttctatacacaaaataatgtaattttcaaagttaatcctttgaaagctcagattttttacaacagctttaacaaggcaatagctttactgtgtgct

SEQ ID NO: 822806 - DNA, 120 bp, Artificial Sequence
  ENSG00000230173_7 (sequence is synthesized)
gtgagctgatagattgggaactttcaaccacttacactatggctaagaattcaaatctctggagaaagattaggaatgtgcatttacacaagcgttgttatctcattctgacgtagatgg

SEQ ID NO: 822807 - DNA, 120 bp, Artificial Sequence
  ENSG00000230173_8 (sequence is synthesized)
tcatctaccagacaatttgagtttaagttttacctgggagctttgaaaaaatacagatgcctagcccccacagacctcacatccaaagatttggttccactagaatggggtacaggtaac

SEQ ID NO: 822808 - DNA, 120 bp, Artificial Sequence
  ENSG00000230173_9 (sequence is synthesized)
agtgtttagagctccatagcttgttaatgtgcagccatggtgtcaaggcaagacttctcaaactttaacgtgcagacaaatcattcatcgatatagtaaaaatgcaagttgtgatttagt

SEQ ID NO: 822809 - DNA, 120 bp, Artificial Sequence
  ENSG00000230173_10 (sequence is synthesized)
aggtctgagataaggcctgagatcttgcatttctaatgagtgtcccaactctaaaaaacaaaaatcagttaatcaggctaggcattgacaggcatgtacattacaagtgaagtagataag

SEQ ID NO: 822810 - DNA, 120 bp, Artificial Sequence
  ENSG00000230173_11 (sequence is synthesized)
attttttagaggctaggaaagtccattttaatattacgcatttaagagagaaactaggtattaaagaaattaacatttagcagttggaaaatattgacttggtagcagggagtctgttat

SEQ ID NO: 822811 - DNA, 120 bp, Artificial Sequence
  ENSG00000230173_12 (sequence is synthesized)
ccttgctgttaccctgaacatttcaatttcagaaagttgcatgacttttgaatctcctccatgtaagacatcctgcttgacataaggatttatttctgactttccatcagtttctaatta

SEQ ID NO: 822812 - DNA, 120 bp, Artificial Sequence
  ENSG00000230173_13 (sequence is synthesized)
atagcaccactgtgtgctacatgatgtgagaattaaaaatctctaaacagtaccacaggagcaccacattgcacttctacttgaaaaaacacctgatcagttatccagctgtttcctcca

SEQ ID NO: 822813 - DNA, 120 bp, Artificial Sequence
  ENSG00000230173_14 (sequence is synthesized)
gatgttttctgtaaactcaaaggtcattgtttcactaaaattgagattaatttggcttaaacatatcttgctcactataataaagtagagctattaaaatcaagtttttaaatagccaca

SEQ ID NO: 822814 - DNA, 120 bp, Artificial Sequence
  ENSG00000230173_15 (sequence is synthesized)
ggtatatacaatcaaatgttgtagaacttaccaaatatatgtttctaaaagcactttctctccacttttataaatctaaatgcaaaatcatatagtttgtatgttttgtaataaaatgtg

SEQ ID NO: 822815 - DNA, 120 bp, Artificial Sequence
  ENSG00000230173_16 (sequence is synthesized)
tagtgacacattctttcctctgagtaaatatctcatgacgaaaaggaacatatcattattagtacagagtaataacagaattcactataagatgaaaagctcagcaaatggtgactgctc

SEQ ID NO: 822816 - DNA, 120 bp, Artificial Sequence
  ENSG00000230173_17 (sequence is synthesized)
ttgaaatgacaaataacacataatatcttcccctaagctaatctggaagcaaaataataagacatgacctaaaggatacagtatatgtgtctgtatgctttactttatagcatctttgta

SEQ ID NO: 822817 - DNA, 120 bp, Artificial Sequence
  ENSG00000230173_18 (sequence is synthesized)
aaataatgtgattttaccagattgcatgagattgtgttataaccagatactattagagtcataggcattaaaagttgtccttcataaggggtattatggcatttaattacaagtattctt

SEQ ID NO: 822818 - DNA, 120 bp, Artificial Sequence
  ENSG00000230173_19 (sequence is synthesized)
tttcataatgaaatcagaatgcaaacaccagccctacaataactctgcacttgaatagcaaaccaaatattcctcaaaggtcataattttataagtttgagattaaaaataacatctaat

SEQ ID NO: 822819 - DNA, 120 bp, Artificial Sequence
  ENSG00000230173_20 (sequence is synthesized)
ctttactactgctgtctttccatccctaggaatattacttattttcattaattacttatttagtctatttgatcacaaagttaaatcaaaatctcagagaagactacagcaataacattt

SEQ ID NO: 822820 - DNA, 120 bp, Artificial Sequence
  ENSG00000230173_21 (sequence is synthesized)
atcaagctccattgtgtatctgtcattgggtgtatactattctgtgaactatggccttccacggactattaataaagagacatagttacatatcaatatttatttctatgacgtatgtcc

SEQ ID NO: 822821 - DNA, 120 bp, Artificial Sequence
  ENSG00000230173_22 (sequence is synthesized)
cctatgaaaaaaatataccttggtctatgattaaatgtcctttgtttacaaaaaccattattgtgtactaaattattcgtcctttttcctttcaaacaataaaaaagctattgaaatatg

SEQ ID NO: 822822 - DNA, 120 bp, Artificial Sequence
  ENSG00000230172_0 (sequence is synthesized)
ggcatcacctgggcacactgtctctccagggcacctccctaccctggctgggcctccactttcccttctctaatatgggcactcagggcccggggtcatcttttctgcaggaagctcacc

SEQ ID NO: 822823 - DNA, 120 bp, Artificial Sequence
  ENSG00000230172_1 (sequence is synthesized)
caccagactcccacattgcctagcagctggggttggagcccaaggcttcactctcctctccccaccaccccatgctaggcccaagggcagcaccacaaaggggcactgccaggcgcctcc

SEQ ID NO: 822824 - DNA, 120 bp, Artificial Sequence
  ENSG00000230172_2 (sequence is synthesized)
accccagacacttgtgagggctccaggacaccaggtctggcacattcccatcctggggacctaacaggctagcaggcgaggcagacagttggccagttagctccagtcctaggtagatgg

SEQ ID NO: 822825 - DNA, 120 bp, Artificial Sequence
  ENSG00000230172_3 (sequence is synthesized)
agaatggcctttccgagaggtcccagcaggaggatgtgacaatggagggacaaagcagaggcttccggccctcgctggtctcctgtgctccaagacatcttccacaaaggatttcctgga

SEQ ID NO: 822826 - DNA, 120 bp, Artificial Sequence
  ENSG00000230172_4 (sequence is synthesized)
acagtgagggcctccctctcctagcactctagatgcaaagctgttggccaacatccctcagtaaacggaggacatagaaaacaatgtcagctcctggcactgcagactcccttgctctag

SEQ ID NO: 822827 - DNA, 120 bp, Artificial Sequence
  ENSG00000230172_5 (sequence is synthesized)
gcatggattcttctgatttcagagactgtttccagcataatggtccctcacgctaccccttccatggcctctgaccatcagccttccaaatctaaaggtgaacatttattctttccccca

SEQ ID NO: 822828 - DNA, 120 bp, Artificial Sequence
  ENSG00000230172_6 (sequence is synthesized)
aaccatcccgtagcaactgagcctgctgagaccttgattcagccatctcttctccctcaagggcacaactgatcagcaagccttctatgtattcatcctggttgcatatttagaaaataa

SEQ ID NO: 822829 - DNA, 120 bp, Artificial Sequence
  ENSG00000230172_7 (sequence is synthesized)
atggaccggccaatcacagaggcctgccctttaggctgctgctgaacctcactcactggggtgtggctgcagaagctaccatctgaaccacatgcatccaccttgtccatgaggacattg

SEQ ID NO: 822830 - DNA, 120 bp, Artificial Sequence
  ENSG00000230172_8 (sequence is synthesized)
tgagatttcacccagtatcttctggaatccaggtgatgcggccggccaacagcacgtcttgtactactaaccagtcaccctgctggaagaggaactggggtggatggagtgcttttcaaa

SEQ ID NO: 822831 - DNA, 120 bp, Artificial Sequence
  ENSG00000253738_0 (sequence is synthesized)
agactgcgagcggagaagcggagtttgcagcctcggaattggctagagcgccagagccgagtcagccataaagctacgcgctaggctcttggccctgacgtgaggcgcgcagagatggcg

SEQ ID NO: 822832 - DNA, 120 bp, Artificial Sequence
  ENSG00000253738_1 (sequence is synthesized)
taacgggaatagttttcaacgtctatttcattccctgcttcagaggacctctttaatctttgattttggtccctgtttctaagaaaagcaactgaaaaggtcgtaataccgcccctgaga

SEQ ID NO: 822833 - DNA, 120 bp, Artificial Sequence
  ENSG00000253738_2 (sequence is synthesized)
aaaaaggagcagcgctaaataatcgagaaaatgcctcctcttgaaacggatatagagatggaaacaagatataagaaggattgagaatcatataatacaggagcttaaacacctatgcgc

SEQ ID NO: 822834 - DNA, 120 bp, Artificial Sequence
  ENSG00000253738_3 (sequence is synthesized)
gatgataaagagggtactattagagcgcttggaaaataccaggaagttgagagagttaacagaagggcgcacgctggattggccacaaaatcgaattactgaaggccactactgattagg

SEQ ID NO: 822835 - DNA, 120 bp, Artificial Sequence
  ENSG00000253738_4 (sequence is synthesized)
acacttatggagaacgtgggtagcactgaagcagcattctagtttccagtgccatcaacctcatacgtatctacctggtctctgatcgaagctaccgtaatgtgttcttgaggtcaacat

SEQ ID NO: 822836 - DNA, 120 bp, Artificial Sequence
  ENSG00000253738_5 (sequence is synthesized)
gttttgtggaagtcactgtatttgcccctttatgtcaattacctattataaaccgagagaaatgggaaaattaaaaacctgttttgaattatttttaatgcagaactattttttcaagtg

SEQ ID NO: 822837 - DNA, 120 bp, Artificial Sequence
  ENSG00000253738_6 (sequence is synthesized)
aaatcttatacagaagtctggtatatgaaacagataaaaatgaaccaatgagattgaagggaatgagtagcatgtaatcctgcccactcttcggagaatttgaggcaactttgtagagcc

SEQ ID NO: 822838 - DNA, 120 bp, Artificial Sequence
  ENSG00000253738_7 (sequence is synthesized)
ttaggagttcagtttgtatgttactgggtaatttaaagcagaaattttaatctgactgcacttaagaatcatctgaagtgtttgtattggttagtcttatttttaatactgatgtcctgg

SEQ ID NO: 822839 - DNA, 120 bp, Artificial Sequence
  ENSG00000253738_8 (sequence is synthesized)
tctctctcccctcaaaaaaactctgctgctgggaccaagcacatagatgctttttaaaaagctcccgaaaatgactctaatatgcagccaggattgaaaataactaccctacacagcatt

SEQ ID NO: 822840 - DNA, 120 bp, Artificial Sequence
  ENSG00000253738_9 (sequence is synthesized)
tttcctgattctgagcactcagcttttcattgattttccctagggcaagtccttcatcttattctgggtccttgtgttttctttctgaacctacaatttctccataggtcccatggtttt

SEQ ID NO: 822841 - DNA, 120 bp, Artificial Sequence
  ENSG00000253738_10 (sequence is synthesized)
caaaatttctcattttccattttctgtccttttatattacctacttgaaaaccacagtcatctttcaaaacaaaacactgcctgtttcttaggtctttattgtgggcttgttattcctca

SEQ ID NO: 822842 - DNA, 120 bp, Artificial Sequence
  ENSG00000253738_11 (sequence is synthesized)
atacaaatttacataaaataataacaattaagacatgggccttggtgtcagaattattttatatctttcttattaactctgcagcttaccagctctggataagttaaaggacagctatag

SEQ ID NO: 822843 - DNA, 120 bp, Artificial Sequence
  ENSG00000253738_12 (sequence is synthesized)
tcttactacatagaatcattataaggaattggtggagtgatccttataaagtgtttgcatggtacctagcacagagaaagtgcttgaagttgttaactgttatggttacaaaatatgtaa

SEQ ID NO: 822844 - DNA, 120 bp, Artificial Sequence
  ENSG00000253738_13 (sequence is synthesized)
ataatttttattgtccaattttctctcttcatatacactaaattgttctaattcttgaaccacagtaacaacgtgtgaatgacttatgcattcagtgtgtccactcaactactatttatt

SEQ ID NO: 822845 - DNA, 120 bp, Artificial Sequence
  ENSG00000253738_14 (sequence is synthesized)
aagtacctgttatggtctatgaaaggaactggcaagacagtcattattccccttaaatattcccaagtgttagtggtcaaagtttctctctgctgaaaatgaaaagtaccccgtaggatg

SEQ ID NO: 822846 - DNA, 120 bp, Artificial Sequence
  ENSG00000253738_15 (sequence is synthesized)
gaggaaacagccatcttgagggctaaatctggtctaacataatatttgttgacctgttactacagtgttgccacatatgctttgttggttttttaatttagcccccaaacattttaaaaa

SEQ ID NO: 822847 - DNA, 120 bp, Artificial Sequence
  ENSG00000253738_16 (sequence is synthesized)
tcagatcatttcatgttaaaagaaatctagacttctagttctcttgcaaatgtgagctctgacaaacattgaaattatagagtagcaggggtagtgtgccctttatttggtgcatgtctt

SEQ ID NO: 822848 - DNA, 120 bp, Artificial Sequence
  ENSG00000253738_17 (sequence is synthesized)
ctgcaggttcccaagttctgctgttctctgttgttgcctcatcactgaggccaaatgtcagttgctgcttacatgcatttgaacagttgttattttttatagtgaaattaaaggtaaact

SEQ ID NO: 822849 - DNA, 120 bp, Artificial Sequence
  ENSG00000253738_18 (sequence is synthesized)
gttttgatatccatgtttctaccaaaggtaagaaaacacaagccaaaaagacacagatttcaaaaaaaataagagaaagcataattctttatggaagtgaagaatagtctttttatctaa

SEQ ID NO: 822850 - DNA, 120 bp, Artificial Sequence
  ENSG00000253738_19 (sequence is synthesized)
gtatgccaaaaaaagcatgtataaaaaaatacaatttaagatgccattatgaaaaaactccaagtcagtgtttactaacatcttttcagttttaggaaggaggcaggttgtcttgcatct

SEQ ID NO: 822851 - DNA, 120 bp, Artificial Sequence
  ENSG00000253738_20 (sequence is synthesized)
gagatagcaggaactattttaatattaagagatatcaaatatgcacgctaggattaataaatgaaataattattttccttcttctacaatatttacttaatctggaggcagaaatacatg

SEQ ID NO: 822852 - DNA, 120 bp, Artificial Sequence
  ENSG00000253738_21 (sequence is synthesized)
ttgtctctcttcctgcttctccatcaaaatcccgaccaagtaatcaggatctttgagaatcacaataagaattacagcctcatgtttggattttttaaatttaaattttaaattactcct

SEQ ID NO: 822853 - DNA, 120 bp, Artificial Sequence
  ENSG00000253738_22 (sequence is synthesized)
ttccactgatatttattgagaaactgctatgctccaggtactgcgataaacactgggcaaatgttggagagctaaaaaggcatattcctcttataaagacattatttacttgtaacaaac

SEQ ID NO: 822854 - DNA, 120 bp, Artificial Sequence
  ENSG00000253738_23 (sequence is synthesized)
aagtaaataaatgtattagtcaatatgtaagtaaacaaaaaaatggacaagcacaaattatattaagtactatgtaggaaaccaatagagtactgtaacagaataataaggtatatggga

SEQ ID NO: 822855 - DNA, 120 bp, Artificial Sequence
  ENSG00000253738_24 (sequence is synthesized)
tgggggtgggaatctgttcagagatgatctacctgagaaggtaacatgtaggcagagatctgaatcgtgaggagtcagcctttcagagtaagtggagtaggcacttccaagagaaaagca

SEQ ID NO: 822856 - DNA, 120 bp, Artificial Sequence
  ENSG00000253738_25 (sequence is synthesized)
tattcctggctatttgcctatcaatgtcatcttgaacaagggttagcaatctcctacctgtaccacagatgctatgtgccacctccatgctacctttgccaccaagagattcaatgtgat

SEQ ID NO: 822857 - DNA, 120 bp, Artificial Sequence
  ENSG00000253738_26 (sequence is synthesized)
gcatgatttgaaggttcctcatcctgataccctgtggaaagtaaaatcagtgacaaataaaagcagatcattatctcaggtagagtctgctaaagatgatacttgcttgtcagtacatga

SEQ ID NO: 822858 - DNA, 120 bp, Artificial Sequence
  ENSG00000253738_27 (sequence is synthesized)
gtatccaccctagtaaaaaaccacagaagaagtgggatttatcttcaatgttctctcacttccccttccaagtgcctctcctgccttctgatgctctttcccacaagttgcaggcaaata

SEQ ID NO: 822859 - DNA, 120 bp, Artificial Sequence
  ENSG00000253738_28 (sequence is synthesized)
aagcatgtatattactctctttttatccagagttgctccttgtccttatatgaagtagattccagacctcacaattgtatatgcctacccttctactccaacccctcaaaaaaagaggaa

SEQ ID NO: 822860 - DNA, 120 bp, Artificial Sequence
  ENSG00000253738_29 (sequence is synthesized)
gaatgaaagaatgaacaagagaaaaggaaggaagagagggagagaggaaaggagggaaggatggtcctgaagatcacagttcggtgctgaaaaaagcatttctattaaacttcaagacag

SEQ ID NO: 822861 - DNA, 120 bp, Artificial Sequence
  ENSG00000253738_30 (sequence is synthesized)
aatgaatgaccatagctaataatgtaccttaagcttttctagaatctttgtattaaaaaagttgattgttactaaatgtattttaatctcataaaattttaggaatttaaatgaagaatt

SEQ ID NO: 822862 - DNA, 120 bp, Artificial Sequence
  ENSG00000253738_31 (sequence is synthesized)
tcacaaagggtaagaaaaattatatattatatttataaatttgtcattatgattctcccattgtggaaaaaaaaacaaaatctcggtaccccaattcacaaagccaaaaggaagaaagta

SEQ ID NO: 822863 - DNA, 120 bp, Artificial Sequence
  ENSG00000253738_32 (sequence is synthesized)
agctgaacgctgagtcatgcaagaaactgctcgcttttgttcctaagctaatagctacagataaaaggtcagatatctccataggtaggtactctatgttcaccttatgtaaagtgccaa

SEQ ID NO: 822864 - DNA, 120 bp, Artificial Sequence
  ENSG00000253738_33 (sequence is synthesized)
tttattgagcgtaagaggattacctaattgactattccccagcctgctccttttctcttgcaacacatggagtcagcaatgggaccatatcctctctctttcccctccagcctgctttcc

SEQ ID NO: 822865 - DNA, 120 bp, Artificial Sequence
  ENSG00000253738_34 (sequence is synthesized)
ccctttaaatactgaagccctcaaaatcatctttctaaaaaggtatgaaccatagattgttcctgtggatttgtgtttctttcttccgggcatatccttaagcttggcaaaataaaattc

SEQ ID NO: 822866 - DNA, 120 bp, Artificial Sequence
  ENSG00000253738_35 (sequence is synthesized)
taaattgattgagtcctgtctcggatgctttttggtttacgctatcaaggtttggaaggcttaagacatgtcattaaggtactttatttccttctagcattttgattatactgaaattgg

SEQ ID NO: 822867 - DNA, 120 bp, Artificial Sequence
  ENSG00000253738_36 (sequence is synthesized)
gtaattagtggtgcctgttttgagtaacatggtgagtagaattaagaatggaaagcactgggaaagggaaaacaaaaacacatcaaagatttccacctttacttccttagtttttttaaa

SEQ ID NO: 822868 - DNA, 120 bp, Artificial Sequence
  ENSG00000253738_37 (sequence is synthesized)
gaaaaattaaatgtattatctaatcacaagctacaaattaaaatatttgatttactttttcagcaaaagttataaattatcgaatagaaattgggaaaagatatgtcatttttaacagtg

SEQ ID NO: 822869 - DNA, 120 bp, Artificial Sequence
  ENSG00000253738_38 (sequence is synthesized)
ttaaaatcttagttatactcatttgactagttagtacagctcttatttacttattctacagacaggtacactcttttatccttgtatagaagttactttaattttttagtatttaagtta

SEQ ID NO: 822870 - DNA, 120 bp, Artificial Sequence
  ENSG00000253738_39 (sequence is synthesized)
acaatctatgcataataggaatacctgaaactgaggacagagcaagtggagctgaaacaataaaggatctacttgaaaaaattttccagaattgaagaacgaactagatctacaaatgga

SEQ ID NO: 822871 - DNA, 120 bp, Artificial Sequence
  ENSG00000253738_40 (sequence is synthesized)
aaaggctcataggatacctttaaagtttaatgaaaagaaagcagcatctagacatatccgggtgacgtttttgaatttcaaagacgaaacattttacaagcatccagtcagagaaagcag

SEQ ID NO: 822872 - DNA, 120 bp, Artificial Sequence
  ENSG00000253738_41 (sequence is synthesized)
gttacttacaaaggggcaaaagtcaggctgacctcagatttttctcctgcaattctaaatgccagaagacagtggaacaatatctagagtgttaagggaaaataattttgagccaagaat

SEQ ID NO: 822873 - DNA, 120 bp, Artificial Sequence
  ENSG00000253738_42 (sequence is synthesized)
tatatactctgccaagttatcatttctttacaaaggaaactggaagacattcttagatatacaggggttaggaaagtatatcaaccaagaactttccctgaaaattttgctgaaggattt

SEQ ID NO: 822874 - DNA, 120 bp, Artificial Sequence
  ENSG00000253738_43 (sequence is synthesized)
cagagaacctgaattaaaataagaatagggaggcaattgtatgaaagaactgatggtatgcattaaaactagttaaggagcattaagtttaaattgttatgtatagggcattaaaactaa

SEQ ID NO: 822875 - DNA, 120 bp, Artificial Sequence
  ENSG00000253738_44 (sequence is synthesized)
atacaaaaatagaaacataagctgggtgtaaaatttcagtttacgtttaaactggaagggcataccacatgttcaatatattggacaaatactgttttatttttagcatgtagtattgta

SEQ ID NO: 822876 - DNA, 120 bp, Artificial Sequence
  ENSG00000253738_45 (sequence is synthesized)
gatacaaatacgcatgttcttaagctaaacctaagtaaaagggctttgtcactgtagatttgacaaataacattctaaatgtcaaatctgacaattggaaaacagtacagttttatttcc

SEQ ID NO: 822877 - DNA, 120 bp, Artificial Sequence
  ENSG00000253738_46 (sequence is synthesized)
cttatttttaagtatagcaggaaaaaaataacaagtttgtccatgttactactgatactgtaaagaaacttccaaatcactggtttgggagggggtggatacatcctcattttctgtaca

SEQ ID NO: 822878 - DNA, 120 bp, Artificial Sequence
  ENSG00000253738_47 (sequence is synthesized)
tgatgcatggggaaaaacagtagttactgcatcatatagttccaagtaaatcatatagttccaagtaaatttgacatggaaataagtgttaactacaaaaatagaatatatacattccaa

SEQ ID NO: 822879 - DNA, 120 bp, Artificial Sequence
  ENSG00000253738_48 (sequence is synthesized)
tgtttggaaaagaagtggtaaaaagaaaaatagcaaaaagacactaaaattagcaaaaagtagattgacagtacagatgacctataaactggttaaatagccctattacaattgaaattg

SEQ ID NO: 822880 - DNA, 120 bp, Artificial Sequence
  ENSG00000253738_49 (sequence is synthesized)
ggtcaaaaatcaatctctaacctgagatacatttgtataaaacaaatgatcaaagagtttaaagataatggaaactataaatcatagaaatggcaacatttttcttaaaatctaaacata

SEQ ID NO: 822881 - DNA, 120 bp, Artificial Sequence
  ENSG00000253738_50 (sequence is synthesized)
agacattttatgtaaaacatacaatataggatgtaacatttaacaaactatatggtaaataatatgacattaatatataaaatatatgttccagatcttgatgtgggtgatagttttact

SEQ ID NO: 822882 - DNA, 120 bp, Artificial Sequence
  ENSG00000253738_51 (sequence is synthesized)
gggtgatagttttacttatgtacatcgatatacatctatttaaaaacatgtacatttaaattgttgcattttatgtatttaaaatttattgagtaatccttctgtatgtattattaaaga

SEQ ID NO: 822883 - DNA, 120 bp, Artificial Sequence
  ENSG00000253738_52 (sequence is synthesized)
aggggaagtctagggtgatccagataagtcacgccttgagattccccagaatcgacccgccacgcgcccttcccccagtcgcggcggcttccagattcccacttccttccgcctcacctt

SEQ ID NO: 822884 - DNA, 120 bp, Artificial Sequence
  ENSG00000253738_53 (sequence is synthesized)
gcaactccttcttctctttgcgatgccttctcagcagctgctcttcctcatcaagctcttcggtcaataccgcctccatgacgaccaggtaccccagcacacgcgctagaagaaacctgc

SEQ ID NO: 822885 - DNA, 120 bp, Artificial Sequence
  ENSG00000253738_54 (sequence is synthesized)
accggctagtaggcaccttccacccctcaaccctcacccggggctccattggctacggctgggacccagccccgccttcaaggcggcaccggatctaagcaaagccactgcaaagacgag

SEQ ID NO: 822886 - DNA, 120 bp, Artificial Sequence
  ENSG00000253738_55 (sequence is synthesized)
gcagtggcaacatcatagctcactgcagtctcccaactcctaggctcaagtaatcctcctgcctcggcctcccaaagcactaagattacaaatgtgagccaccaacccagcgcagttaca

SEQ ID NO: 822887 - DNA, 120 bp, Artificial Sequence
  ENSG00000253738_56 (sequence is synthesized)
gcttttgataaatcaagtaaatgggaagttaagagataaaaggtagttaaatagttaaaatatgtgtgtaatatatatattacttttctaccttatttttgcattctcttcaaattatcc

SEQ ID NO: 822888 - DNA, 120 bp, Artificial Sequence
  ENSG00000253738_57 (sequence is synthesized)
tgaagcatttctaaatgattttatactcaaatgtagagaaaactttaacatatttctagaaagcactcgtgaccacattacaaaaaaaaaaaaaccctagaaaataataattttcaaccc

SEQ ID NO: 822889 - DNA, 120 bp, Artificial Sequence
  ENSG00000253738_58 (sequence is synthesized)
tgaaaaatcacacacttggaatttttttaatgttcttaaataatctttcggtcaaagaggaaattataacaaatactgatgatttaggaaatacaacaatgaagataattatactttaca

SEQ ID NO: 822890 - DNA, 120 bp, Artificial Sequence
  ENSG00000253738_59 (sequence is synthesized)
tgctatgggatggatgtagaaaaggcaagaaacaggaattaaaacactaagtgaagaatggaatatgcatgggaaggactcagtaactaaagttcttcaattttgctacctttcaaatga

SEQ ID NO: 822891 - DNA, 120 bp, Artificial Sequence
  ENSG00000253738_60 (sequence is synthesized)
ggaagtagtctgccttcatagtggatttatccccaatatgttatgagaccacaatttacttatttctcccaattgagctttaatgtagcataatgaattctgagcatctgacaattgatt

SEQ ID NO: 822892 - DNA, 120 bp, Artificial Sequence
  ENSG00000253738_61 (sequence is synthesized)
ctcaaggaaaggaaagcccaagtctccttttttctttcccctccctgcactgtttccccttcacagacctccatataacaatattttaatgtacaacacttttattgaaaagtatggcct

SEQ ID NO: 822893 - DNA, 120 bp, Artificial Sequence
  ENSG00000253738_62 (sequence is synthesized)
tcagaaaaacagcattggcattacctggaaacttgttagaaatgcagtatctcaggtcaatagcagcatagtattagattataaaatcttacatatttacaagacttctcagcacagtgc

SEQ ID NO: 822894 - DNA, 120 bp, Artificial Sequence
  ENSG00000253738_63 (sequence is synthesized)
attatacattgtgaatgctcagtaaatgctatccagaatatatgtagaaaaaaatatttggatgttgccaaaacattaatagtacttatatctgtgtggcagctttttggatagttattt

SEQ ID NO: 822895 - DNA, 120 bp, Artificial Sequence
  ENSG00000253738_64 (sequence is synthesized)
acttctttatgttttttaacatatattaaaaagctattttgcttttataaattaaacatttccgcagaaattttgaaaagtatatagatgatgataaatgttacctgttgtattagtaca

SEQ ID NO: 822896 - DNA, 86 bp, Artificial Sequence
  ENSG00000253738_65 (sequence is synthesized)
ttataaggaaaagaggtttaattgacacaaaattatgtcacaaggtgacaggagagagagtgcaaagcaaagaggggaaaagcccc

SEQ ID NO: 822897 - DNA, 68 bp, Artificial Sequence
  ENSG00000253738_66 (sequence is synthesized)
ctgggaaggcctcaggaaacttaaaattatgtcacaaggtgacaggagagagagtgcaaagcaaagac

SEQ ID NO: 822898 - DNA, 120 bp, Artificial Sequence
  ENSG00000253738_67 (sequence is synthesized)
cctcccacgaggttcttcccccaacacgtgggcattacaatttgaattacaatgaagatgagatttgggtggggagaaagagccagactgtttcacctatgatcccaccatgtagagaga

SEQ ID NO: 822899 - DNA, 120 bp, Artificial Sequence
  ENSG00000253738_68 (sequence is synthesized)
ccctgaaaacagtatatttccttctggtcaattaaattactattcaaatttagaataatactatatataaatttctgcttcattcacttgcagttatagacattttgccaagtcaattat

SEQ ID NO: 822900 - DNA, 120 bp, Artificial Sequence
  ENSG00000253738_69 (sequence is synthesized)
ttttcaaaaacatttttaaccgctgcatattttcccatcacacaaaatagctgtcactttttagcccttatcttgcttaacttctcagcaatatttgacactatttactgcaatattggc

SEQ ID NO: 822901 - DNA, 120 bp, Artificial Sequence
  ENSG00000253738_70 (sequence is synthesized)
atgattgactctcccttctgtccacacttctacaaaaacccaatgtgctcttcccacccagctgtcttagtttcctgtttaacctgcttgatttctctccatagcagtcaacgccatctg

SEQ ID NO: 822902 - DNA, 120 bp, Artificial Sequence
  ENSG00000253738_71 (sequence is synthesized)
agatgtccttgttaaattgggtgttgcctgtctcctctcttggcttctatgatacaccctcttcctttttatctcctttggttctggatgctccttattgactcttctatctcttcctga

SEQ ID NO: 822903 - DNA, 120 bp, Artificial Sequence
  ENSG00000253738_72 (sequence is synthesized)
aatttgctgagttccctagggctctggcccaggctcattttcactctacatactttctgccaacttcatcccattcttcaattaccacatctatgtgccaactggacctttctctcaagt

SEQ ID NO: 822904 - DNA, 120 bp, Artificial Sequence
  ENSG00000253738_73 (sequence is synthesized)
tctagtgtgtattaagattctccggataaacagaactaaaggaatataatagatatgtaagaggatatttattatgggaattggctcacacaattaagttggttctctgggtttttggtt

SEQ ID NO: 822905 - DNA, 120 bp, Artificial Sequence
  ENSG00000253738_74 (sequence is synthesized)
tgtttagtcttttgttcttttaaactaaaatttatgtgtttccaggattctttttgaaatcttagtacatgacaccactctacaccccagacagccccgtatattctggattcatctctg

SEQ ID NO: 822906 - DNA, 120 bp, Artificial Sequence
  ENSG00000253738_75 (sequence is synthesized)
atcccatttactccgagtcctagagctttagccatatttatttttttctgtgtttacaaaaatcagatttcctcctgtcaccaaagttttgcctaggtgcttccttgacttgggaaaaac

SEQ ID NO: 822907 - DNA, 120 bp, Artificial Sequence
  ENSG00000253738_76 (sequence is synthesized)
attcctgaaattttgtaaaactgactttttgttattaaggtcaaaatttatgtttcacttcatcagagatgccttatgtagtaacaacctacataatggtatccaccacattcatatcat

SEQ ID NO: 822908 - DNA, 120 bp, Artificial Sequence
  ENSG00000253738_77 (sequence is synthesized)
ctattgcaaggaactgtcaatcactttgcctgctctatcactgtcacttattactgtctgacagaatctccttttggctttctaaaaacagttttactgagatataattaacatgtaata

SEQ ID NO: 822909 - DNA, 120 bp, Artificial Sequence
  ENSG00000253736_0 (sequence is synthesized)
ggaggcatgtcatcattaattgacagcattttcctttcttaatggtgcacagattaatgaaagggcctcagaactgatgacatcttagagccagtagatgcagtaaagtataaaaggttt

SEQ ID NO: 822910 - DNA, 120 bp, Artificial Sequence
  ENSG00000253736_1 (sequence is synthesized)
aagatggagaagaattaaagtgctacagtcattcagttaacatccgttctagtagtgggacagacttgttaagtgccaggatagaaactgggtagcccaggaaagatgcccagaggaggg

SEQ ID NO: 822911 - DNA, 120 bp, Artificial Sequence
  ENSG00000253736_2 (sequence is synthesized)
ccaagagcccaggagagggaccgggaacagcagggcctccgtgactcacacaagcttcatccctgaaccaaggacgcagcctgccaacaatggccccaagccacaccccgccacaggggg

SEQ ID NO: 822912 - DNA, 120 bp, Artificial Sequence
  ENSG00000253736_3 (sequence is synthesized)
aactgatgctgcggtgagaagtgacagctttctgttgactcttttttttttcaagcagaatatgaattgagacatactttcattttcataatcagaacctaacacttagtaaccaatgtt

SEQ ID NO: 822913 - DNA, 120 bp, Artificial Sequence
  ENSG00000253736_4 (sequence is synthesized)
ggtggaagcaaatgagatcacagtttgtctgttccaaactcatctctgggaaaaggaggaggaaaaattattggcactatgttcagaatcatagctgaagatgcagaaattgttcatccc

SEQ ID NO: 822914 - DNA, 120 bp, Artificial Sequence
  ENSG00000253736_5 (sequence is synthesized)
acccaagtccctttacaggaaaagtttgccaacccctgataggagctcatggatgaaaagtactgtagaacaatgcctgacacagatacagatctcaaagcaaggcttgttggacaaata

SEQ ID NO: 822915 - DNA, 120 bp, Artificial Sequence
  ENSG00000253736_6 (sequence is synthesized)
aacgaaaagagaagcagcagaccaggagaaaatatttgcaaaaccaaatctgataacggacttgtatccagtatttgcaaagaacttctaaacttaataacaacaacgacgacaaaggag

SEQ ID NO: 822916 - DNA, 120 bp, Artificial Sequence
  ENSG00000253736_7 (sequence is synthesized)
caaaatccctggtggtctagcagtgaggattaaaaaagaaaagaagcaaaatatatgaacagctgtttctccaaaggagatataccaatagctaataaaatatgcacagatgctccacaa

SEQ ID NO: 822917 - DNA, 87 bp, Artificial Sequence
  ENSG00000253737_0 (sequence is synthesized)
ttgctaaaatttacactgcctacgaaagctgacctggaatgtgaaccagaaattgtccttaaccaaatcacctcactgtctctcact

SEQ ID NO: 822918 - DNA, 120 bp, Artificial Sequence
  ENSG00000253737_1 (sequence is synthesized)
atcttgctttgttttgtttagaacttttccaggagttgttcactgttttggaaaatcacattagcaatgtcaacattactcatggaattcgagcctccagtacaatacacccgatgggcc

SEQ ID NO: 822919 - DNA, 120 bp, Artificial Sequence
  ENSG00000253737_2 (sequence is synthesized)
tgccccagtggctgccacattgactgtgattctaggtatggatccaggcacctgcaatgttatttcttttagcacagttctgccaagaatttgcatgttgaaatacatgttgttttattg

SEQ ID NO: 822920 - DNA, 120 bp, Artificial Sequence
  ENSG00000253734_0 (sequence is synthesized)
gacgatcatggcatggaaagtaaaaatgactgtatgtgtcagtgtcagagaggcctaaggaactttcaccaagtctcctacagaacagagaagagaggctatgatttccttatgttcctg

SEQ ID NO: 822921 - DNA, 120 bp, Artificial Sequence
  ENSG00000253734_1 (sequence is synthesized)
agaaaggcaaagcatttgtctgaaagcgaaagccaggagatcaaagtaacttccctgtcacaagaggaaacatgagagcagaattcagcatgagttttgtatatggcaatcaagtatatt

SEQ ID NO: 822922 - DNA, 120 bp, Artificial Sequence
  ENSG00000253734_2 (sequence is synthesized)
catggctatctaaatgaatgtccacgtagaagtcaggcagcacaaagaacaagatataacagctgaacgtcccactgaaaaccagctaagtgttgatcacaaccatcaaaaaaattcttg

SEQ ID NO: 822923 - DNA, 120 bp, Artificial Sequence
  ENSG00000253734_3 (sequence is synthesized)
tctttacttacagtgtgactgtaactttcagaaagtaacacatcagtaaaatgcagctactttgactcgaagataacagccatactgttcacagtgaggtccacagaccagcagcttcat

SEQ ID NO: 822924 - DNA, 120 bp, Artificial Sequence
  ENSG00000253734_4 (sequence is synthesized)
cattgtcatgtgaggatgtgtcagaaatgcagaacctcaggctccacctcagacctactatggaatcagaatcttcgccttattaagatccccaggggactgggtgcagtggctcatacc

SEQ ID NO: 822925 - DNA, 120 bp, Artificial Sequence
  ENSG00000253734_5 (sequence is synthesized)
tgacagagtgagatcttgtctcaaaacaacagcaacaacaaaaagatgacccccaggcaattcggcaattcatatgcacatgcaagtttgagaacaacgggaaatgacgagaaaataaag

SEQ ID NO: 822926 - DNA, 120 bp, Artificial Sequence
  ENSG00000253734_6 (sequence is synthesized)
aaagaactgagaacaatctcttataccaccccacaaagattgtttctatttttctaaccttgatgtcttctgtatttcagtttgtaagttccttgatggcaggaactcgattcacatcat

SEQ ID NO: 822927 - DNA, 120 bp, Artificial Sequence
  ENSG00000253734_7 (sequence is synthesized)
tcaatggcatttccaatactgcgtgacatctagtaaatgagaaatgactatttgttgactacatgctgcccaaatcactatatcaggttcagatttctctgagccccagaattattactt

SEQ ID NO: 822928 - DNA, 120 bp, Artificial Sequence
  ENSG00000253734_8 (sequence is synthesized)
tgatttgggcatttcctgatttttttatagacaccactaattcatcatgtgcaaattgatttctcacttatatctgcttcatctctagttttccttctttgtgaggatggtaccccattt

SEQ ID NO: 822929 - DNA, 120 bp, Artificial Sequence
  ENSG00000253734_9 (sequence is synthesized)
tcacagtcatgcagtgactacattcttacattccacatacatgcatacagaatccatcacattatttataccatcatggctgccccctgtattgtttgattatttcttgactgatttatc

SEQ ID NO: 822930 - DNA, 120 bp, Artificial Sequence
  ENSG00000253734_10 (sequence is synthesized)
ttcatggtgttctttcttgctaccttgtctattgtgttacatctcatgtatctattctttacactgcctccaaggtggttaccccaaatctaaacctgatcaagccaccttttcttctct

SEQ ID NO: 822931 - DNA, 120 bp, Artificial Sequence
  ENSG00000253734_11 (sequence is synthesized)
tctttttctttttttttttttttcctaaatagcttctggtgcctttcaggataaaatttaatctctgtagaggattttccaaggtgcatcattatctgctccttgtctacttctctactc

SEQ ID NO: 822932 - DNA, 120 bp, Artificial Sequence
  ENSG00000253734_12 (sequence is synthesized)
actctcctatgttagctctctcctgcccaggtgctctatcactataatcccgcctcattctatgacttgctataataagtgcagtttgctgtctcttgcatccagaactggctaatcttt

SEQ ID NO: 822933 - DNA, 120 bp, Artificial Sequence
  ENSG00000253734_13 (sequence is synthesized)
ctcttccatcttttgccactgatcttgtgtacatctccttcatagaacttaccacgttgcatcacaactttgtttacgtattagatccagagactttatcttatctctacataacaagag

SEQ ID NO: 822934 - DNA, 120 bp, Artificial Sequence
  ENSG00000253734_14 (sequence is synthesized)
actggttctttagaacaaatccacagacttttatctctatatctctataacatatcttggtttagaagtcattatagatctcaattacaaatattttgaattgatgagtgtataatttgg

SEQ ID NO: 822935 - DNA, 120 bp, Artificial Sequence
  ENSG00000253734_15 (sequence is synthesized)
aggcaggaattttcaaacaggggcttagaggaaagttgaagattataaatacctctggagagcaaggatcatgccttgtttaccagtgagctctcagagcttatcactgtctttgaaata

SEQ ID NO: 822936 - DNA, 120 bp, Artificial Sequence
  ENSG00000253734_16 (sequence is synthesized)
caatatgtactccataaatatttgttgaagaagcaaagggatagatggaataatggatgaatagatgtggtcaacaaaatattgctataaaactttattctctgcttgataaaggcattc

SEQ ID NO: 822937 - DNA, 120 bp, Artificial Sequence
  ENSG00000253734_17 (sequence is synthesized)
tcaccacctgctttgtttctccagattttgtcttctactccctccaactgggtctggtgacagacagacctgtaggcccaggcctgtgctagttccgagctaggtatgacagggacagga

SEQ ID NO: 822938 - DNA, 120 bp, Artificial Sequence
  ENSG00000253734_18 (sequence is synthesized)
gttatatcagcaccctcagtcctatccttctgggattcagttttgtcgattacgaaggcctggtgcatcagcaataagttctgtgactatgtgtcagcaacttattaataacagccttgg

SEQ ID NO: 822939 - DNA, 120 bp, Artificial Sequence
  ENSG00000253734_19 (sequence is synthesized)
gtgagcaaggcacgtttggcagagttatttcatcatccctcctatcagtttcaattttctctgctatatgccagtacttcccacccagacttgacttcctccatagacagcttgtgggca

SEQ ID NO: 822940 - DNA, 120 bp, Artificial Sequence
  ENSG00000253734_20 (sequence is synthesized)
tcattttgtgcccctcaaatgtcacactctgctacctgccctgttcctgattattaggattatcaactacacgataatttctgatgctgaatctgtatatctctgttttcacctccctcc

SEQ ID NO: 822941 - DNA, 120 bp, Artificial Sequence
  ENSG00000253734_21 (sequence is synthesized)
aaccctacatttcttcagagatggaaatctagaatttcttgcagcttggcagcataggagccaatggggtagcaatgtgaaagtcaagaagtacacctcatctccaggacagcaagagtg

SEQ ID NO: 822942 - DNA, 120 bp, Artificial Sequence
  ENSG00000253734_22 (sequence is synthesized)
atccctgcctgacaatgatgctgggagaagatgtgccggtgctcaagaaggcaccgtccctcatgcacagccacatgccacaggtcacacaacattggcaggagtccagaccactttttg

SEQ ID NO: 822943 - DNA, 120 bp, Artificial Sequence
  ENSG00000253734_23 (sequence is synthesized)
tctagtagtagctttactgggacctactataacttgggcaagttaagtcttcttcctggattttgtttctctttaaacgagagaataagagtagatgggctacaaagttcccaaagaact

SEQ ID NO: 822944 - DNA, 120 bp, Artificial Sequence
  ENSG00000253734_24 (sequence is synthesized)
tagctaagattctggcatatagttacagtatggattaagtagaaggtgatgaggcagagagtgaacatgacattggtgtgtggccagatttacacttggaccttctttagcgggggcacc

SEQ ID NO: 822945 - DNA, 120 bp, Artificial Sequence
  ENSG00000253734_25 (sequence is synthesized)
cgttgaaaatcagcctgcaaatcctcaataaatccagcactgccagtttttttcattctgaaacagactgcatttggtgaggcaggagggtgagcattatataaaagagatattttgcat

SEQ ID NO: 822946 - DNA, 120 bp, Artificial Sequence
  ENSG00000253734_26 (sequence is synthesized)
tttaggagcaatgatatatacaaaataagtactatagcattaaaatacaatcacactcattgttgaaagatgtttacattatgagaaaaaaatccatgctcctgacatcaactgaagggg

SEQ ID NO: 822947 - DNA, 120 bp, Artificial Sequence
  ENSG00000253734_27 (sequence is synthesized)
catctctcacaagacctggggagtggaagtatggaatctaatgttactacagcaagtgaatccaccttgcatagagtgaaatatttgtaaaactcctaattagaacagatttttaaaaaa

SEQ ID NO: 822948 - DNA, 120 bp, Artificial Sequence
  ENSG00000253734_28 (sequence is synthesized)
agatggtgccaaaggatggaatgatcacctgcaaagtggactaattcagcagaagcagtcctttagagacacgggtgacctgagaaagtaagcaccaaccctccaccctacacctggaaa

SEQ ID NO: 822949 - DNA, 120 bp, Artificial Sequence
  ENSG00000253734_29 (sequence is synthesized)
ttctcatcaacactttgagtacaaaggacctctatgaactgtgaatccgatgtttctatcttaagaggcagaaaaacctcagctggcatgtagttttctaggaggagaagggaacgctgg

SEQ ID NO: 822950 - DNA, 120 bp, Artificial Sequence
  ENSG00000253734_30 (sequence is synthesized)
aaagatgttttgtttcgcagaagcctgcctgtactgagtcttctgaattccatatggagttctctgaattcccagacaccctgtctttggcagaacccaactgctgagactgacagtagc

SEQ ID NO: 822951 - DNA, 120 bp, Artificial Sequence
  ENSG00000253734_31 (sequence is synthesized)
cacctgagcatattgtatgttgtaagtgattcaacctcaagcgcatgactggctgggcttaaggtaaaatgtgatccctttcctatgctttgaaagattctttggccatatggcaggaca

SEQ ID NO: 822952 - DNA, 120 bp, Artificial Sequence
  ENSG00000253734_32 (sequence is synthesized)
aaaagaaactcaaagaggatctgctaagccctcaagtgataaggtgcaagaaaaagaggaacccaaactttctgaggcaatggaggaggttgaacaatatcaactctccttttgccacct

SEQ ID NO: 822953 - DNA, 120 bp, Artificial Sequence
  ENSG00000253734_33 (sequence is synthesized)
ctttcaaatacatattccaaaacaggccagagcttgtgttagtctaggatagtcacaaccatccagttatctttcagggtttcatcttccctctaactatgataaaatataaagaacaag

SEQ ID NO: 822954 - DNA, 120 bp, Artificial Sequence
  ENSG00000253735_0 (sequence is synthesized)
caggaagaccatcatattggactagaacctaccctaataatcccaatgaaacttaatgacttctttgaaggccctatctccatataaagtcatattctaaggttcagaaatcctaaggaa

SEQ ID NO: 822955 - DNA, 120 bp, Artificial Sequence
  ENSG00000253735_1 (sequence is synthesized)
cccaagcaagattttttacaaagaaagaagtgttcacccagatacagcctaatgatacttcaaagagacagattgcttacaaaggaatgacaatgaaattgacttcttgatagcatccat

SEQ ID NO: 822956 - DNA, 120 bp, Artificial Sequence
  ENSG00000253735_2 (sequence is synthesized)
agaatgctctgatgacactggaaaagctttctttcattcatccacccactggtgacttggaaaatagcctcttcaccttcaaatgagagaataatgctgaatttttctgaatttctaaga

SEQ ID NO: 822957 - DNA, 120 bp, Artificial Sequence
  ENSG00000253735_3 (sequence is synthesized)
cgggaagtgatgtatcactaaaacggtgagctctcactgaaacaggaaatcttctaccagtgtgggtctgagttgatctctccctccctccctccaaccatccaataaatatttcatttt

SEQ ID NO: 822958 - DNA, 120 bp, Artificial Sequence
  ENSG00000253732_0 (sequence is synthesized)
acttcagactccactcttccttggagagccatcctccatttcctgcaggtctggtcagagcccctttcatagaaatggaaacacttacttgaattggtttctgcagaagccagaccaacc

SEQ ID NO: 822959 - DNA, 120 bp, Artificial Sequence
  ENSG00000253732_1 (sequence is synthesized)
gtctcgggcaggttcagcagcagtggttcagggacagatttcatattgaaaatcagcagggtagaggctgaggacgttggggtttattactgcctgcaaggtacacaagtgcctcccaca

SEQ ID NO: 822960 - DNA, 120 bp, Artificial Sequence
  ENSG00000253730_0 (sequence is synthesized)
atgtacccagaatcccccgcctttttatcggtggatttcagccctcaaagcgttccgtgagcctctgaccgcccaaatccatcacacatgagttggaatgccagggaccattcccggcca

SEQ ID NO: 822961 - DNA, 120 bp, Artificial Sequence
  ENSG00000253730_1 (sequence is synthesized)
aacgttagattacaggagtaagagagaagaggagggactgtccgaggtgcctcggcactatggctgcacagctggatctctggacacggagccctggaccgtttccacccagacactccc

SEQ ID NO: 822962 - DNA, 120 bp, Artificial Sequence
  ENSG00000253730_2 (sequence is synthesized)
aagagactaataagaaagcatccagtttcttcggtctctgacgttgttgtctgcacaagagagttaaggcagccatcttgggaccatgagggagccagtctaagaggcaaatcaacacaa

SEQ ID NO: 822963 - DNA, 120 bp, Artificial Sequence
  ENSG00000253730_3 (sequence is synthesized)
tgagagggtgttggaaaaagacaaaaagaacctggtccttgatgtcacagccaggcctctgaattaaccacccccaggacttcttgttacgtgagctaataaacgttcctttttgcttaa

SEQ ID NO: 822964 - DNA, 120 bp, Artificial Sequence
  ENSG00000184224_0 (sequence is synthesized)
cctctgctgtggtcctcgtgataagagtgacctttttggcctgctctccccagctcttttccagtcctcatgaagcagggtatcagcattgctgagtggcctgcccaggatgacacaact

SEQ ID NO: 822965 - DNA, 120 bp, Artificial Sequence
  ENSG00000184224_1 (sequence is synthesized)
gccagaactcggcctgaggtctcctaacaacaaatcccccactggtccccacccactggagcacctacttgccaggcttctcaagcgaagaaggagatccactctgatgtcatctcccag

SEQ ID NO: 822966 - DNA, 120 bp, Artificial Sequence
  ENSG00000184224_2 (sequence is synthesized)
gagccttctctgcagcatctcaggtcctggctctcacctcctcagcacccatcccatcctgtgtcactctgtatatcagcctccccagccagcctccaggccacaagccaagaggtatca

SEQ ID NO: 822967 - DNA, 120 bp, Artificial Sequence
  ENSG00000184224_3 (sequence is synthesized)
agggctcctccctgtcccactggccccacatccactgtgtctatctggtcaactttaccttccaaacattccctgcacagtgatagatggctgtggccctgtcatctctcacctgaaatt

SEQ ID NO: 822968 - DNA, 120 bp, Artificial Sequence
  ENSG00000184224_4 (sequence is synthesized)
agccccttctctgcaaacatggaacagtgggattattataaatctcagacccgttttgcccctttcctgcctgagagtttttgtggttccccactgccctcagaacaaagctcaagaccc

SEQ ID NO: 822969 - DNA, 120 bp, Artificial Sequence
  ENSG00000184224_5 (sequence is synthesized)
tttggcctggcattcaaggtcctttgtgctgccacctgtcaacctccccagttccagctcctttggctttgcccatacaagctggatctgcaccagaggatctgtcttcctcccaacttg

SEQ ID NO: 822970 - DNA, 120 bp, Artificial Sequence
  ENSG00000184224_6 (sequence is synthesized)
gccctagtcctcctaggagccctttggacgtcacctcccccaggaagctttctgcaaccaccctacaaccgtccctataaactttataaaaccaattagtgtggggaaaagcaagagaga

SEQ ID NO: 822971 - DNA, 120 bp, Artificial Sequence
  ENSG00000184224_7 (sequence is synthesized)
ctctttcgctccctccttagctcgccggctcccagcctttgatgccacaagtaaacaaacctcgcatgtcgccttctgctgggtcctggaggtcttggaagcctgatgaactcgtctttt

SEQ ID NO: 822972 - DNA, 120 bp, Artificial Sequence
  ENSG00000184224_8 (sequence is synthesized)
tcagtttcctggaaccctctgctgtggtcctcgtgataagagtgacctttttggcctgctctccccagctcttttccagtcctcatgcagggtatcagcattgctgagtggcctgcccag

SEQ ID NO: 822973 - DNA, 120 bp, Artificial Sequence
  ENSG00000184224_9 (sequence is synthesized)
cctacaaattagggaagaagtagggggaaaagatgaaaataaaccaagcctgcagcatactcagtattcatcatgaggtcagctgctctctgacctgcttcctcatggctggttggtgcc

SEQ ID NO: 822974 - DNA, 120 bp, Artificial Sequence
  ENSG00000184224_10 (sequence is synthesized)
tgttgtcccggagtgacaaagaccctagattatagctgcccttaactgctgtataaataacaacttgaacatgaaatgctaaattttccttttgaagtattccttcagatcctgcatgct

SEQ ID NO: 822975 - DNA, 120 bp, Artificial Sequence
  ENSG00000184224_11 (sequence is synthesized)
gataaaactactgactcaactggtccccatgaggagctggctcaccaaagaatgcggtttccaatcccaattatttcatgccccttgcttaggcaatcaacaatcccaaatttccagccc

SEQ ID NO: 822976 - DNA, 120 bp, Artificial Sequence
  ENSG00000184224_12 (sequence is synthesized)
cttgccctccacaatctccttaaaaaattcagtccaaaactccttggggagatggatttgaaggtctcctcccatctccaaacttggtgccctgcaatcattaaactctttctctgctgc

SEQ ID NO: 822977 - DNA, 120 bp, Artificial Sequence
  ENSG00000248629_0 (sequence is synthesized)
gtttgcttccccttccaccatgattgtcccatgtaaaatttccctgttcaacacgaagaaaaaagagaaaggccatctcttctataacagaatggacatttaacactctaagttattctt

SEQ ID NO: 822978 - DNA, 120 bp, Artificial Sequence
  ENSG00000248629_1 (sequence is synthesized)
gttattctttggtttgtcttcagtataaatgtttataatgtcaataatattgaaattggtcattttgtttctcccacagcttgtgctctggggcaaaagataatatatctttcaaataaa

SEQ ID NO: 822979 - DNA, 120 bp, Artificial Sequence
  ENSG00000204464_0 (sequence is synthesized)
aggtcatagaagtttggcttctctcattgacctggaaggatgccgtcatccactctgacctgcaaaccttttgatctcaaacagcgatcttccaggcgtggccccaaatcaacagcatca

SEQ ID NO: 822980 - DNA, 120 bp, Artificial Sequence
  ENSG00000204464_1 (sequence is synthesized)
gctcaccctgggagagacagtacgcgtgttctaagctaccaacagacttcctcagatgcagtgagtcagtacaaacacacaggcaaggttgaagaactctatggccttcgtctctcttgg

SEQ ID NO: 822981 - DNA, 120 bp, Artificial Sequence
  ENSG00000204464_2 (sequence is synthesized)
ctcagccaggcacagttcctcttagcccaagacaaaacagcctatgctgttaaatcagtggttctaccagcttccaatcataaaaccaaggggcaataatacataaaattggaacttata

SEQ ID NO: 822982 - DNA, 120 bp, Artificial Sequence
  ENSG00000204464_3 (sequence is synthesized)
tggattctttcccaaaacccaaaggcccagtccagtcacgagaagacatcaggcaaaccgaaattcagggaagttctacaaaacactaaccagtactcttcaaagttctcaaggtcatga

SEQ ID NO: 822983 - DNA, 120 bp, Artificial Sequence
  ENSG00000204460_0 (sequence is synthesized)
aggaatgtgatatgcgacatacacttagcacatgctggttcctttctcttccttctgtaagtcagcactgaccttcagtccctgtgctgacatccctacccctgcctcactgcctatttg

SEQ ID NO: 822984 - DNA, 120 bp, Artificial Sequence
  ENSG00000204460_1 (sequence is synthesized)
aggaactttcctactcagtggtgccttattgaaatggagcatattcctgccacccataggttggagcacccacccctgctggacaagacccttcctgggggggccaccttggaactctga

SEQ ID NO: 822985 - DNA, 120 bp, Artificial Sequence
  ENSG00000204460_2 (sequence is synthesized)
atagagacttgaagagtgaggaagactaagaggctgctgccatttgaagatgaagtgtacaatacaacagggaatcaagtgaacagaaagtgttgatggggatcccagcagatagccaac

SEQ ID NO: 822986 - DNA, 120 bp, Artificial Sequence
  ENSG00000204460_3 (sequence is synthesized)
aaaagggaacctcacttctacagcagcaaggaactgcattctgccaaaaacctaatgaacttggaagcagattattttctggagtctgtagagagatgagcaggaagagggatattagaa

SEQ ID NO: 822987 - DNA, 120 bp, Artificial Sequence
  ENSG00000204460_4 (sequence is synthesized)
gagagaaagtgaaaactggactgaaacattgctagctggggatcttagcctctctttaggcaactcactcctggtcctgttctctgcacatgtgggaattataatgagcaccaagcagaa

SEQ ID NO: 822988 - DNA, 120 bp, Artificial Sequence
  ENSG00000204460_5 (sequence is synthesized)
tgaatgaaaataaatccagaccaagaaccactgaagaaactgcaacccacaagagaaaactagccagagtatctgcacaggaaggacaaggagacttctctttataataacagaacccag

SEQ ID NO: 822989 - DNA, 120 bp, Artificial Sequence
  ENSG00000204460_6 (sequence is synthesized)
aagacgacctacaaggttctgcccacaggggagattgtgacctattgctggccccaacaccaagtcgaagttacacatttgccttggccttgccctgagaaggtgctgtgacatattgct

SEQ ID NO: 822990 - DNA, 120 bp, Artificial Sequence
  ENSG00000204460_7 (sequence is synthesized)
gggcccagcaccaaggtgatgggactctcctctttctcctggaacctgtccacagtggggattgtgacatattgctgggcccagcaccactgtgatgtgactctcctctcgtgcctgggg

SEQ ID NO: 822991 - DNA, 120 bp, Artificial Sequence
  ENSG00000204460_8 (sequence is synthesized)
ccagcccactggggtaattgtgacatataactggacctagcccctaggttatgtgacttacctctccttcctgagccctgcccacaagggggcctcatgacatatctctggacccctcac

SEQ ID NO: 822992 - DNA, 120 bp, Artificial Sequence
  ENSG00000204460_9 (sequence is synthesized)
tattgctggacccaacacctaggtgatgtgactcttttctactgcttggctctgcccaaggagaaattgtgatgtatcactgggccgagcacctaggtgatgtgactctcctctcctgcc

SEQ ID NO: 822993 - DNA, 120 bp, Artificial Sequence
  ENSG00000204460_10 (sequence is synthesized)
tggctccagccaaaaggggggattgtgacatatcactggacccaacacctaggtgatgggactctcctcttttgcctgggcccacatattttgggtattgtgacctgggtgatgggagcc

SEQ ID NO: 822994 - DNA, 120 bp, Artificial Sequence
  ENSG00000204460_11 (sequence is synthesized)
tactgcttgaaccctacccagagggagctttgtgacatatctctgcatccatcacctaggagatgtgactctcctctcgtgcctggccccagccaaaaggggggatcgtgacatgtcact

SEQ ID NO: 822995 - DNA, 120 bp, Artificial Sequence
  ENSG00000204460_12 (sequence is synthesized)
ggattcatcacctaggtgatgggactcctcttttgtcttggtcccacatactgtgggtattgtgacataatgctgggcccaacacctgggtgatggaaggctcctgcctgggccctgctc

SEQ ID NO: 822996 - DNA, 120 bp, Artificial Sequence
  ENSG00000204460_13 (sequence is synthesized)
acagagagccttgtgacagatctctgcatccatcatcacctagatgatgtgactctcctgttctgcctgcaccctgcccatggggaagattgtaacatatccctgggtgctgttcccagt

SEQ ID NO: 822997 - DNA, 120 bp, Artificial Sequence
  ENSG00000204460_14 (sequence is synthesized)
cttgcctcatggcctttgccccagctgtgtcctctgccctgcaggatgcacctctgctccgtgtggctccctcccactctcactctccaaatgccccgaacccctgagccccactgcagc

SEQ ID NO: 822998 - DNA, 120 bp, Artificial Sequence
  ENSG00000204460_15 (sequence is synthesized)
cccactgtaccctggctctgcagcgctgcttcttcatgatgtgtgtcttccaacagcagacggggccatgaatgtggatgcctcattcactgctgtgtgccggcatccagagcaggactg

SEQ ID NO: 822999 - DNA, 120 bp, Artificial Sequence
  ENSG00000204460_16 (sequence is synthesized)
gagcccagagcaggcacctgactgatagttgttgaatgagtacagtaatgaatgacaatgaaagcactgtgtagaaacactggctgaatagtacctagaaagagaatgtctcaaatacct

SEQ ID NO: 823000 - DNA, 120 bp, Artificial Sequence
  ENSG00000204460_17 (sequence is synthesized)
acattagcaatgaaaaaaacactgctaattaatgaactaagcatctaattcaagaaacaaagcaacacatctaacttatagaaaaagtgaaaaaaataaaaaacataagatcaaaaactg

SEQ ID NO: 823001 - DNA, 120 bp, Artificial Sequence
  ENSG00000248624_0 (sequence is synthesized)
cttttcagcaaggtgtttggatggtcctgtgcaatgtctttgagggcaagatggtgctatgtggactggacagtagcagcatgtggtgatttgcagctgacccttgaatgcctggacagt

SEQ ID NO: 823002 - DNA, 120 bp, Artificial Sequence
  ENSG00000248624_1 (sequence is synthesized)
ggatggcggacaggtgttcatccagagagaaagttccagagaagcagaggactgattaaaacagcagatacgcatcaaaacagggaggaatcagcttgggacagtcaccaggtgggagga

SEQ ID NO: 823003 - DNA, 120 bp, Artificial Sequence
  ENSG00000248624_2 (sequence is synthesized)
agataacctggctgcgagtactctgcccccaactggtggaagggaggagatggtggcgagaaggtgcatctacttctgaagtgccttgggttggagtgaaacacctcacgtcctctcaca

SEQ ID NO: 823004 - DNA, 120 bp, Artificial Sequence
  ENSG00000248624_3 (sequence is synthesized)
tctcattagcaagaactaaccaaatagccctgctcagatgcaaagggagctggaaaaggtagcccgcaaggagtctacactatgaagggggaatatatggaattgtggtgtttgcctgct

SEQ ID NO: 823005 - DNA, 120 bp, Artificial Sequence
  ENSG00000280164_0 (sequence is synthesized)
gtttggcgggtctttgtctcttgctggcgctggcacaggaacttgggatccgtctcctctttcgcctcctccgctttgggagccccgggctactctttcacagcccctgttgccctgtga

SEQ ID NO: 823006 - DNA, 120 bp, Artificial Sequence
  ENSG00000280164_1 (sequence is synthesized)
tctgtaggtccttggggacgcacagttaagatgacaggacatcctggaagctgggaaatgatttcttccagaccttggctggagaaggaaagaagatttttgcagtggcaggaccaagtt

SEQ ID NO: 823007 - DNA, 120 bp, Artificial Sequence
  ENSG00000280164_2 (sequence is synthesized)
caaatgagtcatagccaagtttacagtaagatgtggtagtattctgttttgaaccgaggaccatgattggcaagcttgccacttggtcaagtgcttaccctctaaagatgtcttccttgg

SEQ ID NO: 823008 - DNA, 120 bp, Artificial Sequence
  ENSG00000280164_3 (sequence is synthesized)
tctttgcctccagctgggtgtcacaaactctgaactggattctaaggctttcatgaatgcacttatgtttcccgtggcagctgcattatgttgtgggggatgtgcatgccgaacctccca

SEQ ID NO: 823009 - DNA, 120 bp, Artificial Sequence
  ENSG00000280164_4 (sequence is synthesized)
agattcaaaaattctaaaataaattgctcaaatttccacattatgtaagctattaataaaatgtcttgtaggtgctacatatttattaaaatttttggttgtaattttaagctcactgca

SEQ ID NO: 823010 - DNA, 120 bp, Artificial Sequence
  ENSG00000280164_5 (sequence is synthesized)
ggcagaaaggaatcattaacatttatattcttttttttagtctgtatctaaatgatggtatattttaattccagatatttactttatactgcagtaatgctcgtcatattttgcaaaatt

SEQ ID NO: 823011 - DNA, 120 bp, Artificial Sequence
  ENSG00000280164_6 (sequence is synthesized)
tatgttgttcttttatttggaaatataaggcttttttagctcttgaaatctatattatagtcatataattttattatgttttgtggtaagaagtgcagcaacatattgagaacataataa

SEQ ID NO: 823012 - DNA, 120 bp, Artificial Sequence
  ENSG00000280164_7 (sequence is synthesized)
agcaacatattgagaacataataaaattatcctgtatttttaatgattatttattaaattcctctcattagagcctgttattaatgattgtaatgtattttctgtataattttactgcaa

SEQ ID NO: 823013 - DNA, 120 bp, Artificial Sequence
  ENSG00000280169_0 (sequence is synthesized)
gtggcaccagagtgagggctgggtagaggggatggctggtgatagctgaaggagccaggcagcggggaggcagagaaagaacttgctcttcctgctgctgagacgagagaaaggaaagac

SEQ ID NO: 823014 - DNA, 120 bp, Artificial Sequence
  ENSG00000280169_1 (sequence is synthesized)
gaggcagcacttgcaggaaaaggaaagcctaaatgcagccatgcagggaacaacgcagccatgcagggatgccctgtgctaagtgctgggcatgcaatgagactccatgaagccacagtg

SEQ ID NO: 823015 - DNA, 120 bp, Artificial Sequence
  ENSG00000280169_2 (sequence is synthesized)
tcattgaggggagacagaagacacacttgtcaaagggcgcctcgcgggagacagctgcacagcacaggcactctccctcagaaaccgctccttcagtaagaggtggtggcaccatccact

SEQ ID NO: 823016 - DNA, 120 bp, Artificial Sequence
  ENSG00000280169_3 (sequence is synthesized)
cgggcagggagactgccgccaggctgagaacttgcaaaatggaaagaagtgagaacagtcctatggaagcagcacagactttggaacagagttgtaagatgccaggacagagcaggtact

SEQ ID NO: 823017 - DNA, 120 bp, Artificial Sequence
  ENSG00000280169_4 (sequence is synthesized)
cagcacgcaatggtcattgttttcactattccggggattcaactgcaaaggaagaaaaatatttcatccaagagtggacaagcaggcttaggacagaggtaagaggagaagagagttgga

SEQ ID NO: 823018 - DNA, 120 bp, Artificial Sequence
  ENSG00000280169_5 (sequence is synthesized)
ggatagtgtttctgaagaaggctaattcccagggaggacttctgggaccttgcttaccgacgaccgaggttcacctgggtgtactgggccccgcactaagtagcctgtgtaatctcagtt

SEQ ID NO: 823019 - DNA, 120 bp, Artificial Sequence
  ENSG00000280169_6 (sequence is synthesized)
tatttaatgctctcaactctgtaaagtaggtggtattaccttcatttaacagatgaagaaactaagatgagggctctggcccgaagctggtgagaggcagcagcaggaactgagcctggg

SEQ ID NO: 823020 - DNA, 120 bp, Artificial Sequence
  ENSG00000280169_7 (sequence is synthesized)
cctgctggactccaaaagcctctctggctctgtcacttgcactgaccccaaggcccaagggaggtgaccctgtcaagtatggtggaggactcaggctctgcaatggcagagatggtttgc

SEQ ID NO: 823021 - DNA, 120 bp, Artificial Sequence
  ENSG00000280169_8 (sequence is synthesized)
aaagcaccctacacttccctatgctttttgttccctacttgttttaaattttatctgataaaccaaatccttctctgtatttcctgttttttaatttgtggagttttaaaaattgtgata

SEQ ID NO: 823022 - DNA, 120 bp, Artificial Sequence
  ENSG00000280169_9 (sequence is synthesized)
tcagttcagtagtgttaagtatatttgagttgtgaaaaaggtctccagaaccttttcatcttgcaaaactgaaactttgtacccattaaacaataaccacggaaagcaaaaccacagata

SEQ ID NO: 823023 - DNA, 120 bp, Artificial Sequence
  ENSG00000280169_10 (sequence is synthesized)
aggaggaattcctgttctatgctattttgattacagtaactttatgataagttttgaagtcaggaagtatgagacctccaacattgttcttttccaagatcacattgtctatttaaggtc

SEQ ID NO: 823024 - DNA, 120 bp, Artificial Sequence
  ENSG00000280169_11 (sequence is synthesized)
ctttgatatttccatatacatttttggattgggttttcctctttctgcattaaaggactgcattaatctgtagatcactttaggaaatattgacatctgaacaatattgtcttccaatcc

SEQ ID NO: 823025 - DNA, 120 bp, Artificial Sequence
  ENSG00000280169_12 (sequence is synthesized)
atgaacatgggatgtctttccatttatttatgtcctctttaattgctttcagcaatgtgttgtacttttcagtgtacacatcttgcctgcttggttaagtttattcctaagtattttatt

SEQ ID NO: 823026 - DNA, 120 bp, Artificial Sequence
  ENSG00000280169_13 (sequence is synthesized)
ctttttgatgctatcataaatggaatagtttgtcttttcagattgcttattgttagtgtataaaaatgcaataattatttgtgtgaattttgtctcctgcaacttcactgaatttgctta

SEQ ID NO: 823027 - DNA, 120 bp, Artificial Sequence
  ENSG00000280169_14 (sequence is synthesized)
ttagttctaaaagttttaaggtgaaatgtttacattttctatacaggaccatattgtttacaaatagagttaattttacttcttacctctgacttggatgccttttaaatttctttttct

SEQ ID NO: 823028 - DNA, 120 bp, Artificial Sequence
  ENSG00000280169_15 (sequence is synthesized)
tgcctgattgctccagctaggactcccagaactatgttcaacagaactgatgaaagcagcatccttttcttgttcctgatctcagaagaaaagctttcattctggcatcactgagtatca

SEQ ID NO: 823029 - DNA, 120 bp, Artificial Sequence
  ENSG00000280169_16 (sequence is synthesized)
tgttagctgtgggcttttcatatactgcctttatgatgttgaggtaatttccttctgttcctttgttgactgtttttaaatcatgaagttgtgttgaatcttgtcaaatgctttttctgt

SEQ ID NO: 823030 - DNA, 120 bp, Artificial Sequence
  ENSG00000280169_17 (sequence is synthesized)
atcaattgaagtgattgtgtgttttttccttcattctgttaatgtagtgtattacattgattgattttcttatattgaaacatccttgcattccaggaataaatcccacttggccattgc

SEQ ID NO: 823031 - DNA, 120 bp, Artificial Sequence
  ENSG00000241743_0 (sequence is synthesized)
agacattgtatggaaaagcatcgtgaaaatccgtcctgttctgttccgttctgattaccagtgcatgcagcccccagtcatgtacccactgcttgctcaatcattcacgaccctctcacg

SEQ ID NO: 823032 - DNA, 120 bp, Artificial Sequence
  ENSG00000241743_1 (sequence is synthesized)
gagttgtaagcccttaaaagggacagggattgcttacttgggagctcagttttttgagacgtaactctgccgacgcgcctggccaaataaagccctctccttcctcaactcggtgtctgt

SEQ ID NO: 823033 - DNA, 120 bp, Artificial Sequence
  ENSG00000241743_2 (sequence is synthesized)
aaataaagccctctccttcctcaactcggtgtctgtggctcgtcctgctacaatgcatctacccatacagggcttctgaggtgatcgggcagcgtcagtcttcagctgctaagccgagaa

SEQ ID NO: 823034 - DNA, 120 bp, Artificial Sequence
  ENSG00000241743_3 (sequence is synthesized)
tccaggggctctgggagtggctgccagatggtgtccggaatttcaaataatactgagttatgggaattgccacagtaagtaaagatctacagtcggggaaaaggatttataaggcgtatg

SEQ ID NO: 823035 - DNA, 120 bp, Artificial Sequence
  ENSG00000241743_4 (sequence is synthesized)
atttataaggcgtatgttttatagctcctgtatgagtaggcttttgatgcatcatatacatgctttgaaggtagtattatgcagggtactaaattgagttatacttacagtcaatgaata

SEQ ID NO: 823036 - DNA, 120 bp, Artificial Sequence
  ENSG00000241743_5 (sequence is synthesized)
tcatttgaccaatgacattttagaaaaatatctatataattttccaaggccatgtcttagaaattttgctctgagtcttatatctgaacatctcagagaatttttagagaaaacaatttc

SEQ ID NO: 823037 - DNA, 120 bp, Artificial Sequence
  ENSG00000241743_6 (sequence is synthesized)
acagataatgataattagataccttcactttgcaaatatatgaactgccttttgaatggcccttttagtaaaatgagattgattacgtcctcttcatagcagagattttaccacaaaaca

SEQ ID NO: 823038 - DNA, 120 bp, Artificial Sequence
  ENSG00000241743_7 (sequence is synthesized)
tcaatctattatgaaaagtacatacgtgtaacctggtatccttgcttggcagggtgatgttacatttaggtacatgaactacctactgtgataagctccctatctcttcaaatattaact

SEQ ID NO: 823039 - DNA, 120 bp, Artificial Sequence
  ENSG00000241743_8 (sequence is synthesized)
ctcctgctcattcctgtctgatgcctgaaattcctttaatattacaaaaagcttaatcaatttattaataatcctacattttcttgcattattgctgcccagtgatctggattgtttgtg

SEQ ID NO: 823040 - DNA, 120 bp, Artificial Sequence
  ENSG00000241743_9 (sequence is synthesized)
aaaactaaaaagtcttagaaaatatcattctaatgttattgtatcacagtgaattacccacatacaagcacaaagtaaagctgtaaagcaattaattcagttcttcaaataaaccaaaaa

SEQ ID NO: 823041 - DNA, 120 bp, Artificial Sequence
  ENSG00000241743_10 (sequence is synthesized)
aagaagacagtgaatgataactatcagtttctttcttaatttgatggatgaatttattcactctccatttttctctcccagcctatttgtggttttgtagcaaaaagatttctacatggc

SEQ ID NO: 823042 - DNA, 120 bp, Artificial Sequence
  ENSG00000241743_11 (sequence is synthesized)
tttttctgtaattattttgtgaaaacccacaatataaaagaaactgacttattttaagaataatggaacttcctcttttcagaagggtctgaagcaatttttctctttaagcaaaacctc

SEQ ID NO: 823043 - DNA, 120 bp, Artificial Sequence
  ENSG00000241743_12 (sequence is synthesized)
tgttctatggttcacgttcagatgtggccttcattcaaacatacttcccttcttagctgctgatgaaagcatgtggcaacatttctgccttggcaaatttaaatcatctcccttaaggtg

SEQ ID NO: 823044 - DNA, 120 bp, Artificial Sequence
  ENSG00000241743_13 (sequence is synthesized)
agggtaggtaaataccttagcaagttatctcttttatacaaacagacttattttggcacagtgtataattgtatacatacaattgtataaatactattttaaaatgctagatttttttcc

SEQ ID NO: 823045 - DNA, 120 bp, Artificial Sequence
  ENSG00000241743_14 (sequence is synthesized)
ccatgcacactgaattgaattcattgtaacgtgaaaatgactgacatgtaattcttttctcagagcaacattaaccataaaaatggagacagagcaacaaactcctgggtgactacaagt

SEQ ID NO: 823046 - DNA, 120 bp, Artificial Sequence
  ENSG00000241743_15 (sequence is synthesized)
caggaaagggaaaaacaccgtaggggtagaatttacagaagtcttattttaaatacaattttgcctcaaaagatgggccatagaagggaggtgtgtattccactctccttgtaaaatatg

SEQ ID NO: 823047 - DNA, 120 bp, Artificial Sequence
  ENSG00000241743_16 (sequence is synthesized)
agtttttaaatctataagtaggaagagatgtacaacacatactaatgaagaaatctgttgccacgttttaagtattaaaaaaaaggcatgtctatatctggtgggatttttttttaatga

SEQ ID NO: 823048 - DNA, 120 bp, Artificial Sequence
  ENSG00000241743_17 (sequence is synthesized)
cttaatttattcctactgcaataaattaggctattcaagcaatccagggtccatccatctattaatagtatcaagcttttaaaatgtaaagcttttagttttgctgcttctaaaatcata

SEQ ID NO: 823049 - DNA, 120 bp, Artificial Sequence
  ENSG00000241743_18 (sequence is synthesized)
tagtgctttcattctaatttatgttgattcagttcaaataatagaaattttgaatgacatcatggctattttgacacgtatacagactatagtaaagtggttttggacgtgtgttcagaa

SEQ ID NO: 823050 - DNA, 120 bp, Artificial Sequence
  ENSG00000241743_19 (sequence is synthesized)
cttgggagctcagttttttgagacgtaactctgccgacgcgcctggccaaataaagccctctccttcctcaactcggtgtctgtggctcgtcctgctacaatgcatctacccatacagat

SEQ ID NO: 823051 - DNA, 120 bp, Artificial Sequence
  ENSG00000241743_20 (sequence is synthesized)
ggtgtccggaatttcaaataatactgagttatgggaattgccacagaatgtaaacaccatgagaacacaggctttgtctgccacatttattgctgcatttgcagcatgtagaatggtgac

SEQ ID NO: 823052 - DNA, 120 bp, Artificial Sequence
  ENSG00000241743_21 (sequence is synthesized)
tgacatataagaagtaccaattaaacatttgtggatgagtcaatgaagaaacttgtcaaagcacttcaattaaaacacagaaactatagaaaatcatctggtaaacatgctgatgatgtc

SEQ ID NO: 823053 - DNA, 120 bp, Artificial Sequence
  ENSG00000241743_22 (sequence is synthesized)
aagattcagcagccattctgaactggaaattacatgttaaggctgttatagaagaaataaagaaattaaatctctatgtccccaaggtatctctataccggcctggaatgcctatctcca

SEQ ID NO: 823054 - DNA, 120 bp, Artificial Sequence
  ENSG00000241743_23 (sequence is synthesized)
aacctcctttacatgagacagaaacagcttctatcaccttaaaatctgttactttaggtttttttcattatgagcagctaaaatgaatcttacttgatacagtgtgagtgttcatggatt

SEQ ID NO: 823055 - DNA, 120 bp, Artificial Sequence
  ENSG00000241743_24 (sequence is synthesized)
agggcattgtttgataagaggagtaagaaaagaatataaattgtattggccctgatatgccacaaacaatgagggctgaagccaaattaatcaaagaataaactcaaatacaaagaacaa

SEQ ID NO: 823056 - DNA, 120 bp, Artificial Sequence
  ENSG00000235717_0 (sequence is synthesized)
atcagccttccactagaaaagccagctagtactggcaggaactaagcaaaggaataataaaacaaacacgtatttatttttgactaatattatttgattaaaaacgaacgtgatagaaaa

SEQ ID NO: 823057 - DNA, 63 bp, Artificial Sequence
  ENSG00000235717_1 (sequence is synthesized)
tgactaatattatttgattaaaaacgaacgtgatagaaaatcgctgtgggtaatatggcttat

SEQ ID NO: 823058 - DNA, 120 bp, Artificial Sequence
  ENSG00000235717_2 (sequence is synthesized)
tatatatacataggtgtgtagatatggcctatatatatacataggtgtgtagatatgtcctatatacacataggtgtgtagatatgtcctatatatacataggtatgtagatatgtccta

SEQ ID NO: 823059 - DNA, 120 bp, Artificial Sequence
  ENSG00000235717_3 (sequence is synthesized)
aggtatgtagatatgtcctatatatacataggtgtgtgtatatgtttatatacgtatacatgtacatatacacctatatatctcttagcaacagttctgcaaaactcaatcattatactt

SEQ ID NO: 823060 - DNA, 120 bp, Artificial Sequence
  ENSG00000235717_4 (sequence is synthesized)
tggcagattggttttaggtcactagtaagggcagaagcaccaccatgtgtcatccaaattcttgcctgtgccttccgtaggacaaaaagagggtttatgattttgaccatatcaattctt

SEQ ID NO: 823061 - DNA, 120 bp, Artificial Sequence
  ENSG00000244998_0 (sequence is synthesized)
acctgacgctctgctttcccctgacctccactgacatctacgacccgccctggaggcacggaaggctgtggggttccagccccccaaactgtgcagctgaggaaaatgagccgtgaatgg

SEQ ID NO: 823062 - DNA, 120 bp, Artificial Sequence
  ENSG00000244998_1 (sequence is synthesized)
gggcagagccagatcctgggcgggaccctgcgcaggatgaactcaggcagccagagggaccccgggaagatgggagtgagagctgccttcgtctgcaaaagtctccagacaccacctcac

SEQ ID NO: 823063 - DNA, 120 bp, Artificial Sequence
  ENSG00000244998_2 (sequence is synthesized)
tggtgaaggccagagaccctaaactgtcccaagaccacctgactgggctgcctccctgccacctggctgccagcctctctcagagcgcctgcaagctattcctccaacccagagtttcct

SEQ ID NO: 823064 - DNA, 120 bp, Artificial Sequence
  ENSG00000244998_3 (sequence is synthesized)
tcccagctaaaggcctttgcacctgctgttccttctgcctggaagttcaccgcagactatcccagggcctccatccttcccattgcatggtccccatcagctgccgccgcctctgagagc

SEQ ID NO: 823065 - DNA, 120 bp, Artificial Sequence
  ENSG00000244998_4 (sequence is synthesized)
tcagtctccactggccatcctgtctctcagcccactgcactctccactctgccagaaagtcccccaatcagtgacaacacaggtcacggtccacacctcacctggtttgtccccagtgcc

SEQ ID NO: 823066 - DNA, 120 bp, Artificial Sequence
  ENSG00000244998_5 (sequence is synthesized)
ccagaggcccctggtccttaagggcaggggtggggatggctcagaggacataaccttgcagacccgggttcaaatctgggctcctcagctcatttggtcctcacacagcccatgttggga

SEQ ID NO: 823067 - DNA, 120 bp, Artificial Sequence
  ENSG00000244998_6 (sequence is synthesized)
gagctagtgttctccctgttttgctgatgagacacagagaaggtcagcaactcccgaagattgcccagcaagttgggagtaaagctggtgcaattcccacgtttagctgctaaacagggt

SEQ ID NO: 823068 - DNA, 120 bp, Artificial Sequence
  ENSG00000244998_7 (sequence is synthesized)
gtcctgtacttggtgtgttcaagcagaaatccacacatgggaaggtcaaggcaacatccctggtactccagctttgaggtcctaggaaaaagggaacctcccattaaatgcttctattgc

SEQ ID NO: 823069 - DNA, 120 bp, Artificial Sequence
  ENSG00000244998_8 (sequence is synthesized)
cgggaagttcagcacctgtaaaagcagccccttcccgtttcactgtggctgcattttaattcttattttttaaatgtttagcttaaggccgggcacagtgactcacactataatcccagc

SEQ ID NO: 823070 - DNA, 120 bp, Artificial Sequence
  ENSG00000244998_9 (sequence is synthesized)
aggctgaggcgggaggatcacttgagcctaggaattcaagaccagcctaggtaacatagtgggaccctatctctacaaaaaataaaaaattagccagtcatggtggcatgctcctatagt

SEQ ID NO: 823071 - DNA, 120 bp, Artificial Sequence
  ENSG00000244998_10 (sequence is synthesized)
cctatagtcccagcttggagattgaggtgggaggatcacctgagcctaagaggacaaggctagagtaagccctgatcccgccagcaccccagcctaagtgaaagagcgagagcctgtctc

SEQ ID NO: 823072 - DNA, 120 bp, Artificial Sequence
  ENSG00000248717_0 (sequence is synthesized)
attctatccacgacccatccatcttgctgacggccgacctgagcagctacctgagagctggcagcgctcgctcgatgaaggccgccgaatgacctggaagccaccctgatgggcagggcc

SEQ ID NO: 823073 - DNA, 120 bp, Artificial Sequence
  ENSG00000248717_1 (sequence is synthesized)
ctcgaggttaatgagacacaggtttggatgtctctattcagaagactttggcctgtaatccccctctcatgggctgtctcacaccgcacttggtatcaagattctcccgatctggtgaag

SEQ ID NO: 823074 - DNA, 120 bp, Artificial Sequence
  ENSG00000248717_2 (sequence is synthesized)
gcagtgttgctgtgttccttctggatctattctatggaaaagagtgcataaaattggcatgggaaatgggacatttttctaaatagaggaaaatatttaaggcaaaaatcctgatagaaa

SEQ ID NO: 823075 - DNA, 120 bp, Artificial Sequence
  ENSG00000248717_3 (sequence is synthesized)
aatcaagaatacaaattcagagcttgggaaattcatctctccaccatctccaatctgaggacggggtatgttacactaaccttcaggtacagctgtgatgaaggatgaagtgttgactga

SEQ ID NO: 823076 - DNA, 120 bp, Artificial Sequence
  ENSG00000248717_4 (sequence is synthesized)
gcacacacactcccaaaggcattcaccatcactccacacggactctctcctccatatctccccaccctgatgcacccctattcctatttaaatgacatcactgcttctgggaactgcagt

SEQ ID NO: 823077 - DNA, 120 bp, Artificial Sequence
  ENSG00000248717_5 (sequence is synthesized)
ggatggccacagttgttgactaaactcttcatttctttacaccaaactgcccaaacctcatttccagcaggaggctcaaaccagggtagttctccagcaaaagtagggaggaaagtgtca

SEQ ID NO: 823078 - DNA, 120 bp, Artificial Sequence
  ENSG00000248717_6 (sequence is synthesized)
cctttctcaaagctaagatttttccttattaaatgggagatcccagagtacgcacgttagagctgaatcgctgagtgtgtctgcagagagaaaggaaaacaccgtgagcctcagaccatg

SEQ ID NO: 823079 - DNA, 120 bp, Artificial Sequence
  ENSG00000248717_7 (sequence is synthesized)
ctgtgtcctgtgttcatgggtcttttcttcacttggtgacattagaaaactggttgggagatagtgctcgaggcaatggcccccaaataaagcctagaagacacttgaggaaatgtacaa

SEQ ID NO: 823080 - DNA, 120 bp, Artificial Sequence
  ENSG00000248192_0 (sequence is synthesized)
gtgttttactttcacagcattagccaactgttttacttcatgatatttaatacacacatccacacccatacatgcttacatacagctcccagttcccaacctcccaactcctgtatttgg

SEQ ID NO: 823081 - DNA, 120 bp, Artificial Sequence
  ENSG00000248192_1 (sequence is synthesized)
gatcccattttctagataagagatttgtggctttaagaggttcagtaatattttcaaagtcacacagaaggagggaaagcagggatgtaaaaccaaatttccctaattttaaagcccttg

SEQ ID NO: 823082 - DNA, 120 bp, Artificial Sequence
  ENSG00000248192_2 (sequence is synthesized)
ccatatgttaccttccaaatcccttctgctgatgttagcaaccactaagggtcaaaggttgtattttcaaaatgtgactcatgagccattagtaagttctgaaatcaattgctgggcctt

SEQ ID NO: 823083 - DNA, 120 bp, Artificial Sequence
  ENSG00000248192_3 (sequence is synthesized)
gaccagcatttttaaaaaacaaaatagcgcagggtagattgagtagaatagatcagaaagagtaagaattgtttcatgaaccttggtttcaggtatgcatgtgtggagtgttctaggtct

SEQ ID NO: 823084 - DNA, 120 bp, Artificial Sequence
  ENSG00000248192_4 (sequence is synthesized)
taatgtaaaatgtatttcttattatgggtttatatttaaaaagtttgaaagtcattgggttcagtggatgctctcacatagacctagctcatgaattgagaattactgaacactcagctc

SEQ ID NO: 823085 - DNA, 120 bp, Artificial Sequence
  ENSG00000248197_0 (sequence is synthesized)
ccatgatggctccgtctcattctgtcacagatcgtctttataagccagacatttcagtgctataaactgatgagacacccacagaatttaacagaaatcgaaggtgtggaaaggatctca

SEQ ID NO: 823086 - DNA, 120 bp, Artificial Sequence
  ENSG00000248197_1 (sequence is synthesized)
gacaagcgaatccatcactgttactgtacagataagaaatggaggccaaataggattagcaacttgctcaggactccacagaaagagcagcaactggatggcacagaatgagttctgacg

SEQ ID NO: 823087 - DNA, 120 bp, Artificial Sequence
  ENSG00000248197_2 (sequence is synthesized)
tgtttgggggtttgatgctgaaataaagcaatacacacgaggaaatttactggcattgtattaaaaaacaaagttaatgtatgatgatgccgtagagtgattcatgaatggcattatgaa

SEQ ID NO: 823088 - DNA, 120 bp, Artificial Sequence
  ENSG00000248197_3 (sequence is synthesized)
tattttaaaaacacaaaaggaattaaaagagtatacttggatgttaatgaaaataaaatttcattgagaacaagaatcttggtaaacatcagttgatattaaaaatttattgcttttaaa

SEQ ID NO: 823089 - DNA, 120 bp, Artificial Sequence
  ENSG00000248195_0 (sequence is synthesized)
gttgcctttaatattttctttgtgtcgatactaatggtacattcttgaaatctcatgcataagaaaaataaaatatacaacttcctcataaatgtgtagaaacagtaatgctcttctaca

SEQ ID NO: 823090 - DNA, 120 bp, Artificial Sequence
  ENSG00000248195_1 (sequence is synthesized)
atactattacaataaccctggtcaaaaataacattgtactttcaagtttgtcagaatcttcaactcattattgttcttgttttagaatttacacaagaaatctatctttagatactaccg

SEQ ID NO: 823091 - DNA, 120 bp, Artificial Sequence
  ENSG00000248195_2 (sequence is synthesized)
gttaacttaaacaaatttattcttaaatcaatgagaactatttcaagacttggtcagtaagtgttttgtatattcctcttcttatatacaccatccagaaacaaaaatggaagcaaaagc

SEQ ID NO: 823092 - DNA, 120 bp, Artificial Sequence
  ENSG00000248195_3 (sequence is synthesized)
tatttcaaaattaaatgttttgaataagaaaattgtcatttattccaaataaatatgataaaagaaatattgaactctcttagtttttaatgtaacaacctttggataacctatcttgtt

SEQ ID NO: 823093 - DNA, 120 bp, Artificial Sequence
  ENSG00000248195_4 (sequence is synthesized)
attgaactctcttagtttttaatgtaacaacctttggataacctatcttgttcaattttactatattataaatttaaaaatcattctaccttcaattctctatcttattaatgataatca

SEQ ID NO: 823094 - DNA, 120 bp, Artificial Sequence
  ENSG00000248199_0 (sequence is synthesized)
caggccacaagcaggggcctgagtggctggaaaccaccccgagacctggcattcctgagctgctccgttctgccaggaaactgcccagctggatagagacagacagggagttgctcttct

SEQ ID NO: 823095 - DNA, 120 bp, Artificial Sequence
  ENSG00000248199_1 (sequence is synthesized)
ggtcctcagaggaaaggaagtacagtgatgtcagcaatgaccaccactgacatctctacctggtcaaatagccaaactgtcccaaaggagagccttgttgcagaaattgaacagtgagag

SEQ ID NO: 823096 - DNA, 120 bp, Artificial Sequence
  ENSG00000248199_2 (sequence is synthesized)
aataagtggcccagagtttcacagaagccagagtacaaagacaactggagaatacacacgtagaataaataagctgagaataatggaaagttggatgagagaattgacattccacaaagg

SEQ ID NO: 823097 - DNA, 120 bp, Artificial Sequence
  ENSG00000248199_3 (sequence is synthesized)
tccagcctgcagacggcagatgatggaacttctcagtctacataagcatatgagccaattaccataataaatatactcatagatagatagattgagggagagagagagagagaaagagag

SEQ ID NO: 823098 - DNA, 120 bp, Artificial Sequence
  ENSG00000248199_4 (sequence is synthesized)
agagaaattatcctattgattctgtttctctgtaagaccctaactaaagtacttaggattagcataatttctctcattgaaatcaccacatctcccttaagttccagccagtttcacctt

SEQ ID NO: 823099 - DNA, 120 bp, Artificial Sequence
  ENSG00000248199_5 (sequence is synthesized)
ggctggatgtgttgagggtaagatatgggagctcatgtcacttgtaaactgtgctccaagtgatgactctgctttttgcaactgaccaatttcacaacaaacaaataaacaagaaaacac

SEQ ID NO: 823100 - DNA, 120 bp, Artificial Sequence
  ENSG00000268810_0 (sequence is synthesized)
tgaattatcttaaaatactcagcatcaagtggaaatacatgcatgaatccagatcgtagaacattttataaaagaactggcctggacacagcgcaatgtcactgtcataaaagagtctcc

SEQ ID NO: 823101 - DNA, 120 bp, Artificial Sequence
  ENSG00000268810_1 (sequence is synthesized)
taaaagcagctaaaaaggatgttttggggagagctggggagaattaaaatactaatagatgtctagaaatgcagatgatttatttttcacagattggatatgaccttgacaatgacatgc

SEQ ID NO: 823102 - DNA, 120 bp, Artificial Sequence
  ENSG00000268810_2 (sequence is synthesized)
atatttgtcaatgtttccagattttccggatggcctgtggactgtctaccttagtcagtattatcacatcaatgatgaatttctaagctctctgtaggtctgacgatttccaaaataagc

SEQ ID NO: 823103 - DNA, 120 bp, Artificial Sequence
  ENSG00000268812_0 (sequence is synthesized)
gaggcggcacctgctcccgtcccaggccggagtttgcaagctgctcgccgcccgcgcccctccctgggagcagcccgggaccgcggttggaaaggagaaagcggaaagaaagaaagaaaa

SEQ ID NO: 823104 - DNA, 120 bp, Artificial Sequence
  ENSG00000268812_1 (sequence is synthesized)
gaaaaagagagagggagagtgaatctgggagaaagcgcagagggaagagcagccagcgagtgtccggagcgaggaggaggaggaggagaaggagagggggaagaagaggaggaggaggaa

SEQ ID NO: 823105 - DNA, 120 bp, Artificial Sequence
  ENSG00000268812_2 (sequence is synthesized)
cctcgccgccaacctgccgcggggcgtgcggtgcttgggaccatgtgcccgcgctcgctccgggccgccacccagcgcctccggtggctgcgcgggcgccccaagtgttcgtgtgtctgc

SEQ ID NO: 823106 - DNA, 120 bp, Artificial Sequence
  ENSG00000268812_3 (sequence is synthesized)
gcggggacgcgaagccggcgcggggcgggtgtatttacctgccgccaagaccttcattatgggctgcacttcagagggccttggaggaaacctcagatgccggcagttttcagaggttca

SEQ ID NO: 823107 - DNA, 120 bp, Artificial Sequence
  ENSG00000268812_4 (sequence is synthesized)
tgctcaaatggggaatttgcctgatttatatactggagcctgtgttgtaagacagaaacagctatatttagccgggatccccagtccaggaagttgtttgaggtgcatcataggaaatta

SEQ ID NO: 823108 - DNA, 120 bp, Artificial Sequence
  ENSG00000268812_5 (sequence is synthesized)
tgaatggaagaaagtgagagtgaaggggggggacgagtgaggggggagggtggggagaacagactttttccctcttctaagaatttgattgataaaattataatgaagccttcgacaaaa

SEQ ID NO: 823109 - DNA, 120 bp, Artificial Sequence
  ENSG00000268818_0 (sequence is synthesized)
aatttgctctctgcctcactgcctgagctggaacatttgtcttctgtcctcagactgggctttaccccatctactcccaggatactcagaccttcagactctggctgaattataacactg

SEQ ID NO: 823110 - DNA, 120 bp, Artificial Sequence
  ENSG00000268818_1 (sequence is synthesized)
actttcctgggtctccagcttgcaaatggcaggctatggaacttctcagcccacaatcacccttcagggtagaccgaggagagcacctccccttcctggtgaagggagcccgatacacgc

SEQ ID NO: 823111 - DNA, 120 bp, Artificial Sequence
  ENSG00000268818_2 (sequence is synthesized)
tggtgccggctggccaagaaggaggtggacaaacctggcgaccgctccctggcaccacctcaccagaggacagctcacacctccacaggggtcagaagaaaggagctgccctggggatgg

SEQ ID NO: 823112 - DNA, 120 bp, Artificial Sequence
  ENSG00000268818_3 (sequence is synthesized)
acaactgccaggcacatgccccttgaacacccgatgctacgtgtcccaaaggaaactggtctccacccacccccggcccgtcctcgtcctgggtaccccaccttagtaaatggcgccacc

SEQ ID NO: 823113 - DNA, 120 bp, Artificial Sequence
  ENSG00000268818_4 (sequence is synthesized)
atctgcccggtcactcagcgagaaactcaactcctggcagcagatgacgggcactctggttaaatgactctctccagcctccaagttcaacctgcagggaagccctggaaatcctgtctc

SEQ ID NO: 823114 - DNA, 120 bp, Artificial Sequence
  ENSG00000268818_5 (sequence is synthesized)
cctctgccctgcctctccttcagctccgaaccccaccccactcagtacatggccccccaacaggctttcaaatgtctgccttccccaaaccaatctgtggttttaaaagaagtaaggtca

SEQ ID NO: 823115 - DNA, 120 bp, Artificial Sequence
  ENSG00000272549_0 (sequence is synthesized)
gtgttcggcatgagggtgcctgcagaggaggtgaatccctgcgttttctattctttttttcttccgactggtgtggatcccagacaatttcagggtcctgcagggtttgagaccctctgt

SEQ ID NO: 823116 - DNA, 120 bp, Artificial Sequence
  ENSG00000272549_1 (sequence is synthesized)
gaacactgacccgggaccccgttttgcccatgggaagttgaagccagcgcagcccccggccaggggcactgtctcctcggccccgggatgctggacggaggggacaacgtgcaggggcag

SEQ ID NO: 823117 - DNA, 120 bp, Artificial Sequence
  ENSG00000272549_2 (sequence is synthesized)
ctgctgctgggctgtggacctcccggaaccggaggagcccgggaggggctggcccagcagtgagggctccgatgcgcctcaattcatatgctaaggagccctggattcggctttaattgc

SEQ ID NO: 823118 - DNA, 120 bp, Artificial Sequence
  ENSG00000272549_3 (sequence is synthesized)
cggagtgggaggtgaccccaggggcccaagctgggggcgtggctgggaaatgcacagaaagagacttcgacgggggtggctatggtttgtgctgtgctgtgcacacgtctggctgataga

SEQ ID NO: 823119 - DNA, 120 bp, Artificial Sequence
  ENSG00000272549_4 (sequence is synthesized)
aatctatgtctataaacagttccttccaggtctccgcggaaaactgaagattcctgtgtgctttcagaaaagaggttccaaggaaaagggcagccatttagttttcacaagtctgggcag

SEQ ID NO: 823120 - DNA, 120 bp, Artificial Sequence
  ENSG00000272549_5 (sequence is synthesized)
tgagcgatttggagcttccatccttggctgacatcatgaacaccaatgttgctggcctcgatcgcaagaagggtgggacttcgtgcttagccttcctggggaagggcctgtccctgggtc

SEQ ID NO: 823121 - DNA, 120 bp, Artificial Sequence
  ENSG00000272549_6 (sequence is synthesized)
acgtccccagtgaccacaggaggaagagaagggatgaggatcctggggggcctggctctgcgtccacccgtctctgtgtggatgcctcctgtgtccagggtgataaccggtcacccgact

SEQ ID NO: 823122 - DNA, 120 bp, Artificial Sequence
  ENSG00000272549_7 (sequence is synthesized)
gtgtccttggggtcattcctggcttctcctgccgcttgatcacccctctggctgcagggagcccaggacggagaaggagagacctcattctccctggggaatgcaggctgagaccaccca

SEQ ID NO: 823123 - DNA, 120 bp, Artificial Sequence
  ENSG00000272549_8 (sequence is synthesized)
tgcttctggagcagggtttcatgtgggggaggtccctccagggagggacagtgaactgacgctgtgatattgctcaggatggaggcccagggcagacggcgtcaccagctgccgcagaag

SEQ ID NO: 823124 - DNA, 120 bp, Artificial Sequence
  ENSG00000272549_9 (sequence is synthesized)
ccaggttgccagaggggctgtgtcaccagccctggggacgccatgttgctgtgcgtttcgacacattcctgtggagtgtctgaggaaaaacagggcacacgcattcctgataagattgca

SEQ ID NO: 823125 - DNA, 120 bp, Artificial Sequence
  ENSG00000272549_10 (sequence is synthesized)
ccaaaaggccagggtgggggaccaggctcccagcctccctctgtctcagttgggggccgaggggcagggacagccaggagaaggcccagccagatgctgctggcttcccccaggactctg

SEQ ID NO: 823126 - DNA, 120 bp, Artificial Sequence
  ENSG00000272549_11 (sequence is synthesized)
cccgactggcctctcggttaaacctcctcacctgagcctctcttatggcgtggttgagtcacacatgagagggttttgtctgccgggaggggctcttcttatgggacaacaggggcgcga

SEQ ID NO: 823127 - DNA, 120 bp, Artificial Sequence
  ENSG00000272549_12 (sequence is synthesized)
ggtgtgtggtgtggctctcagggatgtgtctggactctatcacgtctgagtgtccctggggccagagtgctgggggcaggagcctgtggtttatcaagcaccttctgccagctgaggccg

SEQ ID NO: 823128 - DNA, 120 bp, Artificial Sequence
  ENSG00000272549_13 (sequence is synthesized)
tgactttttgtccctcactggaggaggcttcaaggtcagcctctttttcctttggtcccaagcttgccgtgtctcctcctcattccccacgtccacatgagaaggcagtgttcacaggtg

SEQ ID NO: 823129 - DNA, 120 bp, Artificial Sequence
  ENSG00000272549_14 (sequence is synthesized)
ggttggtctgagattgaaatcgcaaggccaggattttctgtctgggcagccccctcgagtcagcctcagaggagcccagacctcttggatggctttcggcgagcctcccagtgggcacag

SEQ ID NO: 823130 - DNA, 120 bp, Artificial Sequence
  ENSG00000272549_15 (sequence is synthesized)
cactcgccaccggacactgcatggactcagcttccacactgcgatgggtatggcctggtccttgcactaccaggggcaaggaggaacgctatgcctggtgggggtgagcaccccatctca

SEQ ID NO: 823131 - DNA, 120 bp, Artificial Sequence
  ENSG00000272549_16 (sequence is synthesized)
tgacaaagcagttctccagggtctgccccacttttctgtaaacctgggggtccagcccagtgcattggctggaaggagaggggacgcctcctgtcccagctcatggcgctctgccgaccc

SEQ ID NO: 823132 - DNA, 120 bp, Artificial Sequence
  ENSG00000272549_17 (sequence is synthesized)
cactgtcagccccaaccttggtgctccggggggccccaatgccatagatgcacttcatggggagcaactggggctgttcctgaggaccaagatgggcagagaccctaaagacgtccatgg

SEQ ID NO: 823133 - DNA, 120 bp, Artificial Sequence
  ENSG00000272549_18 (sequence is synthesized)
attgacccctgctctctgtggcccctgcctggctggcctcccctcctcacactctccacagttctcatgcaacacagcgcctctaaaaatgctgtcctgaaaatgtgcgctttggggaag

SEQ ID NO: 823134 - DNA, 120 bp, Artificial Sequence
  ENSG00000272549_19 (sequence is synthesized)
ctcctcttcgaccaagttcgggtcccttctacccttcagtggctgtaggcagtcggtgagggtcctggacggggtgggccgggggcagggaggggcactgtgggctttggttgctcaggg

SEQ ID NO: 823135 - DNA, 120 bp, Artificial Sequence
  ENSG00000272549_20 (sequence is synthesized)
gtcctggcagacacaccaacctggtgtgtttggaaatgcacctggatgtgtgctgacctctgtgtggaggaccacgggtctgttcatcccccactggctgcacccccgggaggctgcagc

SEQ ID NO: 823136 - DNA, 120 bp, Artificial Sequence
  ENSG00000272549_21 (sequence is synthesized)
gtgcactattcggtccctacgctgcagttattcttgtatctgccttgtcactggccttgctgcccatgactccctcaggtcagcccacgtctctgtcaaactttcatcctccgcaattct

SEQ ID NO: 823137 - DNA, 120 bp, Artificial Sequence
  ENSG00000272549_22 (sequence is synthesized)
gcgcagcctgtaaatgcttaaaaaatattgcggaacaggtgagtcacattacagaaaggacgcaacctggaaaagcacagacattccttccccttctgcacctgttagagtaagggaggg

SEQ ID NO: 823138 - DNA, 120 bp, Artificial Sequence
  ENSG00000272549_23 (sequence is synthesized)
gcatgagggggtgggacctgcacaaggtgcagctgatagaaatgcagtcttcaggaaaagccctggctctgaaacggcaaaggctgtgtgcctgggaaaaagacaaacgtgtcttatccg

SEQ ID NO: 823139 - DNA, 120 bp, Artificial Sequence
  ENSG00000272549_24 (sequence is synthesized)
gagacggcccccctgccccaaaggctgtcacgctgccgttcagttatctattctgcagcgatagaactggcttgacctaaaaattcagtgacggaaaaatgtcatctaatgctgcttagt

SEQ ID NO: 823140 - DNA, 120 bp, Artificial Sequence
  ENSG00000272549_25 (sequence is synthesized)
gcagtcaggcggtcagcagatgagggcagaaggccactggtctttgacagaacacgcggatggcgaaataacaaaacaggtggcggatgagggcagaaggccactggtctttgacagaat

SEQ ID NO: 823141 - DNA, 120 bp, Artificial Sequence
  ENSG00000272549_26 (sequence is synthesized)
atgcggacggcgaaataacaaaacaggcagcagatgagggcagaaggccactggtctttgacagaacacgcggacggcgaaataacaaaacaggattcaggctgcactgtcagcagcaga

SEQ ID NO: 823142 - DNA, 120 bp, Artificial Sequence
  ENSG00000272549_27 (sequence is synthesized)
gacaaacaattcttccaaaataaacaagcgagctcccagcagaggcctgtgaagtctcccgttctgcccaaaccacacacatgtggcccacagaggaggctgcagaggcccacggggaac

SEQ ID NO: 823143 - DNA, 120 bp, Artificial Sequence
  ENSG00000272549_28 (sequence is synthesized)
tcaagtggccgagtgtgagacccaggccaccggccgtcctccctgtcagaacaaaaggttcatggaaagggccaggaggacacagcaaggggaaccgaatgccactggcatttcttggat

SEQ ID NO: 823144 - DNA, 120 bp, Artificial Sequence
  ENSG00000272549_29 (sequence is synthesized)
cttttgtaccatagtctaagcatttagaggaagcaccgcgagtttgctgccctggaagctgacgtgctccccaaacacaagacgcaggactggaggccttgccccgcagctcgagaggcc

SEQ ID NO: 823145 - DNA, 120 bp, Artificial Sequence
  ENSG00000272549_30 (sequence is synthesized)
gttttgggacatatcaaggaaggaaggcttaagcgacacaggacctggctgacttacgcacccgctgtctaaagatggggtgctggccggtgaactggagtggctcacggcagacctgga

SEQ ID NO: 823146 - DNA, 120 bp, Artificial Sequence
  ENSG00000272549_31 (sequence is synthesized)
gtgacagtcatgggtctgtacctgtgtggagtcctccatggctgggcttgcagagactgagctggactgcattgcacattggctggaaggagaggagccactgagagacccagcttacgg

SEQ ID NO: 823147 - DNA, 120 bp, Artificial Sequence
  ENSG00000272549_32 (sequence is synthesized)
cactctgcccaccccactgcccaccccaaccctggcgctccaggggggcccaatgccacagacacactccagggggacaattggggctgttcccaaggaccaggagggacaaatgcccta

SEQ ID NO: 823148 - DNA, 120 bp, Artificial Sequence
  ENSG00000272549_33 (sequence is synthesized)
aagatgtccatggtttgacccctgctgtctgtgggccctgcctggctggcctccccttctcacactctccacagtcctcatgcaacacagcacatctgaaaatgctgtcctgaaaacgcg

SEQ ID NO: 823149 - DNA, 120 bp, Artificial Sequence
  ENSG00000272549_34 (sequence is synthesized)
cactctggggaagagcagcttcctcctctccgagtggagcgggctggccccatgaggcgtgattttcactgtgaaatgtgcttcacgtaacactggggcctttgtcaccatttttaattg

SEQ ID NO: 823150 - DNA, 120 bp, Artificial Sequence
  ENSG00000272549_35 (sequence is synthesized)
tacagtttggaggcattaagtgtgttcatcatcaccaccttccacccacagagcttcttcgtcttcccaaacggaaactctgtcgtcggtaaacactccctcccctcccacagcccctgg

SEQ ID NO: 823151 - DNA, 120 bp, Artificial Sequence
  ENSG00000272549_36 (sequence is synthesized)
cacctgccttctccttcctgtctccatgaacctgacaactcttcggaccccacctaagtggagttgggcaggatttgtcctctgtggctggctcgcgtcactcagcggccctgaagactc

SEQ ID NO: 823152 - DNA, 120 bp, Artificial Sequence
  ENSG00000272549_37 (sequence is synthesized)
atctgcgccgcagcctgtcccagaatctccctccctctaacactgattaatatcctgctgcacaaaaaaacaaagatgatcatttgatacccgaaatccacttgaaaattggtaagaaaa

SEQ ID NO: 823153 - DNA, 120 bp, Artificial Sequence
  ENSG00000277718_0 (sequence is synthesized)
ggcctccgtctacacagcagagactgagagcccctcctgtcccaggggtgctgagaggtctgtctctggctcccccaccgctcccatgtctctgctgggactggacctgtgcctcctggg

SEQ ID NO: 823154 - DNA, 120 bp, Artificial Sequence
  ENSG00000237336_0 (sequence is synthesized)
ggagtttgctattgggccagttggctttgtctttgaccactgggtgctggatcttactaccttacgggagagggacacgtaactctaaagaaacagctggaagagaagatttccgaggga

SEQ ID NO: 823155 - DNA, 120 bp, Artificial Sequence
  ENSG00000237336_1 (sequence is synthesized)
ctccttcagagcaagagaggaagacagagatgaattctacatagaaagcctgagaaggcctctcagagatggcttccttgccctccccagatgttcacagggttaacttaaaaacgaagc

SEQ ID NO: 823156 - DNA, 120 bp, Artificial Sequence
  ENSG00000237336_2 (sequence is synthesized)
atcatggagctggcaaatcatctctgcatcccaaagacagtgcgacatgtgataatgactgtgaagcgcagctaagcccgttagcaggaatgaccagggagtgagaggcagcgctggagt

SEQ ID NO: 823157 - DNA, 120 bp, Artificial Sequence
  ENSG00000237336_3 (sequence is synthesized)
caccctccaacatcgtctctttgtttgaggatcactaggaaaggagccattagaaaaacgctagcctggtaataggagggaaatggatcttggcagggctgtgttacccattgagaaatt

SEQ ID NO: 823158 - DNA, 120 bp, Artificial Sequence
  ENSG00000237336_4 (sequence is synthesized)
agcaaaaaacattcagggaagaaagcaggggcttctgtgcttacccattgaggctcttggggaataatgacacatggttaccacctgaggaacccctgctgaggcagctgacttgcccag

SEQ ID NO: 823159 - DNA, 120 bp, Artificial Sequence
  ENSG00000237336_5 (sequence is synthesized)
tggtctactacaggctcaggtgagtaggagggtccttcccaggaggggcagtgatgctcaggcagggctgggatgctcaggctccttgcaagagctgatcctcaagtctgaaccactccc

SEQ ID NO: 823160 - DNA, 120 bp, Artificial Sequence
  ENSG00000237337_0 (sequence is synthesized)
agggctgggagataatacagcaaaaagcctgccatgtcctggtgacaggagcccatttcagcggccaaaaaatctttccaacagcttctgttttgctggtaaatgtctgtgtttgtgttg

SEQ ID NO: 823161 - DNA, 120 bp, Artificial Sequence
  ENSG00000237337_1 (sequence is synthesized)
gttgtaggaggaaacctgggaaaacaagttgggttctggatgagaaaatgggtgactttgttataggatggagcaaagagaatcacaagaaagctcaatggcatttgaccccaaatggaa

SEQ ID NO: 823162 - DNA, 120 bp, Artificial Sequence
  ENSG00000237337_2 (sequence is synthesized)
aacccaaaatgacacttccattaggatattcctttgttttggaagaacagggtgagaagaagaaagacaggggcaaactttaccagacatgcccttcaccagccaggattagtaactgaa

SEQ ID NO: 823163 - DNA, 120 bp, Artificial Sequence
  ENSG00000237337_3 (sequence is synthesized)
gggtgcactccagctgctgggacccttctctttccatctcactgtacctttgcttctggaggaaggaaaatacattcaagtcctaggaagattctgaaggtcaaatgagggaaaggagcc

SEQ ID NO: 823164 - DNA, 120 bp, Artificial Sequence
  ENSG00000237337_4 (sequence is synthesized)
ctgcccagcaagatgtatcatgtcaagccacctgcttctatcagtcccaaatccaccatcaccttagttcctgactgcaattagcacaactgtgttatcacctgctctaactttagagag

SEQ ID NO: 823165 - DNA, 90 bp, Artificial Sequence
  ENSG00000237337_5 (sequence is synthesized)
gatgaacatcatttcagaaaggaagaggaaaaatgatgatgattctccttgatatgaaataatgaacttcaagctctaaaacagaacatt

SEQ ID NO: 823166 - DNA, 120 bp, Artificial Sequence
  ENSG00000237337_6 (sequence is synthesized)
gatatgaaataatgaacttcaagctctaaaacagaacattgcatagaacaagaggaggacagaggcagaaaaacttgcctgtgaattgaaagatatgagatagtctggtaccacaatgaa

SEQ ID NO: 823167 - DNA, 120 bp, Artificial Sequence
  ENSG00000240291_0 (sequence is synthesized)
ttctttaggaatttctcataactatttattgtatccataaggattgcaaggtctcttggatcaggttgtcaccaggctggagtgcattggtacagtcacggttcactgcagcctccacct

SEQ ID NO: 823168 - DNA, 120 bp, Artificial Sequence
  ENSG00000240291_1 (sequence is synthesized)
gcctcccaagtagctgggtctacaggtatactctaccaccccagcttaatcatttttaatattgcgttttcttgggggtaagggaaataaggagttaaatgtaaaacagttttacttata

SEQ ID NO: 823169 - DNA, 88 bp, Artificial Sequence
  ENSG00000240291_2 (sequence is synthesized)
gttttacttataaaaggctaagaatatttggtaagaacttggaataatcaaggaagcaaaacaaagtagattttataattttgctgga

SEQ ID NO: 823170 - DNA, 120 bp, Artificial Sequence
  ENSG00000240291_3 (sequence is synthesized)
gatctaatgttttaatttgtaaagtgtacaagtcatttttaatgttaaaaattagtgaatctaacaaaaggaataaattagcaatatttgatgtggttatgaaaagttgtttttgtttct

SEQ ID NO: 823171 - DNA, 120 bp, Artificial Sequence
  ENSG00000240291_4 (sequence is synthesized)
aggttcctagtttcttaaggattcagggcatgggaagtaaaacattgactatgtgccaataatggaggttgtcaccaggctggagtgcattggtacagtcacggttcactgcagcctcca

SEQ ID NO: 823172 - DNA, 120 bp, Artificial Sequence
  ENSG00000240291_5 (sequence is synthesized)
ctcctatctcagcctcccaagtagctgggtctacagaacagaaactttggttataagaagcacttctgggttctgacagacagtgaacctgctggagtcggtggtggggaggaatggttc

SEQ ID NO: 823173 - DNA, 120 bp, Artificial Sequence
  ENSG00000240291_6 (sequence is synthesized)
gtggtggggaggaatggttcttcttcagcttgggaagcagaacggataggagcggagcgatcagtcctctgatcaccttgagaaccctggcagcgaaaggagcacaccaggcgttaacca

SEQ ID NO: 823174 - DNA, 120 bp, Artificial Sequence
  ENSG00000240291_7 (sequence is synthesized)
cgtaaagcagtggagacaacttgcaatatcaacaatgcatttggcccaggaactgctaatgaacgtacagtgcggtggtggttcacgaagctttgcaaaggagacgagggacttgaagat

SEQ ID NO: 823175 - DNA, 120 bp, Artificial Sequence
  ENSG00000240291_8 (sequence is synthesized)
gaggagcatagtggctgaccattggaagttgacagcgactactcaagaacaataatcaaagctgattctcttacaactacacgagaagttgctgaagaattcaacattgaccattctatg

SEQ ID NO: 823176 - DNA, 120 bp, Artificial Sequence
  ENSG00000240291_9 (sequence is synthesized)
gtctttctacatttgaagcaaatcggaaaggtgaaaaaactcaataagtaggtgcctcatgagccaagcaaaaataaattgttgtttggaagcatcttctcttattctgtgcaacaacaa

SEQ ID NO: 823177 - DNA, 120 bp, Artificial Sequence
  ENSG00000240291_10 (sequence is synthesized)
tgaaccatttctcagtcggattgtgacgtgggacgaaaattggattttatatgacaaccactgacaaccagctcagctgttggactgagaagctccaaagccaaacttgcaccaaaaaaa

SEQ ID NO: 823178 - DNA, 120 bp, Artificial Sequence
  ENSG00000237339_0 (sequence is synthesized)
agagagagccagagtcgctacagccagcctggcagtgcaagcccggagctgacacagggccacagccacgatgcagccactaatgcggacccttgggctgagcctgctttccatgctgtg

SEQ ID NO: 823179 - DNA, 120 bp, Artificial Sequence
  ENSG00000237339_1 (sequence is synthesized)
agcccaggggacccagatggttcctgtccccgctgagaaggtggaaggactgtggcacgccctgcgctgggagcaggacagggagctacttaaagaggagacggctcaccctctgccacc

SEQ ID NO: 823180 - DNA, 120 bp, Artificial Sequence
  ENSG00000237339_2 (sequence is synthesized)
attctggatccagcgtttccagggtaactttatgttaaaaatgaatgtaagtttcagtcagcaggtccctttttaactggatcatgtgctgaagaacgccacacacggagggcttgctca

SEQ ID NO: 823181 - DNA, 120 bp, Artificial Sequence
  ENSG00000237339_3 (sequence is synthesized)
tcaccacaatctctcacaggcacttctgtaagatgggacagtccagttgcaggaaaatgagctcagggctcccaccgattctacactatgggatcccactgggaactgcacagtatttaa

SEQ ID NO: 823182 - DNA, 120 bp, Artificial Sequence
  ENSG00000237339_4 (sequence is synthesized)
gacactgctggtgaaaacagacaactctaccacgtacagaatctattcctgcgtggtcggctgtaactgaggtgagtgccacaaggcctctgcgtgtgttcagagtgtccacaccagact

SEQ ID NO: 823183 - DNA, 120 bp, Artificial Sequence
  ENSG00000237339_5 (sequence is synthesized)
ccggccggactcatgggccctgggactccgcagccctcgaccttggcagcctccttgcctgtgggtgcttgaatgccacgcagcatccgacacatcccacaaccttgagtctgctatgag

SEQ ID NO: 823184 - DNA, 120 bp, Artificial Sequence
  ENSG00000237339_6 (sequence is synthesized)
ccacaaccttgagtctgctatgagtcaagtgtggtcgctgtagataaggaggaaaaaagatcatgaaaaagaacaacaacaacaaaaaatcactcatggccgggcgcggtggctcatgcc

SEQ ID NO: 823185 - DNA, 120 bp, Artificial Sequence
  ENSG00000237339_7 (sequence is synthesized)
cgtgcacacaatgaacctgacaggcgcgtgtccacgctgatgtcacggggcctgtggacgggggcctgtggacgggggcgctgccccttggagtcctccctaactcagccatgcccagat

SEQ ID NO: 823186 - DNA, 120 bp, Artificial Sequence
  ENSG00000237339_8 (sequence is synthesized)
aacaaacaaacaaaaatcactcctaagctcaccacccaggccaatgtactccagaaaaagggagaaggcttcaccacctccctgtgtgatttcatgtcccaagctctgtgtctcagggtg

SEQ ID NO: 823187 - DNA, 120 bp, Artificial Sequence
  ENSG00000237339_9 (sequence is synthesized)
taggaagccctctgttgaataagtccaccctccctggccacagccttagtcctacttgctgtttgggaacagaagatccctgcccggtgcctacagaggggtgggcagaggctgaaaccc

SEQ ID NO: 823188 - DNA, 120 bp, Artificial Sequence
  ENSG00000237339_10 (sequence is synthesized)
cctccagtcctcagctttcctttctaagagagaagagaccggggcctgggcagtgagtggacaggactgtccccctgtcctcctctgtaggtgcacgcccctacaggtgacacctctggg

SEQ ID NO: 823189 - DNA, 120 bp, Artificial Sequence
  ENSG00000237339_11 (sequence is synthesized)
tcctccacaccctcagtaggagctccagggcatggctggtctcccagccacacgggaagccacaggatccccatgggacatccccagccacgtgccacactcagtaaccacccgtgggct

SEQ ID NO: 823190 - DNA, 120 bp, Artificial Sequence
  ENSG00000237339_12 (sequence is synthesized)
tgtgtgcaaatccctgaagtcagtgatggctcaaatgtcgtctctgccaccgtggaggttggccatgggggaaaggtgacgggggcagaagggtgagggctccaagtggctcgaggaagg

SEQ ID NO: 823191 - DNA, 120 bp, Artificial Sequence
  ENSG00000237339_13 (sequence is synthesized)
ggccatggtgtgagcaggggcacgggcgggcagtcaaggagctgggaagggccagccagtcctgccctggagcctccgggaggagccagcgctgcggacaccttggctgtagccagggag

SEQ ID NO: 823192 - DNA, 120 bp, Artificial Sequence
  ENSG00000237339_14 (sequence is synthesized)
gctcactttggacttccaacctccacacctgtcagaggccacgagtgtttagccattaaagaaacctccaggggctgcggtgacaaatgaccacagactcaggagctgaacacaacgcac

SEQ ID NO: 823193 - DNA, 120 bp, Artificial Sequence
  ENSG00000237339_15 (sequence is synthesized)
atgcattgtctcacaattctggagtcaaaagtctagaaacagtcggtggggctggttccttctggagacttctgggaaggggagaagccgctttcttggctttcccagtttctggagtgg

SEQ ID NO: 823194 - DNA, 120 bp, Artificial Sequence
  ENSG00000237339_16 (sequence is synthesized)
ctgcatcctgcactctcggccccgccatgccaccaaggcctccgtttctgtagcctctgctgctctctggcatctgcacggttgccccgaagccgctccgcgacggccctccctgagctg

SEQ ID NO: 823195 - DNA, 120 bp, Artificial Sequence
  ENSG00000237339_17 (sequence is synthesized)
tgtagcgctggggggaggaggcgtggccacagtgggctgcattcaggatcttgaaagccactgaagccatggctggctctcagtcctcagggagcctcttcccctgcctggcaccaggct

SEQ ID NO: 823196 - DNA, 120 bp, Artificial Sequence
  ENSG00000237339_18 (sequence is synthesized)
cccagaatctgggaggcagcctcttcatctggctgctggtggagacctgagcccagccccagggtcctcagtcctgccccttgtcctccgcaagctctcactacatcctacctatgtcca

SEQ ID NO: 823197 - DNA, 120 bp, Artificial Sequence
  ENSG00000237339_19 (sequence is synthesized)
gggacctcggcccatgcatctgcccagatcccagcctacccgagagcatgcatccccaactggaccagcacccaacacagcccagggctcccctgacccacataaaccttgttaatattg

SEQ ID NO: 823198 - DNA, 120 bp, Artificial Sequence
  ENSG00000272545_0 (sequence is synthesized)
cagccctttgtgcaggcacacacatgcagagagagaaaactgtcctggtaagatcactgggaaattagagaagagaaaatacaggagaatggggccagatgccaagcccttaggatccct

SEQ ID NO: 823199 - DNA, 120 bp, Artificial Sequence
  ENSG00000272545_1 (sequence is synthesized)
tggcccttaacaatcagcaaagggcttagatacttgtcctcttgattactctgaactacatcttgtaattaccaacttcagtcaagaaacactaaacagtttatccttcagaagctccct

SEQ ID NO: 823200 - DNA, 120 bp, Artificial Sequence
  ENSG00000272545_2 (sequence is synthesized)
aggagaccagcggtagccaaagagaagctatatccttaactaccgctgctcagctggctgggggcaaagctgagggcctcttgtttccttagtctagggattattgctacatagaattta

SEQ ID NO: 823201 - DNA, 120 bp, Artificial Sequence
  ENSG00000249574_0 (sequence is synthesized)
aaagtccggggcgggacctcctgtcacagactcttctgaagctgccccggaggggaggggccacccacaggactcctgccccatgctggcaccgccatccacttctctgagcctcgtccg

SEQ ID NO: 823202 - DNA, 120 bp, Artificial Sequence
  ENSG00000249574_1 (sequence is synthesized)
ctcatccgtgaagtggccgtaactgtggcacctgctcaggacgcctggagaccaggaggagaggggaccctcaatgctcagaacggagagtggcagacaaggggcctggtctggaaaact

SEQ ID NO: 823203 - DNA, 120 bp, Artificial Sequence
  ENSG00000249574_2 (sequence is synthesized)
gatccccagcaaagcctcctgctgagtgacgtcttcgtgcaggtcccgctggtgaccgtggcccatgggatgtctctgacctgcagcagcgtcactcacccctctgagcaagctctggga

SEQ ID NO: 823204 - DNA, 120 bp, Artificial Sequence
  ENSG00000249574_3 (sequence is synthesized)
ggcagcgtccctgtggatctggcatctgtagagactgcaccatgaacagccttcactcaggaggcaggtgatggccaggactccctgagacaggggacgcagaaggaaggggcagcgggc

SEQ ID NO: 823205 - DNA, 120 bp, Artificial Sequence
  ENSG00000249574_4 (sequence is synthesized)
tgtgccctggggggatcacactcccctgctcgcagctcaggggagctgggggtgggtgctggatcccctgaggcagcaggagacccctgccttcagctcagagtgagcctcccctttgtc

SEQ ID NO: 823206 - DNA, 120 bp, Artificial Sequence
  ENSG00000249574_5 (sequence is synthesized)
ctgcctcccatcagcttgaagctgcctcagtttccctccctcctggccctcatgaacctcctggtgggtccagggctttggccagcagagctagtgcatgaagtgtggagatgcgggatg

SEQ ID NO: 823207 - DNA, 120 bp, Artificial Sequence
  ENSG00000249574_6 (sequence is synthesized)
gcattgcccccggcagggaccccgcgagcctgcatgcacgctgtgcagactgatgagccgtccacggcactgactcaaaccatccagaggggagtgggggatgcccacaggtggggacac

SEQ ID NO: 823208 - DNA, 120 bp, Artificial Sequence
  ENSG00000249574_7 (sequence is synthesized)
tgaggcaccgagaagggaccgacccagggtcctgcttaaagagagacatcaggagacgcctggcacagacaagacttatttttccgggtgcctcccactaagccctgctataaatccagg

SEQ ID NO: 823209 - DNA, 120 bp, Artificial Sequence
  ENSG00000249574_8 (sequence is synthesized)
tcctgactcccagcctagcaagagaaggcagctggggggtgggagccattcccctgccaggtgcaacaggggccttgagcagggggctcggcacagcaaaccacgcccagaaagcccctt

SEQ ID NO: 823210 - DNA, 120 bp, Artificial Sequence
  ENSG00000249574_9 (sequence is synthesized)
ggtccctgtgggcctgagaccctcctccccaccaagaagtacgggtggcatcggtaggggaatgccacagcatgctggctcagcacaggaagcgaccatcgggtagaaacttccttcccc

SEQ ID NO: 823211 - DNA, 120 bp, Artificial Sequence
  ENSG00000249574_10 (sequence is synthesized)
acctagagctgccacatggccggggaaatccccggcccctcaggaagcaccagtggaaactctgccagcaccagatcaaccaaggatacccagacggcaccacccatcccaaagagtaaa

SEQ ID NO: 823212 - DNA, 120 bp, Artificial Sequence
  ENSG00000249574_11 (sequence is synthesized)
aatgtcaggaaccacagttcatgacaccagccaggacctggtgccaacctacagggcggtggcctaggaaaataaagtacatccacaggactcagagtctctaagcagggccaaaatgcc

SEQ ID NO: 823213 - DNA, 120 bp, Artificial Sequence
  ENSG00000249574_12 (sequence is synthesized)
caggatacaagcaaaagctgctcatcacagcaaaagctggaggacacacacgtgaatgagaaaagacaatgaatgacaccagtgccaggaccagctcgaggctgaggacacgaccaggag

SEQ ID NO: 823214 - DNA, 120 bp, Artificial Sequence
  ENSG00000249574_13 (sequence is synthesized)
gccagggttgtcaccacagggcaccatgacaaagcaatgcactctccagaaacaaatgaagtagaagacctcagcaaagacacagaagttatcagaaagaaccaaagggaatacacagag

SEQ ID NO: 823215 - DNA, 120 bp, Artificial Sequence
  ENSG00000249574_14 (sequence is synthesized)
ctaacaactacaaacacagaaacaaaactctccggatgtactcagtagtaaagtgaagatggcagaggacacagccagtgaacctgaggacacagcagtagaatgggcccaataagaacc

SEQ ID NO: 823216 - DNA, 120 bp, Artificial Sequence
  ENSG00000249574_15 (sequence is synthesized)
atagagagagaaagggagggaggaagggaggagggaggaaggaagggaggaagagagggagggagaaaggagaggaaaaagggagaagtgagggagggagggaaggaggagggaacagag

SEQ ID NO: 823217 - DNA, 120 bp, Artificial Sequence
  ENSG00000249574_16 (sequence is synthesized)
gaagaaaaaacgaacagagcttcaggaaccagtagaacaataaccaaagacccacccgattttcaggaagagaacaggactgactgaggatttgaataagtaataatggaatacttctca

SEQ ID NO: 823218 - DNA, 120 bp, Artificial Sequence
  ENSG00000249572_0 (sequence is synthesized)
atcttcgacacggggacaaatcccgggatggagtccagggtttcccgcggcttcggcgcttcctgacctggcgtgactgccgacttgtcggcaccacccaggcctcaggctccctgtctg

SEQ ID NO: 823219 - DNA, 120 bp, Artificial Sequence
  ENSG00000249572_1 (sequence is synthesized)
tagtggtgaatcgaccttcctcatggcagtccaggcttcccaagccccatgtcctgttgatccgggacaaactcttccttgaacgttcttcactacgagccgctgctgatctgtactgcc

SEQ ID NO: 823220 - DNA, 120 bp, Artificial Sequence
  ENSG00000249572_2 (sequence is synthesized)
accatggattctcacgcctgggtgccagtgtttggaatcgactgggcttttttatgttagtaggcaatttaaaacaattacttatttgaaatcagaagcgcaataggcataacttcagct

SEQ ID NO: 823221 - DNA, 120 bp, Artificial Sequence
  ENSG00000249572_3 (sequence is synthesized)
caagatcccagaggaagaggagccatctttcccagtggctttaccggaaaagtccctgagccagtcactgtgcccactggaagacaaatggagacttgccaagctttggtcatgaactca

SEQ ID NO: 823222 - DNA, 120 bp, Artificial Sequence
  ENSG00000274253_0 (sequence is synthesized)
gggtggcgggggtcgggagaggcgtcaggatccctggcgccgcctgagccagcggctgctaggaggctgtgtccgcaagccagcggggcgaggcggctgggccctgcgcgtcaggtcccg

SEQ ID NO: 823223 - DNA, 120 bp, Artificial Sequence
  ENSG00000274253_1 (sequence is synthesized)
gcctggggcaccggggctgccagcgtcggaggaggcctgagaactgggaggaagctggagaaaagatgccctctgaatctttgtgtttggctgcccaggctcgccttgacaccgaatggt

SEQ ID NO: 823224 - DNA, 120 bp, Artificial Sequence
  ENSG00000274253_2 (sequence is synthesized)
tgaaaacagatatacagatgatagtgtcgaaccaagtggaacaaagaaagaagatctgaatgacaaagagaaaaaagatgaagacgaaactcctgcacctgtatatagggccaagtcaat

SEQ ID NO: 823225 - DNA, 120 bp, Artificial Sequence
  ENSG00000274253_3 (sequence is synthesized)
tctggagacctgggtgtgggtcaagcaaccaggtaatcttctgagttttggcattttggaaagcttgatctgacgctccttttctaaataacttggatggattattcgtattttttggta

SEQ ID NO: 823226 - DNA, 120 bp, Artificial Sequence
  ENSG00000274253_4 (sequence is synthesized)
acaatttaaaaaaatgtaattaaaaaaatttaaatattgtggtaaaatatacataccttaaaacttgccattttaatcatttttatgtgtacagttcattggcattaagtatattcacat

SEQ ID NO: 823227 - DNA, 120 bp, Artificial Sequence
  ENSG00000274253_5 (sequence is synthesized)
tattgcccagccatcaccaccatccatctctacaacttttgccctttctccaactgaaactccgtatccatgaaacactaactccttctgtccccaggcaaccaccattctacttttgtc

SEQ ID NO: 823228 - DNA, 120 bp, Artificial Sequence
  ENSG00000274253_6 (sequence is synthesized)
tcagaatttgactactcaaggtgtctcctataaggggaatcatacagtatttgtccttttgtgactgggttattgaacttcctaggtgtttggggttcatccgcatgtgtcaaaattttc

SEQ ID NO: 823229 - DNA, 120 bp, Artificial Sequence
  ENSG00000274253_7 (sequence is synthesized)
ttttaaaggctcaatgctattccattatatatgtaagccacatgttatcccttcagtgggcaatcaggttgctttcatctcttgactgttgtgagtaatgctgctatgaacactggttta

SEQ ID NO: 823230 - DNA, 120 bp, Artificial Sequence
  ENSG00000274253_8 (sequence is synthesized)
cgagtgtcttgagtgtctgcttttaattctttgtggctatacctaggagtggaattggtcaataatgtggaatgcttacatatttattttttttgagatggcatctcgctctgtcgccca

SEQ ID NO: 823231 - DNA, 84 bp, Artificial Sequence
  ENSG00000274253_9 (sequence is synthesized)
tattttttttgagatggcacatctcagctcacagcaagctccgcctctcgggttcacgcaattctcctgcctcagcttcctgag

SEQ ID NO: 823232 - DNA, 120 bp, Artificial Sequence
  ENSG00000274253_10 (sequence is synthesized)
gccaccgcacctggccaataatgtggtagttagatttatgtttaacttattattgttgtttttgagattgggtctcactctgtcactcaggctggaatgcgttgatgtaatcatagctca

SEQ ID NO: 823233 - DNA, 84 bp, Artificial Sequence
  ENSG00000274253_11 (sequence is synthesized)
atgtcagtgaccttcttgcctcagcctctcaagtagctaggactagaggcgcagggaatttctcatcttctctctactgcctct

SEQ ID NO: 823234 - DNA, 120 bp, Artificial Sequence
  ENSG00000274253_12 (sequence is synthesized)
aaagtaacacaatgtccccacccacagggttagaacccctcttctggtggcagctctgaggggagcagtcacatgtggagagtacagggctctgtgtccagctgggggaaggaggttacc

SEQ ID NO: 823235 - DNA, 120 bp, Artificial Sequence
  ENSG00000274253_13 (sequence is synthesized)
gctgggggaaggaggttaccaagggggttgacccccctctggccaggtggctgccttctgacacaccagtctctctctctagcacggtggcccctacacacccagcctgtcaaaccttca

SEQ ID NO: 823236 - DNA, 120 bp, Artificial Sequence
  ENSG00000274253_14 (sequence is synthesized)
gccctcaggaaggctttggccaaatccatgagcggctccctctgttaagaaggaagcacagctgaagcatgaggagggcagtagagtgtgtatgctctgccgcgtctccccacagtctga

SEQ ID NO: 823237 - DNA, 120 bp, Artificial Sequence
  ENSG00000274253_15 (sequence is synthesized)
ccagaaggaaggggcctttcagccaggctcacccaggctggggttggagtgtcagcatcaagccaatgtcttcttgcttaatgagtgagcccagctgctcccgtgcagctgccaccatag

SEQ ID NO: 823238 - DNA, 120 bp, Artificial Sequence
  ENSG00000274253_16 (sequence is synthesized)
ccacggcactttcaggctcaggctgcctggtgagatctactctgtgggctctgtaggctggtagaggcttccaggaggaggaggggatgcagccaccagtccccactcctgggagtcgta

SEQ ID NO: 823239 - DNA, 120 bp, Artificial Sequence
  ENSG00000274253_17 (sequence is synthesized)
tttctgaaagcttgggtatacagtaaatattaggctgtgggctggtttatctatggatttgatgtgggagggttataggtacaagcagtttaaagatggaaattttgagagaacaggaag

SEQ ID NO: 823240 - DNA, 120 bp, Artificial Sequence
  ENSG00000274253_18 (sequence is synthesized)
ggatttagtgctgggtaaggcaagcaggcttgtcaaagcagctcttttggggaggccagaatcctgtacaaatgtcctcagcatgttcatcagctgctgggggagtgccggacaggatga

SEQ ID NO: 823241 - DNA, 120 bp, Artificial Sequence
  ENSG00000274253_19 (sequence is synthesized)
aagcacaggagaactttctggatgataaatgttccatatcttcaaaggaggtgggttacatgggtaatgcatttgttaaaagtcatcaaaatgtaaaccagatctgtgcatttcacggaa

SEQ ID NO: 823242 - DNA, 120 bp, Artificial Sequence
  ENSG00000274253_20 (sequence is synthesized)
agtcatcaaaatgtaaaccagatctgtgcatttcacggaataggaattatacctcaaattagaaacatttataaaaagacagatgggctggatgcagtggcacacgcctgtaatcccagc

SEQ ID NO: 823243 - DNA, 73 bp, Artificial Sequence
  ENSG00000274253_21 (sequence is synthesized)
tgtaccactgcactaggttttcaacattcattaaaggcagagtagcttgttatagactagcctccccacagga

SEQ ID NO: 823244 - DNA, 120 bp, Artificial Sequence
  ENSG00000274253_22 (sequence is synthesized)
aaggcagagtagcttgttatagactagcctccccacaggaacagttagaaaaactggacaaaaatgtgtccccccttccccccaccatcaaaaacaattgttggaaggtaattggggacc

SEQ ID NO: 823245 - DNA, 120 bp, Artificial Sequence
  ENSG00000274253_23 (sequence is synthesized)
ttggaaggtaattggggacctcagccaggacttgagtgaccaggcctaggaggtgatcctgacagtccttagtgcttttcccacatttggtgattggtcaacagtagagggctaagaggc

SEQ ID NO: 823246 - DNA, 120 bp, Artificial Sequence
  ENSG00000274253_24 (sequence is synthesized)
gatagttaagaggctggagagcctagctgaatgtttggcactctcacagggctgaaatgacataatgagaatttgggtcccagtaaggagatgagaccttggtggggatcctggaagggc

SEQ ID NO: 823247 - DNA, 120 bp, Artificial Sequence
  ENSG00000274253_25 (sequence is synthesized)
cacccctaagagtccaaaagaataaaaaatagaccagctgtcacaaaaactaaaacctgctttgagccagcttagtcccaaactagatgaaagcgatctgcttgaacgccaattgtgtgc

SEQ ID NO: 823248 - DNA, 120 bp, Artificial Sequence
  ENSG00000274253_26 (sequence is synthesized)
cataaagtcaaagtcaatactctctggagacacataaaactttactaggcatgccataagacaagacaacacaagacgaaaggagaaaacaaacaaaaaaaacaatagaaacatacatag

SEQ ID NO: 823249 - DNA, 120 bp, Artificial Sequence
  ENSG00000274253_27 (sequence is synthesized)
aggagaaaacaaacaaaaaaaacaatagaaacatacatagatattagagtcctcaggtagaaaaatttttttttttttttgaaatgggagtttcactctgtcacccagactggagtgcag

SEQ ID NO: 823250 - DNA, 120 bp, Artificial Sequence
  ENSG00000274253_28 (sequence is synthesized)
tgatccacctgcctaggcctcccaaagtggtgtgattacaggtgcaggccaccgtgcccggccagtattttgccacaatttaaaatacattttctttttttcaagtttgttctcagacta

SEQ ID NO: 823251 - DNA, 120 bp, Artificial Sequence
  ENSG00000274253_29 (sequence is synthesized)
gttctcagactatattcacaaggtcacatggcggcttacacttctgtaggccttgttgaccgttctttttagatattgatgatcttgatctttttcttgtctcctcggtagaagaatggg

SEQ ID NO: 823252 - DNA, 120 bp, Artificial Sequence
  ENSG00000274253_30 (sequence is synthesized)
atgcaggaggtgctgcctaagcctgggcgctcctgggcgttcttcattccagggggcagctgcatgatctgctgtgcagtgtggtggtcatgggaataacccttcccggcttctcgtgca

SEQ ID NO: 823253 - DNA, 120 bp, Artificial Sequence
  ENSG00000274253_31 (sequence is synthesized)
ggctccaggctgccagggtggctcatatcacaaggatatttggagggagggaggcagggctctgagcaccgctcctcctgcatcttctcctcctgctctcccatcctctccttcttctcc

SEQ ID NO: 823254 - DNA, 120 bp, Artificial Sequence
  ENSG00000274253_32 (sequence is synthesized)
cccatcttctccacctgcccccggatcttctcctcctcctcctgcatcttctcatactcatcccacagcctctcctccttgaatcgcagcctctcgacctgcttccgcatctgctcctcc

SEQ ID NO: 823255 - DNA, 120 bp, Artificial Sequence
  ENSG00000274253_33 (sequence is synthesized)
tgggtcaagcaaccaggaaacggaagcccaaagaggaggggagcttacagcaggccctggactagggattaacacaaaaacaacagcaacaaatctgatttaagcttcacacatgctgga

SEQ ID NO: 823256 - DNA, 79 bp, Artificial Sequence
  ENSG00000274253_34 (sequence is synthesized)
caacagcaacaaatctgatttaagcttcacacatgctggaatgcagtggcgtgatctcaactcattgcaagctccacct

SEQ ID NO: 823257 - DNA, 120 bp, Artificial Sequence
  ENSG00000274253_35 (sequence is synthesized)
ttgtgaggttttaatatgaagtattaaagctatgctggttagacaatttggaaaatgtttcttctcctatttctgacagagtttatgtaagatgtgtgctatttcttccttaagcatttg

SEQ ID NO: 823258 - DNA, 120 bp, Artificial Sequence
  ENSG00000274253_36 (sequence is synthesized)
gaaagaattcacttattaagccatgtgagactgtagttttctttataaggtgtttaactacaggttcaattacatatatataaatattcattttggtaacctgtgtttgctgaatcaatt

SEQ ID NO: 823259 - DNA, 120 bp, Artificial Sequence
  ENSG00000274253_37 (sequence is synthesized)
tgttcattttatcgaaaatttcaaagttattctattattcatttatctttttaatacttataaagtctccggttagagtttgtgccttttgtctgttttgttaatcaatcttgctggagg

SEQ ID NO: 823260 - DNA, 120 bp, Artificial Sequence
  ENSG00000274253_38 (sequence is synthesized)
ccatcaattttattagtgtttcaaaaaagcaaactttgattttattcatccctttaccatactgaaaatgttttgcttaatttccaaacttatagttccactgtgattaaatatttgtat

SEQ ID NO: 823261 - DNA, 120 bp, Artificial Sequence
  ENSG00000274253_39 (sequence is synthesized)
aactaaaactctgtggaatttgtgtcttctcaatgattgaaaatatgattaatttttataaatattgcttctgcacttgaaaaggatatgtattctgcatgttgagcgtagtgtaccacg

SEQ ID NO: 823262 - DNA, 120 bp, Artificial Sequence
  ENSG00000274253_40 (sequence is synthesized)
tatctcagttaggtccagtgtgttaaatgcatcctttaaagattctatgtgcttactgatgtttgtttatttttcagtggctgagacacagatattaaagtttcccacaatgatcatcaa

SEQ ID NO: 823263 - DNA, 120 bp, Artificial Sequence
  ENSG00000274251_0 (sequence is synthesized)
gcctatgcggggcggggccctggcgctagccaatggcaaatgttcttttcagcttcgctaatccccgtggccagtttgtaactccctagagtccagctggagccttcactcggtcctttg

SEQ ID NO: 823264 - DNA, 120 bp, Artificial Sequence
  ENSG00000274251_1 (sequence is synthesized)
gcccgccccgccttgtgggggcaggtctggaggtctgaagagagtttgggctaatccaggccccttcccggctcccacccaacccccactggccccaggagacctggctggagaagccca

SEQ ID NO: 823265 - DNA, 120 bp, Artificial Sequence
  ENSG00000274251_2 (sequence is synthesized)
ccactcttagtccgagtaagtgtttgccgttttgactctcctggggtcccaagtcgtgtccggcccgccccaccagtcaggaagattccatactgagtaggaaggcagagcaagggtctg

SEQ ID NO: 823266 - DNA, 120 bp, Artificial Sequence
  ENSG00000274251_3 (sequence is synthesized)
gtccccccaccacaatgtgtttggatccctagttcttcactggcaaaatctgccctgtctctcacaataatgtgagtctgagcagaaaatattaataataaacctaacactcattgcacg

SEQ ID NO: 823267 - DNA, 120 bp, Artificial Sequence
  ENSG00000274259_0 (sequence is synthesized)
tagtaggagggcacaggcccagggtgtcctcgcaacgggcgtcccggggagctgctgaagtcctccccgctgcagaggaccgagaggcagggcccgggagagaacagcccggtcggaggg

SEQ ID NO: 823268 - DNA, 120 bp, Artificial Sequence
  ENSG00000274259_1 (sequence is synthesized)
ggtgggccgtcagccgccccggaaagctgcgtttcccggtgattaagtgtagcacccgcccccggccgcccctcacctgccaatgatgctcttgatctgggaatccttctctgcctgctg

SEQ ID NO: 823269 - DNA, 120 bp, Artificial Sequence
  ENSG00000274259_2 (sequence is synthesized)
tcactctgctccagtcgggcctgatactgcatcaggattttgctggtttgttcttcctgggacagcagcctccgctcatactcttccagcttccggttggacatgtgcagccgctctttc

SEQ ID NO: 823270 - DNA, 86 bp, Artificial Sequence
  ENSG00000274259_3 (sequence is synthesized)
ctcttccagcttccggttggacatgtgcagccgctctttcagatccctgcaaatgtaatcaaactaagaagaggccagccatggta

SEQ ID NO: 823271 - DNA, 120 bp, Artificial Sequence
  ENSG00000274259_4 (sequence is synthesized)
gggcctggcacttgcccacatcactttgtgtcttcccaccggccctgcgagggtgggggttgccgtcctcagtttccaggcgggggaaacgggctggaagcgtcactcagctaatagtag

SEQ ID NO: 823272 - DNA, 120 bp, Artificial Sequence
  ENSG00000274259_5 (sequence is synthesized)
tggacctgggactggaactcagatttgctaaggaaccaggcaggttctttcctgttttctgcacgggagcattttaaccagcaattaaagaaaccttatttctaggtaatttttaaaaga

SEQ ID NO: 823273 - DNA, 120 bp, Artificial Sequence
  ENSG00000287893_0 (sequence is synthesized)
gtttgaatgaggtggctggggcaaaggaagacaacgtccattttctgaggagctatgctgcagagaggcccccagcaccctcggaagagttgaagcagggccatcgaatcctctggttct

SEQ ID NO: 823274 - DNA, 120 bp, Artificial Sequence
  ENSG00000287893_1 (sequence is synthesized)
gtggttgtgggacctgaggcggcagcttggggaaaaaggcttcaatccatgaattgggcttcctaatcagcaacatggaaactaaagccagctccacgcagcagcatgtgaggaagtcag

SEQ ID NO: 823275 - DNA, 76 bp, Artificial Sequence
  ENSG00000287893_2 (sequence is synthesized)
actaaagccagctccacgcagcagcatgtgaggaagtcagagactccaaatggagggttggacatttattagttcc

SEQ ID NO: 823276 - DNA, 73 bp, Artificial Sequence
  ENSG00000287893_3 (sequence is synthesized)
gagcaatatgaaatgtgggcaccttaaaaaaagaacagtccaccagtgagctgggtggaacagagccatattt

SEQ ID NO: 823277 - DNA, 120 bp, Artificial Sequence
  ENSG00000287893_4 (sequence is synthesized)
tcaaaagcaaatgggagaaatatcaccgaattctttttctcagcatggaacatccccgagaaagagaatgcgcacctgggggtaggtctctaaactggccccactgggcgtggtcgtctc

SEQ ID NO: 823278 - DNA, 74 bp, Artificial Sequence
  ENSG00000287893_5 (sequence is synthesized)
gaaattcctgccgaataaattttggtccgatggttgatctcaaaactctgtctcctgataagatgttatcaatg

SEQ ID NO: 823279 - DNA, 120 bp, Artificial Sequence
  ENSG00000244461_0 (sequence is synthesized)
gatttactttcagctctgttccagaacagatgctcttttccactccccacggagatcaagagcttggagcagaaataatagctctcctcacaaaaagacaagagtggagagaaccacaca

SEQ ID NO: 823280 - DNA, 120 bp, Artificial Sequence
  ENSG00000244461_1 (sequence is synthesized)
ttatgcacctatctctacagtctttgcatacatggcctacttttattaccccttctctttttgaggtaaccaggtatccaggttaatcacgctacccttggttatcatcacatgtatttc

SEQ ID NO: 823281 - DNA, 120 bp, Artificial Sequence
  ENSG00000244461_2 (sequence is synthesized)
tgaaattgtcttttacatatatctttttacttgttaatgtaagacataagaacagcctttatcttgttgattatggtaattagcacatagtaatttctcaataaaaatatgttggaaagt

SEQ ID NO: 823282 - DNA, 120 bp, Artificial Sequence
  ENSG00000270947_0 (sequence is synthesized)
agttcaggtcctaatatctttgtggtttttttttcctcagtaatccatttattagtgtctgtggggtgttgtagtttcctcctattattgtgtcagagtctgtcttcataagtcactaag

SEQ ID NO: 823283 - DNA, 120 bp, Artificial Sequence
  ENSG00000270947_1 (sequence is synthesized)
tgtctactgaaattccgacgtcttgacagttcaacatgttccaggacatggctgttgtaggaaaaaatatgaattagaaataagaggatttattcacataccttaaaataaaggagaata

SEQ ID NO: 823284 - DNA, 120 bp, Artificial Sequence
  ENSG00000270947_2 (sequence is synthesized)
ttttgctcttctctcttttcttatagcatttatattatatgtagacaattttctctgttttttttgaaatatatggaagtcatattaacagctaaataaaccttttggcattctttttta

SEQ ID NO: 823285 - DNA, 120 bp, Artificial Sequence
  ENSG00000287117_0 (sequence is synthesized)
ggcggagcttagggaggcgccggtgtcgggaggaacccagggactgggagaaatgaggcttctccccaggaccagcattccatgaaggcagcccttttctagatggagaaaacagaacct

SEQ ID NO: 823286 - DNA, 120 bp, Artificial Sequence
  ENSG00000287117_1 (sequence is synthesized)
gaaggcacccgtttccctaaactgctctcgctcatgtttctacagggcctggagctgatacgaaaaacctcccttctttcccaaatggtccccagcttccccgttcactgaaggccctgc

SEQ ID NO: 823287 - DNA, 120 bp, Artificial Sequence
  ENSG00000287117_2 (sequence is synthesized)
agtcgggaacagtcaggactttgcacccagttgttttgggtgtttggacgacccttcctcttgtgtgattcatggacccgcagcattgcatcacccgtgagcttttggaattgaagactc

SEQ ID NO: 823288 - DNA, 120 bp, Artificial Sequence
  ENSG00000287117_3 (sequence is synthesized)
tcagggctcacccgggaggacctgctgggccagaatctgcattttaacaagatacccaggaaagaatgtgctggagaaaaacagagactccctctggcctagagcttcacaagcttagcc

SEQ ID NO: 823289 - DNA, 120 bp, Artificial Sequence
  ENSG00000287117_4 (sequence is synthesized)
ccttccaggagccacagaggagttggggcatcgggaaagtcttggaggatacaagtctacaggtgtatccagcagctccagagagacagcaaccagcgagaaggggtcatgatgatggtg

SEQ ID NO: 823290 - DNA, 120 bp, Artificial Sequence
  ENSG00000287117_5 (sequence is synthesized)
aaggggtcatgatgatggtggtggttttgtcaaaaagaaaagggggatatgcagggaaaagaaagagagatcagacagttactgtgtctatatagaaagggaagacataagagactccat

SEQ ID NO: 823291 - DNA, 82 bp, Artificial Sequence
  ENSG00000287117_6 (sequence is synthesized)
gtagggctgtgcaggacttgccttgttaacaaaatgtttccaagcagtatacttggtaagtcattgccattctctagtctca

SEQ ID NO: 823292 - DNA, 120 bp, Artificial Sequence
  ENSG00000287117_7 (sequence is synthesized)
accaggggcacaatacactgtggaaagcggcagggagccctgcccttgaaagcggcatattgtctaaggtttctacccatgtgatagtctgaaaagtggcctcatgggaggagaaagacc

SEQ ID NO: 823293 - DNA, 120 bp, Artificial Sequence
  ENSG00000287117_8 (sequence is synthesized)
atattgtctaaggtttctacccatgtgatagtctgaaaagtggcctcatgggaggagaaagacctgacggtcccccagcctgacacccgtaaaaggtctgtgctgaggtggattagtcaa

SEQ ID NO: 823294 - DNA, 87 bp, Artificial Sequence
  ENSG00000287117_9 (sequence is synthesized)
atagaggaaggccactgtctcctgcctgtccctgggaactgaatgtcttggtataaaacccagaaccgccctatggtgggaggcgag

SEQ ID NO: 823295 - DNA, 120 bp, Artificial Sequence
  ENSG00000255198_0 (sequence is synthesized)
ccgggctctgagtgctcttgcccgtccggccccagccgcggcccgggaatctacgtcacccgaaaagcgactataaacgccggcgcctccgtccccagccgcggctcgggaatccacccg

SEQ ID NO: 823296 - DNA, 120 bp, Artificial Sequence
  ENSG00000255198_1 (sequence is synthesized)
tctcctcttcacttaggacactggtcctcccacgcctgacaccgacgtcgccaggaccgcggggttgggggaacttggctgtcccacgtctttcaaataaagctgttttgtctaactcac

SEQ ID NO: 823297 - DNA, 120 bp, Artificial Sequence
  ENSG00000255198_2 (sequence is synthesized)
aacgccggcgcctccgtccccagccgcggctcgggaatccacccgaagagtggctataaacgtccgcgcctccattgcgctctcctcttcacttaggtaggtcctgccgcgttgaccact

SEQ ID NO: 823298 - DNA, 120 bp, Artificial Sequence
  ENSG00000255198_3 (sequence is synthesized)
cgcgcgctgccccatgtgcggcggtgaaacccaggccccgacaggcgctgccgcctcccccccgggtgcggtcgctcgcgaggtctggcccctgactcctgaccccgactgcagacccct

SEQ ID NO: 823299 - DNA, 120 bp, Artificial Sequence
  ENSG00000255198_4 (sequence is synthesized)
aaccttgttctttctccgcaggacactggtcctcccacgcctgacaccgacgtcgccaggaccgcggggttgggggaacttggctgtcccacgtctttcaaataaagctgttttgtctaa

SEQ ID NO: 823300 - DNA, 120 bp, Artificial Sequence
  ENSG00000255197_0 (sequence is synthesized)
gtgcccagccggccgatcacaggatgtggacgtgagtcaaccaagcgagaagttccatctggaaactcgggcatgaggtttaaatgtggtctgctctgcctcaggctggctgtgaccttg

SEQ ID NO: 823301 - DNA, 120 bp, Artificial Sequence
  ENSG00000255197_1 (sequence is synthesized)
agctggtgatgtccctgcctcagtttcctcaccttctgatggagatgggaggggaagaaagcagctgcctctgggtggtggcagagatgcccatgtctaggacctccaggccttaactaa

SEQ ID NO: 823302 - DNA, 120 bp, Artificial Sequence
  ENSG00000255197_2 (sequence is synthesized)
tcaggggcactgatgaagccagcggggctccactggggaccacaggcaagactgggccaggacgaggcggtcacgcagaggagcacgggcctccccgggagtgggcttcagcctccctag

SEQ ID NO: 823303 - DNA, 120 bp, Artificial Sequence
  ENSG00000255197_3 (sequence is synthesized)
actcctgtctccttccaagggctaggcctgggggaccagaagcaagagtccctagagcgtccaagatttttggtttcaaaccaatttcctgctgaccagaatgaaatggagccacattcc

SEQ ID NO: 823304 - DNA, 120 bp, Artificial Sequence
  ENSG00000255197_4 (sequence is synthesized)
agcacgatgcacctgctgacctcctgcaagtcagggaccttctctgcccctcttttgctctgctgcaggagggagaagctgggaatgtgttcctctggggtcccatcacctccagccagc

SEQ ID NO: 823305 - DNA, 120 bp, Artificial Sequence
  ENSG00000255197_5 (sequence is synthesized)
cactgtccctgtctccccaaaacctcctcgttgtccctcctctgtcctcctcctcctccatctgccttcgccctgctctcctctttttcgcctgaggttcgtgctgcctcctcacctctt

SEQ ID NO: 823306 - DNA, 120 bp, Artificial Sequence
  ENSG00000255197_6 (sequence is synthesized)
gtcctgtttctcccttctctctgctccctcctttgatcttgctattttgcttctctttcccttcctctcttctcctccctccccttcctccctgctccctgcctcagcttctcagtctct

SEQ ID NO: 823307 - DNA, 120 bp, Artificial Sequence
  ENSG00000255197_7 (sequence is synthesized)
ctccgttcttcctctagcttccttccctccccagaagacccagcccttcctagagccccagaagccagggttcatgccccagctctctacccacacatgctgtgcaaccctgggccagtc

SEQ ID NO: 823308 - DNA, 120 bp, Artificial Sequence
  ENSG00000255197_8 (sequence is synthesized)
actggtctcttgggcctcagttcaacagatggctgtcttggtgatgtgagatcatagggtggaagcacccagaatggtgccaggcactcaaaaatttttttcttttcctttttaaggaac

SEQ ID NO: 823309 - DNA, 120 bp, Artificial Sequence
  ENSG00000255197_9 (sequence is synthesized)
tactaaccgtgaggttatggattaccaaaccgttcctgttcttggaatctgggtcctactattcccaagaatttgaattaccacgggtccctggggatgtaaggggatgaggcttctgat

SEQ ID NO: 823310 - DNA, 120 bp, Artificial Sequence
  ENSG00000255197_10 (sequence is synthesized)
gtactttgggagggggaggagtggaaagaggagttgggaggacactctagcattgcccagagggcagaggacattctgcctatttccagaggttattgaccctggatctcttttatggag

SEQ ID NO: 823311 - DNA, 120 bp, Artificial Sequence
  ENSG00000255197_11 (sequence is synthesized)
acacagtctactgtgtttcttggctgcacccacggaggacagcccccatactccttgcttacaaccagcaaagactccacagccatccctgcacacgactcaggctccttggcttggcac

SEQ ID NO: 823312 - DNA, 120 bp, Artificial Sequence
  ENSG00000255197_12 (sequence is synthesized)
tcaaggctctttgctttcctgtcctgctttgcttccagctgcaaagatggtggcttcctgttttcctcttcgtttcctttgcttaagttgattctcagccagacatgctttccccctgca

SEQ ID NO: 823313 - DNA, 120 bp, Artificial Sequence
  ENSG00000255197_13 (sequence is synthesized)
cgcttccctaagccatcctatctgggaccctgacccaatcaatggttccctaatgcacctttgagaccaagtgtacctggcacctcctctcttgccccactatctgctcacatgaccctc

SEQ ID NO: 823314 - DNA, 120 bp, Artificial Sequence
  ENSG00000255197_14 (sequence is synthesized)
tgcaggcctgtaagctgctggaggctccgagtatgcctcattcatgtctatcccccttactaggcccagaccatggaagacactcaataaaaagtaagtgattaaatgacaacctctacg

SEQ ID NO: 823315 - DNA, 120 bp, Artificial Sequence
  ENSG00000255197_15 (sequence is synthesized)
gaaaagagtatggagatttctcaaagaactaaaaacagaactaccttttggccagatgcagtggctcacacctataatcccaacatttgggaaggctgaggcaggtggattgcttgagcc

SEQ ID NO: 823316 - DNA, 85 bp, Artificial Sequence
  ENSG00000255197_16 (sequence is synthesized)
gaaaccctatctctacaaaaaatacagaaaattagatgagactacaggtggcacacatccatagtaccagctactccagtccagg

SEQ ID NO: 823317 - DNA, 120 bp, Artificial Sequence
  ENSG00000255197_17 (sequence is synthesized)
cgggaggatcgcttgagcccaggaggtccaggctacagtgggccaagatcacgccattgcactccagcctcagtgataaagtggcattctgtctcaaaagaaaaagaactggccaagcat

SEQ ID NO: 823318 - DNA, 120 bp, Artificial Sequence
  ENSG00000255197_18 (sequence is synthesized)
caacaagagcgaaactcagtctcaaaagaaaaagaaaaagagagaaaagaagaaaggaaaagaaatatcatttgatccagcaatctcactgagtatctaaccaaaggaaaataaatcact

SEQ ID NO: 823319 - DNA, 120 bp, Artificial Sequence
  ENSG00000255197_19 (sequence is synthesized)
cactataccaaaaagatactgcatttttatgtttatcacagcactattcataatagcaaagacacagaatcaacctaagtgtccatcaacggatgagtgaataaataaaatgttatattt

SEQ ID NO: 823320 - DNA, 120 bp, Artificial Sequence
  ENSG00000255193_0 (sequence is synthesized)
gcggcgcggaacaagccccgcagggccttccctggccgccaacacaccactcccggagctgattccctgtgcccagctcctttcttggcgaggcttcagtcccttagtcggcctcagtct

SEQ ID NO: 823321 - DNA, 120 bp, Artificial Sequence
  ENSG00000255193_1 (sequence is synthesized)
gtccaccttcggagaggtctgagcgctagccggagacaggtagacaccgagaagtgacagaacccagaggaagctggagagaggcagcgaggaaacgagggcccggcgggcagcagcatg

SEQ ID NO: 823322 - DNA, 120 bp, Artificial Sequence
  ENSG00000255193_2 (sequence is synthesized)
tctgcagcacccagcaagaccaacgcagaaggcaggagagagaaaaagagaaaggaagaaagagagataacacaaagggaacaaatataaatcactgacttttttctttggagtctcctt

SEQ ID NO: 823323 - DNA, 120 bp, Artificial Sequence
  ENSG00000255193_3 (sequence is synthesized)
taccaagagcaaaaagaatcttgatagtgagatttctgtctatgcttgtggccctcagagaagcatttcaatagattattcatctgtaaaactggaatggggagagaagatcctctgtca

SEQ ID NO: 823324 - DNA, 120 bp, Artificial Sequence
  ENSG00000255193_4 (sequence is synthesized)
accttaagatgcaagctgtgctatataatagttgaaaggacacagaaaaatatttaggacaattaaagcaagctaccattctagacatagggattataaataaattgattttgatattga

SEQ ID NO: 823325 - DNA, 120 bp, Artificial Sequence
  ENSG00000233521_0 (sequence is synthesized)
ggtgaggacatcactggacaaacccagatcgtgagacattcaaaacacagttggtccagacttttcaaaaacgtcaatgtcattaaaaaggaaggaaaaaagcattccctctggaataca

SEQ ID NO: 823326 - DNA, 120 bp, Artificial Sequence
  ENSG00000233521_1 (sequence is synthesized)
tcagcactgttgcctttgaggctggcctgcttgaatgcacacctgagctccggattcacagcaatttcttggatgattcacagtggaggaagccagatgccatgtcatgagggtgctcaa

SEQ ID NO: 823327 - DNA, 120 bp, Artificial Sequence
  ENSG00000233521_2 (sequence is synthesized)
aacttggcaagcatgtttgagagccacctgggaagtggagccttcagccccagttaagccttcagatgagactgcagtcctggccaccatctggactgcaacttcacaagagctcctaag

SEQ ID NO: 823328 - DNA, 120 bp, Artificial Sequence
  ENSG00000233521_3 (sequence is synthesized)
ccagagccatgcagatggattcttggcccccagaaattgtgccactacattttgggaaatttattatgcagccatagattaccaatacactcactatttcttttttctgatgccatacta

SEQ ID NO: 823329 - DNA, 120 bp, Artificial Sequence
  ENSG00000233521_4 (sequence is synthesized)
gctgatgagagacaggagcgatggatggtctgagttagcggggtcccggcaccacccagcgcaaaggcactgcactcacgcacgccatgcacatgctggctcacctcctccatcccatgc

SEQ ID NO: 823330 - DNA, 120 bp, Artificial Sequence
  ENSG00000233521_5 (sequence is synthesized)
acacctgagctccggattcacagagtctcactctatcgccaggctggagtggtgcagtggcaagatctcggctcactacagtctccacctccagggttcaagccattctcttgcctcagc

SEQ ID NO: 823331 - DNA, 76 bp, Artificial Sequence
  ENSG00000233521_6 (sequence is synthesized)
taaaaccatcttgaatgaccttcatcactgtgaacagtgatgcagtggctttataaactctagaatgtgctacaat

SEQ ID NO: 823332 - DNA, 120 bp, Artificial Sequence
  ENSG00000233521_7 (sequence is synthesized)
gcctgcctaaagatttctgatgcttaatcctcctctgtctcccttgctgtctttctctgtcattgtatctcttggcatctcagttccacgtcttctgtttctctctctttctccacctat

SEQ ID NO: 823333 - DNA, 120 bp, Artificial Sequence
  ENSG00000233522_0 (sequence is synthesized)
tgctcctccttccacctctccgattccacctcctcctcgcaccccgctgggaactcctccaggggctgagattggattcaccgagcctggtgagaatgactcaggagtggttgtccgagg

SEQ ID NO: 823334 - DNA, 120 bp, Artificial Sequence
  ENSG00000233522_1 (sequence is synthesized)
gtgtgccctgcggttcctgtccgagtagtgttcacgcgtgcccagtggtggccgatggggtcacggcccctctccccaccccaggcgcgcggcgatgggatatgaaccagtcactgcctt

SEQ ID NO: 823335 - DNA, 120 bp, Artificial Sequence
  ENSG00000233522_2 (sequence is synthesized)
tgtgctttcctcctctctccgctgccccggtcaaccagcggagagtggggaactgcgggcaggtcggcggagttagatggcagcaaaggtgggccggcttggtgtgataaagttccaact

SEQ ID NO: 823336 - DNA, 120 bp, Artificial Sequence
  ENSG00000233522_3 (sequence is synthesized)
gggtccttccgcgagccctgggtccataagatgtcatcggcgagcgctggacttgaccgtcaacttgggattgttaaggtaaatggtgtctccttctgtcgccaaggcggtggcatggtc

SEQ ID NO: 823337 - DNA, 120 bp, Artificial Sequence
  ENSG00000233522_4 (sequence is synthesized)
gattctcctgcctcagccccccgagtagcagaaattacaggatttgtcgctgatgccttacttcattcactttgtgaggtcatgttttcctggatggtgacaatgctagcagatgttctt

SEQ ID NO: 823338 - DNA, 120 bp, Artificial Sequence
  ENSG00000233522_5 (sequence is synthesized)
ttttcctggatggtgacaatgctagcagatgttcttcagtgtctggacattaaaactttggcatgcagcaccacataagatgtgaaaaaaagattttttttaaaaaaaagatgagcatta

SEQ ID NO: 823339 - DNA, 120 bp, Artificial Sequence
  ENSG00000233522_6 (sequence is synthesized)
attgtagacttcactgtgtggggttattcgtagctatctttcttgggaaggatttccacatatttgaaaagaacccagagttgatctctgcaccacgccatcactgctggtggtgaggaa

SEQ ID NO: 823340 - DNA, 120 bp, Artificial Sequence
  ENSG00000233522_7 (sequence is synthesized)
tctttcagtgatatgaagttaaaaccaggagggaagatcagtggagccttctttctgccatcttgtgttacctttgcagccaagaatcagaatgaagaactttcaataagaaaagctttc

SEQ ID NO: 823341 - DNA, 120 bp, Artificial Sequence
  ENSG00000233522_8 (sequence is synthesized)
ataatttgacttggaatatagagttcattcaaatactttatctagacaatttaagtactggctgatttggcatgaaaatctgacaaactattttcttggtattcaattgatttttactct

SEQ ID NO: 823342 - DNA, 120 bp, Artificial Sequence
  ENSG00000233522_9 (sequence is synthesized)
gtttgctgtagtagttttataaaccaatcagtcttcattaaagttctgggaattcttaccctgttcaaatgatatgattctaacgttgtcaaaaatctgtattcaagaatacttctcagg

SEQ ID NO: 823343 - DNA, 120 bp, Artificial Sequence
  ENSG00000233522_10 (sequence is synthesized)
accttttccatcctttcatgaaactccttaaagatacagtattctataattttgcaagcttgtaaagttttcagaatttgaaatgcctcacaattaagcaatttactgtagaaatgattt

SEQ ID NO: 823344 - DNA, 120 bp, Artificial Sequence
  ENSG00000233522_11 (sequence is synthesized)
taaattttcatagacacagttgacaagaaaattttattatttacaggagtgacccaccacaccaggcctctgaagttcatttaataaaattttataaataaatttatcaaatgtgtcatc

SEQ ID NO: 823345 - DNA, 120 bp, Artificial Sequence
  ENSG00000233522_12 (sequence is synthesized)
tttgaatcccagatttttgtgagcctatgctttagattttcccccaactttctctatttatctagttgtatctattttttacttcttcaatttgaaaccttaagtaacttaaaaaaatta

SEQ ID NO: 823346 - DNA, 79 bp, Artificial Sequence
  ENSG00000233522_13 (sequence is synthesized)
ttaaaaaaattaaaacacattttttgcctttataagttttctaatcaaaagtttatcttcacatcagttgaggtctagg

SEQ ID NO: 823347 - DNA, 79 bp, Artificial Sequence
  ENSG00000233522_14 (sequence is synthesized)
gccagcctgggcaacagaacaggactcggtctaaaataataataataataacaataaagaatcatatcttgctttttca

SEQ ID NO: 823348 - DNA, 120 bp, Artificial Sequence
  ENSG00000233527_0 (sequence is synthesized)
gaagctcaagcggagcccgctggccgcaggggccgcaccacgccccagaccctggagtttccgggtgcgcagacccttgccatcagcagaggctgccgctgcgcgtcccctaggcgcgga

SEQ ID NO: 823349 - DNA, 120 bp, Artificial Sequence
  ENSG00000233527_1 (sequence is synthesized)
agaggcggctggtggtccctgacggcaaggttttatacattacgaataaagctggcacgtttccatttctcctgggcaaatatttagaagaaaagttgctgggtaattggtggagacaag

SEQ ID NO: 823350 - DNA, 120 bp, Artificial Sequence
  ENSG00000233527_2 (sequence is synthesized)
agaaaagttgctgggtaattggtggagacaaggtttcgccacattgactgggctggtctggaactcctgagctcaagcaaccggccctccttgacctcccaaagtgctaggattacaggt

SEQ ID NO: 823351 - DNA, 120 bp, Artificial Sequence
  ENSG00000233527_3 (sequence is synthesized)
gaagtagaataggtagatcacattattattaacagtatatgggaagagggaggtcctcccatgttacattgttctcccttcaccttctgggtcatgttgcaccactgtttcccttctagt

SEQ ID NO: 823352 - DNA, 120 bp, Artificial Sequence
  ENSG00000233527_4 (sequence is synthesized)
tggtcaccagaggaatgggagtaatctgattgaaagataagacagaagattgtactctcttttttttttttttgagacagagtcacccaggctggaatgcagtggcattgtcatggctca

SEQ ID NO: 823353 - DNA, 88 bp, Artificial Sequence
  ENSG00000233527_5 (sequence is synthesized)
tgcaaccacatgcagctatttttttttaaattttctgtagagacagggtctcactgtgttgctcagtttgtctcaaactcctgggctc

SEQ ID NO: 823354 - DNA, 120 bp, Artificial Sequence
  ENSG00000233527_6 (sequence is synthesized)
gctcaagtgatcctcctgccttggcctcacaaagtactaggattacaggcatgagtcaccacactcagctgaactctactctttatgttcaggaaagcactggagaagagagaggacaag

SEQ ID NO: 823355 - DNA, 120 bp, Artificial Sequence
  ENSG00000233527_7 (sequence is synthesized)
atgttcaggaaagcactggagaagagagaggacaagagaaacaggtccgtagtgacaggagcctaggaatagagcaggccttcagtcttggtgaaaaaataaatggtattctaagccttc

SEQ ID NO: 823356 - DNA, 120 bp, Artificial Sequence
  ENSG00000233527_8 (sequence is synthesized)
gctgtgaggaatccaagcagctacatagaaaggccacaactagatattccagctgtagtcagctgaagctccagccaacagccaacatcaaccaccacacgtgaaaacgagcaagccttc

SEQ ID NO: 823357 - DNA, 120 bp, Artificial Sequence
  ENSG00000233527_9 (sequence is synthesized)
agatgattccgactcccaacctccaagccacctcagctgaagccaagtagagcagagactagctgtcccccaatgctctaatatgcagattcataattaaaaagaatgttattgttctaa

SEQ ID NO: 823358 - DNA, 120 bp, Artificial Sequence
  ENSG00000233527_10 (sequence is synthesized)
ttacaggtgtgaaccaccgtgcccggccctactttctatcgaagtagaatagaagcactgagaccacagaggcaagagctggggaaggaaaactgcccatgagatgagatgtgcctctca

SEQ ID NO: 823359 - DNA, 120 bp, Artificial Sequence
  ENSG00000233527_11 (sequence is synthesized)
ctcagcttccaaaatcggggagggttgcaaagggatgacaccatccacaccagaactgcatgaatggcatcaggaatgatcagagaccataaattccagtgagaccaataacaccatttc

SEQ ID NO: 823360 - DNA, 120 bp, Artificial Sequence
  ENSG00000233527_12 (sequence is synthesized)
accggaagcccgggccggggagggtgaagggagtcgcggacccggctgctcagccgaggaggaaacccggaccccaggctgagggaggccgaagaaggaactggagggccgggctgggaa

SEQ ID NO: 823361 - DNA, 120 bp, Artificial Sequence
  ENSG00000233527_13 (sequence is synthesized)
acggcacacactagggtctccgtctctcacacacacacaccacaatgacgtcgtaaacaatagcactaaccaccatcgtccgcagctcccgcgtacagaggcctcaggctcccggctcca

SEQ ID NO: 823362 - DNA, 120 bp, Artificial Sequence
  ENSG00000233527_14 (sequence is synthesized)
cgtggaccgacctcgcccggcagcgcggggccacctcaccgcgagctcctcccgcagcccggcccgggtcacctcgactcgccaggcttaactcaataaccacaacaccggaaaaggaag

SEQ ID NO: 823363 - DNA, 120 bp, Artificial Sequence
  ENSG00000233527_15 (sequence is synthesized)
ttcttctggatacctcctgaaggacttgcctgaggctgttttacagttactttttttttttaataagtagaaggagtacagtctaaaataataatacaaatagtacaataaattacataa

SEQ ID NO: 823364 - DNA, 120 bp, Artificial Sequence
  ENSG00000233527_16 (sequence is synthesized)
actagtaatgtaatcacttattattatcacctattacgtactatacataattgcatgtgctatacttttatacaactggaagcacagtaggtttatttacagcagcgtcaccacaaacac

SEQ ID NO: 823365 - DNA, 120 bp, Artificial Sequence
  ENSG00000233527_17 (sequence is synthesized)
ctgagtgatatgttgcatgacaacgtccacaagtgataggaatttttcagctccattgtaatcttatgggaccaccattgtatatgtgtccatcattgagtaaaatgttattacatgaca

SEQ ID NO: 823366 - DNA, 120 bp, Artificial Sequence
  ENSG00000233527_18 (sequence is synthesized)
catgactgtgttcatcaggaatatgtatgctagtatgaacctataatgagagtgttaaattttatgaagcaaaaactaacagaacaaaagaaatagatccacaagcataattggaaatcc

SEQ ID NO: 823367 - DNA, 120 bp, Artificial Sequence
  ENSG00000233527_19 (sequence is synthesized)
aattcagtagtatatgtaatcagctcttcatatatgcagattcaaccaatagcaatgcacaaatattcagaaaaaacacaatgacagtaaaaaaatacaaattttaaaatacagtataaa

SEQ ID NO: 823368 - DNA, 120 bp, Artificial Sequence
  ENSG00000233527_20 (sequence is synthesized)
attatttacatagcatttacattgtattaagtattataaaaaatctagagatggtttaaaatatacagaaggttgtgcataggttatatgcaactactacaccattttatataacaaact

SEQ ID NO: 823369 - DNA, 120 bp, Artificial Sequence
  ENSG00000233527_21 (sequence is synthesized)
tgggcatctgtaggttttggtatccacaaggtgtcctggaaccagtcccctgtggatagcaagggacaactgtatagaagatatgaaccacaccagtcaacatgacctaattgttgttta

SEQ ID NO: 823370 - DNA, 120 bp, Artificial Sequence
  ENSG00000233527_22 (sequence is synthesized)
cagaacaccatacccacaattgaaaaattacattcttttcatgtacctgaacagtccccatgatagactattggctggaccataagtcacaataaacttcaaaagattgccacattacag

SEQ ID NO: 823371 - DNA, 120 bp, Artificial Sequence
  ENSG00000233527_23 (sequence is synthesized)
ggaatgtgcattagaaaccaataataagaaacctatacagtccttcaatacatggaaattaaataacacacttctagatctacagatcattgaataaataaggggaaaatgttttgaaat

SEQ ID NO: 823372 - DNA, 120 bp, Artificial Sequence
  ENSG00000233527_24 (sequence is synthesized)
atgaaaaagtgacaacagcatatcaaaattggaaggatacagctaaagcagagttgagaggaatgttaagtacttaaataaaaaaaggagaaattcatagcagcattattcacaataacc

SEQ ID NO: 823373 - DNA, 120 bp, Artificial Sequence
  ENSG00000233527_25 (sequence is synthesized)
aagaaatacgtacaacccagatgttcatcagtggatgaatggataaacaaaatgtggtaatatgatttggatatttgttccctcaaaatctcacacggacatgtgacccccagtgttgga

SEQ ID NO: 823374 - DNA, 120 bp, Artificial Sequence
  ENSG00000233527_26 (sequence is synthesized)
ggtggcgcctagtgggaggtgttggattatggggtggatctcatgaatggcttggtgtcctccacatggatatgagttcatcctatagctagttgtttaaaagagcctggcacctcctcc

SEQ ID NO: 823375 - DNA, 120 bp, Artificial Sequence
  ENSG00000233527_27 (sequence is synthesized)
ctagttgtttaaaagagcctggcacctcctccctctcccttttgttccctcttgccatgtgatatgctagctctccctttgccttctgccataattgtaagcttcctgaggcctcaccag

SEQ ID NO: 823376 - DNA, 120 bp, Artificial Sequence
  ENSG00000271015_0 (sequence is synthesized)
gacattctgttgacccagactccactctccctgtccatcacccccggagagccggcctccatctcctgcaggtctagtcgcagcctcctgcatagtaatggaaacacctatttacattgg

SEQ ID NO: 823377 - DNA, 120 bp, Artificial Sequence
  ENSG00000271015_1 (sequence is synthesized)
gggtcccagacaggttcagtggcagtgggtcgggcattgatttcacactgaaaatcagcccggtggaggctgcggatgttggggtttatattactgcatgcaagctacacactggtcccc

SEQ ID NO: 823378 - DNA, 120 bp, Artificial Sequence
  ENSG00000271011_0 (sequence is synthesized)
caagtatataggacttaattggtgagccgccatcttccaagggaggtgtccatgtaagtgttgctttttcagcagaaacattactgatttcaacaggacctgggggaccaggtacatcaa

SEQ ID NO: 823379 - DNA, 120 bp, Artificial Sequence
  ENSG00000271011_1 (sequence is synthesized)
ggactgttaccttcacatgttccaccttcgtgccaaaaggattggtagcagtgatggtatattcacccgcatcttttctagtggcatacttgatagtaagcatggaagatgttggggttg

SEQ ID NO: 823380 - DNA, 120 bp, Artificial Sequence
  ENSG00000271011_2 (sequence is synthesized)
tgccttggaccaacttgattttggaaggggtttgccaagaatgctaatggcattcaaaacaatggtatcccctgctttaattgttagcccatcttttattgtgggatcaaggacaattgt

SEQ ID NO: 823381 - DNA, 120 bp, Artificial Sequence
  ENSG00000271011_3 (sequence is synthesized)
tggtgcctctgcaaagaaaaaaatacattttaatcagaaaaggaaggaggcttaatttgctttaaaaaaaaaagtacataaaaagtaaaatggacctaccgtattcatccttgcaaataa

SEQ ID NO: 823382 - DNA, 84 bp, Artificial Sequence
  ENSG00000264015_0 (sequence is synthesized)
aatccgcgagactccgtggggtaggaccctccgagccaggtgcggggggaaagcgcagtgttctggtgggagtgacccgatttt

SEQ ID NO: 823383 - DNA, 120 bp, Artificial Sequence
  ENSG00000264015_1 (sequence is synthesized)
ggccatcttggctccttcctcatccttattcaattcttgaacggttccacacaaaaataactgaagatgggcctccagtcttacgacgccacaaagtgccctgacaccactgaacacgaa

SEQ ID NO: 823384 - DNA, 120 bp, Artificial Sequence
  ENSG00000264015_2 (sequence is synthesized)
aactcattgcagagttttattgcatgaaagatgtttgtgatgtttgcaattggatgactcaagtctttgtcatggagacctcccttactctcaaggggcctcccagcgcaagaggcagtg

SEQ ID NO: 823385 - DNA, 120 bp, Artificial Sequence
  ENSG00000264015_3 (sequence is synthesized)
agtccatcaccataggaagtgtgcacatgtacagactgttcaaacatacagtacagactgctatgatgtcagcaaacacccatgtgggaaaagcaatgagaattcatccagccaaatatg

SEQ ID NO: 823386 - DNA, 120 bp, Artificial Sequence
  ENSG00000264015_4 (sequence is synthesized)
cattttgaattagtttcttaaaaacatgttacatgaatttaactagggaatagaggataattactaccaataccagatgtggaagaacaaacaaaaaactcttaggacgttaacaaaaaa

SEQ ID NO: 823387 - DNA, 120 bp, Artificial Sequence
  ENSG00000264016_0 (sequence is synthesized)
agcagggataggttgtctgtgctcactcagcataagctgggacagcttgcaggctgaggcctgaagtcatgtgaaggctctctctcacgcatctggtggttgatgctggctgatggctga

SEQ ID NO: 823388 - DNA, 120 bp, Artificial Sequence
  ENSG00000264016_1 (sequence is synthesized)
gattcaagctggcgtgcctgccagagcactcacagatgcttctccatgtcacctgggcttccttccaacatggtggctggtgttccatagataaggcaacagaggccagaggaggttcag

SEQ ID NO: 823389 - DNA, 120 bp, Artificial Sequence
  ENSG00000264016_2 (sequence is synthesized)
tccttctgccattgacaccatcacatcgaccatccgggcaagacccccgcaccgcccccaagggcgcaggcttgatttcactgccaagccaataatgtcagcaacagcacttatggtgct

SEQ ID NO: 823390 - DNA, 120 bp, Artificial Sequence
  ENSG00000264016_3 (sequence is synthesized)
ggaccataaatgaaacaagctttgagaactaactgccaccccagaggcctcagggaggaggtggctgccctcaaaggctcagtctcgtattctgtaacctctctaccctgaagaagatcc

SEQ ID NO: 823391 - DNA, 120 bp, Artificial Sequence
  ENSG00000264016_4 (sequence is synthesized)
caccagctgcctcttcttccagatcctgccaagaattaggcatctcccaaccccactcctgggcctcttctccacattctccctgccaatcatcccctttaataaaaaacggtgaataat

SEQ ID NO: 823392 - DNA, 120 bp, Artificial Sequence
  ENSG00000264016_5 (sequence is synthesized)
caatcagtactaaggggtctctcctttcctatggacaggaggggagggctttgagtctctagcagtcccctgacatataatagatgcatcctgatacctccacagttattccgaaagtgt

SEQ ID NO: 823393 - DNA, 120 bp, Artificial Sequence
  ENSG00000264016_6 (sequence is synthesized)
ggggtttggagatagcccaaattgggttcaaatccccttctgctgctgtgtgcctttgggaaagctacttgactaccctgagcctatttccttagcctataaaatgtggaagatacagaa

SEQ ID NO: 823394 - DNA, 120 bp, Artificial Sequence
  ENSG00000278537_0 (sequence is synthesized)
gatactgtgatggcccagactccactctcctggcctgtcgcctctagagagccacccccatatcctgtaggtctagtcagagcctcttgtccagtgatggatacacctattcgtattggt

SEQ ID NO: 823395 - DNA, 120 bp, Artificial Sequence
  ENSG00000278537_1 (sequence is synthesized)
ctggagtcccagacaggttcaatggcagtgggtcaggcactgatttcacactgaaaatcagccgggtggagctgaagatgttggggtttattactgcatgcaggctctgcagcttcctcc

SEQ ID NO: 823396 - DNA, 120 bp, Artificial Sequence
  ENSG00000264019_0 (sequence is synthesized)
tctctataatcatttaatttttctttttggaaaatgtatgtatacatacacacagtttccataaaaaaacatagatagtaaagctgattaaaatcttcctgtcctattggtaccagcaca

SEQ ID NO: 823397 - DNA, 120 bp, Artificial Sequence
  ENSG00000264019_1 (sequence is synthesized)
taaaaattcctagtgacagcccactccttctcaggcaggtgtgattgtttgaaatctctcccaatattgagatgaaacctgcttccctgtaacttccctgtaattctgtgggtcccttgt

SEQ ID NO: 823398 - DNA, 120 bp, Artificial Sequence
  ENSG00000264019_2 (sequence is synthesized)
agccacagagaaggcagcaatcagtaggggaagtgctataaaaatatactatcccggccaagcgtgggcctgggtcccaatcccacaccctctcttgacacctagccctagctccactct

SEQ ID NO: 823399 - DNA, 120 bp, Artificial Sequence
  ENSG00000270050_0 (sequence is synthesized)
gtatacgactagagcgacatactaaaacacacgcaagatctgtcttgaaaaatgctgttgccggggaccctcagatcatgttacctgagcatcctcagatgaaccaagcatgcaatcaga

SEQ ID NO: 823400 - DNA, 120 bp, Artificial Sequence
  ENSG00000270050_1 (sequence is synthesized)
cctctgatacccacatccacccccaagcgatgcgcaccttctcactgaccttctctgcttggatcagaggcagttttcttatttccttgcctcgaggtgctgtgtcatacagcagcagga

SEQ ID NO: 823401 - DNA, 120 bp, Artificial Sequence
  ENSG00000270050_2 (sequence is synthesized)
acagacagtcagacacaaggactcgaggcaatggcggcggctgtgtatggggattgactcggcacctgggactcaagacgagataaccgctttatcagattaaagactgcgattggcaaa

SEQ ID NO: 823402 - DNA, 120 bp, Artificial Sequence
  ENSG00000224384_0 (sequence is synthesized)
ctgtcagtcattctgcctcatccataaatttcacagcctgggatacagagctcatcaatgccataaggaagttgaggacttagactgtgtcagaggaaatctttttggcatgggtctgaa

SEQ ID NO: 823403 - DNA, 120 bp, Artificial Sequence
  ENSG00000224384_1 (sequence is synthesized)
gatggaagctggagctgtacacgggctaactctcatgggctactatcaaacagtgagggaaacccacagtctcagagagaaatgtcttctgtgccatttgcagttaccttgctaatgaga

SEQ ID NO: 823404 - DNA, 120 bp, Artificial Sequence
  ENSG00000224384_2 (sequence is synthesized)
gagtccacagagaagagggagcgtctcggcaggcactccagagctctcaccaaatgaggcactgcctattaagcagcatgaaagtacctaaagactgcccataaaacaggaacaaagaaa

SEQ ID NO: 823405 - DNA, 120 bp, Artificial Sequence
  ENSG00000224384_3 (sequence is synthesized)
acaaagctcagtttcacctccagccaaaaaggagtcttcatgacctatcaatatgtaagatgaatacagatcatgctgactttcctcagagaaaagtctaataaaaaatgtccttatcaa

SEQ ID NO: 823406 - DNA, 120 bp, Artificial Sequence
  ENSG00000270052_0 (sequence is synthesized)
acaaaacaaaagggtaaggaagaggcagggccccctctcaaccaaagtccagaagccctctgaagttccaaagacaacctggaagggaaaagggacccttcgagaaagttccaggaaaaa

SEQ ID NO: 823407 - DNA, 120 bp, Artificial Sequence
  ENSG00000270052_1 (sequence is synthesized)
ccagctgaataggaaactcactcaaaatgagccatagcaggaccgagttagccaggagacctccacaatctccagcgtctccctggacagccagtaatttcaaggcaagttcagaggcct

SEQ ID NO: 823408 - DNA, 120 bp, Artificial Sequence
  ENSG00000270052_2 (sequence is synthesized)
agatctatctgagaggtctccagagatctgaccccaaagaactagctagcagggtctaggatacattctataccccacagggtacgccccatggtgatgaaaataaaatgaatctgttgt

SEQ ID NO: 823409 - DNA, 120 bp, Artificial Sequence
  ENSG00000270557_0 (sequence is synthesized)
gttttgaactggggcacatttttaacctaagaagggaatacaggttgtctcgtgaggtggttgtgcagttcaaatgagattacaaacgtgaaagcttgtgaagctcaatgatgtacattc

SEQ ID NO: 823410 - DNA, 120 bp, Artificial Sequence
  ENSG00000270557_1 (sequence is synthesized)
atggagtcctcattgtacaaactggcccttcttggtaacctttagagttccctcccaggctgtaagctgcaagagggcagggaccaggtctgattgtattcatcatgtatcacaatgttt

SEQ ID NO: 823411 - DNA, 120 bp, Artificial Sequence
  ENSG00000270557_2 (sequence is synthesized)
agcagaagggttcatgtgggtgttcaataaagttttgctgagtaggtaaataaatgaattaatgaatcctgttatgctctgaacagttcctattatttgttccttaagcagttccttcaa

SEQ ID NO: 823412 - DNA, 120 bp, Artificial Sequence
  ENSG00000270557_3 (sequence is synthesized)
ctcaacctcctgtgacttactagtgtgccaggagactgggagaattctggatggtactgtcagaggcattcaaaccagagaaactccattttgaatgagggctaggaaaatgagactgag

SEQ ID NO: 823413 - DNA, 120 bp, Artificial Sequence
  ENSG00000270557_4 (sequence is synthesized)
actggctgggctgcattctcgggaagttaggctttcttagcctctagatgtttacagctaagggaacaaattaatagtgtttactaaacaaacccagacttgggagtgtccagatatccc

SEQ ID NO: 823414 - DNA, 89 bp, Artificial Sequence
  ENSG00000270557_5 (sequence is synthesized)
gtatttatttatcacaaactcttgtagcagagcacatctccctatatatacgagcgatgtacctagcatggaatcgttcctcctcttac

SEQ ID NO: 823415 - DNA, 120 bp, Artificial Sequence
  ENSG00000270557_6 (sequence is synthesized)
acgagcgatgtacctagcatggaatcgttcctcctcttactttcggcaacatcctactttgtctatggagtaggtgtcctttcaccactttgctttcttaataaactggcttttacttta

SEQ ID NO: 823416 - DNA, 120 bp, Artificial Sequence
  ENSG00000235209_0 (sequence is synthesized)
ggagagccaataaagatacgacagatctggcaggagaacaagatccagcccaggtgatggggtgtgaggcttggtcttagctacaggagacgctggtctgaaaagaaggcaacgcaagga

SEQ ID NO: 823417 - DNA, 120 bp, Artificial Sequence
  ENSG00000235209_1 (sequence is synthesized)
agagaacagagccaaggcacctgcagcgagccagagccagagccctgacatcacaaatgctttaattggttccatttattgtttaatccacttgaaattgaatttctgtcatccccgact

SEQ ID NO: 823418 - DNA, 120 bp, Artificial Sequence
  ENSG00000235209_2 (sequence is synthesized)
aattagacgaagtttgtattctttttattacttcctttaaccctgaatcagggtccagaagcattttgttgaccattaactcttctctgtgaataaagcagcatgaggaacaacctcttt

SEQ ID NO: 823419 - DNA, 120 bp, Artificial Sequence
  ENSG00000235209_3 (sequence is synthesized)
tattcacagagcaaagctcttcgctgctcagccacagcggcttcaactctggcacgggtcctgaagtgccatttctagcacatgactcacaaagtaaataatctgtaaatgaaaagcctc

SEQ ID NO: 823420 - DNA, 120 bp, Artificial Sequence
  ENSG00000235209_4 (sequence is synthesized)
ttatcatactttggcacgaaaaacaaagcgacaagccaggcagcatttttccctcatatttgaaccccacatgcaccaagggctgttttatgccttgcacatgaggagtttggtttgctc

SEQ ID NO: 823421 - DNA, 120 bp, Artificial Sequence
  ENSG00000270059_0 (sequence is synthesized)
cacagggttgtgctactgtaatgtctccatgcgtcacttggactaaatctctctaattccattgattagagtcacaaatgggttataatatgttaagttccaatatttttctgacttgat

SEQ ID NO: 823422 - DNA, 120 bp, Artificial Sequence
  ENSG00000270059_1 (sequence is synthesized)
tttgttcttttgttgtttattgttaatgctctcctatgccagcctgtcattgttccagttgtttgaaaaaacaaaacaaaacaaaacaaaaaaggatgcattcgttgtctgggttctcga

SEQ ID NO: 823423 - DNA, 120 bp, Artificial Sequence
  ENSG00000270059_2 (sequence is synthesized)
gtcaccttatggctgtctaaaaatgtcactgttccgattgcggtctctgcagccttatttgagtgttgccttagactgtctgactggacaaataaactctctttgccctatgttaacaaa

SEQ ID NO: 823424 - DNA, 120 bp, Artificial Sequence
  ENSG00000235204_0 (sequence is synthesized)
tacttggctttgcagcatgcaacaggagcaaagcacgacaaaggcagccagatgtggtttaaggttttgtttgctaaaagaagacgtccaaagttcattcggtaagctcaaactcgctga

SEQ ID NO: 823425 - DNA, 120 bp, Artificial Sequence
  ENSG00000235204_1 (sequence is synthesized)
ttccattaacgacagggtttttaaacgtgcctccaagacctgcctgcacgtactgtacaccaaactaaggcgacattttcccccaaaaaaggcaagctgaatttggaaaagtcagaccaa

SEQ ID NO: 823426 - DNA, 120 bp, Artificial Sequence
  ENSG00000224388_0 (sequence is synthesized)
tggtatttgtatccacttttaattatatgcaaatgaaggggcagtttatgcagacatttccagggtgagggtggtaacttctgggtgctgccagagccatggtgaactgacttgacacag

SEQ ID NO: 823427 - DNA, 120 bp, Artificial Sequence
  ENSG00000224388_1 (sequence is synthesized)
agcatctgccctggacctattttagctagtgctcagtttggtctgagccctgcctggcactggaggagtaaaaatctctggatacctgatctaaggagcccagaggcaggacgatttcat

SEQ ID NO: 823428 - DNA, 120 bp, Artificial Sequence
  ENSG00000224388_2 (sequence is synthesized)
tctccgtgtcagtggacaggatgggctggaagccttgtgccagcattgtctctggaactgtggtaatctagaatacacaaactttactaagaggttaaagaagcaaggaccaaacatttg

SEQ ID NO: 823429 - DNA, 120 bp, Artificial Sequence
  ENSG00000235200_0 (sequence is synthesized)
cccctatggtttataacccctgagtctgggggtaatggcacggggacccaccagcttgtctgccgccatctggggtacagtgctggaagcggggatacagggacaaataagacacagatc

SEQ ID NO: 823430 - DNA, 120 bp, Artificial Sequence
  ENSG00000235200_1 (sequence is synthesized)
cttaatggctgagaaacacagaggagagacccagagagaaggagaaggccgcatgaagatggagcagagactggagttattcagccaagtcaaggaatgcctggagcaccagaagccgga

SEQ ID NO: 823431 - DNA, 120 bp, Artificial Sequence
  ENSG00000235200_2 (sequence is synthesized)
agaggcaaggaaggatcctcccttagagcatttggaagagtgtggccctgccaacaccttgacttcaaacttctggcctccataactatgaaataaattcttgttgttttaagccaccaa

SEQ ID NO: 823432 - DNA, 64 bp, Artificial Sequence
  ENSG00000235200_3 (sequence is synthesized)
agtctgggggtaatggcacggggacccaccagcttgtctgccgccatctgggatgaagtctcgt

SEQ ID NO: 823433 - DNA, 120 bp, Artificial Sequence
  ENSG00000235200_4 (sequence is synthesized)
cacacagagtgtcagttacctaaacattgtgagcctcagttaccttatctgaaaatggggctaaaacttagacctaccttttagggctgctttaaggagtaatagaaattatacatggga

SEQ ID NO: 823434 - DNA, 120 bp, Artificial Sequence
  ENSG00000235200_5 (sequence is synthesized)
attacatggcaccaagttgttccttaatagagggaaactgttatgatggcggaagagcagtaatgaaatactgaattcatccagcagatggcagaagatggatttgcaaacaagaggact

SEQ ID NO: 823435 - DNA, 120 bp, Artificial Sequence
  ENSG00000235200_6 (sequence is synthesized)
ggcacggggacccaccagcttgtctgccgccatctggggtacagtgctggaagcggggatacagggacaaataagacacagatcctgttcctaaagagttttttgagatgaagtctcgtt

SEQ ID NO: 823436 - DNA, 120 bp, Artificial Sequence
  ENSG00000235200_7 (sequence is synthesized)
gtagctggattacaggatcatgacaacagcatgaaacaatgcaagtagaatttctggaataccctatgttaatgccatttcccttccccttttccctgaagagtcttttctaaggcacca

SEQ ID NO: 823437 - DNA, 120 bp, Artificial Sequence
  ENSG00000235201_0 (sequence is synthesized)
aatacagcttggaattctgaacgtgtgatgctggagccaggaccaactgcaaagatcctttggcattgtgccgtcgaggaaactgaggtatgctgttctgaggtaaatttatatgcctct

SEQ ID NO: 823438 - DNA, 120 bp, Artificial Sequence
  ENSG00000235201_1 (sequence is synthesized)
gattgtgcaccagctgtctgcagtgagggtcaactcaataatatgtctttacaatccctttttctctgtctctaacttccttcagtgaccccctcactctggctctctgaataaattcct

SEQ ID NO: 823439 - DNA, 120 bp, Artificial Sequence
  ENSG00000275665_0 (sequence is synthesized)
gaaaaggcggcgccatcctaaggagggacacagatccaccgcccaattcctttcctgggatcttcagagttatagaaatttgaggtcaagacagacctggattgaacttaaacctgacat

SEQ ID NO: 823440 - DNA, 120 bp, Artificial Sequence
  ENSG00000275665_1 (sequence is synthesized)
caacttttgtgaccttgggctcctaaccagcctctccgaagtgactgttattaagattaaaagaaggcctgtctcaggggtctcatcagcaggcacaggggtggcactcagtgcgggcat

SEQ ID NO: 823441 - DNA, 120 bp, Artificial Sequence
  ENSG00000275665_2 (sequence is synthesized)
ctgagctggaggtggtggtggagaagcgcatgatgggcccaaagccagagaagaccaccttctgctcaaaaaggctatggctggaagactttttcccctttgactccctgctgctctcag

SEQ ID NO: 823442 - DNA, 120 bp, Artificial Sequence
  ENSG00000275665_3 (sequence is synthesized)
aggtctcctgcgtgctggcctcgtggtgggaggaagaggaagccgaggaggagacctgaaggagaggagagaggaaggttcaacaccaggcagggaagatggaagccaagagggagatga

SEQ ID NO: 823443 - DNA, 120 bp, Artificial Sequence
  ENSG00000231969_0 (sequence is synthesized)
acaacagacaactgaggtaacgtccactcttcgaaggtgtgtcgtccaccacgtcaggaccaaagtccaagctctccccgtaccctaaggaggccagaactcgcccccatgccaggcaca

SEQ ID NO: 823444 - DNA, 120 bp, Artificial Sequence
  ENSG00000231969_1 (sequence is synthesized)
gatcccccagcccggagccggcagtgcagctcagagcccttccggtttacagccgcggaaaaacaactcggaccagatccgggaggggaatgggggctgggtggccaaaattcagtccag

SEQ ID NO: 823445 - DNA, 120 bp, Artificial Sequence
  ENSG00000231969_2 (sequence is synthesized)
aggatcgaagcggctgctttaacagaagttggggctgcgtaacaacagctccaagcaaagcttcaggctgatcggaaagatgaggaagcagaaaagagactaaagacagacggacaggat

SEQ ID NO: 823446 - DNA, 120 bp, Artificial Sequence
  ENSG00000231969_3 (sequence is synthesized)
ggctggggacaacgacagggacccagtgaaaatacgggcaataccgagggctgtaaccctaacacgggcaaatttggaggggctaacatgggcggaaaccatccgtaccagtcaccacca

SEQ ID NO: 823447 - DNA, 120 bp, Artificial Sequence
  ENSG00000231969_4 (sequence is synthesized)
cggtggtagcacctacgctggcggtgagcaggcaaaggaagttgcttccgagcgcgtcgaaacgatgatgcgcacgcgcaaagtaggcctacgtggagccgacctgccattggggaacct

SEQ ID NO: 823448 - DNA, 120 bp, Artificial Sequence
  ENSG00000231969_5 (sequence is synthesized)
gatggaataaactgctgtgagagggagtattgaaaatacttctcccctggaccttgttcccaggctccgtgtgaagctgaacactccgcatgatctccctgccaccatagcaagctatga

SEQ ID NO: 823449 - DNA, 120 bp, Artificial Sequence
  ENSG00000231969_6 (sequence is synthesized)
agttcattacacatgcaggtagcagacaatacagctctgcttccatttctgagcacctacggtagactgccattattcagtgtgccagcctgtttccaagcctacaatgtatagttcctc

SEQ ID NO: 823450 - DNA, 120 bp, Artificial Sequence
  ENSG00000231969_7 (sequence is synthesized)
tagtacgtaaactcattttttttctcagagagccaagtagagacacaggcagttttcttctcaaaatgtgccagaaattccaaaacaatctcaaagcattaaaggctatgtgcacaaagt

SEQ ID NO: 823451 - DNA, 120 bp, Artificial Sequence
  ENSG00000231969_8 (sequence is synthesized)
aggtggggcaggggtgatttgggtggatggataggagggcttccgacctgcgttaggcgggtcagttaatcttcagtaactccttgatgcgtttgatagtcctcccaacttaagccttcc

SEQ ID NO: 823452 - DNA, 120 bp, Artificial Sequence
  ENSG00000231969_9 (sequence is synthesized)
ttactgcctccaggagatacagtcttctgttctttttgtcatagttgtttatttttcatgaatcgctgtttttgagcatagggcacttacctctttctgtgtccccagccctaccacagt

SEQ ID NO: 823453 - DNA, 120 bp, Artificial Sequence
  ENSG00000231969_10 (sequence is synthesized)
gccaggctctcaatatgctcgataaatattaggcgattgatttgtaaatcgtgtatcattttcatgtatctaatacttttttaaaaattgattaaagcccataagcccatattttattcc

SEQ ID NO: 823454 - DNA, 120 bp, Artificial Sequence
  ENSG00000231969_11 (sequence is synthesized)
agatgtccttagttttcgacctggtattcttttccattccaggatcctgtccggagtacatcaccatgtcttccaggctcctctggaccgtgaccgtttctcaaactttccttgtttttg

SEQ ID NO: 823455 - DNA, 120 bp, Artificial Sequence
  ENSG00000231969_12 (sequence is synthesized)
ataaccttaatagttttgaagcgacttattggtcatttggtcaaatgtccttcaattgggttttgcctgtatttttctcatgcattaactgaggttatgggtttttcttgagttaagaga

SEQ ID NO: 823456 - DNA, 120 bp, Artificial Sequence
  ENSG00000231969_13 (sequence is synthesized)
tgacagagcaaggaaatatttgtggatatgctaacctgactaaatacgcatatctgctccatacctacctaacatctatcttctcaagaactctgccagggaaggagtagtttctgtgtt

SEQ ID NO: 823457 - DNA, 120 bp, Artificial Sequence
  ENSG00000231969_14 (sequence is synthesized)
tcataaacagactgagactcaaagaggctaagtaaactacctgaagccatatatagcaacacacaatgacggatgtgagattcaaacttggatttatctggctccaaaatttctagtttt

SEQ ID NO: 823458 - DNA, 120 bp, Artificial Sequence
  ENSG00000231969_15 (sequence is synthesized)
tttttttttttttttcccactacagcaaaactaaggagaagagacagagaaaacactagatctgaataacaaaggatgcatacttaagcaaactaaggcatatatagttatcactaaatg

SEQ ID NO: 823459 - DNA, 120 bp, Artificial Sequence
  ENSG00000231969_16 (sequence is synthesized)
ctcaacctggaaagaatactggattgcagtctgctttttctgtaaagacaatagtattataaaaccgaaagagacaacagggaatatttcccactcaactaagcatatctaaaagcacat

SEQ ID NO: 823460 - DNA, 120 bp, Artificial Sequence
  ENSG00000231969_17 (sequence is synthesized)
ttgaagtttggagacaatattctgtgttattttaagaaaagattctatagcattattacctggtggtaagaaaataacatgtaaaagaaaaggtaataagaataaaaaaaataagtaaaa

SEQ ID NO: 823461 - DNA, 120 bp, Artificial Sequence
  ENSG00000231969_18 (sequence is synthesized)
gaggatgagaaagctattactgcacagtctattcataaatgctcaaaacgatgtccctgagtcacttaaatgtgtttgacttatggtgggtatcctcttataaaaaggcagttttcacag

SEQ ID NO: 823462 - DNA, 120 bp, Artificial Sequence
  ENSG00000231969_19 (sequence is synthesized)
acagaatagtagaatttggttaaaaaaaaaaaaaaactattagaaaaatttactttaacctcctttccttttttctaactttttaatgaaatataatattcatgcagaaaactatcagat

SEQ ID NO: 823463 - DNA, 120 bp, Artificial Sequence
  ENSG00000231969_20 (sequence is synthesized)
gtgtatagctcactacattaaaaaaaagtgtattgtgatcagcatccagattaaagaaagaaaggttatttccagaaaccaataaccctcttaccctttttcaatcaccacattccccac

SEQ ID NO: 823464 - DNA, 120 bp, Artificial Sequence
  ENSG00000231969_21 (sequence is synthesized)
cctcccaaagatagttgctgccctacttctaacagcattgcctttgtactttatataaatagactcatacagtatgcacccttgtactactttgtgtctgaattattttaactttttttt

SEQ ID NO: 823465 - DNA, 120 bp, Artificial Sequence
  ENSG00000231969_22 (sequence is synthesized)
tttttaaataatgacacccaggatgtgacaggcacacaaataatgaccaagcaaggaatacaagaagccacaggtcttcatctttggactaaagcaattctcactagctctttcagaaag

SEQ ID NO: 823466 - DNA, 120 bp, Artificial Sequence
  ENSG00000231969_23 (sequence is synthesized)
aaagtttttgctccataagactttaacacattttcatcttaaaagatgtttcaactatatgaatcaacaaagaaacaaagatataaaaaacaataaaattaaacatctaagtaaataatt

SEQ ID NO: 823467 - DNA, 120 bp, Artificial Sequence
  ENSG00000231969_24 (sequence is synthesized)
atatgcaaaatgagtagctgcaatgtcaaattttgtctgcttaatctcacgtgtaatccagatataaataagttattgttttgaacgataactttatttttatgtcctctatgcctccac

SEQ ID NO: 823468 - DNA, 120 bp, Artificial Sequence
  ENSG00000231969_25 (sequence is synthesized)
aaaattaactgtacctaactggccaattttcagaaggttaacttatctctatgaatatataacttcaataattctcatctttgcatagatgtgtgatgaacaatgtggaagtaaaaatgg

SEQ ID NO: 823469 - DNA, 120 bp, Artificial Sequence
  ENSG00000231969_26 (sequence is synthesized)
ctgaaaacacaaacaaaaaaattagtagattgactccagaatactaatgctgtggtcctttgcatcagagattaagtatgcttcactagaagtgtggaggtaggccagctgaatccttgt

SEQ ID NO: 823470 - DNA, 120 bp, Artificial Sequence
  ENSG00000231969_27 (sequence is synthesized)
ggtcactcaccagctgaatgccccccaaacccttggtcttggcctgaaagttattttatttttctttagtgactattgataatatattattttggagacaacctaaaatcggtaacagaa

SEQ ID NO: 823471 - DNA, 120 bp, Artificial Sequence
  ENSG00000231969_28 (sequence is synthesized)
gttagttatgtctattaataaaacagatttataaaaaagaagtatcccaaaatggcatacatatttagaaatccctaaaattcttaaagaaaaatgtttgaattaataatgttccatttt

SEQ ID NO: 823472 - DNA, 120 bp, Artificial Sequence
  ENSG00000231969_29 (sequence is synthesized)
ccctagcatttctatttcctgtttggggaaattgtcaatatgatgtcctgcaatgttgtttttttaggtttgtgattagtttttgtaatgctccttatttttatctggtctactgtaaca

SEQ ID NO: 823473 - DNA, 120 bp, Artificial Sequence
  ENSG00000231969_30 (sequence is synthesized)
taaaatgcaataaaaattgcattctctctatatctaacaactcaagtttaggggaataaatttagcaaaggcccatgcaaatctataggtcctttttccaaataaaaattttgaatttga

SEQ ID NO: 823474 - DNA, 120 bp, Artificial Sequence
  ENSG00000231969_31 (sequence is synthesized)
aaaggaacaaaaatttatcacatgtataaaatgtagaaaagcgtaactttagcacgcagttggctgatatctaaaaaaacagccatccccataagatatataagcaagtgaaaaaagaca

SEQ ID NO: 823475 - DNA, 120 bp, Artificial Sequence
  ENSG00000231969_32 (sequence is synthesized)
catatagaaacaatatcatttccgttctcagctcagaggtcacatgtgaaagattattaaaaagaaaattgtttgctggttgaagttaacccttcccacataccatgtctgtgtaatgtc

SEQ ID NO: 823476 - DNA, 120 bp, Artificial Sequence
  ENSG00000231969_33 (sequence is synthesized)
taagttgacacattgtaattatgtgaaagccatatttaaacatgaagttttcagatgtatatttttatgaatcactttgaatcactcttctgtatgaaacattcatttgaaaggcattta

SEQ ID NO: 823477 - DNA, 120 bp, Artificial Sequence
  ENSG00000231969_34 (sequence is synthesized)
aggtaagattttcaaatccgttttaagaggtggttgactttaaccaaagatttaaaattaatttcactgctatttgtctttaaagccgccacggtgacctcagaaagtccagactttcta

SEQ ID NO: 823478 - DNA, 120 bp, Artificial Sequence
  ENSG00000231969_35 (sequence is synthesized)
ctgaaacgtgacaggagatctaaaattatcacaagggtttcacaaaattttaaaatccagattgattttaatttgaaaaaagtcaatactttatcttctgaatgtgagaactttaaataa

SEQ ID NO: 823479 - DNA, 120 bp, Artificial Sequence
  ENSG00000231969_36 (sequence is synthesized)
gctgaacagcactgagttacttaaacaagttgatttcaaatgtggaacaaaggcttttcattttcacttgtgggcatttcccattttggaaaatggcatgtggctgaggcagcggaacct

SEQ ID NO: 823480 - DNA, 120 bp, Artificial Sequence
  ENSG00000231969_37 (sequence is synthesized)
gtcttggtatggcaagaacagtggcatcaaggaacagtgcttaggaagtcatcagtacctgtcttggaaagcagcccatttgtatgtgcattgtgttttttaacaaaatgtgtatctgct

SEQ ID NO: 823481 - DNA, 120 bp, Artificial Sequence
  ENSG00000231969_38 (sequence is synthesized)
tgcctgtgggagtgcctcgtgtatgtgtgtatactgcagatcatttcactgtgtctcaatttcctcatctatgagatggtcacagacactgccgtcagcattcctcaaattcctaaacct

SEQ ID NO: 823482 - DNA, 120 bp, Artificial Sequence
  ENSG00000231969_39 (sequence is synthesized)
aggcttttgaaaaccagctaaggattccaaagtaaatgatggggcttggaggtataaagaaaaatgaaactgagctgttataactcttttccacgtttccaaacttgagcacacccattc

SEQ ID NO: 823483 - DNA, 120 bp, Artificial Sequence
  ENSG00000231969_40 (sequence is synthesized)
ccgaccagatcccctttcccataatttccacttctgatgttggaccatgactggaaaaaaaggaaagctggaagaaataactgaaaaatccaagaggaaagagtgaaactaaatctccta

SEQ ID NO: 823484 - DNA, 120 bp, Artificial Sequence
  ENSG00000231969_41 (sequence is synthesized)
atagaaaaagtggaacatgattgtcctaatttcctaatcgtctgcccctgagttactggtaaaagcactaagagacgtcccagatattatgatccttttacacagcatgcagatggaaaa

SEQ ID NO: 823485 - DNA, 120 bp, Artificial Sequence
  ENSG00000231969_42 (sequence is synthesized)
tcagggtgggataaaggaagagaagaacagagaagaggcagattaacagaatcaaattccagatgggaaaggatggagaaaggcaaatggcattcgggctctccctctcaactattcatg

SEQ ID NO: 823486 - DNA, 120 bp, Artificial Sequence
  ENSG00000231969_43 (sequence is synthesized)
ctttttcctatgggagaaaagggaggtggtttcttctggatgctctaagtctgggcagacaataaaacatcaccacagtgacagccgggttattactttccagcttgtgaccaaaatgag

SEQ ID NO: 823487 - DNA, 120 bp, Artificial Sequence
  ENSG00000231969_44 (sequence is synthesized)
accctagtgtggcagaattaaaattcgcaatctcatccatgaaaggattttctgtaccagacgttttgttaaaggtctttaaaaaacagcctaatgtgttaatattgaaaatagatgcat

SEQ ID NO: 823488 - DNA, 120 bp, Artificial Sequence
  ENSG00000231969_45 (sequence is synthesized)
gtaatttgagaatgagtataaaataccgtgtgtattgaattaataatgtttcattactcaccatcacagagtcattattttaaataaccgtatttcatttcagtggacagagtgtaaatg

SEQ ID NO: 823489 - DNA, 120 bp, Artificial Sequence
  ENSG00000231969_46 (sequence is synthesized)
agtatgtatttttatgtaaagtggacctgcatcattatttattcatgagttttaaaaggatcattatttttgacagacagctcctgtcaaaagatttatgcataagagctcatgtttccc

SEQ ID NO: 823490 - DNA, 120 bp, Artificial Sequence
  ENSG00000231969_47 (sequence is synthesized)
attgggtaaacgcaagggaggagaaaagaatcagctgcttccccaaaaagccaagggtacttttaatggaaaatgatattagaaatcaagatttggacatttgggatgttgttgcttcta

SEQ ID NO: 823491 - DNA, 120 bp, Artificial Sequence
  ENSG00000231969_48 (sequence is synthesized)
atacttctcccctggaccttgttcccaggctccgtgtgaagctgaacactccgcatgatctccctgccaccatagcaagctatgaagttcattacacatgcagttaaaatatctgcaaac

SEQ ID NO: 823492 - DNA, 120 bp, Artificial Sequence
  ENSG00000231969_49 (sequence is synthesized)
aatcctttgtatcaagctctgctttcagggaaacccagattaaaatagagataccaagagcaacttcagaaagctatcaggatagattttggaaatggtaataaggacaaattgctgatg

SEQ ID NO: 823493 - DNA, 120 bp, Artificial Sequence
  ENSG00000231969_50 (sequence is synthesized)
atgactgaggtagatagacatcattcctagcccacagtagcatcacaatgacaaagaatctcactggatttgggctgaactgagatcctggtggaaggagaagcaaggaattgcactgga

SEQ ID NO: 823494 - DNA, 120 bp, Artificial Sequence
  ENSG00000231969_51 (sequence is synthesized)
gctgtggcacttggatgaaatggagctgacagtaattctaaaattatggagttgcttatttttattttctagtttggaagccttgaaaaatgaaaataaactcaatttagtcaattttta

SEQ ID NO: 823495 - DNA, 120 bp, Artificial Sequence
  ENSG00000231969_52 (sequence is synthesized)
actcaagatataccttaaaaccagaggccttctatggtaaggaaaacccttgtctcctaccactgtgggggcagattgtgccaaaaagtctgcatgcctgtgatttaattaaaagggtgg

SEQ ID NO: 823496 - DNA, 120 bp, Artificial Sequence
  ENSG00000231969_53 (sequence is synthesized)
aagctgcaaagaagaatcagcacatgatctcaaaagtcacctatataaaagacatctcttgcaaggcaaagaacaagactcttggtcctgacatggagacatttagatggacaagctgga

SEQ ID NO: 823497 - DNA, 120 bp, Artificial Sequence
  ENSG00000231969_54 (sequence is synthesized)
gagtcttgaaatctcagattgcccagaatcctaagagcccaattgagaagcaccctcattcttgctgtcagaatcatgtttaccagtactgcaaagacctcacctgagacatactcacac

SEQ ID NO: 823498 - DNA, 120 bp, Artificial Sequence
  ENSG00000231969_55 (sequence is synthesized)
aagagaacttttatccttcctaatatctactcctgctactctaaatggctgaggcaagctaagataatttactttgcttttagtgggacacacttatgtgattaactgttccatccatga

SEQ ID NO: 823499 - DNA, 120 bp, Artificial Sequence
  ENSG00000231969_56 (sequence is synthesized)
atagttatgttactgcaaaacatcctggcataaaaaatgtttccatgaacactcttgccatgtgatctgttcaatcactaaaagtcatgacacaaaaatggcagactaacagaggttgaa

SEQ ID NO: 823500 - DNA, 120 bp, Artificial Sequence
  ENSG00000231969_57 (sequence is synthesized)
ctagcatgtgaaaatgtcttgtggtactggcactatgtgggtggcagagaagatgcaaatttgagagatatcaaaacacaaatggatctgatgaaaattctttcaaatttttaaacttac

SEQ ID NO: 823501 - DNA, 120 bp, Artificial Sequence
  ENSG00000268108_0 (sequence is synthesized)
ggaatgagccatcgcacctggccatcaagctggaaaattttaaggtctgtttctttcccaatgtagagtaaaggttgggacagggaagagggctagaaacctgacttcagctccctgccg

SEQ ID NO: 823502 - DNA, 120 bp, Artificial Sequence
  ENSG00000268108_1 (sequence is synthesized)
agggctgaactctccagcatcctgatcacttctcattcaaccttgcttgtactcctctgtgatcggtagcttattacctcaaaacagaatattctaagtcaacctttgccccctcttacc

SEQ ID NO: 823503 - DNA, 120 bp, Artificial Sequence
  ENSG00000268108_2 (sequence is synthesized)
aaaggccttctgtgggccacgttctcaaggtcccctggccatctgcttgcctgttctagtttctctcctcctccacccacatcgtgaaatgtcccctcccactccccagcaaggtggtgt

SEQ ID NO: 823504 - DNA, 120 bp, Artificial Sequence
  ENSG00000268108_3 (sequence is synthesized)
cctctgagactgagtagtcagcaacttaacaccaagggccaccaatgatcaaatccatgagagttgatctgaggagttatgtattagggataagaaacagtaaacactcagtaaatagtg

SEQ ID NO: 823505 - DNA, 80 bp, Artificial Sequence
  ENSG00000231963_0 (sequence is synthesized)
tgcggggctgcggggctgcggggctgccgggctgcgggcggtgggagatgacgggggtgggagcaggagcgggagcaggg

SEQ ID NO: 823506 - DNA, 120 bp, Artificial Sequence
  ENSG00000231963_1 (sequence is synthesized)
gtgggagatgacgggggtgggagcaggagcgggagcaggggcgggagcgggagcgggagtgggagtgctcagtctctcgggtcgcctggatatttatgaaaaggacgccagggaaagggc

SEQ ID NO: 823507 - DNA, 120 bp, Artificial Sequence
  ENSG00000231963_2 (sequence is synthesized)
tccgctgtagaccgaagggataagggttcgattcagaagggagcgttatttttatcccctctccacataatggaacgtttaaatggttaaatcaagtaccttgcaggagagggtggggtg

SEQ ID NO: 823508 - DNA, 120 bp, Artificial Sequence
  ENSG00000231963_3 (sequence is synthesized)
gccttgagaatacactcaaggcctcagtacatgcagtctggaagtgggggaatcaagagcaccctgtctctagtactgtcctcaatgataaggcgctgaggttcccaacctggaccaaga

SEQ ID NO: 823509 - DNA, 120 bp, Artificial Sequence
  ENSG00000231963_4 (sequence is synthesized)
atatttatggaaagcttatcagagaacagaagtgtcagcagaggactgtaagtgctatgtgattggacgacggtggccatagaatttcacctgcccagcacgtattctctcatcctctcc

SEQ ID NO: 823510 - DNA, 120 bp, Artificial Sequence
  ENSG00000231963_5 (sequence is synthesized)
tcctctgccttctttgggagggagaaatcagaaggagtggggatgcagttcagagagcagaggagaagagaagaaaagaaggaagaaggaagaggactagggttgggtggggggggagga

SEQ ID NO: 823511 - DNA, 120 bp, Artificial Sequence
  ENSG00000231963_6 (sequence is synthesized)
caccaatgggaagagggacagatcaactctatacacaaaagtaaatcaaaacaccaaaaacaggggtctatgtaaagaagcctcttcccgtgaattgctcgttgcatagctgcagggagg

SEQ ID NO: 823512 - DNA, 120 bp, Artificial Sequence
  ENSG00000231963_7 (sequence is synthesized)
gtgtttaggggcatagagaatgaaaacatacctgtattttggtgtagggaaattgtttctgtcaattcacaccgtccacacaccacctcccaccccaaccccgccactaccaaattcctc

SEQ ID NO: 823513 - DNA, 120 bp, Artificial Sequence
  ENSG00000231963_8 (sequence is synthesized)
taaataaaaataattatgagatacaggccaacaaaaacgtcagcgttaggctgttatttagagagaattggaaagcgtttgaatgtggccctgttgtttaataaacgataacaatgatta

SEQ ID NO: 823514 - DNA, 120 bp, Artificial Sequence
  ENSG00000231966_0 (sequence is synthesized)
cgtcttcattcttgaagtcggtgagaccgagaaccctccaattgcagacacaatattacatgagatgccgtttgaagctttcacctggagttggcacatctctgaaactccaaacacata

SEQ ID NO: 823515 - DNA, 120 bp, Artificial Sequence
  ENSG00000231966_1 (sequence is synthesized)
ctcaatcgtagaggaaaccactgggctcaccaagagaatgatcgtttccggcccctttctacataacttcatgcaacacggagactcctgaaagttgtagatgagttggatttctgaaaa

SEQ ID NO: 823516 - DNA, 120 bp, Artificial Sequence
  ENSG00000287320_0 (sequence is synthesized)
ttttttttttgtaaaaaatatttcaatgacaaaatctcccaaattagaatatgagaactttgattctggcaatcctttaatgatgatgtagtagaaaaagaaatgaggcaggagctttaa

SEQ ID NO: 823517 - DNA, 120 bp, Artificial Sequence
  ENSG00000287320_1 (sequence is synthesized)
gtccaggtgtcatatttttctgtctataaataagttgttatggtttattttgaacaacatagagtataattagatggttcctaccttttctaggaaatttctggaaaaataacattctca

SEQ ID NO: 823518 - DNA, 120 bp, Artificial Sequence
  ENSG00000287320_2 (sequence is synthesized)
aattaaaatatggcaagtaaaatgatacaaaaaataaaacttttaggttgatttatcaaagaggcatgaataaacagaataaaataatgagtttgaattatcatattttaaataattgca

SEQ ID NO: 823519 - DNA, 120 bp, Artificial Sequence
  ENSG00000287320_3 (sequence is synthesized)
ttaaaatagattggtatcaggtgcctttaattcaataagccttgagctctttgtcacacttttttttcagtattgagttaaagagtggatattaagaaaaacctatctactgctgatgta

SEQ ID NO: 823520 - DNA, 120 bp, Artificial Sequence
  ENSG00000287320_4 (sequence is synthesized)
gaaaaggagtgaccgacttcataagttatctttgtttccaatcatttgaaagaatgtccaacattacttataagttttctataaaccttcagtgaatgttaataattgttggcatttttt

SEQ ID NO: 823521 - DNA, 120 bp, Artificial Sequence
  ENSG00000287320_5 (sequence is synthesized)
ttggcattttttgaacaaatattatgttccatagtatattcatgtattcctagagctttatacaattaatgtatttaatattcataaatacccagtaagactatttattaaatgctaaaa

SEQ ID NO: 823522 - DNA, 120 bp, Artificial Sequence
  ENSG00000287320_6 (sequence is synthesized)
gtcattttacagatggagaaatttaccaaaacctgacttttgaaagttaaagagctatgtaatgagacagcaattccacaaaatttggttccagaatttgatatttattctattactatt

SEQ ID NO: 823523 - DNA, 120 bp, Artificial Sequence
  ENSG00000287320_7 (sequence is synthesized)
tccatgatgaaaaaaaaactgaagacataaaaaatttggaagtatatttctattttgattataaattctttcttctaagcaccacatggttagaagggcaaagttttgcaacctatgatg

SEQ ID NO: 823524 - DNA, 120 bp, Artificial Sequence
  ENSG00000287320_8 (sequence is synthesized)
gtaattttaggtgtataaaataatccacttttgtctattggtaactattttgccaattaaattttgtgtgtaataactggggcaaaatatatgattagcatttgcagcatcaataaattg

SEQ ID NO: 823525 - DNA, 120 bp, Artificial Sequence
  ENSG00000287320_9 (sequence is synthesized)
cctaattgcaaagtcttgttttagctattgctgattctgtttaaatttttaaaattcctgcatattgaagaatatatgcagtctgagtcatttaaagtgggatttgagtaaccaatgttt

SEQ ID NO: 823526 - DNA, 120 bp, Artificial Sequence
  ENSG00000287320_10 (sequence is synthesized)
gcagtctgactgagagtactcagatatgctgaaccaagcatgttctatttattctcccctcctcaccatgggaacctctcacttctcctcttctttgttggagcaactgaagtattagag

SEQ ID NO: 823527 - DNA, 120 bp, Artificial Sequence
  ENSG00000287320_11 (sequence is synthesized)
cagatattgaagagctctcacaatacctttccccatcgagtataaattttcttccctcagtagaaatatgattgtcagactatgaacattttttcaaaattctaactctcactttcagat

SEQ ID NO: 823528 - DNA, 120 bp, Artificial Sequence
  ENSG00000287320_12 (sequence is synthesized)
ttctgaggttcttccaaaaatgagctagtactgacaacttttgaagcacagagaatgtgaagaaatggaatgggctccaatcatttaaaggatgaaaaaactttttgaaatactatttca

SEQ ID NO: 823529 - DNA, 120 bp, Artificial Sequence
  ENSG00000287320_13 (sequence is synthesized)
catcaaactttgatttatagctactaaatatttaacctttttcatataaaaattacagtatgtactgttatctcagaggccaaagtgataacatttgttaaccccaaatccagcagaaaa

SEQ ID NO: 823530 - DNA, 120 bp, Artificial Sequence
  ENSG00000287320_14 (sequence is synthesized)
acaactttttgcttcattagagcactgtcccacttgtttccatgggtggcaagaaggtcttttgtttgtttgtttgtctgtttgtttttttgagaggagactcgctctgtggccaggctg

SEQ ID NO: 823531 - DNA, 81 bp, Artificial Sequence
  ENSG00000287320_15 (sequence is synthesized)
tttgtttttttgagaggagactcgctctgtggccaggctggcgtgcagtggcgtgatgtcgctgcaacctcagcctcctgc

SEQ ID NO: 823532 - DNA, 120 bp, Artificial Sequence
  ENSG00000287320_16 (sequence is synthesized)
ggcccaagaatatcatatttttaggtgcataatggtgatcctttgcatgtttactggcttatattctattccttttgcacatctgcatttttatgccaaattaaataaggtatgtttata

SEQ ID NO: 823533 - DNA, 120 bp, Artificial Sequence
  ENSG00000287320_17 (sequence is synthesized)
tatttctggggaataaaattctttgtcagcattcagttttctgcattcccttgtgagttcaaacactggaagttatttcattagaatttactgaaaatgtttttgagaccagttaaaaat

SEQ ID NO: 823534 - DNA, 120 bp, Artificial Sequence
  ENSG00000287320_18 (sequence is synthesized)
tgctgtataaaattaatgatattgaagacccttacaccatgtatttttatagtaataaagatttccctaagtaattcgacatatgagtgtgactgtaagaaaaacttcccccttattttt

SEQ ID NO: 823535 - DNA, 120 bp, Artificial Sequence
  ENSG00000287321_0 (sequence is synthesized)
atagagagaaagaggaatcatgtggagaggaagaaggtggggagttaaggagagaatttggttatagccaacaggaatagatctgacaactgaaattcttatgggtaaaggcattgtgga

SEQ ID NO: 823536 - DNA, 120 bp, Artificial Sequence
  ENSG00000287321_1 (sequence is synthesized)
ctgctcaacctagatgaggctcaacaatatctcagagggaatccatatgtcatcatttctggccagtgacctctgagtggaagtctgagaagaagtttctgggaagaagagtcctgttat

SEQ ID NO: 823537 - DNA, 120 bp, Artificial Sequence
  ENSG00000287321_2 (sequence is synthesized)
gtcctcactctgttgtttcctgtgaaggatactggtgggcagaagggaagactagattgaggcatccatcttgacatcatgagataaagaccatcaaaattccagaagtacctaaacaaa

SEQ ID NO: 823538 - DNA, 120 bp, Artificial Sequence
  ENSG00000287322_0 (sequence is synthesized)
agaactcagttctaagaatttagtacaggattccattcactggaactgtcagactttctttatgccctctactatttagacaccgatccaagtactggggtatatttaaaggataaagat

SEQ ID NO: 823539 - DNA, 120 bp, Artificial Sequence
  ENSG00000287322_1 (sequence is synthesized)
tctatttagcaaaaataaccactcctcgaaaaatagagtaactaaaactccaacaaaaataatccacatggtaaattgttaccttagcaagtaaagacactccagtaggaaagagctcac

SEQ ID NO: 823540 - DNA, 120 bp, Artificial Sequence
  ENSG00000287322_2 (sequence is synthesized)
ctagtgcccagacacttgtctctactaccattctccttaaaggaatcagggctctcgagaaatgggcgattccaaaggtgaggcaggggagagattcaaaaggatcctagaatatcttat

SEQ ID NO: 823541 - DNA, 120 bp, Artificial Sequence
  ENSG00000287322_3 (sequence is synthesized)
tgtgtcagaaaataagaaagtgctccaaaaaatgacggaagcgtgtcacaaggacatagcagccgctgtgaaggagtttccgctgtccaaagctgggacaacctgaacaccaaaatcagt

SEQ ID NO: 823542 - DNA, 120 bp, Artificial Sequence
  ENSG00000287322_4 (sequence is synthesized)
acatgagtgaattataaactgtaaaaaacaagaaatcatgagtctacaccaataattaataaacaaataaatataggaaaataagagctcattcttatagcagaatactaagtgccaact

SEQ ID NO: 823543 - DNA, 120 bp, Artificial Sequence
  ENSG00000287322_5 (sequence is synthesized)
ggtaaatgtggaccaagtactgaagttgagaagttatcattttgcaactataagagtaaagactgaatcagacaagaaccattaatggctactaagtttagggagaaattttgatgagga

SEQ ID NO: 823544 - DNA, 120 bp, Artificial Sequence
  ENSG00000287322_6 (sequence is synthesized)
gtgccataaaggacaggtagacgaattgtgcctctacatgtgatactctgagaaggacataccacctatgaagtatggctgccagctaagaatccataacttcaatctaatcatgacaaa

SEQ ID NO: 823545 - DNA, 120 bp, Artificial Sequence
  ENSG00000287322_7 (sequence is synthesized)
acatcagacaaatccaaaattagtgttttaaaaagacgaggtcggggggatactcttcaaaaatatacatgtcataaagggctaaaaaaagctacggaaatgttccagattaaaacaaac

SEQ ID NO: 823546 - DNA, 120 bp, Artificial Sequence
  ENSG00000287322_8 (sequence is synthesized)
tacagagacaagacaattaagtacatgacccaagatcagatcctatactggaagggaaaaatgatactgtagacattattaggtcatctgacaaaattggaatatgaatggaaaattaga

SEQ ID NO: 823547 - DNA, 120 bp, Artificial Sequence
  ENSG00000287322_9 (sequence is synthesized)
aggtcatctgacaaaattggaatatgaatggaaaattagatgaaattgttctatcaaagttaaatttactaaagccagtaactgttctggccgggcacagtgactcacgcctataatccc

SEQ ID NO: 823548 - DNA, 120 bp, Artificial Sequence
  ENSG00000287322_10 (sequence is synthesized)
ttcaagaccagcctgggcaacatagcaacctcatctctacaaaacatttaaaaattagctgagcttgctggtacgtgcttgtagttccagctactcagaaggctgacgcaggaggataaa

SEQ ID NO: 823549 - DNA, 90 bp, Artificial Sequence
  ENSG00000287322_11 (sequence is synthesized)
tggtacgtgcttgtagttccagctactcagaaggctgacgcaggaggataaagcccaggaattcaaggtggcagtgagctatgatcacca

SEQ ID NO: 823550 - DNA, 120 bp, Artificial Sequence
  ENSG00000287323_0 (sequence is synthesized)
agaatagcatccaagtcaagggggcacagatgcgtcagagctgggcatgcatggggaaattcccctcctggtcctcgccattggaaaatcgcttgagggtgttagccgggacttggagct

SEQ ID NO: 823551 - DNA, 120 bp, Artificial Sequence
  ENSG00000287323_1 (sequence is synthesized)
gctgccagaccgcgtcgtctccttactcccctgaaggaagagaagaaggatcatcaatggcaagcggcagctgcaacaaaacaacactatgagctggctgcatgctcaggaaagaatgcc

SEQ ID NO: 823552 - DNA, 120 bp, Artificial Sequence
  ENSG00000287323_2 (sequence is synthesized)
agtagagtcttagaagacttgattttgttaagacaacaatattccccaaagcaatatgcagattcaatgcaatccctatcaaagtccccaaatcccacaaattccgttttgctgaagtag

SEQ ID NO: 823553 - DNA, 120 bp, Artificial Sequence
  ENSG00000287323_3 (sequence is synthesized)
aaaagctgactctgaaatgtacatagaattgcaagggatcccaaatagtcaaaacaatcttgcaaaaagaagaacaaggtgttaagactcacatttgccaatttcaaaacttactacaaa

SEQ ID NO: 823554 - DNA, 120 bp, Artificial Sequence
  ENSG00000287323_4 (sequence is synthesized)
gctacagtaatcaaaatcatgtactaccaacataaggatagtcatgcatatagatcaatggaatagaattgacaatccagaaataaacgtatgcaactatggtcaattgattttcaacaa

SEQ ID NO: 823555 - DNA, 120 bp, Artificial Sequence
  ENSG00000287324_0 (sequence is synthesized)
acacgcccagtccggcaaccgcacgggaggtctctccccctagactgtgctccatggggtggacccaggccttgtgctgtttttacttatatcccccatggagaccagagctaggcacag

SEQ ID NO: 823556 - DNA, 120 bp, Artificial Sequence
  ENSG00000287324_1 (sequence is synthesized)
agtacagcagcaccccaactttcagccggttacccatacatctctcatgtcattaagaacaatgaaactatagcacacacacattccagtggaaaaaaataattttcaaagttccctgga

SEQ ID NO: 823557 - DNA, 120 bp, Artificial Sequence
  ENSG00000287324_2 (sequence is synthesized)
aagaggtttagttcagcctggaaggagggcatcccatctgagccgagacctctttgagggtccttgtatgtcacctgctgtctgtcgctggttcgccttctggcatctttgatacctccc

SEQ ID NO: 823558 - DNA, 120 bp, Artificial Sequence
  ENSG00000287324_3 (sequence is synthesized)
cagtcagagacctctgtttgtgccaagaagtcatctgctgtgtcttcaaacaagaccgtaggaggcagagcctctggtgctggcacatcgcagaagctaatacctcgtcaccaacggagt

SEQ ID NO: 823559 - DNA, 120 bp, Artificial Sequence
  ENSG00000287324_4 (sequence is synthesized)
gaagagaccacggctttcccctttccttcctgtattccagcttgcatggatgccagcagaattcaatctaaagtggaaagagaaaagtaaacaaacctgagaactttctggatctctgca

SEQ ID NO: 823560 - DNA, 120 bp, Artificial Sequence
  ENSG00000287325_0 (sequence is synthesized)
aggtgtgcgtgtgtgcctgtgtttgtgggagacagtggccctgtttgaccagtggacacccccacagaagacgtaaacataagacctgaagctgtaaaactcctagagggaaacagggga

SEQ ID NO: 823561 - DNA, 120 bp, Artificial Sequence
  ENSG00000287325_1 (sequence is synthesized)
aatgctgtttgacatgggtcttggcaatgattttttggatatgaagccaaaagcacaggcgaaaaagcaaaaatagacaagtgggactacaccaaactcaaaagcttctgcacagcaaag

SEQ ID NO: 823562 - DNA, 120 bp, Artificial Sequence
  ENSG00000287325_2 (sequence is synthesized)
gaaacaacaaaatgaaaaggcagcctacggaatgggagggaatatttgcaaaccctctctctgataaggggttaacatccaagatatataaggaactgctgtcactcaatagcagaaaac

SEQ ID NO: 823563 - DNA, 120 bp, Artificial Sequence
  ENSG00000287325_3 (sequence is synthesized)
ggacatgcaaatcaaagccacagtgagaccgacttgcacctgttaggatggctggcatcaaaaagacaagatggcaagtgttggccggggtgtggagaaagggagcccttgtaccctgtt

SEQ ID NO: 823564 - DNA, 120 bp, Artificial Sequence
  ENSG00000287325_4 (sequence is synthesized)
ggtgggaatgtaaaatggtgcaaccagtataggaaacagcatggaggttcctcggaaaactaaagatagatctgccatctgatccagcaatccctctactgggttacagccaaaggaaat

SEQ ID NO: 823565 - DNA, 120 bp, Artificial Sequence
  ENSG00000287325_5 (sequence is synthesized)
ggcaccaggatcttgaagatagagctgtactcccatgatcgctgtggctttgttgaggatagccaagatacggaaacgcccgaagtgtctgtggtcagatgaatgaagaaagaaaatgtg

SEQ ID NO: 823566 - DNA, 120 bp, Artificial Sequence
  ENSG00000287325_6 (sequence is synthesized)
gtatagacacatgatggaatattaacctttaaaaagaaggaaacctgccatatatgacaacgtgaataaacctggaggattttatgccaagtgcaataaagccagacccagaaaggccaa

SEQ ID NO: 823567 - DNA, 120 bp, Artificial Sequence
  ENSG00000287326_0 (sequence is synthesized)
aagttgagattcggcatctgtgcaccacacacatcacacctgctggtgacgaggccattacctttttgaagacttcggcacggagtctgttactttggtagaagactctcatgactacct

SEQ ID NO: 823568 - DNA, 120 bp, Artificial Sequence
  ENSG00000287326_1 (sequence is synthesized)
gcacgccaccatcttccccggcctggcgcaattgccttcaggatatgtacagcatgacccacagggatttcacttcatggaatgcaaaaccaacctgcatgagctttgtttgaaaacaaa

SEQ ID NO: 823569 - DNA, 120 bp, Artificial Sequence
  ENSG00000287326_2 (sequence is synthesized)
acaaaacaaaacgaaaacaaaacaaaacaaaacagagaaatcctatctataaaattactcttaatggaaattctgcctgtataaaattaaagtggcagccatctgtggaatcccactgct

SEQ ID NO: 823570 - DNA, 120 bp, Artificial Sequence
  ENSG00000287326_3 (sequence is synthesized)
gaatgaccgttgcacatagcagcttgtttcagaaccctgtcagatgactttgtgctgggcaccaagtggcattgttacagatgccggggtacacacacggagacagctccaggcaaggtg

SEQ ID NO: 823571 - DNA, 120 bp, Artificial Sequence
  ENSG00000287326_4 (sequence is synthesized)
cattgttaggcaagcttcctgtgaggcaaagctagccacagatggaagcctgcacccaaccctactgcccagaggaaccccaggaccctcagccatcccttcctggaattgctcaacata

SEQ ID NO: 823572 - DNA, 120 bp, Artificial Sequence
  ENSG00000287326_5 (sequence is synthesized)
gaggatgcagctgggcggcaggtagcttggggcaagttcttagccctgcttgtccactgcctggaaacagacttggtgctattacggagtgcaaccagccctttggattgcgtgggagct

SEQ ID NO: 823573 - DNA, 120 bp, Artificial Sequence
  ENSG00000287326_6 (sequence is synthesized)
ctgacaacctgcatgactcagcagagggagccataatcctcctagaaaaggaaatttgaacatagagacacagacgcagggaggatggccatgtggagacagaggcagagactgtagtgc

SEQ ID NO: 823574 - DNA, 120 bp, Artificial Sequence
  ENSG00000287326_7 (sequence is synthesized)
atggccatgtggagacagaggcagagactgtagtgccgcatctacaaaccaaggaacatcaaggattgcaggaagccgccaggagcagggagggaggctggacacgggattgaccactga

SEQ ID NO: 823575 - DNA, 120 bp, Artificial Sequence
  ENSG00000287326_8 (sequence is synthesized)
gcctctagaaagtaaccaaccctgtggaaacctcggttttgacttctggcctctagaactgcaagaaatctccacaagccacctgcagcttaccactcagaggatggggaatcgtgaact

SEQ ID NO: 823576 - DNA, 120 bp, Artificial Sequence
  ENSG00000287326_9 (sequence is synthesized)
gcttcttgctggtgcggatgggaaggaggctctgcttctgcctcaggtcctccttccgctgggctttcctctgctggaccatgtgttcaagcttcttcagccgttcttgtgagcgagaaa

SEQ ID NO: 823577 - DNA, 120 bp, Artificial Sequence
  ENSG00000287326_10 (sequence is synthesized)
tgaactgaggcttacgaacttccagtgcttcctatgcaaagcaaagaaaatacgtcatttttaagagcagtgacacagaaaggcaacgcatctgtctgatgcagccaagaagccgatggc

SEQ ID NO: 823578 - DNA, 120 bp, Artificial Sequence
  ENSG00000287326_11 (sequence is synthesized)
aagcacaacactcagagaccaaaagccacggtgcaaaagtacgtcacgcttttcttgcacatctttgtgtaaagaaggtaacaggcatgttgacaacacaggtcctgggggtcaggcctg

SEQ ID NO: 823579 - DNA, 120 bp, Artificial Sequence
  ENSG00000287326_12 (sequence is synthesized)
taccctgctgagtcatttgttcccaaaagacgatccaaaagccctacattctgtattccaaagagacatgggagtggagggcatggaggtgctgagtcacttgcttctgttgcacttgga

SEQ ID NO: 823580 - DNA, 120 bp, Artificial Sequence
  ENSG00000287326_13 (sequence is synthesized)
agccccaagaagcacagacacagatcatccactcagcgtgaaaaacgtgctctttcaggaggcaccacaactgcggctgaaggaaacagctcctcctcctgggtagaaagagctgggagg

SEQ ID NO: 823581 - DNA, 120 bp, Artificial Sequence
  ENSG00000287326_14 (sequence is synthesized)
aaacctttgcctatacagaaagttctgtgagctccacaaaccatgtcagaagtccctatgtctccactcccacctccatgcactaagccacccacacaagtctcctgaacaagactaact

SEQ ID NO: 823582 - DNA, 120 bp, Artificial Sequence
  ENSG00000287326_15 (sequence is synthesized)
gccattctgctccatcccagatgccgggctaggtgcttgatgtgtattcatcacctcgtggagtcccacaactgttcaggaaggcaggaatatttctttccatttgacagatgcaaaaac

SEQ ID NO: 823583 - DNA, 120 bp, Artificial Sequence
  ENSG00000287326_16 (sequence is synthesized)
tgaggctcatggtagtttggtagatcacatggtaacaccctatccacgggaaccccattcttttcctgcactgccttttatggtcttaacttcctattccttgagtgtctctgctcaagt

SEQ ID NO: 823584 - DNA, 120 bp, Artificial Sequence
  ENSG00000287326_17 (sequence is synthesized)
tgtccccagcctgaagtaccacccatagccattggctcaagttccatctaccccaggaatccctgttgaaatgccctgttgagccagagcatggtgcttcaccgatgggcttgagcaaca

SEQ ID NO: 823585 - DNA, 120 bp, Artificial Sequence
  ENSG00000287326_18 (sequence is synthesized)
gtgagtcatatgtttacctccgtgctaggctgtgagctccaggaagtcatgggccatgtctcattgacaatgcatcactcacacagtaggagtcctgcatgtatatgctcagcaaaggct

SEQ ID NO: 823586 - DNA, 120 bp, Artificial Sequence
  ENSG00000287326_19 (sequence is synthesized)
cactgggcatgctgccatgactgaaactttcctctgcccccttcctcttccttgggagctcagagtgcccaggcggaagaagtgtgggctcagtctgtatcacatatgtgtccctggcag

SEQ ID NO: 823587 - DNA, 120 bp, Artificial Sequence
  ENSG00000287326_20 (sequence is synthesized)
ctacactgggggagaagtcttcttggccagctccccacatggtgccagccaccaggaacagagaaccacaaggtacaagtcactggatgtgctgaagcttcaagagagttccatgcctaa

SEQ ID NO: 823588 - DNA, 120 bp, Artificial Sequence
  ENSG00000287326_21 (sequence is synthesized)
agagataacccctaggaacagcctggtggctcaggtttagctgctgccttggctgtccaccccaccaagaatggccttagagactttgggggcaccatgaatgcctcacccaggtcccac

SEQ ID NO: 823589 - DNA, 120 bp, Artificial Sequence
  ENSG00000287326_22 (sequence is synthesized)
cgaggccccctgggtacaggagccagccaatggagccatctccacaactgcaactgcagggagatttgcaaccttattaagtgccttccaagaaggtgtggctagctgtgcaatacagtt

SEQ ID NO: 823590 - DNA, 120 bp, Artificial Sequence
  ENSG00000287326_23 (sequence is synthesized)
agcagaggattcctctgaggttgtttgccttcctaatttttatttctctgtatttttttaaactttataaaatgtgtgcatactacattttataaaacaattgggaaaagatgccaaact

SEQ ID NO: 823591 - DNA, 120 bp, Artificial Sequence
  ENSG00000287327_0 (sequence is synthesized)
tgaaactaaagagtatctggcagaaaatgtgggagaataccttcacaacctcaggaaggcaaagttttcttaaagaaaagatgaaaaggaaagcaattgacaaattgtatacttactgtg

SEQ ID NO: 823592 - DNA, 120 bp, Artificial Sequence
  ENSG00000287327_1 (sequence is synthesized)
cattgggtttaagataaattatacctcaatttaagaaatgctttttgaggtatttatgtttctgtatttccaagcacatgggaattttctggttatctgttgttgatttctcatttaatt

SEQ ID NO: 823593 - DNA, 120 bp, Artificial Sequence
  ENSG00000287327_2 (sequence is synthesized)
attctgtatgatttcaaagcctgacagtttgagactggcctgatgacacattgctatggtgcttttattaacgtctgcatgagtttgaaatgaatgtgtatctgcaggtgctggatccag

SEQ ID NO: 823594 - DNA, 120 bp, Artificial Sequence
  ENSG00000287327_3 (sequence is synthesized)
tgtccacaaacattactctttcttaattgctttgttcaaatcttttgaatagctactgattttttctgtgcttgctgtgtaacttgctgatagatgtgttaaaatcccccactatgacca

SEQ ID NO: 823595 - DNA, 120 bp, Artificial Sequence
  ENSG00000287329_0 (sequence is synthesized)
ggcagagcaggagccctccgtggcagtgcttgggtgtccaggctctgaggctccggcctcacctctccacggggtcgaagggaacgtctccggatgccaggagtcgcaaagggccgacca

SEQ ID NO: 823596 - DNA, 120 bp, Artificial Sequence
  ENSG00000287329_1 (sequence is synthesized)
cacgggatcccagcctcaggcctgcacagacggtgttggttgggaccaaatgggtcaccggctactgaaaaagaatccagacctctgaaagggttcgtgacaaattttttagaagttctc

SEQ ID NO: 823597 - DNA, 120 bp, Artificial Sequence
  ENSG00000287329_2 (sequence is synthesized)
ctgaaagggttcgtgacaaattttttagaagttctcacgctcatctgttacgatgattttcttttcttttttctcttttaaaaaagttggctaatttgtgtttctatattcctctttaat

SEQ ID NO: 823598 - DNA, 120 bp, Artificial Sequence
  ENSG00000287329_3 (sequence is synthesized)
tttatttttattgggggtacaaatgtttttaaaggagggatttcattagacccgaaactgtggggtggcttcctctctagccaacttactatctctacgcctgtgattcccatctccccc

SEQ ID NO: 823599 - DNA, 120 bp, Artificial Sequence
  ENSG00000287329_4 (sequence is synthesized)
tgaccagaaaactgtacctggagaaaatgaagtatatgttgcaggatccgggaccgcggtctttgcttgcttcatgaaaaatcggctggtctccaaactcgcgaaggaaaattcaaggcg

SEQ ID NO: 823600 - DNA, 120 bp, Artificial Sequence
  ENSG00000287329_5 (sequence is synthesized)
cctcaactcctccttttaaattttttaataaagagcctagaaagggaactttccctgggcctgccggagccccagcctggctctcccaacttcccagcggccataaatgtttttctgctt

SEQ ID NO: 823601 - DNA, 120 bp, Artificial Sequence
  ENSG00000287329_6 (sequence is synthesized)
ccattcgggccccccgtcttcccggacatctctgagctcctgccggatcaaggctgtggtcatcacctcattcatctctgctgcttggcctgggcctgcacatttggcctccttcttaaa

SEQ ID NO: 823602 - DNA, 120 bp, Artificial Sequence
  ENSG00000287329_7 (sequence is synthesized)
acaggggctcctagagagtcccaaaatccattaaccattcccatatgtgggatcccttccctgatcacacaaagcagaagcctgagaaaaaaagcaataaagagtggcctcctggctctc

SEQ ID NO: 823603 - DNA, 120 bp, Artificial Sequence
  ENSG00000259204_0 (sequence is synthesized)
gatggattggaggctctaaaacaagctgagataatgagctaaaaggttttacagctcctcctgccaatctctcttctcttcaagacccaggaattgggcctgcagtattcctccttggtg

SEQ ID NO: 823604 - DNA, 120 bp, Artificial Sequence
  ENSG00000259204_1 (sequence is synthesized)
catgtgcagaaagtcttgcaaatgggactgctccctcagtgccctctctctcccttaaatcatttgtaacattatgtatgcatgttggaaacaatggtatctccccagcttccccgttaa

SEQ ID NO: 823605 - DNA, 120 bp, Artificial Sequence
  ENSG00000269473_0 (sequence is synthesized)
gggacttccgtcgtcgtcctcggaccatcactttggcatttctcgattttgtctgcttctgaagggaccgcgttgtcaggcgagggacggaatcttggaggctccctgggcccatggaaa

SEQ ID NO: 823606 - DNA, 120 bp, Artificial Sequence
  ENSG00000269473_1 (sequence is synthesized)
caggagcgaggaaggcacgagagtcggggaagttccgccttcttgacatacaagcgcccccaccgcggcgaatatcgcccctgagcccagtgttcgccccccacaacaccgcacccccct

SEQ ID NO: 823607 - DNA, 120 bp, Artificial Sequence
  ENSG00000269473_2 (sequence is synthesized)
tccccaccctgtgccttagataaagccggcccagtgggaccctcaggttgcaccgcgcggaggtgtccgcggctctcgggagtcgtcgcccttggcgttatgttggctttagggagcgcg

SEQ ID NO: 823608 - DNA, 120 bp, Artificial Sequence
  ENSG00000269473_3 (sequence is synthesized)
aggccgaggccaagaaaagctacgcattgggaggtcttgacccagtgtgcgcccggctgtaggcatggaacgtgcgccaaaggtctcctggcacccactccgctggactcagcaccattg

SEQ ID NO: 823609 - DNA, 120 bp, Artificial Sequence
  ENSG00000269473_4 (sequence is synthesized)
tcctaagtctccgattgagaagtatctgccccaggtcctctgcgggccccactgaacagtgtggagcgttcacaggttgggggtcaccatttcagaatccagtttgttgagacgtggagg

SEQ ID NO: 823610 - DNA, 120 bp, Artificial Sequence
  ENSG00000269473_5 (sequence is synthesized)
gtacaggaggagggatctgcatatgcgaagacttggacttgaccctgacctgagcgttcaggcaggctctcatgcccccttggcagcgagtggagagcgtaagaggagtcctgcctctcc

SEQ ID NO: 823611 - DNA, 120 bp, Artificial Sequence
  ENSG00000269473_6 (sequence is synthesized)
tggcacaccgagggcgcctgggagccatgaaaggtgttgaacagaaaagggatggacatgacctgagttagaatttggaaagtatttcagtggttgctgaatgaacacactactggagaa

SEQ ID NO: 823612 - DNA, 120 bp, Artificial Sequence
  ENSG00000269473_7 (sequence is synthesized)
ggtggttgtagtggggctggaagcagggagactgtgggggaggttattgcagtattgttccagacagttatgatagtggcctgtccagaacggaagcaagaaggatgggagaagtgatca

SEQ ID NO: 823613 - DNA, 120 bp, Artificial Sequence
  ENSG00000269473_8 (sequence is synthesized)
gattcccagtggatcttcaagatagagctaatggaattttttgctaccttagataagtggaataagcatgagtaggggtgaaggaccatcccaagtagttaggaagaattaggatgcctc

SEQ ID NO: 823614 - DNA, 120 bp, Artificial Sequence
  ENSG00000269473_9 (sequence is synthesized)
ctgtggagaatagaggttggcagttggcaggaggaggatgtttcatggaagattagcgatggattttgtaggtatagagtctgaattgtctggagacctgtgagtggaggtgtcaaatgg

SEQ ID NO: 823615 - DNA, 120 bp, Artificial Sequence
  ENSG00000269473_10 (sequence is synthesized)
gcctctggatatatagaattctggtgtggcttcaggacgtccagactgcattatgttggtggcctggcccagtgaacggcctgaggataggatttgggaaggagggttttaggttggagg

SEQ ID NO: 823616 - DNA, 120 bp, Artificial Sequence
  ENSG00000269473_11 (sequence is synthesized)
accagtggctagggctcacgctcagtgcttagatcacatctgtctgcccattggcttggtgttgcagggcttaatgacctttgaggacagggtcagtacatcttccaagaatgtggggct

SEQ ID NO: 823617 - DNA, 120 bp, Artificial Sequence
  ENSG00000269473_12 (sequence is synthesized)
ccttagtgaggtccaagggggcttctacagtgacatgatactacagagctttgtactccagtgcccactaggtaaggctactgtgtctcctctttcccctacacatgaaatctaggtttt

SEQ ID NO: 823618 - DNA, 120 bp, Artificial Sequence
  ENSG00000269473_13 (sequence is synthesized)
ttttcctccgcctttccattgttccctctgggaggtgctgctggccctggcactggccagtgtcctgctgtgtccggaattgtttccttcctctgggttcttggtctcgctgacttcaag

SEQ ID NO: 823619 - DNA, 120 bp, Artificial Sequence
  ENSG00000269473_14 (sequence is synthesized)
tcctcctggtgggttcgtggtctcgctgacctcaggagtgaagctgcagacctttgcaatgagtgttacagctcgtaaaggtggcgtgtccaatgttgtttgttcctcccagtgggtttg

SEQ ID NO: 823620 - DNA, 70 bp, Artificial Sequence
  ENSG00000269473_15 (sequence is synthesized)
aagctgcagacctttgcaatgagtgttacagctcgtaaaggtggcgtgtccaatgttgtttgttcctccc

SEQ ID NO: 823621 - DNA, 120 bp, Artificial Sequence
  ENSG00000269473_16 (sequence is synthesized)
agcagcagcaagatttattgcgaagagcaaaagaataaagcttctacagcatggaagaggacccgcgggttgccgctgctggcttgggtggccagcttttattctatttggccctgccca

SEQ ID NO: 823622 - DNA, 66 bp, Artificial Sequence
  ENSG00000269473_17 (sequence is synthesized)
tgctggcttgggtggccagcttttattctatttggccctgcccacatcctgctgattggtccatta

SEQ ID NO: 823623 - DNA, 87 bp, Artificial Sequence
  ENSG00000269473_18 (sequence is synthesized)
ttacaatcctttagctagacagaaaagttttccaagtccccagccaaactaacctttagggagacacagagcgctgattggtgcatt

SEQ ID NO: 823624 - DNA, 120 bp, Artificial Sequence
  ENSG00000269473_19 (sequence is synthesized)
cggacagaaaagttccccaagtccccactggacccagaagcccagccggcttcacttttcactgctacttatccctggctgctgcataaacaacccccacaccttccctgggatcttgac

SEQ ID NO: 823625 - DNA, 120 bp, Artificial Sequence
  ENSG00000269473_20 (sequence is synthesized)
aaccttgtgaagccacagtgatggtccctgcacccactcccacgcccttgtccagctctagaggcctcctgtagcccaacccacaagccacaaaatgaggaccatcatggcggtgccgga

SEQ ID NO: 823626 - DNA, 120 bp, Artificial Sequence
  ENSG00000269473_21 (sequence is synthesized)
aatctcacccctcaatgcccacctggaatcggaagtctcaaaacctgtgtagcatatcacatgcagctgggtcgtttcctggctaggttaccctgtcaggatctgtgacttttctgtcct

SEQ ID NO: 823627 - DNA, 120 bp, Artificial Sequence
  ENSG00000269473_22 (sequence is synthesized)
ttctgccacattccctcactctagtaggagttttctgccagctgtcccttgtgagtcccagtgggcactgacatggtcattgattgtggggtcactgagcattgactttgtgaagttcag

SEQ ID NO: 823628 - DNA, 120 bp, Artificial Sequence
  ENSG00000269473_23 (sequence is synthesized)
ttctttccagctatatacctgcataggtgatcttcacctacggtgatttgtcatggggtggatcaccttgacgtgggctgccttctcacaaaccacttgatgagagctgtataggatcac

SEQ ID NO: 823629 - DNA, 120 bp, Artificial Sequence
  ENSG00000269473_24 (sequence is synthesized)
tgccaccacccccgccatgtgatcacctaactagaacaaatgaagagacctggctggtggacagggtggcttgaattaggccatggacagagaggccccatggtgcaccagttctgttga

SEQ ID NO: 823630 - DNA, 120 bp, Artificial Sequence
  ENSG00000269473_25 (sequence is synthesized)
gtggaagacagctgtggcagagctgttggcagtgccctggtggctcacctggtacctgagttgtgccctctgttgtcctggcaccaggatgtatagctgtgccttttaaaaaaaattttc

SEQ ID NO: 823631 - DNA, 120 bp, Artificial Sequence
  ENSG00000269473_26 (sequence is synthesized)
ctgaccttcttctgacactctatcctactttgccctgactcctgttccctggatggcttcctctctgtcttccaagattcactctttccccttctcccgtcctcccctccagtggccagg

SEQ ID NO: 823632 - DNA, 120 bp, Artificial Sequence
  ENSG00000269473_27 (sequence is synthesized)
tcttctaccattggcctccctttaatgtgtcttgaacggataatgtatctttaaatagttgttatctgcacatggtggctcataactacagtcccaactacttgggatgctgaggcagga

SEQ ID NO: 823633 - DNA, 120 bp, Artificial Sequence
  ENSG00000269473_28 (sequence is synthesized)
ggagcgcttgagaccaggagtttgagtccagcttgggcaacataacgagatcctatctctaaaataaataaataaatacatagatacctaaatagtttttgaaaacctcttcttccgtga

SEQ ID NO: 823634 - DNA, 120 bp, Artificial Sequence
  ENSG00000269473_29 (sequence is synthesized)
gactggcttgttccatttgaggagtatgggcataggtgtcaatggttcaagacctggacttcgctcactgcatggtactgacctgtcaccagacactagggccctgcagctccacatttt

SEQ ID NO: 823635 - DNA, 120 bp, Artificial Sequence
  ENSG00000269473_30 (sequence is synthesized)
gcagaacctacagagaactgacactgaagagatagctgataaatacacagcatatggaaaggtgtttgaggggaagcaagccttttctcctaccaaaaaacttcacagtggaaaaaattg

SEQ ID NO: 823636 - DNA, 120 bp, Artificial Sequence
  ENSG00000269473_31 (sequence is synthesized)
caagtgtattatgagcatgggaaggccttcacttttgtcttcatcctgagaaagcaggagtacatgcacatcttcaaaggcccttacaagtatagtaacatggggaatcctccagccaga

SEQ ID NO: 823637 - DNA, 120 bp, Artificial Sequence
  ENSG00000269473_32 (sequence is synthesized)
actctacctcctttgagcaccaatatgttcaccccagagaaagtccccataagcgcaaggagtgtggtccagccatgagcaaaattttgcaaaactctcctctgtatcaaaatggtcata

SEQ ID NO: 823638 - DNA, 120 bp, Artificial Sequence
  ENSG00000269473_33 (sequence is synthesized)
ccctaatgaaggactcctaagttcagggaatgtggggcactgccagctgtcctggtggcttccctggtacctgacttgaggttcatacatgttatattcagagttctgctttcattagca

SEQ ID NO: 823639 - DNA, 120 bp, Artificial Sequence
  ENSG00000269473_34 (sequence is synthesized)
aaaacaaattaacaccggaaaatggttgtacaaatgcaataactacatgaaagctttcagtgaaatatgaaacctcatcctgcagaattctcatcagagaggcccagtgcatgcagctaa

SEQ ID NO: 823640 - DNA, 120 bp, Artificial Sequence
  ENSG00000269473_35 (sequence is synthesized)
tgttggaaagcctattctcaattttaatcctatttagcaccagcaatttacagcattgtgagtgtagcatgtaggagagcaaaaaattgcagctcctgccttgatgtgcacaaagtgatt

SEQ ID NO: 823641 - DNA, 120 bp, Artificial Sequence
  ENSG00000269473_36 (sequence is synthesized)
cacactggaaaaaccctctatgagtgcagccagcatgggagagcatcggccacagctcctgccttgcttggcaccagaaacttcaccctggagaaaagccttttgattatagtaaatgta

SEQ ID NO: 823642 - DNA, 80 bp, Artificial Sequence
  ENSG00000269473_37 (sequence is synthesized)
cttcaccctggagaaaagccttttgattatagtaaatgtaggaaagtcttcacctcccttatttagtataaaagaattca

SEQ ID NO: 823643 - DNA, 120 bp, Artificial Sequence
  ENSG00000269473_38 (sequence is synthesized)
gtttgagaccaacctggctaacatggcaaaccccctctttacaaaaaatacaaaaatcagctgggcatggtaacgcccatctgtaatcccagctacaccagaggctgaggcaggagaatt

SEQ ID NO: 823644 - DNA, 120 bp, Artificial Sequence
  ENSG00000269473_39 (sequence is synthesized)
gcttgacctcagggggcagaggttgcagtgagctgagttagagccactgcaccccagactgggtgacagagcaagaccctgtctccctcaccaaaaacaaacaaacaaacaaacaaaaaa

SEQ ID NO: 823645 - DNA, 120 bp, Artificial Sequence
  ENSG00000235493_0 (sequence is synthesized)
atgagtaatgggcattgcccctcacatttgtcttccttcccaaatcattctcctttcaggaaaaagagtttgaaatatgagaaatcaaggggtttgggagttttcaggggaaaggagatg

SEQ ID NO: 823646 - DNA, 120 bp, Artificial Sequence
  ENSG00000235493_1 (sequence is synthesized)
agaatgaagtaggtgaggacttttagttgattcagacactcaagggcatcactggtaaactttaggggagtctagaaactgatgggggatcaattgacttggtttgagaacaagtgaacc

SEQ ID NO: 823647 - DNA, 120 bp, Artificial Sequence
  ENSG00000235493_2 (sequence is synthesized)
aggatgtgaactgcaagatgtggtatttcatttggtttctctctgggatgaattgatttgctggccagaaatgaggctgaattcctccatcaggttaaaggctgctgacacagggtgttt

SEQ ID NO: 823648 - DNA, 120 bp, Artificial Sequence
  ENSG00000235493_3 (sequence is synthesized)
ggtttagcagcctgccccaagcgcctcatctgcatactgataaagcctgcttccctcccagcccaagcttggcagtggccattgctaatgcaagctgtttggggaacaaaggagaattca

SEQ ID NO: 823649 - DNA, 120 bp, Artificial Sequence
  ENSG00000235493_4 (sequence is synthesized)
atctagttttcaccttaatgtaagtaggccaaaaggaaaggttcctcatctttattaaagtctactccctttatttttaagcgggcaactacctttagttacatttcacagacttctgct

SEQ ID NO: 823650 - DNA, 120 bp, Artificial Sequence
  ENSG00000235493_5 (sequence is synthesized)
ttaatcttcccctttgccctaatcaggcatctcttctccagattttctaagacactctattaatttgctagtgctgccaagatgaggtaccacagactgggtggctcaaacaacagaaac

SEQ ID NO: 823651 - DNA, 120 bp, Artificial Sequence
  ENSG00000235493_6 (sequence is synthesized)
ttgttttctcatgattctggagcgtaggagcccaagatcaacaagatcaaggcatcagcaaggttggttccttcttaggcctctcttcttggcttgcagatgaccatcttctctctgtgt

SEQ ID NO: 823652 - DNA, 120 bp, Artificial Sequence
  ENSG00000235493_7 (sequence is synthesized)
cttcattcacaggctctctctctgtgtgcctgccctaatctcctactcttataaggacaccagtcatattggattaggcccaaccatatggcctcatttgaccttaaatacctctgtaag

SEQ ID NO: 823653 - DNA, 120 bp, Artificial Sequence
  ENSG00000235493_8 (sequence is synthesized)
gactcatctccaaatacagtcacagtgtgaggcacgggagcttaggatttcaacatatgaatttggggacaggagaggaaaggcaaaattcagcctatagcagacaggatctttcaggtg

SEQ ID NO: 823654 - DNA, 120 bp, Artificial Sequence
  ENSG00000235493_9 (sequence is synthesized)
caacttcaacctgggcatgacacttctggtcccaaatgatgtattagccgtcttttttctagccttggaaaatattctgaattgaaataaagtattgcctcaagacaggctagacctaca

SEQ ID NO: 823655 - DNA, 120 bp, Artificial Sequence
  ENSG00000235493_10 (sequence is synthesized)
ctattcggccatcttggctcctctccggagcttacaaaggaatgagcaagaggaaagaagattctggtctcacttaaaatggactgcggtacctcctctgcttgaaattcaaagaagcca

SEQ ID NO: 823656 - DNA, 120 bp, Artificial Sequence
  ENSG00000235493_11 (sequence is synthesized)
aggctaaggcattcatagacaagtgttatttgttttttcaaacaaacgagattaaaagagaaaaccaaataatggagagaacccagcacagagccagatgtacgggaaagaagaccagca

SEQ ID NO: 823657 - DNA, 120 bp, Artificial Sequence
  ENSG00000235493_12 (sequence is synthesized)
ttagagatcaatgggaaagactggaaaactgctttcatatagaaagttggagattaaacaatcataagtcaactgataagcgggtgatgggaaaggtttgaaacttttaaatgctggcct

SEQ ID NO: 823658 - DNA, 120 bp, Artificial Sequence
  ENSG00000235493_13 (sequence is synthesized)
gctaaggcattcatagacaagtgttatttgttttttcaaacaaacgagattaaaagagaaaaccaaataatggagagaacccagcacagagccagtgaaccaggatgtgaactgcaagat

SEQ ID NO: 823659 - DNA, 120 bp, Artificial Sequence
  ENSG00000235493_14 (sequence is synthesized)
gtggtatttcatttgtgacagctacttctacaagcttgaggaagaaaaaatactggaaaggaaattagttcgaatcattattaatagaacattcaagaggaaatctcctatccaaccacc

SEQ ID NO: 823660 - DNA, 120 bp, Artificial Sequence
  ENSG00000235493_15 (sequence is synthesized)
atggaatttacctgctgtgatgaggttttacaggatgccaagtgccactctaaagcaaggaactaaaccatctatacagaaattgcatttggggtgctcttttgccagcattattccact

SEQ ID NO: 823661 - DNA, 120 bp, Artificial Sequence
  ENSG00000235493_16 (sequence is synthesized)
aatataatgtttctcagaaaaataatttgccaagtgagtttgtgtggcagaacctaaaggcaagtccatgtctcacgtggagccaagaccatgctttttcccatgtctcacagccactct

SEQ ID NO: 823662 - DNA, 120 bp, Artificial Sequence
  ENSG00000235493_17 (sequence is synthesized)
agagaacttttaggagacattcagttggcagtacgtgcatgacactttaccaccgaagattgtgtctattcttccattgccttgaatttgaccagtagtcacaaggagaggcactggagc

SEQ ID NO: 823663 - DNA, 120 bp, Artificial Sequence
  ENSG00000235493_18 (sequence is synthesized)
accagatatatgaatgaagaaactaccttggcatccagcctagttgagcctttggataagtccagcctcagccctatcatactgcaactgcatgaacgaccccaaagaagagccatccag

SEQ ID NO: 823664 - DNA, 120 bp, Artificial Sequence
  ENSG00000274536_0 (sequence is synthesized)
agaaagcccaattccatctggcccctgcaggttggctcagcactggggaatcagagtcccctccatgaccaaggcaccactccactgacagactctgttaatcagcttgcttggctggcc

SEQ ID NO: 823665 - DNA, 120 bp, Artificial Sequence
  ENSG00000274536_1 (sequence is synthesized)
tccaaccataggtccaggggctgagacaaggtccttttgagctcctatgtgggaggctctggaaagcttagcaacactttccaacaactttgccagggtcacatctcccaggaagatctc

SEQ ID NO: 823666 - DNA, 120 bp, Artificial Sequence
  ENSG00000274536_2 (sequence is synthesized)
acttccccacagaagctcttggcctggcctcctgcagtgccacgctccgtgtatttgacaagctgagttggacactccatgtggtagagtgtcagtttgtcaaataccccaagtgcggca

SEQ ID NO: 823667 - DNA, 120 bp, Artificial Sequence
  ENSG00000274536_3 (sequence is synthesized)
catgcttaccagctctaggccagggcagatgggatatgacgaatggactgccagctggatacaaggatgctcaccaagcaccaagttctcacaagttattttatgtgactttgcaggaac

SEQ ID NO: 823668 - DNA, 120 bp, Artificial Sequence
  ENSG00000274536_4 (sequence is synthesized)
tgaggcattatatctgaggacaccaggggaaaagtgtggcatctcagggaaatacagccctgggctgtgtctacacacaccatgagagtgctgatgggggcgcaatagtcttgaaaatgt

SEQ ID NO: 823669 - DNA, 120 bp, Artificial Sequence
  ENSG00000274536_5 (sequence is synthesized)
ataaagtgtccaggaatggaagtgctctttgattcattattattttcttccttcatattcccctcccagagtctcctatctaggacatcagcattctcacacaagcctaatggcttatct

SEQ ID NO: 823670 - DNA, 120 bp, Artificial Sequence
  ENSG00000274536_6 (sequence is synthesized)
gagtaagcagggcttagaaattcactttcttgatactcagtcttgccttctaaacactccttgatcttgcctacctctccccttttccacatgtcttttcctgtaggaacactttctcca

SEQ ID NO: 823671 - DNA, 120 bp, Artificial Sequence
  ENSG00000274536_7 (sequence is synthesized)
ccaattcttccctatatttcctggaccagctaaagtccagtgtttccagagacttttgaaagtcaacttacactttttccttcttcattcacaaagctcttcttccctgggccctggtat

SEQ ID NO: 823672 - DNA, 120 bp, Artificial Sequence
  ENSG00000274536_8 (sequence is synthesized)
gtatgcctttctctcctactgtctaatagcacctcgtaaattgtcaatgaacttttctaaggggtattcttgaattcccaactagattgtgagcttctggaagacaaggctatgtctttg

SEQ ID NO: 823673 - DNA, 120 bp, Artificial Sequence
  ENSG00000274536_9 (sequence is synthesized)
attgttgtctcccctaccacagcccagtactttagttacagaaaataataaatatttactgattgattgactttcctcttgtccactagctttaggtttgggggccaaattctaccctgg

SEQ ID NO: 823674 - DNA, 120 bp, Artificial Sequence
  ENSG00000274536_10 (sequence is synthesized)
attttgaaaaattcaaactgtgaacaccacaatgttatagagcatatgaggtagtagccagcatgaaggatgttttcttcctgagaaacagtgtcaagggctggaggaagagggcaaaat

SEQ ID NO: 823675 - DNA, 120 bp, Artificial Sequence
  ENSG00000274536_11 (sequence is synthesized)
agcagactcagagggcaaataaattttggtattacttggtcacacaaggttatacaggtgttttcttgtaggatttttcagagcctttaatagtctaatgttgcattgagaatctcaaag

SEQ ID NO: 823676 - DNA, 120 bp, Artificial Sequence
  ENSG00000274536_12 (sequence is synthesized)
aggaaaccatagaatgaggcatttgccatacctatctgatcatgaattttcttttcccccacagccttctcctgtgtcaatgtccaatgaagcacgatttgggaaactgtcctagagaaa

SEQ ID NO: 823677 - DNA, 120 bp, Artificial Sequence
  ENSG00000274536_13 (sequence is synthesized)
ctttataccttcccgctcttctggagatcttttcctcttttcattcatctactttccccaaccagccatctgcctaagaaaggtcacatgttatcatctcatttttgtttagcctctgca

SEQ ID NO: 823678 - DNA, 120 bp, Artificial Sequence
  ENSG00000274536_14 (sequence is synthesized)
gctgtggactatctttattacataggaattctttactagcttgtcctgtatttaaaaatattctaagttttgaggcaaagaagatccagatgctgcaataaatatatgcactgaggagtt

SEQ ID NO: 823679 - DNA, 120 bp, Artificial Sequence
  ENSG00000274536_15 (sequence is synthesized)
agaaagcccaattccatctggcccctgcaggttggctcagcactggggaatcagagtcccctccatgaccaaggcaccactccactgacaggtacttggctcactctgagtgttcagaga

SEQ ID NO: 823680 - DNA, 120 bp, Artificial Sequence
  ENSG00000274536_16 (sequence is synthesized)
ttcctagacacctacttacccctaattcttctggtctattccctccaattccctccataaaaactgacccatcctttgcatcaacaatagtggcttgatgacgctcttcagtagaggatt

SEQ ID NO: 823681 - DNA, 120 bp, Artificial Sequence
  ENSG00000274536_17 (sequence is synthesized)
ttgcatttcatatggggaaaaatgatgttattctaagtaatataacagaccaagagaagagctttcaaattcccttaatatcatcccatatagatatttatgtcttctttctatgggtct

SEQ ID NO: 823682 - DNA, 120 bp, Artificial Sequence
  ENSG00000274536_18 (sequence is synthesized)
ggtgaacatttctcaactgaatgtgattttcttacatacactccattggagaggcataccagtctagtttcagctcaaccactaactccttccattaatactgaagcaatgttgtctata

SEQ ID NO: 823683 - DNA, 120 bp, Artificial Sequence
  ENSG00000274536_19 (sequence is synthesized)
aggctccacaaatttcaaagtactaataatttttagcccctttcatgcctcctttccagcctttctggaggtgaataaagtcagaaagtgcattcaaaaggctgtgaacacctccagctt

SEQ ID NO: 823684 - DNA, 120 bp, Artificial Sequence
  ENSG00000274536_20 (sequence is synthesized)
atctaggtcttcttactggagctgacagccaatgagtgtaatgatacaaaaaaggtaacaatccatttctttttctcctgccatccccaactcagactctgttaatcagcttgcttggct

SEQ ID NO: 823685 - DNA, 120 bp, Artificial Sequence
  ENSG00000274536_21 (sequence is synthesized)
gttctcatttccagagaagacaactgaaacccaaagaaagacttgcccaagccatgattggctagttgatggccaagacagcattagaacacaagtttgtcgattctgtcatgccatatt

SEQ ID NO: 823686 - DNA, 120 bp, Artificial Sequence
  ENSG00000274536_22 (sequence is synthesized)
tggtgaccatgactgctgcttttgctgctgggtggattaggctgaattgggtaggtagaaaaggaagtgagggagtgaaagagctttagttttgagatgactgccagaacttaaattgaa

SEQ ID NO: 823687 - DNA, 120 bp, Artificial Sequence
  ENSG00000274536_23 (sequence is synthesized)
ggagtatgttaccttcttaacattcaattaaaagaatagagcaagaaaagacactgattgttttcttgctgaaagacaaggctgaatccctctgtcttacctgggctgggacagggcttt

SEQ ID NO: 823688 - DNA, 120 bp, Artificial Sequence
  ENSG00000274536_24 (sequence is synthesized)
ccggcctcatgggggcagtttaccatttctggtaaccttgtgatgtttgccacttttcatgacaatatttaatgtagaccagctacctgctcacagatcaactgccacagctggtaaggg

SEQ ID NO: 823689 - DNA, 120 bp, Artificial Sequence
  ENSG00000274536_25 (sequence is synthesized)
cagtaatttgacaccagcaacctgggatttttagcaacaggatctgattgttgccaagggaattctcccagaagtttcagacctgaccctgctcctggcagcttccttattgccctggtg

SEQ ID NO: 823690 - DNA, 120 bp, Artificial Sequence
  ENSG00000274536_26 (sequence is synthesized)
gcttgtgggttcagtgatcccaaatgttgcattacaaagctattgcctgtttttgccctctttgttgatgtgtcttccctttcccagagggatatacagagaagggaggcaaaataacca

SEQ ID NO: 823691 - DNA, 120 bp, Artificial Sequence
  ENSG00000274536_27 (sequence is synthesized)
atgaggaaagctgtataaggcatactgctgaactgtaaaaaatttattgtataaactttacaagtctcctccccaacaggagcctttgttatctcatttataacctaagtgagtgagact

SEQ ID NO: 823692 - DNA, 120 bp, Artificial Sequence
  ENSG00000274536_28 (sequence is synthesized)
agatgatctttaagggcactttaatagctgccattcttgagtccctatgggacaagaggatcatgttaggcaaggctgagaccacaagaaatcaatgtcacacctgtccagatcctgcta

SEQ ID NO: 823693 - DNA, 120 bp, Artificial Sequence
  ENSG00000274536_29 (sequence is synthesized)
aatcaattgccaatagctctttctttcattttggtcacacaaccactactttttgagcatttgttatgtattgaatactgaaccaaaggctttacatgcattatctcctgtcattctcac

SEQ ID NO: 823694 - DNA, 120 bp, Artificial Sequence
  ENSG00000274536_30 (sequence is synthesized)
tccaaggttgcctaactagctaatggaagaactaggatttaagctcatgtttaacctcaaagcctatgtgcataaccacaacactgaaaacacagcttgggagaattgagaagagggagc

SEQ ID NO: 823695 - DNA, 120 bp, Artificial Sequence
  ENSG00000274536_31 (sequence is synthesized)
aaggatgctgactctagggtctggtactttcctcaagtcagggaggcaggatgatgaccaaattttcccctctctgctgcatagaggaacccactgaagcttgggacccctagaaatgcc

SEQ ID NO: 823696 - DNA, 120 bp, Artificial Sequence
  ENSG00000274536_32 (sequence is synthesized)
atagctacaggactcaggcctgatgagcttccagctgagcactgggtgtcactcgggctttacctgcttatcttcaggatctctcttctggttaggaaccctatgcctattttgctcact

SEQ ID NO: 823697 - DNA, 120 bp, Artificial Sequence
  ENSG00000241696_0 (sequence is synthesized)
ccctaatgaaggatatcaaaaatgaaggggcagctaaagaaaaataaaagacacctcagaaagtagcctgcctctttgacaagggacatgccttcagaggaacataacagaaacctctga

SEQ ID NO: 823698 - DNA, 120 bp, Artificial Sequence
  ENSG00000241696_1 (sequence is synthesized)
gcactgaacattttgaatcatttgccttttctcaacactggattttaagcaaggaacaagactattccagttctaaatgctttaatgaacaaggggtattgggttttagcatcaacatga

SEQ ID NO: 823699 - DNA, 120 bp, Artificial Sequence
  ENSG00000241696_2 (sequence is synthesized)
tctatcctcactctgaagctttaacttgagtagctgctgtgctttgtaaagcttcaatccaattcatttgataactacaattaccaaatctgggcattgctgactacacagttcaaaaaa

SEQ ID NO: 823700 - DNA, 120 bp, Artificial Sequence
  ENSG00000241696_3 (sequence is synthesized)
ataatgggaaaaaccacttgcaaatgaattggtaatcagagttggagctatatgtgatctagttatcttcaccttttaacaaaggtctggagagatttgaagagagacagatccaaaata

SEQ ID NO: 823701 - DNA, 120 bp, Artificial Sequence
  ENSG00000241696_4 (sequence is synthesized)
gagagaaactttcacagccctaaaaaaatctggggatatcctcatgaatgaatagaactggagttatcttcagaagtgtggaaaaagataaagatgcccaaggtccacgaccaaaaagag

SEQ ID NO: 823702 - DNA, 120 bp, Artificial Sequence
  ENSG00000241696_5 (sequence is synthesized)
tctacaagcaaggtgtggtcaaagtgataagagtctaaaaagaccaagggagagaagaaaacttgcagagaactagcagatcatcatagtaaactctgctcaggccattttggtactgga

SEQ ID NO: 823703 - DNA, 120 bp, Artificial Sequence
  ENSG00000241696_6 (sequence is synthesized)
aatgacagagaagccagaaatggtagccatgccatgccatgtcatgccattttcaatgacaaaagaaggaaagagttttccctttctcttcctagtccccaaggagagcggctgtaaata

SEQ ID NO: 823704 - DNA, 120 bp, Artificial Sequence
  ENSG00000241696_7 (sequence is synthesized)
gtagtatattagctatgacaactggcaaatagctatgctgtccctatgtcatggctgcttctgtgggtaccattgtgaccccagcatgagtcaagatgattatcagaatgtctagcagat

SEQ ID NO: 823705 - DNA, 120 bp, Artificial Sequence
  ENSG00000241696_8 (sequence is synthesized)
gagggaagacctgctgagaaccttagaatctatcgataagctcttgaaatggtttaaagtaataaaccacttcaattgaaagggcaataaaatgtttttcgtgtatatatgtacataaga

SEQ ID NO: 823706 - DNA, 120 bp, Artificial Sequence
  ENSG00000241696_9 (sequence is synthesized)
caaaagaagatggatgttccagctcaaacagagaacaaatcctctgccttccctctgccattttgttctatttgggccctcaatggactggatgatgccagcctatactggtgaaggaga

SEQ ID NO: 823707 - DNA, 120 bp, Artificial Sequence
  ENSG00000241696_10 (sequence is synthesized)
tctttactcagcctactgattcaaatgccaatcttttccagaaacacccctgaaatggtgttttaccagcgatccaagcatcccttagcccagtcgacacataaaattaaccatcacact

SEQ ID NO: 823708 - DNA, 120 bp, Artificial Sequence
  ENSG00000241696_11 (sequence is synthesized)
ctgtgcttttattgatcctctccaaaggaacacctttaaaaaagcatgatataaattggcactaatcctcataagagaagaatgtcagccaagccagtgaaggaattttggagttcgctt

SEQ ID NO: 823709 - DNA, 120 bp, Artificial Sequence
  ENSG00000241696_12 (sequence is synthesized)
ctacacctgaactcagatcctcagacttgtgactcttttccccaagcagaagggtgtgaaacttcccacaggcttcaagttctccagatgctgggcagctgaatttcacagaaatctgaa

SEQ ID NO: 823710 - DNA, 120 bp, Artificial Sequence
  ENSG00000241696_13 (sequence is synthesized)
aatagctgccatctatactcagactgtttggcacccaaatagtttgtccctctatgaccccactcccaactcataagattgctttcaggggcctcgtctcttgaatataaccctcctaca

SEQ ID NO: 823711 - DNA, 120 bp, Artificial Sequence
  ENSG00000241696_14 (sequence is synthesized)
tatggccctttgccccagattgcttttctgtaagatgatgagaggacaggggtctgtactccccttcatactggttcccacatcctaagttttttaataaagccttttccttaatgtgta

SEQ ID NO: 823712 - DNA, 120 bp, Artificial Sequence
  ENSG00000241696_15 (sequence is synthesized)
tccaaaggaacacctttaaaaaaggaacacaagagctaaatgaatggatatatttttcaaaatcaataaagaaaaaattgcatatttgtattagactcaaggaaagacataatggctgtg

SEQ ID NO: 823713 - DNA, 120 bp, Artificial Sequence
  ENSG00000241696_16 (sequence is synthesized)
gatttttaaagctcaggatgtacactgtcagtgctgctcagataccagaagaatgggagggccgtttcagataaggtagtcagcaaagttctctctgaggtgacatccaagttgaagtac

SEQ ID NO: 823714 - DNA, 120 bp, Artificial Sequence
  ENSG00000241696_17 (sequence is synthesized)
attaagaaggtagccaaatgatattcagaggaagagcattctaagcatatgggaaggagcatgcctggtgtgttcaaaaaaaagcaaggagcagagtgagctaaagtaaagaaatagaag

SEQ ID NO: 823715 - DNA, 120 bp, Artificial Sequence
  ENSG00000241696_18 (sequence is synthesized)
ataacgtggccagagaaatagtgacggggcagatcaagggagattatggaccatgataagaactttgaatgttatttattattttattaaattgtatttatttataagaactttgaattt

SEQ ID NO: 823716 - DNA, 120 bp, Artificial Sequence
  ENSG00000241696_19 (sequence is synthesized)
caaagaagtgataacatgtaacttgactttttacaaacattactctggttgctattttgaaaagggactttagtgcgggaaaggacagaggcatggagaacatttggtaaggggatccaa

SEQ ID NO: 823717 - DNA, 120 bp, Artificial Sequence
  ENSG00000241696_20 (sequence is synthesized)
agaaaagcatattggctttcttctttcctcccattggatagaactcctggagagccactcttgaagactgggagtaacctcagagaaggggagagaaacatctcacttctcaaggtggaa

SEQ ID NO: 823718 - DNA, 120 bp, Artificial Sequence
  ENSG00000241696_21 (sequence is synthesized)
ccacagaagcagaggtccacctcagcacgaccaccaaggttggaacacagagagtgagttcatggaaacacctgatatgttaccctggaaattgaaggcatctgagaacaggaaaatgga

SEQ ID NO: 823719 - DNA, 120 bp, Artificial Sequence
  ENSG00000241696_22 (sequence is synthesized)
tgcttgcctttcacctgaagattatgaaggtggctggagccgcccatggtggtagcaaacagaggaggaggcaagggagaacactctagtttccccagagctgaagtaacaatatgaatt

SEQ ID NO: 823720 - DNA, 120 bp, Artificial Sequence
  ENSG00000241696_23 (sequence is synthesized)
tctacaggccaatgcgagactacagaaagtaaccagcctagagctaccctatataacctacattactgtctggaatagagaaatccaagagaaacagagagaaggtgcccctctaggagc

SEQ ID NO: 823721 - DNA, 120 bp, Artificial Sequence
  ENSG00000241696_24 (sequence is synthesized)
aggggctgagttgggtcacaggaagtcatctctggagacactggctgtgcagtgccttctttattaggggcctcttatagccccttctttattagacagcctttacaaccagattacatg

SEQ ID NO: 823722 - DNA, 120 bp, Artificial Sequence
  ENSG00000241696_25 (sequence is synthesized)
taagatttcttaccttttttctatattctcccttatttcaccatctaccctggaggaaacagataaagtaggaaaggagtaaaaaaaaaaaaaataaaaaagagatgatctagtaaaagt

SEQ ID NO: 823723 - DNA, 120 bp, Artificial Sequence
  ENSG00000284678_0 (sequence is synthesized)
gtcacgtgctttgcatgaatcctcacaccgtctcaccaggggcgctctcccagtttcaccagtgacttggtgacaaccagcatcgctcacgaagcgtcagccgtatcctttctgtgtgca

SEQ ID NO: 823724 - DNA, 120 bp, Artificial Sequence
  ENSG00000284678_1 (sequence is synthesized)
gtggggtgtgggttgtgtggagccgcggtgtctgtggaattcacaggctggggccggaatccatggcccccgtcgccgctgccaccccccaggatacaagtggaggacagaaatgaggca

SEQ ID NO: 823725 - DNA, 120 bp, Artificial Sequence
  ENSG00000284678_2 (sequence is synthesized)
caagtggtaaacattaacatcagcagtaatgggacaagttgacattgtgtgactcctaatatggtacactgagaagaatgtcgcatcgtttctgtggtattcctgccagagatgcataaa

SEQ ID NO: 823726 - DNA, 120 bp, Artificial Sequence
  ENSG00000284678_3 (sequence is synthesized)
tcatgaggacacagcagacaaatccaaactgaagacaacctacaaagtcattgacctgtatttttcaaaaatcttggccagagaagggaagcctgaagaattgttctagaataaattaga

SEQ ID NO: 823727 - DNA, 86 bp, Artificial Sequence
  ENSG00000284678_4 (sequence is synthesized)
gagaagggaagcctgaagaattgttctagaataaattagactgaagagactccttgaaggcgactgaattggatgctgggcctgta

SEQ ID NO: 823728 - DNA, 120 bp, Artificial Sequence
  ENSG00000284677_0 (sequence is synthesized)
atggttcccagcgtcctcccggggagccgctccgccagcgcagacgcccccaccggtgcgcgccgggttggctgcgttcaggggctcccagtatccgatccctgcgagcatcatcagcct

SEQ ID NO: 823729 - DNA, 120 bp, Artificial Sequence
  ENSG00000284677_1 (sequence is synthesized)
ggctcctgcgggaggagatggagcctgcgttcttgggccccagactctgatgaagaacaaccatctttcctccgctgggaaaatgcacgtgaacgttaggattcccagtttcactgagat

SEQ ID NO: 823730 - DNA, 120 bp, Artificial Sequence
  ENSG00000284677_2 (sequence is synthesized)
taagcctgtaagttatggagttcttgtaagaagactgaaccagtagtttcaggagaggataacacagaggaatctctgaacagcaggacaccaggcacagctgaagacagaactcccacc

SEQ ID NO: 823731 - DNA, 120 bp, Artificial Sequence
  ENSG00000284677_3 (sequence is synthesized)
cagatctacactctctgggcagcaaatttgaagaaacgtctccagtgactccaggtggcctaagagaaaagacctaagcacactgacactggggtttccccaggaacgcacagatcacca

SEQ ID NO: 823732 - DNA, 120 bp, Artificial Sequence
  ENSG00000284677_4 (sequence is synthesized)
cccaattcatatgggcagctctggtcgcagggtaccaagagtgtcatgatctgcagttcaatctccccagggccagatggaaaactagttactcgccaaaaaaggcatcatttcaaaaac

SEQ ID NO: 823733 - DNA, 120 bp, Artificial Sequence
  ENSG00000284676_0 (sequence is synthesized)
gggagagggtgtttcgggaagatggcccagcacacgcagaggcctgcacacagctgactctgtgtggcgagtgtgagacgagagtgggaaagacgaggctgcagagcagttctaccatca

SEQ ID NO: 823734 - DNA, 120 bp, Artificial Sequence
  ENSG00000284676_1 (sequence is synthesized)
gaaaacacagtgaaggctacgtactgagctttacatacaaggatgttcactgcagcgttgaagataacagccaatacttggaaacaaccctaatgtccgatagggaaagcgatgggtaat

SEQ ID NO: 823735 - DNA, 120 bp, Artificial Sequence
  ENSG00000284676_2 (sequence is synthesized)
tgtcgcaaatccttgtaatggaatattgtgcagccaataaaagccatgactgtgaagctcctttaatagcaccgaaatggaggagcagaaatgacacctgccgtcctatgtgctccccac

SEQ ID NO: 823736 - DNA, 73 bp, Artificial Sequence
  ENSG00000284676_3 (sequence is synthesized)
aggagcagaaatgacacctgccgtcctatgtgctccccactgtggcatctctgcagagacagggtctcagtct

SEQ ID NO: 823737 - DNA, 120 bp, Artificial Sequence
  ENSG00000284676_4 (sequence is synthesized)
ctgagtaactgggactacagcagcggggatgggctgtgtgaagccatcctccctcctccctcaccacatgggtctgccaacagcccaaccgagaaggagtttcttgtcggcaggggctga

SEQ ID NO: 823738 - DNA, 120 bp, Artificial Sequence
  ENSG00000284676_5 (sequence is synthesized)
gttccaacctgggcttctcagtcgtgtgcccattctccccagaaaccaccaggcctggggccatcacccgccataaaggatatggaacagaaacctgcccagggtctatcttcctgccac

SEQ ID NO: 823739 - DNA, 120 bp, Artificial Sequence
  ENSG00000284676_6 (sequence is synthesized)
gcccgcatcagcccatccagccctgctccccccatcagcccatccggcttctggaagcagcagggggagaagtttttccagagacaactcttcattaaatcgcctgtccaagaatctgca

SEQ ID NO: 823740 - DNA, 120 bp, Artificial Sequence
  ENSG00000284676_7 (sequence is synthesized)
cctgcacctccctcagctgccacccgaatctctgacctcaacgaatccctatgccaggggaatgcaagactgattggccacaggcctggggctctgtactcccctgagcctgggtgggga

SEQ ID NO: 823741 - DNA, 120 bp, Artificial Sequence
  ENSG00000284676_8 (sequence is synthesized)
ctgagcagtggtccccaagggaagtggcactgggggtggggcagaaccatcacgcgttaccgatggtggggtcagaatcagggggcctgagatatatgctattgggtcccaccctatagc

SEQ ID NO: 823742 - DNA, 120 bp, Artificial Sequence
  ENSG00000284676_9 (sequence is synthesized)
cctgcccacgtccttcagctgtggagagcgtgggctgccagctgggcccttttctggggaatcatcctcagctgaggaagctgactgctgactcacctgaaaaatgcctgcgaggtctca

SEQ ID NO: 823743 - DNA, 120 bp, Artificial Sequence
  ENSG00000284676_10 (sequence is synthesized)
cctttccctgggatgacctgcagccagtcactggctgacacatgggtacaaaaggtctggctcattcgaggaggcaggacagtcatgtggtgccacagaggacactccagagctccccat

SEQ ID NO: 823744 - DNA, 120 bp, Artificial Sequence
  ENSG00000284676_11 (sequence is synthesized)
gggcccagatcagggctagactagaccaagtccatgccctggcctggcttcttgcccaccctccgctacttccctcactccccttcttctgagcgtgcgccctctgcaatctcacatgtc

SEQ ID NO: 823745 - DNA, 120 bp, Artificial Sequence
  ENSG00000284676_12 (sequence is synthesized)
cccgtaagtccccatctcaggctctgcttctagggagcctaacctatgcagaaggccaagctggctctcgcctgcacacctgccccatgcaagcttccccttggatcttcttccctgcat

SEQ ID NO: 823746 - DNA, 120 bp, Artificial Sequence
  ENSG00000284676_13 (sequence is synthesized)
ggggaaattggtcctaccccaccaggctccaaggtgtgcagccagcatcatcttggaatccctctcaaacccagactcccaccaagaactcaattctccccacatctgctccaggtcctt

SEQ ID NO: 823747 - DNA, 120 bp, Artificial Sequence
  ENSG00000284676_14 (sequence is synthesized)
aggaaactcaacatccaaatccctttcatctccaggttgattaacagaagattataagcaagcttcagaaggaagaaaaaccagtgtctccccagggcagacactgtctgttgacaaata

SEQ ID NO: 823748 - DNA, 120 bp, Artificial Sequence
  ENSG00000284676_15 (sequence is synthesized)
ccaccaatatatatttttctcatttttgtatagatatacagaactaagccgattaatatattcttctttccctcttaggtctaggactgcaatgggaatctttctgccccatggtgaact

SEQ ID NO: 823749 - DNA, 120 bp, Artificial Sequence
  ENSG00000284675_0 (sequence is synthesized)
actcacgggacatcaggacacctaatgcaagcagaagcttgacaagcacttgcacagaggggtttgctctcttttgctatttttggaatccagccatcatgtgaagaagtctagactggc

SEQ ID NO: 823750 - DNA, 120 bp, Artificial Sequence
  ENSG00000284675_1 (sequence is synthesized)
ttactagatcctggagacacatagcctggtcacccttgtggatccctcccaggttccaggcacataagtgataccatctgggaccaccaggcctcagacagtcctcacctgactgtagcc

SEQ ID NO: 823751 - DNA, 120 bp, Artificial Sequence
  ENSG00000284675_2 (sequence is synthesized)
acatacacaagttcaggtgaactcaacagaagaacttccaagctaagcccaacccaaactgccagcctccaggatgggtgacctgcagaatactcatggaggaggtctgctttgagttgt

SEQ ID NO: 823752 - DNA, 120 bp, Artificial Sequence
  ENSG00000284675_3 (sequence is synthesized)
aggctcccaaagtgctgggattacagattcattgctatactgacctctcattgactgaaactttacatcaaggctcagggactgtaaacccaccgcagcttggaatatggaatatggatg

SEQ ID NO: 823753 - DNA, 120 bp, Artificial Sequence
  ENSG00000284675_4 (sequence is synthesized)
agcttggaatatggaatatggatgttgagatacacacttcagttcctgaactcagtaatgaaatcgcccccagagttctcatgccagcattcagctagctgcaactttctcctgcttgcc

SEQ ID NO: 823754 - DNA, 120 bp, Artificial Sequence
  ENSG00000284675_5 (sequence is synthesized)
ttctaaggagattaagaacgggcattttattttgtttccgttttagtttatttgaaggttttatgatgtcttggttgagtggctcgtgggacttgcaaataaacatgctgcctttaaaaa

SEQ ID NO: 823755 - DNA, 120 bp, Artificial Sequence
  ENSG00000271830_0 (sequence is synthesized)
gtttcttatttcctttggatctatcaaagtgtttttccccaagtggcacctgggaaaacatattctattcatttattttataactgttcccttgacctctttattgcttccctattacaa

SEQ ID NO: 823756 - DNA, 120 bp, Artificial Sequence
  ENSG00000271830_1 (sequence is synthesized)
tattttattaatggaaaccacatgttatgtattttacatatgttatgacttgaaatttatgttatgacttgaaattggggaatctgatatgtctctaataataaaggcttcacagtacaa

SEQ ID NO: 823757 - DNA, 120 bp, Artificial Sequence
  ENSG00000271833_0 (sequence is synthesized)
tgccagtgctgactggaacaggccgggctcctcactcagcggctcctgcctcagctgtggttcccgcagcctctgggtctcacggaacccttccttgggagttccatttctcatggcttt

SEQ ID NO: 823758 - DNA, 120 bp, Artificial Sequence
  ENSG00000271833_1 (sequence is synthesized)
gctcatcttccggcttcaggctctgacttcatctcaggatgggatcggtgtgtgtctgttttcatagatccactacatcagaagtatctttacatctctgtatctttacatcccaaggtc

SEQ ID NO: 823759 - DNA, 120 bp, Artificial Sequence
  ENSG00000271833_2 (sequence is synthesized)
tagcttcagtcttccccaaaccatgccacttcctcccatttctttgggtcaggaatctggcttttgttttccatatttctttttcccaagacattgggaggcatctggtgaacaacacca

SEQ ID NO: 823760 - DNA, 120 bp, Artificial Sequence
  ENSG00000271833_3 (sequence is synthesized)
ataaaacagttctctccccacggtcatccaggtcacttctctaactcattcctgcacacacagcacacgtggaatttgcctgtttagtctatgttcttgacttgatcacagacgcctgta

SEQ ID NO: 823761 - DNA, 120 bp, Artificial Sequence
  ENSG00000271833_4 (sequence is synthesized)
caataaagccccttttcaacaaggtgctgcagaatgataatgctttccccaaaatctgaaactgatttgtatcattgaagtttttttctgtattaaaaataaagcaaaattaaaaataaa

SEQ ID NO: 823762 - DNA, 120 bp, Artificial Sequence
  ENSG00000273084_0 (sequence is synthesized)
ttttttttttttttttttttttttggcacaggtggaccaacggggggtgtgactgtgggcaccgtgcgcggaggcggaggctcatctggttcccaccctccgtgccgctggatgccccag

SEQ ID NO: 823763 - DNA, 120 bp, Artificial Sequence
  ENSG00000273084_1 (sequence is synthesized)
gattttctccaaccggggtcccggcttggagccctccttggtgcgagctttggctcagcaatggggaaagcgggaatgggtctcgcccttgtggctgcctggtggaagcggcggttttga

SEQ ID NO: 823764 - DNA, 120 bp, Artificial Sequence
  ENSG00000273084_2 (sequence is synthesized)
cacacgaatagtcgtggggagcagatccagagagggcgcatttgcaataataacgcttagtttatctctgccagaggggcgggaacaggccttcgcgctggtgtcttacatcagccaagc

SEQ ID NO: 823765 - DNA, 120 bp, Artificial Sequence
  ENSG00000273084_3 (sequence is synthesized)
aaaacctcaccatgccagtgacacgactgcaaacggcgggtggcacatgccgggggcttgggatgggagggtttggaaacctcgctccaaggacgccctcagccaaggagcttcggctcc

SEQ ID NO: 823766 - DNA, 120 bp, Artificial Sequence
  ENSG00000273084_4 (sequence is synthesized)
ttcctagaatttctagaagcacttttggagggaccgagggcttccggccgggcccagaggaatttgagcgcttgcccgggcaggcagaagcgcagcctgggagtggagaggctgctgggc

SEQ ID NO: 823767 - DNA, 120 bp, Artificial Sequence
  ENSG00000273084_5 (sequence is synthesized)
cacattccggcccagcttcccccgctaggccccagccctgccgcggcgccccaggaagcacctccgaaaacaaagcgctgtggtttcagcccaaggttaaagtccaccgcgagcgtgttt

SEQ ID NO: 823768 - DNA, 120 bp, Artificial Sequence
  ENSG00000273084_6 (sequence is synthesized)
tttcccccctccagaatctaagagcgatagcgtttctccaaataaaccgccaataaatcagctcccgggggcgcctgctgaagagctctggtgaccttgggggatggtttttctgcctga

SEQ ID NO: 823769 - DNA, 120 bp, Artificial Sequence
  ENSG00000273082_0 (sequence is synthesized)
acccccaccagcagcagcagcgcccgctttgccccggctccggagcgctgtttacctaatctcagcggctgaccgagcccagcagaatgcgaaagggaggcagcggtggtacagcagcgt

SEQ ID NO: 823770 - DNA, 120 bp, Artificial Sequence
  ENSG00000273082_1 (sequence is synthesized)
acgttggcaggcatagcagattctgtttctgatgccattaccgtgtcggagaagaacattatatgaaaaaatactatctaatatcctagagaccattaaagtgtcaaagtttaatgccaa

SEQ ID NO: 823771 - DNA, 120 bp, Artificial Sequence
  ENSG00000273080_0 (sequence is synthesized)
aactccaggcgattggcgcgaaggaggcgaaaagggcggattccctttccgggtcgcgcccgggctgcaggtccttatccggaaggggttactaggtgaacactgccggagggagagcgc

SEQ ID NO: 823772 - DNA, 120 bp, Artificial Sequence
  ENSG00000273080_1 (sequence is synthesized)
atttcgtaggaaggagccgatttggcgaaagttacgtaaacaatggaattgtctcagtttgcgcctttgtttcgtttgacagccctccagggagtcatagtgattgctggagacggtgaa

SEQ ID NO: 823773 - DNA, 120 bp, Artificial Sequence
  ENSG00000273080_2 (sequence is synthesized)
ctaacactgtggggacccttgtgctaaacgtgtcaagtggcacaacaaggataggaacacgggtcctttggactccacagcttctgctccttccagattaagccacactgctttctccaa

SEQ ID NO: 823774 - DNA, 120 bp, Artificial Sequence
  ENSG00000261845_0 (sequence is synthesized)
ggagctcagaagttgggcaaaggtcacagcagacttcctgaaaagcagacactgaggaacacagtggagagcgggagttcacagcgacgcagctgaggacgacgcaggacctctcccaaa

SEQ ID NO: 823775 - DNA, 120 bp, Artificial Sequence
  ENSG00000261845_1 (sequence is synthesized)
ggtgctgcagctccagcaccaggggccagggctgcggcgacagcagctcagcaacccttgctgtgctcaagttcttggggattcagagctaagttcaaaatttagaaacagtgccttaaa

SEQ ID NO: 823776 - DNA, 120 bp, Artificial Sequence
  ENSG00000261845_2 (sequence is synthesized)
gacgggcaagaaaacccggtgtgggagtctgctcatctatggtttgttactgctctcgcttcgatattcttaaattcctaggtaccaatgaaaaagccaagtgaacgtggcagagtgagg

SEQ ID NO: 823777 - DNA, 120 bp, Artificial Sequence
  ENSG00000261845_3 (sequence is synthesized)
aggagacaggagcgtgtgcaccttccatctgtgagaggcacacttcagtctgggttcaagatgcagaatggtgcctacggcaaaaaaaaaaaaaaaaaacaccctcctcccttctttacc

SEQ ID NO: 823778 - DNA, 120 bp, Artificial Sequence
  ENSG00000261845_4 (sequence is synthesized)
cacgggaaagtctacccccgactccttctggatagtaacatacacagctgcataaaaacgtctccaaggggacatacgatgcatttgcttggtgtcccagccaagctccccaccggcgac

SEQ ID NO: 823779 - DNA, 120 bp, Artificial Sequence
  ENSG00000261845_5 (sequence is synthesized)
ctcactgttccttagagctcaagagctcgtctcctatcaatcagagaaccccatcagctgtgaccaacagagctggagccctctgtggagggagctgaccccacacacaggacagagcag

SEQ ID NO: 823780 - DNA, 120 bp, Artificial Sequence
  ENSG00000261845_6 (sequence is synthesized)
aatcctgattattttacaaactgcaaaccttctgagtaagaagacaaaaatatacattccaaggtatctgtaaagtgcttggaagatgcagacagctgcaccgaggggctctgatccatc

SEQ ID NO: 823781 - DNA, 120 bp, Artificial Sequence
  ENSG00000261845_7 (sequence is synthesized)
cacacgctgcgctttgctgcggtcacacacacggtctcagtcacgtgatggttttgcttttatttcttaaacggctgagtgataatccagctagtgtgcagtcatttcatacctttcaat

SEQ ID NO: 823782 - DNA, 120 bp, Artificial Sequence
  ENSG00000261845_8 (sequence is synthesized)
gggcgtcaccgcagtgacgctgccccagccccatgctgagggccgacacaattcacggaacagattcatcatatttggtctttatgtaaataataaatgttttaaaattgcctaaatata

SEQ ID NO: 823783 - DNA, 120 bp, Artificial Sequence
  ENSG00000261840_0 (sequence is synthesized)
gggagggggaactgtggggcgttcgccatcttgtctccctctccttacctgcgtcctcgggggcgtgcgcaccaccccccctcccgcctaggaggggggagggccccctcttggccaccg

SEQ ID NO: 823784 - DNA, 120 bp, Artificial Sequence
  ENSG00000261840_1 (sequence is synthesized)
ccttcgcggcctttaaactcccctggagactgcggctactgccaccgccttgcctccactgcctcttcgcgcagcacacagatgcggacggtgggtgggaaaaagggcagacgctactcc

SEQ ID NO: 823785 - DNA, 120 bp, Artificial Sequence
  ENSG00000261840_2 (sequence is synthesized)
ttctcgcgagagacaatcacccagtaagctgcagcaagttagcagtggaacctgggcctcccgattcccatggcagcccacttctgtagcgctgcttcgttttacgcgaggatggtttcc

SEQ ID NO: 823786 - DNA, 120 bp, Artificial Sequence
  ENSG00000261840_3 (sequence is synthesized)
tgatagctttcaaacacctttgccatctcttcgcaaactttctagattaagaatccctttgagaatctgatacctttaccccagaatagaacaataaataacagctaccttctactgaca

SEQ ID NO: 823787 - DNA, 120 bp, Artificial Sequence
  ENSG00000261840_4 (sequence is synthesized)
gtgcgcggctggaggcggagcgagccggctgcgcgcacggcccaggggctcccgccagaacccgagcccacgcacacaagggtcgcggggctgggaagctcgtcatccaagcccgtcagg

SEQ ID NO: 823788 - DNA, 120 bp, Artificial Sequence
  ENSG00000261840_5 (sequence is synthesized)
gagcccccccatcacccgaccgcgaaaggctgagagaagggagggttcgtgccaccaggtcctggtcccccggctagatgtggtgggcgcgcgccccgactactcgtcccacgcccccct

SEQ ID NO: 823789 - DNA, 120 bp, Artificial Sequence
  ENSG00000261840_6 (sequence is synthesized)
tcctcttcccgcgcgcccctgaggggtgactgggttggtgggcgggcaggagcgcacctgggtccgtcctctcagggctcgctcgctcgctcgctcgctcaggcacgcgtgcgcagaagg

SEQ ID NO: 823790 - DNA, 120 bp, Artificial Sequence
  ENSG00000261840_7 (sequence is synthesized)
gcgggaagggagaggagacacgccggggcccagcgccggccggcctgaccccctcagtctgtctctatgggcgcgcgccgacagcctcgcgcaccggccccggggccccggctgagggtg

SEQ ID NO: 823791 - DNA, 120 bp, Artificial Sequence
  ENSG00000261842_0 (sequence is synthesized)
aattaatgtaatcgagaaaatgtgcatatttaaaatatggatagagacgcataaatacatctttaaaataaaaatataatcgtttgtgttaagtccttgctccattggctctcagctgca

SEQ ID NO: 823792 - DNA, 120 bp, Artificial Sequence
  ENSG00000261842_1 (sequence is synthesized)
ctcacagcaccagtgagaccgacacggttgtgccccatcccacaggcgccaaatggagggcgcagggttttaggagctcgcgtagggcctctcgggcggcagcaatggagccgcgaggcc

SEQ ID NO: 823793 - DNA, 120 bp, Artificial Sequence
  ENSG00000261842_2 (sequence is synthesized)
ggcggggagaccgaggacgggacccgctgagctctgggtgagctggggggactcgaggggacctggatgggccagaggcctggcttggggaagggccccttcccggttccccaaggtccc

SEQ ID NO: 823794 - DNA, 120 bp, Artificial Sequence
  ENSG00000261842_3 (sequence is synthesized)
ggtgtgccgctgccgtagggaagcaggaaggcacggccgcgccaggcgacctgaacgagaggaagcccggggtcgccgcccgcgggcgcggctggtgttcatacccagccaggaagggcg

SEQ ID NO: 823795 - DNA, 120 bp, Artificial Sequence
  ENSG00000261842_4 (sequence is synthesized)
ggcgggcctcgggtgccacgcggcgtgcccggcgctttccccgcagtcccgcttgctgcccgtccctggactccttatcaggcagctgggtgaccttgctgcaaagggcagggccgtgga

SEQ ID NO: 823796 - DNA, 120 bp, Artificial Sequence
  ENSG00000261842_5 (sequence is synthesized)
gcaggatttctgccgcacaccagccacctgcaacggtggtaagaggatttggcagtgatccgggtactctacctaatattggggctgaaatatcagaaggaatgataaaatccattttta

SEQ ID NO: 823797 - DNA, 120 bp, Artificial Sequence
  ENSG00000261842_6 (sequence is synthesized)
agtgatagcgtttaaaggtgttggatcaggtttaatgaagaaaatcatctccatcccagctgggcagagatttgggattgtacccgtgtttcttcccgcacattgtcacctgtggcttgt

SEQ ID NO: 823798 - DNA, 120 bp, Artificial Sequence
  ENSG00000261842_7 (sequence is synthesized)
tcatccgttcatttcgcgtgcactgaggacctctgaggaccttgcgccagactctggagcaagcgcgaaatgaacaaaagccggccctgcccttgggaaaaatcaaacacacaatggccg

SEQ ID NO: 823799 - DNA, 120 bp, Artificial Sequence
  ENSG00000261842_8 (sequence is synthesized)
ctgagtgcacgctccgagcacgcgccaagccctggaaagcccggtagaggggaccctccaacctcccgcagtgatgcgtgtgtggccaggggtcttgctaggctgcaccttgcacctgaa

SEQ ID NO: 823800 - DNA, 120 bp, Artificial Sequence
  ENSG00000261842_9 (sequence is synthesized)
gcgggggagacgtctttgtagctttctcacagggcttaagacatctgtcctgctatcttccccggccttccagggattctcagtggatgttagctctctggatttcactggcaaggttat

SEQ ID NO: 823801 - DNA, 120 bp, Artificial Sequence
  ENSG00000261842_10 (sequence is synthesized)
agagacttaccattttctgatatgaacatctgccaagtaacgcatagagaataggaaagcatgcatatcccacaaggaaaaaaaataaaactaagaaactgttctatcaaagaattaagt

SEQ ID NO: 823802 - DNA, 120 bp, Artificial Sequence
  ENSG00000261842_11 (sequence is synthesized)
aagcatggagtgtgtcactggataaattaaacatacagagtttggattgaggctaggaaaggttgaagcaagagaaaaggagccctggtgacttgcccagggcagaggtttttgaagtga

SEQ ID NO: 823803 - DNA, 120 bp, Artificial Sequence
  ENSG00000261842_12 (sequence is synthesized)
gcttcctccttggagacccctcagcgcagggggagtttgggaagacgggggcgccagagcaggtaggcttggctccctctccagcctcttaaggcacgagttattttacatatttagctt

SEQ ID NO: 823804 - DNA, 120 bp, Artificial Sequence
  ENSG00000261842_13 (sequence is synthesized)
ctgaaaattgttttatttaaacaagggattccggaggctacaaacgaaagcttgaaaacactgacagatgaagtgcaaaaaatttggctgaccattataaatttgataaagatttcatgt

SEQ ID NO: 823805 - DNA, 120 bp, Artificial Sequence
  ENSG00000261842_14 (sequence is synthesized)
cctgaatctgaaagagattctaaaatatattacagatttagttctacagagaagggatgaactcttccaagtaatttcacaggtggagatggttagaagtcctcatactgggtggttaaa

SEQ ID NO: 823806 - DNA, 120 bp, Artificial Sequence
  ENSG00000261842_15 (sequence is synthesized)
attgatttcttccatagttatggaaaagacttgataccttctcttggagaaataagggactcattcaattgtaagtttttattgtttagaacatagaaattccttctacaaccagaaaaa

SEQ ID NO: 823807 - DNA, 120 bp, Artificial Sequence
  ENSG00000261842_16 (sequence is synthesized)
aacgctattttcatttgggggcaaagaattttaaataagattctggaattctgttatgtgattactacatactaataagagttcatctttttggtaaaatgaacacccaagcatgtttgt

SEQ ID NO: 823808 - DNA, 120 bp, Artificial Sequence
  ENSG00000261842_17 (sequence is synthesized)
atgcaattaacgtttgtttcaagactctgaagagctggcaacaatttgggcaaggaaaatgtgtctatttctctcaatttgtctactgtatgaattaaacacaccagagactggcttaaa

SEQ ID NO: 823809 - DNA, 120 bp, Artificial Sequence
  ENSG00000261848_0 (sequence is synthesized)
tccgtgggcgtaggaccctccgagccagtctttttctggaggaagagcaatcaagtttgtggccacagagatgctggtgggatggacatggttctggatctgagctctaatcacaattgc

SEQ ID NO: 823810 - DNA, 120 bp, Artificial Sequence
  ENSG00000261848_1 (sequence is synthesized)
tggttctggatctgagctctaatcacaattgcagcagctgcacccagaggaccagtgctggatccccactctggggaaggcaatggctgtgcaccctggagctcatgttcactggggatc

SEQ ID NO: 823811 - DNA, 120 bp, Artificial Sequence
  ENSG00000261848_2 (sequence is synthesized)
ggcaagaggcaagaacaggttttaagaaaagaagtgaaataggaagaaggactaacacagatgacttttccaactccaagacctgcattgctctcttcccaacttttgttcattcagctg

SEQ ID NO: 823812 - DNA, 120 bp, Artificial Sequence
  ENSG00000261848_3 (sequence is synthesized)
caccagtaagcattccactttgatgaatggattgaacatcaaataccacagctaagccatgtcatgtgtctggaagacagaatatggatttcatgtatttctactttcttcttaaacaag

SEQ ID NO: 823813 - DNA, 71 bp, Artificial Sequence
  ENSG00000261848_4 (sequence is synthesized)
gtgtgggatatagtctcgtggtgcgccggtttttaagctttttctggaggaagagcaatcaagtttgtggc

SEQ ID NO: 823814 - DNA, 120 bp, Artificial Sequence
  ENSG00000227143_0 (sequence is synthesized)
gtaagaccacctcatgagtagagctgtgttcttccatcagtcaggttgcttctctgtttgtgatgtttgcagccattgatgatcactgcctagatccattaattcattaaggtctgcaaa

SEQ ID NO: 823815 - DNA, 120 bp, Artificial Sequence
  ENSG00000227143_1 (sequence is synthesized)
aggaccctctcttctccactctgtctcccaggtaggaacctctgaagctgaggacgtattcttgctggcttcattattgtcatcattcctcttcgtgacctattacacatttctgaagag

SEQ ID NO: 823816 - DNA, 120 bp, Artificial Sequence
  ENSG00000227143_2 (sequence is synthesized)
aaactcctctcaccagctcctttgtttcctaagatggctgggatcctgatacctacatgcatgagaagccacaccagaatgccagccgacatttgcatgcagagacgttgcctgtggagc

SEQ ID NO: 823817 - DNA, 120 bp, Artificial Sequence
  ENSG00000227143_3 (sequence is synthesized)
tgtctccagaagaggatgcagctgcaggtacttgaggaccacactccccctcccaagcctaatgttccctacatggcagcgcactgagcattggcaatgcaaaaaccacttctcaattac

SEQ ID NO: 823818 - DNA, 120 bp, Artificial Sequence
  ENSG00000227143_4 (sequence is synthesized)
tcataattgagttgcaaaaagagattattctttgctgaaacttgacttctcatcctggaagcaggtttttctcatttgggatgggaggggggcaaattatattaaaatttgctggaaatt

SEQ ID NO: 823819 - DNA, 120 bp, Artificial Sequence
  ENSG00000227143_5 (sequence is synthesized)
tttgcttggaacaaggcacaaaaatattccttggaggttgcagatgcctcagttgtcattctttaacaaaatcagggctctctttgtaaaaacaaacacgacccaggcatgttcactctt

SEQ ID NO: 823820 - DNA, 120 bp, Artificial Sequence
  ENSG00000227143_6 (sequence is synthesized)
tctttggaatgtatccatggtgctaaattagattttttgaataccctcacaactggccccaaggttgtgcatggctattgctgactctacaacaggggaattaaaggctaaatgtattct

SEQ ID NO: 823821 - DNA, 120 bp, Artificial Sequence
  ENSG00000227143_7 (sequence is synthesized)
gctgactccctggttctctgcttatccaaagggcactgggattcattttggaaaatcctagagattacacacaggctttcttccagggataagttaaagaatttaggaaacacccaggct

SEQ ID NO: 823822 - DNA, 120 bp, Artificial Sequence
  ENSG00000227143_8 (sequence is synthesized)
tctgtcttaacacacttgaaaaaaaaaacaaaacatatcttataaggtgtcccagtgacccaaaataggtaaaacacctcccaaggaagcacttttctgtaaaatctggttctttaaccc

SEQ ID NO: 823823 - DNA, 120 bp, Artificial Sequence
  ENSG00000227143_9 (sequence is synthesized)
ctgtgcctcttctcattctcaaaactgcacaagaagcagcatgcccaaggttctagcccaaattgacattgcattaacactgtcaaaacattaatggaaagtgtcccaggaaggactaga

SEQ ID NO: 823824 - DNA, 120 bp, Artificial Sequence
  ENSG00000227143_10 (sequence is synthesized)
gagatttcttctaccccattgttgctgactctgacttcctggttccatcaagattccaaaggggaggagaaacttgatgcttacctcggggaaatctctgagtataaaaccttaactgaa

SEQ ID NO: 823825 - DNA, 120 bp, Artificial Sequence
  ENSG00000227143_11 (sequence is synthesized)
gacctgactctaggcttgggaccccctctccaagaggtagggagggcagacctcccaaagcacagggtttcatccagggctctttataatttctaaggctgccctctaaaacctactcct

SEQ ID NO: 823826 - DNA, 120 bp, Artificial Sequence
  ENSG00000227143_12 (sequence is synthesized)
ttgcttccctttatcttcccctccatcaattcccttccctcctatttccaaaaaccataaccataaccaaatttggcctgattctttaaccgataaacctaaaaattcagaaatcaggca

SEQ ID NO: 823827 - DNA, 120 bp, Artificial Sequence
  ENSG00000227143_13 (sequence is synthesized)
gctctaacattcttgaattgtgcctcatgatactttagttgttgctgttgtcattttgtttgtcagaagaatactttgctatgtaggtgaatttaaaaagtgaccctggaccattatatt

SEQ ID NO: 823828 - DNA, 120 bp, Artificial Sequence
  ENSG00000227143_14 (sequence is synthesized)
tcattataaaatacagcggcataaggccctctccaaaagacatgctacagctcctgccttgttgatgtaaccatataaacctgtgaggagcatgagcacacatccaaatagacatatctc

SEQ ID NO: 823829 - DNA, 120 bp, Artificial Sequence
  ENSG00000227143_15 (sequence is synthesized)
acatgaacacgctaaacagagacatggcgcagaagctatgtggggccttgggctgaaccagcagttagagcatgcaaaataccactacagacaaactacagacaagttctagaaagtcca

SEQ ID NO: 823830 - DNA, 120 bp, Artificial Sequence
  ENSG00000227143_16 (sequence is synthesized)
gttgatactacatgagcaagccagtgaaaagaaataattgcctgtagcaacacaggatacaaaatatatttttagaacagggtcttaaaagtgttaggacattaaggattctaaggaaat

SEQ ID NO: 823831 - DNA, 120 bp, Artificial Sequence
  ENSG00000227143_17 (sequence is synthesized)
ctggtctgtatcagtgaaaataattttgaaaaccgaggaaaatgctaaagtccaatgtaaaggaaagggtggaaggggcaagtaattgacaggtttcctggtggccgcgcacctgcggag

SEQ ID NO: 823832 - DNA, 120 bp, Artificial Sequence
  ENSG00000227143_18 (sequence is synthesized)
cacttactcacctcactcacctcactcagtgcttttccaggcatgttttatttcctttgcagtcctcggcaccctccgaatgacccctgataacagcaatggccagcgtttctctgatgc

SEQ ID NO: 823833 - DNA, 120 bp, Artificial Sequence
  ENSG00000227143_19 (sequence is synthesized)
tctgctaattccacacgtgacctcatctgagcctcacaatgaccctgtgaggtaaggattattgtctcccattttacagagaaggaaactgagacccaagtggtactcaagtgtcccctg

SEQ ID NO: 823834 - DNA, 120 bp, Artificial Sequence
  ENSG00000227143_20 (sequence is synthesized)
gatacctaccagtaagtgataccttactggtaggtatcctaagctcactaccagtaagggacacagcagaagctccaccccacttggtgactctcagtgacaagccctccctacctggcc

SEQ ID NO: 823835 - DNA, 120 bp, Artificial Sequence
  ENSG00000227143_21 (sequence is synthesized)
ataccacctcatgtggtgtaaagctctgttgccagtatggaaaacactcacacgagtaaaaccaaatatccacttgcattgtccaaaatgacatccagagtcgagaggccaggaaatatt

SEQ ID NO: 823836 - DNA, 120 bp, Artificial Sequence
  ENSG00000227143_22 (sequence is synthesized)
cctagacacacataggttgtccattcttcattcagcagtttagagacaaaggcataattaggcccatctgtaaataaagtgagtccctgacacaggacacaaataaagggcttcactgtc

SEQ ID NO: 823837 - DNA, 120 bp, Artificial Sequence
  ENSG00000227145_0 (sequence is synthesized)
attaacaacacacgtaaaggaagtacccactggaccaactcagggtaccagaccagaagatcagatcgtagaagttactggagaaaaagatcagcggacagcactcttgaactacatgcc

SEQ ID NO: 823838 - DNA, 120 bp, Artificial Sequence
  ENSG00000227145_1 (sequence is synthesized)
aggcctcttcttcctggaactctaatggatttaaatggcttaagagacgggatgaattgttgaaaatggttctttcaaaagacctcacggaaggccaaagacaagactcactgaggccaa

SEQ ID NO: 823839 - DNA, 120 bp, Artificial Sequence
  ENSG00000227145_2 (sequence is synthesized)
gctgatcaacaatatctataagttgacgcattctaatcatgtggcgatcttgaccttgggagcttgatttgtggaccagtgtccccaagaagatgaccatcagacagatgacaatcctct

SEQ ID NO: 823840 - DNA, 120 bp, Artificial Sequence
  ENSG00000227145_3 (sequence is synthesized)
ccatgttgccaggactggatctcataagtaccaacagtagagctagaccttggtctcgttttcacttcagcttgactgagaacaggtatacgtgtgcatgtgctaatgtgtgggggcagg

SEQ ID NO: 823841 - DNA, 120 bp, Artificial Sequence
  ENSG00000227145_4 (sequence is synthesized)
gcatctttgacaggaaaaagagagaatgggtgaattccaattttcagcatgaatcaagaatgtcaccgatgaagtttttgaatgctgtgctcctaatctcattttcctcctccagagact

SEQ ID NO: 823842 - DNA, 120 bp, Artificial Sequence
  ENSG00000227145_5 (sequence is synthesized)
tcggtgaaggatgatgcaaactgtgtttcttcagcatatcttggctccaacatgggatactcagcagtgaggctagagatcagatgtccttcattccttgaccactaagcctagaggatg

SEQ ID NO: 823843 - DNA, 120 bp, Artificial Sequence
  ENSG00000227145_6 (sequence is synthesized)
gagagaaagaagtggaacatctgcactcttcaacctgagtccactccaactccatcccacaaggtgaggcaagttccaccagcctctccagcctcctgtctaatatgatcagagaaatcc

SEQ ID NO: 823844 - DNA, 120 bp, Artificial Sequence
  ENSG00000227145_7 (sequence is synthesized)
tcttctctctggactcaagacccatccctgtttccttccctaaggcgacaggtggctatagcaccctttgtcttggccctgcagccaccaatacacaaccataaaaataaagtagtccaa

SEQ ID NO: 823845 - DNA, 120 bp, Artificial Sequence
  ENSG00000227145_8 (sequence is synthesized)
ccatcagccatgagtgtggcagctccagaatgtctataccagagtggctgagagtcagcaacttggctggaagctacacttgaatagcaaacaaaccacttttacttagtttccatgtct

SEQ ID NO: 823846 - DNA, 120 bp, Artificial Sequence
  ENSG00000227145_9 (sequence is synthesized)
atttggtaccttggagtacagtgatgagttttactagatgtggactttccaggaatatagccaaggtcgtcaccatgaaagtatgaaactttagtcatttacccaaggggattcatggac

SEQ ID NO: 823847 - DNA, 120 bp, Artificial Sequence
  ENSG00000227145_10 (sequence is synthesized)
atatattaagaattttctttaatggactgtgtttatagaacacctggtcaggacggaaatgaggccagggaactaaaggggtagaagtctgaagaggaatggttttgcatgggaaaactg

SEQ ID NO: 823848 - DNA, 120 bp, Artificial Sequence
  ENSG00000227145_11 (sequence is synthesized)
tgccaggtctaaaactgggctgaacactatttgtccccaactctctggcccggtcctcatagttctttctgtgatccctgcgtggtgaatactccttttctgctttcactggctttggcc

SEQ ID NO: 823849 - DNA, 120 bp, Artificial Sequence
  ENSG00000227145_12 (sequence is synthesized)
cctcatggatagaattagatgttctgcatggcaaactgtgggaagagaggcctccagtgtttagagtgatattatcatgtgtaccactactattatacatactaaaggtattcagacagg

SEQ ID NO: 823850 - DNA, 120 bp, Artificial Sequence
  ENSG00000227145_13 (sequence is synthesized)
tctcacttatttgacttgaggaagaaaattcgaacgaggaaaatcatcaaggatttgctaaagtcccttctgtaaaatcttccttaaggaagtttaaacactcctattctctcttctctc

SEQ ID NO: 823851 - DNA, 120 bp, Artificial Sequence
  ENSG00000227145_14 (sequence is synthesized)
attcttttgaactcactgcatgtattgatatcactgacttggtttgttttctagaatatatgtaaaagtaagagtgtgtatatataacccattatgtacataacaagaacagttccttcc

SEQ ID NO: 823852 - DNA, 120 bp, Artificial Sequence
  ENSG00000227145_15 (sequence is synthesized)
agtagcacccccattctacctccaagtgtgacaaccagaaatttttccagccaatgccaaatgttttctggggcacaaaaatcaccaccggttgagaaccactggttatatgattagacg

SEQ ID NO: 823853 - DNA, 120 bp, Artificial Sequence
  ENSG00000227145_16 (sequence is synthesized)
gaaagaaaaagagaaaaagaaagatgcctggctaggccaattagagatcttagataattactatatgcatgcaacattagatagttttattttcattaaacttttaaatcttttaaaatc

SEQ ID NO: 823854 - DNA, 120 bp, Artificial Sequence
  ENSG00000227145_17 (sequence is synthesized)
tcttacagaccctactttgaagctagcttgatataatgctaatgtgaccttgaacgatttctttcttcctgagtttgcctactagtatagcttaaagatccaagttacactattactcac

SEQ ID NO: 823855 - DNA, 120 bp, Artificial Sequence
  ENSG00000227145_18 (sequence is synthesized)
ttatatcatagccagcattgcttgatcagattatcagatagatacagtatcacggagacaaaatcctttcattatgatgtaagataaaaaatatctttcattaacaacacacgtaaagga

SEQ ID NO: 823856 - DNA, 120 bp, Artificial Sequence
  ENSG00000227145_19 (sequence is synthesized)
gttgtcttacgagagaaaaacaagagccttctcgggccccgtgttctctagctcttgatgtggcctcttcggtatcactggcagccccacagtctggtggtcagtgtgtcgcagcagagg

SEQ ID NO: 823857 - DNA, 120 bp, Artificial Sequence
  ENSG00000227145_20 (sequence is synthesized)
gtcattcaccgatgctgcttatccacagcaccttttctgtggggaatgggggcctctattctgctagtagactcaggtgtgtcactctgtgatactcttaagactgggttcattgaggac

SEQ ID NO: 823858 - DNA, 120 bp, Artificial Sequence
  ENSG00000227145_21 (sequence is synthesized)
aggtctctttgctaacattcacacaaagtcattgtttggaagcacagtcctgcttctgaaatgctaggtctggaggagttccagcagcagccacatgggccctctcctcagatcttggct

SEQ ID NO: 823859 - DNA, 120 bp, Artificial Sequence
  ENSG00000227145_22 (sequence is synthesized)
caactccatcccacaagggaactgcctccattgctgatgttggattaaacagaacagcctgtgcagttagttcatggattccataaagggactggaccttaatgaagacgttcctgacat

SEQ ID NO: 823860 - DNA, 120 bp, Artificial Sequence
  ENSG00000227145_23 (sequence is synthesized)
gggtttgggcaagaagatattataattttgcaaatgaagaaactgagatacagaaatgacatccagcaccctcagtgtcacacagagagtaaatggactggcctgaaccaggctgcctcc

SEQ ID NO: 823861 - DNA, 120 bp, Artificial Sequence
  ENSG00000227145_24 (sequence is synthesized)
tggaactggtttctttggttggttgaatccatggatggagaactcgtggatacaagggctgactataatgagaagatatgaaagctgaaaagacaaacattactacatatttacatatgt

SEQ ID NO: 823862 - DNA, 120 bp, Artificial Sequence
  ENSG00000227145_25 (sequence is synthesized)
ccaaagaagaaggttcatctccacgtggacctccctatagagcttcttgaatggcctcacaacatggcggctggcttcccacagagtgagcaatccaagatttccttgattcagagaaag

SEQ ID NO: 823863 - DNA, 120 bp, Artificial Sequence
  ENSG00000227145_26 (sequence is synthesized)
aagataaaaacacatacaaagagacggcaccagctcctttcccagttgtgaccagattgcacgatacccaagccatggctccaaagagtgcgtgtactgaagcctggccattcatgacag

SEQ ID NO: 823864 - DNA, 120 bp, Artificial Sequence
  ENSG00000227145_27 (sequence is synthesized)
actcatttccacacctgagtccggttttgctctgtgagtgttgggctttctccaagggaatggttggagctgttgcgagcgaacttcctggctgccacagagttgattggattccttgga

SEQ ID NO: 823865 - DNA, 120 bp, Artificial Sequence
  ENSG00000227145_28 (sequence is synthesized)
aatgcacactcacaggctgctgctctttgaagctgtctccttcactggccatgattctcctgtctcattagctgttgcctatgaccctggtgtcgttttctccttttactcatcaacacc

SEQ ID NO: 823866 - DNA, 120 bp, Artificial Sequence
  ENSG00000227145_29 (sequence is synthesized)
caaatccacagggttgtgatggattagcagcctttcttattagcaagaagccctgtggcctcaagaggcaaaatgaatcgtggttagaaatctccatctcctccctcccttggtataatg

SEQ ID NO: 823867 - DNA, 120 bp, Artificial Sequence
  ENSG00000227145_30 (sequence is synthesized)
ccatcatttaactatctgaaaatagagaagactccgttccaattgtaaagccctaaggagaaaaactgagtttgaaactttccttaattatgctgatatttaacaataaactttgtagta

SEQ ID NO: 823868 - DNA, 120 bp, Artificial Sequence
  ENSG00000227148_0 (sequence is synthesized)
ccggtgggctccggcggctgcgccgcggcggacaaagatgctgaaggccaagatcctcttcgtggggctttgcgagtctggttcccactgctccccgctgcagacagcccatagctggtt

SEQ ID NO: 823869 - DNA, 120 bp, Artificial Sequence
  ENSG00000227148_1 (sequence is synthesized)
gtctccagagaagggcatctggagggccctccagggtccatcccaacccaaatcttctgtagtcaagaacaaggagccagtggtgcagacacagatgcagttccatcgcttgggccccac

SEQ ID NO: 823870 - DNA, 120 bp, Artificial Sequence
  ENSG00000227148_2 (sequence is synthesized)
caaggagagaagaagttctcagagactagagtggaggatggagacaggctgggcccacacccccatgccccacaggtacctactacgactccccagaaataaacatttccccagtcctga

SEQ ID NO: 823871 - DNA, 120 bp, Artificial Sequence
  ENSG00000237062_0 (sequence is synthesized)
agatgtcaggcttttttaatcttactcaactctgaagaagctgagtggcctatagatgaccaaaatgctctgatggcttcttgcagggagtgtgcatgtgtgagtgagtgtggcgtgcat

SEQ ID NO: 823872 - DNA, 120 bp, Artificial Sequence
  ENSG00000237062_1 (sequence is synthesized)
gtataaagaaaagcttttctctgaaaagagcagagaagggcatggtgacctcgatgaaagtgaatgatgcatcttttccctgcccactcccagccccatctcacatgttatttattatat

SEQ ID NO: 823873 - DNA, 120 bp, Artificial Sequence
  ENSG00000237062_2 (sequence is synthesized)
gatcacttcaattcatgccaggagaagaatcattagattctaaatgcattcagaagacagggggcagagagacagactcggaggatcacagaggctcctcaaagctggttttgcaaagct

SEQ ID NO: 823874 - DNA, 120 bp, Artificial Sequence
  ENSG00000237062_3 (sequence is synthesized)
gtgacagaaagcctcagaaaagcactggaaggctggcttctgcttcaatctatcatgagaagccatcaagatgttgcctttcttgtactgccattaaaaatgcaacatctggctttaaaa

SEQ ID NO: 823875 - DNA, 120 bp, Artificial Sequence
  ENSG00000237062_4 (sequence is synthesized)
gactccaaaaatacagagagccattaatctgtatcagattcttgcgtgctctctctccccatccatcatatacatgcatgttttttaatacatccccaagcccttttttcatctgcttat

SEQ ID NO: 823876 - DNA, 120 bp, Artificial Sequence
  ENSG00000237063_0 (sequence is synthesized)
aaaaaaaaaagagaattccatcacatcacctccagtggggggatatccaggaagacaatttcagctcactataaagaactccctaacagttggagctacccaagaatggaatggaccacc

SEQ ID NO: 823877 - DNA, 120 bp, Artificial Sequence
  ENSG00000237063_1 (sequence is synthesized)
ttgggagtgatgaactccttgtcaatatatgtattcaaggaaagattaagtcttcattgggaaattgaactaggatcctggtgacctctcaagttgaaaaaatgggcaagttctattagg

SEQ ID NO: 823878 - DNA, 120 bp, Artificial Sequence
  ENSG00000237063_2 (sequence is synthesized)
caaagctgtgcttccagacaattatgtgactgtatgtgtagaagaaatgggtggggagggatcagaggcaggcaggaccagtaggaaaccactgcagtggtccaggagataaaagaatag

SEQ ID NO: 823879 - DNA, 120 bp, Artificial Sequence
  ENSG00000237063_3 (sequence is synthesized)
agcctcccaaagtgctgagattacagccgtgagccaccctgcccggcaccctaaagatttttactatgtctttttgtagcaacttagggaggagggcaagatcagtgttgttgccacttt

SEQ ID NO: 823880 - DNA, 120 bp, Artificial Sequence
  ENSG00000232021_0 (sequence is synthesized)
tggggggcgaggcgcccaccccgcacaagaacagaggagcgggggagaagagacggcctcgctgctcactgggcccctttgtgtgactaaatttggcaagaatatggatctgagccagtc

SEQ ID NO: 823881 - DNA, 120 bp, Artificial Sequence
  ENSG00000232021_1 (sequence is synthesized)
tttccacgtgtgctcccagctcccagctgagaaggccaagggttctcttccgggaaaaccagtttggctattaagggaacctgtcgacacagagcagagcaagataaggccaggtttcag

SEQ ID NO: 823882 - DNA, 120 bp, Artificial Sequence
  ENSG00000232021_2 (sequence is synthesized)
aaagaatagctgtttaccatcaaagcaactgggttccacacagacatggtatattatacacaaagacgaaggatatgggtccactctccgtcaaggaatgttataaatccacgtggtgtc

SEQ ID NO: 823883 - DNA, 120 bp, Artificial Sequence
  ENSG00000232021_3 (sequence is synthesized)
cctgggtgtcaggcttggccagaacatctgtggctggagaagccaatgtggctcaggagctccctgctggctgcacatctgaacggcttcaggagtacaagtttccccatcaaaggtttg

SEQ ID NO: 823884 - DNA, 120 bp, Artificial Sequence
  ENSG00000232021_4 (sequence is synthesized)
gaataaattacactaaaaaattggctccagaacgagttattttggacaggacaaggtgaagctctcatgaggtgtgttaaatgcatccctctgtgcagtgggcaactgcgggagagctgg

SEQ ID NO: 823885 - DNA, 120 bp, Artificial Sequence
  ENSG00000232021_5 (sequence is synthesized)
agggggtggtcaaaggctgtggggaaagtggagaaactctaaccctgcacacacttggacagaaatgccaaatctactgactggacaagatttgggaaattcattttttaaacaaatggt

SEQ ID NO: 823886 - DNA, 120 bp, Artificial Sequence
  ENSG00000232021_6 (sequence is synthesized)
tttacaaagctttataacttaatttgaatatatatcttataaatagtcatccttttcctgatacttcattttcaaaggatgtcctttcctccctcatggagtactggagccagctcacac

SEQ ID NO: 823887 - DNA, 120 bp, Artificial Sequence
  ENSG00000232021_7 (sequence is synthesized)
gttttcaggacttttgtgagccagttgtcaaacacagctgctattaaaaattaaattacataaactttcaaagttatcttaaaaacaagggtaagaaatgtcccaaactcattatcattt

SEQ ID NO: 823888 - DNA, 120 bp, Artificial Sequence
  ENSG00000232021_8 (sequence is synthesized)
cctaattattttgctacattttattatgatctatgttcttgaggttagttacatctcttgtacctatttgatggaaatactgtataatggtgggccactgtgtatctcattacatctcca

SEQ ID NO: 823889 - DNA, 120 bp, Artificial Sequence
  ENSG00000232021_9 (sequence is synthesized)
tgttcagtgacatcacatggatagtttcaagtcaacatgttgggagtagttgcctcacagaaactgactacaaatcagggcgttgacttatcatttcattgatgatccagacaagaaagt

SEQ ID NO: 823890 - DNA, 120 bp, Artificial Sequence
  ENSG00000232021_10 (sequence is synthesized)
ggaggaaatgttaataatgcatactaaatttaaacatgtgttatgcttgcagttattacatatgaatagcctaaacattgagaaaagattcttccagtatttaacaactattaaaatggt

SEQ ID NO: 823891 - DNA, 120 bp, Artificial Sequence
  ENSG00000232021_11 (sequence is synthesized)
atccaattcagcaaagaagttgcccatgtcatcagtgaacaagtgttgtactgacataagtctttgttgtttattattccttaatataagtgaaaatactaaacaacaatttatgcagga

SEQ ID NO: 823892 - DNA, 120 bp, Artificial Sequence
  ENSG00000232021_12 (sequence is synthesized)
attatacttgttaactgccattataggttggctaaggacacgagttagataaaaatcaaggagagcatcctgtgagaaatcaacttactacatagaatttacaatatagagttttgtata

SEQ ID NO: 823893 - DNA, 120 bp, Artificial Sequence
  ENSG00000232021_13 (sequence is synthesized)
ttttattatacttataaattatgtccttatatcctttatgttggtaacattgatagtaaatcaatgcacatatttatggatacatttctttcctggagagttgattgttagacttttact

SEQ ID NO: 823894 - DNA, 120 bp, Artificial Sequence
  ENSG00000232021_14 (sequence is synthesized)
tgcgcacggccccgcgcggcggcgcggcctttgaagtcgcggcggctgccgctttcatcctttcttttttccctcgcaggcccctttgtgtgactaaatttggcaagaatatggatctga

SEQ ID NO: 823895 - DNA, 120 bp, Artificial Sequence
  ENSG00000232021_15 (sequence is synthesized)
gccagtctttccacgtgtgctcccagctcccagctgagaaggccaagggttctcttccggatgcagcctttttgaaatttattcttggccaaaagaggaagatagttcaaggattctatc

SEQ ID NO: 823896 - DNA, 120 bp, Artificial Sequence
  ENSG00000232021_16 (sequence is synthesized)
ttgcttttggggggcaatggagaaaccctgaaaacacttaaggaaaacctgaggccttctataagaaaataaactccctgaaaggggaggcagggccaaggaatttacttatttttataa

SEQ ID NO: 823897 - DNA, 120 bp, Artificial Sequence
  ENSG00000232021_17 (sequence is synthesized)
gggctctgttggcattgggcaagcacgtaatgcctggtttgaggctagaagccaaagccacaaccttcttgcagtaccaactgagccatagggagattaatgcagaacaaggtcgttagt

SEQ ID NO: 823898 - DNA, 120 bp, Artificial Sequence
  ENSG00000232021_18 (sequence is synthesized)
ctcattgtttatccagttactagccgcatagattttgtgtaaatttcagctacagtggttgcagcctgcctttgatgtgtgtaatctgtacattttagtgctccaggaaagtacctgatt

SEQ ID NO: 823899 - DNA, 120 bp, Artificial Sequence
  ENSG00000232021_19 (sequence is synthesized)
gacaagatctacatccaatgcccagaaaacacatcctacacaggcacagtgaagcgtggagttgaagaattttccagtgagttccatcaaagtaaataaaccaacctagagcatcaggat

SEQ ID NO: 823900 - DNA, 120 bp, Artificial Sequence
  ENSG00000232021_20 (sequence is synthesized)
aaggacgagagaaaagcacggtgcccctcgagtcctctccgccccctcggtcctaacccccgcccaggctccaggtcttcccctttgtgtggcctggactctctcccagctacgactttg

SEQ ID NO: 823901 - DNA, 120 bp, Artificial Sequence
  ENSG00000232021_21 (sequence is synthesized)
gtgggatccaaaaggaaggaggtggcggggcctacggaagaggatacccaggagccagggagaagggctagaaaacgaataatgtgactccagaggcggaaccccgaccccctctatttc

SEQ ID NO: 823902 - DNA, 120 bp, Artificial Sequence
  ENSG00000232021_22 (sequence is synthesized)
ccaccccggcttcacccggagacgaaagctgtgggcatcttcagtttaacggacttcgcggaaaaggagagaaggggggcgagggaaatggcagtttgtgtcccaggggttcttcccctt

SEQ ID NO: 823903 - DNA, 120 bp, Artificial Sequence
  ENSG00000232021_23 (sequence is synthesized)
cttcttgccgcctcctaaagacaaacaaactcaaccccccaccctccggggtatcagggaactcgtgggaccgtgaaaaagtcgttcccaaatccggccgcctgcggacgtcggacttcc

SEQ ID NO: 823904 - DNA, 120 bp, Artificial Sequence
  ENSG00000232021_24 (sequence is synthesized)
ggcgcccgttggcgtctgtagctcggcgcagccacgcggggctccagcgagcggggtccgccacccctcgcgccctcctgcggctttcccagcgctgggccagtgcaggccgagccctgc

SEQ ID NO: 823905 - DNA, 120 bp, Artificial Sequence
  ENSG00000232021_25 (sequence is synthesized)
ccggggcgcggctgtccacagggccgcctcctcctgcggcccgcggggaaggggcgcatcccaccccgctctgcaggccgcccttctgccagctgggaggcgagggcacacgtcctaagg

SEQ ID NO: 823906 - DNA, 120 bp, Artificial Sequence
  ENSG00000232021_26 (sequence is synthesized)
ccagacagggcccggccacgcgccctcctcgctcggctgcgctccgtgacgggaacccaggctcccacgcacggggaatgcctagaacggagctagaatggaggcccctttgtgtgacta

SEQ ID NO: 823907 - DNA, 120 bp, Artificial Sequence
  ENSG00000232021_27 (sequence is synthesized)
ctctcggaactggggcagcggcccgctcacctcgtgtccgttgctggccgggatgatttcagactcgttcaccaaggaagacttgatgtcagctaaatcgccttcctcttcgggatgact

SEQ ID NO: 823908 - DNA, 120 bp, Artificial Sequence
  ENSG00000232021_28 (sequence is synthesized)
gatctcggcgaagatcttttccttctgaggatcgccctcgtccttgaaggggatcatctcgtccgtggcgcagagttccgggtcccccccgccgccgccacctcctccggagagttgggg

SEQ ID NO: 823909 - DNA, 120 bp, Artificial Sequence
  ENSG00000232021_29 (sequence is synthesized)
aattgctaggggctggctggattgctgttggtttttcccctcctggtggctttgcttggtttgggtttagtttgggaacaaacttgttttatatcaacacttccttctacatcgggcgcc

SEQ ID NO: 823910 - DNA, 120 bp, Artificial Sequence
  ENSG00000232021_30 (sequence is synthesized)
cagggagaaagatcaaagagtttggggagctggatctgaaatgtgaattgaaaataaaaatcaagcctggacacattccagtttctaaagcaaaaccaaccctcagcagaggccggctct

SEQ ID NO: 823911 - DNA, 120 bp, Artificial Sequence
  ENSG00000232021_31 (sequence is synthesized)
ctatatagctctctttctttctctctctgctccctttgactcttttctgtgaccattcttgagcacatggtataaaataaagagaacatagggaaacagtttctctatatttcgttttgg

SEQ ID NO: 823912 - DNA, 120 bp, Artificial Sequence
  ENSG00000232021_32 (sequence is synthesized)
agtgctccaggaaagtacctgattgacaagatctacatccaatgcccagaaaacacatcctacacaggcacagtgaagcgtggagttgaagaattttccagaaaaccagtttggctatta

SEQ ID NO: 823913 - DNA, 120 bp, Artificial Sequence
  ENSG00000232021_33 (sequence is synthesized)
tatcttgttcataattaccggtatgtgaagccgaatttccttagccgtaaatactgtcttatttcagcatgcttcgcactttcttctgcggccacatttgggaagagaacgttgacacaa

SEQ ID NO: 823914 - DNA, 120 bp, Artificial Sequence
  ENSG00000232021_34 (sequence is synthesized)
cacgtgtggatatgttcgttgtgtatagtggtcctttttttctacacatgatatggtgcaccgtatagttttctttcacagaagttagattctggaaaaccaatgttagtatttttatca

SEQ ID NO: 823915 - DNA, 120 bp, Artificial Sequence
  ENSG00000232021_35 (sequence is synthesized)
aagtacttactgtcacagttgatctctgtgatttgaaaccctctcgtcgatagactgcagagatcttttcctagaggccactcaccagtcagaaacctttgtgtttttatggttaaaaaa

SEQ ID NO: 823916 - DNA, 120 bp, Artificial Sequence
  ENSG00000232021_36 (sequence is synthesized)
ctgtaggtcccttcacttctgttgttaatggaagtaactaaaagaaagagacagctttgaaatactgtgatacgaagagtcagaaatcctgggttggagatgggccctgccactccctct

SEQ ID NO: 823917 - DNA, 120 bp, Artificial Sequence
  ENSG00000232021_37 (sequence is synthesized)
catgccattggtaaccttaggcaagccattttaacctctcccagagtctgtttcctctctgaaaaaatggatataataataccgtactattaagtgagataatgcatatgaaagtatgta

SEQ ID NO: 823918 - DNA, 120 bp, Artificial Sequence
  ENSG00000232021_38 (sequence is synthesized)
caaatgtgaggtattattagtccatgaagcaaagacgatccttttaaggggacctgttaagttgcaaaaccaaaaacttctgaagctctagaaacccttaccacaggagcaaatggggac

SEQ ID NO: 823919 - DNA, 120 bp, Artificial Sequence
  ENSG00000232021_39 (sequence is synthesized)
agtgttacgctctcgcgtccatgctatgaccatctccacgcctccatcagttgtgttacaaaggccaccaaaatcactgaagcagttgttacccccaagtgagtgtgatgagagaacatt

SEQ ID NO: 823920 - DNA, 120 bp, Artificial Sequence
  ENSG00000232021_40 (sequence is synthesized)
ttcagaacagggtgaatgtgccttaactcgtgtttatgttgggctcttaatgaattcataaatgaatgaagaaaataacactgaaaacaatatcttcttgtgagacatttaacacacatt

SEQ ID NO: 823921 - DNA, 120 bp, Artificial Sequence
  ENSG00000232021_41 (sequence is synthesized)
acagcagctctgaaaacagtcttagtataatggcttgagaaagcagtaatgtttatgtggataaaatacccccaacaacagttgtaaggactcacaggtggggagagtgactagaaaggt

SEQ ID NO: 823922 - DNA, 120 bp, Artificial Sequence
  ENSG00000232021_42 (sequence is synthesized)
atataagagttgtttcttgggactgtgtgagtgccacaaaaatctatgttttagaatagactgtgattatgtatcccagacagaggtatctcaagtttacaatgcagtaaagattattgc

SEQ ID NO: 823923 - DNA, 120 bp, Artificial Sequence
  ENSG00000232021_43 (sequence is synthesized)
tagggctggctgggaagtgacaggagtaccacaggtgtagtgcatagggcatttagctgaatgtacctcagtgtgatcctttctaacctaaggtaaccccaccaagggagccatttcctg

SEQ ID NO: 823924 - DNA, 120 bp, Artificial Sequence
  ENSG00000232021_44 (sequence is synthesized)
ggctcattgggagccattttccaatataagcttttcagtgtgacctgtatacaaagttatgaaagcagcagggctgggagatgggtggggttccagggttcctaggtccctttggcatgg

SEQ ID NO: 823925 - DNA, 120 bp, Artificial Sequence
  ENSG00000232021_45 (sequence is synthesized)
cccaaggctgcccagggtgcagactcctcctgagatgctccatctccttcagctgcctcctgccagaagcaaccctcagcctttgccaattgtatggaagggactctatagcaattttaa

SEQ ID NO: 823926 - DNA, 70 bp, Artificial Sequence
  ENSG00000232021_46 (sequence is synthesized)
ctttgccaattgtatggaagggactctatagcaattttaattggcacttagaaagcacttgtcgcccagg

SEQ ID NO: 823927 - DNA, 61 bp, Artificial Sequence
  ENSG00000232021_47 (sequence is synthesized)
agtagctgggattatgtattggccaggctggtctcaaatttcaaacctcaggtgatccgcc

SEQ ID NO: 823928 - DNA, 63 bp, Artificial Sequence
  ENSG00000232021_48 (sequence is synthesized)
caccttctattttcaatgtaccttttcccaaatgtcctaaattaaaagtggatgctgatcaag

SEQ ID NO: 823929 - DNA, 120 bp, Artificial Sequence
  ENSG00000232021_49 (sequence is synthesized)
tttcccaaatgtcctaaattaaaagtggatgctgatcaagttcactggtcaacttcaattcttcctttctcttttctttacagatgcagcctttttgaaatttattcttggccaaaagag

SEQ ID NO: 823930 - DNA, 120 bp, Artificial Sequence
  ENSG00000215424_0 (sequence is synthesized)
gcttgcgtcccgggagcccggcctcgtgcgccgcgctttgagcagcagactgctcgacaaacactgcgccaagagctcctcagcagaagctcctcgcatcagatcctctgtgctgggaat

SEQ ID NO: 823931 - DNA, 120 bp, Artificial Sequence
  ENSG00000215424_1 (sequence is synthesized)
cctcccctcttgagcacactctgtgctcctcttccagttacggtgcatgtgaagcaatggtatgggaaaattgtttgcagaaggatgaaaaggctttattgccaaactaaactggaccag

SEQ ID NO: 823932 - DNA, 120 bp, Artificial Sequence
  ENSG00000215424_2 (sequence is synthesized)
gttgatacacaaggcgataagatcatcccatgggatctccatgaccgaggggcctgccccatggactggggagggactcttgctcttccacctacagtaggttctgtggagcaggttctc

SEQ ID NO: 823933 - DNA, 120 bp, Artificial Sequence
  ENSG00000215424_3 (sequence is synthesized)
cacctgggactggaggacaggctgtgtctggcgtgagctggggatctgggaggcgtactggacaaccatggagcacacggggagccagggggctggggagaaagtgcctcattagttaca

SEQ ID NO: 823934 - DNA, 120 bp, Artificial Sequence
  ENSG00000215424_4 (sequence is synthesized)
gtcccgggagcccggcctcgtgcgccgcgctttgagcctctaggccatgaaactgcctcaccaagcactatgcaattgagtgcccaccagaagacacccctccagtcaacccacagaccc

SEQ ID NO: 823935 - DNA, 120 bp, Artificial Sequence
  ENSG00000215424_5 (sequence is synthesized)
cagaaagagtacccagaggagcctgagcacactccaccctatctgttctctgaaattcaatcaaatgagtcactctacttctctggaagcagaaagaggctggaagtttttctccagcag

SEQ ID NO: 823936 - DNA, 120 bp, Artificial Sequence
  ENSG00000215424_6 (sequence is synthesized)
cctcgcatgacatataacatccaacaaggggctgaaccaagaaaaaatactgcagctgctgctaatggcaacactgagcaagcacctggcctgtgccaggcactgtcctgtgcagtctgt

SEQ ID NO: 823937 - DNA, 120 bp, Artificial Sequence
  ENSG00000215424_7 (sequence is synthesized)
gtttgcactcattttatcctcaagagccagatgagcatctccaccagacagcacctgcagaggcttgggcagtttattttaccgtctctgagtaaaatagggataataagtaacagtacc

SEQ ID NO: 823938 - DNA, 120 bp, Artificial Sequence
  ENSG00000215424_8 (sequence is synthesized)
catacacaggtggcagagacgctagggaacttgcccaaggtcacagagcttccaagtggaggagcagggacacatatgctcacaatgatggcactaaggcacatgttgcctggatggaga

SEQ ID NO: 823939 - DNA, 120 bp, Artificial Sequence
  ENSG00000215424_9 (sequence is synthesized)
ccagcccacagatgagagttccaggacagagggaacatggatggatcaagtgaagtgacagaacatttggaaaactctaccgagatatatacggccccccagtaaaattaaagagataaa

SEQ ID NO: 823940 - DNA, 120 bp, Artificial Sequence
  ENSG00000215424_10 (sequence is synthesized)
gagaactacattaagtgagacaataaggcaactctatttcttgcaggaaaaaaataattgtggttatagaacactactggttctgaggtgaatagcagtcacagagccatcaaaatatga

SEQ ID NO: 823941 - DNA, 120 bp, Artificial Sequence
  ENSG00000215424_11 (sequence is synthesized)
ccccactcactgaagtaatacaaagtgctagtgtagctatcccgggaagacgtggaaggccgagcaaggaccatggcacaagaggccacgctgtacctagtatggtatgcagtggccaag

SEQ ID NO: 823942 - DNA, 120 bp, Artificial Sequence
  ENSG00000215424_12 (sequence is synthesized)
ctagtgttcatgcccacgtgtgatctcctgccccgtgagctgggcctagccactcacttctgacagacagaagccaacaaaagcaacaggatgtcacttctaagtttaggttataaacac

SEQ ID NO: 823943 - DNA, 120 bp, Artificial Sequence
  ENSG00000215424_13 (sequence is synthesized)
actcagacttccatctaggctcacctcttgctcactctgatgaaagccagctgccatgctgtcagctggggagaggcccatgtggcaggaactgaggaagtctttggccacagcctgcaa

SEQ ID NO: 823944 - DNA, 120 bp, Artificial Sequence
  ENSG00000215424_14 (sequence is synthesized)
ggaagtgaatcctgacacaagctcactagagtgagctgggaagtagatacccttcagtcaagctttcagatgaggccacaatcctagccaacattttcatttccacccatgagaaacctt

SEQ ID NO: 823945 - DNA, 120 bp, Artificial Sequence
  ENSG00000215424_15 (sequence is synthesized)
gagccagaagacccaagctaagctacacctggattcctgacccacagataccatgataacagacattattttaagctgctatgttaggagtaattagttatttaggaataaggtaactaa

SEQ ID NO: 823946 - DNA, 120 bp, Artificial Sequence
  ENSG00000215424_16 (sequence is synthesized)
tacatttatattaatgggaagtcagcagagaacatttaaatggataaactgagaaatggctgtgtaagtgtgtgatctggaaacaggagaaaaatgcagccctgaagaaaggagttaaga

SEQ ID NO: 823947 - DNA, 120 bp, Artificial Sequence
  ENSG00000215424_17 (sequence is synthesized)
gaggaaggaggagctactatgtctcattttaaatcacgtgggtggcattatttgacttctttttaagtacacggaagtgttactttcttaaatgaaaatgaaggtaacagcagcagtaaa

SEQ ID NO: 823948 - DNA, 120 bp, Artificial Sequence
  ENSG00000215424_18 (sequence is synthesized)
ctaatttccagtagatgaaatgtgactttgtaatcccaggaaaagggaagaatttgcaccaagaagttactgttacctcagaatggcaagagcatggatggctcttatcatcatctttat

SEQ ID NO: 823949 - DNA, 120 bp, Artificial Sequence
  ENSG00000215424_19 (sequence is synthesized)
acttcttttacatttcctcattttttaaaagttttgtgtacatattacatttaggaaatccaatatatagtattaaaacagaaaaagtaaagaagcaggctgggcttggtgcccactact

SEQ ID NO: 823950 - DNA, 120 bp, Artificial Sequence
  ENSG00000215424_20 (sequence is synthesized)
caatttgactggcttaaaaaaattttttaaacgacatgtacggacagacataatacttgcttctgagcctcccagtctttcaaaaccacattagggaataagcagtatttgcatggttcc

SEQ ID NO: 823951 - DNA, 120 bp, Artificial Sequence
  ENSG00000215424_21 (sequence is synthesized)
agtgatatctgggagtaagtgaaagtaatgaaaacacagaagtaaacacaaagtaattatagttcacctttatacacacgttaacagaaatcatctgatcccctttgctgctaagtgagt

SEQ ID NO: 823952 - DNA, 120 bp, Artificial Sequence
  ENSG00000215424_22 (sequence is synthesized)
tgaaaagcgaaagcgtctgaatcccaccagcatcgctggatgtgtcatccactgagccttcatctcccatgaacttgacttttaaccaatttgctagaattctacagatttaaaaaaaac

SEQ ID NO: 823953 - DNA, 120 bp, Artificial Sequence
  ENSG00000215424_23 (sequence is synthesized)
gccggcgtccctgggaagctgagcgccgcgtagcttcgccggggggagtggggtaggcgcggtgaggccgtgggcccccacacctggcggaccacaggggccagaagccctggagccccg

SEQ ID NO: 823954 - DNA, 120 bp, Artificial Sequence
  ENSG00000215424_24 (sequence is synthesized)
ccagggaagggctgcgtcgctggccaggaccgagcgcggtagagcctcagctgctcacggggtcgctggagttgggggtggccccaggagaaattaaaggtgaaaagccttagcagcaga

SEQ ID NO: 823955 - DNA, 120 bp, Artificial Sequence
  ENSG00000215424_25 (sequence is synthesized)
gggaagaggaagatggaggcagagcgagtgaccgaacttggaagggacagccgggcgcaacagggcagggggcgtctgactgttggaaacatggctgacgtctggaggctgcagccagtg

SEQ ID NO: 823956 - DNA, 120 bp, Artificial Sequence
  ENSG00000215424_26 (sequence is synthesized)
gtccgtaagtcaggtcaaggacccacagaagaccccagcatgtcttcacctggcccacagaagccctgacatccagttacaactgccccagcctagtgagcatttcggcacccactcctc

SEQ ID NO: 823957 - DNA, 120 bp, Artificial Sequence
  ENSG00000215424_27 (sequence is synthesized)
aattcctacccccagcctaacttcgaaggggcggtgagccacagcaagccggaggagaaagttggaagagagagtggacaaaagaatacccacaggcaccttccccacagtggaatagcg

SEQ ID NO: 823958 - DNA, 120 bp, Artificial Sequence
  ENSG00000215424_28 (sequence is synthesized)
gggttttagacaatcaaggataatcacctcttcctatcccagttcagaaacggatgaaaaagacacagcaataagatgggtgggtatcaaaatatcagctttgccacaaattaaaaacct

SEQ ID NO: 823959 - DNA, 120 bp, Artificial Sequence
  ENSG00000215424_29 (sequence is synthesized)
gaagaaggtgacaagaatctctgacctcaccctgctggcctgttcccctcacctggccacacaaccaagctggtacctccacgctttcatcatgtcctctcaagtacactgtctccagct

SEQ ID NO: 823960 - DNA, 120 bp, Artificial Sequence
  ENSG00000215424_30 (sequence is synthesized)
acacccctgcactcctctccgggaattctgtttctcctctacccaaccagaccctgttccatcctctgttttttccttgctaccaattcaggcccacgcctcatgcacattctctgagaa

SEQ ID NO: 823961 - DNA, 120 bp, Artificial Sequence
  ENSG00000215424_31 (sequence is synthesized)
ttatgtacataagtacctgactctcctggatgtaagctgggtgggcttagcaggcagaggccctgtgtcttactttatctctgcatcactgatgtctggcacatcaaggactgcaagttt

SEQ ID NO: 823962 - DNA, 120 bp, Artificial Sequence
  ENSG00000215424_32 (sequence is synthesized)
gctgagagaatgaatcgccttttatacatggaaatgtaagctctaaactgcctcagagcatatgctggtgggtgacaatctgaggaggtcatgaatataggagaatattgaagaggtcac

SEQ ID NO: 823963 - DNA, 120 bp, Artificial Sequence
  ENSG00000215424_33 (sequence is synthesized)
acaggggaaacaacttttcattatgaaaaactgggagactgacatttaaatggtttatctgcatgattaaattaatcacatttccaacagtgcatcaagcatctgagaataacattattt

SEQ ID NO: 823964 - DNA, 120 bp, Artificial Sequence
  ENSG00000215424_34 (sequence is synthesized)
tgagtaaaaacagaaactcttcgggagagaccccctccccacaggtcaggctgctcaaatgtccaccatgtctagcagcgcagagagatggagctcagaggcaacttcctcttcccttga

SEQ ID NO: 823965 - DNA, 120 bp, Artificial Sequence
  ENSG00000215424_35 (sequence is synthesized)
actccggatcagcctttccaggtgctttagtcgttcgcctagacacgttcctgtcgcctctgacagctgcagttgctccctcatcatgtcactctatttgaataaaaaagaaactgaaca

SEQ ID NO: 823966 - DNA, 120 bp, Artificial Sequence
  ENSG00000215424_36 (sequence is synthesized)
ccgggagcccggcctcgtgcgccgcgctttgaggacttcctaaagccagtccaggagcacagtttttacctgttcagtggcacatatctgtgattgaaactctgtttttgcatctttaac

SEQ ID NO: 823967 - DNA, 120 bp, Artificial Sequence
  ENSG00000215424_37 (sequence is synthesized)
atatttctacagcatcatgtaaagcatgtagatacatttgcacatgtgcattaacatgtaagaacatgtgcctcagacacatgtgccctcctggaacagctcatgctggccccatgcctg

SEQ ID NO: 823968 - DNA, 120 bp, Artificial Sequence
  ENSG00000215424_38 (sequence is synthesized)
cttccaagcttccatcaagtcagggagtggagcaaagagggaaggcagcccctgcactgtagggacccttatgcacagaggcattgagactgcctgttcctcttggaagcttctgctctc

SEQ ID NO: 823969 - DNA, 120 bp, Artificial Sequence
  ENSG00000215424_39 (sequence is synthesized)
aagaggcagctaggtttttggagcttctctgcttcatgtcttgcttcccaccctagggttccagattctgttcttccctagtattggcaaggttttttatagatagctcttggatacatt

SEQ ID NO: 823970 - DNA, 120 bp, Artificial Sequence
  ENSG00000215424_40 (sequence is synthesized)
tggaagtaatgtttacaaatggtgagagagaaggcatctgacatttttttctaaacacatgccaatgtttgtcttttccccactaatttcaataatttggcctaacacttttgtcacata

SEQ ID NO: 823971 - DNA, 120 bp, Artificial Sequence
  ENSG00000215424_41 (sequence is synthesized)
ttctgactctttattctgatccatttatctactctggcatccccacatggttttaagtactggagctttactgtatgtcttggtatcaggccaagcaaaccatgttagtcttatttaaaa

SEQ ID NO: 823972 - DNA, 120 bp, Artificial Sequence
  ENSG00000215424_42 (sequence is synthesized)
ctttctcagcaattgatgcatatttgtttatcctgatgaattttagaacttaccagtactgacatcttcacagcattgtatcctgtcaacaacctagtctgaacctcaatggttcaggtt

SEQ ID NO: 823973 - DNA, 120 bp, Artificial Sequence
  ENSG00000215424_43 (sequence is synthesized)
agaactcatatgttaatgagaaagacattccgggaaaccaggaggtgaggagaccaaggattaggctccactcctattatgaagatgaacagtttttagagtatcatggagttggagaag

SEQ ID NO: 823974 - DNA, 120 bp, Artificial Sequence
  ENSG00000215424_44 (sequence is synthesized)
gtacttcaaggatctctatggggaacaagaaggaacagcaaagttccaccatcctgtgccctttctgttcaggtttattgttgtgaatgagaatttttttttttttaacatgttgtggat

SEQ ID NO: 823975 - DNA, 120 bp, Artificial Sequence
  ENSG00000215424_45 (sequence is synthesized)
ctatctatctgatcaccttattgaactgagaatggttctatggacttgacttttcttggactgacaactgtactgtctggaaatgacagtttctccttcctttcagtatttgtgcctgtc

SEQ ID NO: 823976 - DNA, 120 bp, Artificial Sequence
  ENSG00000215424_46 (sequence is synthesized)
tatcccacatccctgtactggtcaggatttccaggacaatagtgaataatagtcgggacaacaggctggttctgattccactgttcctaacattctaccaagaagcatgttttttttcta

SEQ ID NO: 823977 - DNA, 120 bp, Artificial Sequence
  ENSG00000215424_47 (sequence is synthesized)
ttttggtagttttatgttaggtagccttatcaagttaggactttttttttttttaacccaagctaaagaaagtacccaaaataaagaaattttatcaggaacaggtataaattttaagaa

SEQ ID NO: 823978 - DNA, 120 bp, Artificial Sequence
  ENSG00000215424_48 (sequence is synthesized)
acgtatttcaacgcctgctaaaattaccacttatttttctattatggcaacaaattacattaatagattttcactgttattgtttatcctgggagaaagcatacttgtgaacttttttag

SEQ ID NO: 823979 - DNA, 120 bp, Artificial Sequence
  ENSG00000215424_49 (sequence is synthesized)
gtactgtgctttggaaccaaatttggaagtgagatgaaatgtcagctgtactctcctggttaggtatgatttcagggtcaggtatgcctgataaatgaagtgagatgctttaactttgtt

SEQ ID NO: 823980 - DNA, 120 bp, Artificial Sequence
  ENSG00000215424_50 (sequence is synthesized)
ctagaatagtttctactgcatgggaatgatctgttccttgaggatttgtcacagtctgcccacagtggactggatttggcatgtaggatgttaatttctatttactttgcaagaaaaata

SEQ ID NO: 823981 - DNA, 120 bp, Artificial Sequence
  ENSG00000215424_51 (sequence is synthesized)
cagtttagcaagcaacagaaacatactgaacatgaacctcaccgtccctctctcagctgtagctccttctgcgtctgcaacctggcttgttcccacgacaaaggaacatcatattttttc

SEQ ID NO: 823982 - DNA, 120 bp, Artificial Sequence
  ENSG00000215424_52 (sequence is synthesized)
aaatcgtttttaaaaaaatacacacatatctgaccatcttcactcagcgcctctgagaaaacaatacaaaaacagataaagaggccagcctggccaaccctgtctcaaaaaaaaaaaaaa

SEQ ID NO: 823983 - DNA, 120 bp, Artificial Sequence
  ENSG00000215424_53 (sequence is synthesized)
ggcacagacatcctcacagcaacgggccacacggaccctctggtctgtctctactgcattcctagaaacagggcaatcagcatggaagacactgcacttggggcccacagacactgaggg

SEQ ID NO: 823984 - DNA, 64 bp, Artificial Sequence
  ENSG00000215424_54 (sequence is synthesized)
catggaagacactgcacttggggcccacagacactgagggcttgcttgaaaagtgcaagagtct

SEQ ID NO: 823985 - DNA, 120 bp, Artificial Sequence
  ENSG00000215424_55 (sequence is synthesized)
ggtgagcctctctgagaaatttgtgaggagggtccagccgcgggtcggaaggaaggacgtggggagcgaggctcgagcgagcgacagcgagtgcgaagcagcagactgctcgacaaacac

SEQ ID NO: 823986 - DNA, 120 bp, Artificial Sequence
  ENSG00000215424_56 (sequence is synthesized)
aacattttctcaggagaaggcaactgtgaagttgagaagtctgctttctaaacacagcagaaccacagttgttgagggggaagagcagcttgctcccagggtctaggtgagggatgcaga

SEQ ID NO: 823987 - DNA, 120 bp, Artificial Sequence
  ENSG00000215424_57 (sequence is synthesized)
cagtcccccttaacagtgttgctagccaagttctacccagaagttctgactgtacaggcctgtggttgtgcctaggaaatctgtattttaacaagcacccagatgagtctggtataagca

SEQ ID NO: 823988 - DNA, 120 bp, Artificial Sequence
  ENSG00000215424_58 (sequence is synthesized)
gtcttagcttattttggggaaccccaacctaaccagagcaccgagggcttgtgctgagtggtttgcttccctttgggttccttcaataatgagcatgagttagacctactacagaccaca

SEQ ID NO: 823989 - DNA, 120 bp, Artificial Sequence
  ENSG00000215424_59 (sequence is synthesized)
caccacaatttagaagggcgcctgaggcccaaaggggagtgtctgtgctaatgccacaacttctgccagataagcagctcattcccttctgagtgcataggaaggagcagccccatgcca

SEQ ID NO: 823990 - DNA, 120 bp, Artificial Sequence
  ENSG00000215424_60 (sequence is synthesized)
tactgggcttgagccagccagatggcctgtcggatctgtgtcaaaacagcccaaagacctcagccaggaacaggggcacagccagagccatagaagaaggcctctttgacaaagaaagaa

SEQ ID NO: 823991 - DNA, 120 bp, Artificial Sequence
  ENSG00000215424_61 (sequence is synthesized)
tgttaaatcagcactgagtgccatggctgcggcttggggacagggctacatggtccccatgctctttgccccttgtctgttctgaaaacagggaccctgtgggcaggcaggacaggatca

SEQ ID NO: 823992 - DNA, 120 bp, Artificial Sequence
  ENSG00000215424_62 (sequence is synthesized)
gggttggtgttcctcccagtaccacttgtcacttttctcctgaagctgagtgaactcccatggactgccttgctggtcaggaaaggctaacagcccccactccacaaaacccagcttgtt

SEQ ID NO: 823993 - DNA, 120 bp, Artificial Sequence
  ENSG00000215424_63 (sequence is synthesized)
gagacacacggaggtggacgtgcagccctcacactggtgcccaacacctgccagacggttactacagtgagaaggaagcctgagacttggctgcagccacccaccagacctccccaggtc

SEQ ID NO: 823994 - DNA, 120 bp, Artificial Sequence
  ENSG00000215424_64 (sequence is synthesized)
aagcacgtaccccccaggggtggaaggtccatctgcggaagctggaacccgagcacagcctgcttcagccaggccaggtgctctggggcattccagtgcaggtgaggaagcagccggctg

SEQ ID NO: 823995 - DNA, 120 bp, Artificial Sequence
  ENSG00000215424_65 (sequence is synthesized)
ccccctgcctcagcaaactcagtgacaggccaggacaggtcacacagctgttcagaggacaccacagaagccaggaactgcagcacactgttaaacagctcaatgatggcgccaggctcc

SEQ ID NO: 823996 - DNA, 120 bp, Artificial Sequence
  ENSG00000215424_66 (sequence is synthesized)
tgagaagcaagaccgcccagacgcctctctcttctgtcatggaaaaagcggccactaaactcatggccaatcccgtcttcgacgtactgaatgagagtctggcagcagaggtcaagggaa

SEQ ID NO: 823997 - DNA, 120 bp, Artificial Sequence
  ENSG00000215424_67 (sequence is synthesized)
tgggggcagtgggaaaccagccactgcactgcttgcaaaacctgagaagaaagaagagacttggttgaacaattcacactgtttttcaaaaacagctttctgaaagggcttgatccccca

SEQ ID NO: 823998 - DNA, 120 bp, Artificial Sequence
  ENSG00000215424_68 (sequence is synthesized)
aggttgcccacagcaggtaataccagagtactgggctctcaactgtggtaggaaggggaacagaagtgtcctatgcagttgagtttagccttctagggctctggagacatgtccagtagg

SEQ ID NO: 823999 - DNA, 120 bp, Artificial Sequence
  ENSG00000215424_69 (sequence is synthesized)
ggcactaaagagagcccccagatcccacctggcctgaggaggagtgtgacctgcatggttgccccatggaaaggcccaggccctcaggaaaccagccctgaacatccccttcaccatgca

SEQ ID NO: 824000 - DNA, 120 bp, Artificial Sequence
  ENSG00000215424_70 (sequence is synthesized)
cagaaatggagtcttctcctttttggaaggactaacagcttcactatgtgccaaggtgccttcacaccctatggttatcttacttcctatagttattttaattcctggcacctctttctc

SEQ ID NO: 824001 - DNA, 120 bp, Artificial Sequence
  ENSG00000215424_71 (sequence is synthesized)
tacttcctatagttattttaattcctggcacctctttctctaaattgttagcaaagactccccctgccctattttttttgtttttgagaagggggtcttgctatgttggccaggctggtc

SEQ ID NO: 824002 - DNA, 120 bp, Artificial Sequence
  ENSG00000215424_72 (sequence is synthesized)
cgagtagcagagactacaggtgcgaggagccaccacgcccagcttcagacttcctttttaaaggaaacatcaaataacattatttcttcatatattcagaggacaattaccctagaaaaa

SEQ ID NO: 824003 - DNA, 120 bp, Artificial Sequence
  ENSG00000215424_73 (sequence is synthesized)
taacttctgtatctgaccttcagatataagacatgttcatattttaaattcatagaaacaaaaacactaaaaaattttacatgaacaatttaatttgcagatagcaggactgtgggcaaa

SEQ ID NO: 824004 - DNA, 120 bp, Artificial Sequence
  ENSG00000215424_74 (sequence is synthesized)
ttttatcttttattttgatttctgcttatgtttttagaaagttatctgtataaaacatacaactgctgccaggcgcagtggcacaccacagtagtcccatatacttgggagactgaagtg

SEQ ID NO: 824005 - DNA, 120 bp, Artificial Sequence
  ENSG00000215424_75 (sequence is synthesized)
ggaagattgcatgagccctgtagtttgaggttgcagggagctatcatcatgccactatactgggtgacaataaaaccctgtctcttaagaaaaagacaatgcaaacgctaatatacactc

SEQ ID NO: 824006 - DNA, 120 bp, Artificial Sequence
  ENSG00000215424_76 (sequence is synthesized)
ctctctgagaaatttgtgaggagggtccagccgcgggtcggaaggaaggacgtggggagcgaggctcgagcgagcgacagcgagtgcgaagcagactgctcgacaaacactgcgccaaga

SEQ ID NO: 824007 - DNA, 120 bp, Artificial Sequence
  ENSG00000215424_77 (sequence is synthesized)
agactttcaggaaaagaagaaagaaaaatatcacacagacctaggtccacaaataccacatcttactatgaagctgatctgcacaaaacaggctgttgttttaaaatggagcaacgatct

SEQ ID NO: 824008 - DNA, 120 bp, Artificial Sequence
  ENSG00000259478_0 (sequence is synthesized)
gaatgcctactggggtgataacagttttaaaaagtattatgttttacttcttcatgtatatttgcatgttttcctaacagaccctcaacgttgctagatgattggctatatggatgattt

SEQ ID NO: 824009 - DNA, 120 bp, Artificial Sequence
  ENSG00000259478_1 (sequence is synthesized)
gactgggaggtagtggccctaatggagtaataagaaacgctgtgcatagatggttgagaaacagccctgggtgctgacacatcccaaacattaaataggccttatgaaatgtattttggt

SEQ ID NO: 824010 - DNA, 120 bp, Artificial Sequence
  ENSG00000259478_2 (sequence is synthesized)
gttcttgagatacgaggatgaattttcaagaggacaatttagtctcattttaacttggaagatagaagagatggtcaagagtcttatccgttgtttatataaaaagactgtagaaaatgc

SEQ ID NO: 824011 - DNA, 120 bp, Artificial Sequence
  ENSG00000259478_3 (sequence is synthesized)
gtcaaagcattcgtgagattaggcacctctacatgcttcttgaggttagacacctctacatgtttggtgtggtatctagcacagagtaagctctaaatacaacaaatagaatgaataaat

SEQ ID NO: 824012 - DNA, 120 bp, Artificial Sequence
  ENSG00000259478_4 (sequence is synthesized)
aaatgaatgaatgaacgttgtattcattgatggtgactgacacatgttcctttctcctccctgtctgtctagttcttctcacctgaagaacgttgggaagaccttaattggaatcacaag

SEQ ID NO: 824013 - DNA, 120 bp, Artificial Sequence
  ENSG00000259478_5 (sequence is synthesized)
aattgggtgtaaactttggctccacattcactatctgtgggacattcattatctgtgggcttcatctgtaaatgggtgggctgtctttgggtaggtcacccagttgaaacaatggactcc

SEQ ID NO: 824014 - DNA, 120 bp, Artificial Sequence
  ENSG00000259478_6 (sequence is synthesized)
aagggttttattacctcctaagtgttgaataggattattgtgtgtctccttgacttaattagtccaattttctacctcaggtagcacaaccatcacttctcaatttcgtattctatttct

SEQ ID NO: 824015 - DNA, 120 bp, Artificial Sequence
  ENSG00000259478_7 (sequence is synthesized)
tttaggaagagtcaatgctcaagatctgtgagaaactgaagcatgtttgcctgtttttctcaatatatgcacgttctgtatatctcagttctaaagaactaaagcatatcacctgctgtc

SEQ ID NO: 824016 - DNA, 120 bp, Artificial Sequence
  ENSG00000259478_8 (sequence is synthesized)
aatacagaaaaacagctttccccagcgttttctcccctaccttctctcctgaacagtactgacgtggctgcttggtagaagtttaccactagggtcctatggagtagacatacaggacct

SEQ ID NO: 824017 - DNA, 74 bp, Artificial Sequence
  ENSG00000259478_9 (sequence is synthesized)
gtttaccactagggtcctatggagtagacatacaggaccttccgaactgctgtgggggaagaagagaagatggt

SEQ ID NO: 824018 - DNA, 72 bp, Artificial Sequence
  ENSG00000259478_10 (sequence is synthesized)
atccacctgcctcagtcttgatcatttttgaaaagcagaaatccaggaacagacccgagggagttacaaggt

SEQ ID NO: 824019 - DNA, 120 bp, Artificial Sequence
  ENSG00000259478_11 (sequence is synthesized)
aagcagaaatccaggaacagacccgagggagttacaaggtgtagaatgttgaaggtatttctcaaaatgctattcctcttctcaataccagttcagcattctcctccagagatctggtgt

SEQ ID NO: 824020 - DNA, 120 bp, Artificial Sequence
  ENSG00000259478_12 (sequence is synthesized)
ctcacactgccttttgtgctgtaaaagccaagccaaatgagaggcatttaaattatttctgttgcctaggaaagagaaatattatccacagtaacaaaatcatcaaattttattatgcac

SEQ ID NO: 824021 - DNA, 120 bp, Artificial Sequence
  ENSG00000259478_13 (sequence is synthesized)
aagttagtgctatatatttaggagttttgctttagaggatataatttagaaaaatgggacagcttttcattggcttggaagtttctattgtcaaaacatattaccaggaaagtacaatac

SEQ ID NO: 824022 - DNA, 120 bp, Artificial Sequence
  ENSG00000259478_14 (sequence is synthesized)
attgtaaaattataaggaactgcaattcagtcctattttgactttatttataaaaaaaacaaattaatagcaaatgaataaaacttttaaaccattatccgggtaataatactaaacaaa

SEQ ID NO: 824023 - DNA, 120 bp, Artificial Sequence
  ENSG00000259478_15 (sequence is synthesized)
acaactaataaaacagccgcattcaaacagctgtttaaggaagcccaatgatatttcatccattgtcaaacttggcatttgagcagaataaagaccaaagtaaatatttattgattcatg

SEQ ID NO: 824024 - DNA, 120 bp, Artificial Sequence
  ENSG00000259473_0 (sequence is synthesized)
gcctgtttaagagaagagcagccgcgaggccctgggctggtctcgggggtgagctctgctgtggatacccgccatggcttgtcttccccgcccacagataaatgcaacctttctcttcta

SEQ ID NO: 824025 - DNA, 120 bp, Artificial Sequence
  ENSG00000259471_0 (sequence is synthesized)
gtaagaagtgcgtttcaccctctgccatgattatgaaacctccccagccatgtggaactgtggggtctccctatgttgcccaggctgaactccaactcctgggctcaagcaatgctccca

SEQ ID NO: 824026 - DNA, 120 bp, Artificial Sequence
  ENSG00000259471_1 (sequence is synthesized)
caactcctgggctcaagcaatgctcccatctcagtctcccaaagtgctgagattacagtctcgctctgttgcccagtctggagtacaggtatgatcttggcttactgcaagctccgcctc

SEQ ID NO: 824027 - DNA, 120 bp, Artificial Sequence
  ENSG00000259471_2 (sequence is synthesized)
tctcccaagcagctgggattataggcccgagaaggcaagggagggagcaggaaccagaaccagaggaggttttgcaggacttgcctatatccaggcgtcagagtgagcccagggaaggtt

SEQ ID NO: 824028 - DNA, 120 bp, Artificial Sequence
  ENSG00000259471_3 (sequence is synthesized)
tgatggatttaccatgcctgccttgcccacaatggagtcccaaaaggtggccatcatcaaatgactgcacccatagtcttctgtgcttcaccctcttctgtgggcttccctggcctagca

SEQ ID NO: 824029 - DNA, 120 bp, Artificial Sequence
  ENSG00000259471_4 (sequence is synthesized)
tgctccctacaccgctggactcttctccatctaagtcatgtcatggaaacccctccagagctgcagacagacagatctggctctgagtctctctactatcccttcttagatgtggggcag

SEQ ID NO: 824030 - DNA, 120 bp, Artificial Sequence
  ENSG00000259471_5 (sequence is synthesized)
gaaactagcctctgagattctttttttttttttttaacctgtaaaggaggctcttacactaattacctgaacaaatttattgtgagtttcacatgagataatgactaatattttcaaagc

SEQ ID NO: 824031 - DNA, 120 bp, Artificial Sequence
  ENSG00000259476_0 (sequence is synthesized)
gacacgtacagcttagagcctagtcatgaaatgggaaataaacagccccatcctcaaggtctgaacaggggattggggagcacagagaagggccccaccccgaccagctgtcaagagaac

SEQ ID NO: 824032 - DNA, 120 bp, Artificial Sequence
  ENSG00000259476_1 (sequence is synthesized)
tatccatacattctaattcctccaaggttgagggctaaggtgtaggaagaggagagaggttccaagcagaaggaattgcagaagcaaaggcacagaggcatccgggacctgcgagcagct

SEQ ID NO: 824033 - DNA, 120 bp, Artificial Sequence
  ENSG00000259476_2 (sequence is synthesized)
atggctggagccgcgtgtcgcaggatggagagcgtgtgaacagaggggactggaagcggatcctcccaggaagcagttgcaggcggtcatgctacatttgcagggagacgggaggttgtg

SEQ ID NO: 824034 - DNA, 120 bp, Artificial Sequence
  ENSG00000259476_3 (sequence is synthesized)
aagaacaataaccagaagagagtttgcgtcttcatcagaaagcacctggggcaggtagagttggtgctagcttctccatccatccctgacaccccagccccattcatcattcagcagaag

SEQ ID NO: 824035 - DNA, 120 bp, Artificial Sequence
  ENSG00000259476_4 (sequence is synthesized)
acaggctgggctggcccaacttggtcctgtacccccaccaccccagaaccccactggtccatagtgaggatcccttctctttgactctcctccttctctgtgactcgcctaagcctgatc

SEQ ID NO: 824036 - DNA, 120 bp, Artificial Sequence
  ENSG00000259476_5 (sequence is synthesized)
ctacaccttctctcccagccactgcctcagcttcctccacccccagcttgggacgagccacctccctggctgggtagcatgggacaagccatctccctgcagaggcagagaaccagtgac

SEQ ID NO: 824037 - DNA, 120 bp, Artificial Sequence
  ENSG00000259476_6 (sequence is synthesized)
actacacgcaaaccaaggccatgctgcaaacagaacaccaaggcaccctcgtcttaggatgcattatattcggggtagatgttgaattctagtaacacattccctggggtgttttcaaat

SEQ ID NO: 824038 - DNA, 120 bp, Artificial Sequence
  ENSG00000259476_7 (sequence is synthesized)
ggctgctgcccctgttccatcctggcaagcggaactgaacaggcccgactccacagcccccggtgctgccagctgcaagctctgctgactccaacctcaggcccctgcgtgcctgcttct

SEQ ID NO: 824039 - DNA, 120 bp, Artificial Sequence
  ENSG00000259476_8 (sequence is synthesized)
aaatccacacgttcctgctccttcctgcccctgctgccctctcagaatgccacttctttctgccaagacctcaggcattgctatggcccagccccatctttattgatgtcggggctctgt

SEQ ID NO: 824040 - DNA, 120 bp, Artificial Sequence
  ENSG00000259476_9 (sequence is synthesized)
ccccttgcagagcccatcccattgccacccacatctgggacagcaaaagacttctcagtttcctccagagttcagtttcttccaaaaagctcggcacatcttagctgccagtgtgaactg

SEQ ID NO: 824041 - DNA, 120 bp, Artificial Sequence
  ENSG00000259476_10 (sequence is synthesized)
tgagctcccagagatgcccgtggcactttccaacattcgtcacttttgacacatctaaaatatcctagctcccagagctgcgtgagcaccagcccagatggaccggctgctggggaagca

SEQ ID NO: 824042 - DNA, 120 bp, Artificial Sequence
  ENSG00000259476_11 (sequence is synthesized)
tcagtctctccagggcctctgtgaagccctggggcagtagggggatgtctgacaaagcttcctaactgaggagccccacttcctctcgctctgggcacccctgccaaatgagcgggcacc

SEQ ID NO: 824043 - DNA, 120 bp, Artificial Sequence
  ENSG00000259476_12 (sequence is synthesized)
tctatgttccagcagccctcgctgcccagcttctgagctgcaagccagcttccttccacagaattctctgcaccttggcttccggtggctccaagcactttgccatctgccgagtcagtt

SEQ ID NO: 824044 - DNA, 120 bp, Artificial Sequence
  ENSG00000259476_13 (sequence is synthesized)
ctgccagagatgaagcagctgatgtggggagttctctgtgggggccacctttcctctctcaggtcacctttactctcagaaggaaactgaccccctgacctattaaatagctgaaatcaa

SEQ ID NO: 824045 - DNA, 120 bp, Artificial Sequence
  ENSG00000259475_0 (sequence is synthesized)
gctcgcgcacctcgtcctcgtacagctgcaccgtctcccgccacgactcggccaccagcagtgcgtagctgtcgtgcacctcccgcaggcgtggcggcggcgcggcggggccggtggcgc

SEQ ID NO: 824046 - DNA, 120 bp, Artificial Sequence
  ENSG00000259475_1 (sequence is synthesized)
gggcgcggaaatgcatggctgaacaccttagggaccatcaacccccggtggtgtcgtttccagtgaaaaccgaactccgggatgtagccggattggagagaagcgagtgacgcgtgcgcc

SEQ ID NO: 824047 - DNA, 120 bp, Artificial Sequence
  ENSG00000259475_2 (sequence is synthesized)
gtcagttctggggaggctggcgccatccttctcgaatgctctcccctttgggggacacatacccagcccttctcctggaacagggacaagactcaaatggaattcctgccctgctgggaa

SEQ ID NO: 824048 - DNA, 120 bp, Artificial Sequence
  ENSG00000259475_3 (sequence is synthesized)
gcagcttcctgggggccagctgtgaccccccccggaggctgggtgacggtcagcagggtgagcacacagaggtgcctccgtattctcacttcactcttggccctgatgtcctgaactgga

SEQ ID NO: 824049 - DNA, 70 bp, Artificial Sequence
  ENSG00000259474_0 (sequence is synthesized)
ttcttaagagacagggtcttgggccgggcgcggcggctcatgtctgtatcccagcaatcctggccaacac

SEQ ID NO: 824050 - DNA, 120 bp, Artificial Sequence
  ENSG00000259474_1 (sequence is synthesized)
ttcatttattcacctaacacgtttactgaatatctactatgtgccagcaattgttctaggagctggggatacaataccaaaccaaagttcctgtcctcatggagtttaatgaacagttaa

SEQ ID NO: 824051 - DNA, 120 bp, Artificial Sequence
  ENSG00000221845_0 (sequence is synthesized)
cttgcatttggcagacgagtcacccgggcagtgggatgaggatggcaccaacagagtcaacagaaggaagacggctctggccgggccccagggagggaggcagcggtaaggaaacaactt

SEQ ID NO: 824052 - DNA, 120 bp, Artificial Sequence
  ENSG00000221845_1 (sequence is synthesized)
cagagaagttaagcaacttgcccaggccacacagctattcaccaaagagagctgatgctgagtctttcagaggagtgcctgcagcatttaaaaaatgcagagaagtgttcagagcctgct

SEQ ID NO: 824053 - DNA, 120 bp, Artificial Sequence
  ENSG00000221845_2 (sequence is synthesized)
ggggaagcagggagctgctatttctgttcaaggcaatcagtgaggctggacctgcccagaattcatgtggaatcaccctagagaaggctggtggcttggaagacactggatctcactggc

SEQ ID NO: 824054 - DNA, 120 bp, Artificial Sequence
  ENSG00000221845_3 (sequence is synthesized)
tcagctgggcacggtgcaaggtgctatacataaatggtttcactgacccctggaaggatgctcaggcctggatactcattgtgagctgcaaaaaaggaaaggggacccctgagagggaag

SEQ ID NO: 824055 - DNA, 120 bp, Artificial Sequence
  ENSG00000221845_4 (sequence is synthesized)
gcaggaactagggctcatggccagaggtgtggagctgcattgaaatctcttgagtgggatgcccatgcttccccaccagatcccagaaactcaacgtagtgtcctgatgtcctgactggc

SEQ ID NO: 824056 - DNA, 120 bp, Artificial Sequence
  ENSG00000221845_5 (sequence is synthesized)
tctgcagaagcccaggtgtcactccgggtgagtgggctcagatcctccacggtctacatcctccaggcactctgggcatccccgtcctctgggtggggacagctttctagctgtgctggg

SEQ ID NO: 824057 - DNA, 120 bp, Artificial Sequence
  ENSG00000221845_6 (sequence is synthesized)
tgagggtgattatagccagcaatcctggctgggccttcgttcttgatccccggtaaaggcaggggctacagggtgccctggtgcacagaggctcactggctgctcaaggtctcctcccac

SEQ ID NO: 824058 - DNA, 120 bp, Artificial Sequence
  ENSG00000221845_7 (sequence is synthesized)
aaccatctacatcctgactcagcgctgaattgtgatgctctggaggacaaggctggtgctcccacagtgtgtacctgccttcctggaggccaggatgccaagaactgcctcctagccacc

SEQ ID NO: 824059 - DNA, 120 bp, Artificial Sequence
  ENSG00000221845_8 (sequence is synthesized)
cgcttcttccaggcccttagaactccagccagagggctgcctgtagggcctgcttctgtgcagctgctcagagcagtgacagcactccttaccccgtccctgtctaccccacaagtgctg

SEQ ID NO: 824060 - DNA, 120 bp, Artificial Sequence
  ENSG00000221845_9 (sequence is synthesized)
cctgcttacttgggtcgtgtccatgctggcctctgctcttggggcctggggagccagagccaccaaggacggacaggccagactcaggaagcagcctgtggtggggcagcccacctacac

SEQ ID NO: 824061 - DNA, 120 bp, Artificial Sequence
  ENSG00000221845_10 (sequence is synthesized)
tcgcccctcccttgagccttctcacccggcagcatccctgctggatgcaggttccctccatgcctccacccaggggcatccccacccctcattgcgaccgtctccagagcccttccttcc

SEQ ID NO: 824062 - DNA, 120 bp, Artificial Sequence
  ENSG00000221845_11 (sequence is synthesized)
ctgcaccatccctgctccttcatctcctgccctttgcctgccctacctgtcgcctcagcaggcactcacatgggcacatcttggcctccctcctgagggccctgcccagaccagccaaag

SEQ ID NO: 824063 - DNA, 120 bp, Artificial Sequence
  ENSG00000221845_12 (sequence is synthesized)
ctgggcagtggggacaaggaccacaatgcccgtggctgtaggtgtcatgggttggggagggggtgtgggttcctggacctttgccctggtcctggggtgggcaggtggggttcctggttg

SEQ ID NO: 824064 - DNA, 120 bp, Artificial Sequence
  ENSG00000221845_13 (sequence is synthesized)
accctgcacacagcctccggggtggtctccagaggactgtgcagtgggggcagccagtggcagcctaaagagtgcaggatgggggtggggggtgcccactgaaacaaatgctcaagagca

SEQ ID NO: 824065 - DNA, 120 bp, Artificial Sequence
  ENSG00000221845_14 (sequence is synthesized)
gctggttatggcaggactttaagtatatattcctgtacatcttttcaaacatatacacaaagcaattcacattttcatatactggaaaggcaggctaacttttcattttcctgcaacatg

SEQ ID NO: 824066 - DNA, 71 bp, Artificial Sequence
  ENSG00000221845_15 (sequence is synthesized)
actggaaaggcaggctaacttttcattttcctgcaacatgtgcatagtaataaaaaattctggccgagcgg

SEQ ID NO: 824067 - DNA, 120 bp, Artificial Sequence
  ENSG00000221845_16 (sequence is synthesized)
gcagtgagccgagactgcgccactgcaccccaggctgggtgacagagctagactcagtctcaaaaaaaaaaaaaagttctatagccttcttccagtttctccccccaattaaatgtaata

SEQ ID NO: 824068 - DNA, 120 bp, Artificial Sequence
  ENSG00000221845_17 (sequence is synthesized)
acaatctaatcagtgcactgaaagttaagataatagaaaaaatttcatccagaatcccatcacccacatgttaccgagggagaaattttaccacctcttgtttcaggccagttcaggcag

SEQ ID NO: 824069 - DNA, 120 bp, Artificial Sequence
  ENSG00000221845_18 (sequence is synthesized)
gtgtacattgtctcagaagggagatatttctttcgtctgatactggagagtcaccagagtcgccagacaacaggacaggacactcatcttgcccacaggctaggtttgctggatgtcact

SEQ ID NO: 824070 - DNA, 120 bp, Artificial Sequence
  ENSG00000221845_19 (sequence is synthesized)
aggtttgccagacaccaactcttgtcagagttattccatttgcctgtttggaaaaggcagccttcacccctgcattcctagctcctgggctgacggcctgcctgacatctgagggtagtg

SEQ ID NO: 824071 - DNA, 120 bp, Artificial Sequence
  ENSG00000221845_20 (sequence is synthesized)
gagtgaggttggcacttgccctgcgctgagagtggaggggagataatggtttaggtgggaaagtacagcccctccagcttcagggatcagctcacagcagggggaaaagtcctagaggaa

SEQ ID NO: 824072 - DNA, 120 bp, Artificial Sequence
  ENSG00000221845_21 (sequence is synthesized)
gactggggtggggcatgtctgctcactcacaaaagcagattcattattacagggcctttaaagagggatgtgtgtgggtagatgggatcctcaccgaggtgtgacctgctttttctagtg

SEQ ID NO: 824073 - DNA, 120 bp, Artificial Sequence
  ENSG00000221845_22 (sequence is synthesized)
tttgcgaggatgtctcattaacctgcaggaaagtgctggtttcaattcgatggtttgttttctgttctgtttcctttctgttacaaacacaaagggtacattaaagagcctttccccatc

SEQ ID NO: 824074 - DNA, 120 bp, Artificial Sequence
  ENSG00000272027_0 (sequence is synthesized)
gctgcccagtcttttgaaagatatttgaaaattcaggatacatgtttacagaagagacaaacttgacttcattatctagagccagaacacatagtatctgtatatccacggtgattggga

SEQ ID NO: 824075 - DNA, 120 bp, Artificial Sequence
  ENSG00000272027_1 (sequence is synthesized)
ctaatgccaagatttgaaataatacctcagacagttcagcttcagagagagaatagcttttgaaaaatctaaaatctaccttaggaacgtacatttctctaagcaaaaaagatccacgta

SEQ ID NO: 824076 - DNA, 120 bp, Artificial Sequence
  ENSG00000272027_2 (sequence is synthesized)
aaggaacatctcaccaattttaaatccgagatgaaggagatgcgtttcatccgtggacccaaaactctgatgccagtcacagactcaggaagacattcttcccttggtgtttaatcacgc

SEQ ID NO: 824077 - DNA, 120 bp, Artificial Sequence
  ENSG00000272027_3 (sequence is synthesized)
gtttaatcacgcggggacgcctgcctgattactcacccacgtttcagaggtgtctgaccacatggggatgcctgccttggtccttcaaccttagcagcaagtaccacttttctgggggtg

SEQ ID NO: 824078 - DNA, 85 bp, Artificial Sequence
  ENSG00000272027_4 (sequence is synthesized)
tgtgggaccccatggacagagcccctggaaatctggcccaagactctctaactgactccttcccagatcttctcagtttagagtc

SEQ ID NO: 824079 - DNA, 120 bp, Artificial Sequence
  ENSG00000272027_5 (sequence is synthesized)
atttctgcatcctctcagtcatgatgataaaggatttactacctcagtcatgtcaccactcttgaatatcattcccatggcatggtgcagtaggaactgccattctgggcctggcgcggt

SEQ ID NO: 824080 - DNA, 120 bp, Artificial Sequence
  ENSG00000272024_0 (sequence is synthesized)
tgaggacagtatgataagtgaaatgagtcagaagcaaaaagacaaatattgtatgattccatttacataaggtacccagagtagtcaaattcatagagatacaaggtgtctgctggaatg

SEQ ID NO: 824081 - DNA, 120 bp, Artificial Sequence
  ENSG00000272024_1 (sequence is synthesized)
gagtccagagtttcagtttggaaatgatgacagagctctggagattggttgcaccacaatatgaacatagttaacactatggcattgtacatttagaaatgattaagatggaaaatttta

SEQ ID NO: 824082 - DNA, 120 bp, Artificial Sequence
  ENSG00000272024_2 (sequence is synthesized)
cgttagatgtattttaccacaactaaaaatttaaaagaaagaaaaaaacagctatgaagatttctaagtcttgggccttattttgccatgaggaaaaataaatacatcccataaaaaaaa

SEQ ID NO: 824083 - DNA, 120 bp, Artificial Sequence
  ENSG00000272023_0 (sequence is synthesized)
ggtgacgttcccggctgtggggtctgatgacccgggccaggcaaaggacccgcccgagcggtataggcctgagcctctgggcactgcggccgcgtccggcagggctgccacggcagtaca

SEQ ID NO: 824084 - DNA, 120 bp, Artificial Sequence
  ENSG00000272023_1 (sequence is synthesized)
cgtagcccgctagtgaggttccgaagggcggggccgggccgaaccggatatgccggttctggggctcaggtgacaaacccaggccttccgcccctcgcctctggtggggatccggcccaa

SEQ ID NO: 824085 - DNA, 120 bp, Artificial Sequence
  ENSG00000272023_2 (sequence is synthesized)
cccggagcttcctagacttgcttccaggtgtcgaagcctcgagtcctcaagaggtccagcaaaaaggcaaaggacgcaggaggctgttcggtatttccagtaaacttaccctaagaagcc

SEQ ID NO: 824086 - DNA, 88 bp, Artificial Sequence
  ENSG00000272021_0 (sequence is synthesized)
tcctgacctcaacttttaatttttatctatcgatctagtctattattacccgctacttacctacccatccatccattcatccatccat

SEQ ID NO: 824087 - DNA, 120 bp, Artificial Sequence
  ENSG00000272021_1 (sequence is synthesized)
ttagctctggtctttgttatatttgttgataggcccaagtaaattagtatgtgtaaaactcacttaaaacagtgcttagcacatggtaagcataatatgtgatagcccttatgatctagt

SEQ ID NO: 824088 - DNA, 120 bp, Artificial Sequence
  ENSG00000272021_2 (sequence is synthesized)
aactcaccagtatcttgtgtgtattagaacaatgtgtctctgtaatattttaattatatctctataagagcatacataaatgacaatatataaatctcaataacagaatgtttctaaccc

SEQ ID NO: 824089 - DNA, 120 bp, Artificial Sequence
  ENSG00000260073_0 (sequence is synthesized)
aaggaggaggagtggagctgcagggaggaggctcgacaggatcgcctccagcctggggcagctgggttggcgaggcgggggctggttgctgccctggcgggcgaggtgataaaccatgtt

SEQ ID NO: 824090 - DNA, 120 bp, Artificial Sequence
  ENSG00000260073_1 (sequence is synthesized)
gtagaatgccattatccccacctccagctgggggcgcctgggcgtatctgaaaaccttgggggaagtgttcacgtttttggcgcttaagaaaaggaagaagcggcagctagctgcagagg

SEQ ID NO: 824091 - DNA, 120 bp, Artificial Sequence
  ENSG00000260073_2 (sequence is synthesized)
ctgttccaggccttccagcgacatcgcagaacctgcaccgagtgccacttggaccgcagtctggacctgaagccttgggccggggcacccgtaggagctcagccctcaccgctcccgccc

SEQ ID NO: 824092 - DNA, 120 bp, Artificial Sequence
  ENSG00000260073_3 (sequence is synthesized)
tctttggattctcttctccccgagcttggccagagttcaggtctcctggtttctggtctgcccggtaagagtgcaggagtgcagaggtgaggagggggagttaggagtcttgttccggtt

SEQ ID NO: 824093 - DNA, 120 bp, Artificial Sequence
  ENSG00000260073_4 (sequence is synthesized)
ctcagcatagtgagaagtctgaaaagaggtgatgatccggttgtgcttgaaggggagaggccaaagcccaggacattctgcctttttaggggatttacctttcaagccctatttggtctc

SEQ ID NO: 824094 - DNA, 120 bp, Artificial Sequence
  ENSG00000260073_5 (sequence is synthesized)
cactagcctttgcttctgaggatgaaggagttgagcctctgttacatggatgtctacagagatcataccccttgccctgaacgaccgagagactgatagctctagggccagcacctgaga

SEQ ID NO: 824095 - DNA, 120 bp, Artificial Sequence
  ENSG00000260073_6 (sequence is synthesized)
agcctgtagcctgcctgccagtggactcctgtatccggagtagacagccctcctgacccccctgctggctgcctgcctctagtgtctttgattcctgcagctggccaggccttccttgca

SEQ ID NO: 824096 - DNA, 120 bp, Artificial Sequence
  ENSG00000260073_7 (sequence is synthesized)
aatgacgctgagattcagcagtttgtgcacagatcagattggctgcttgagtctttggcatcctgagccatctcccttgggccttcagaagggctatgtcatcctcggtgggcatggcct

SEQ ID NO: 824097 - DNA, 120 bp, Artificial Sequence
  ENSG00000260073_8 (sequence is synthesized)
ggatcctgtgacctctccatgggtgtccagtctcaccctgccttcaatcactcgctcagcctttccggctttttggggacaagccccgatccaccagacacgtctattacctgtgtgttt

SEQ ID NO: 824098 - DNA, 120 bp, Artificial Sequence
  ENSG00000260073_9 (sequence is synthesized)
cttttagcagtgttcaaagaaagagatctatttccattttttctcccataacttgacctctaactcattcatcataatataagcttgacgggtagacatgcccgtaaatgtgtgtccaaa

SEQ ID NO: 824099 - DNA, 120 bp, Artificial Sequence
  ENSG00000260073_10 (sequence is synthesized)
tgcttactgtgggaaagaggtctgcctcctgctaagctgatttcctggtgagctctgggaaattcttcctgactaatgggttgtttcagcattgcagtcttgctctttctgtggatccag

SEQ ID NO: 824100 - DNA, 120 bp, Artificial Sequence
  ENSG00000260073_11 (sequence is synthesized)
attcggaaaagattgtgccttttggtgaaactcctgaatctacaggagataatcgaaaaggctgaaggtctgtgcagatggctggtgctgctgctcaagcagaaagagaaacttctttgt

SEQ ID NO: 824101 - DNA, 120 bp, Artificial Sequence
  ENSG00000260073_12 (sequence is synthesized)
ttaaggacacacctgccaggccagcatgctcatggtccttgtcctcctggcacattctttggtacagaggttaagatcctgatgatgtgagagtgtgcctcctagagttggtcctgttga

SEQ ID NO: 824102 - DNA, 120 bp, Artificial Sequence
  ENSG00000260073_13 (sequence is synthesized)
cacatggcccctgagtgccacggaggtttggagatctcttttgtatgcagggcctggatgagctggtgcattgccacccttgatgcctgacttgggcagcccacagagggatcccaggga

SEQ ID NO: 824103 - DNA, 120 bp, Artificial Sequence
  ENSG00000260073_14 (sequence is synthesized)
ccataagatgtgtatggtagaggaagaactggtacaactgaccctttgctggtgaatggattgaaggcaggaagaagataggttcttcttggatagatgtacaggtggccttgctgcagc

SEQ ID NO: 824104 - DNA, 120 bp, Artificial Sequence
  ENSG00000260073_15 (sequence is synthesized)
tgaacagtcaggtgaagcctctcacttaggcctagtgctggagaatttacaggcccacttctgctctagcctgcacgactgatcctttgatctgacaccagatctgaattctggactctg

SEQ ID NO: 824105 - DNA, 120 bp, Artificial Sequence
  ENSG00000260073_16 (sequence is synthesized)
gaatgcctgtctgttttaccagtttctctttggtggtgatgctaggaaagcaatttttctcaaaggcttggatgtggacactagtctggtatctaataattgctgcccactttttcctga

SEQ ID NO: 824106 - DNA, 120 bp, Artificial Sequence
  ENSG00000260073_17 (sequence is synthesized)
cttcttgggagaggcattcatgagtccaaagctgaggtcaaaatcacttctgtcttatctgacattatctctcaaagcaaatctggattctagcctccagaatgcccatttcttgggcca

SEQ ID NO: 824107 - DNA, 120 bp, Artificial Sequence
  ENSG00000260073_18 (sequence is synthesized)
gtttttcactggtaaatctgcaagggtacaggttccatttaaaccatgctggttgggtatccttttgacttggcataaaatacttctccttcattatgattcacttgggtgaaagccaac

SEQ ID NO: 824108 - DNA, 120 bp, Artificial Sequence
  ENSG00000260073_19 (sequence is synthesized)
agaaagtctggaaagatccactgtgaaaagatttcatctggactccacagacaccgctggccagctctcacttgcacaggatttccgcacaccgagccagccccagcccttgcttcaata

SEQ ID NO: 824109 - DNA, 120 bp, Artificial Sequence
  ENSG00000260073_20 (sequence is synthesized)
ttttcccactccagctcattaaacattttagttttttgttatatatttaagacactgaagaaagcataggaaaccagcaaaaattgaattttgctggaatttaagtttgagagcagcccg

SEQ ID NO: 824110 - DNA, 120 bp, Artificial Sequence
  ENSG00000260073_21 (sequence is synthesized)
caagaggaacacattgggtgggtagacatgttgtgctttttaatttttttcctgtaagatagtcaacaataattaatttgaacaagaaaaaaatggttgtcatacatatataaaagtaaa

SEQ ID NO: 824111 - DNA, 120 bp, Artificial Sequence
  ENSG00000260073_22 (sequence is synthesized)
gtctagaaaaataaaaagtttttgttttgacctaattcagattatataaaaatagaaatcacagtatttgtttttacatattttgaaaattaaataaccttgaaatgataaagtgcagaa

SEQ ID NO: 824112 - DNA, 120 bp, Artificial Sequence
  ENSG00000260073_23 (sequence is synthesized)
aataatgtgaataataatgttgagttttctagtccctcttctgatccttcatcctggtagcttatatcctgttttgctgcataataaataattttattctcacctttgggaaataccaaa

SEQ ID NO: 824113 - DNA, 120 bp, Artificial Sequence
  ENSG00000260072_0 (sequence is synthesized)
accgcaaaacccaaagacccacttaggtgtcccctctctccgcagaagagagagcttttccctttctctctgttaaacctcttctcttaaactcacttcttgcgtgtcctcgtcctcgat

SEQ ID NO: 824114 - DNA, 120 bp, Artificial Sequence
  ENSG00000260072_1 (sequence is synthesized)
ttccttggcgtaagacgacgaacctcaggcatttaccccagacaacgaaggtgcttcataaggtcatgcagctgggtcaacataggactgtgtagccaagagctacaggatggattgctg

SEQ ID NO: 824115 - DNA, 120 bp, Artificial Sequence
  ENSG00000260072_2 (sequence is synthesized)
aggccagggagattgaaaggaagtcacagcccaatctcagagggatccacggagccagcgaaagctaaggcgggacttacccaacagagggtcctggcccagtcacccagtggcacaacc

SEQ ID NO: 824116 - DNA, 120 bp, Artificial Sequence
  ENSG00000260072_3 (sequence is synthesized)
caactgggagatctgagcatctaccaactgtggccaccagtgagatggtgtcattgtctggggtaaataccgggggtttgttgtctcatgccaaggaaatcgagtttgcggacacaagaa

SEQ ID NO: 824117 - DNA, 120 bp, Artificial Sequence
  ENSG00000260072_4 (sequence is synthesized)
ttaataggcaaaagaaagagaaagggtaacagtaggagagagaggagtgcgccagtgggacttctgacccacgatggagtgcattggattttatagacaggcttgaggaggcagtgtctg

SEQ ID NO: 824118 - DNA, 120 bp, Artificial Sequence
  ENSG00000260072_5 (sequence is synthesized)
gcttgaggaggcagtgtctgattgacacagggcccacagattggttggaccaggtgtgagttttacatagcgtgtggggaagctggccacgccaccctaatcttattatgcaaataggct

SEQ ID NO: 824119 - DNA, 120 bp, Artificial Sequence
  ENSG00000260072_6 (sequence is synthesized)
ttccacttggccggcaccatgttgtctgctgcctaatgcacatgtggttggaaagggaaagggaagatgcagctgccattttgaacatgcctagtcccaggtagccttttcctattgaca

SEQ ID NO: 824120 - DNA, 120 bp, Artificial Sequence
  ENSG00000260072_7 (sequence is synthesized)
cagctgccgcattcacccgtgcaagcttctgtgtctgcagctcaattttacaggctgctgtttgttagaaaagaaatgattcaggggctgcttttcattaaaaggaaaccttactgagga

SEQ ID NO: 824121 - DNA, 120 bp, Artificial Sequence
  ENSG00000260072_8 (sequence is synthesized)
cttccttaccctcactgtctgcctaaataatttcttctttactcctatatcaccggcatcagaggccagcagaagtctcagtgatcgggcaggacaaaggacatttctgcagagaatact

SEQ ID NO: 824122 - DNA, 120 bp, Artificial Sequence
  ENSG00000260072_9 (sequence is synthesized)
gaaggtccaggagacagcacagtgggacatatgtgggcccctgccccatcattaggaggaagtgtaggcttttctgaggacctggatgccataccatcttgagacagagaatgaggaacc

SEQ ID NO: 824123 - DNA, 120 bp, Artificial Sequence
  ENSG00000260072_10 (sequence is synthesized)
aacccttgacaagagagagatggccctggtagagaatttgaaccttgaattggattgaatatttatccaaaagaaattgaaccagcactagagagactgttttgaactagaagtaaccaa

SEQ ID NO: 824124 - DNA, 120 bp, Artificial Sequence
  ENSG00000260072_11 (sequence is synthesized)
gttaccttaactggaagttaggatttttccacccctgacatcagtgggacaagggcacatgagcaagatatttacggacaaagaagaacgttcatgttttgtacacctgctttgtagtat

SEQ ID NO: 824125 - DNA, 120 bp, Artificial Sequence
  ENSG00000260072_12 (sequence is synthesized)
gttgcagataccgttggttcccctgatttcaggtgttctcgttctttctgtacagtcacttgctcagggcaaatggtcctctcctgcatgactcagaagcacatactgattattctaaac

SEQ ID NO: 824126 - DNA, 120 bp, Artificial Sequence
  ENSG00000260072_13 (sequence is synthesized)
tggtcttcatgccccgttcccttgtcagtgatgtagttaggcaaaggattatgtaacaattctggctatgagacattgaaacttctactgtggggcatctgggaagatttttctcattga

SEQ ID NO: 824127 - DNA, 120 bp, Artificial Sequence
  ENSG00000260072_14 (sequence is synthesized)
aaagaagagacgcagggtgtggagactcatgcctgtaatccgagcccttgggaggcccaggagggagggtcacctgagtccaagagctcaaggccagttcgagcaacataccaaggctgc

SEQ ID NO: 824128 - DNA, 79 bp, Artificial Sequence
  ENSG00000260072_15 (sequence is synthesized)
caagagctcaaggccagttcgagcaacataccaaggctgcaataaacaagcaaacaaacaaacaaacattagctgggca

SEQ ID NO: 824129 - DNA, 120 bp, Artificial Sequence
  ENSG00000260072_16 (sequence is synthesized)
gcacttcagcctgggcaacagagcgagatcctgtctctataaaaaaattttaaaaaaaggaagaaaagaaaagaagagacacacgtggaagaaacagtctctattctgatgcaagtaatg

SEQ ID NO: 824130 - DNA, 120 bp, Artificial Sequence
  ENSG00000260072_17 (sequence is synthesized)
ctattctgatgcaagtaatgactggaactgtggcagacagcttggaaccatgagaggagttaactgagggctatcagggaaactagaagaagcctgggtccttgaggaggcagactacta

SEQ ID NO: 824131 - DNA, 120 bp, Artificial Sequence
  ENSG00000260072_18 (sequence is synthesized)
aatggaccatcgtcccttcaccctttttgttatgtgagataataaactctctaatttaaatctacttgagatgaatatctgatacttgtagccaaaatcatccttaatgggacagagtgt

SEQ ID NO: 824132 - DNA, 120 bp, Artificial Sequence
  ENSG00000260072_19 (sequence is synthesized)
gggtaaattatcaaccttgctagccttgcctcataatttttgaatttatttttatcttttaattttgtttattttttatttttaaagtagagacaggatctcattatgttgctcaggctg

SEQ ID NO: 824133 - DNA, 120 bp, Artificial Sequence
  ENSG00000260072_20 (sequence is synthesized)
cagcctcctaaagtgctgagattacaggtatgagcccctatgccaggccattgctttgccattgtatccatgtgattgcaaaaaagaaaatcgtgctaatagtcattagctttgaaagac

SEQ ID NO: 824134 - DNA, 120 bp, Artificial Sequence
  ENSG00000260072_21 (sequence is synthesized)
agaaaatcgtgctaatagtcattagctttgaaagacacttggaatttcttccttcaagcgagctttattcccaaactgttgaaccctctgggtttgacagcaggatctacttcacatggt

SEQ ID NO: 824135 - DNA, 120 bp, Artificial Sequence
  ENSG00000260072_22 (sequence is synthesized)
agcatctccttctatttgccttcaagacatttcctaagggaagagatgaagacacacttgtaacgtgaacaaaataatcctttttccttttaaaaatgtatgattaaaatgtaaaatata

SEQ ID NO: 824136 - DNA, 120 bp, Artificial Sequence
  ENSG00000260072_23 (sequence is synthesized)
tatatatattcttaaatgtaaaatatatatatatatcttctagagttgcctggaaagtgagctgagagcagttaaacatcaaacccactgctgctttccagctttaaccagaatcaccat

SEQ ID NO: 824137 - DNA, 120 bp, Artificial Sequence
  ENSG00000260072_24 (sequence is synthesized)
tgtctttccctatgaaagaaaggaaatcttagaacttaaaaggatttcaagaagaactgaattttaaccactgagatgaccagagatgtaaggctcacactgactgaagcagtataattt

SEQ ID NO: 824138 - DNA, 120 bp, Artificial Sequence
  ENSG00000260072_25 (sequence is synthesized)
ggctgtctttttaacattcagaattctctctgactctccaaaattgcatctactttgatgagcttatttttttcctcaaccaaattacatttcttggagttcacctgatacatcatgcct

SEQ ID NO: 824139 - DNA, 120 bp, Artificial Sequence
  ENSG00000260072_26 (sequence is synthesized)
tacaggggtaagccaccatgtccagccctgcctacttactttgaacaaattatttcaggctaatttactagctggagagaaagagggagggaagcagggaggaagcaaagatagagggag

SEQ ID NO: 824140 - DNA, 120 bp, Artificial Sequence
  ENSG00000260072_27 (sequence is synthesized)
agaaagagagggagacagagaggaagagggagagggagaggagagagagagaaagaatgaattgtgttctcccaaaattagtatgttgaagtcttaatatcccagtacctcagactatga

SEQ ID NO: 824141 - DNA, 120 bp, Artificial Sequence
  ENSG00000260072_28 (sequence is synthesized)
ctgtatctgtagatagggcttttgaaaaggtgattatgtttaaatgaggccattggggtgggccctaatccagtccaactgttgtcattgtaagaagaagagattaggacacagagatac

SEQ ID NO: 824142 - DNA, 120 bp, Artificial Sequence
  ENSG00000260072_29 (sequence is synthesized)
caggcatgtgcgtgcccagacagacaactatgtgaagagacaacaataggtcagccatctgcaagctgaggagagaggcctcagaggaaaccaaccctgccggcaccttgatcttggagt

SEQ ID NO: 824143 - DNA, 120 bp, Artificial Sequence
  ENSG00000260072_30 (sequence is synthesized)
tccagcctccagaactgtgagaaaatgtattcctgttgttgaagccatttctgttgttctgtggcattttgttatggcagccctagcaaactaatatgataattaactcttccaagtgct

SEQ ID NO: 824144 - DNA, 120 bp, Artificial Sequence
  ENSG00000260072_31 (sequence is synthesized)
gtttccattacaaagtatcccagaattttatattggtgaatctgtgttcctcaggccatgtcttccctgttggaaatgctgttattatgtcccaaggtgacttcaaggagtgggttagag

SEQ ID NO: 824145 - DNA, 120 bp, Artificial Sequence
  ENSG00000260072_32 (sequence is synthesized)
gctgagacagagggtgtgagatcgtcactactgtaaccttgctttgttcagtatgaacatgctcagatattctctgttttgtattgggagatcgggaaaggatttattgaaaaaatgttt

SEQ ID NO: 824146 - DNA, 120 bp, Artificial Sequence
  ENSG00000260072_33 (sequence is synthesized)
ccattagcaaatgaagtttgaaggcaactaccgtctacaagagcaaacaaatgcataaaattcaaatattattttgtcccaacctcagtgtcatgagggtctcttatacagaatagtaga

SEQ ID NO: 824147 - DNA, 120 bp, Artificial Sequence
  ENSG00000260072_34 (sequence is synthesized)
tgagaataaaatttgaattgataatactggaatagagtagtcattatgcaatgtaacaaacctcaaatattcagtggtttaacactatagatgtttatttaccactcattcaatgtatgt

SEQ ID NO: 824148 - DNA, 120 bp, Artificial Sequence
  ENSG00000260072_35 (sequence is synthesized)
gttccttgttagcagtagttttccttgtagtcattcaggaatccaggcatattagttatctatttctgtgtaccccataaaaaccatttattattgcacactttcagagggtcagtaatt

SEQ ID NO: 824149 - DNA, 120 bp, Artificial Sequence
  ENSG00000260072_36 (sequence is synthesized)
tgggagtggcttagctggggtgttctgaccagagtctctcttgaggttgtagtcaagatgttggctagggttgccatcatctgaaagcttgactgggactgtatccactttcaagatggc

SEQ ID NO: 824150 - DNA, 120 bp, Artificial Sequence
  ENSG00000260072_37 (sequence is synthesized)
gcacttacttggctgttggcaggaagcctcaatgacttatcatgtggtcttctccacagtgctgcttgagcatccacacaacatggcgctagcttcccccagagtgagtaatccagaatg

SEQ ID NO: 824151 - DNA, 120 bp, Artificial Sequence
  ENSG00000260072_38 (sequence is synthesized)
aagaagacagaaaccacaatatcctttatgaactggccttataagtaatattttgtcatttccataaagtcctattggttacacaagactgccgtattcaatataagagtgacaacacat

SEQ ID NO: 824152 - DNA, 120 bp, Artificial Sequence
  ENSG00000260072_39 (sequence is synthesized)
ggggataaatacttggaggtgtaaatcattgggaaccatcctggaagttgcctacaatactaggatctatggctacaattccctgggtcttggcttcaagacagagaaaagggaaagaac

SEQ ID NO: 824153 - DNA, 120 bp, Artificial Sequence
  ENSG00000260072_40 (sequence is synthesized)
atgaaacagccccatgtggtttttgttttttttttaatggacaagagtaagaaatggtgaacatttcttctactcatattctacagttagaatttggtcacataatgtatctaactatga

SEQ ID NO: 824154 - DNA, 120 bp, Artificial Sequence
  ENSG00000260072_41 (sequence is synthesized)
aggtagctaggtaatatcatctcttgttgggagggtagctgggaatacctctatacaatggaaggaagagcatgaacttttggtggagagataatgctctctgccatgataaaatgaaaa

SEQ ID NO: 824155 - DNA, 120 bp, Artificial Sequence
  ENSG00000260072_42 (sequence is synthesized)
aaataacatatgcagaatggtcaacataacagcatgaagcaaatgcacaatgaatgataatcataatatagtgctcttttgataatctagtgcatacccagaacctgggaggtatttggt

SEQ ID NO: 824156 - DNA, 120 bp, Artificial Sequence
  ENSG00000260072_43 (sequence is synthesized)
tttaatacatgtttgttgtatgaatacgtgagttaaggtaatggatgcaaaaatggtataaataggaggaattataattgatatttcttgagttagcatgtttcattggctatctttatg

SEQ ID NO: 824157 - DNA, 120 bp, Artificial Sequence
  ENSG00000260072_44 (sequence is synthesized)
gaggtccagaccctcctccgaaggtggatattactgttccgatttcaattggtcaaatagagaccaagagactttaggcaacttgttttagatttggcactgaatggcgggaaagtgcag

SEQ ID NO: 824158 - DNA, 120 bp, Artificial Sequence
  ENSG00000260072_45 (sequence is synthesized)
attttctgagtactatgtctgggctctttgctataagcactattgatttgaatggataagaacagaaaagtcctttgctcagaggagaatcagggccactgtatcagtcagggtccaatc

SEQ ID NO: 824159 - DNA, 120 bp, Artificial Sequence
  ENSG00000260072_46 (sequence is synthesized)
aagaggcagaaactataccagttatttaatttcatttatttatttattattattttttagagatgtggtcttgctgtgttgctcaggctgttctcgaactcctgggctcaagcaatccac

SEQ ID NO: 824160 - DNA, 77 bp, Artificial Sequence
  ENSG00000260072_47 (sequence is synthesized)
tacaggtgtgagccactgtgcctggccccgtaccagttattttaacagagagaatttagtatggcccaggccaggga

SEQ ID NO: 824161 - DNA, 86 bp, Artificial Sequence
  ENSG00000260072_48 (sequence is synthesized)
agcagggaggatcacttggtgagagtccacttaagaaaaagaatttaatataaagaacttttttcttttcttttttttttttttga

SEQ ID NO: 824162 - DNA, 86 bp, Artificial Sequence
  ENSG00000260072_49 (sequence is synthesized)
gttgcccaggctggagtgctgtggcgtgatcccagctcaccgcaacatacgcctcctggaatcaagcacctctcccctcgctaaca

SEQ ID NO: 824163 - DNA, 65 bp, Artificial Sequence
  ENSG00000260072_50 (sequence is synthesized)
tgatcccctggaattgttaactaggaatcaagttgataaccaggcaactaaaaaggaaaaaaaaa

SEQ ID NO: 824164 - DNA, 120 bp, Artificial Sequence
  ENSG00000260071_0 (sequence is synthesized)
acaggaagtaggacagagcaatggagggaagccagatttaatgtcagaagtctggaccatcaattttatcccttcccattgcctccttttaaattttagtcaattcaataaatattttca

SEQ ID NO: 824165 - DNA, 120 bp, Artificial Sequence
  ENSG00000260071_1 (sequence is synthesized)
actcctcgtctgtaccaggcaccaagccacagaatggagttctggcaatgaacactgcagacatggccgcctttagcctcatggagcttagggtctgggagcattgtcagtttctgaatc

SEQ ID NO: 824166 - DNA, 120 bp, Artificial Sequence
  ENSG00000260071_2 (sequence is synthesized)
ctccaagtgctaaactatcttctctcttcaaattagagaaaagaaatgagacagcaggcctgcttctttgagtgtttttttcttttttgtttccgttttctgacaaccatacttcacgtc

SEQ ID NO: 824167 - DNA, 120 bp, Artificial Sequence
  ENSG00000260071_3 (sequence is synthesized)
tgacagaggaaatgattctttttgtcagtgataaatttatgagttttgactgtttgtgaagttccctaattaattctttatagacttctattggcaactgaatttgtgttttgagttaaa

SEQ ID NO: 824168 - DNA, 120 bp, Artificial Sequence
  ENSG00000260071_4 (sequence is synthesized)
aatgggagttcagatgaattacagttgaacattctgctccctttgaagagctcatactccacattctacgctgttaatctctctgcttactgagaggcaccgtttgtcttgcagtgacgc

SEQ ID NO: 824169 - DNA, 120 bp, Artificial Sequence
  ENSG00000260071_5 (sequence is synthesized)
acggtgggtggttaccatggcataggaaaacattgccagcgctggccctgtcgtcatggaacccctgggccatctcctgagaaacttggttggaataaatgcagatgctgcaaattgatg

SEQ ID NO: 824170 - DNA, 120 bp, Artificial Sequence
  ENSG00000260071_6 (sequence is synthesized)
gaggcctggtgtcttccagagtggaggtaaaggctggctgaggaatcagtgaggccaggaagagggctcagctgagcaactgatcaaagcatccctcttcaggaaggagcttcctgtgtt

SEQ ID NO: 824171 - DNA, 120 bp, Artificial Sequence
  ENSG00000260071_7 (sequence is synthesized)
ttctctgggaactcacctgttttccactccagactctccaagatatgcagagctttgggccaggatcctacagccacgggtcatgcagagccagttggccacatcctttgggccaaattt

SEQ ID NO: 824172 - DNA, 120 bp, Artificial Sequence
  ENSG00000260071_8 (sequence is synthesized)
tttcatgcgtaagatgtttcatgaagtaactgaatgggctaatgggttgttcactggataagactcccagatactccctttcatgccattccccagaattccttcacctcccagtgctgt

SEQ ID NO: 824173 - DNA, 120 bp, Artificial Sequence
  ENSG00000260071_9 (sequence is synthesized)
ctgtaagggtgaagatactccattttgccccatgctctttgctgtgccccagataggctcaaacatttttcccttttggggattttgcaggtaggaattgttgaacatcttaccatttaa

SEQ ID NO: 824174 - DNA, 120 bp, Artificial Sequence
  ENSG00000260071_10 (sequence is synthesized)
tccagaagttatgtcctttaaggaatcgaccctgagcctgtgagttttactttgggttgggggtgaaggagtggaccttgcagcattcaaggtcatccaagatcatccagttaaggcccc

SEQ ID NO: 824175 - DNA, 120 bp, Artificial Sequence
  ENSG00000260071_11 (sequence is synthesized)
taaggtcactacggggggaaaagcctggtgagggaagagaaagcattagggggagctgcaccgtgctgagaaataacaccacacagaagtctgtgttctaatctcagctctgctttgcat

SEQ ID NO: 824176 - DNA, 120 bp, Artificial Sequence
  ENSG00000260071_12 (sequence is synthesized)
tactgtgtgacctggagctgatcacagccctctgagtcttaaaggggttggacaaggccaactaaacattagaaacacctgaaagtgctggttaaaaggaagaatgcatgagcttcactc

SEQ ID NO: 824177 - DNA, 120 bp, Artificial Sequence
  ENSG00000260071_13 (sequence is synthesized)
cagatttactatatcagaatttccagggtcagggtccaagaatctgcatgtttaatacgctttccacatgatttttcccccctctggacttaagaaaacaatgggcaagtcagctcatga

SEQ ID NO: 824178 - DNA, 120 bp, Artificial Sequence
  ENSG00000260071_14 (sequence is synthesized)
agaacttttcagatattcagactattattctgagagagaaaatattggcagagaacagatgggatttttctcaaggaaaagaaatggaaatcctacatcttgcaagaaatagaaaaaaat

SEQ ID NO: 824179 - DNA, 120 bp, Artificial Sequence
  ENSG00000260071_15 (sequence is synthesized)
aaataaactgtttgaagaagaatcacatcaggctggcaggagagagcctgcggctcggtgtctgacccagaatgttaaagccagcctggcttggctccaggataaaggacactctgtcag

SEQ ID NO: 824180 - DNA, 120 bp, Artificial Sequence
  ENSG00000260071_16 (sequence is synthesized)
cctctccacattgattcatctccccagccccaagatcaggagagcattctgttccttgaagcattttatgactgtaagtcagaagtgctgcagttttaataaaaagctgtattgtcctga

SEQ ID NO: 824181 - DNA, 120 bp, Artificial Sequence
  ENSG00000260071_17 (sequence is synthesized)
actgtcttcgtctctcaggtgggggaaaagggatatagaagcatatagtctaagctgggagttaaaaacactaggttaaaatcctagctttgctactgaatagctgtgtgaccttaggca

SEQ ID NO: 824182 - DNA, 120 bp, Artificial Sequence
  ENSG00000260071_18 (sequence is synthesized)
atttacttaacctctctgagtctctgtaaaatggagggaaaaaatgcttctctggaagagtggttaaatacttgaaagaggcaatgtaactgtcttatgcctagagcatagtaggtgctt

SEQ ID NO: 824183 - DNA, 120 bp, Artificial Sequence
  ENSG00000260071_19 (sequence is synthesized)
aacaaacagtagcttatttctggcattataattagatgaggggaaggtccctcctagcacagaccctggaagattctatgactcagggagtgggcagattgcatccatggtccctgccct

SEQ ID NO: 824184 - DNA, 120 bp, Artificial Sequence
  ENSG00000260071_20 (sequence is synthesized)
catttgtagctacctgaagggcctgtctcagcaataaaaacagccaagtgagcacaggcagagaaacatcatttcctcctcctcttgagggcaggagtccaggcgcagccccagcagcag

SEQ ID NO: 824185 - DNA, 120 bp, Artificial Sequence
  ENSG00000260071_21 (sequence is synthesized)
cccaggagaggctggtgcaggaaggctcagacactgtgttctctgacataatttatgggcatgaagaaggaggaaaaggatgcaggaaagaatttaagaggcaaagtggatgtgataaag

SEQ ID NO: 824186 - DNA, 120 bp, Artificial Sequence
  ENSG00000260071_22 (sequence is synthesized)
gaacgagaagatcatgagaaaagatgaaaaagagaacagtgactgacccatgtcatgaagcatcagtttctaaactttgctgtatgcaggctcaatggcatccctcttcaggaaggagct

SEQ ID NO: 824187 - DNA, 120 bp, Artificial Sequence
  ENSG00000260071_23 (sequence is synthesized)
tgtcaacctaatcacatccacgttaaaggtaagaagaaggagagaaggggtagggccaatggaggaatactgttttgttaagagagaaaagactttcttgagacctctttgtagatttct

SEQ ID NO: 824188 - DNA, 120 bp, Artificial Sequence
  ENSG00000260071_24 (sequence is synthesized)
gcttgtgcctcagtagctgagctgtgttatgtggtcactcctagctgcaatggaagctgcgggggagaacatttgtcatctgtgtcgtttatagtgtaaatgagcagaaaagaaggggat

SEQ ID NO: 824189 - DNA, 120 bp, Artificial Sequence
  ENSG00000260071_25 (sequence is synthesized)
gagaatgagtgctaggtcagataaccatagtatctgtcacaccattaagtaatgttacactattgaaagagacacacatggagaattacaatacagagtgctaaataatttcatatacac

SEQ ID NO: 824190 - DNA, 120 bp, Artificial Sequence
  ENSG00000260071_26 (sequence is synthesized)
ccacaaatgtaatagggactgaaaagggaaaatttaattccctgttagagttcagaatatcattacaatgcattcattattaaggctatttgagcatggaaatgcaggtgtgtaaataca

SEQ ID NO: 824191 - DNA, 120 bp, Artificial Sequence
  ENSG00000260071_27 (sequence is synthesized)
gactaacacacttgacaagcaaaatgaatcatagaaagatttgagaattatcatggtggatcaattactgcttaaaagtatccactctctccctcccaccttcatgctcgctgctcacta

SEQ ID NO: 824192 - DNA, 120 bp, Artificial Sequence
  ENSG00000260071_28 (sequence is synthesized)
gactgatgggaccaatgttgagtttgaccatgtggcttgctgacatcatgataggctatgtgcacttttctgcttcttgactttggactcagcatgtggcttggccaatgagatcgtagc

SEQ ID NO: 824193 - DNA, 120 bp, Artificial Sequence
  ENSG00000260071_29 (sequence is synthesized)
cgtaatgatgtaagcagagaagcttgaaatgcatttggaagaggcgcttcctttcagtcactgctggaccttccacttgggctccagaatggacacacctggagcagatttgcaccaaac

SEQ ID NO: 824194 - DNA, 120 bp, Artificial Sequence
  ENSG00000260071_30 (sequence is synthesized)
ctacagtgagcagccaagcccagctggtcccaggctggaatacaagctgctcggctgagcttagctaactcccatccaacctaacagaaacatgagtgagaataaatgattgttatttta

SEQ ID NO: 824195 - DNA, 120 bp, Artificial Sequence
  ENSG00000260071_31 (sequence is synthesized)
aattactgagttcaggatggcttgttacacagcaatagctaactgatacaaacacatactgtaaaagtgcatgtgttcaaaacccacaaattcagaacctatgttgacaggatgggttat

SEQ ID NO: 824196 - DNA, 120 bp, Artificial Sequence
  ENSG00000260071_32 (sequence is synthesized)
tcatttttaaataaaatatgataaatttcaacacaatgtagtatgtttaaaaatgcaagtgaagacaaaatatggagctataataagggagaggactattgattctatggaggaagggag

SEQ ID NO: 824197 - DNA, 120 bp, Artificial Sequence
  ENSG00000260071_33 (sequence is synthesized)
gaagaactagcagggacataaggcttcttggaggagaggagcatctgaattgccattttaaagttcagtagaagatcaccgacagagagaaatagggagagagtgggaacagaaggatta

SEQ ID NO: 824198 - DNA, 120 bp, Artificial Sequence
  ENSG00000260071_34 (sequence is synthesized)
atattatgtacagtttcgaggcaaaaaggggcacactaaatgtggggaaccattagcaattcaatattaccagaaggttagtggtgagggacaatgtgtctaaaatctcttgagagggtc

SEQ ID NO: 824199 - DNA, 120 bp, Artificial Sequence
  ENSG00000260071_35 (sequence is synthesized)
tgctatgcgaggccaaggcacttttcttttgcctaaccataaggacaatggagagcaatgtagatcactggcatgttttaatgtattcaaattagtaataattctattggtaacagctaa

SEQ ID NO: 824200 - DNA, 120 bp, Artificial Sequence
  ENSG00000260071_36 (sequence is synthesized)
catttattgagtgcttactaggtgcaaaacactgggtcacgtatatgtattcttcacaacactaaaagacaggtattattattattcccatttaacagatgaggaaactgaggcctagag

SEQ ID NO: 824201 - DNA, 120 bp, Artificial Sequence
  ENSG00000260071_37 (sequence is synthesized)
tcagagtgaggatttgaccaaaactgctcaactccggattcttcctccccaaccactgctgttcctgattctctatatagcagattgaggagttggccaagtcactcaggaaattattca

SEQ ID NO: 824202 - DNA, 120 bp, Artificial Sequence
  ENSG00000260071_38 (sequence is synthesized)
acaaacatattggaacgcatattcctaatgttacaatttcaacatactttatagactcttgttacatggaagtcactgcgccagtcaatgaagacttcaagtatgaagaggacttgatct

SEQ ID NO: 824203 - DNA, 120 bp, Artificial Sequence
  ENSG00000260071_39 (sequence is synthesized)
ttgccgttaagaaatttgagtgacagaaaatcaatgcttagtgccaacaacttttgtctgttcattaaagtaggttctatgaggcagtggctctatgaggcagtggctcctgagcttggc

SEQ ID NO: 824204 - DNA, 120 bp, Artificial Sequence
  ENSG00000260071_40 (sequence is synthesized)
tctgggtcaaagtacctgagtaacggagttaaaaaaattttttttaatacaaagcttccaggtaccatcccagatcaactggaaaaagatctctagggtggggatcttggaaacccctct

SEQ ID NO: 824205 - DNA, 120 bp, Artificial Sequence
  ENSG00000260071_41 (sequence is synthesized)
cccttcctctctcctgttctttctctctctttctttgcacttcctaggtcattccatagtctctgtgaaagtgatattatccctgttggtcctcctcagactctccaagatatgcagagc

SEQ ID NO: 824206 - DNA, 120 bp, Artificial Sequence
  ENSG00000260071_42 (sequence is synthesized)
ttcagagagggaggaggagagagaaggagggagggaagaaaggagagagggagagagccagaaaacagagcaagataaaggaagagaatgcacctgaaatagacacaaggataaatggat

SEQ ID NO: 824207 - DNA, 120 bp, Artificial Sequence
  ENSG00000260071_43 (sequence is synthesized)
ggcactgggattacaagcgtgtcctgaccttcacgttctatcaggagagacagtctttgaacatgatttcactcatacaggggcatgaagaaggaggaaaaggatgcaggaaagaattta

SEQ ID NO: 824208 - DNA, 120 bp, Artificial Sequence
  ENSG00000260071_44 (sequence is synthesized)
gttaatatttcatgcgaattgttgaacatcttaccatttaatccagaagttatgtcctttaaggaatcgaccctgagcctgtgagttttactttgggttgggggtgaaggagtggacctt

SEQ ID NO: 824209 - DNA, 120 bp, Artificial Sequence
  ENSG00000260071_45 (sequence is synthesized)
tatgagtaatggagactcattcctcttcaccaacccctggaccacttctcttaggagctcttttctgttaggatgagtataggccctaaagtggcctaccccacagaccctctggacatg

SEQ ID NO: 824210 - DNA, 120 bp, Artificial Sequence
  ENSG00000260071_46 (sequence is synthesized)
ggaccgtccttcccccaaatcaaaatgccagaaatcataccacttccagccttgacaaagcagctggctttgggttagcctccctgctttaaaaaagtataaaactaaacaaaatttatg

SEQ ID NO: 824211 - DNA, 120 bp, Artificial Sequence
  ENSG00000260071_47 (sequence is synthesized)
cttctagtcactgggtagtaagcagcccaagactgtgatcctggagtgtgggaaactcatgaagtaagacccacatcagtgtggtattggctgggacaatctttggatcacggtgcagag

SEQ ID NO: 824212 - DNA, 120 bp, Artificial Sequence
  ENSG00000260071_48 (sequence is synthesized)
agttggagcctgggtaggaagtagcagtgctactgatctgatgaggcagagatcagagatcaggactgctgaagtggctggaagctataaggcagggcactggaaaggagggagctgaac

SEQ ID NO: 824213 - DNA, 120 bp, Artificial Sequence
  ENSG00000260071_49 (sequence is synthesized)
agagaaatctcagtaagtctctgtagggattctaaaggattccttggctgagggatgcacatgtgcagagcaaaattatgcaagacttaccagtgagtcactgtcatgggctgacagaag

SEQ ID NO: 824214 - DNA, 120 bp, Artificial Sequence
  ENSG00000260071_50 (sequence is synthesized)
ataatactgcaggttaatgagtactaggagatgtgagagttgtggtctacccacagttgagaaaccttgttaacatgttggtcatccagatgagaaaccaggaaaaatactcctatgatg

SEQ ID NO: 824215 - DNA, 120 bp, Artificial Sequence
  ENSG00000260071_51 (sequence is synthesized)
tgggaatatattatagagcaaggtcttctctggatcttctctaacaaagcttaaaatctagcctggcaaaatctgcagagacatcaacatttggagtttgaggggcttaggaaaaacctt

SEQ ID NO: 824216 - DNA, 120 bp, Artificial Sequence
  ENSG00000260071_52 (sequence is synthesized)
ggggattctatagatctactttaacaaagcataatgccaagactacacatgttaaaggtgattcctcagtaactgatcctccttagagaataaaaatcaacattctttagagtgaaagaa

SEQ ID NO: 824217 - DNA, 77 bp, Artificial Sequence
  ENSG00000260077_0 (sequence is synthesized)
cagcattccttctgcgtggaacatgccaaccctcgtctgctttgactttgcaaaactgcatgagagaggccgaggca

SEQ ID NO: 824218 - DNA, 120 bp, Artificial Sequence
  ENSG00000260077_1 (sequence is synthesized)
tgcatatgactccccagtgaagccctccctgattggcctctgcagaaggcagcatgcccgggctttggagtcagacctgcatacaaatccttgttttgccggtgtgaccttgccaagtct

SEQ ID NO: 824219 - DNA, 120 bp, Artificial Sequence
  ENSG00000260077_2 (sequence is synthesized)
tctttcctgcaggacagaaggcggcagcagctctccctgaactggcactctggcttctcttgccccagggtctgtttctgctccttggacagcaggcgcatgtgggaactgtgccctctt

SEQ ID NO: 824220 - DNA, 120 bp, Artificial Sequence
  ENSG00000260077_3 (sequence is synthesized)
cagccatgagcccctgttctgcgcacatctagcccatcttccagatggacagacagtctgtggtcgtcgccaaacccctgaatctggccctgcccgcagtcagagggatggcaatttgta

SEQ ID NO: 824221 - DNA, 120 bp, Artificial Sequence
  ENSG00000260077_4 (sequence is synthesized)
ttgcgaatcattcacttggagactgaactaagactactggcaccaggctccgtagaccctcgggaagagcatggtctggcaggcagactggatgtggccacagataacatcccctaaggg

SEQ ID NO: 824222 - DNA, 120 bp, Artificial Sequence
  ENSG00000260077_5 (sequence is synthesized)
gagagcgtgagcctgcaggccagaatgccaccactttctcctgtgtcgttccagagagagcctgtggctatgcacgcttgctgctacagagggtagtgctgtatacctcctgggctcact

SEQ ID NO: 824223 - DNA, 120 bp, Artificial Sequence
  ENSG00000260077_6 (sequence is synthesized)
tactgacttttcagtctaagggcttattgcaattggtacataacgatcatactttgtaatggttaagtaatattccatcatatggatgtgttgtttatttaacattctggttgaataacc

SEQ ID NO: 824224 - DNA, 120 bp, Artificial Sequence
  ENSG00000260077_7 (sequence is synthesized)
aagacttttaggtttccagttttccaggaacatcatgcccctccatcatttgcccacctggaaggataactacaggataagcagctcttagaactggaattgctgagttaactgctctgt

SEQ ID NO: 824225 - DNA, 120 bp, Artificial Sequence
  ENSG00000260077_8 (sequence is synthesized)
gcatttccttgctttttcttgcttttcttttctttcttttattatttttttgggtaaatttttattgaactatagcatagcgtagatacaggaaagtgtaaaaacttaaatgtacaattc

SEQ ID NO: 824226 - DNA, 120 bp, Artificial Sequence
  ENSG00000260077_9 (sequence is synthesized)
aatgaattttcgctaggcaaacactgtgtcaccagcacccagatttagaaacagaatattaccagaatcccaaaagccccatgagctgccgtccagtcactacttaccgtttccctgatc

SEQ ID NO: 824227 - DNA, 120 bp, Artificial Sequence
  ENSG00000260077_10 (sequence is synthesized)
ccctgcataggataatccttatcatggcttctgacactttcggttggttttggatgtactgacactttttgtgtgtgtgtgacacttttataatacaaagaaaatcatacagtatgttca

SEQ ID NO: 824228 - DNA, 120 bp, Artificial Sequence
  ENSG00000234928_0 (sequence is synthesized)
ttagtgtcaaacacacaagatctacaaagccataaactcacagcttggtgatattaccaagtactaattaagaaagaaaaaagaaaattccctttcatgatcaaattttgagccctgcca

SEQ ID NO: 824229 - DNA, 120 bp, Artificial Sequence
  ENSG00000234928_1 (sequence is synthesized)
gccgagaccatctgcactgcgagggaagcagcgcccaccttccttggtggtccgggaaggccggaccggccccttgggtccccactggcctcagccactgtgggctcgtccagcttcagg

SEQ ID NO: 824230 - DNA, 120 bp, Artificial Sequence
  ENSG00000234928_2 (sequence is synthesized)
tcttagtggcatctggggtcgaggagggcgactgtcagccagttgggggatgttttcttcttggtctctcggcttctgcttccctgtgagctgggcagcctcagcccaggtcctatccgg

SEQ ID NO: 824231 - DNA, 120 bp, Artificial Sequence
  ENSG00000234928_3 (sequence is synthesized)
tactcagctggcctcggtgtgcacagcgcaggcttgagtgcagccgtgggggcgggcggggcagaagcagggcccctgggaacagctgagtctgaagggtcagaagccacggcccctgtg

SEQ ID NO: 824232 - DNA, 120 bp, Artificial Sequence
  ENSG00000234928_4 (sequence is synthesized)
gggggctctggggcagccaggggagctgctcgttagtcgtctctggggcagaaggaagggaccttcacctgggttgggactgggcctgggtccccagtctcacagggagctcgtcctgat

SEQ ID NO: 824233 - DNA, 120 bp, Artificial Sequence
  ENSG00000234928_5 (sequence is synthesized)
agaggccaggccgaggtcaggaggctcagcagctggttccatgacttcctcttcgctgaggaggtcaggacagaagcttctagatgacaggccgcccaacttggtataaaacagcaaatt

SEQ ID NO: 824234 - DNA, 120 bp, Artificial Sequence
  ENSG00000234928_6 (sequence is synthesized)
tctgtgcctgtgctgtcgggctgtgaatgacttctcgtctgtttcatgagatgcagcttcagcccagggagccatcagatgcagccgggcgagacgcggagccaagagctgtcctcgccc

SEQ ID NO: 824235 - DNA, 120 bp, Artificial Sequence
  ENSG00000234929_0 (sequence is synthesized)
agtgtaggagtgacttcccacaaagtgttaagcgacagtgagacgctggcggttttccagggcactgaggccgtgggcaggctggctggccccaccaggggaagtgtttgcagtcctggt

SEQ ID NO: 824236 - DNA, 120 bp, Artificial Sequence
  ENSG00000234929_1 (sequence is synthesized)
cgatgggcacacaagattttctagatggctggtttctctctggataccattatttgctcaaggttgagatgcatgcctgcggctgaaccctgatcatggtaacattgactcacctgagac

SEQ ID NO: 824237 - DNA, 120 bp, Artificial Sequence
  ENSG00000234929_2 (sequence is synthesized)
agggagctcatggactgcagccacacaagccaaacaagccctgccatgaacccggggggcaggccgcatgccagagctcccaaggaagctgagaacaggagcactacctgcatttccggg

SEQ ID NO: 824238 - DNA, 120 bp, Artificial Sequence
  ENSG00000234929_3 (sequence is synthesized)
ggcaaacgcagccctgaccgcaactgccgctcacaccacagtgaacaggacaccagctcagccaaagcctgtctcaccgcacatcaaggctgaaaagaggtggcctctgtgatcatgtct

SEQ ID NO: 824239 - DNA, 120 bp, Artificial Sequence
  ENSG00000234929_4 (sequence is synthesized)
gagagagagagagagagagattgatttcagagaattttttcactcctttgtggggctgggaaatctgaagtctgcagaccagcaggctggaaattcagttttccagctctgcccccgtct

SEQ ID NO: 824240 - DNA, 120 bp, Artificial Sequence
  ENSG00000234929_5 (sequence is synthesized)
ttgccactaaatctgcagtgtctattgctggccgtggtctccccgctccagacgcctttctgcctgcattgaggagagagacactgaccctgatgggaagcttccacacatgtgcagggg

SEQ ID NO: 824241 - DNA, 120 bp, Artificial Sequence
  ENSG00000234929_6 (sequence is synthesized)
gcccgcccgtggtgaggtctctgcagcatgatggggctggaagctggcggctttgttgtggttatctataaatcttctgtttgggaacagccaggccttttcctgagtggtcaagatttt

SEQ ID NO: 824242 - DNA, 120 bp, Artificial Sequence
  ENSG00000234929_7 (sequence is synthesized)
actcatgtgctcccacaaagaaatccttaacctcactccttagtcgtgcctcctggttaagattcactgcgatggccatccctccatgtcccctatttcctgacagcagcctgggctgag

SEQ ID NO: 824243 - DNA, 120 bp, Artificial Sequence
  ENSG00000234929_8 (sequence is synthesized)
agcctctgacccccacccacagtggcctgacagcagcttttctcaaagctcccccgccgctcagattctggacagcgttgcacccgggactgggaaatggagggcatgctctgctgtggg

SEQ ID NO: 824244 - DNA, 120 bp, Artificial Sequence
  ENSG00000234929_9 (sequence is synthesized)
aataactcagccccagaggagagccaagggtgaggcagcctcaccggagacagcagtcctgctgagaaaccctggtcactgggaactcacaaaggacccaggtatgagaccagatgttga

SEQ ID NO: 824245 - DNA, 120 bp, Artificial Sequence
  ENSG00000234929_10 (sequence is synthesized)
accctgtgaccatgaagagcgactatccttgtccccagcagtctggacagagctctcctccgctctgagatgagatcttcaggtggcctctggctctctcctgaccgacctccacagctg

SEQ ID NO: 824246 - DNA, 120 bp, Artificial Sequence
  ENSG00000234929_11 (sequence is synthesized)
tctgcctccagagaggagtgtgcaagagaagaggtctggtgtgtgtgcatggctgcacactctcaacagcacaaggcacccctcggccaccaggctgtgggaccccgagagagataggta

SEQ ID NO: 824247 - DNA, 120 bp, Artificial Sequence
  ENSG00000234929_12 (sequence is synthesized)
gggctgcctctgtgtccactggagggatggtgagggcaggtgtgtggtcaggagctgctgagaatgctgcagggtggggggcccagctctgcaggaggagccgtaaggggaagcttcccc

SEQ ID NO: 824248 - DNA, 120 bp, Artificial Sequence
  ENSG00000234929_13 (sequence is synthesized)
agggagcaggggtttgaactgagccttcaaggacatgttttccaggcagagagaagcagtttgcaaataacacacctatgaaacatggggtgtgcttgagaaacaaagcttgggtgtaac

SEQ ID NO: 824249 - DNA, 120 bp, Artificial Sequence
  ENSG00000234929_14 (sequence is synthesized)
tgggacttgcactgtgctcctgggtggtgcaggaagggctgccactctcccagttcctgccccacaccccttctgcctctgcttctgctctcgcttctcctcccctgccactgaccctcc

SEQ ID NO: 824250 - DNA, 120 bp, Artificial Sequence
  ENSG00000234929_15 (sequence is synthesized)
tgcctctgtcccctctaagggccctagtgattgcctcgggccacctggctgatccaagtgaatctcctgtctcaagactgtagcagaagcatgtctgccaagttccctttgccacaggag

SEQ ID NO: 824251 - DNA, 120 bp, Artificial Sequence
  ENSG00000234929_16 (sequence is synthesized)
gtgacatatttgcagtttccagggattaggagctgaacgtcattgagggccattactctgcctccagggctgtgtgtgaagcaactttgacggcaaatacagaatgcacagagcaatgca

SEQ ID NO: 824252 - DNA, 120 bp, Artificial Sequence
  ENSG00000234929_17 (sequence is synthesized)
cctgcttgttcaccaacactgtgaacacagtgccaactgcctttttctttcccaaactgtcactgaatttacactaacagggaagaatgaagtaggttacacactgatgacacagcacac

SEQ ID NO: 824253 - DNA, 120 bp, Artificial Sequence
  ENSG00000234929_18 (sequence is synthesized)
caagccaagacatcggcctacctcgtgtctgcaagaattagagcgagagaaggacccacggtgccatctttggggcagagcctttgcccttcccccagtgacatctcactccatttacag

SEQ ID NO: 824254 - DNA, 120 bp, Artificial Sequence
  ENSG00000234929_19 (sequence is synthesized)
tggcagagaggcactgaggcatggcgtccacattgtgacactgtgtgctccaggaacgtcagtgatgagctcaaggtcaccaagcccagcaagagactgcaagtgaggctccctgcttcc

SEQ ID NO: 824255 - DNA, 120 bp, Artificial Sequence
  ENSG00000234929_20 (sequence is synthesized)
cccagcaagagactgcaagtgaggctccctgcttcccaggggagccacagtcatcaaagccccgcacattttgctctcaaaaaaattttttttgatggagttttgctcttgttgcctagg

SEQ ID NO: 824256 - DNA, 120 bp, Artificial Sequence
  ENSG00000234929_21 (sequence is synthesized)
tgttggccaggctgctcttaaatttttaagtgactttcccctgccgtgacatgtaatcgtggaaggaatattgttctgggctggtagaacgctctgtgttttgatcccatgcctgccctg

SEQ ID NO: 824257 - DNA, 120 bp, Artificial Sequence
  ENSG00000234929_22 (sequence is synthesized)
ctggaggtggtcatttgggaggattaaatgggaccgtgcctgcagagctgcggccacaatgccccttgcttcttgagcagagctgaacagatgccagctccttccctccggcaggcctgc

SEQ ID NO: 824258 - DNA, 120 bp, Artificial Sequence
  ENSG00000234929_23 (sequence is synthesized)
gctcttcagagctcgcctctggcggcttctgcgggaggctgatgctggtgaggaatggtgtttcctctccacctgcagatttctgctgctcccctcccagaatagctcaagtaggctgtg

SEQ ID NO: 824259 - DNA, 120 bp, Artificial Sequence
  ENSG00000234929_24 (sequence is synthesized)
acctcagcgagcacccttgagagactctcgaggcgccttgagaagtcgcacacgaggctgctgcatctgggctggatccattattcatgcacgcaggtctcggcaagcacagtaatttag

SEQ ID NO: 824260 - DNA, 120 bp, Artificial Sequence
  ENSG00000234929_25 (sequence is synthesized)
agtttctcgaagcgcacgctgcagcaaccataaactacgttctgtgtgcttcagggaaaaattacctttcccttgccgaagccaggggtcatggcagaaagctcacacagatgaagcaag

SEQ ID NO: 824261 - DNA, 120 bp, Artificial Sequence
  ENSG00000234929_26 (sequence is synthesized)
gggccgaggaggagatggaggcggtccagacctttcagaaaagcgcttggagaccccacgctgggaagccgcccccgatcacctgcatgacctctgcagcctcagctttctccctgggaa

SEQ ID NO: 824262 - DNA, 120 bp, Artificial Sequence
  ENSG00000234929_27 (sequence is synthesized)
ataagtcaccgaggtccgcaggtgcacccctctccactctccctgctcctcccatgaccccctgggagtaacttactgttcccccaaatcatctcagtagatgatgcatgcctatctccc

SEQ ID NO: 824263 - DNA, 120 bp, Artificial Sequence
  ENSG00000234929_28 (sequence is synthesized)
gttgtttcaggaaccaaaaacagtgcatgtactgcccctggcacatggagacaagaatacatctcacacgtatatttatctccatcttcatagctcccataaaaaagcatagcttttatg

SEQ ID NO: 824264 - DNA, 120 bp, Artificial Sequence
  ENSG00000234929_29 (sequence is synthesized)
tcttcagagaatgtaagtgcagaagcgcagatttctccagaaaacatagcactgagaaagcaaatgagcaaatcctcacaaacaccactcatgctaaaggggtggagataaacataaata

SEQ ID NO: 824265 - DNA, 120 bp, Artificial Sequence
  ENSG00000234929_30 (sequence is synthesized)
aaaatgaaagaaaggcagcagcagccagttttaggtgctggaatgcaatgaggacaaagcaccttgaggaatctgtgaggtcagtgctagcttctcactctatcttttgctttctgaaca

SEQ ID NO: 824266 - DNA, 120 bp, Artificial Sequence
  ENSG00000234929_31 (sequence is synthesized)
tgacagatccggcgtggctgcatccccctcctcagctgcagcgccggcttctcatttctattctccccaaagcccagcttctctgcagaaatgaaggatgtggctccacagtgagcaggc

SEQ ID NO: 824267 - DNA, 120 bp, Artificial Sequence
  ENSG00000234929_32 (sequence is synthesized)
gggctgtgtgtgagctgggcggcagctccagccatcccaggacacacggggatctctcaccatgcgggtcctctgtggccctgtgcccgcctcctgcctggccagagccacacagagctg

SEQ ID NO: 824268 - DNA, 120 bp, Artificial Sequence
  ENSG00000234929_33 (sequence is synthesized)
ggtcctggggctctcagaggcttcctcttccatcaggcctgggctgcctcctctcttctggtcccctcaggacctggacctggtgctgtcttcaagctctccttatgtcatagttgttga

SEQ ID NO: 824269 - DNA, 120 bp, Artificial Sequence
  ENSG00000234929_34 (sequence is synthesized)
ctggtgacaagagcatctgtgtacgcgcagacccaagggagggttagggggctgcggcctgaacacgtggggccccagcaggttggtgatgccttctcaggcggcaggtggagttgagga

SEQ ID NO: 824270 - DNA, 120 bp, Artificial Sequence
  ENSG00000234929_35 (sequence is synthesized)
cacatgacaggctcctgctgcattcctgcccacgggcagtctccggattgtgtccctgtcagtgtgtgggacagtgacatccatggggcccaggatgagagccaagaccccctcctttag

SEQ ID NO: 824271 - DNA, 120 bp, Artificial Sequence
  ENSG00000234929_36 (sequence is synthesized)
tttcccaggctcctgcttgatctctgtcctgtctatacaaaaacagatcaacctatcaatggcccacctggtggcacacattgtgactgtaccaatgccaccgaattgttcacctgaaaa

SEQ ID NO: 824272 - DNA, 120 bp, Artificial Sequence
  ENSG00000234921_0 (sequence is synthesized)
tggcgtccctgtctgcagcgccgcgtctgtcgacttgtccacgcccgtgttttcctgccgtaagaggttgcgcctgaacttggctcgggcgttctggaaccagacctgcgggggacgaca

SEQ ID NO: 824273 - DNA, 120 bp, Artificial Sequence
  ENSG00000234921_1 (sequence is synthesized)
gggaagggctggtgagcggaaggcaggcagagcatccccccgactgcttcactcagagctctgctgcctctggggacgctgatctgtgttttgccaagaggatccaaaaagtcagagacg

SEQ ID NO: 824274 - DNA, 120 bp, Artificial Sequence
  ENSG00000234921_2 (sequence is synthesized)
agctgagctgtactcccgaatatcacagccacgagccacgtatggctgctgagcacttaaaatggcattagcccaaattcaaccagtctgcaggtgaaaacacacaacctatctgaaggc

SEQ ID NO: 824275 - DNA, 120 bp, Artificial Sequence
  ENSG00000234921_3 (sequence is synthesized)
aggctgaatatgaaaaaaaaagcaggtagaatatctcaataatttttatattgattacatgtcgaaatgattaatagtttggctatactgagttaagcaaaatacattattaaaattaat

SEQ ID NO: 824276 - DNA, 120 bp, Artificial Sequence
  ENSG00000228384_0 (sequence is synthesized)
gccgggctgccaggctcgacaggaggggcaggatcaggcgggaaggggttggggcggcgaaggccgggagcgccgggcagtggtcccccgagtggctccgaaacccccgcgatgcgaccc

SEQ ID NO: 824277 - DNA, 120 bp, Artificial Sequence
  ENSG00000228384_1 (sequence is synthesized)
agggggtcctcccatgacaggaattcctgatgagaagaaaaggtgcagctctctctgacaagctggctcctctcctcagaaaaaagaaagaaacaaagagaagaggatgacattgaatgt

SEQ ID NO: 824278 - DNA, 120 bp, Artificial Sequence
  ENSG00000228384_2 (sequence is synthesized)
atcagagaactaagaaacttctgccagcctgagcaacttctccagccagggcgacagagcaagaccatgtctcaaaaaaacaaacaaatgaaaaaagaaatttctggatgaggaggatgc

SEQ ID NO: 824279 - DNA, 120 bp, Artificial Sequence
  ENSG00000236272_0 (sequence is synthesized)
ggcccttgcccggccctggaaaagactcaggatgcagagagtattctggcattgagtgagaggcgggtttagcaccctctcagcccagaccctgggattctcagcttctacccaaacacg

SEQ ID NO: 824280 - DNA, 120 bp, Artificial Sequence
  ENSG00000236272_1 (sequence is synthesized)
gaatctcctaccagtggccactcccccaggggtggagaccacactcctggagtgggcgtgggccagagagcagccggcagcctggacggactcagggctgggctctgagcccttccatca

SEQ ID NO: 824281 - DNA, 120 bp, Artificial Sequence
  ENSG00000236272_2 (sequence is synthesized)
tcacaggcactgtgcttctcagggtgctgagaaccttccccgcggattctcttgggtgaaactcacagtggcctgggaagaaaggctcatggggagactgagctagcttcacagatggag

SEQ ID NO: 824282 - DNA, 120 bp, Artificial Sequence
  ENSG00000236272_3 (sequence is synthesized)
ttaagtggggagagggaggtaaatgcaaaagctctttgcaaacctaactgcatttggtaaattgaaaaagggctttctaaaccgtctgtggggcacataataaagttctttgtgtggagc

SEQ ID NO: 824283 - DNA, 120 bp, Artificial Sequence
  ENSG00000260921_0 (sequence is synthesized)
cacaaacctctctgcagaatgcttgggggaaatcagctgcggggggcacacaggacccactgatcagagtcatcgccagagattgatgcttacagagatgaaaagccctcaaccattgtc

SEQ ID NO: 824284 - DNA, 120 bp, Artificial Sequence
  ENSG00000260921_1 (sequence is synthesized)
accaggatcagagtattgaggaaactcagggatacctgcaccctccagtgtgtcatgtggagactcacctgggaatgcaagtggccaacagtagtgaagaggatgagcttgtgtggtcaa

SEQ ID NO: 824285 - DNA, 120 bp, Artificial Sequence
  ENSG00000260921_2 (sequence is synthesized)
gtgagtcaccttcctcaccagtagtgttagaaagaggctgtgaaagttgtcagaatcaaaatagatccacttgtgttaaaaccctgacaaatggaactaggaatgaccatgaaggaggtt

SEQ ID NO: 824286 - DNA, 120 bp, Artificial Sequence
  ENSG00000260921_3 (sequence is synthesized)
tcccatgcacatactcctgataacaagaacgaccatgaatggattctgcttaaccacaacctttgatagaagccaccatgaccttataaaaatcacatctacaaggacatcttcccagca

SEQ ID NO: 824287 - DNA, 120 bp, Artificial Sequence
  ENSG00000260921_4 (sequence is synthesized)
aatcactgtttaaccctatattgatgccaaccttggtattgactctacaagcaaggaaaatactctcaaaacaatttatgtaacccacctcattttcactaataaacctatggattgaca

SEQ ID NO: 824288 - DNA, 120 bp, Artificial Sequence
  ENSG00000260920_0 (sequence is synthesized)
ttattattattattatcattattattattgtagagacagtctcactatgttgctggactggtctcaaactcctggctccaagcagttctcccacctcagtctcccagtatgctgcgatta

SEQ ID NO: 824289 - DNA, 120 bp, Artificial Sequence
  ENSG00000260920_1 (sequence is synthesized)
attacagacatgagccaccgtgtctggccaggaacagcctgttatattacgtcagctttatgacagactcccacatttatctttacttttcccagttcactatgtgccagtgaaatttca

SEQ ID NO: 824290 - DNA, 120 bp, Artificial Sequence
  ENSG00000260920_2 (sequence is synthesized)
tggcgtgttagtgatctgtggattaacttttgagaaacactcttttaagtatccctttaataaatcagaataaaatatagtacagccttttactctagccctttatatggctagaagagg

SEQ ID NO: 824291 - DNA, 120 bp, Artificial Sequence
  ENSG00000260920_3 (sequence is synthesized)
tagaaattaaaatgttgcttctcatttctagaagaaaaaatgttaaagggagttttctagcattgatagataacttactgtacacgagatgcttatttatattttatggttttatataga

SEQ ID NO: 824292 - DNA, 120 bp, Artificial Sequence
  ENSG00000260920_4 (sequence is synthesized)
gcaagaattggcaaactttctgtaaagggccagatagtaaatacgttaggtgttgtgggccatgtggtccctgtcacacctattcaacttccccattttagtacaaaacagccagagaca

SEQ ID NO: 824293 - DNA, 120 bp, Artificial Sequence
  ENSG00000260920_5 (sequence is synthesized)
atatataaactacagtatctgaaccttggcactaccaatattttggaccggataatactttgctataggaagctgcccagtgcatcctgggatgtttaggggaatccttggcttctaccc

SEQ ID NO: 824294 - DNA, 120 bp, Artificial Sequence
  ENSG00000260920_6 (sequence is synthesized)
acaagatgccagcattcaatgctgatagctgcccctcccccagttgtgacagtcaaaaatgtctccagacatggccaggtgtacctagaggccaaaattgtccctggttgagacccactg

SEQ ID NO: 824295 - DNA, 120 bp, Artificial Sequence
  ENSG00000260920_7 (sequence is synthesized)
atgaatgtgtgcaatagtggttcccataaactgcatttaaaaaacagctgttaggtttcgtttggctcaagggctgtcatttttcactcctccccccatagagtatgtaaaatgattaga

SEQ ID NO: 824296 - DNA, 120 bp, Artificial Sequence
  ENSG00000260920_8 (sequence is synthesized)
aatgacaacagactatcatttagtatcagattagtgtgtgtatatgccataaattatttccttagcaattcctttagtatttttgttgcaataattctttaaacgctacatttgtaatgc

SEQ ID NO: 824297 - DNA, 120 bp, Artificial Sequence
  ENSG00000260920_9 (sequence is synthesized)
tgtcttggagcctaggaattatttttggagatatttatgcagacttccctctataatgatcggttttttattatggttaatccataaatattttgagatgtatctctaaaaaacgagcac

SEQ ID NO: 824298 - DNA, 120 bp, Artificial Sequence
  ENSG00000260920_10 (sequence is synthesized)
cacaattccttaaaacataatgatgcctttttgaagagagatatattgagacttcattctggggagaaacctttcagataactttatttaccttttcctttgccaagcatacaacattag

SEQ ID NO: 824299 - DNA, 120 bp, Artificial Sequence
  ENSG00000260920_11 (sequence is synthesized)
atttgaaatatgctttgtatcaagtggaagtgtctcttaagatagcccctagaacaacacatcaagaggcccaccaaagaggaccagagaaaggtgactgaaggagccatactcaggcag

SEQ ID NO: 824300 - DNA, 120 bp, Artificial Sequence
  ENSG00000260920_12 (sequence is synthesized)
ggaaatacggagagaaagcagaggaattggctcctaatgcttcactgtacttaatgaaatagatactccatccttacagacataattggaagtaagtcaagttcaacttctttgttttat

SEQ ID NO: 824301 - DNA, 120 bp, Artificial Sequence
  ENSG00000260920_13 (sequence is synthesized)
atggagatagaacagtttcaatcacgtgagtattataagtgtgaattatctaaagtaaagctataaatccagaatatataccagtatctctagaatttttcatattactacatttactta

SEQ ID NO: 824302 - DNA, 120 bp, Artificial Sequence
  ENSG00000260920_14 (sequence is synthesized)
aaaaaaaagctggcctctaactcttaagtcctgtatgactgatgggcagaaaaagagtgaggtatacactgtttcttaaaattgttctaccatgtttctatggtcttagatttcccaaga

SEQ ID NO: 824303 - DNA, 120 bp, Artificial Sequence
  ENSG00000260920_15 (sequence is synthesized)
atttgaatttctccaattgcttatttccctgaaagacatgactatgacttttctctgtagttcctgcctcagtgatctcatacagtctttggcttaaaataccgtctctgtttaacagct

SEQ ID NO: 824304 - DNA, 120 bp, Artificial Sequence
  ENSG00000260920_16 (sequence is synthesized)
gccagattcacatctccagcccagacctctcccgaactccagccttgttctaacctttgggccgtttcactagctgttgcagatgccctatacccttaccttctcatctttgctcaattg

SEQ ID NO: 824305 - DNA, 120 bp, Artificial Sequence
  ENSG00000260920_17 (sequence is synthesized)
ttgccttcttactgaagcctatcctgtccatactatttaatactgcagctgtctaccttccagatcgagaaatcccatacccctttcacctgctctatgtttttcatatcacctatcacc

SEQ ID NO: 824306 - DNA, 120 bp, Artificial Sequence
  ENSG00000260920_18 (sequence is synthesized)
ctagatacttcacatatttgtgtttattgtttactgttgtttcccctggctataatgtaagctccatgtgggcaggggcctttgtttttttcactgatatatcacaagtgcctaaaacag

SEQ ID NO: 824307 - DNA, 120 bp, Artificial Sequence
  ENSG00000260920_19 (sequence is synthesized)
tgcctgacacgcagaagggactcagtaaatatgtattgaatggttttgatttgaactgaattgaactatgtatccatgatgcaagtaaagaaatgtaatccatatactttcctacctaca

SEQ ID NO: 824308 - DNA, 120 bp, Artificial Sequence
  ENSG00000260923_0 (sequence is synthesized)
ctatgtgctgatggtggtcttacatttccctaagtttctgccgactaaactgtgcacacgttctcaggacctcctgaagctgcgtcacaggcactaatcaaagaacacaaccaagagttt

SEQ ID NO: 824309 - DNA, 120 bp, Artificial Sequence
  ENSG00000260923_1 (sequence is synthesized)
ttttcttcagcactgggaattgtgatccaaagcttttcctgatgaagcacaaagttggagaaaaaaaacgcaaactaaacaacaacaatgaaacagaacagagtgaatctgctgtagctc

SEQ ID NO: 824310 - DNA, 120 bp, Artificial Sequence
  ENSG00000260923_2 (sequence is synthesized)
gctcaagagaggacgtagctgcccccactccgcatccccgggctcgggtttgccttgctgacctctgctgccacctggtgccgcacagagaaactgaggagaaaccacatcagtctcctt

SEQ ID NO: 824311 - DNA, 120 bp, Artificial Sequence
  ENSG00000260923_3 (sequence is synthesized)
cagcctcagcttcacatctgtgggtcaagtaaccctttcagaagctgaataatgtgggaaagctttcctctcaggaaaatgcacacatccaactttgagaagatgcccttgggggcgctt

SEQ ID NO: 824312 - DNA, 120 bp, Artificial Sequence
  ENSG00000260923_4 (sequence is synthesized)
gggcgcttcaaggattctagataataaccccctttcccgaacatccaagaacctaagattttttttttttttttgagaaagtctcgctctctctcccagtctggagtgcagtggcgtgat

SEQ ID NO: 824313 - DNA, 60 bp, Artificial Sequence
  ENSG00000260923_5 (sequence is synthesized)
tggtccaagagcccaagttttagatctagagtgatgtcagcatgacattgatttcctgag

SEQ ID NO: 824314 - DNA, 120 bp, Artificial Sequence
  ENSG00000260923_6 (sequence is synthesized)
tagatctagagtgatgtcagcatgacattgatttcctgaggcccaggggcgaaggagctgaggacagcagaggggtgaaggaactcagctacagacagcagcagctgatgcacaggcctc

SEQ ID NO: 824315 - DNA, 120 bp, Artificial Sequence
  ENSG00000260923_7 (sequence is synthesized)
tcagctacagacagcagcagctgatgcacaggcctcccagcgcctgaagtcacccggaattgggaagtgctcagaagcttacaaagctgcctcgagcagaagaatcccagacttcttaga

SEQ ID NO: 824316 - DNA, 120 bp, Artificial Sequence
  ENSG00000260923_8 (sequence is synthesized)
tcctcatgctttcttctgccgtatccatcgttcaaacaaacatgaggcaaagctagacacattcctgaaggaacccaagaaattcctctctttctctctctggaatgaaatgaattctct

SEQ ID NO: 824317 - DNA, 120 bp, Artificial Sequence
  ENSG00000260923_9 (sequence is synthesized)
atccaagagcagatccctgatcctataaaaatgtactagatgcagtgggggcattttaaatgagcagagaaggacagacagataaacagaaggacaaacagtattgggattgggataaat

SEQ ID NO: 824318 - DNA, 120 bp, Artificial Sequence
  ENSG00000260923_10 (sequence is synthesized)
gctcagcttttgcccaaatcttagtgacttaagcatcacttatttgctcacgattctgtggctggaccatttggtttggctcacagggcagggactgtgctggtcttacctgagcagacc

SEQ ID NO: 824319 - DNA, 77 bp, Artificial Sequence
  ENSG00000260923_11 (sequence is synthesized)
tcacagggcagggactgtgctggtcttacctgagcagacctgcatgtctgcggtcaactgggttggcagagacagag

SEQ ID NO: 824320 - DNA, 72 bp, Artificial Sequence
  ENSG00000260923_12 (sequence is synthesized)
ttccagaaaacagaaatggataaggaagacccacagttgcaaagcaaatagaatttccaactgcctcttgta

SEQ ID NO: 824321 - DNA, 120 bp, Artificial Sequence
  ENSG00000260923_13 (sequence is synthesized)
acatgtctgaaacttggtatctggagaggtgagagggacaaaggagccgttgttactgcacgttttcattctccaaacttcaccttgcacacagtaacagacaatgcacaaagctacttc

SEQ ID NO: 824322 - DNA, 72 bp, Artificial Sequence
  ENSG00000260923_14 (sequence is synthesized)
ctcccagcgcctgaagtcacccggaattgggaagtgctcagaagcttacaaagctgcctccagacagaagaa

SEQ ID NO: 824323 - DNA, 120 bp, Artificial Sequence
  ENSG00000260923_15 (sequence is synthesized)
gacagagggactgagggactgtctccccccaggaagcagcaggttggctctgtttccttcgtggggcagctggtctccagggcagcaagagagaccaagccccagtgcacattctacagc

SEQ ID NO: 824324 - DNA, 120 bp, Artificial Sequence
  ENSG00000260923_16 (sequence is synthesized)
ctctgtgcacatcagacttgttaatatcccattggccagtgtaagtcacatggccaagcccagattaaggagtggaaagatggaggctatctcctcctgggagaggaggccaaggaggtg

SEQ ID NO: 824325 - DNA, 120 bp, Artificial Sequence
  ENSG00000260923_17 (sequence is synthesized)
ggagtattatgtggccacttatgtttgcaatctaccataattagcactttgagaaaagaattaactgagaaacttgcttcaaatagggcattcagtaaaatgaagccccaattgaagtaa

SEQ ID NO: 824326 - DNA, 120 bp, Artificial Sequence
  ENSG00000260923_18 (sequence is synthesized)
aatgcatatataaaaaatgaaactgtgaccgattttaaggacagtattggcaaatatttctgtgctcttggaggagaagacccttattggcatgacatgtcagaaaccacaatgaaagaa

SEQ ID NO: 824327 - DNA, 73 bp, Artificial Sequence
  ENSG00000260923_19 (sequence is synthesized)
caaaccaatgcagaccaaaccaatgcagaactcctatgtgctgatggtggtcttacatttccctaagtttctg

SEQ ID NO: 824328 - DNA, 120 bp, Artificial Sequence
  ENSG00000260923_20 (sequence is synthesized)
ggaagtgctcagaagcttacaaagctgcctcgagggtcgggaggccatgccaagcattgtgatttgcagagtccatgagacaggaacactcccaccacagtgacctgcctctgcacacag

SEQ ID NO: 824329 - DNA, 120 bp, Artificial Sequence
  ENSG00000260923_21 (sequence is synthesized)
ccagaatgtagctgactcctttcttctcccacttgcatgcttccaagccttcaaaacatactcatctccatgttctgtgaattagcaatttttaaaaaaataaaaaaataaacaaactca

SEQ ID NO: 824330 - DNA, 90 bp, Artificial Sequence
  ENSG00000260923_22 (sequence is synthesized)
gtaattttagtatttgtattaatatacatgtgccttcggcttattgcccaattaattgtagcctcaggctaaactttggtttctgtcttt

SEQ ID NO: 824331 - DNA, 120 bp, Artificial Sequence
  ENSG00000260922_0 (sequence is synthesized)
ttgaggaaggccggccttgctgaacacagtggactgaccgggtctggacccctcccccacaggtgactgtgcactgcagcagagagaagaggaaggagtcagaaacactctactgaggac

SEQ ID NO: 824332 - DNA, 120 bp, Artificial Sequence
  ENSG00000260922_1 (sequence is synthesized)
acaccagggtctgtgagtcatgcgaaggggttgctaaggcagggcaaggcgagaatttcacaactggcttcctctgcatcctcctcttggctggatttagattctgtaagtggaaagcaa

SEQ ID NO: 824333 - DNA, 120 bp, Artificial Sequence
  ENSG00000260922_2 (sequence is synthesized)
atcaaacttctctccttcccaaggcactgtgctctccctggaataccagaaagctattggaaatgttctcaagaaacactggatatgagaaagacctcataatctgtgactaaatgaaac

SEQ ID NO: 824334 - DNA, 120 bp, Artificial Sequence
  ENSG00000260922_3 (sequence is synthesized)
agtgtgaagagatgtctataacatgatttcagtacagagggatacaaaatgatactcacggtatgtgagtctgtcaaacacatgtttgcttacatgtgcctagggaaacaaatgatatag

SEQ ID NO: 824335 - DNA, 120 bp, Artificial Sequence
  ENSG00000260922_4 (sequence is synthesized)
tgtattaccttttaattattttatatatgtatcctaaaaaagtattttttcatactttgttaattagcatggacctacagataggcctttcagacataagaatttcttcattttctgtat

SEQ ID NO: 824336 - DNA, 120 bp, Artificial Sequence
  ENSG00000260922_5 (sequence is synthesized)
ctttgctctgtctctgattctaagccttattatgcttagtgggatggaaccagtaggaagtctcactgtcaccaggtgctctgaataataggaaatgagagaccaacattcatgctgtgg

SEQ ID NO: 824337 - DNA, 120 bp, Artificial Sequence
  ENSG00000260922_6 (sequence is synthesized)
tttcaggaacttattttgggcacttgttcttcctcccaaatgagcaagtgtgacaatggtttaacccccaaatatgtgacattgttcacatctaaataaaacgccttccttctactcacc

SEQ ID NO: 824338 - DNA, 120 bp, Artificial Sequence
  ENSG00000260922_7 (sequence is synthesized)
cagtagatggttgctgttgttccttccttgcaagggttgtctcagatttaatccattcctctagtgagagaacctttgctgaccttacccctgaggggatatccatgtttcagatagaca

SEQ ID NO: 824339 - DNA, 120 bp, Artificial Sequence
  ENSG00000260922_8 (sequence is synthesized)
tcttaagtttgccatgtatgcgtcctcacttgccttgaccctagcttttataacttccaaatggaaggttaataatgacagaaaagccaagactggcggaaactaaaagctgaaaattaa

SEQ ID NO: 824340 - DNA, 120 bp, Artificial Sequence
  ENSG00000260922_9 (sequence is synthesized)
cccttcgccttctgccatgattttaagtttcctgaagcctctcagccatgcttccagttaagcctgcggaactgagctggacagaagtttgtattacaggctcgtagcaccggaggtttc

SEQ ID NO: 824341 - DNA, 120 bp, Artificial Sequence
  ENSG00000260922_10 (sequence is synthesized)
tgatggagcagacaacttgaggaaggccggccttgctgaacacagtggactgaccgggtctggacccctcccccacaggtgactgtgcactgcagcagagagaagaggaaggagtcagaa

SEQ ID NO: 824342 - DNA, 120 bp, Artificial Sequence
  ENSG00000260922_11 (sequence is synthesized)
ctacccggactctgtgattaatggtgaggtggggagcacccgagtcctctgaactgaacagctgtgcagcaacatctgctgggtggaatgctggaaggaccgcgtcacacaccaatccta

SEQ ID NO: 824343 - DNA, 120 bp, Artificial Sequence
  ENSG00000260922_12 (sequence is synthesized)
gctaaagtttcacccaagtcttctgaaaagaagggtgcctctagcatctgataagtttaaaagcgaagtatccttggctgaattgcctgacattctgagctttagggaccatactacccc

SEQ ID NO: 824344 - DNA, 120 bp, Artificial Sequence
  ENSG00000260922_13 (sequence is synthesized)
tgaataggagtacttagcaccgtgcatagtaatagcttgacaaatattagctattacattgttcagaaacatgatgtaagaaccaaatgagtaaaggctgtgagcagcatttctaaaaca

SEQ ID NO: 824345 - DNA, 120 bp, Artificial Sequence
  ENSG00000260924_0 (sequence is synthesized)
ggctcggggagggtggacgatgtggctgggccggcgagaatccaggggctgcaggcaaggacggggactcgcgatgaaacccgaagatcaggggctggtggcagtgaccgcgaggggcct

SEQ ID NO: 824346 - DNA, 120 bp, Artificial Sequence
  ENSG00000260924_1 (sequence is synthesized)
ccaagcagcccaatcaatctcggacgaggggtcgagtcagtggcggtgcaggcggcaaaggcagccagggtctgagcagcgcggctccagccccagcagcaacgggagagcgcgtgcgcc

SEQ ID NO: 824347 - DNA, 120 bp, Artificial Sequence
  ENSG00000260924_2 (sequence is synthesized)
gccccagacgactggacgcgccctcgtgacgccatcagcgcgcgccgccccaacttccgagcgcaagcgtggtcgcccccacagcctgtgggctacgggaacgcgatccgactcggcggc

SEQ ID NO: 824348 - DNA, 120 bp, Artificial Sequence
  ENSG00000260924_3 (sequence is synthesized)
cctccctgcctggatggccggtccccgaggctgaggaagtccattcctctttcggaaatggtccccaggaagcttctccgtgtccccctatggccgggtactgagcggggcccgggtggt

SEQ ID NO: 824349 - DNA, 120 bp, Artificial Sequence
  ENSG00000260924_4 (sequence is synthesized)
ctgcggccgtggcccccgcccctcagcgcaggcgaccctcctggccctggcgggcacagcgcctctcccgtgacctgggccggcccgcaggatgagcccccggatcacgatcgctggcat

SEQ ID NO: 824350 - DNA, 120 bp, Artificial Sequence
  ENSG00000260924_5 (sequence is synthesized)
tttatttaccttcttccattacaaccccaggcgagtctcccgggccccgagaggagggggtgactggtcagggtcatcggtagcggcggcaggggcctgcatagggctgcctcggggcga

SEQ ID NO: 824351 - DNA, 120 bp, Artificial Sequence
  ENSG00000260924_6 (sequence is synthesized)
agaatggccgccagcctcggctgccccagcccccagcgcatggaatgtgccccgggccccaggagctccaggaaccgcgcttgtgagacggagcttcggctgcttggagctagtgagcca

SEQ ID NO: 824352 - DNA, 120 bp, Artificial Sequence
  ENSG00000260924_7 (sequence is synthesized)
ccggccacggcagggatttgagcagaacttgggggcagagggatgagatggtgcatcccttgaggtcacttcaggagatgacactcctgtggctaagtgtagcttcccaggtcatggctc

SEQ ID NO: 824353 - DNA, 120 bp, Artificial Sequence
  ENSG00000260924_8 (sequence is synthesized)
ccaggtcaggcctggtcaatggagaattaagtgggcgttgggtggtggatggatgtgatttggcagaggggacaaatgtgacaacagtgtaataagggccatgttggggagggtcagggg

SEQ ID NO: 824354 - DNA, 120 bp, Artificial Sequence
  ENSG00000260924_9 (sequence is synthesized)
tcagggtccggcccaacctgagcagaagggaggctgctctcagggatatttgtcaggtaggaatgggtggagtggaactacagggccaccatgtttcccatgggtcacccatggtggcct

SEQ ID NO: 824355 - DNA, 120 bp, Artificial Sequence
  ENSG00000260924_10 (sequence is synthesized)
tgtcatgtttatccgtgatcctcagtgttctctgtggtcctcccgtcacccctttcagactgtcctttcagttctccactgtccctgcatcacctctgcccctgtcccgtttgtctgtgt

SEQ ID NO: 824356 - DNA, 120 bp, Artificial Sequence
  ENSG00000260924_11 (sequence is synthesized)
tcagtccatgttcccaggtcttgaggtggcccctggttctatgccccttacctaagaccctgtgcagggaatctgtgaaaacacagaggaaataaaaagtgaggaaaatagtactcttgc

SEQ ID NO: 824357 - DNA, 120 bp, Artificial Sequence
  ENSG00000260927_0 (sequence is synthesized)
gcctcctcctgaaaagagctcagttgtcaaggaactatttttcttgccgtcgtcccagagatgcctttggaaaagcggaagggcacggagggttctggagttcgttgctggcacctgcgt

SEQ ID NO: 824358 - DNA, 120 bp, Artificial Sequence
  ENSG00000260927_1 (sequence is synthesized)
ggtgtcatgagaacgtggcggggcgattcacactacaaggaatactaaaggacgttctccacattgaaggaaaatgatctaaagagaaacagatctgtaagaagaaatgaagagcactgg

SEQ ID NO: 824359 - DNA, 120 bp, Artificial Sequence
  ENSG00000260927_2 (sequence is synthesized)
taaagttcatgggtgcttcagaatgtgtggtcaaaagcagccctcagatcagagacctcgacccctctcctgcctcaggacagcaaactcaaccagcctccaagacggggcctttcttca

SEQ ID NO: 824360 - DNA, 120 bp, Artificial Sequence
  ENSG00000260927_3 (sequence is synthesized)
gtagcaggtccagcatagcaagtgggtggtgagatgccggcagtggaattctagaagcagtgcctcccagaacagcactacagtactgaggaaggactatgcacctgggaagctgtcaca

SEQ ID NO: 824361 - DNA, 120 bp, Artificial Sequence
  ENSG00000260927_4 (sequence is synthesized)
cacacaaaatcatttcatgaaaactttctttgggtaaaggaagggttccactgcgtagtatttgatttgagaagggctgcatggtgcatgaggttaagaaagaaatgactatatttgcct

SEQ ID NO: 824362 - DNA, 120 bp, Artificial Sequence
  ENSG00000260927_5 (sequence is synthesized)
ttaaacacttcagctgattccaagcacccaacttcagaggctcagtgagaagaaagcacactaattaaagaaagcacattaattaaagataccaccacctgccaaataatagcatgtgct

SEQ ID NO: 824363 - DNA, 120 bp, Artificial Sequence
  ENSG00000260927_6 (sequence is synthesized)
gcaaggaatggggctagggagagtgtttcacaaatgcagagcaccaggccacaaggttaaagtcatgcactaaaacagtcaatcccaagaggcaggtgtctgagtggcgcgactcagaag

SEQ ID NO: 824364 - DNA, 120 bp, Artificial Sequence
  ENSG00000260927_7 (sequence is synthesized)
caagtacataaaaacggaacactcccaacaggacaccactctagccccacttctgccaaaggaaagttttcacatcaaggtgtaacacacatctttgcaattcaaggtttatccctcccc

SEQ ID NO: 824365 - DNA, 120 bp, Artificial Sequence
  ENSG00000260927_8 (sequence is synthesized)
tctcccccaaagagacaggaaatacaagttaaggtcctcatagcaatggtttgtctcccacttgggaaggctggttattgtcaacatttttatttaagaaaacaggatttaacatggcat

SEQ ID NO: 824366 - DNA, 120 bp, Artificial Sequence
  ENSG00000260927_9 (sequence is synthesized)
ttttcttccctctaagggcagcagcacataaatcatacatcagtcatccagtgatacaaagaggtggccaattgtgtctgaagtagtcacttgtaaaggatcacaacccaggcagtgttg

SEQ ID NO: 824367 - DNA, 120 bp, Artificial Sequence
  ENSG00000260927_10 (sequence is synthesized)
cttttctgcaaacagaaggaaacagaaggctccatggtccttgaagattatccaagttttccactagttgtcaagatttctgtcccaacctcttagtcaccatttacagcaagaagagcc

SEQ ID NO: 824368 - DNA, 120 bp, Artificial Sequence
  ENSG00000260927_11 (sequence is synthesized)
agcaagtgaaaaactgttaatttattgattcaaagttgttttttttctttttaaaaaacaatccccaatacatgcagttcagggttaagtatcacatttgtagcacattgttgagtctca

SEQ ID NO: 824369 - DNA, 120 bp, Artificial Sequence
  ENSG00000260927_12 (sequence is synthesized)
aaacaaaaatatgcatcacctgtataatcccatcacatctttttccagcctctacaatacctagttgggggtgttttcatttatacatccacatagctcagaagcatgttattaacggtt

SEQ ID NO: 824370 - DNA, 120 bp, Artificial Sequence
  ENSG00000260927_13 (sequence is synthesized)
gatctggcccgatgcttctccgccacctcccctgccctggtctccacctcggggttatttttttctaaaggcaggatgttactcagtcttaatttattaagatcactgacaaactttggc

SEQ ID NO: 824371 - DNA, 120 bp, Artificial Sequence
  ENSG00000260927_14 (sequence is synthesized)
ttcttgtgtgctcatgtggtccctgcttttgctttcggaagggtttatattgaaacgactgtgactctgatcggttattatcccctcattttttgtaggaaataagtttgcttgtttctg

SEQ ID NO: 824372 - DNA, 120 bp, Artificial Sequence
  ENSG00000260927_15 (sequence is synthesized)
tgggtgctcacacagtaacacaggttcctaaagtaaccatttaatctgaactggtattaaaggaaactgttaaccaggctctcttagatctatttcagttcatataaaaaaactcttcca

SEQ ID NO: 824373 - DNA, 120 bp, Artificial Sequence
  ENSG00000260927_16 (sequence is synthesized)
attgttgcttgtgtctcaaagtagttctgcttccatccttatcaacagagcacctgggagaacctaagtcatttccctgagtaggcacagaccacgagccccgcggcacccagctctctc

SEQ ID NO: 824374 - DNA, 120 bp, Artificial Sequence
  ENSG00000260927_17 (sequence is synthesized)
tgggactaagcgcctgactcgagagcaccacctttcagtccactgggaccaatccagtgggcagcgccctccccagggtacattccagaacataaacttggtaccctctaatttatcccc

SEQ ID NO: 824375 - DNA, 120 bp, Artificial Sequence
  ENSG00000260927_18 (sequence is synthesized)
tcaagaagttaatttcctcctcaagagctacctttagatggattttcttattggtcccttttcttttaacagcccttcccctagccactctcttcaagtccccaaggattacgagtttgt

SEQ ID NO: 824376 - DNA, 120 bp, Artificial Sequence
  ENSG00000260927_19 (sequence is synthesized)
gtctgagagcaccttcctctctgcaagggaacacatttgctttaaaccttgtgagtgctgacatgttacagaatgtctgggaggaggcctggctgagtgactggtgtttaagtgcctcaa

SEQ ID NO: 824377 - DNA, 120 bp, Artificial Sequence
  ENSG00000260927_20 (sequence is synthesized)
tgaacgacatcagcgcttctctagttggtgagaaggcccaggaaagcttggtctgcgtcatacactcaatagcttctcctacccagccacctaccctgcctacagggataggatgaaagc

SEQ ID NO: 824378 - DNA, 120 bp, Artificial Sequence
  ENSG00000260927_21 (sequence is synthesized)
aaggccagctgacagcatccaggggagagtgaactgccaccacaccagaggtgcaaatgtgactcagcacttcatgagttctactctcaccatgggatttctcagcagaagcaaaccttg

SEQ ID NO: 824379 - DNA, 120 bp, Artificial Sequence
  ENSG00000260927_22 (sequence is synthesized)
cagtcaggctcacttgtagccaacaaatgatatagccatctggatttggcataggaaccttttgttctcaccataccaggtctatgttcttgaacataggcagtacctgagatgatagta

SEQ ID NO: 824380 - DNA, 120 bp, Artificial Sequence
  ENSG00000260927_23 (sequence is synthesized)
taacactaccctgttccccacattttttgcttttctttaggaaataattaagtccttatcataggcacttttaacctgtttaagataatgaagcaaacaaatgaaaagtactgagatgag

SEQ ID NO: 824381 - DNA, 120 bp, Artificial Sequence
  ENSG00000260927_24 (sequence is synthesized)
tttaagaaagaatatgctaactgaaaaggatactgggtgcgtacatttaccatggtttagtctaaatattagacacacagacacacacacagacacacacacagacacacacacagacac

SEQ ID NO: 824382 - DNA, 120 bp, Artificial Sequence
  ENSG00000260927_25 (sequence is synthesized)
acacacagacacacacacaccccttttggaactctccaagaccatctccgaatctaggtaaatagtcttaaaatttcgggggagctaggtttggaaacaaaaatggtttttggagacagg

SEQ ID NO: 824383 - DNA, 120 bp, Artificial Sequence
  ENSG00000260927_26 (sequence is synthesized)
aaaagagatggtctgaaactggactcacttcagtttggaaaggaatagcctaggtgccaagaccagacccaggaaggggtgagcatttcaagcccagttatggtctaagtctaaggcatg

SEQ ID NO: 824384 - DNA, 120 bp, Artificial Sequence
  ENSG00000260927_27 (sequence is synthesized)
aagagaggtaaaagtctaggtgctggaaaagcaagctgtgtgcttcaaaggaagaatgcctgtgtcaaagctgcagttacaaaaccccaggacaaggcaggcaggcggtgtctgcaccta

SEQ ID NO: 824385 - DNA, 120 bp, Artificial Sequence
  ENSG00000260927_28 (sequence is synthesized)
catcaccgtcagagagacaggcagaggtcaatcacctgactattctcctccaggtacttttattacctttgggggacccaagggaaaggaatggagttaccgcttcaccaagaccctcca

SEQ ID NO: 824386 - DNA, 120 bp, Artificial Sequence
  ENSG00000260927_29 (sequence is synthesized)
gtaggcacctcttgcctggtccagacaggcaacttaaaaaaaaaaagggagggctgaggagtggggtggggtgataaaggagattggagggggagcaggaaagacacgcagtggcacatc

SEQ ID NO: 824387 - DNA, 120 bp, Artificial Sequence
  ENSG00000260927_30 (sequence is synthesized)
tccctgatgataaccaatgcttcaggattgcctataagggcatattagaaggcttttgataatctcaaacactgagttttgctgcctgacatatcaatacaggtttagccaaagagctca

SEQ ID NO: 824388 - DNA, 120 bp, Artificial Sequence
  ENSG00000260927_31 (sequence is synthesized)
catcttgcttttgattttcaggtagaacaaatgtttacattagtatacagaatgtgcaatgcaagcaggcagcattggtatgagaaccttaactgaatgcattccttggctttgggatct

SEQ ID NO: 824389 - DNA, 120 bp, Artificial Sequence
  ENSG00000260927_32 (sequence is synthesized)
tatttattttttactctataaactcaactctataataagagaagagtttcatttgtattttaagttcccacagaccaaacgacaaaaatagaatctacatttagagtaggatctgctacc

SEQ ID NO: 824390 - DNA, 120 bp, Artificial Sequence
  ENSG00000260927_33 (sequence is synthesized)
aataccaataagattttattggaatatggaatgtaaacaaatgtttcaaacaaacatctaaccttataaaaatgtatggcattattaaatagttaataaagaaatcttaaagggtgatgt

SEQ ID NO: 824391 - DNA, 120 bp, Artificial Sequence
  ENSG00000260927_34 (sequence is synthesized)
ggtagacacctctagttctagcctaggtgtgtgaagtccccacagctgtggcatggccctgcagctggggtgaggggactgcctacaaaccatgttgctcctgagtccccaaaatgaaat

SEQ ID NO: 824392 - DNA, 120 bp, Artificial Sequence
  ENSG00000260927_35 (sequence is synthesized)
cagccctatttttgtttaaacaaactctagctttctctgctaacatgaaggtttgcaaaatggatccaacacttgctccgggagcaccattttcttccccaagccccttgtatattcctc

SEQ ID NO: 824393 - DNA, 120 bp, Artificial Sequence
  ENSG00000260927_36 (sequence is synthesized)
tgagttgcttgagtttcagatgaccctgcccacacaactctagtacctgcatgcaagacagacttatctttgccatcacataaatgtatcacatatcagaacttacaaatgcatattacc

SEQ ID NO: 824394 - DNA, 120 bp, Artificial Sequence
  ENSG00000260927_37 (sequence is synthesized)
ctgattacagtgggaaactgtgtctcatggggataaaaggaggtgggagagagatatttttttccataagtctttcctgaaaaaattctaatgggatgttttcctccctcgccttgcctg

SEQ ID NO: 824395 - DNA, 120 bp, Artificial Sequence
  ENSG00000260927_38 (sequence is synthesized)
aagactgactttccagctttagttatggttgtgaacaaaaaggtctctgtttcagagaggtgcattaaaataggcgcacacatagggatgtgctgggaaatggtgaagttctccttacaa

SEQ ID NO: 824396 - DNA, 120 bp, Artificial Sequence
  ENSG00000260926_0 (sequence is synthesized)
agagcatgccgggaaaggcacctctcccgatctcctggcgctcacctcccgggcgttcctttcgtgtccccttgaaagcccggtccttgggcttggaatgagacggtttgggctcatgcc

SEQ ID NO: 824397 - DNA, 120 bp, Artificial Sequence
  ENSG00000260926_1 (sequence is synthesized)
tgctttggtcagtagaatacagctgaagtgatgttgtaccagttttgcgtctggtctttacaagcactggtagcttcaactttctccttcttggtactcacccaccatgttgtaaggaaa

SEQ ID NO: 824398 - DNA, 120 bp, Artificial Sequence
  ENSG00000260926_2 (sequence is synthesized)
cccaaacagccacgtggaagacagttctagttgagctcccagcccagagcctatcccaactctccagccataccctgacttccttcagcaaagagacagcttctgattcatgttcgtctc

SEQ ID NO: 824399 - DNA, 120 bp, Artificial Sequence
  ENSG00000260926_3 (sequence is synthesized)
gaagaatttgaagagcactgaatgtgggagataggacagaggaaaggagtcaaatgtctccaagaaacgaagcctgtgtgccctggagaatgaagaagcatcatcaaatcggggagactg

SEQ ID NO: 824400 - DNA, 120 bp, Artificial Sequence
  ENSG00000260926_4 (sequence is synthesized)
aaggaggaatcggttttcagagaaaaacaatttatattgtcttagctgtgttaggtggcatactattacattcaagtgaagctgtgtaatagacagagatgacaaattttattcatttat

SEQ ID NO: 824401 - DNA, 120 bp, Artificial Sequence
  ENSG00000260926_5 (sequence is synthesized)
gaatgccccccaaaatatatatatagtttttgccctcatgtctcttattgggatgacagacataaatcaaagaattccataaataaatattaaaatacaatttgtgataaatgctacaaa

SEQ ID NO: 824402 - DNA, 120 bp, Artificial Sequence
  ENSG00000260926_6 (sequence is synthesized)
ccgctaatcacctggcaccgagctcgaagcggcgccgagtcgttcgcacgcggagagggagggtagttagagggccatccttttctgccgttatggatttaaacccataaagaggaaacg

SEQ ID NO: 824403 - DNA, 120 bp, Artificial Sequence
  ENSG00000260926_7 (sequence is synthesized)
agaaaccagaggctcaaagctaaggaagctcgcacctaccggcttaacttcgcacgcctctccaggagccgggaaccatcgcccttgggcgctccccgatgcacgccgggatacgcctgg

SEQ ID NO: 824404 - DNA, 120 bp, Artificial Sequence
  ENSG00000260926_8 (sequence is synthesized)
cagacatatattaaaacacagtgtatgattccattctgtaggacattctagaacagacaaaattaatctatgatgtggtggaataaagatggcccatctttgtcactctccccactgaaa

SEQ ID NO: 824405 - DNA, 120 bp, Artificial Sequence
  ENSG00000260926_9 (sequence is synthesized)
acctatcctcgtggctgcagccatttccctctctgcagatacttccaaaagttacactagatgttaactgagcactaaggacactacgtgaaagactggagtacaaacatccaaaggact

SEQ ID NO: 824406 - DNA, 120 bp, Artificial Sequence
  ENSG00000229458_0 (sequence is synthesized)
agtcttcatagactatatgctggtaatttacctttgaatatagtgagtacttggaactatgggaggagggtcagagtgggatatagcacaacagtaattgtcagaggctgaccatgaaat

SEQ ID NO: 824407 - DNA, 120 bp, Artificial Sequence
  ENSG00000229458_1 (sequence is synthesized)
gcattaaagtgtattcctatatctagtttagcctttaattctccccaggcgagagagagatgtcactcaggactgcttccgaaggagtttcccttgaagcttgcttcactgtctgactcc

SEQ ID NO: 824408 - DNA, 120 bp, Artificial Sequence
  ENSG00000229458_2 (sequence is synthesized)
ccctggcttggtatatttcctccacctgctgagcatcctctcaccctctacttttacctggaagaaagaagacaataatatctaccaatcaagatgctgtacctgaagcagaagataacc

SEQ ID NO: 824409 - DNA, 120 bp, Artificial Sequence
  ENSG00000229458_3 (sequence is synthesized)
tggcaaagaaaagagtatagtgctgccttcagggaactcctagtctaggggaagacagccaataatcacataactgctctaatcaaatatttcaccaaaataaagtattagccacctcct

SEQ ID NO: 824410 - DNA, 120 bp, Artificial Sequence
  ENSG00000229452_0 (sequence is synthesized)
gcgcagtggcttacatctgtaatctcagcactttgggagactgagagaaaattaattccagttggtgttctgggcagaaatgaagaggaggaggaagaagacaaagcagcttctcccctt

SEQ ID NO: 824411 - DNA, 120 bp, Artificial Sequence
  ENSG00000229452_1 (sequence is synthesized)
ctttctctggtgtggccacaccatcgtccacacgatgaaaagcagaggcccagggaggctgaaagacttttctgaaatcatccagggaggagcaaagccagccctgaatcccaggtctcc

SEQ ID NO: 824412 - DNA, 120 bp, Artificial Sequence
  ENSG00000229452_2 (sequence is synthesized)
aaatgattaatccagaacgccttccacttctcttttctgccacatggccttaaaacagaagacaacccagatgggacaaactagactgaataaatattcataatattctaatattcataa

SEQ ID NO: 824413 - DNA, 120 bp, Artificial Sequence
  ENSG00000229454_0 (sequence is synthesized)
atatctcagtctctagtcaagcgtggtttatggtgccaaataagtgccaggtgaactcactacatctgacaaaatctcaaggaaccaagtttaccagataatatttatgattatgtgaaa

SEQ ID NO: 824414 - DNA, 120 bp, Artificial Sequence
  ENSG00000229454_1 (sequence is synthesized)
cagctgtactggtctggagctgcacattcttttcagagaagtcttgttccattaagttcaggtgactcttctcctgtaacagagcctccttcttagaaactatggcctcccgtttcttta

SEQ ID NO: 824415 - DNA, 120 bp, Artificial Sequence
  ENSG00000229454_2 (sequence is synthesized)
agtctgcttccagctcctctaattcttggcattggttcagaactttctctacttcttcatctaactatttcttttgcttatccaatttctacattaaaattaaaaaaaaaattacttgtt

SEQ ID NO: 824416 - DNA, 71 bp, Artificial Sequence
  ENSG00000238133_0 (sequence is synthesized)
ttgttttttttttgtgagctgtaacactcacggagaaggtctgcaggttcatttctgagccagcgagacca

SEQ ID NO: 824417 - DNA, 120 bp, Artificial Sequence
  ENSG00000238133_1 (sequence is synthesized)
ggagaaggtctgcaggttcatttctgagccagcgagaccaccagcccgccaggaggaagacgctgccgaacatcagaaggaacaaactccaaacacgccgcctttaagaactgtaacacc

SEQ ID NO: 824418 - DNA, 88 bp, Artificial Sequence
  ENSG00000238133_2 (sequence is synthesized)
aacaaactccaaacacgccgcctttaagaactgtaacacctggagggtccgcggcttcatgaagtcgcatgcatcattgcactccagc

SEQ ID NO: 824419 - DNA, 120 bp, Artificial Sequence
  ENSG00000238133_3 (sequence is synthesized)
cattgacgaccagctttggctgttccaactcaccacagcctctgaaagacccatgctctctttggattgcttggtacctgcagcacgtttccatgcctgggagggagaataagagtaagt

SEQ ID NO: 824420 - DNA, 120 bp, Artificial Sequence
  ENSG00000238133_4 (sequence is synthesized)
gaacagtttactcttactggaacattccaatgctcttacagataataactaagtgaatgaaaacaaaaagttcaggcattcactggcaaaatccaactctgaacaggtatggaggtgggt

SEQ ID NO: 824421 - DNA, 120 bp, Artificial Sequence
  ENSG00000238133_5 (sequence is synthesized)
ctggatttggctcaacatttcacttcgctactcgtctgaaatgcacctcagagcaagggaggcagcaatcaggtaacgcacgtcatggtgagagtactttggtcaccacgggaaacacaa

SEQ ID NO: 824422 - DNA, 120 bp, Artificial Sequence
  ENSG00000238133_6 (sequence is synthesized)
ccaaccaagtgttttgccaagagacacagatcggaacgctcatcacaacactgcatggctcattcagtgcaggttgccacaggtctacagtcacatggttaatgaaaatccaaaacagga

SEQ ID NO: 824423 - DNA, 120 bp, Artificial Sequence
  ENSG00000238133_7 (sequence is synthesized)
ccaacaggatgacacattttctgttcttaatgctcattgccattattgctagatctcactctgtagcccaggctggagtgtcgtggccagatctcggctcaatgcagctttgacctcccc

SEQ ID NO: 824424 - DNA, 120 bp, Artificial Sequence
  ENSG00000238133_8 (sequence is synthesized)
tgatcctcccacctcagcctcccgagttgagtaactgggaccacagctatggtcagaaatcaggactgtcattcagatctctggttcacttcttcattgagacgagtgatggtctttgaa

SEQ ID NO: 824425 - DNA, 120 bp, Artificial Sequence
  ENSG00000238133_9 (sequence is synthesized)
tctttgaaagccagacgctgtggcctgctgtcggggctacccacctccactccgccttgttgtgtaggaatgagttacacttgtcaggaaggctcgtgtcatttgacatggactccagga

SEQ ID NO: 824426 - DNA, 120 bp, Artificial Sequence
  ENSG00000238133_10 (sequence is synthesized)
atgatggccgtttctgaagaagagaaaataagtaatcattcgctgggacttaagaaaggagatatttaagagaaaacgtagatactacaagcatagtaaggaccacaagtctcagaagag

SEQ ID NO: 824427 - DNA, 120 bp, Artificial Sequence
  ENSG00000238133_11 (sequence is synthesized)
taggaagtgcccagcatcacacaggaagcaagttacagaaccaagggctctgttcataaactgttcaacatcttttatcacataagggctcataggtccaactaactgaaagcctcaatt

SEQ ID NO: 824428 - DNA, 120 bp, Artificial Sequence
  ENSG00000238133_12 (sequence is synthesized)
tgtgggaagaagagaagcgaggctggggacacagcacaaacggtgtttacgccactgaagttcttttgaaatggaaaggctctgcatgaagaagcgaacagttatgccactgcctcgcca

SEQ ID NO: 824429 - DNA, 120 bp, Artificial Sequence
  ENSG00000238133_13 (sequence is synthesized)
attccagtgaggagctcatcttcaatgtagtgttcaacgtaggtggcaaaactgtaatttttcccttttttgaaactattttttcttcttttatttttgaaattctcatctaagcgacag

SEQ ID NO: 824430 - DNA, 120 bp, Artificial Sequence
  ENSG00000238133_14 (sequence is synthesized)
tttcttgtactatagtgactcctgctgggagaggtaagttgaagtagctgaaggtctcttacagatatatcaactcccggccagtaaaaaagatgtcctaaacgcaggagatggagttaa

SEQ ID NO: 824431 - DNA, 120 bp, Artificial Sequence
  ENSG00000238133_15 (sequence is synthesized)
actgttcccctaccttggacgcaatggcttctttcatcactaagaacaaacccctaggttttacaattgagactgagaaactagtacagtacttgtacaatttttgatctacagcatcac

SEQ ID NO: 824432 - DNA, 120 bp, Artificial Sequence
  ENSG00000238133_16 (sequence is synthesized)
gacgtgaagctgcaacaattagatgtaaagggtccattcatgaggaataacatcactttgaccctttgtgttagctcctactgctaatctttccataagcgtgaacttactttcaatttg

SEQ ID NO: 824433 - DNA, 120 bp, Artificial Sequence
  ENSG00000238133_17 (sequence is synthesized)
aagaagatgaaaaagtcttttgcaaaaccccaatactgttttctgatctatgtacctgaatggagaaacgtagtcttacctcgtttttttccactacaagccaagctacttgtaatcctt

SEQ ID NO: 824434 - DNA, 120 bp, Artificial Sequence
  ENSG00000238133_18 (sequence is synthesized)
ccaaacctttaaaggggacctcccttgttagcatctcccagagaacctggaacaaaaagaaaatggaatttttatttttgtactttatattttttggtacatattactgagaccttatct

SEQ ID NO: 824435 - DNA, 120 bp, Artificial Sequence
  ENSG00000238133_19 (sequence is synthesized)
aacatgtaattgtatctaattaccagacacaaccaaccccaactgtagaaacttgggcaaaacaattaagcacacaacttcttctatatattaaatactttttacgttcttttttataaa

SEQ ID NO: 824436 - DNA, 120 bp, Artificial Sequence
  ENSG00000238133_20 (sequence is synthesized)
gaaaaaacctggtttagaaattaggacatctagagccagacttaaaattttatgaaaccaatgggcctgactgatttaatgtcatctcataaattatcagaatttttatgttctcacaaa

SEQ ID NO: 824437 - DNA, 120 bp, Artificial Sequence
  ENSG00000238133_21 (sequence is synthesized)
caggaagcaagttacagaaccaagggctctgttcataaactgttcaacatcttttatcacataaggggaggtgcccgcaacgatggcctgctgcagaatacagagtggctttttcatgtt

SEQ ID NO: 824438 - DNA, 120 bp, Artificial Sequence
  ENSG00000238133_22 (sequence is synthesized)
tgatgggttgtaagaaacaaaaagccaactatggcatctatgaagactatgcaacagagactatttatattctgggataatctagcaaatgagctgcgcatcaaaataatggattagtgg

SEQ ID NO: 824439 - DNA, 120 bp, Artificial Sequence
  ENSG00000238133_23 (sequence is synthesized)
aaaccaacataagccatttattttcagtaaatataattggataacaatcgttaatttaaactgtattgattttatttttgtttaattgaaaaattggttttgaatttacctgtatatgag

SEQ ID NO: 824440 - DNA, 120 bp, Artificial Sequence
  ENSG00000238133_24 (sequence is synthesized)
agttataaggagttaattcttagttttatgtttatgtatatttaagttacacagaaataatttcagtcaacatgtgaaatctggaagactaaaattttctatataaaagatctacacatt

SEQ ID NO: 824441 - DNA, 120 bp, Artificial Sequence
  ENSG00000238133_25 (sequence is synthesized)
aggcttccattgacgaccagctttggctgttccaactcaccacagcctctgaaagacccatgctctctttggattgcttggtacctgcagcacgtttccatgcctgggaggtaaggacca

SEQ ID NO: 824442 - DNA, 120 bp, Artificial Sequence
  ENSG00000238131_0 (sequence is synthesized)
actcacgtatctgttcttcggtctcatacatcgagactcttcacagttcaggcgctaatgatttttgccaccaaacacttatgttcacaccatttttaaagcagttttaaatccttgggc

SEQ ID NO: 824443 - DNA, 120 bp, Artificial Sequence
  ENSG00000238131_1 (sequence is synthesized)
aattggtcaaatgcttcttctggctattttcttgttctgaaagtcagaagtttgaagagggttttagggattcgaattaaggtgtcagcagacctgtgcttctctggaaggctctacggg

SEQ ID NO: 824444 - DNA, 120 bp, Artificial Sequence
  ENSG00000238131_2 (sequence is synthesized)
ccaccatcgtcaactctcccactatgactgagaccttctgcctgtctcagcacatgagtttcaggctctctaccgttcatgcccatgacaccaggagcagcaccctggagcagacacagc

SEQ ID NO: 824445 - DNA, 120 bp, Artificial Sequence
  ENSG00000238131_3 (sequence is synthesized)
cagaccacaaacccagctcaaggttaatcactgctgcccgtcaatgtgattatctccctctgcatggcagtgccattttcccactgtgggaccagagtatgtgctgtcatacacaacagt

SEQ ID NO: 824446 - DNA, 77 bp, Artificial Sequence
  ENSG00000238131_4 (sequence is synthesized)
ccactgtgggaccagagtatgtgctgtcatacacaacagtaaacactggatgctgttaattcatggctgcctggcgt

SEQ ID NO: 824447 - DNA, 120 bp, Artificial Sequence
  ENSG00000238131_5 (sequence is synthesized)
tgatttaggagatacatgtgcagggctgctacctgggtatattgtgtgacactgaggttggagcacgaatggtcccgtcacctaagtattctgaaagtcagaagtttgaagagggtttta

SEQ ID NO: 824448 - DNA, 120 bp, Artificial Sequence
  ENSG00000280366_0 (sequence is synthesized)
agaaactgcctgttcaagaaatctggaagtgcaggaagcagagggaatcttgggcagcctcatagtaattttcgatagtatactgggacttgcaagtcctgtcccagctactgctggaga

SEQ ID NO: 824449 - DNA, 120 bp, Artificial Sequence
  ENSG00000280366_1 (sequence is synthesized)
agagtggcttctctttctcttccccttccaaatcctggtgagatcccttcctttgaagcgtctgacctggaatcctagtgagactaaattatgagttccaattctgggtagggctttcaa

SEQ ID NO: 824450 - DNA, 120 bp, Artificial Sequence
  ENSG00000280366_2 (sequence is synthesized)
tttaatgaacctaaataagacatgatcctttgtggctataaaagttacactttgaaaaaagctcagctggtcaagagccacttgaaaatgatgttactgcaggggaactctgtcaaaagt

SEQ ID NO: 824451 - DNA, 120 bp, Artificial Sequence
  ENSG00000280366_3 (sequence is synthesized)
ctactcctcttgatttcctcctaggcacttttgtctgaaccacgtggcacaaattggcagagaacaaggaaaagaagaacagaggaaggagaaaaggagaaaagtcattctgctgaaaac

SEQ ID NO: 824452 - DNA, 120 bp, Artificial Sequence
  ENSG00000281091_0 (sequence is synthesized)
aaatagagaccaacgtggccgggcaggaagagcagggtcccgccttcaggtgtttgggactcagctgagggtgtgggtgccccgcggtgggggctgaaccttcctggggtgtggagagac

SEQ ID NO: 824453 - DNA, 120 bp, Artificial Sequence
  ENSG00000281091_1 (sequence is synthesized)
tgagagagagaaagagctgggaccctcctcgccccagtgagtgtgatgtcttgctccgggtgtcctggggcaactttctatacaggcgggacgtgggaggatcagacagacaagggtgtt

SEQ ID NO: 824454 - DNA, 120 bp, Artificial Sequence
  ENSG00000281091_2 (sequence is synthesized)
gactctgcagcacagaaccagtagtttgtggagaagaatggaggtgtggtgttgaatctgctagacaggctactgaagcaaaagtcaagagatccagattccatcatggggacactttag

SEQ ID NO: 824455 - DNA, 120 bp, Artificial Sequence
  ENSG00000281091_3 (sequence is synthesized)
agctgatatcaggtgtctgaaggaggcaagttttgaagatgtgggtcatgatggctgctgaagcttccactccatatttgaaggtcagcagttctcaggaaacctctagcacttccatcc

SEQ ID NO: 824456 - DNA, 120 bp, Artificial Sequence
  ENSG00000281091_4 (sequence is synthesized)
ctggtgggatgtgatgcctgtctcaggtgagctcacagatgtgaacggaagcatgttgtagaaaagcacttgtgaggttcacaaaataatctaaaagtagagaagctattttgatatcac

SEQ ID NO: 824457 - DNA, 120 bp, Artificial Sequence
  ENSG00000281091_5 (sequence is synthesized)
ctttggagaagaggtttatcaggtagactcttacttggtagtgaggcttttatacattctatggtaaaattttgtagtagccaataatttttgaagtgttagtttaaaatgcccatttaa

SEQ ID NO: 824458 - DNA, 120 bp, Artificial Sequence
  ENSG00000281091_6 (sequence is synthesized)
aaatttgttattttaataaatgacaattacactagaatttatcctattataatgatacataaccatgttgtctaaaatagccaggtattcttaaataccactttattttaccaagttatt

SEQ ID NO: 824459 - DNA, 120 bp, Artificial Sequence
  ENSG00000281091_7 (sequence is synthesized)
acattttagttttgaacttcagaaggaaatgcacatcaactttctctacatatttagatgcacctcatttcaaatgattatttctgttgtggacatatatagtgtgaacgacttgataag

SEQ ID NO: 824460 - DNA, 120 bp, Artificial Sequence
  ENSG00000281091_8 (sequence is synthesized)
acatagtgtccatctgctaatgtgacaaggtcatgttagtgggaattgttctcctgattaattcagtatcatcaaatctcagaaaaatacaagtatatttcagatgctttattgaggtat

SEQ ID NO: 824461 - DNA, 120 bp, Artificial Sequence
  ENSG00000281091_9 (sequence is synthesized)
gtttgatatgaaatatactaagtatatttaaagcctttactttagtaagctttggcatatgtatgcaccaatgaaaccaacaccatagtcaaagtaatgaacatatccatcaccccaaaa

SEQ ID NO: 824462 - DNA, 120 bp, Artificial Sequence
  ENSG00000281091_10 (sequence is synthesized)
ccaggcaaccactgctcttctgtcattgtagattgatttacatttcctataattttatgtaaatggcatcatacaatatgtatttttttggtctggcttcttacattcagcctattaact

SEQ ID NO: 824463 - DNA, 120 bp, Artificial Sequence
  ENSG00000281091_11 (sequence is synthesized)
ttttgatttatctttattgttgcatgattgaataattcctttttaaaattgctaagtagtatatggatataccacaatttgttttatccattcactttttcatggacagtaggtagtttt

SEQ ID NO: 824464 - DNA, 120 bp, Artificial Sequence
  ENSG00000281091_12 (sequence is synthesized)
cagtttggggttcttctaaataaagctgccataaccatttgtgtaaatgtctttatatgtacacatgctttctttctctagggtaaatactaggagtccaatggctggatcatgtggtag

SEQ ID NO: 824465 - DNA, 120 bp, Artificial Sequence
  ENSG00000281091_13 (sequence is synthesized)
atgtgagattaacattgtaagaaactgccaaactgttttccaaagtggtagtaccattccttattcattcccatcagcagtatatgagaattccattctccacaaccttgccaaagcttg

SEQ ID NO: 824466 - DNA, 120 bp, Artificial Sequence
  ENSG00000281091_14 (sequence is synthesized)
cttggtatggtcagtcttttttactttagccattctcatgggtgcatagtaatatctcattagagttttaatttacttttttttttcaagacattgtcttgctctgtcacccaggctgga

SEQ ID NO: 824467 - DNA, 120 bp, Artificial Sequence
  ENSG00000281091_15 (sequence is synthesized)
gcctacattttcttaatgactattattgttaaacatcttttcatgtgattacttgccatttgtatatattctttggtaaagtttctgtttctattattttcccatttatttattggagtg

SEQ ID NO: 824468 - DNA, 120 bp, Artificial Sequence
  ENSG00000281091_16 (sequence is synthesized)
tctgtttactttttacttttaaatgattttatatattctggatataaattctttgtcagttatacgattcttcaaatactttttcccagtcattgacttatcttttcattctctcaacag

SEQ ID NO: 824469 - DNA, 120 bp, Artificial Sequence
  ENSG00000281091_17 (sequence is synthesized)
tggcttttagaagagcagaaatttttaaccttgaggaagtgccatttataatttttttatttagggttaagatgtttttattgatgtcctatctaaaaaatgtttacctactcacagtca

SEQ ID NO: 824470 - DNA, 120 bp, Artificial Sequence
  ENSG00000281091_18 (sequence is synthesized)
caaggatttactcctgtcttttcttgtaggagtttatacatttggattttatagttaggtctcatattcagtttgagttgattttgtatatgttgtgatatatggattacagtttatttt

SEQ ID NO: 824471 - DNA, 120 bp, Artificial Sequence
  ENSG00000225173_0 (sequence is synthesized)
gtccgcgcctcgctgggctcagcaccccggcccccggcgggacggaggctcgggtccaaagcagtggctgcaccgacacgaacccgtctgcgtttctccacctgtcttccctcgccacct

SEQ ID NO: 824472 - DNA, 120 bp, Artificial Sequence
  ENSG00000225173_1 (sequence is synthesized)
gcatctactatggtctctaaatgcctcgctttgtactttgtggctttctggcagccctttaaagcagcggtgaaagaaaggagagagtcaagacacgggagaaaatgtttcatcccgggt

SEQ ID NO: 824473 - DNA, 120 bp, Artificial Sequence
  ENSG00000225173_2 (sequence is synthesized)
gtcgccaaattgacgagctcattaacctttggagtattgttatttaaaaagtaggaaataaaagataaatgtggaaatatttaataaaagaaaaacgtaagctctcaattttctttatta

SEQ ID NO: 824474 - DNA, 79 bp, Artificial Sequence
  ENSG00000225173_3 (sequence is synthesized)
ttaataaaagaaaaacgtaagctctcaattttctttattacttttttttttttgagacggagtctctcgctctgtcgcc

SEQ ID NO: 824475 - DNA, 120 bp, Artificial Sequence
  ENSG00000225172_0 (sequence is synthesized)
acacagagatagctaagcaagtcattgtgttgtcttcttgtcttctagtcacaaatccatgcaacattttataaaacaaataatcaaaaggaggaactggataaggaagatgtaatttca

SEQ ID NO: 824476 - DNA, 120 bp, Artificial Sequence
  ENSG00000225172_1 (sequence is synthesized)
gcaaagaaatgaaaagtgatgatactggaagtgaaatttgaatagatgggggtatagaaggcatggttgactaagagaaggaatgttgactactgcatgtatgcagtcaagaggaactta

SEQ ID NO: 824477 - DNA, 120 bp, Artificial Sequence
  ENSG00000225172_2 (sequence is synthesized)
atgacgtctttcaccagtggaccccaaatccaccaccagtgaatcccattagccaaatcccactagaataagccaacaagggaagtcaatgcaatccatgaaggttgactgcctgaggcc

SEQ ID NO: 824478 - DNA, 120 bp, Artificial Sequence
  ENSG00000225172_3 (sequence is synthesized)
ctgaaggggacaggaggaggaaggaaggagtttgattctggagattacggcaaagagaataagcagaataacctaataataagaccttagtaatgtacctgtgtctcactgaattatacc

SEQ ID NO: 824479 - DNA, 120 bp, Artificial Sequence
  ENSG00000225172_4 (sequence is synthesized)
cacatctcaagatttgaaactgttattgatgatcaaaaaatatttgctccattcctgagataggaagcagcatcttctcccaagataggaaacagtgtcttgacagctttttaagctaga

SEQ ID NO: 824480 - DNA, 120 bp, Artificial Sequence
  ENSG00000225172_5 (sequence is synthesized)
caagaagacggtgcaaagtaatatatgcaaaaagtgtggagtcaagtgtattgtaaaatgaagtgcataaatgtgaacaatgagagacttgaagcacagaaggctaaaactacctttaac

SEQ ID NO: 824481 - DNA, 120 bp, Artificial Sequence
  ENSG00000225172_6 (sequence is synthesized)
ttctaaagaaattttgtgagaagcatctgagactcttgacagttaaaatccctatcatttcagaaagtgcaactggggatcacatgtattttaaataattctagttgagaatagtcaaaa

SEQ ID NO: 824482 - DNA, 120 bp, Artificial Sequence
  ENSG00000225172_7 (sequence is synthesized)
gtcgcatttatgaaggaagattgacatttttaagcttcccaatgatttcatcaagcttatttagtactcctagcctcagtttcttcacttgcaaaataagaataccaaaaacaggagctt

SEQ ID NO: 824483 - DNA, 120 bp, Artificial Sequence
  ENSG00000225172_8 (sequence is synthesized)
cgtggattaattttaagaattaaatgggaaaatgtttatcgacattttagcacaagcctgcttacaataaacattttaaaaagttatctatcttaataaatatcgattatttaaaatgaa

SEQ ID NO: 824484 - DNA, 60 bp, Artificial Sequence
  ENSG00000225172_9 (sequence is synthesized)
accacgcccagagaaaaacagatcttcaacagttttttgatggaaataaacaatttcaag

SEQ ID NO: 824485 - DNA, 120 bp, Artificial Sequence
  ENSG00000225172_10 (sequence is synthesized)
gatcttcaacagttttttgatggaaataaacaatttcaagttgagacaacacatcagcttcatgcattccttcagcttgaagtcaactgggcctgggttgaatctggttctgttttgttg

SEQ ID NO: 824486 - DNA, 120 bp, Artificial Sequence
  ENSG00000225172_11 (sequence is synthesized)
aaacaaagcaactaaatgatatcaaatacccttgttttgaaaatcaaagaataagcacggcacccaagacaactttttgtatcacaggcacacatgaatgcttttttccttttccttttc

SEQ ID NO: 824487 - DNA, 120 bp, Artificial Sequence
  ENSG00000225172_12 (sequence is synthesized)
ttatcataaaaacctatattttatgacttttacatttattcctagatgctctcatatgcattatctcatttttacaataacattataaatataaacactgttatgctattttacagatga

SEQ ID NO: 824488 - DNA, 120 bp, Artificial Sequence
  ENSG00000225172_13 (sequence is synthesized)
caagaactttcctacaaagtgtctgtgacggattgaattatttttctcaacttgttactcccttctttccatacgaggattacatatccctttcccattggcattggtgacttattttgg

SEQ ID NO: 824489 - DNA, 120 bp, Artificial Sequence
  ENSG00000225174_0 (sequence is synthesized)
ttcacacttggctgcctacactcctgctctaagaagcctgtttcaaagaagcccacattcccttgttgcacgtagaaggctgcagttggagacgggacaactaggttctgggaagccatg

SEQ ID NO: 824490 - DNA, 120 bp, Artificial Sequence
  ENSG00000225174_1 (sequence is synthesized)
gcagaaatcacgcagactctgattcccgccgagaaccagcctaaagaaccactcatggcaagacgggggcccaccggcctgctggctcctcaccaaactctactccgcattgactgtggg

SEQ ID NO: 824491 - DNA, 120 bp, Artificial Sequence
  ENSG00000225174_2 (sequence is synthesized)
ctcttgttctagaggcacccgcatcctcaggatgaaatcctctgattcaacagaaatctggaagtgttcacagcttggcccggagaagatcgttttaaatctacagctttaaaatgtggt

SEQ ID NO: 824492 - DNA, 120 bp, Artificial Sequence
  ENSG00000225174_3 (sequence is synthesized)
tgaaaaggagcccaggttggattctgccagcaggtccgctggccgctgttacctccccactgtcaacgcctaggtctctgcctccagccctgtttcagcctgtccttgaggatttgcttc

SEQ ID NO: 824493 - DNA, 120 bp, Artificial Sequence
  ENSG00000225174_4 (sequence is synthesized)
acctcatttactgagcttgccacagattcattacctggcatcagagctcccctctcactgagcctgcccagaggggtgccagtatactagccagatgccgctggagggactccacaataa

SEQ ID NO: 824494 - DNA, 120 bp, Artificial Sequence
  ENSG00000225174_5 (sequence is synthesized)
agcctggctattaaagacttcaacagtctcataaagtcactttgccagctgtagagcacacaagtgcccacagatccaagcctccttccttccccaaagaaacaccttggataaagtctt

SEQ ID NO: 824495 - DNA, 120 bp, Artificial Sequence
  ENSG00000225174_6 (sequence is synthesized)
ggaatatcatccattagcacatggctccagccaacacatgaattcccttacaccagcacatggtctctctttcctgttcattcactttggaagacagtccttgaaatgacaaggcctgga

SEQ ID NO: 824496 - DNA, 120 bp, Artificial Sequence
  ENSG00000225174_7 (sequence is synthesized)
gtgtcttgtacaaccaccgccaatccggtttccagcagaggcttgtgggctagggagtgtatcgatttgtattgttaaaggaatttcctgctcctctcagtgtcagctgaagagccctct

SEQ ID NO: 824497 - DNA, 120 bp, Artificial Sequence
  ENSG00000225174_8 (sequence is synthesized)
caagaggagacgaactcctggttccttcctacggggtgtatagaccagtgacaatgttagtcctacaatttggatttatttgtttgttttctaatcaccgccacttctccaagtacaaag

SEQ ID NO: 824498 - DNA, 120 bp, Artificial Sequence
  ENSG00000225174_9 (sequence is synthesized)
tctgtgtctataattagatatcttctacatgttacaccggcaagtccatctcatcattttacagagggatggtgacttcctttagcgccccatactgaccgcggtccctcacctgctgac

SEQ ID NO: 824499 - DNA, 120 bp, Artificial Sequence
  ENSG00000225174_10 (sequence is synthesized)
tgattgacttataaatctgccccccacccacttgtctgtccattgaaggcaaattcgccatcgggaacacagtagtttctcaataactatctaatgcatggccacccttcccaggattta

SEQ ID NO: 824500 - DNA, 120 bp, Artificial Sequence
  ENSG00000225174_11 (sequence is synthesized)
gaatatcaaagggacgtgttctttcctcccaaatcacctgcctgcgcttcccccagccgggtgccccagccttcacctcggtccggccaccacctcatcccgcttcttcgcggcttccag

SEQ ID NO: 824501 - DNA, 120 bp, Artificial Sequence
  ENSG00000225174_12 (sequence is synthesized)
gcctcgggctgggatctcagcccctgcctgtaggtgcggcccagagggtgcgacacgcgtcggagcggggcagcggaggaggggacagggacgcggcagccacacccgcatctctttccc

SEQ ID NO: 824502 - DNA, 120 bp, Artificial Sequence
  ENSG00000225174_13 (sequence is synthesized)
ctctcgggcatccccgagggcccttctgcctccagttccttgagcccccgaagccccccatgcggcaagagcgagtcgcaggaacaagtggggaatcttggccgcggccccctcccccgc

SEQ ID NO: 824503 - DNA, 120 bp, Artificial Sequence
  ENSG00000225174_14 (sequence is synthesized)
cttataaaaaagaaattgacttttgtttggagtttgtgaaaagtggggctcggggcccagtcaatggggcgccccgcggcgcgggctgagtggagctagcgcgaaccgctcagccgcggc

SEQ ID NO: 824504 - DNA, 120 bp, Artificial Sequence
  ENSG00000225174_15 (sequence is synthesized)
cccaattaatccgccctttgtgcggcccgcccggccgcccccgccgcagccgcaccagcggcccattgttcggcctcgccgggccgcgggatttacccttttcaaacagccggttttgtc

SEQ ID NO: 824505 - DNA, 120 bp, Artificial Sequence
  ENSG00000225174_16 (sequence is synthesized)
ggcaagacgggggcccaccggcctgctggctcctcaccaaactctactccgcattgactgtgggctcttgttctagaggcacccgcatcctcaggatgaaatgtgagtacaagagcagag

SEQ ID NO: 824506 - DNA, 120 bp, Artificial Sequence
  ENSG00000225174_17 (sequence is synthesized)
ggaaggaagcaaaaagccaccggcccgaaggttgggcccaaaacagggactctgcgtcccacccgcggccgcgccgcccccccgcgcccccggccctgcagtcccgaagccccgcggggg

SEQ ID NO: 824507 - DNA, 120 bp, Artificial Sequence
  ENSG00000225174_18 (sequence is synthesized)
gaccactgcacctgctgagccagacactccgcggacctgacctccgttttacccatctgtaaaatggagcagctgggcgctggcaagccgtaagtccaagagctttggctccaccagcgt

SEQ ID NO: 824508 - DNA, 120 bp, Artificial Sequence
  ENSG00000225174_19 (sequence is synthesized)
gtacgacgctcatttcctttctctctccccacaccctttccaaaaactgtaagccagaaaacctggccaggcctccgcgacggcgagaaacggtcttgaaggtcggtcggtcgccgtaat

SEQ ID NO: 824509 - DNA, 120 bp, Artificial Sequence
  ENSG00000225174_20 (sequence is synthesized)
gcggtccggatcgtgcacgtgctgtttcgccactgccctccggctcctccttaacaaagatgtcaaccgtgctaaatcacaggtggtgcctttgtaagaccagctattgtcccctcataa

SEQ ID NO: 824510 - DNA, 120 bp, Artificial Sequence
  ENSG00000225174_21 (sequence is synthesized)
gtcaagatataaaacgctttgtactgaatggcccatgatctggagcgctcaacttgggagttgagctgttagattttcttttccccacccaccagagccactcttctcccaaatgacctc

SEQ ID NO: 824511 - DNA, 120 bp, Artificial Sequence
  ENSG00000225174_22 (sequence is synthesized)
acttaataagcaaaatttaaatggggtggggggggactcaacatgctgtggatgaaaagaatagttactgatttcttcacacttaatggcatgtaggagtcttttaaaatacagtctcat

SEQ ID NO: 824512 - DNA, 120 bp, Artificial Sequence
  ENSG00000225174_23 (sequence is synthesized)
accaaacagatctgtgaattttaagcagaactgaattgtattaatcagttgatgggtttgttcatcttctatcactagatgagaaatacaaaggttgggaatccacagcgtctaattcta

SEQ ID NO: 824513 - DNA, 120 bp, Artificial Sequence
  ENSG00000225174_24 (sequence is synthesized)
ctgtacttaagcaatctctccctttagtccagaaaatttcctactagttgcacatgagagaaaaattgaagcaaaaaaaaaaaaatctgttttttgtttatccatcaggtgaatacacac

SEQ ID NO: 824514 - DNA, 120 bp, Artificial Sequence
  ENSG00000225174_25 (sequence is synthesized)
ttcagcatcatacagaggaaaccctaggtggtctttagcaagatttcagtggttaagagctacaatttagaaaagatgacaatacatacacagtgtcaatagtatttaaacaaacatccc

SEQ ID NO: 824515 - DNA, 120 bp, Artificial Sequence
  ENSG00000225174_26 (sequence is synthesized)
agacaacagaataatggttattaactatgatgctttgggcttctgactaatttcccatgtctgtctgcagccaaacagctgcaggatttttccccctttaaaaactgtttgtgcatcatt

SEQ ID NO: 824516 - DNA, 120 bp, Artificial Sequence
  ENSG00000225174_27 (sequence is synthesized)
ttaaaaattgcatttaacagccatattctccagagcagtccctctgtgtggaactgaagtgaatggtttagcaatagcgatgaagccagtaagtagtaagaatgtctttcatgccaaaag

SEQ ID NO: 824517 - DNA, 120 bp, Artificial Sequence
  ENSG00000225174_28 (sequence is synthesized)
aactctaaccactctgctagaaatgggctacatttttactctctgaaatgtagaagctgtctgctactgtatgaccttcagtatggtttacatgtctaaataaatggaattatttaaccc

SEQ ID NO: 824518 - DNA, 120 bp, Artificial Sequence
  ENSG00000225177_0 (sequence is synthesized)
aacatggaattaacaggactcatgggtgtatccataaaagcaactgaatttttagtcttctgctgttaataatctgttccatgaggatagttcttcctcttccacagaatgaaactcagg

SEQ ID NO: 824519 - DNA, 120 bp, Artificial Sequence
  ENSG00000225177_1 (sequence is synthesized)
cagtcctataacttttttattctctcaggtaatagaaaatcctgttactttaagaggaaaaaccctgctcttaattcagtaattcaaatcttgtccccttccccaacagggtctcctatg

SEQ ID NO: 824520 - DNA, 120 bp, Artificial Sequence
  ENSG00000225177_2 (sequence is synthesized)
gacagaagtgcgggcaaggagctttgttcctccccgatgtcaccctcccacagcccacttgctagcaggcaagagaggggtggaggccggcagtaaggcatgtactgaactggacctctg

SEQ ID NO: 824521 - DNA, 120 bp, Artificial Sequence
  ENSG00000225177_3 (sequence is synthesized)
ccttcagtgagactttttccgaagaatcccttttaaaatgacctcaagctgaccttcctgatgcagattccacatatggtatctgagactcacacagtgtggttggaagatagcacagtg

SEQ ID NO: 824522 - DNA, 120 bp, Artificial Sequence
  ENSG00000225177_4 (sequence is synthesized)
acctcccaggcacagccctctgccagccctccactggctgccctaggatgctggccttcctccgatgggagtcgggcccagtctgctgtgagccaggagaagccagcaagctccctgcga

SEQ ID NO: 824523 - DNA, 120 bp, Artificial Sequence
  ENSG00000225177_5 (sequence is synthesized)
ggcctggaggagcccttctcactcagcttggtgttcgatgccagtgcccccgcccattgtggggtgagggtgggactctcagcacagccctgtccaaataaatcctctaaagccctcttc

SEQ ID NO: 824524 - DNA, 120 bp, Artificial Sequence
  ENSG00000225177_6 (sequence is synthesized)
cggtgcggtggcccagcgcggccgcctggccctcgagctcgccgaagatgtccccggcgcagcgcgacagggttgttatgaggctcaaaggaacggctgctgtgaaaaaacatgctttgc

SEQ ID NO: 824525 - DNA, 120 bp, Artificial Sequence
  ENSG00000225177_7 (sequence is synthesized)
aatgtctggccatgcttcctgacgctggcaatgaattttctctagctgcttattctaccccaaccttggtcttccttctgtcccctccatgcagactcttaccatcagggtcctgccaac

SEQ ID NO: 824526 - DNA, 120 bp, Artificial Sequence
  ENSG00000225177_8 (sequence is synthesized)
ctgttgtacagcgcctcattttttacaatgtgggccagtaactatttcgtatcacctactctgaccaccttcagggttgttatgaggctcaaaggaacggctgctgtgaaaaaacatgct

SEQ ID NO: 824527 - DNA, 120 bp, Artificial Sequence
  ENSG00000225177_9 (sequence is synthesized)
tgcctatttaaagtgtataactcaatgctttttagtatatttacaatgttgtgcaaacatcaccataatcacttttagaacattttaatcacaccagtctcaaaaaaacaattctcttta

SEQ ID NO: 824528 - DNA, 120 bp, Artificial Sequence
  ENSG00000225177_10 (sequence is synthesized)
gtactcagttccctccctcctaaaccatcactagccaattgcaaccactcatgtgtctatggatttgcccattgtagaggtttcatatcaatgaaatcatacatgtgtgattgtttgtga

SEQ ID NO: 824529 - DNA, 120 bp, Artificial Sequence
  ENSG00000225177_11 (sequence is synthesized)
ctggcttctttcacttagtgtgatgttttcaaagtttatccatggagtagcatggatcagttttgattctttttttaaggctgcataatatcccattgtttggatatgccacattttgtt

SEQ ID NO: 824530 - DNA, 120 bp, Artificial Sequence
  ENSG00000225177_12 (sequence is synthesized)
tatccattcatcagttaatggacatttgggtgtccactttttggctattatgattaatgctgctgtgaacatgtgtgtacaagtttttgtgttaacgtgtgttttcatttctcttgggta

SEQ ID NO: 824531 - DNA, 120 bp, Artificial Sequence
  ENSG00000225177_13 (sequence is synthesized)
cataccgaggagtggaattgatgagtcatggtgccaatctgttttccgaagtgactgcaccattttacctcccagccagcaatgtatgagggttccagtttcttcacatcctcggcaaca

SEQ ID NO: 824532 - DNA, 120 bp, Artificial Sequence
  ENSG00000225177_14 (sequence is synthesized)
ctaatttttatgtcttttttattacagccattctagtgggtataatacctcattgtggattcgatttgcattttcctgatagctagtgataatgagcatcttttcatgattttatcagct

SEQ ID NO: 824533 - DNA, 120 bp, Artificial Sequence
  ENSG00000225177_15 (sequence is synthesized)
acctgtttatcttctttggaaaaagataacattgtagaaatgtctgttcagattcttggccattattaaatcaaatttttgtccatttcttatcaagatgtaatagatccttgaatattc

SEQ ID NO: 824534 - DNA, 120 bp, Artificial Sequence
  ENSG00000225177_16 (sequence is synthesized)
taatagatccttgaatattctagatacaagtcccttaggtgtaacatttacttcctgattgctttaacagtctattgtgggttttttgttttttgttttttgttttgagatggagtctcg

SEQ ID NO: 824535 - DNA, 66 bp, Artificial Sequence
  ENSG00000225177_17 (sequence is synthesized)
tcaagcacccggcccagcattgttctttagtttattccctcttctattcccttgagactttcccat

SEQ ID NO: 824536 - DNA, 120 bp, Artificial Sequence
  ENSG00000225177_18 (sequence is synthesized)
ttagtttattccctcttctattcccttgagactttcccattggtttgaaaagaattatgatttagccacataaactaataaaaagagagcaagaatatttttgtaaatttgtaatcctgg

SEQ ID NO: 824537 - DNA, 120 bp, Artificial Sequence
  ENSG00000281097_0 (sequence is synthesized)
gtacaagagaactctgcatttgtcttctgcccacaacttcgttgaagaagtggagaggccaagcaactccaaggctgtttggaaggagagctgggctctgcctcctgggagagttggagg

SEQ ID NO: 824538 - DNA, 120 bp, Artificial Sequence
  ENSG00000281097_1 (sequence is synthesized)
acatttcttctctgtggagtgtgaagggaggactgccctattccttgtctgctagtgcttgcccctgggagccagtgcatcttatcccttttaattctcgctggctcccaggggcacgta

SEQ ID NO: 824539 - DNA, 120 bp, Artificial Sequence
  ENSG00000281097_2 (sequence is synthesized)
ttaccatcccattttacggatgcagaaactgaggcactgagaagaatgatttcagaccatacagtcttccaagtggcaaagcctgggcttgaaccaggtctcctgacctacaacttggca

SEQ ID NO: 824540 - DNA, 120 bp, Artificial Sequence
  ENSG00000281097_3 (sequence is synthesized)
gagagagggacaaccaccatgtccccttgtccgtggctgcatccagtgccgatttaactcagcacttccgggaagcccctttctcaccctggccccaggctcgttcctggggaagattca

SEQ ID NO: 824541 - DNA, 120 bp, Artificial Sequence
  ENSG00000281097_4 (sequence is synthesized)
gctcttgagtgctgagagctccacgagaggaagaagatgcctgggtgctgagtaaggaaactgacatggaacacctgccttccaccaggcagggctgctgggaacaccgtgggcattttc

SEQ ID NO: 824542 - DNA, 120 bp, Artificial Sequence
  ENSG00000281097_5 (sequence is synthesized)
tcacttcattttcacaatgaccctacgagcaaaccatgggtgcagcagaagacatgaaaagggaaaggagcgaggttgctgctcttctcgtgggaccagctcccggtgctgtcaaaacaa

SEQ ID NO: 824543 - DNA, 120 bp, Artificial Sequence
  ENSG00000281097_6 (sequence is synthesized)
gcctgagataagggcgggcaaggggtggcaggctcagagattagcgctgctactgcccaacctgctcagaaagtttcattcttttagcaaagttcctggcagctgtgaccacttaaacgg

SEQ ID NO: 824544 - DNA, 120 bp, Artificial Sequence
  ENSG00000281097_7 (sequence is synthesized)
cttttgcttccattaaacaggagactcattaagtcacggagcttaaaacagctctaaagggcccagtagtcattcctcagtgaaaagtgccaattcattgcttggtagattaaaaaaaaa

SEQ ID NO: 824545 - DNA, 120 bp, Artificial Sequence
  ENSG00000225179_0 (sequence is synthesized)
tacaagaaatgcaatcagggggagcagaatgacgcagaggagtctggaagctcaggattgcattaagcgactttcccatactgtgaggagatgtggtggggaccattaactgttggaagg

SEQ ID NO: 824546 - DNA, 120 bp, Artificial Sequence
  ENSG00000225179_1 (sequence is synthesized)
atatcagagccacttgggagaaataagaaacaggtgtagaaacagtcgcagattggcatgagctgtggagaaagagtctggattctgggttgctgtgtcacacacagcccacttgcagga

SEQ ID NO: 824547 - DNA, 120 bp, Artificial Sequence
  ENSG00000225179_2 (sequence is synthesized)
tgacagtggaagaatgagtcatgatctctgcaagcgcccatcaagaacagcctgagaggtctggaaagtgctcaccccaggacccttcatgtccttattaaaattgtatggcagaaaaaa

SEQ ID NO: 824548 - DNA, 120 bp, Artificial Sequence
  ENSG00000225179_3 (sequence is synthesized)
cattatatcaagagctagatatcagagccacttgggagaaataagaaacaggtgtagaaacaggattggtagacaacatgttcatgcaaatgatatgaagaagattggcacctggaaaat

SEQ ID NO: 824549 - DNA, 120 bp, Artificial Sequence
  ENSG00000225179_4 (sequence is synthesized)
agaaaaaagcacatggtgaggctgattctgtggggatgtatttgagctagaagattcaggagggaaaattagttctaagacaaagatggagacatcaataagattgggaaatactcagac

SEQ ID NO: 824550 - DNA, 120 bp, Artificial Sequence
  ENSG00000225179_5 (sequence is synthesized)
gtcagaagaatttgggtttgaatcagaattcctttacatactttctaagtttcaagttaagcagcaattcagtgtttcaaaccttacgattgataaacaaaaaataaaatgaaattcacc

SEQ ID NO: 824551 - DNA, 120 bp, Artificial Sequence
  ENSG00000225179_6 (sequence is synthesized)
acaataataataatcagctgtttcaacaagtcttagaaaaatagaagactgagatatagatttcctgtgtgcaccaacagattgattgaaaatgaagaggcaggcttggtatatgaagat

SEQ ID NO: 824552 - DNA, 120 bp, Artificial Sequence
  ENSG00000225179_7 (sequence is synthesized)
cttgggagaaataagaaacaggtgtagaaacagggaatttggttctgtggtattgttggaggtgacgtgcttcagctgctgaagactaaattatttgggatccagtgaccctggccttga

SEQ ID NO: 824553 - DNA, 120 bp, Artificial Sequence
  ENSG00000225179_8 (sequence is synthesized)
agttcagctgcaggatggagctgacatcacccaagctcaagtccattctgcttctgcttcctcaacacagtgaggtggccactgttcctaccactttgacagcagggaaaagaggcagag

SEQ ID NO: 824554 - DNA, 120 bp, Artificial Sequence
  ENSG00000225179_9 (sequence is synthesized)
aggatctggggctggggctggagctacagctggagggaattcacaagcaagctgcattttaaggttgtggtgaagaaagaagaagccagaagaagagagttccttaatgctggagaatac

SEQ ID NO: 824555 - DNA, 120 bp, Artificial Sequence
  ENSG00000225179_10 (sequence is synthesized)
catccaaaccttgttataaagcacatgagtttctggggtgcctgcatgattgagcttacactttatcaggggaattgttgccaccgattatagatgttgaaaaactcaatatttagagga

SEQ ID NO: 824556 - DNA, 120 bp, Artificial Sequence
  ENSG00000225179_11 (sequence is synthesized)
gaaaattgataaaagttttatttggttatataaaaataatactgagaacagtcatttatgtggttacttaacagtcacttatgtggttatttatggcttttgctgtgcagaaaaatgaat

SEQ ID NO: 824557 - DNA, 120 bp, Artificial Sequence
  ENSG00000225179_12 (sequence is synthesized)
accatgcagtattttaaattggtgtcgaattaactgtgtaaactgctgttgattaaacttcacagctagtgactcatggttcaaaattttaaaaattccagtgaacattaacgtgtctca

SEQ ID NO: 824558 - DNA, 120 bp, Artificial Sequence
  ENSG00000225179_13 (sequence is synthesized)
ctccggtgttgtcttatacacttttgcatgtgtactgtttattttgtcttctcagatacaccagaaacaaactaaaggtatattttaataattttcttctatacatatatccaataaata

SEQ ID NO: 824559 - DNA, 120 bp, Artificial Sequence
  ENSG00000225179_14 (sequence is synthesized)
aaatagtatccataacaaaaattaactttatcatttgcactttgtttctttcatacatgagatttttaaacccatctttaaatgtcaaaatagaactttgaaaaatagaaatactttttg

SEQ ID NO: 824560 - DNA, 120 bp, Artificial Sequence
  ENSG00000225179_15 (sequence is synthesized)
ccctccattatggattgaattggacttttaagccaattggttaattaagctaaaaaataaacaatttagagatatttttttcaggtctcctatttttttgccagaacgacagatgtgcaa

SEQ ID NO: 824561 - DNA, 120 bp, Artificial Sequence
  ENSG00000225179_16 (sequence is synthesized)
ttctcaaagagatcgtttaccaagagctttaaatattaccgcagtaaatatcttttcttaatgacttagtctattcttctgcaataaatcactgtattctgacgctttcaggaaactttg

SEQ ID NO: 824562 - DNA, 120 bp, Artificial Sequence
  ENSG00000225179_17 (sequence is synthesized)
tttatacactgctgtggctgttaagtcttgccttcaatagtgttagttttgtgatacagtgaacaaaaatgtgaactccttaaggataaaggttgctcttgtgccttcataaaatatctg

SEQ ID NO: 824563 - DNA, 120 bp, Artificial Sequence
  ENSG00000225179_18 (sequence is synthesized)
ttgacttctgggaattctctaggcttttaaaatagtaattaattttttaaattgatgaaagttgtgtatatttatggtacataacttgatgttttgatttatatatacgttgtagaatgg

SEQ ID NO: 824564 - DNA, 120 bp, Artificial Sequence
  ENSG00000225179_19 (sequence is synthesized)
cttaatcaagctaattaacttatcttcacctcacatacttattattttttggtaagaacacttaaaatataccctcatagcaatttttaagtatgcaatatattgttgttaacaatagcc

SEQ ID NO: 824565 - DNA, 120 bp, Artificial Sequence
  ENSG00000225179_20 (sequence is synthesized)
accaggatgcctgattgatctcttgaacttattcttcctgcctaatggaaattttgaatcctttgaccaatatctcccctagtccctgggaatttagtcttataggccatattgtggcat

SEQ ID NO: 824566 - DNA, 120 bp, Artificial Sequence
  ENSG00000225179_21 (sequence is synthesized)
gagcaaggtcacctcagatattagggcttccaatttattgactagtctctctttatgacatctttaagctaaaaaggctaaggaaagtgaactatggagcaatatttattttatctgaaa

SEQ ID NO: 824567 - DNA, 120 bp, Artificial Sequence
  ENSG00000225179_22 (sequence is synthesized)
aatgtacacatatgatattttggtaaaatgtatcttcctctgatatacatatatgttattttcataagtctgtattttgttcatattttaattccaagttttagttccattttagatatt

SEQ ID NO: 824568 - DNA, 120 bp, Artificial Sequence
  ENSG00000225179_23 (sequence is synthesized)
ctactttgtgtagcctccatcataacccctgccccccgtatctgttgactttgatcattgacatccaagttcagtgatcatctcctcagcaacaccagttctaaaaaaataaaaataata

SEQ ID NO: 824569 - DNA, 120 bp, Artificial Sequence
  ENSG00000225179_24 (sequence is synthesized)
ataattttaaaaaacctcatccatattccagtcaatctgtggcataattgtgtattttctttgttgaagaaaaaaataaggaattaccttgtaacactaacccaaactcactattaacac

SEQ ID NO: 824570 - DNA, 120 bp, Artificial Sequence
  ENSG00000257458_0 (sequence is synthesized)
ttgtgtgtgacaggaaggaaacttgttaatactgctgtctcagtctttagctatttctgctgttgctgcagaggcagagagatggtgaaagaatcaacctcaggaaatagtatggaggtc

SEQ ID NO: 824571 - DNA, 120 bp, Artificial Sequence
  ENSG00000257458_1 (sequence is synthesized)
aagggtcagctaagaggatctactgattttctgatctgcggagctttctgagaggaaaaaactcccaagactcctagaaagtgagcatgagctgctatagtttgaatgtaacctcttcaa

SEQ ID NO: 824572 - DNA, 120 bp, Artificial Sequence
  ENSG00000257458_2 (sequence is synthesized)
tgactaatccttctagtgaaagatattcacttttataataaggtgcttgtctacacagaggtttctgagtcaaaggaggagaacgtacaaaatagaccgaaagaagagcctgcctagctg

SEQ ID NO: 824573 - DNA, 120 bp, Artificial Sequence
  ENSG00000257458_3 (sequence is synthesized)
ctctttttcttttgtaattaccaagatcccgacggtttatacccactcaactgcaggtgctgggagaggagaggctactgtgacaaaaattatataaagaagagcccagcagatgcattt

SEQ ID NO: 824574 - DNA, 120 bp, Artificial Sequence
  ENSG00000257456_0 (sequence is synthesized)
agtttttatatttttaagacagtttattattatgtggccaatgaaccagcaggtggcactacacaacaattttacacaggcaaaaataagttcccttagggcgaaaaagatgatgttttc

SEQ ID NO: 824575 - DNA, 120 bp, Artificial Sequence
  ENSG00000257456_1 (sequence is synthesized)
ccatacgaaaacggaatgtgatcaacactactctgacaatttacacaaacaagaagtgaccactttaaagatggaatgccaagaacaatacaataaatgctaaagagaaagagtgacaaa

SEQ ID NO: 824576 - DNA, 120 bp, Artificial Sequence
  ENSG00000251200_0 (sequence is synthesized)
gcaagagggcatacagagaaatgtccaagtacagtaccttggggaacatttaatctaggggatgaggggaagaaatggagtcccagaggatgttacggaaatgaaaggagaagaaagcat

SEQ ID NO: 824577 - DNA, 120 bp, Artificial Sequence
  ENSG00000251200_1 (sequence is synthesized)
caggattactgttcttgaaaggaactgcttcatcagagaggtctggtcctcaggctgtgagtgatgtgccttaggggcaggaggaaagtcaagtcctcctgggccttggatgactccctt

SEQ ID NO: 824578 - DNA, 120 bp, Artificial Sequence
  ENSG00000251200_2 (sequence is synthesized)
gcaagaatacattctgtgagttgagaccagaagcagcaaccagaataactagatgattactcttctcttcatgtggtcaaagtatttatagtatttgcttaataaaactcatgaaatctc

SEQ ID NO: 824579 - DNA, 120 bp, Artificial Sequence
  ENSG00000251200_3 (sequence is synthesized)
agtcacattgagaggctatgtgtggttgccctggtcaacacccaactgccagcatcaactgccagctatgtagcgagctctcttggacatctagcccagtcaaagccttgggtgactgtc

SEQ ID NO: 824580 - DNA, 120 bp, Artificial Sequence
  ENSG00000251200_4 (sequence is synthesized)
accccagccagcatctgacggcaacttcagagagaacccagatgagaactgctcagctgaaccccatcatccaaaaaactagacagggtttcaccatgttgcccaccctagtcttgaact

SEQ ID NO: 824581 - DNA, 120 bp, Artificial Sequence
  ENSG00000203362_0 (sequence is synthesized)
gggtgacaccaaaaaaatcagtgttgcatatggaaactaaaaaaaaagaaagttatgtaataagatgtggtacagaaaggtaagaccaaagaacacctttcttattatgataattaaatt

SEQ ID NO: 824582 - DNA, 120 bp, Artificial Sequence
  ENSG00000203362_1 (sequence is synthesized)
tctgactctggtcccagaataataaaatatcaaatatcaaaagcttatgtaccatgattttgcttcctctataagtggcacatctttattgtccattatattttgtccaaagaactaaag

SEQ ID NO: 824583 - DNA, 120 bp, Artificial Sequence
  ENSG00000203362_2 (sequence is synthesized)
gatctgcagcctctagcttgacatactttgcattatcaggatcagaaaataaaataattccttaagtcacaagcttccctgggcagttttactactactcttctgcacaacacattaaag

SEQ ID NO: 824584 - DNA, 83 bp, Artificial Sequence
  ENSG00000203362_3 (sequence is synthesized)
gggcagttttactactactcttctgcacaacacattaaaggcattttatgcaattgttcagcagcaaaagcaaagtttacatg

SEQ ID NO: 824585 - DNA, 120 bp, Artificial Sequence
  ENSG00000203362_4 (sequence is synthesized)
aagaaaaaagaaagaaagaaagaaagggaaagaaagaaaagaaaggaagggaggaaggaaggaaagaaggaaggaaggaaagacagacatctaagatatatcaaatgtatctgtgggtac

SEQ ID NO: 824586 - DNA, 120 bp, Artificial Sequence
  ENSG00000203362_5 (sequence is synthesized)
agacagacatctaagatatatcaaatgtatctgtgggtacaagagggtaggtgcggcacagagggagtgggaaaatcactataaagggtaaaagtagcaaaatacaatgagaggggcctt

SEQ ID NO: 824587 - DNA, 120 bp, Artificial Sequence
  ENSG00000203364_0 (sequence is synthesized)
acactgtaaatgttagtcatggaggatgtgtaccaacatggaagagtgtttacaatgtatctttagagaaaagatggactatccaagtatgcatactggaattatcattagattaccata

SEQ ID NO: 824588 - DNA, 79 bp, Artificial Sequence
  ENSG00000203364_1 (sequence is synthesized)
aggagcagaacagagacataagtaacagcaaccgtgaacctcagaggcagccaagggctggagtgcaatggcaccatcg

SEQ ID NO: 824589 - DNA, 120 bp, Artificial Sequence
  ENSG00000251205_0 (sequence is synthesized)
accagtcaccatggcagggattcaatagcccactgtgccacagagggcatgccttggatgtagagagtgaagactttccacaacttgtgaatgagccctctgtgagtttagccaaaacat

SEQ ID NO: 824590 - DNA, 120 bp, Artificial Sequence
  ENSG00000251205_1 (sequence is synthesized)
tcatgtcaaagaaatggaaatctcaaataaaacccatcgcaggccaagctcaggagggctggctagccaacaaatcctgaacaagggggttcaagggaaaaggaaaacatgtgtttcata

SEQ ID NO: 824591 - DNA, 120 bp, Artificial Sequence
  ENSG00000251205_2 (sequence is synthesized)
gcagggtgatggttggggcaagaaggcatctgcagcctgggtcactggtaacctgtcgtagtgactgagctgacaccaagccttgctctgaagcagttcagagactggagatgggcagtg

SEQ ID NO: 824592 - DNA, 120 bp, Artificial Sequence
  ENSG00000251205_3 (sequence is synthesized)
tcacccatatcaggaatattccctcagatacagtcagaagaatatacaaggataaatgtacaaggaacaggaggcctgacgtcaaaagctccccctcgtgaccaaatcgactgggacttg

SEQ ID NO: 824593 - DNA, 120 bp, Artificial Sequence
  ENSG00000251205_4 (sequence is synthesized)
ttggatccaagatggcagctcacttgacttctgaagaacctggaacttcattataatcaaatttccgtgctaaatgacattcccgcgagcaccatgacagttgacaatcaccatgacaat

SEQ ID NO: 824594 - DNA, 120 bp, Artificial Sequence
  ENSG00000251205_5 (sequence is synthesized)
gacagaagaaaccataaaatgacaaaaaggaaggcggcaactctggttctgagttttctgcccatttccagaaaagatgtgaatattcttctctttgcttttaatgcctgaccctgtcat

SEQ ID NO: 824595 - DNA, 120 bp, Artificial Sequence
  ENSG00000251205_6 (sequence is synthesized)
tagagatattctgtatctgtgacttcctggttttcataagctgagaaggtgatttgtgagccaatctcctggttctcaatttcatggccattgaatgaagctggtactgcttgatgctca

SEQ ID NO: 824596 - DNA, 120 bp, Artificial Sequence
  ENSG00000251205_7 (sequence is synthesized)
ggcagttaagagcaaaattccaagttaaacagaataccaacgacagtctggaagggaaaaagacagcacacaaagactggcagaagttagaaagatggataaggccaagtgttggtggag

SEQ ID NO: 824597 - DNA, 120 bp, Artificial Sequence
  ENSG00000251205_8 (sequence is synthesized)
atgttcccacatacaggaattttaccattgctgatggagtcactgtgtcattactgcagcctttttggaaagcatctgtcactacttagccaattaagaaaatgcatattctataaccca

SEQ ID NO: 824598 - DNA, 120 bp, Artificial Sequence
  ENSG00000251205_9 (sequence is synthesized)
gcaattatacctctgggcatgcttgcaatatttctccaccaaatatgatgatggttccaggttttctatagataccatttatccagaactcaacactgcagtgcttagacaatatgtcct

SEQ ID NO: 824599 - DNA, 120 bp, Artificial Sequence
  ENSG00000251205_10 (sequence is synthesized)
gtaagacggtactgtttgtgaactacaagatatattttccatgattccatggattgttggaccctgtagccaagactagaacacatacttggaatccaaagtataagaagcatttggcct

SEQ ID NO: 824600 - DNA, 120 bp, Artificial Sequence
  ENSG00000251205_11 (sequence is synthesized)
gagaagataccacaccctctccatcgttttcataagaattgcctaccatctacagatgaacccacccaagcaaagccagcatgctctgcataggaagcctgagatgatggagtccacatg

SEQ ID NO: 824601 - DNA, 120 bp, Artificial Sequence
  ENSG00000251205_12 (sequence is synthesized)
acaatagcgtctgcctttagcaagtaatctcaagagagtcactttcagagtccagactggaagaacacttaacttcaaaatagctctttacaaatactaatcagatggtccacaaaactc

SEQ ID NO: 824602 - DNA, 120 bp, Artificial Sequence
  ENSG00000251205_13 (sequence is synthesized)
tctgccatatgaaagttatcttaacccaagtagggaagtcacagatagctgtaaatatctgtgtgcctagctctgtgttagaagcaatggtgaatgtgtgtgtgtgggatggggtggagt

SEQ ID NO: 824603 - DNA, 120 bp, Artificial Sequence
  ENSG00000251205_14 (sequence is synthesized)
cagtgggtatgtgtaggtgtgttggtgggtggagaaaggctgcattcatttaggtgcaggaaaaggcttttttttttttctgaccaattaggtttttgactgaatggaccaaactgactg

SEQ ID NO: 824604 - DNA, 120 bp, Artificial Sequence
  ENSG00000251205_15 (sequence is synthesized)
ttgtggtgtcatggaaacctagccatggaaaccttatagaaatatcaggagctgaagggagggagtgttgaagaaagcatcacagagagattgctaccaactgattcccatagatactat

SEQ ID NO: 824605 - DNA, 120 bp, Artificial Sequence
  ENSG00000251205_16 (sequence is synthesized)
aaaaataactccttttatcttcccattttcagtgagagaatctcgctatttggaaaatcatgcttgctattctgcagcttttctgtacagataactaataaacaacttggaaaacactca

SEQ ID NO: 824606 - DNA, 120 bp, Artificial Sequence
  ENSG00000251205_17 (sequence is synthesized)
ggcagttaagagcaaaattccaagttaaacagaataccaacgacagtctggaagggaaaaagacagcacacaaagatcccagaataagaaaatatacagaggaagctgcagccaatatat

SEQ ID NO: 824607 - DNA, 120 bp, Artificial Sequence
  ENSG00000251205_18 (sequence is synthesized)
attcaacatgttacataagtgagaaacagatgtttgtggttataagtcactgagttttgggagctatttgttatcacagcataacttagtgagagctgactaatgcagaagactggcaga

SEQ ID NO: 824608 - DNA, 120 bp, Artificial Sequence
  ENSG00000251205_19 (sequence is synthesized)
tccttttcaggtggtacttctccagggaacgatgtccttatctgtgagaccttgaactgaatggggacgaagggaactgaattgttcagcgggactgtaactgacagtggagctcctggt

SEQ ID NO: 824609 - DNA, 120 bp, Artificial Sequence
  ENSG00000251205_20 (sequence is synthesized)
agagatgatgggaggccgcaggatgggacagtccaagagttcagaggcatgcttgcaatatttctccaccaaatatgatgatggttccaggttttctatagataccatttatccagaagc

SEQ ID NO: 824610 - DNA, 120 bp, Artificial Sequence
  ENSG00000251206_0 (sequence is synthesized)
agcaaagcccctggcttgacctggctcccttctgggagggaggaccacgtctcaatttgacagcaggaggctgtaggtcagtggggtgatgacctggccctgggagacctgctctttctc

SEQ ID NO: 824611 - DNA, 120 bp, Artificial Sequence
  ENSG00000251206_1 (sequence is synthesized)
tcagcagaaccccataaatccttcaaaaggaaggcatgctacccatcaagctaagaggccagaagaagatctttttataatgtaactcaaaggaggggagaaaagagccagagacccttt

SEQ ID NO: 824612 - DNA, 120 bp, Artificial Sequence
  ENSG00000251206_2 (sequence is synthesized)
aggcgtgcactctcaccagggaaatggcttgattgctgtgtaaatagatgcttgaccttcatcctgccattcatccatatggaccctaaacgctctccagctctatcctaggggacatgg

SEQ ID NO: 824613 - DNA, 120 bp, Artificial Sequence
  ENSG00000251206_3 (sequence is synthesized)
aatggaggttttccaaagacattggaacacccctgtagccatagtagctcttttttaaagaggagaggaatctgtagattctttcacatgagggtgggtgagtaaaagttaagcaaacaa

SEQ ID NO: 824614 - DNA, 120 bp, Artificial Sequence
  ENSG00000257453_0 (sequence is synthesized)
agtgccgggaccttaccttgtcttgcccgggagctgcccctttcaggcagagttggaggtgctgcggagaagccggtgcccgtgcggctgcgagtgcggctcgtgatctcggcgttccag

SEQ ID NO: 824615 - DNA, 120 bp, Artificial Sequence
  ENSG00000257453_1 (sequence is synthesized)
ccctggtcttgcgggcaccgaaagtcgatctccttgccctctgccatcaccacagtgaagtacatgtacttgcccttgcgctccacacagtccacggtcttcatgttggagaagtgcagt

SEQ ID NO: 824616 - DNA, 120 bp, Artificial Sequence
  ENSG00000257453_2 (sequence is synthesized)
ctgctgctgctgctgctgttgctgctgctgctgctggtgttgcagctgcttgggcgggataagcagcagcccttcctcggtgaggatgcaacactttttcttccagagctgcaacaaccc

SEQ ID NO: 824617 - DNA, 120 bp, Artificial Sequence
  ENSG00000257453_3 (sequence is synthesized)
gtcgctgcgcttctccagcacgccctccttcagcgctttgcagccgctactctccagcatcctcccagcataagaggggccgccgcttggctcggcctctccgtttccagccgcgcgggc

SEQ ID NO: 824618 - DNA, 120 bp, Artificial Sequence
  ENSG00000287809_0 (sequence is synthesized)
ggcccaccccgaggtcaggatgactcagcagggatcgagtttgcgggcgtcacgctccaaggcccggaataggaggagaagacagtgaggctgagggctgctcaacatgcacagtgagca

SEQ ID NO: 824619 - DNA, 120 bp, Artificial Sequence
  ENSG00000287809_1 (sequence is synthesized)
ggagatacaagcacgtggagggacggtcacagcccgtgcaactggcaccttcacacacggaggcctgtgattcccagacacctggcgctggggcaaatcccattccacagccagaaacag

SEQ ID NO: 824620 - DNA, 120 bp, Artificial Sequence
  ENSG00000287809_2 (sequence is synthesized)
gctcggcagggccaggtggatttctcaaagccttggttgcttttggcctgacgctagctggacaatgtctcagctcacaggttcctaaacgcacacccgcccacaccaatctgctgagga

SEQ ID NO: 824621 - DNA, 120 bp, Artificial Sequence
  ENSG00000287809_3 (sequence is synthesized)
gtgacagccatggggaggagacccacctcactccagggaccctggcaccgtctcccatgaggccaggtgtcctcagccacccgcagccagagtcccgcgagaccgatggacggcctgccc

SEQ ID NO: 824622 - DNA, 120 bp, Artificial Sequence
  ENSG00000287809_4 (sequence is synthesized)
ctgcgtgacggcacgcctgggactgtcccagcaggctcccatgcttcacccaactgggacagggaaacaggagggggctacttctgctttcaaggcatggaggagctgtctgcaggccac

SEQ ID NO: 824623 - DNA, 120 bp, Artificial Sequence
  ENSG00000287809_5 (sequence is synthesized)
ttcccgaacacctatgcgcttggggaactgactgagactgagccggggtatcttctccacgatgtggtgagcccatcaggcccttcttctgagagcacctccctggaggtggaagcccct

SEQ ID NO: 824624 - DNA, 120 bp, Artificial Sequence
  ENSG00000287809_6 (sequence is synthesized)
gaggcccacagcatcttctgaacctgtgagttcccacttactgagagctcgcctgggccagtgccagtccacggctgtggccgggactttgagtagatgctaccctacttgctatgcaga

SEQ ID NO: 824625 - DNA, 120 bp, Artificial Sequence
  ENSG00000287809_7 (sequence is synthesized)
caaaccaaatccaggcccagccagaatctcaactccagcctttgcgccttctgataaaacccagcattgcttgaatttccagtacacgctgccaagtcttcatcaagcaataaataaccc

SEQ ID NO: 824626 - DNA, 120 bp, Artificial Sequence
  ENSG00000287809_8 (sequence is synthesized)
acacaaccctactgtcatgccaagttccatatggccatccagaaagagacacatggagctggttcctctcatctttatgacccgtgaaaagcgcaccaacacgaagacacgcgtgaaagg

SEQ ID NO: 824627 - DNA, 120 bp, Artificial Sequence
  ENSG00000287809_9 (sequence is synthesized)
acctcatctcctaaccagactgacaagcaagggattttttccactcaccgtcagtgggatggttctaagcaccgaggccaacccatttcacacgattatttcacaaaaagaaactttctg

SEQ ID NO: 824628 - DNA, 120 bp, Artificial Sequence
  ENSG00000287809_10 (sequence is synthesized)
tgggacgtgcctgggcgactgaaaagacagccagcaaaactgagaaccttgttcgcaaatccgtaccctctcccaaggcagcctcagaggcccgagggctgaggatccagacccgaaagc

SEQ ID NO: 824629 - DNA, 120 bp, Artificial Sequence
  ENSG00000287809_11 (sequence is synthesized)
cactgtaccttctgtaggatcaggctcaaggactaagggggtaaaaggtgccctttcccttcctaagcagaaaattctggaacccaaccttatgtgtgatcatttaaaaaaaaaaaaaat

SEQ ID NO: 824630 - DNA, 120 bp, Artificial Sequence
  ENSG00000266450_0 (sequence is synthesized)
attatgggtacagtagaacacaattaaaggagttttcacaagaatagcaatgtgattctgtctacattgttaaagaatcactttgtctattgcatgcagaatggaccatggacatcagac

SEQ ID NO: 824631 - DNA, 120 bp, Artificial Sequence
  ENSG00000266450_1 (sequence is synthesized)
acagaggcagggagataagaagctgtgtgcagttgtgcaggaaagagatgattgtacctggactacagtgatagaagcagagatgggaaaacaaagggagagtttagacaagcattaaag

SEQ ID NO: 824632 - DNA, 120 bp, Artificial Sequence
  ENSG00000266450_2 (sequence is synthesized)
tgtagtcagtgaggaaaattatacattcagaaatgactcctggaattttggcttaacgaattagtgtgggtggatgatattgctatttacagaaatgacctcttgacctccatctccaca

SEQ ID NO: 824633 - DNA, 120 bp, Artificial Sequence
  ENSG00000266450_3 (sequence is synthesized)
tttcctcccagcctctacacctccatgtgctgttctctctgtggacatgtctctggctacctgaaggcatccagcatgtgaaaaaacaactcagaccacacattttccacctatgttctt

SEQ ID NO: 824634 - DNA, 120 bp, Artificial Sequence
  ENSG00000266456_0 (sequence is synthesized)
taacaaaatgttcttcctttagtttgcttttgcacttaaaatatatataattgacttttttggaaaaaaatctaagattcattgctttgttttgtaaagaccaataggttctgtatagtc

SEQ ID NO: 824635 - DNA, 120 bp, Artificial Sequence
  ENSG00000266456_1 (sequence is synthesized)
tttttttaaattgtggtaaaatacacatggcattaatttaccattttaaccattttaaagtgcacaatttgtggcattaagtacactcacgttgctgtgcaaccatcaccaccgtccatc

SEQ ID NO: 824636 - DNA, 120 bp, Artificial Sequence
  ENSG00000266456_2 (sequence is synthesized)
ttcagaacctttttatcttcctaaactgaaactctgtactcgttaagcactcacttcccttttccccatcccccagcccgtagcaaccacgactgtactttctatgaatttgactactct

SEQ ID NO: 824637 - DNA, 120 bp, Artificial Sequence
  ENSG00000266456_3 (sequence is synthesized)
ctgtactttctatgaatttgactactctaggtactgcatgtaggtggaatcatacagtatttgtcttttgctttgttttgttttgttttttgttttctaagacagggtctcactctgtcg

SEQ ID NO: 824638 - DNA, 120 bp, Artificial Sequence
  ENSG00000266456_4 (sequence is synthesized)
cagtgtccttttgtgactggtttatttcacttagtgccatgttttcaaggttcatccatgttgttgcatgtctcagaacttccttttttaggctaatattcttgcatgtatttacctagt

SEQ ID NO: 824639 - DNA, 120 bp, Artificial Sequence
  ENSG00000266456_5 (sequence is synthesized)
tttgcttatccattcagccattgatggacacttgggttgcttccatcttttggctattgtgaataatgctgttttgaacgtgggtgtgctacatagttactttttaaaattggcacaaca

SEQ ID NO: 824640 - DNA, 120 bp, Artificial Sequence
  ENSG00000266456_6 (sequence is synthesized)
gcgctgtcttttgacatacgtattttatggaaaacacaagattttcctggctgacgctcaacctcataatttggaccttggtgcaacacaataataggagagctatgtgtcagtatatat

SEQ ID NO: 824641 - DNA, 120 bp, Artificial Sequence
  ENSG00000266456_7 (sequence is synthesized)
caataataggagagctatgtgtcagtatatatcactaaggattacaatgagagtatatacagtcagtattacaaattataaaaagaaatgtaggccaggcacggtgcctcacacctgtaa

SEQ ID NO: 824642 - DNA, 120 bp, Artificial Sequence
  ENSG00000266456_8 (sequence is synthesized)
ccagcctgggcaacagagcgagactcttttttaataaataaataaataaataaatatataaaagaaacgtaatgaaagagagagaactctgaacttttaaagaacttttcacccagtctt

SEQ ID NO: 824643 - DNA, 120 bp, Artificial Sequence
  ENSG00000266456_9 (sequence is synthesized)
tcttgatctatctgacagaaaggcttgtcagagaaagttagagttcagaggcagccaattgaatataattaactccaaatgaagataaaccttttctaaatcataactgaaggctataaa

SEQ ID NO: 824644 - DNA, 68 bp, Artificial Sequence
  ENSG00000266456_10 (sequence is synthesized)
taaatcataactgaaggctataaaaaatgagaattatgttattttttttttgagacaggaagcctgac

SEQ ID NO: 824645 - DNA, 120 bp, Artificial Sequence
  ENSG00000266456_11 (sequence is synthesized)
cagcctcctgagtagctgggactacagctttcagttacccgagatcaactgcggttttaaaatattatgtggaaaattccagaaatacatagtaagttttcaattgcatgccattaaatc

SEQ ID NO: 824646 - DNA, 120 bp, Artificial Sequence
  ENSG00000266456_12 (sequence is synthesized)
aatctcatgctgtccctgaccccttcctctccggaggtgaatgctccctttgtccagtggctccacgatgactacattccccaaattgttctcttaggaaccctttctgtgttcaaggaa

SEQ ID NO: 824647 - DNA, 120 bp, Artificial Sequence
  ENSG00000266456_13 (sequence is synthesized)
ccaaattgttctcttaggaaccctttctgtgttcaaggaacccttactttacttaattatggccccaaagcacaagatagggatgccggcatactgttataattgttctattttattatt

SEQ ID NO: 824648 - DNA, 120 bp, Artificial Sequence
  ENSG00000266456_14 (sequence is synthesized)
ttcaactttatcataggtatgtaggtataggaaaaaaacatggtatgtataaggttcagtactatctgcagtttcagacatcccctgggggtcttggaacatatcccccgtggataaggg

SEQ ID NO: 824649 - DNA, 120 bp, Artificial Sequence
  ENSG00000266456_15 (sequence is synthesized)
gaaactactgtaaaagtttgtgttttatagagtagttgtgagaactacattaatccataatgtgtggctcatgatactcattgatagatggtagtagcaacaataaaaaataatattatc

SEQ ID NO: 824650 - DNA, 120 bp, Artificial Sequence
  ENSG00000287803_0 (sequence is synthesized)
ggcacactggtgggtgtatcttatggaaagctgcttctgcctcctctgctagtcctcaatttgggctggtgtccaaagccaaactccggagttaagtcctgcctcctcccttctacaaag

SEQ ID NO: 824651 - DNA, 120 bp, Artificial Sequence
  ENSG00000287803_1 (sequence is synthesized)
aagtggtagattaaagataccacaaattctttgtgaatctttccatggaggaatgctcagtgtcatggtacattctgcaggagttgagcctacttgtgagaagtacagctacatcaagat

SEQ ID NO: 824652 - DNA, 120 bp, Artificial Sequence
  ENSG00000287803_2 (sequence is synthesized)
aaggtgctgctataacaaataccgaaaaatatggaagtggcattgtaacagattctggttgctggcaatccttcgttttctttggcttgcaactgcaactcttcatctctgccttggttg

SEQ ID NO: 824653 - DNA, 120 bp, Artificial Sequence
  ENSG00000287803_3 (sequence is synthesized)
tcacatggccttctccattctgtgtctgtctgtgtctgtgtgtcctctacccttctcctaaaaacaacagttatattgactttagggtatgccctaattccatgtaacctcatcttaact

SEQ ID NO: 824654 - DNA, 120 bp, Artificial Sequence
  ENSG00000287803_4 (sequence is synthesized)
ttactaattatgtctgcaaaggttgtgtttctctctgctctggttgctataacaaaataccatagactgggtgactttaacaaaaaacatttatttctcatagtctggaggctggaagtc

SEQ ID NO: 824655 - DNA, 120 bp, Artificial Sequence
  ENSG00000287803_5 (sequence is synthesized)
cagatttgattattggtttgggctcatttcctagctgctttcttgttttatcctcccaaggcaagagacagagctctgatctcttcctcctcttaaaaggagggctcaccctcgtggctg

SEQ ID NO: 824656 - DNA, 120 bp, Artificial Sequence
  ENSG00000287803_6 (sequence is synthesized)
catctcagcccagttacatcccaaggaccctgccccaaaataccattacattaggcattaaggcttcaatgcatgcattttgtggggaaaaaaaatcctgtccataacaggacttatttc

SEQ ID NO: 824657 - DNA, 120 bp, Artificial Sequence
  ENSG00000287803_7 (sequence is synthesized)
caaataagattacattctgtggttctgggcggacattaatattgaaaaggcattatttaaagcagtacagttactaataaattgatcttaaaatagggagatttcctagattacctgcat

SEQ ID NO: 824658 - DNA, 120 bp, Artificial Sequence
  ENSG00000287803_8 (sequence is synthesized)
gaggggagggttccaggtcatatcataaacccctgatagcagagaaaagcagagctttcacccagtcgagggtagaggagcaagtcagagagatttagcatgagagaatgctatggagat

SEQ ID NO: 824659 - DNA, 120 bp, Artificial Sequence
  ENSG00000287803_9 (sequence is synthesized)
tttaaatgcctttgctggcctagggacacatgcaagacatgagaaggaagtaaattattttgaaaagctgaataaaaatggcagtaaattctcccctaaatcgtccaaataagagctcag

SEQ ID NO: 824660 - DNA, 120 bp, Artificial Sequence
  ENSG00000287803_10 (sequence is synthesized)
tccaactgacaccttgatattggccttgtaagaccataagtatattactgattaagcctccctggaagtttgacttataccacagtaatataataaatatttctgtgttacactgttaaa

SEQ ID NO: 824661 - DNA, 120 bp, Artificial Sequence
  ENSG00000287802_0 (sequence is synthesized)
ggatattgacatgaacagagcaatgaccatatcaagacaccagaagaagacaaccatctataagccaaggagagaggcctcagaaaaaatcaaccccttcgacaccttgatcttggactt

SEQ ID NO: 824662 - DNA, 120 bp, Artificial Sequence
  ENSG00000287802_1 (sequence is synthesized)
ctagcttccagaacttggcatcctagggatttgtcagaacactgtcaacagaggaagactcaggaaaagaatgaaaagtccagctgctcccagccctttccagcctccattcattatgct

SEQ ID NO: 824663 - DNA, 120 bp, Artificial Sequence
  ENSG00000287802_2 (sequence is synthesized)
taagtctgttcctacatagtgggctgtttcattggggctgcatggtgtttgtccctgactggagtggaagtttcagaagagtgagctcttggagaactgagagttaagttagcctcttta

SEQ ID NO: 824664 - DNA, 120 bp, Artificial Sequence
  ENSG00000287802_3 (sequence is synthesized)
aacgagttcttttctacacaacttatatctagaaagtcagttagccagtaaatatatgagattcaaaaaaggtctgaaggaaatacgaatggtagggagaaaggaaggcaggcagagaag

SEQ ID NO: 824665 - DNA, 120 bp, Artificial Sequence
  ENSG00000287802_4 (sequence is synthesized)
tcaagattttgaaaatcagtaaaaactattatgagcaaaaacatttctttttgaccagctaaccgttctgtcaaactaagttctagccagataatcatagctactgcataataatggaat

SEQ ID NO: 824666 - DNA, 120 bp, Artificial Sequence
  ENSG00000287802_5 (sequence is synthesized)
ttttttttattgtgctgtgacatgcctgaaataaatttcattagaactggttattgatatgagacttaagtagcagaggaagcttgctgtaatcagccaatgttttagtatttttctcag

SEQ ID NO: 824667 - DNA, 120 bp, Artificial Sequence
  ENSG00000226482_0 (sequence is synthesized)
atttcaggctcaagctaccttcttgatgaaaaattctggacgtgttctgaaaatcacagtcatccctaacttcagtggaaaagattcatattgtccagctgaacaaggattgatacttaa

SEQ ID NO: 824668 - DNA, 120 bp, Artificial Sequence
  ENSG00000226482_1 (sequence is synthesized)
aaccagggatttcctaaaatgaaaatgtttctgtggataaaactgattacatgcagagactggaatggagttaattctgggtagatatgggattcaagagattggtcttcatgaggcatt

SEQ ID NO: 824669 - DNA, 120 bp, Artificial Sequence
  ENSG00000226482_2 (sequence is synthesized)
tatcaaggatctgcaagggatttagaggtgacggaagcacagtccttcctgggcagttgcctctagcctggtgggaggtgttcctcacacccaggactctcatccatggcaaaataaaaa

SEQ ID NO: 824670 - DNA, 120 bp, Artificial Sequence
  ENSG00000226482_3 (sequence is synthesized)
aatacaaaaattagccatgtgtggtggaatgcacctgaagtctcagctactcgggaggctgaggcacaataattgcttggacccaggagaaggaggctgcagtgagccgaggtcgtgtca

SEQ ID NO: 824671 - DNA, 120 bp, Artificial Sequence
  ENSG00000226482_4 (sequence is synthesized)
gactccatctcaaaaaaaaaaaaagtggatatcacatcagagaagctcctggccaggtggccttgaggaacagggatgagttcggcacttagagatggagttggctttccccgttggagg

SEQ ID NO: 824672 - DNA, 120 bp, Artificial Sequence
  ENSG00000226482_5 (sequence is synthesized)
ttcggcacttagagatggagttggctttccccgttggagggaaaggcatgagaagggacataggtaagaggaagtagagtagtgcaggggccattgagtagtagtccttccaagacagga

SEQ ID NO: 824673 - DNA, 120 bp, Artificial Sequence
  ENSG00000226482_6 (sequence is synthesized)
cgtcatcatagaaccactttctctgaggaagctctgcttgggggaggttttaattcatgaggaaggcaaattcaatggctctcaggtgaggtgggaaacagacacctaccaacactccaa

SEQ ID NO: 824674 - DNA, 120 bp, Artificial Sequence
  ENSG00000226482_7 (sequence is synthesized)
agagaacatgtacctctataaaagggcacagtctagtgaacaaagtccacagctctgggtttgatttctagcactgtcacttaatactgtgtgaccttagacattcacttaactctctca

SEQ ID NO: 824675 - DNA, 120 bp, Artificial Sequence
  ENSG00000226482_8 (sequence is synthesized)
gcctcaggatacaatctgtaaaaacaggagaatgcttgttccctgtgccttataggattgatatgagcatcaggagagacagtgggcacaaaatagcactgtcaactacttctttctagt

SEQ ID NO: 824676 - DNA, 120 bp, Artificial Sequence
  ENSG00000226482_9 (sequence is synthesized)
cagttatctggtcatgtttgtgaagctccccaggactgggaacatagcatatgatttttttaaagttactcgatgaatgaatgaataaatgaatgagtaaatgaatgaataatatctaaa

SEQ ID NO: 824677 - DNA, 120 bp, Artificial Sequence
  ENSG00000226482_10 (sequence is synthesized)
ggcctccaactaaataataatcaacttcctaaccgtactgaaagcctttaattgactttggggctgtttggcctggaggaggctctgagttagtggtgatcagttggtgtcatggtagag

SEQ ID NO: 824678 - DNA, 120 bp, Artificial Sequence
  ENSG00000226482_11 (sequence is synthesized)
aagaaagcctgtgaaggtggagtcattgtcattatcagcatagagtccattacgctctccttccccatacacctggagccagacttggtcgcccacctccagatgcaggagcacagagcc

SEQ ID NO: 824679 - DNA, 120 bp, Artificial Sequence
  ENSG00000226482_12 (sequence is synthesized)
ggaggcctggtccacattattttcctggtactgatcataggtgaagagcatagccttgtccttcttgaagaggctgaccttcacatccttcatatagactgtgatgtggtaggcaaagta

SEQ ID NO: 824680 - DNA, 120 bp, Artificial Sequence
  ENSG00000226482_13 (sequence is synthesized)
gaatgggcatgttggggatagtaacgtaagtctccaatcccacactgaatgctgagcggtatacataggcaccttctccaggttctcctttcctgccttggattcccggaaagcctcggg

SEQ ID NO: 824681 - DNA, 120 bp, Artificial Sequence
  ENSG00000226482_14 (sequence is synthesized)
gaccttcagccccgggtactccggtttcaccgatgtctcccttaggaccaataagacctaaggaatgagaagacctcagtgactacaaagaacagaactcctgcctaggatgtctctcct

SEQ ID NO: 824682 - DNA, 120 bp, Artificial Sequence
  ENSG00000226482_15 (sequence is synthesized)
cctctattctgcctacccatcattcaaggcctagctgaagctctgcctcctccttgaagccttcattcttcatcaggtccacggggtgccatctctgccatcacggcctggggccccatt

SEQ ID NO: 824683 - DNA, 120 bp, Artificial Sequence
  ENSG00000226482_16 (sequence is synthesized)
atggcccggatgccctgggatgcccgccatccaacctgtgcaggcccccttgggcaggggaagcaggactccgggcccttgagtcgtggtttcctggtcatgaccgggcagagctaatag

SEQ ID NO: 824684 - DNA, 120 bp, Artificial Sequence
  ENSG00000226482_17 (sequence is synthesized)
cagtagaacagctcccagcaacagcatcctgagccctggaatccacatgtgcactgtcagccatggagagacagaccccacacacacacccagttgggacctacaaaggactccgtccat

SEQ ID NO: 824685 - DNA, 120 bp, Artificial Sequence
  ENSG00000226482_18 (sequence is synthesized)
ctcagcagagtctacttctaggagctgctttctaagtattcaacttttccaggaagacttttctgaatattgcagcccaccttgatctctttctgccctgaaatctgtaatacttagcat

SEQ ID NO: 824686 - DNA, 120 bp, Artificial Sequence
  ENSG00000226482_19 (sequence is synthesized)
tattccctgtgtgtagtctcctttcctcaccaagattatgaattcagtgattgcacagatgacactcctctaattttcccatgtctgagcacaggaccaagcacagggaaagctccaaga

SEQ ID NO: 824687 - DNA, 120 bp, Artificial Sequence
  ENSG00000226482_20 (sequence is synthesized)
gtcgacttgccaagaatccatccttgggtttcccaagtacgatgacacagattgctccattcaatgctaaccagcttctctcctctggctcctttcttctttttctttccccccttctct

SEQ ID NO: 824688 - DNA, 120 bp, Artificial Sequence
  ENSG00000226482_21 (sequence is synthesized)
ctcattttctgtgtctattcctccttcttactctctcattctctttcttcctctacccctctcctggggcacatgtttgactattgggtatattacatttgcacacatgcacacacacaa

SEQ ID NO: 824689 - DNA, 120 bp, Artificial Sequence
  ENSG00000226482_22 (sequence is synthesized)
acacacacagagaaaaagagagagagagggagggagagactcaccttgtgttaagcagacaacgagagacacatcatcccatgaacatatcccctggccctttgtttgcctgagccatct

SEQ ID NO: 824690 - DNA, 120 bp, Artificial Sequence
  ENSG00000226482_23 (sequence is synthesized)
ttagctgcccctcctcccctgtctaatctctattcagctttcaggacccagtttggatgtcatctgtttcaagaagtcctccttgttctccatctcactccttggctggttctttcccct

SEQ ID NO: 824691 - DNA, 120 bp, Artificial Sequence
  ENSG00000226482_24 (sequence is synthesized)
ctgtgtttctccagtgccctggtaatatggtttgggtctgtgtccccacccaaatagcacgtcgacatgtgttggagaaggggcctggtaggaggtgactgaatcatggaggcagactta

SEQ ID NO: 824692 - DNA, 120 bp, Artificial Sequence
  ENSG00000226482_25 (sequence is synthesized)
gaatcatggaggcagacttatcccttgctgttctcatgatagtaggtgaattctcacaagatctggttgaaagtgtgtagcacttcccctatattctctctctctctctttctctctctc

SEQ ID NO: 824693 - DNA, 62 bp, Artificial Sequence
  ENSG00000226482_26 (sequence is synthesized)
tctctctctttctctctctctctcctgctgctgtgtgatgtgcttgcttccccttcgctctt

SEQ ID NO: 824694 - DNA, 120 bp, Artificial Sequence
  ENSG00000226484_0 (sequence is synthesized)
gattgtttcacaaggctgccaggacaaaacagtagcacagtgatgagccaatggtctcctggggaaaatatagtcaaatgacttttcatttgtttatcctgctttcccttgtccctgatt

SEQ ID NO: 824695 - DNA, 120 bp, Artificial Sequence
  ENSG00000226484_1 (sequence is synthesized)
tttcttcttgtgtttttttttccacagcatcataggatattctatctgttcttagtgtgcctaaggaataacctgacttaaagtgggtttttcaactctgatgctcatgttctaggttgc

SEQ ID NO: 824696 - DNA, 120 bp, Artificial Sequence
  ENSG00000226484_2 (sequence is synthesized)
acattctgcaagctggatcaggttgtaaatctttgacttttgagcatgaagatctctatccccatagcacaaaaccatgctgctcgcaaaaccacagatgctcaagagctgacacagtga

SEQ ID NO: 824697 - DNA, 120 bp, Artificial Sequence
  ENSG00000226484_3 (sequence is synthesized)
cactgttttattatgatgcattgttccttgtctctgagctctgaggattgttgacatttacagacattgtatgttgggtagtactaggaattgggatctagatattgacctctagacatc

SEQ ID NO: 824698 - DNA, 120 bp, Artificial Sequence
  ENSG00000226484_4 (sequence is synthesized)
ctatattgcactttggaagtattctggggcaaagaaagaactaggtgaatacataaccaagcaagggagattcacaccttacattttcaggatgagattatcagttggtgctatatttaa

SEQ ID NO: 824699 - DNA, 120 bp, Artificial Sequence
  ENSG00000226484_5 (sequence is synthesized)
atgcaggatttcgaagattaagcacaagaagaggcctgccatgtttatactcaggaagcagccctgagagtaagccaagtgaatggggtccatcactgaattcttaagatgaaagggcag

SEQ ID NO: 824700 - DNA, 120 bp, Artificial Sequence
  ENSG00000226484_6 (sequence is synthesized)
gaagggccttgcatttgtccactcaaggaactagcctgaggataggcaacaacactgaaacatctctcaaagcctgcctaaaaaaaagaaaattacaaattggtggaatcaaacacttct

SEQ ID NO: 824701 - DNA, 120 bp, Artificial Sequence
  ENSG00000226484_7 (sequence is synthesized)
gccctggatctagttgtctgaggctctagatgagaagaaagatttcatcagtgtgaaaagaccccctatcagagcaacatgaatgctgctgaaattgaagcaagaacaaacatcaaattt

SEQ ID NO: 824702 - DNA, 120 bp, Artificial Sequence
  ENSG00000226484_8 (sequence is synthesized)
aatgccttataaaaagtttatgggaacagtactccaaagaaatcatcatcaatttacaagtgaataactcattttaagaagggacgagaaaatattgaaaatgatgccccagcagcccac

SEQ ID NO: 824703 - DNA, 120 bp, Artificial Sequence
  ENSG00000226484_9 (sequence is synthesized)
catccacatcaatttgcaaggaaaaaatagtcttgtttgtgttctaactgaagaggacctatgattaagaggagaaacaatagccagcaccataaacacttagttcagcttacacaattc

SEQ ID NO: 824704 - DNA, 120 bp, Artificial Sequence
  ENSG00000226484_10 (sequence is synthesized)
tgactgaaaaattaagttgaacaaactttccacttagttatttgttaagaggtgaccgtgtcgataaggatatggagcaactggaattctcatcatgctttgctggagaggctcataggt

SEQ ID NO: 824705 - DNA, 120 bp, Artificial Sequence
  ENSG00000226484_11 (sequence is synthesized)
ggaaaggacttgcctcatctcagtacattttaggtttaaatcctacagtgatgagagttccgtttgtgttaaaaggaagaagttctccagcctgaggttttacaaaaaactccagatcgc

SEQ ID NO: 824706 - DNA, 120 bp, Artificial Sequence
  ENSG00000226484_12 (sequence is synthesized)
tgccaggttcaagtttggacagtgaattttgtggttatcctatctataaagccttgcatcacctggcacaagtgattatacatttaactgttcaccactcattttgaccataaagctgga

SEQ ID NO: 824707 - DNA, 120 bp, Artificial Sequence
  ENSG00000226484_13 (sequence is synthesized)
caactgttacaaacaaccatttcagccctcgagaaatggatcaaatatatgcaaagctaacagacacatggatgcagctggaggccattatccttagcaaacaacataggaacagaaaac

SEQ ID NO: 824708 - DNA, 80 bp, Artificial Sequence
  ENSG00000226484_14 (sequence is synthesized)
aatgaatgatgagaacacacggacacagagacgggaccaatagacactggggcctacctgaggatggaggttggaaggag

SEQ ID NO: 824709 - DNA, 86 bp, Artificial Sequence
  ENSG00000226486_0 (sequence is synthesized)
gactccaggactctttgggactcttcaatttttgaggttttgggactcaaactggctttcttgctcctcagcttgcagacggccta

SEQ ID NO: 824710 - DNA, 120 bp, Artificial Sequence
  ENSG00000226486_1 (sequence is synthesized)
ttgtgggacttcaccttgtgatcatgacaaagccatctttggtgaagataaataagaaacacctgttctttatactatgtcagccagtatgatgttggtgtggggataagaaaagcagac

SEQ ID NO: 824711 - DNA, 120 bp, Artificial Sequence
  ENSG00000226486_2 (sequence is synthesized)
agaaaagcagacattgttaatgaaactattacaagctttttacgtaaatgtcttccaaggtagatgtgcagctgacttcaatgtgtaattaacaaataaccggggtgacatcgatagaaa

SEQ ID NO: 824712 - DNA, 120 bp, Artificial Sequence
  ENSG00000226486_3 (sequence is synthesized)
gccaaaagtatatacttcattgataaaactattgattaaccaagagtatcaactgatattctcgattttcaggagtaaataaatgacatctcaatatagacaagaattgcccccctgggg

SEQ ID NO: 824713 - DNA, 120 bp, Artificial Sequence
  ENSG00000226486_4 (sequence is synthesized)
tcctcttggcttctctctcctgtcgtggaaccatgcctcacaaagcaagggctgttggcccagagtactctctgcttactgcatgaaagaagaacctctgattcatgcatgaggctggat

SEQ ID NO: 824714 - DNA, 120 bp, Artificial Sequence
  ENSG00000226486_5 (sequence is synthesized)
gaaaactacagctgaaagatggggaggagttttggaattttcaccacttaccagttattttggagagctgatcagtagaacgcctcatgctgtcatcatagaagttgatcaaagtattgt

SEQ ID NO: 824715 - DNA, 120 bp, Artificial Sequence
  ENSG00000226486_6 (sequence is synthesized)
tttctttcagtccactaattatattttgtcctcaaattatattctaccaaaattctgtttcaccatagtccaagtattttaaaaagttttcttgccctgttcttattatgcaaaacgtaa

SEQ ID NO: 824716 - DNA, 120 bp, Artificial Sequence
  ENSG00000226486_7 (sequence is synthesized)
gaactatccttttccaccatctctttgaaaaatcaaatataaaactgaaacacaattctgttcctttcatggtaatcttttctatagtactctattttctgctcattgctgacagtaatg

SEQ ID NO: 824717 - DNA, 120 bp, Artificial Sequence
  ENSG00000226486_8 (sequence is synthesized)
accacatattacatttcaaatatgtatctagttttcctaatcccttatcaaatatatatttatgaattgcagtggcagtataaacacttccatctatatcttcatatgtagaaagcacag

SEQ ID NO: 824718 - DNA, 120 bp, Artificial Sequence
  ENSG00000226486_9 (sequence is synthesized)
tttcttgcacaggagagacgcaataagtatagtgtctattatgaccacatttataagtcaaaaaggagtttgaaatgtttctacttaaaaagtcctcctttttcaaaaattctgtgagac

SEQ ID NO: 824719 - DNA, 120 bp, Artificial Sequence
  ENSG00000226487_0 (sequence is synthesized)
agacctgggcactggtcccagctcgccaccagctcttagttggaccttggacaatccttggacacattggatcttcgtttttcctctgtgaagtggcaggattagactagaagctgatac

SEQ ID NO: 824720 - DNA, 120 bp, Artificial Sequence
  ENSG00000226487_1 (sequence is synthesized)
aaacagctgatgaatggatgcatgcatgaatgaatgaatggcccgtctaagacagatcaagtctttaaggccccacgcttctcagggtgtcacaaagccaagtttgaaaaccactggatt

SEQ ID NO: 824721 - DNA, 120 bp, Artificial Sequence
  ENSG00000226487_2 (sequence is synthesized)
gagaaactaccttttgggtaaccatgctcactatctgggtgacgggatcaatcataccccatacctcagcgtcacacaatatactcatataatgaacctgcacatgtaccccttgaatct

SEQ ID NO: 824722 - DNA, 120 bp, Artificial Sequence
  ENSG00000226488_0 (sequence is synthesized)
agcccctttaggaccaccaacgtgcctggtccccacgactcgcggctgcctcctctcgggccggggcagggaggagccgctactgccggttatcttcggacacgttgtgggccagccagt

SEQ ID NO: 824723 - DNA, 120 bp, Artificial Sequence
  ENSG00000226488_1 (sequence is synthesized)
tcactcggtttccagctctcgcggagggcttcgttaaacttcactcggaagtgcttcgttaaacttcactcggaagtgcttcgttaaacttcactcggaagtgcttcagcgcctcctctg

SEQ ID NO: 824724 - DNA, 120 bp, Artificial Sequence
  ENSG00000226488_2 (sequence is synthesized)
ttttccccggtgccagggagtccttgagataccggatgtctttggagcagctgagctcaggcaggcctgctgcctgcatcagggcaaagaggtggaggaagagaagcccgtggcgccgca

SEQ ID NO: 824725 - DNA, 120 bp, Artificial Sequence
  ENSG00000226488_3 (sequence is synthesized)
ttaggccctttcacagtagccccggaacctttcaaatttctcatattattagtcttcccctgctcaatcacatggacaaagtcatagtgtgaaactacaactgtgtttataaggaggatg

SEQ ID NO: 824726 - DNA, 120 bp, Artificial Sequence
  ENSG00000226488_4 (sequence is synthesized)
ccactggaaatgaattctgctcaaagaatgaactctctacacacatcatctttctctcacagacatcataccacctcaagcactgcagcctcaaaaggggaaattcctgagtgattcttc

SEQ ID NO: 824727 - DNA, 120 bp, Artificial Sequence
  ENSG00000226488_5 (sequence is synthesized)
ttgaagcttaaattctgtgggatttttatggtggaaaacttaggagaggaaccagacagcccatctaggagctgatactcttctagtgaagaccacccttgcaggaaagcatctgtcctc

SEQ ID NO: 824728 - DNA, 120 bp, Artificial Sequence
  ENSG00000226488_6 (sequence is synthesized)
ccagaatccggatgttaggtttgagaatttactaatgtgtgacttctctgaaacaatttatttaggaaaaaaggttgaataaatatatactcaataaaagtattgcaaaaattaaataaa

SEQ ID NO: 824729 - DNA, 120 bp, Artificial Sequence
  ENSG00000226488_7 (sequence is synthesized)
cgtggtcttgaaattcccccagaaagtggcaaaaatcaatgtggaacagctgcccactcgctcggatcatgatgttgtcgctgtgccgatcaccgatgcccagcactgtgaaactacaac

SEQ ID NO: 824730 - DNA, 120 bp, Artificial Sequence
  ENSG00000226488_8 (sequence is synthesized)
aacttcagcaatgatcattgccaagtacattatgtgtatgggttaaaaatatatgccatggtacagaaaaaaatatatattgcatgatctcacttatatgtggaatcaaaaaaaccaaat

SEQ ID NO: 824731 - DNA, 120 bp, Artificial Sequence
  ENSG00000226488_9 (sequence is synthesized)
gtatagagatagagaacaaagcagtggttaccagaggtgatgatgtttgggagtgggagaaggaaactggcggggtaggtcaggggatagaaagtagcaaatatgaaggatgaacaaggc

SEQ ID NO: 824732 - DNA, 120 bp, Artificial Sequence
  ENSG00000226488_10 (sequence is synthesized)
tggagacctacagcccaacataccactacaagtaataaactcgagctgtatttgggattcatgctgaatggctagattttagctgctcttgccacacaaagaaaaaaatgaataactagg

SEQ ID NO: 824733 - DNA, 120 bp, Artificial Sequence
  ENSG00000226488_11 (sequence is synthesized)
taggagagatgacagatatgttaatctgtttcactgtagtatactttttttactatttatacatattccatagcattatgttgcataccttaagtatatataataaagtttattttctta

SEQ ID NO: 824734 - DNA, 120 bp, Artificial Sequence
  ENSG00000226488_12 (sequence is synthesized)
gccgctgcgcgaaggaggcatttccgtttatggctgtttagctccttaaacatttcaagtcatacagaaataactagtgtaaaaaaaaaaaaaggtggctgtgtaggttctttcccgtga

SEQ ID NO: 824735 - DNA, 120 bp, Artificial Sequence
  ENSG00000226488_13 (sequence is synthesized)
cagtagccagcacaggagagggtgaactcttcgttgcctccatccatgttgcggttgttgagttggatgttggcgatggtgtctgggtggagtagcacctcaacgacgcctgtgtggtcc

SEQ ID NO: 824736 - DNA, 120 bp, Artificial Sequence
  ENSG00000226488_14 (sequence is synthesized)
ccagtggggaggcagccttagggggtcatcctcaggtccagcccctgctgcttccacaggacgtccatgagccggatcgtctgcatgtgtgaaactacaactgtgtttataaggaggatg

SEQ ID NO: 824737 - DNA, 120 bp, Artificial Sequence
  ENSG00000226488_15 (sequence is synthesized)
tctggataatgtgcacataatggatcatggaaaatccacaagagagtcgcagagaaatacaactggggcccctgagttgagccaactgctgtagttatcttacccctccacttccgatta

SEQ ID NO: 824738 - DNA, 120 bp, Artificial Sequence
  ENSG00000226488_16 (sequence is synthesized)
tttgggacaatcagttgcttatgtttaagctgttaaactgaattccctgttcggattaaattttctgttagttttggaagcatcagaaagaaacagacaacaataaatattcaaacaaaa

SEQ ID NO: 824739 - DNA, 120 bp, Artificial Sequence
  ENSG00000250551_0 (sequence is synthesized)
agaatatcagagttttgccagaaacccttgagtctggagtggtacggctggagtccagattgcagtctgtggaggagtggacaggagaccaagaaattctcgagttctcttcagagacca

SEQ ID NO: 824740 - DNA, 120 bp, Artificial Sequence
  ENSG00000250551_1 (sequence is synthesized)
actggggatcaacaattcaatttaattctgacacccaaggaagaagagagtgcacctgatgtagtagccactgtaagaactgtgttggagaatgatccgattggccagtgcaagagggat

SEQ ID NO: 824741 - DNA, 120 bp, Artificial Sequence
  ENSG00000250551_2 (sequence is synthesized)
ctgctcacaatgaaatactgtacagcaggggttctcaaactttttggtcttaggacccttacagccttaaaaattattgagaactccaaagaactttcaattatgtgggtcataactact

SEQ ID NO: 824742 - DNA, 120 bp, Artificial Sequence
  ENSG00000250551_3 (sequence is synthesized)
ttatgtgggtcataactactgatacttactgtattataacttgaaactgaaaaaatttttaaatatttataaacatttaaaaataataaacccattgtaagctaatgtaaatagcatgtt

SEQ ID NO: 824743 - DNA, 120 bp, Artificial Sequence
  ENSG00000250551_4 (sequence is synthesized)
tttccaaagcaaaaaatgtagtgagaagagaggccttcttttacattttaatatctggcttatgagaaaatagctgagtttctcatttctgcttctccatttaatctgttggtgtatatt

SEQ ID NO: 824744 - DNA, 120 bp, Artificial Sequence
  ENSG00000281548_0 (sequence is synthesized)
atgcgcagccctcgctctcgcacgcaactcgtggccacctagcctagaggcggctgccaagcgtcctggctgagggatggcgggaccccaggcggctggagtggagaaagttgaccgccc

SEQ ID NO: 824745 - DNA, 120 bp, Artificial Sequence
  ENSG00000281548_1 (sequence is synthesized)
ccgtcttttctgccccgtgggtggctactgcgtgcccccaagtaacccagaggttgagggccccccagtgcgcggcggccgggggtcaggatgcgggactcccctccaccgccatgatct

SEQ ID NO: 824746 - DNA, 120 bp, Artificial Sequence
  ENSG00000281548_2 (sequence is synthesized)
cgcagtgtgggggagcgctcggggacagaaatgaggcccgagatgtgtgccttctccttgctcctgaccgctgacttcgttattccaaatacgcagccgaaaccatcgctcttgcaggtg

SEQ ID NO: 824747 - DNA, 120 bp, Artificial Sequence
  ENSG00000281548_3 (sequence is synthesized)
cagcttttctctgcctctcctatgtggaaagcagcgcagcgtggactccagccaaactccctcgattggattgcagctctctggctctctgtccctgtgaccttgggcagtttacctcct

SEQ ID NO: 824748 - DNA, 120 bp, Artificial Sequence
  ENSG00000281548_4 (sequence is synthesized)
ctatgtctcagtttcctcagctgtgcaaaggggttactgatcctgcttaatggggtgggttgttgtgaagaggaaatgagttaacataagtagagaaagagactggtgcctggcaagcac

SEQ ID NO: 824749 - DNA, 120 bp, Artificial Sequence
  ENSG00000281548_5 (sequence is synthesized)
tatgtgagtgttttgatgttattattgctgtttttattagagctgtgtgtaacgggacgtttaatgagccttttcctgttaccctggaattagtgagtcagggcacaaaggtgagtaccc

SEQ ID NO: 824750 - DNA, 120 bp, Artificial Sequence
  ENSG00000281548_6 (sequence is synthesized)
gccagccctgccattctgaaccaccaccaccctaccctcaggcttacataactggacaacgggggagggatggggcgggaggaagggtaagagtttccctaagcagcttcctgggtgcag

SEQ ID NO: 824751 - DNA, 120 bp, Artificial Sequence
  ENSG00000281548_7 (sequence is synthesized)
aaatagggagggtgcggtgctattactaaagccaacagggtgtagctcaaagagagttaccataatgacttcagatgcctaaaaaagagaggctggcatcttccctgattggatgtctgc

SEQ ID NO: 824752 - DNA, 120 bp, Artificial Sequence
  ENSG00000281548_8 (sequence is synthesized)
ttggacagtgtgagcttgctagactgcctttatacctggctttgaagaaatctagaaaactcagagacctctgggcaagggtcttcagggggcttccctgtcattgcttgtgctgtccaa

SEQ ID NO: 824753 - DNA, 120 bp, Artificial Sequence
  ENSG00000281548_9 (sequence is synthesized)
tgccagaccacatccactaggcaagaggctgtggagcaaacagcaatagggagtaacactgatggcaaagctagttggagttgggagtgaaggaggttgagctagagctcgtttcccata

SEQ ID NO: 824754 - DNA, 120 bp, Artificial Sequence
  ENSG00000281548_10 (sequence is synthesized)
gagctcgtttcccatatcagaacactctatactgaagataccctgcagagcctttggaaaaacttacatgaactccccatgaaagaaggtcagtggggctgggcgcggtggctcatgcct

SEQ ID NO: 824755 - DNA, 120 bp, Artificial Sequence
  ENSG00000228467_0 (sequence is synthesized)
gcctgaagagcttcctttaggatttcttgtgagacaagtcagcttttatttgtctggaaaagtctttatctcacttttatttgtgaagaactgctttggcagccgtaccctcaagaagtg

SEQ ID NO: 824756 - DNA, 120 bp, Artificial Sequence
  ENSG00000228467_1 (sequence is synthesized)
caccttccaaccacccttatatgagcctgctccaaaaccttgccagccagcacttccaggttacgactattgacctccagctcccagtttcagagagttctcccagtctcctggatcaca

SEQ ID NO: 824757 - DNA, 120 bp, Artificial Sequence
  ENSG00000228467_2 (sequence is synthesized)
ctggtctgaaagctgtttggtagacaaccttcgagtctttctgccttcatactgtgggtataccgttctcccaactgaaaacccgtttattttcttatctgtctactcaaagcctaacca

SEQ ID NO: 824758 - DNA, 120 bp, Artificial Sequence
  ENSG00000228467_3 (sequence is synthesized)
tccagcccttgtgaatgtgaattcacatctctgttctctgtgttccttggccacttagtaccattcacaatatctctcatagctagctctctgccttagggctggcccatgggactaaaa

SEQ ID NO: 824759 - DNA, 120 bp, Artificial Sequence; identical to SEQ ID NO: 822681
  ENSG00000228467_4 (sequence is synthesized)

SEQ ID NO: 824760 - DNA, 120 bp, Artificial Sequence; identical to SEQ ID NO: 822682
  ENSG00000228467_5 (sequence is synthesized)

SEQ ID NO: 824761 - DNA, 120 bp, Artificial Sequence; identical to SEQ ID NO: 822683
  ENSG00000228467_6 (sequence is synthesized)

SEQ ID NO: 824762 - DNA, 120 bp, Artificial Sequence
  ENSG00000225284_0 (sequence is synthesized)
catcctctctccaaatgtctctgaaaaacactggatgatcaactaaaactcagagaggattagtaactgcctaggttacacattaaggagcaaatagagattttgccaaaggcagacaga

SEQ ID NO: 824763 - DNA, 120 bp, Artificial Sequence
  ENSG00000225284_1 (sequence is synthesized)
ttcctgtgttcttaaccacagaaaccttggctattctctctcttctcattcataaaaacactatccctaattgtttgttttgctacataatctccctttctaaatctaaaacagataaga

SEQ ID NO: 824764 - DNA, 120 bp, Artificial Sequence
  ENSG00000225284_2 (sequence is synthesized)
ggaattaacttctccaactgaaatccaaagcaaaagagccgaaatgcagtagagtgggaaacgaataagatttaagagtaaaagctttctcttaggcagacagtcatgacaagcaaatcc

SEQ ID NO: 824765 - DNA, 120 bp, Artificial Sequence
  ENSG00000225284_3 (sequence is synthesized)
taagactgcacctgaccgagtcaatatttgctcattcaacactacttctacttgttcattacaagggtttatctggaaggttacagataaatcagttactgaatccatatgagcactgcc

SEQ ID NO: 824766 - DNA, 120 bp, Artificial Sequence
  ENSG00000286018_0 (sequence is synthesized)
tagctttgacttgtgcatccatgaggttttcttctcccttactaaaattcatcaattcttcagcagtctttatcaacactgttccctggcaaaacaagtaaacattccctttaaaatcat

SEQ ID NO: 824767 - DNA, 120 bp, Artificial Sequence
  ENSG00000286018_1 (sequence is synthesized)
ttcactacgttggtgttcaaagtcattagataatagttgactgaagaaataaaggtttggcaaaaaaatatgaagatatatgtgcatatattatgaagcagcagaatactgtatgtgtga

SEQ ID NO: 824768 - DNA, 120 bp, Artificial Sequence
  ENSG00000286018_2 (sequence is synthesized)
gtgaaatagaaactcagcttgcttctagaaccccctgtcaaaacagatgcatctgcttttgataagtacttaggtggaaaagtacttttatctatttatttattttgagacagagtctca

SEQ ID NO: 824769 - DNA, 78 bp, Artificial Sequence
  ENSG00000286018_3 (sequence is synthesized)
tgccttggcctatgctgggattacaggccaaggcgggtggatcacttgcagtcaggagttggagaccagtctggccaa

SEQ ID NO: 824770 - DNA, 120 bp, Artificial Sequence
  ENSG00000226739_0 (sequence is synthesized)
ggaatcttgctgtgatgagttttaaatgcctcccatactgaatgttctccaacctctgtctccagctccaatctctggatttagagatctctggatagagttcactctatctagctccac

SEQ ID NO: 824771 - DNA, 120 bp, Artificial Sequence
  ENSG00000226739_1 (sequence is synthesized)
catagttctagtttctttgaatggcacatcactccagctgcttaaaccagggcccagaagagtcttaaatgccttctttacccttttactccatgtccatgcagtctacctgctttcaga

SEQ ID NO: 824772 - DNA, 120 bp, Artificial Sequence
  ENSG00000226739_2 (sequence is synthesized)
acccagaggaaaaggatgtcctcatccccaatttacagcaaaagccatgaatttacagatgacagcttcagaattcatgtcaggatatgtgttctaatctgaataaagcattatttccaa

SEQ ID NO: 824773 - DNA, 120 bp, Artificial Sequence
  ENSG00000286011_0 (sequence is synthesized)
actaagggctcactcccctaagcctctggaaacaggatttggctgtcaccaccctcccagggtgcatttttcttggtgcctgatgcaggttcagagtctggcacggggcctctggctggc

SEQ ID NO: 824774 - DNA, 120 bp, Artificial Sequence
  ENSG00000286011_1 (sequence is synthesized)
agaccctgcacctcagcggcaaggggaggctgggaaggcctcacctggcttctgcaattggaaacgaggattcatgaggcggagaactccccaaatgtaaagcatgtttagcagccaaaa

SEQ ID NO: 824775 - DNA, 120 bp, Artificial Sequence
  ENSG00000286011_2 (sequence is synthesized)
aggatggcagatgtccccttctgttcttggtcctcagagccacctccatcttcctccttgcaatgaatcccactccactcacaccacgggtcccggctacacttcgccatcttctctgtc

SEQ ID NO: 824776 - DNA, 120 bp, Artificial Sequence
  ENSG00000286011_3 (sequence is synthesized)
tgtgttaggcctcaggagcaggccttggggaaacagaatctctctggccttttcctgtcctcctttcacccgcctaaggccgtactctaatcttcctccacctttctgattgtgggaccc

SEQ ID NO: 824777 - DNA, 120 bp, Artificial Sequence
  ENSG00000286011_4 (sequence is synthesized)
taattccagagagggtcctgccccatactctgggagaaggaatgctgtggttatgaatcttctataaaaacccaagaggcctggttcagagagcttctccatagctgaccatgtgaggct

SEQ ID NO: 824778 - DNA, 120 bp, Artificial Sequence
  ENSG00000286011_5 (sequence is synthesized)
cctagagtgtggtgtgcccacggagggcatggagcctccacaccctttcccactatttctgccctacacatctcttcatctgtatcctttgcaatatccttcataataaaccagtaaaca

SEQ ID NO: 824779 - DNA, 120 bp, Artificial Sequence
  ENSG00000286011_6 (sequence is synthesized)
gcaaagattgcgccagccagggtgggatcccggtagctaggtgggggctaccctgctggggaagagatggccttctctcctcgcaaacccagctccccacccctgcacgcgcccctctgc

SEQ ID NO: 824780 - DNA, 120 bp, Artificial Sequence
  ENSG00000286011_7 (sequence is synthesized)
cctggagtcgctggtccgagccctccttctctgcgaacctgagccccgccctgccctccctacgagagcaaactcccattcctggaaggaggagcagcccagaccctgagactggactag

SEQ ID NO: 824781 - DNA, 120 bp, Artificial Sequence; identical to SEQ ID NO: 431898
  ENSG00000286011_8 (sequence is synthesized)

SEQ ID NO: 824782 - DNA, 62 bp, Artificial Sequence
  ENSG00000286011_9 (sequence is synthesized)
acaacatagacacagaatggtctgcctgggcctcagtcacattggaggagcagagagagaag

SEQ ID NO: 824783 - DNA, 120 bp, Artificial Sequence
  ENSG00000286011_10 (sequence is synthesized)
ggcggggtctcggaagctgcggcctgtggtgcctttgctgagcccagcttttacacttcctgatctgggcatatactgctacatactggatcatcaaggaaggaggaaaatacctagtca

SEQ ID NO: 824784 - DNA, 120 bp, Artificial Sequence
  ENSG00000286011_11 (sequence is synthesized)
ttttaggcagagccgtgacacaaccagagatactacgagcaaaggttccggaacagggcagggcaggacaggtttgagagcaatggcgcgatttcggctcacagcaacctccgcctcctg

SEQ ID NO: 824785 - DNA, 120 bp, Artificial Sequence
  ENSG00000286011_12 (sequence is synthesized)
gacatatggacaggaaatgggcaagacacgggcctttcagagaagagagaccaaagatgtttgcagagaggcaggctttgcgcaacctgtaaagaatgagtaaggtttgaatagcagcta

SEQ ID NO: 824786 - DNA, 120 bp, Artificial Sequence
  ENSG00000286011_13 (sequence is synthesized)
caacaaatattgattgagagcctgctgtgtgccagactgtgggcccggcacttggaatttggccgtgaacctagcagacacagtggctgcccatttacatagcgtgcagtcgagtgtggg

SEQ ID NO: 824787 - DNA, 120 bp, Artificial Sequence
  ENSG00000286011_14 (sequence is synthesized)
agtttacagtctagctgtgaaataaacctgtaggtttaattatggtgggagctcagagagcggggtaggagactgtcctggtctgggacctccactgctgaggaagggtcacctaagctg

SEQ ID NO: 824788 - DNA, 120 bp, Artificial Sequence
  ENSG00000286011_15 (sequence is synthesized)
gggcctgcaggaggagggaggaaaggggccaggatgttccagaggaggaatagcaaatgtacactccagataagaagggcctggtggagattagaaagggtggaaagaagccatgtcaca

SEQ ID NO: 824789 - DNA, 83 bp, Artificial Sequence
  ENSG00000286011_16 (sequence is synthesized)
tgagcccagatatctgtttttaaattaaaaaaattaaaaagaatgctctctctctttgtcatattctgtaaagattgagtaaa

SEQ ID NO: 824790 - DNA, 120 bp, Artificial Sequence
  ENSG00000286011_17 (sequence is synthesized)
ttgtcatattctgtaaagattgagtaaatatctagaaattccactaaaatttccttaagtcaacaggacacagaatggtctgcctgggcctcagtcacattggaggagcagagagagaag

SEQ ID NO: 824791 - DNA, 70 bp, Artificial Sequence
  ENSG00000286011_18 (sequence is synthesized)
tgactttgtgatccacccaccggattaaagttcttaactgaaagtaagagaaacagactctagctagttt

SEQ ID NO: 824792 - DNA, 120 bp, Artificial Sequence
  ENSG00000286011_19 (sequence is synthesized)
ttcttaactgaaagtaagagaaacagactctagctagtttaagctggaaaataaattattaaaactattctgtagctcatagcatctccagcagggctagagagttagccaggaataatg

SEQ ID NO: 824793 - DNA, 120 bp, Artificial Sequence
  ENSG00000226733_0 (sequence is synthesized)
attctgacagataattaagaaagcagcagctttttctagacggctcttcctcatgatttgcattttagccagaggcgaccagttataaaaaaaacatgatggaaagatggtaagaagcca

SEQ ID NO: 824794 - DNA, 120 bp, Artificial Sequence
  ENSG00000226733_1 (sequence is synthesized)
attagatggatggatggctgactgacagctctctggtattacgactccagatttcagactacatagcctggcagttttctacaagaaccaacttttttgcaggttaaagagacatgtttc

SEQ ID NO: 824795 - DNA, 120 bp, Artificial Sequence
  ENSG00000226733_2 (sequence is synthesized)
taaataaaaaacaaagtgtgtcatcatcaaaacaaaactacatctcaccacaaaacttatgaggttgtgcctggaaaatgtagtaaaattcattggagcctatttctaccatcattttca

SEQ ID NO: 824796 - DNA, 120 bp, Artificial Sequence
  ENSG00000226733_3 (sequence is synthesized)
tattaaactttgcaatttgagtgactggaatttgaacttaaacagtgaagggaagcataaagaaggtcatacatatgctattggagagttcacagctagcccctcactactcaaattgtg

SEQ ID NO: 824797 - DNA, 120 bp, Artificial Sequence
  ENSG00000226733_4 (sequence is synthesized)
aattgacttgagaagcaaggagattattcatgctcctgcacactctgttatctctgggagctcttaatcaatgcagggtgagagccagttagcatgactgaggttagggtaaacgggctg

SEQ ID NO: 824798 - DNA, 120 bp, Artificial Sequence
  ENSG00000226733_5 (sequence is synthesized)
ttcagggaaagataaattaaaatgtgattattattcaaattggaatatagagaacataatccatgatggaagagaaggagaataatagaaataaataaaaatttacctactgaatcactt

SEQ ID NO: 824799 - DNA, 120 bp, Artificial Sequence
  ENSG00000226733_6 (sequence is synthesized)
gctctattgaatctagtccttgaaattccaaagacattataatatgctatgactaaagggaatgatttgggagatttatactctatctttattggctcctgcagatatgctgaaatacaa

SEQ ID NO: 824800 - DNA, 120 bp, Artificial Sequence
  ENSG00000226733_7 (sequence is synthesized)
attctcacatgctggaaatgtctactaaatgtaccttgatatacaaattaaattctcctatagaaaactgtactgtactcaaaaacctatatacaaataaaaagactaaattctaaataa

SEQ ID NO: 824801 - DNA, 120 bp, Artificial Sequence
  ENSG00000226733_8 (sequence is synthesized)
agtgacagcaataaggccatgtctggaaatgtgacagttttggctttgtgctcccctgagcaatagcccaggtgttcagagaaagtgtgggaaaacccatatttctgcattgtcattcga

SEQ ID NO: 824802 - DNA, 120 bp, Artificial Sequence
  ENSG00000226733_9 (sequence is synthesized)
tcagaggactaactggggccaacagccattagcgaggtaccaagaagcacaagcaaagaaagaagatacaagtgattcaaatctcaacatccttaaaggaattctgatttcaagtttgaa

SEQ ID NO: 824803 - DNA, 120 bp, Artificial Sequence
  ENSG00000226733_10 (sequence is synthesized)
ataagaaccatcctttgtgtggattcagatgacagaagtcgagaatgaacagatgtctttcaacaaggaacattaagaaaatgaatatttgatgtcatgaaatttgatttcatggagcat

SEQ ID NO: 824804 - DNA, 120 bp, Artificial Sequence
  ENSG00000226733_11 (sequence is synthesized)
cagaaaagcacaggtctgggggtacatgtgtggatttgttatatagataacttgcatgtcacaggtgttgggaacacagatcatcacccagatggcatggcaactggcccaatctctgct

SEQ ID NO: 824805 - DNA, 120 bp, Artificial Sequence
  ENSG00000226733_12 (sequence is synthesized)
gctgactgctcctgcagtcttgttctcagtgacaataaacaatgccaccttctcttgtgattgatccatgatggacatgaagtaacactgagaataaacctatgttgttttaagacactg

SEQ ID NO: 824806 - DNA, 120 bp, Artificial Sequence
  ENSG00000286013_0 (sequence is synthesized)
cctcaatgcactagcatgcactaaaaccaaaacacacaaggagattcagcactgttaagaagagaaatccaagttgacttggcatgaagcaggaggctgattgagagctttgaaacctct

SEQ ID NO: 824807 - DNA, 120 bp, Artificial Sequence
  ENSG00000286013_1 (sequence is synthesized)
ttaaacttggacatttcaagaatcctggaagagcactattgtgaaaaaaactaggagacctgccaggaatgagtgtttggtttctgctctggaggtgcttgagaagggcaatagatctta

SEQ ID NO: 824808 - DNA, 120 bp, Artificial Sequence
  ENSG00000286013_2 (sequence is synthesized)
tctccaagtcttattttctaaagaggttccaagccatcgatacgcatgatcttcagcatcccagcagccatttcctgctgaccgctgagcaggaagagcacatgaccctggctggagccg

SEQ ID NO: 824809 - DNA, 120 bp, Artificial Sequence
  ENSG00000286013_3 (sequence is synthesized)
ccaagagggtggagatgatcagaaatcctttcactgtcaaattcagagaagaaacatgctgagaagaggcacttcctatgccaggcctacctgtgccgtgaggaatacatgtaggagaca

SEQ ID NO: 824810 - DNA, 120 bp, Artificial Sequence
  ENSG00000286013_4 (sequence is synthesized)
ggtcgccaccttgctggaacaaccaatgcagagataatgctgggccctctaatcagttgaacagtggcttcaaaaagataggtcaaagttataatctcctgcagctgtgcatgtgacttt

SEQ ID NO: 824811 - DNA, 120 bp, Artificial Sequence
  ENSG00000286013_5 (sequence is synthesized)
ctttggaaataggatcttgcaggtatgatgaaggcctatcttccccaggcctgccaaagggatcctgcaaaaaagcaaatctgatcatatcccagctctcagacctctccactcgatgtc

SEQ ID NO: 824812 - DNA, 120 bp, Artificial Sequence
  ENSG00000286013_6 (sequence is synthesized)
catcagctccaggaggtgccttccaaggcctgaaggttgacagatcccccaggatccccagggccagcctactctgcagcctcacctcccatgctccccttatgccaattctcagcaggt

SEQ ID NO: 824813 - DNA, 120 bp, Artificial Sequence
  ENSG00000286013_7 (sequence is synthesized)
ttctcccctgcttcatcccctaaatgttaccctccagtgatattattgatcaccttctgagcatgcgatgcctgcctgtgactttccacacagtttccctgagtcaggaaatgttctttt

SEQ ID NO: 824814 - DNA, 120 bp, Artificial Sequence
  ENSG00000286013_8 (sequence is synthesized)
tgcttgacaacctggcaaagtctggttagctttccaattcagctaggaccagagccttctcttacctttacatctacccaccacacccctgaattaatttaatctctcctccctctctac

SEQ ID NO: 824815 - DNA, 120 bp, Artificial Sequence
  ENSG00000286017_0 (sequence is synthesized)
tgaggagcgtctctgcccggccgcccaacgtctgagatgtggggagcgcctccgccccgccgccccgtctgggaggcccgcatggagtggcacaaagttcccaggcagaaccaggctcag

SEQ ID NO: 824816 - DNA, 120 bp, Artificial Sequence
  ENSG00000286017_1 (sequence is synthesized)
catggagtggcacaaagttcccaggcagaaccaggctcaggaacagctgaagtcctggtctggccttcctgtggttttcctaactcaccaagttacaggtcagttagagcagcagcgctt

SEQ ID NO: 824817 - DNA, 120 bp, Artificial Sequence
  ENSG00000286017_2 (sequence is synthesized)
ctgacctcggtgaggagttggaaggatctggacgggaagtcagagcctgggtaacagtcctggctctgccacccactagatgtgtaaccccaagtcagctgattcctctccaggtgcctc

SEQ ID NO: 824818 - DNA, 120 bp, Artificial Sequence
  ENSG00000286017_3 (sequence is synthesized)
ggcttccgcatctgtcgtatgacccgtgatctctgggaagccacacagctcaaggtcttggggagatggggtctcaccgtgttgcccaagctggtctggaactcctgggctctagcgatc

SEQ ID NO: 824819 - DNA, 120 bp, Artificial Sequence
  ENSG00000286017_4 (sequence is synthesized)
aagtgctgagaagttcagcacgtcatggaggctccggaagcgtcacttaccctgtccctgtcggcatcatcatcgtcagcatcgtttaagaatcaagccctgttttcttcttctgaccac

SEQ ID NO: 824820 - DNA, 120 bp, Artificial Sequence
  ENSG00000286017_5 (sequence is synthesized)
tgggtggctccgcagaattggttctgtgattatcgcgctctcaaaggcggccttggggtttgggtgaacagtatgataatgctggtttgtcgtaggtcaaaaacagcaaattatctgcaa

SEQ ID NO: 824821 - DNA, 120 bp, Artificial Sequence
  ENSG00000286017_6 (sequence is synthesized)
tgtcatgtggttctacctaatgcttgcggtgtccctgccctgggctgtttcccttcggcttcatctcagcgaatcacgaacacattccacggactcacctccttggaagccttttggatt

SEQ ID NO: 824822 - DNA, 120 bp, Artificial Sequence
  ENSG00000286017_7 (sequence is synthesized)
ctctgcgcagcccaagctgcccgggatctgggaggccaggctgagtctatggccccggagcccgcccggacttgccactggagacctggggccaagggcccatccgagctgggaagagag

SEQ ID NO: 824823 - DNA, 86 bp, Artificial Sequence
  ENSG00000253116_0 (sequence is synthesized)
catggaaagaaggggcatgattggtcattgatcatgatgagcacctgctatttacagagtgatttggggaatgaagacctaactat

SEQ ID NO: 824824 - DNA, 69 bp, Artificial Sequence
  ENSG00000253116_1 (sequence is synthesized)
ccagttttattgcaatggtattacaccagttttcaactaagaaatcagcaggaatagaaacactgcaca

SEQ ID NO: 824825 - DNA, 120 bp, Artificial Sequence
  ENSG00000253116_2 (sequence is synthesized)
tagaaacactgcacacaaaacctacaaaacctcctatcaacagggaagagtgaacaagaatgtatcctgtctgcacagggacagtcggcatgaaaaatatagcaagtcaaagggctggca

SEQ ID NO: 824826 - DNA, 120 bp, Artificial Sequence
  ENSG00000253116_3 (sequence is synthesized)
tgcagctcccagcaagatcaatgcagaagtctgccagtgaccatcaggcatgggctctgatggaagcctggtggtgataaggtcatccacagatctcattatgctgtgagctacagccga

SEQ ID NO: 824827 - DNA, 120 bp, Artificial Sequence
  ENSG00000253116_4 (sequence is synthesized)
atctcattatgctgtgagctacagccgacgtgattataaaattctgaggtggaatcctgagagacaggagggctgagccaaaacccttcatggggttgtgctgcaaggagtgcctgccgt

SEQ ID NO: 824828 - DNA, 120 bp, Artificial Sequence
  ENSG00000253115_0 (sequence is synthesized)
gagatgggaagctgtgggctgcgcagtgggtctttatggtcttggaaaggggacaccccaccttgtgctcatctttgtagaatctgggcaagtttgggggtcctcataaagattttgaaa

SEQ ID NO: 824829 - DNA, 120 bp, Artificial Sequence
  ENSG00000253115_1 (sequence is synthesized)
gtgtacttgggagaatatgatgatggggacagagcatgctgcattgcatggcttcttaggaagaaaacactatgggctgccctgcagaaatgcaggcagaagctgtcatcagtgaatgtt

SEQ ID NO: 824830 - DNA, 120 bp, Artificial Sequence
  ENSG00000253115_2 (sequence is synthesized)
gggaggatccataatgttggattggaatagaactagagtgagactgtttcatgaggccttctcccatctagaatctttctcaggagtattctggatgctttgacctggatcagttactgc

SEQ ID NO: 824831 - DNA, 120 bp, Artificial Sequence
  ENSG00000253112_0 (sequence is synthesized)
gtttgccagaggatgttttcctcagtgtctgttcgaccttcagcttttttggtcttccttttacgctgcatctgagctggtctgcctccacgttcttgcgccttacaccgatctccagtg

SEQ ID NO: 824832 - DNA, 120 bp, Artificial Sequence
  ENSG00000253112_1 (sequence is synthesized)
aggactcagacagggcttcgtgtctttccaaaaggatctactgtccctctcctccagggggaacagtaagggacactttctcagtacccacacccttgcctcaatcttttttgtaagcat

SEQ ID NO: 824833 - DNA, 120 bp, Artificial Sequence
  ENSG00000253112_2 (sequence is synthesized)
ccaatgaaatctgtggagaagagcctgtgagtggatacaaactccccctgtgtctgcagccccccaggcgatctctgttttcttgctggtccacactaagttcattaaattttaactgaa

SEQ ID NO: 824834 - DNA, 120 bp, Artificial Sequence
  ENSG00000253111_0 (sequence is synthesized)
caacagtgaaagatttaatacccacatgacaagggccttccagacatggtccagctggggtctgatgctgatttggatagatccatggcaaactgatgaagaaattttggtcagagagat

SEQ ID NO: 824835 - DNA, 120 bp, Artificial Sequence
  ENSG00000253111_1 (sequence is synthesized)
gaagtagctctgccagtacacagcatggaattgaaagcaatgggcctggcactgactgagaggtactcacagcttggggcagactcccatttggagatgggatcctgaagaagcctggat

SEQ ID NO: 824836 - DNA, 120 bp, Artificial Sequence
  ENSG00000253111_2 (sequence is synthesized)
aatggggacctagatgcagtcgtcttcaagttccataggagggctgtggctgaccttgtctcgtctgataaaccactgaagaagaatgctgtgtatctatctagtggggccttctaggga

SEQ ID NO: 824837 - DNA, 120 bp, Artificial Sequence
  ENSG00000253111_3 (sequence is synthesized)
actacggggggcaagggcaagttcattggcctgtcattactgtttcctaatctagggagcctctcagaaaagactcccctgaagcgattggtcttctctggctcgggccaggggctgagg

SEQ ID NO: 824838 - DNA, 120 bp, Artificial Sequence
  ENSG00000253111_4 (sequence is synthesized)
agtgacgctgggtggaggcaacacccagggagataggaagcctgttctgtggggcttatctcaggactgtgaggcaactgaagacagaagccatgagaggagaagtttggtaatctcatc

SEQ ID NO: 824839 - DNA, 120 bp, Artificial Sequence
  ENSG00000253111_5 (sequence is synthesized)
ggggtcttggaaagatgcaaatgatgtaatgagcagaagcaggggattgacttccaagctctgccacttattagctttgtggtcacttacgccctccgcaagccccagtgttttcacctg

SEQ ID NO: 824840 - DNA, 120 bp, Artificial Sequence
  ENSG00000253111_6 (sequence is synthesized)
tacaatgggggattacaataccaactgccagagtggatgcaggtggcgtgcagactctaatcacagcagtgaatgcaagaaggaaggtggaaggtggtggcgaggtcctgaaatgggcgt

SEQ ID NO: 824841 - DNA, 120 bp, Artificial Sequence
  ENSG00000253111_7 (sequence is synthesized)
ccatgtggacttgcacacaccgtgacaaccccagaaaatggtgtgtgatttcccagcttcccttggagaaatgtcactgccatgattgtgttacagaggacctccatctagccagcacgc

SEQ ID NO: 824842 - DNA, 120 bp, Artificial Sequence
  ENSG00000253111_8 (sequence is synthesized)
tcacactccttccctggatcggtttgatgaagcaggcctccatgttgtaaactgtctcatggagaggcccaactggcaaggaactgaggaaagcctctggccaacagccagtgaggagct

SEQ ID NO: 824843 - DNA, 120 bp, Artificial Sequence
  ENSG00000253111_9 (sequence is synthesized)
gaatcctgccaacaacactgagaaagtttggaagtggatcctgccccagttgaaccttcagatggctgtggtctcagctgacatcttgattgtagctttgtaagagactttgacccagag

SEQ ID NO: 824844 - DNA, 120 bp, Artificial Sequence
  ENSG00000253111_10 (sequence is synthesized)
gatttgaacccaggtgcatttgcatggcttctggctcctctgtggactgacagcctgtgtgggccagcgcttcccttctctgggactcaattcttccacttataaaatgagggggttgga

SEQ ID NO: 824845 - DNA, 120 bp, Artificial Sequence
  ENSG00000253111_11 (sequence is synthesized)
ccagatgactttttaagagtcttcccatccctggtattccctgagtcgccatcttggaaattctgacctcattcctgctttgtgcagctgtttatttgcttgtctctcttacactgtgga

SEQ ID NO: 824846 - DNA, 120 bp, Artificial Sequence
  ENSG00000253111_12 (sequence is synthesized)
gctgtggagcagttcaggccagtcttgctgggataaaggcatagcttcctctgtggcctctgggtttgagaaggtctccgagaatcctcactccacagaggacatagcatctttttcgga

SEQ ID NO: 824847 - DNA, 120 bp, Artificial Sequence
  ENSG00000253111_13 (sequence is synthesized)
gccctcccactggctcgagagggaacttgtaatttcgttttatttttggttttctctctcttgctctttttactggagtaagatatacataatataaaacttaccatttatctattttca

SEQ ID NO: 824848 - DNA, 90 bp, Artificial Sequence
  ENSG00000253111_14 (sequence is synthesized)
agcatcattatgtaaccatcaccatgatccatctgagaacattttcattatcccaaatggaaactctgtaccataaaacagtatcatcca

SEQ ID NO: 824849 - DNA, 120 bp, Artificial Sequence
  ENSG00000205325_0 (sequence is synthesized)
ggcagacaggtgggttgctgcagcctatggctgtagttggaggcctcagtacctctccactctgtaagtggcctcatgacatgacagctggtttcctccagggcaggtgattcaggagag

SEQ ID NO: 824850 - DNA, 120 bp, Artificial Sequence
  ENSG00000205325_1 (sequence is synthesized)
caagacaaagctgcaacatcttttgtgaccaaacctcagacatgacacaccattatttctgcagtatcctgttggctacacagatccaccttatttcatgtggaaagactctatgaaggg

SEQ ID NO: 824851 - DNA, 120 bp, Artificial Sequence
  ENSG00000205325_2 (sequence is synthesized)
catggatccagggggaacaaacaaagaaaaaaaaactgggaccagccactgccctggggaacagtggcagggtggagtgatctgaacatgaggcatgagaagaactgagtgactacagtg

SEQ ID NO: 824852 - DNA, 120 bp, Artificial Sequence
  ENSG00000205325_3 (sequence is synthesized)
attgggctataatagactctgtcactggcccagctgtaatccctggcgcctgctgcttcactgtgttctgcaggagttccactgccctgaatctctgactctgtgcccgaggtctttttc

SEQ ID NO: 824853 - DNA, 120 bp, Artificial Sequence
  ENSG00000205325_4 (sequence is synthesized)
tggaattgtggaaggtgctctgctatgtgggaaacaagctggaagttccgggaatcacacttcccagaagctacacccaaccagtgattgacaggagttgaagtaaaaacatcatggctt

SEQ ID NO: 824854 - DNA, 120 bp, Artificial Sequence
  ENSG00000205325_5 (sequence is synthesized)
tcttaccccttaagtggaatattttatactatttttcagaatttccccaaggagttaagctgtaattgcccatcacggcagccgggttaataaggtatctgtatctgccagaattaaatg

SEQ ID NO: 824855 - DNA, 120 bp, Artificial Sequence
  ENSG00000205325_6 (sequence is synthesized)
agcttaatataaggaattatcatgtaattatagagttgttctataattatgtaatattatattctaagctcctcttatacaatataggagaggatttgcagtaacaagggattagatagc

SEQ ID NO: 824856 - DNA, 120 bp, Artificial Sequence
  ENSG00000205325_7 (sequence is synthesized)
aagatgtaagagaactctgaagaatataggactagtggatataaggaacagccactacccctggggctgaggtggagcactccaagaattaaagaacctggaataagaacacctcacctc

SEQ ID NO: 824857 - DNA, 120 bp, Artificial Sequence
  ENSG00000205325_8 (sequence is synthesized)
actcacggctcactggatggtggacaagtccctgagttgtgatgctgtagaactttctggaaatttgccctccatattttcaagggaagatgtcaaagagaagtttcatctctcagaaat

SEQ ID NO: 824858 - DNA, 120 bp, Artificial Sequence
  ENSG00000205325_9 (sequence is synthesized)
tatctcaaaaccttcttggggattaccagggaaaattgtcacaggagactccatgaggggtcatgtcactcctaggctgttcaagggagttctgggggaagctgggcactgctggtcaca

SEQ ID NO: 824859 - DNA, 120 bp, Artificial Sequence
  ENSG00000205325_10 (sequence is synthesized)
acaggttgtaaaagctgggccctggagaagctgtccgcactgcaggagactgggtgctgctggagttgctggatgagcttaaggcatgtggggagaggagaacattagaactaggaaatg

SEQ ID NO: 824860 - DNA, 120 bp, Artificial Sequence
  ENSG00000205325_11 (sequence is synthesized)
aaacctctctctattctactgtccctccagcaccctctactgtaaacacttagcattgtgccacctggcacaggagaagtctttacagggcccgtctataacatagcaaagcaggcaaca

SEQ ID NO: 824861 - DNA, 120 bp, Artificial Sequence
  ENSG00000205325_12 (sequence is synthesized)
aagggtgaacttggagtggctcacatgttgctctatgttgacttcttccctttcctttttcattcccctactccccttattggttttccttaaattctaaataaaatacagtcatcctca

SEQ ID NO: 824862 - DNA, 120 bp, Artificial Sequence
  ENSG00000205325_13 (sequence is synthesized)
gccaaagctgaactcgaaatggagcatccacagaatggagatctcctgcacaagccagggattctttttcctcaaagagcacagctctggagtgagctctgtgaaggcagcacagatgcc

SEQ ID NO: 824863 - DNA, 120 bp, Artificial Sequence
  ENSG00000205325_14 (sequence is synthesized)
tggaaggaccctctacagaagcctttgctcctgtgtgtttccgctgcatagcccaaccagacctccatcgccggcatcagcccccaagggctttctcctgctctccccaactagcagcaa

SEQ ID NO: 824864 - DNA, 120 bp, Artificial Sequence
  ENSG00000205325_15 (sequence is synthesized)
tccaagggggattggttccaggcttctcagagaataccaaaatctgtggatgctcaagtctcagttataaaatggcgtagtatttgcatataatctacacacgtcttcccatatacttta

SEQ ID NO: 824865 - DNA, 120 bp, Artificial Sequence
  ENSG00000205325_16 (sequence is synthesized)
aatcatttccatgttacttacaatacctaaaaaaacgctacataaatagttgtcattgtcaattactttttatttttgtatcgttatttattatttttttcaaattttttttactgcctg

SEQ ID NO: 824866 - DNA, 120 bp, Artificial Sequence
  ENSG00000205325_17 (sequence is synthesized)
tttggttgaatcatggatgtagggttcatggatattgagggctgactaatcgcacttgacttttgactccgtgttggcttttgggtaaacccagactacattttgaaagtaaagccaata

SEQ ID NO: 824867 - DNA, 120 bp, Artificial Sequence
  ENSG00000205325_18 (sequence is synthesized)
aaattttctaatgcattgtatttgggatatgagcaaaacagaggagtcaaggatgcttccaatgtttttggcctaaaccatggggaaaatttcatctttataatattaagtttcttagtt

SEQ ID NO: 824868 - DNA, 120 bp, Artificial Sequence
  ENSG00000205325_19 (sequence is synthesized)
ttaatactgaatatgatgcctccttccaatttccctgtagagccctttgcatctttcattgaatttattcctaagcatttaatagttttgatgccattgtaaatgatatattttttcttt

SEQ ID NO: 824869 - DNA, 75 bp, Artificial Sequence
  ENSG00000205325_20 (sequence is synthesized)
tgatgccattgtaaatgatatattttttctttttcttttttttaaaaatagggtctcactttgttatgactcctg

SEQ ID NO: 824870 - DNA, 120 bp, Artificial Sequence
  ENSG00000205325_21 (sequence is synthesized)
ttataggcgtgagccaccacatccagcttgtaaatggtatatttttaaatgtcagtttctaaaatgttttgttagcataaagaaatacaattgactttttaataccaagccatcttgcta

SEQ ID NO: 824871 - DNA, 120 bp, Artificial Sequence
  ENSG00000205325_22 (sequence is synthesized)
gactttttaataccaagccatcttgctaatttaataatttagttctagatctgatttagactttatagttgtgcaattgtactatctgtggaaaatgacaatttttctcttcctttataa

SEQ ID NO: 824872 - DNA, 120 bp, Artificial Sequence
  ENSG00000205325_23 (sequence is synthesized)
tctttagcttttttttcttttccttggctttttgcaagataatgggatgtccagtgtggtgttatatacaagtggtaattgtaagtgtccctgttctgttctttttgtttgttgttctca

SEQ ID NO: 824873 - DNA, 120 bp, Artificial Sequence
  ENSG00000205325_24 (sequence is synthesized)
agctcaaagaaaaacaactttgctatttcgtcattgagtatgataacacttaaactttacttactgtaggattattgtacataatctttattgtattaaagatgttcctattttgctaag

SEQ ID NO: 824874 - DNA, 120 bp, Artificial Sequence
  ENSG00000205325_25 (sequence is synthesized)
ggaacccagggcagcaggtgcagcccgcgccactattcccagccccagggacttgatatatgcaaatgcgggggccatcaggccagggacaatagagcctcttaatccccccaggcaatg

SEQ ID NO: 824875 - DNA, 120 bp, Artificial Sequence
  ENSG00000225826_0 (sequence is synthesized)
gggaagtctgcttgaaaggaggtagtagtccagaaaaagattttgttttgctttatgaaaaggaagcaggaggagaaagtattattttttgtctttagatttaccatgagcatgtgatgc

SEQ ID NO: 824876 - DNA, 120 bp, Artificial Sequence
  ENSG00000225826_1 (sequence is synthesized)
ttaggctacggcagccatcttggtaccctgagaagagtcaccctaagagaagatgccagcattctaggaaaagcagggcggggatggagaaaaaatccagggcctggatgacattgctga

SEQ ID NO: 824877 - DNA, 120 bp, Artificial Sequence
  ENSG00000225826_2 (sequence is synthesized)
gctgctgagttaacctagaactatcctaactcaagatttctctttataagaatctctcttgcaggagtaacacaggcatgtggagaatttctcagagtatttccgcagcaaccaactggc

SEQ ID NO: 824878 - DNA, 120 bp, Artificial Sequence
  ENSG00000225826_3 (sequence is synthesized)
gtttcaatcttaacaccatgtgactaattcggtctctatgatcaaagccttataagaaagaatgactggttgacccgacatggaccaagtgaccgttcttgttcccagtgtgttgtgggc

SEQ ID NO: 824879 - DNA, 120 bp, Artificial Sequence
  ENSG00000225826_4 (sequence is synthesized)
taagaagagatgggcacagaatgatgggaacgcagagcgaaagggcccaactctaccaggaggggaagataaaaactcctgaagaaattatacaaaaatagaatacttacaacagaattc

SEQ ID NO: 824880 - DNA, 120 bp, Artificial Sequence
  ENSG00000225826_5 (sequence is synthesized)
tcaacatcatttttccctgtttgaatccagcaagtcagccattggtcacttaagagcactaacccctccctggtttgaagatgttcttgactttaaatacaaacatctgatattccagct

SEQ ID NO: 824881 - DNA, 120 bp, Artificial Sequence
  ENSG00000225826_6 (sequence is synthesized)
tagactcctccacaagaactagagtgtcatcctattttggcttccagctcagtccctctgctacaagtcttgactccagaactctgtgggataataaaatacaagatcatagcttgaaaa

SEQ ID NO: 824882 - DNA, 120 bp, Artificial Sequence
  ENSG00000225826_7 (sequence is synthesized)
gagcctgaatagttgtctcactttcatattgagcaaggacatggaatctctgacaaacgaggaagacttggaacacttaagcaagcataacctcctgagagaatttaccatgagcatgtg

SEQ ID NO: 824883 - DNA, 120 bp, Artificial Sequence
  ENSG00000225826_8 (sequence is synthesized)
ttttcttctgaaaatcctttgtagcagattctattagcttcaggtaacaggcaattatgtgctttaagagagaacccctctcccaggaagtgaacgtgattggcacaccaactggggtaa

SEQ ID NO: 824884 - DNA, 120 bp, Artificial Sequence
  ENSG00000225826_9 (sequence is synthesized)
ggacgttagaaagaaaggctggaagagggatgtggaagaggtgtatgctcttcattgggtaagacttgggcatttttaacgctaatagaaaggattcaattgagatgtagggtctaaata

SEQ ID NO: 824885 - DNA, 120 bp, Artificial Sequence
  ENSG00000225826_10 (sequence is synthesized)
tgtaagagaaggaaggcgaaattgttcacaagaagataaagcagaagggtccaaagcacagagagaaggaccaatggcagacaggatggacaacttcttttcctacagtgaaaaggagca

SEQ ID NO: 824886 - DNA, 120 bp, Artificial Sequence
  ENSG00000229337_0 (sequence is synthesized)
ggaagagggcctttgccgccgttcgcgtcagggcgagttccgggacgtcagtgcggtctccgccaatgtatggatttgacaatgcctttgattgacctcgcagctgctcatcacacaaaa

SEQ ID NO: 824887 - DNA, 120 bp, Artificial Sequence
  ENSG00000229337_1 (sequence is synthesized)
ctccgccaatggttgcaagaaaaactcctcggcccctcggaccatctttcctgtttccaaatgccggggaccagtgtctgtgactgcgccgcctgcctgagggcatgtactgaaaagccc

SEQ ID NO: 824888 - DNA, 120 bp, Artificial Sequence
  ENSG00000229337_2 (sequence is synthesized)
tgcgactccaacatgtgggactcacaagcaccttggacaggcctcaaaacgcggctgacatacagaatttttaccattaacgacctgaggcaggactggtggagctgaatacagacaata

SEQ ID NO: 824889 - DNA, 120 bp, Artificial Sequence
  ENSG00000229337_3 (sequence is synthesized)
tggaggcctcaggctcagaggatggcagagtcttcagatggatggagggagctgcagtcactgaaccactgcagggagagaagtactcacagaccaggaacgctcaacttggactgttat

SEQ ID NO: 824890 - DNA, 120 bp, Artificial Sequence
  ENSG00000229337_4 (sequence is synthesized)
tgacagagtaataataaacttctattttggtttgagtaatgttgtgttttgggtttatctgtttctgcaatctagcttactaccttaatgaatataagctttctttccattaaaaaattt

SEQ ID NO: 824891 - DNA, 120 bp, Artificial Sequence
  ENSG00000229337_5 (sequence is synthesized)
attaatgtataaatcacataccatacagttcactcacttaaagtgtactatttaatggcttttgatctatttcattgttaatttttagaaattatgttaaagtatatataacacacaatt

SEQ ID NO: 824892 - DNA, 120 bp, Artificial Sequence
  ENSG00000229337_6 (sequence is synthesized)
ttttattttaactatttttagatgtacaattcagtggcattaattacagtcacaatgttggacaaccatcaccacaatttccaaaatttttcttagatgaaaattctgaaaccattatgc

SEQ ID NO: 824893 - DNA, 120 bp, Artificial Sequence
  ENSG00000229337_7 (sequence is synthesized)
aataacttcccattacccactccttccagctcctggaaatctttaatttactttctgtctctataaattcaactattttagatatttcatgtaagtggaatcatgcaatatttgtccttt

SEQ ID NO: 824894 - DNA, 120 bp, Artificial Sequence
  ENSG00000229337_8 (sequence is synthesized)
tgggcttggcttattttacttagtataatggttttaagattcatgttgtagcatatatcaaaaattcattcctttttattattgtctctctctctgtccatatatatatatacacatata

SEQ ID NO: 824895 - DNA, 120 bp, Artificial Sequence
  ENSG00000229337_9 (sequence is synthesized)
aagagctgatgcatctgttgtagctgacggaatttaaggaactgaataattgacaagatttccagaaaagcagggtcgccagataatgctacctgtttgcgaatgattgttaccgtaatg

SEQ ID NO: 824896 - DNA, 120 bp, Artificial Sequence
  ENSG00000229337_10 (sequence is synthesized)
ctctagagagctaatcctttctcggcctagtcagatgattttaaatcatttgattttacagagctttagtttcagttttttaaatgaaaatggggatgggattaggtcatcttctaacac

SEQ ID NO: 824897 - DNA, 120 bp, Artificial Sequence
  ENSG00000229337_11 (sequence is synthesized)
ccacgacagccataaattgataatctatggatccatatttaaagttactgataaaaataaccacaattgaccagcctcccttccctgttaggaaatgctttatattttaatttagcaacc

SEQ ID NO: 824898 - DNA, 120 bp, Artificial Sequence
  ENSG00000229337_12 (sequence is synthesized)
catgtgaccaacccttttagaattgaactggctctccctaggaaaggttagaaatctaatcagttatagtaagtttctgttaacaaatggggagtggtcgacttggagtttggaaaaggg

SEQ ID NO: 824899 - DNA, 120 bp, Artificial Sequence
  ENSG00000229337_13 (sequence is synthesized)
tttgttaatttatctagccgttgctccaggaggacctgtgttatagtttggaaacatttacaaagggtatttttgtggggcagaaaacagttagcagtccttaatgtaatttggttgaaa

SEQ ID NO: 824900 - DNA, 120 bp, Artificial Sequence
  ENSG00000229337_14 (sequence is synthesized)
taaccgttcaaaccagactcctcctgttgctttgattcctttttcgcaaactttcttatgttctacgtatccaggtgctcctgatggccagcaatagacttgagacattggaagaatgta

SEQ ID NO: 824901 - DNA, 120 bp, Artificial Sequence
  ENSG00000229337_15 (sequence is synthesized)
tagccttagcgtctatttagtgttaagattttgtaagtctaattactgtgaaatagtcctggtaactttatcgattctggatacaaagaaaaatgcaaagtgaaagacctttggaaattg

SEQ ID NO: 824902 - DNA, 120 bp, Artificial Sequence
  ENSG00000229337_16 (sequence is synthesized)
ctattcacaccagagtactctatgagacattacataggtgatcaagaagagtgatcacctggctgcactttagggtatgtttgtccaggtttttctaataagttaattctaatcaataac

SEQ ID NO: 824903 - DNA, 120 bp, Artificial Sequence
  ENSG00000229337_17 (sequence is synthesized)
ttttgttctaattagtaacttttgtataaatgttaatgttaaatcgcgaaacaatgtgggatgggatactaagttctctccaggaacatgaaatgtcagcccatttattcacatcttttt

SEQ ID NO: 824904 - DNA, 120 bp, Artificial Sequence
  ENSG00000229337_18 (sequence is synthesized)
gtcctccctattgtattggtccagatttgttgttcatcctgactgtatgctgtttttagacattagttattttttatgcttttgtctaaacaagctctggccgggcgccatggctcacac

SEQ ID NO: 824905 - DNA, 120 bp, Artificial Sequence
  ENSG00000229337_19 (sequence is synthesized)
ctgtaatcccaggcctttgggaggccgaggtaggcaggtcacctgaggtggagagtttgagaccagcttgaccaacacggttaaaccctgtctctacttttaaaaaaaatacaaaaatta

SEQ ID NO: 824906 - DNA, 90 bp, Artificial Sequence
  ENSG00000229337_20 (sequence is synthesized)
aaaaatacaaaaattagccgggcatggaggcacacgtcagtaatcccagctgcttgggaggctgtggcacgagaatcacttgaactcaac

SEQ ID NO: 824907 - DNA, 120 bp, Artificial Sequence
  ENSG00000229335_0 (sequence is synthesized)
atatctgaggtgcgactgcgggacgtagagcggactgggcctttcccgttggcgcgtggcctcaatcagagatggggttccgccatattgctcacgctggcctagaactgccgagctcaa

SEQ ID NO: 824908 - DNA, 120 bp, Artificial Sequence
  ENSG00000229335_1 (sequence is synthesized)
agtgcttcactggccccggccttatttccaaaatgaaataactcacataagttctgtggtgacatgtaaaaacccaattcccgtaacagctttcccaacgttgattttttagacatgatg

SEQ ID NO: 824909 - DNA, 120 bp, Artificial Sequence
  ENSG00000229335_2 (sequence is synthesized)
ctttcagccctcacctcccaggaatggggagggggcatcctaccccatatctgaggtgcgactgcgggacgtagagcggactgggcctttcccgttggcgcgtggcctcaatcagggagt

SEQ ID NO: 824910 - DNA, 120 bp, Artificial Sequence
  ENSG00000229334_0 (sequence is synthesized)
acttcagtctacagagcaatgttccattggatcctattactgagccatctccttcatccccctttccgccccctcctctaggtttccgagagggagcagcaggggattggcgcccgtttc

SEQ ID NO: 824911 - DNA, 120 bp, Artificial Sequence
  ENSG00000229334_1 (sequence is synthesized)
cccgcccgacagccccccgacccgtggccccattacagcgcgtgggcggcgatccagcaggaggaggcgcagatccacaggccgaaggagatgcagacgcggtggcgggcgaagcagcgg

SEQ ID NO: 824912 - DNA, 120 bp, Artificial Sequence
  ENSG00000229334_2 (sequence is synthesized)
tccaggagtcgctggtgttgatgctgaaaagttacaggatctcttccaggaggaggatggcagtacagcagcttaccctacaaagacaacatgaatgacaacagtgcagcctaagtgcca

SEQ ID NO: 824913 - DNA, 120 bp, Artificial Sequence
  ENSG00000229334_3 (sequence is synthesized)
tctgtggcctcagaggagacagctccacccagtcacactctgatggagctttctgccttctggttaagttagctgagttgagttttggtctactgcagctgaagagtcctttttctaata

SEQ ID NO: 824914 - DNA, 120 bp, Artificial Sequence
  ENSG00000229334_4 (sequence is synthesized)
aagtgttctagagacctagctcttcccatggcgccccagactaggatgaaatctctttcttcttttctcgtttgcattcccactcaagtattcttcagtatacggacatgatcatactta

SEQ ID NO: 824915 - DNA, 120 bp, Artificial Sequence
  ENSG00000229334_5 (sequence is synthesized)
tggtgaatattttccaaaacaaaactcaagacataactggacagttacggtaatgccgggttagactgttaaagtcaggagagttcctcgactcctgtatgtggggttgcagttgctcac

SEQ ID NO: 824916 - DNA, 120 bp, Artificial Sequence
  ENSG00000229334_6 (sequence is synthesized)
tgggtgcaagtctgcctctttccatcataaatgatctgaaggctgtgactatttttacctcatctttacatcctccacagtaagtggtaaacgaatacatgacttatccataccaatagc

SEQ ID NO: 824917 - DNA, 120 bp, Artificial Sequence
  ENSG00000229334_7 (sequence is synthesized)
atgaactgctttcttcctgaactgaaggcaagcccatatggttgccactgagctccaagagctccaccgatgtggtcttgagaagaggaggaaataaagccaaatcctcacaactggtta

SEQ ID NO: 824918 - DNA, 120 bp, Artificial Sequence
  ENSG00000229330_0 (sequence is synthesized)
ggtactttctcagcaggacaagccctgagctctggaaaaacgcagctagaataacgaggaagcagaggggcctctcccacaccaggcttgccccgacaggtcacagccagatcagatacc

SEQ ID NO: 824919 - DNA, 120 bp, Artificial Sequence
  ENSG00000229330_1 (sequence is synthesized)
ctgaggaggaggctgtgagtcatgtttgtccagaagtgccaactgctgcaccagaaaagccgggagaaaagaagcaagcgtaaggctggagcacaatggcacaatctcggctcactgaaa

SEQ ID NO: 824920 - DNA, 120 bp, Artificial Sequence
  ENSG00000229330_2 (sequence is synthesized)
gggttgaagcaattctcctgcctcagacccctgagtagctgggactacaggcgcacgctgctacacccggctaattatttgtattttaatagagacgagttttcaccgtgttgcccaggc

SEQ ID NO: 824921 - DNA, 120 bp, Artificial Sequence
  ENSG00000278041_0 (sequence is synthesized)
tttttgggctgcaaggaggcagttagcacagggaactacgtagtgagggacatggagactaaacagcagctggcccatctctctggcttctcatggccaagcctgggacacacagctgcc

SEQ ID NO: 824922 - DNA, 120 bp, Artificial Sequence
  ENSG00000278041_1 (sequence is synthesized)
ctcgtgcaggtccagaactatggcacttgttccctcaggacccatcctcaaagccagtgacttggtcttttcctatgacaaaggagctcccagaatgtggcagtcccccttcctagaggg

SEQ ID NO: 824923 - DNA, 120 bp, Artificial Sequence
  ENSG00000278041_2 (sequence is synthesized)
agaatctgactgggtcagggaggcacccccggtttgcagagcccccattggtcaggttcagtgtccaaaacacctgaggggcaagtggcttctcgaagtccagcccatatggttactttt

SEQ ID NO: 824924 - DNA, 120 bp, Artificial Sequence
  ENSG00000278041_3 (sequence is synthesized)
gacttggacactcaaggcacagggacacatgacacaggcacagggtgtgacaactgcatgcagaaagagccactctcattcctcagaagaggctgtggagatgagtggctgagccatgtg

SEQ ID NO: 824925 - DNA, 120 bp, Artificial Sequence
  ENSG00000278041_4 (sequence is synthesized)
ccccaaaattcatgttgaagtcctaacccccagtatcttaaaatgtgaccatatttagaaatagaacctttaaagagctaactgggttaaaatgaattcattagggtaggccctacttca

SEQ ID NO: 824926 - DNA, 120 bp, Artificial Sequence
  ENSG00000278041_5 (sequence is synthesized)
gtatgaccggtgtctttagcagaagaagaaatcggtacagacacgcagaggggagggcatgtgaggacatgggaaggaaatgccacttgcaagccaaggagagaggcctcagaagaaacc

SEQ ID NO: 824927 - DNA, 120 bp, Artificial Sequence
  ENSG00000278041_6 (sequence is synthesized)
agccctcctgacaccttgatcctagacttccagcctccagaactgtaagaaaatacatttctgttgtttaagccacctggtcttagagttctatcttgaatttctctctgcttcagactt

SEQ ID NO: 824928 - DNA, 120 bp, Artificial Sequence
  ENSG00000278041_7 (sequence is synthesized)
ttctgttttgttttttagcctaaatgctattgaaaagagcagagaagatagagtgcaggcccctagagacaggatggaacgaaacacgcagtgtgcatctgtgtcctgctcagcatacgc

SEQ ID NO: 824929 - DNA, 120 bp, Artificial Sequence
  ENSG00000278041_8 (sequence is synthesized)
tcttggtccccactgggccatctcgctgctgactggcatcccgaagaacaggcagattgcacaggggcagctctttcctccaaagctgcaatgtggtgcatgaagtcctcagatttggga

SEQ ID NO: 824930 - DNA, 120 bp, Artificial Sequence
  ENSG00000278041_9 (sequence is synthesized)
actcatacaggcacttgagctcaaacatacagttctgatctaagacatcacaggtaagaatatccaaaaaggtgagctttccccctggaaaccatgacttcctcagaaacaaggagaaat

SEQ ID NO: 824931 - DNA, 120 bp, Artificial Sequence
  ENSG00000278041_10 (sequence is synthesized)
gtttcagctgcccaggttgcagttccgagtatggaggcttccatgtttcatgtcagggtcatggtggagctgtttcagctgcaggtggtattccaccatttggtcctccctgatgtctcc

SEQ ID NO: 824932 - DNA, 120 bp, Artificial Sequence
  ENSG00000278041_11 (sequence is synthesized)
tggcacctttccttcttcagtctcagcactctgaagaagcgtgcttgtgagcgccgcgggacgatccaggatgtccaggattgtggacgatcctgttcttcccatctgtgaggtaaggca

SEQ ID NO: 824933 - DNA, 120 bp, Artificial Sequence
  ENSG00000278041_12 (sequence is synthesized)
gattaggaatgtccacgtctagcttgaatttcacatccagccattggctgccaccatggccaggggcttctgcagatggatcaccgtttccctcccaggagcaggcaggtgtccagtatc

SEQ ID NO: 824934 - DNA, 120 bp, Artificial Sequence
  ENSG00000278041_13 (sequence is synthesized)
agccccagaacatcccggtcacccatctccatagggcttggatgacatgatgatgctctctgtgcctctgaggacggcgccttgggtctttgtacactaaatcccaccttgtcctctcct

SEQ ID NO: 824935 - DNA, 120 bp, Artificial Sequence
  ENSG00000278041_14 (sequence is synthesized)
ctatttgaaacagccatttcccaaatcccaatctgatgaaatcctgttcttccttccctcatgtttctctaggcctcctgtggactcccagaatgtaaagtcagcattcccttgagcctt

SEQ ID NO: 824936 - DNA, 120 bp, Artificial Sequence
  ENSG00000278041_15 (sequence is synthesized)
taactttaaagatcttacaggaccatagggtgtgcgtaaaaagcctgctgcaaatcagagtgcttcaactgcgtattaatgagatggaggaaagaggctgtgagtgcagacaatgagtcc

SEQ ID NO: 824937 - DNA, 120 bp, Artificial Sequence
  ENSG00000278041_16 (sequence is synthesized)
ctgagtaaatagactccagagccaaaggtgttctccacaccgaaagaatgactgtacccagggaaggagctcagactcacctggacaaaccctgaggggacagccatgttccagtgtggc

SEQ ID NO: 824938 - DNA, 120 bp, Artificial Sequence
  ENSG00000278041_17 (sequence is synthesized)
taggagggtctggagctgggcacgtcccccatgtctgcttgattcccctctggccgagttctactcaggtgagttgtgctcattcttgcttccccagggcctggatcacagttcctcaag

SEQ ID NO: 824939 - DNA, 120 bp, Artificial Sequence
  ENSG00000278041_18 (sequence is synthesized)
ctttgggatacaaacgaatcacctgggatttggataaaatgcagattcgtgttcagcagccctggcattctgcatttctcatgagctccagggagacgctggtgctgctggggcaggacc

SEQ ID NO: 824940 - DNA, 120 bp, Artificial Sequence
  ENSG00000278041_19 (sequence is synthesized)
acactttgggtggcaagggcttggcaggcaattccaggtgtcaccctagagatggcctgctattgcactgtcagtaggtagctgccacagtgacggccgctccagatcaaggggaggacc

SEQ ID NO: 824941 - DNA, 120 bp, Artificial Sequence
  ENSG00000278041_20 (sequence is synthesized)
ttttgaaaagggtccttgaatcatttgggaaataaatcaagccatatgagtaaaaagtaatcaaaaaatatgttgaatattggaaccagaggaaatcttagcatcattttgtaatgactc

SEQ ID NO: 824942 - DNA, 120 bp, Artificial Sequence
  ENSG00000278041_21 (sequence is synthesized)
cctccacgaattttccagataaggaaactgacaaagccaggtggcctgtggctgaggagcgagacggtcagcgaggtctccctgctgcactctcgtgcacttccacagtgaaaccctgct

SEQ ID NO: 824943 - DNA, 120 bp, Artificial Sequence
  ENSG00000278041_22 (sequence is synthesized)
gagagacacaggaaatgttgaacatagtgtctttaaaattaagactatgactgccctaaacatttacaaagcacaaaccatgagaaaaaagcctgtaccagaaatcagaagatggctttt

SEQ ID NO: 824944 - DNA, 120 bp, Artificial Sequence
  ENSG00000278041_23 (sequence is synthesized)
gtccatgtgcaaccttggacaagttaattacttatcgctgctctctgagcccgtttccccactggttaccgaaaaaatagaaaaggatatgcctgcccttcctaattcacagggcatcgc

SEQ ID NO: 824945 - DNA, 120 bp, Artificial Sequence
  ENSG00000278041_24 (sequence is synthesized)
agggaggtaggtagttaatatgctgaaccacttcaaaacggtggagctgaactcacagcaggaaccctgtcacacctttccatgacaaggatatcagtggggtgagggaggtggggagag

SEQ ID NO: 824946 - DNA, 120 bp, Artificial Sequence
  ENSG00000278041_25 (sequence is synthesized)
gcatgaggatgggagacaaaggagtggggtggggggcgggggaaggaggaagccagaaggacaggcccaggctaggctctgaagtcagcaggtgagcgaggtagagaactagcagcacca

SEQ ID NO: 824947 - DNA, 120 bp, Artificial Sequence
  ENSG00000278041_26 (sequence is synthesized)
ctgtccatggatatttgcggtgatggaaatgtactgtatccatgttctccaatatggcagccactagccacatgtggctatcaagcgctagaaatgtagctagtgtgatcgaggaactga

SEQ ID NO: 824948 - DNA, 120 bp, Artificial Sequence
  ENSG00000278041_27 (sequence is synthesized)
tctttaatttttctttaattgttattaatttccatttaaatagccacatgtggccagtggcttatgtagcaaagatctagatcatttgtttgaagcagtaaaaagagaaatgtgaatccc

SEQ ID NO: 824949 - DNA, 120 bp, Artificial Sequence
  ENSG00000278041_28 (sequence is synthesized)
ctcttcttacctcctataacatgctaattaacatcactgcaattaaccaccattcacagctcttcagctgctctgtggaacctcagcccactctgaaatgaacagccgcagtggcagggg

SEQ ID NO: 824950 - DNA, 120 bp, Artificial Sequence
  ENSG00000278041_29 (sequence is synthesized)
ttacagaatgggctgggagtggcaatgtagatttatctcttcacacactctatgccctctatcaaaaatgcctcaggctgtgtaaaattccacaaataataaagagattttaaaaatgtg

SEQ ID NO: 824951 - DNA, 120 bp, Artificial Sequence
  ENSG00000259291_0 (sequence is synthesized)
aaagtgttgggattataggcgtgagccagtacgcccagcctaacaaattctaaaagagctgtaacactgacagtctcttcatggtcccagttatttccaaaagggcacgttctgctctgg

SEQ ID NO: 824952 - DNA, 120 bp, Artificial Sequence
  ENSG00000259291_1 (sequence is synthesized)
agttatttccaaaagggcacgttctgctctggttccttctggtgggttagcaacagggcagatccactagaatacagctctcaaaatctactgcacatggactcacccaaagtgctttac

SEQ ID NO: 824953 - DNA, 120 bp, Artificial Sequence
  ENSG00000259291_2 (sequence is synthesized)
aaaaatcctgatcccaggccacattccagatcacttacatttgaacctcaggtccaaactcaggcatcagcatttaaaacattcctcaggtgactcccaacatgcagctgatttgccagc

SEQ ID NO: 824954 - DNA, 120 bp, Artificial Sequence
  ENSG00000259291_3 (sequence is synthesized)
cagccctctgcagtctggatcaaaggttctcaacatgaggtccctgaaccagcggctgctttgctaagaactgggaacttgtgggaaaggcagcgtctcagaccccaccccagatctact

SEQ ID NO: 824955 - DNA, 120 bp, Artificial Sequence
  ENSG00000259291_4 (sequence is synthesized)
gaatcagaaactctgggggtggggccagcactttgtttcaacaagccctccaggagactctgaggcactagtctggtccagtgggtctcaaacttgactgcaacaaatggcccagagatc

SEQ ID NO: 824956 - DNA, 120 bp, Artificial Sequence
  ENSG00000259291_5 (sequence is synthesized)
tttttgaagtgtagagtctgactcagcaggtgtgggtggagctgagaggccagcaagatcccaggtggggccgaggctgctcatcctcctaccacattttgagtagcaaggagctaccaa

SEQ ID NO: 824957 - DNA, 120 bp, Artificial Sequence
  ENSG00000259291_6 (sequence is synthesized)
gagcagccgacggggtttcattctcgtctactggaagcaaccttaatagacaactgaaaaacaaaacaaaacaactgagatacctgtttctgccagaaaacccaggccattcactggtca

SEQ ID NO: 824958 - DNA, 120 bp, Artificial Sequence
  ENSG00000259291_7 (sequence is synthesized)
ggttactgccaaagcatgttcccagctggtgtgactcagaggcacaccagaatttctttattataatttggcgatagggtcttgctttgccacgcaggctggagtgccgtggtccgatca

SEQ ID NO: 824959 - DNA, 120 bp, Artificial Sequence
  ENSG00000259291_8 (sequence is synthesized)
ctcctgggctcaagtgatcttcctgccttagactcccaagtagctgagattataggcacacgccaccacacccagctaatttaaaaatatttttgtagagaccaggtctcactatgttgc

SEQ ID NO: 824960 - DNA, 90 bp, Artificial Sequence
  ENSG00000259291_9 (sequence is synthesized)
cgccaccacacccagctaatttaaaaatatttttgtagagaccaggtctcactatgttgcctggtttggtatcaaactcctggccttaag

SEQ ID NO: 824961 - DNA, 120 bp, Artificial Sequence
  ENSG00000259291_10 (sequence is synthesized)
cagaaatagctcccaactgtagaaggagcctccctgtagcgctgttggctccctccttcctgtggagtctccacagcagtccctccccaccatgaggccagagaggctaacagctttgct

SEQ ID NO: 824962 - DNA, 120 bp, Artificial Sequence
  ENSG00000259291_11 (sequence is synthesized)
gtcacccaacagaaatgctttaagtactgaccactgctggagggaaaggctaccgctaacacttgggatgttttctgacagcctctgaaacttctacgaactgctgaggcataggatcct

SEQ ID NO: 824963 - DNA, 120 bp, Artificial Sequence
  ENSG00000259291_12 (sequence is synthesized)
ctcctaaaatttctcccagatcttaacgtcagggctgtctggccctttcatgagtatgtgggttatagtctctggcaggcacttgtgaagagtgtgactgattgacacttttttgccttg

SEQ ID NO: 824964 - DNA, 120 bp, Artificial Sequence
  ENSG00000259291_13 (sequence is synthesized)
gttgctgggaagctcagatctcccctctgcatgtcccttgcttaggacctcccatggtgtacttggagttgggacctcacctggctctcccttatctttccggctgccattttttcccct

SEQ ID NO: 824965 - DNA, 120 bp, Artificial Sequence
  ENSG00000259291_14 (sequence is synthesized)
ttctaactttctttcccatacacttatttgaaatattatctcacggtaacgaaataaagtgtctgtcacctcctgctgtgttgtcatcttgcatgagctatctaagttctctgttcttca

SEQ ID NO: 824966 - DNA, 120 bp, Artificial Sequence
  ENSG00000259291_15 (sequence is synthesized)
gtttctgcatctgtaaaacgatgacaatgacagagccaacctcgctttgaggatcacatgagttaataaaggcctggcacacagttagcactcaataaatgttagttatgatttttatta

SEQ ID NO: 824967 - DNA, 120 bp, Artificial Sequence
  ENSG00000259291_16 (sequence is synthesized)
tttgcagtcacctcactaaagaatattcatttatttataattattgctaagtaaacttctcttttaaacaggaacataaaaacacagtagggctttgcacaagtggaatctctaaacagt

SEQ ID NO: 824968 - DNA, 120 bp, Artificial Sequence
  ENSG00000259291_17 (sequence is synthesized)
tggtttgtatacatgtcaaaataagttagaatggaatttgtccaggagtttccaagtcacccgagaggctgtgcacctcttttgagaaggttagggaggggtacagacaggagccttgcc

SEQ ID NO: 824969 - DNA, 120 bp, Artificial Sequence
  ENSG00000259291_18 (sequence is synthesized)
aagaccaccccccagctcaaactgtgagttgtgctgtttcctcctcctagctttgcccaggtccaaggcacagggcagggggcgttcaagtatcgaacctcacagagggccagtgctgac

SEQ ID NO: 824970 - DNA, 120 bp, Artificial Sequence
  ENSG00000259291_19 (sequence is synthesized)
ggcggggctgggggagggaaaggagagccccaccctgggggccagaccttctcccttcagtttccaagaccaaggccactgcactggcaggagggaggaggaggaggagaggtacagggt

SEQ ID NO: 824971 - DNA, 120 bp, Artificial Sequence
  ENSG00000259291_20 (sequence is synthesized)
gtgacggggtcactgccacctgagggtcatcatggcgggcacctgggaggtcgtggggcttcggggtctggaagccatacttgggccaccttgtccacccctcagtcctgatcacagtca

SEQ ID NO: 824972 - DNA, 120 bp, Artificial Sequence
  ENSG00000259291_21 (sequence is synthesized)
ccctgaggcctggcttggtccttcacttaaggatccagccttgggggtggctgcgctgcagattggttcctcccaccgcaggcacttgtgaagagtgtgactgattgacacttttttgcc

SEQ ID NO: 824973 - DNA, 120 bp, Artificial Sequence
  ENSG00000278044_0 (sequence is synthesized)
ctgtttgtccatctgtccaattacctgtgagtctatctatgcatcttcttgtccattcatctgcccacccatctgtccctccatctgcccaccggcctcccctctccttctgggccgcag

SEQ ID NO: 824974 - DNA, 120 bp, Artificial Sequence
  ENSG00000278044_1 (sequence is synthesized)
gacccccggcctttgcccacgccgctgttgctgctgactccaaggtcttctcaaatattgtacggcaggaaactgcatatcttctggtttacatgaagatggagtgctaatggaaatgcc

SEQ ID NO: 824975 - DNA, 120 bp, Artificial Sequence
  ENSG00000227463_0 (sequence is synthesized)
caggcactcctgatacccactggaggtaatgctggttttgggagcacaatgtattgtgaataaaatatacgaagaaaaaagcatataatcctctggataaatctctgaataaaatttcag

SEQ ID NO: 824976 - DNA, 120 bp, Artificial Sequence
  ENSG00000227463_1 (sequence is synthesized)
atgaaaagaacacttaaatggccacattatatcaacagaaagacaggcatttcaggactaaaaaagaacataacatatggaatactgaaaacctgtactgtagcccagcgccaggcacca

SEQ ID NO: 824977 - DNA, 120 bp, Artificial Sequence
  ENSG00000227463_2 (sequence is synthesized)
ggtcagcacactaaatgcccagaaggatgatgtgtgggtgaagaagcagagcaacataatatgggaggggaaccccttcttggcagattttaaagaataaagtaaatggaagtccttgtt

SEQ ID NO: 824978 - DNA, 120 bp, Artificial Sequence
  ENSG00000227463_3 (sequence is synthesized)
tcttcaattagacagcagaaagctggaattttgtgatcatagtttgccacagaagtctcataattgcacccgcatctggggctaagcagtaggaggaaatagaagaaaaaaatcaactcc

SEQ ID NO: 824979 - DNA, 120 bp, Artificial Sequence
  ENSG00000227463_4 (sequence is synthesized)
tgtttgagttgatccatcctcatgggaccacagcttctctgaggagagaagaaagtttccattccacaaagttttaggtacctgtggaccctgctgctgctgctgttgctgccattaacg

SEQ ID NO: 824980 - DNA, 120 bp, Artificial Sequence
  ENSG00000227463_5 (sequence is synthesized)
ccactactgccacgaatggaggatttcctggcggccaggacatgatagcgtggagattgtaaaagaaaaaaaaaaataggcgggtggagaaaaatggcggactacaagcctacatccttc

SEQ ID NO: 824981 - DNA, 120 bp, Artificial Sequence
  ENSG00000227463_6 (sequence is synthesized)
ctactacccacaggaacccaaattttaaaaactatctgcacacagaaaagcaccatcataagaaccaaaaatcagggtaactgtggaagctgacagacataagccgaagaagaaaatgat

SEQ ID NO: 824982 - DNA, 120 bp, Artificial Sequence
  ENSG00000227463_7 (sequence is synthesized)
tggcatcactgtaggtcctcagcaaatcaaaatgggtgcctggtaaggttcatggttaagagatgtggtgcagctgttcttttatctcctactcagagtggaaatagccttaccagagca

SEQ ID NO: 824983 - DNA, 120 bp, Artificial Sequence
  ENSG00000227463_8 (sequence is synthesized)
tcagtggcttaacaaagattgacatcagcgtgacattctctgcaacaatgcacaaggctgcacagaaaaatcttccctatttacaagcacagtcaacctttcatctctgatttcccctga

SEQ ID NO: 824984 - DNA, 120 bp, Artificial Sequence
  ENSG00000227463_9 (sequence is synthesized)
agaccgcagtgaccctcttaaaatatactgcagggagtatgcaacaaacttcttcgaaagagaggcaatctagaaataattgagacaagggcagaagccaaaggacaatgaaaaaatttc

SEQ ID NO: 824985 - DNA, 120 bp, Artificial Sequence
  ENSG00000227463_10 (sequence is synthesized)
agaaacagggttgtttgaaactgaagatgctatacttgaggctttttgtggcatcggcttctgaattcaactctgaagtgaatgtgttgcattgctttcaagtgtggtggtgatgaatta

SEQ ID NO: 824986 - DNA, 120 bp, Artificial Sequence
  ENSG00000227463_11 (sequence is synthesized)
ctgaagaaatttcaatcagagggcatacagcaatggagcccctgtggttttcagaaaacttgcctgcttgctgttgaaagtctgacacaaagtaaaagaactgtgctgggactactggtg

SEQ ID NO: 824987 - DNA, 120 bp, Artificial Sequence
  ENSG00000227463_12 (sequence is synthesized)
aacagggagctatttgtgatagagaaaacatggtatttttcctctggtaagatgtacatttattagagcatttatcaaataatttggcttttcaatacattatcagaaattagtgagatt

SEQ ID NO: 824988 - DNA, 120 bp, Artificial Sequence
  ENSG00000227463_13 (sequence is synthesized)
ggttatgaacttaattatgcttttctaaaaaatgtttttagcctgctctcaaacattttgaagtggacccttattagagttaccaaattgtatgaaagcacattgccctcagcacataag

SEQ ID NO: 824989 - DNA, 120 bp, Artificial Sequence
  ENSG00000227463_14 (sequence is synthesized)
ggtcacaggtggaatgtagcagggttgaaatgaaggataatggaaaaatccactacttgtgtttgctacttaaatgtcatggctgggtaaatggatttctctacttcctaggactcggct

SEQ ID NO: 824990 - DNA, 120 bp, Artificial Sequence
  ENSG00000227463_15 (sequence is synthesized)
tctactacattagtctggcagcaattagagagaagaggttgctctgcaaattggcttggcgaaccatgtagttcatctttttattgtgcaaaacagaaaaaattgcttctaatcaatcca

SEQ ID NO: 824991 - DNA, 120 bp, Artificial Sequence
  ENSG00000227463_16 (sequence is synthesized)
ttttaaaaactatctgcacacagaaaagcaccatcataagaaccaaaaatcagcactgttcacaatagccaagatttgaaagcaacctaagtttccatcaacagatgaatggataaagaa

SEQ ID NO: 824992 - DNA, 120 bp, Artificial Sequence
  ENSG00000227463_17 (sequence is synthesized)
atacacaatggagtactattcagccattaaaaagaatgagatcctgtcatttgcaaccacatggatgcaactggaggtcgttatgctaagtgaaataagccagggtaactgtggaagctg

SEQ ID NO: 824993 - DNA, 120 bp, Artificial Sequence
  ENSG00000227463_18 (sequence is synthesized)
gaccgcagtgaccctcttaaaatatactgcagggattacttcaaggacctttcttttcttgaaaacagtcacaatatattcaaccattcattcatttgaccatttgatgaataaatcatc

SEQ ID NO: 824994 - DNA, 120 bp, Artificial Sequence
  ENSG00000227463_19 (sequence is synthesized)
cattcatttgatgatctgttctcaaaaatgttccagacatgaaaggcagtttacaagatgaataaaatacaacaaaatggcctatgaaaaccggagtgaaataagaaaggaaaacaagaa

SEQ ID NO: 824995 - DNA, 120 bp, Artificial Sequence
  ENSG00000227463_20 (sequence is synthesized)
tagaatcaacaaaatggagccaagaatatagctaacacacagaagagtttatcttgtttacccctgctctctctgacatcttctttctgaagctgctcctggctgctgcttctcacctct

SEQ ID NO: 824996 - DNA, 120 bp, Artificial Sequence
  ENSG00000227463_21 (sequence is synthesized)
tctccataaatcctaatttcttggaagatcatttttttaaacatttcctgatggtcctgatttgtcatctgctcctatgggatgcttggtggcttctcatcattttaaacttcattacct

SEQ ID NO: 824997 - DNA, 120 bp, Artificial Sequence
  ENSG00000227463_22 (sequence is synthesized)
ttggagtcttcactttgtctgtgtccaacttgccatggggtttaggagaaatgaaagggagcttggctatagctgctgaagatgcagttacagaagtggagaggcaggacagtggggaag

SEQ ID NO: 824998 - DNA, 78 bp, Artificial Sequence
  ENSG00000227463_23 (sequence is synthesized)
ggaggccgaggcgggtggatcaactgaggcctagaatttgagaccagcctcgccaacatggcggggcgtggtggcagg

SEQ ID NO: 824999 - DNA, 120 bp, Artificial Sequence
  ENSG00000227467_0 (sequence is synthesized)
cccagacacagggcagccttcctctcagaacatcttctgtatcctgaaagcctccagtgggttcatccttcaagttaatggacaggaaaactaagaccagtgaggaatcccaacactcat

SEQ ID NO: 825000 - DNA, 120 bp, Artificial Sequence
  ENSG00000227467_1 (sequence is synthesized)
cctgccaggatagaaaggaaagcccagaggcattgcaaagagtgctgaagagcagggattcgctgtatggggacaactcttgctttgtgtttcaggacagggaacccaggagtgcaaacc

SEQ ID NO: 825001 - DNA, 120 bp, Artificial Sequence
  ENSG00000227467_2 (sequence is synthesized)
tcagtcaggtgcagtccagagcctgtcttgagcataatggctgctctgctctgcccccgaccctcaccacctccagcggggttcatcatcccagtttatggacagaaaaactaagactag

SEQ ID NO: 825002 - DNA, 120 bp, Artificial Sequence
  ENSG00000227467_3 (sequence is synthesized)
agggggagggcttagctcctgctcggaggagaccttcaactccttcacctgcctggacttggcaccctcccaagagactgcaaccaaggttatgaaaatagcatctactcaccatccttc

SEQ ID NO: 825003 - DNA, 120 bp, Artificial Sequence
  ENSG00000227467_4 (sequence is synthesized)
ctcagcacacccccaaccaatccacccctcagtcccacccctgtctcaaggagactgagccccgagaagcacagcctcctgcacctcctcacctcccagcctgccttcctggtctatctg

SEQ ID NO: 825004 - DNA, 120 bp, Artificial Sequence
  ENSG00000227467_5 (sequence is synthesized)
caatgtcctcaagtcctttcccgtcctcctcatccaaactccaagacctgcctcacctcaccctcctccaggaagcccccttcatggtctgggttcactccctgtcatgacgtccgccct

SEQ ID NO: 825005 - DNA, 120 bp, Artificial Sequence
  ENSG00000227467_6 (sequence is synthesized)
caccagcacagcaccaagccttgcaatgctctctagtagttatttcctgcacagagaaggggtgagggaagcatcatttctgcctatccctgttcacacgcaaggctggctctgccttcc

SEQ ID NO: 825006 - DNA, 120 bp, Artificial Sequence
  ENSG00000227467_7 (sequence is synthesized)
cagggaccgttctgcagagggagaccgctcatcaggcaggtaccacctccagggatctcactaaggtagaactgatgggcctcagttctgttcagagaacagctatacaggctggaggcc

SEQ ID NO: 825007 - DNA, 120 bp, Artificial Sequence
  ENSG00000227467_8 (sequence is synthesized)
tccaagaaacagtttccattttccctgaggagtctgtatggatgtgtactgtacagggtataggctgtatggagtctgcaggtaaacatgcctgtgtgtcaaagaatgagtctgtatggg

SEQ ID NO: 825008 - DNA, 120 bp, Artificial Sequence
  ENSG00000227467_9 (sequence is synthesized)
tgtgtactgtacagggtatatgctgtatggagtctgcaggtaaacatgcctgtgtgtcaaagaatgagcatgtgtgtgtgtgcatgtgtcagcatgagaatgcctctgtgtttgtgagtg

SEQ ID NO: 825009 - DNA, 60 bp, Artificial Sequence
  ENSG00000227467_10 (sequence is synthesized)
atataggtgcagcattctgttgatggagagtcaaactctgtaaaaaaaaatttttttttt

SEQ ID NO: 825010 - DNA, 69 bp, Artificial Sequence
  ENSG00000227467_11 (sequence is synthesized)
gctgggattataggcacctgccaccacggtcgactaatttttgtattttttagtagagactgggttttc

SEQ ID NO: 825011 - DNA, 120 bp, Artificial Sequence
  ENSG00000227467_12 (sequence is synthesized)
tgagaacatgtgcccaaggtggtcgggatacatcttggttttatgtattttaggaaggtatgagacatcaatcaaatacatataagaaatacattgatttggttcagaaaggcagaacaa

SEQ ID NO: 825012 - DNA, 77 bp, Artificial Sequence
  ENSG00000227467_13 (sequence is synthesized)
tttgagtttgtctaaagacctgggatccatagaaaggaatgttcagtttaaagataaaggattatagagaccaagtt

SEQ ID NO: 825013 - DNA, 80 bp, Artificial Sequence
  ENSG00000227467_14 (sequence is synthesized)
agagcaagttgtaaattgtctcttatcggacttaaaagggtgcctggctcttacttagttgattatctcctggatctgga

SEQ ID NO: 825014 - DNA, 69 bp, Artificial Sequence
  ENSG00000227467_15 (sequence is synthesized)
agagcaagttgtaaattgtctcttatcggacttaaaagggtgcctggctcttggaaggggaatctctat

SEQ ID NO: 825015 - DNA, 71 bp, Artificial Sequence
  ENSG00000227467_16 (sequence is synthesized)
ttgcagggcaatttcaaggtatggcacggaaatatattttggggttaaatattcacaacatatagggtcaa

SEQ ID NO: 825016 - DNA, 120 bp, Artificial Sequence
  ENSG00000227467_17 (sequence is synthesized)
tgatgagaatgtatggtttgtagggcatgacttcctagacctcttaggtaggaatctgggtaagacagaatatcagacttagtcctcaattcctaatgcaaagttctgagatccaaaatg

SEQ ID NO: 825017 - DNA, 120 bp, Artificial Sequence
  ENSG00000227467_18 (sequence is synthesized)
ctccaaaatctaaaacattttttagcaccgacataatgccacaagtggaaaattccacacttgcttcaatgtgcacaaactttgtttcatgcataaaattattcaaaatattatataaaa

SEQ ID NO: 825018 - DNA, 120 bp, Artificial Sequence
  ENSG00000227466_0 (sequence is synthesized)
aaaactgaagggattctttttaacaaaggtgtatctcagaacagaatcaacgttacatgttttcttggccctgttaagtatgctgtacatctggaggcattgcttttaaagtagagcatg

SEQ ID NO: 825019 - DNA, 120 bp, Artificial Sequence
  ENSG00000227466_1 (sequence is synthesized)
tgctcaagatcaaaaacttttgaatgccagggaaacgtcttattaagtccagactgcttgactcaacactaccacagcacactgccttaaggacaatatccttaaaagagaaattatgct

SEQ ID NO: 825020 - DNA, 120 bp, Artificial Sequence
  ENSG00000227466_2 (sequence is synthesized)
ttatggagagcttgttgtatgctggaaactggaccgagctctggccatgccttatactttcttttaacttattgttctgccctttgaattcaataaataaatacctcattcaaaaatgta

SEQ ID NO: 825021 - DNA, 120 bp, Artificial Sequence
  ENSG00000232949_0 (sequence is synthesized)
ctagacttctttctccaggctcccgttgtgtggcttggctgcccactacctcattcccatcaatggacaatggctgggagagaaagcctccgtgactgtatcacggaacagtctccactc

SEQ ID NO: 825022 - DNA, 120 bp, Artificial Sequence
  ENSG00000232949_1 (sequence is synthesized)
caggttatggatccactgttgggcagttctacactgctcacatccggatgccgattctgccagcaaatccatctgattctatctctctctccggtctgtctaactctaggttctgcacat

SEQ ID NO: 825023 - DNA, 120 bp, Artificial Sequence
  ENSG00000232949_2 (sequence is synthesized)
caacatttagtacatgcctgctaaaaagttactgtcaacatatttgttgaacaatgattactggatgggtggatgaaacatcaatatgacttgcccaagggcagttatgaatgtctccaa

SEQ ID NO: 825024 - DNA, 120 bp, Artificial Sequence
  ENSG00000232949_3 (sequence is synthesized)
aactatttcaggggtaattcatgaacatgtcctctgaggattcttcttccatctctaagtcagttcctatgatatgactacctcagggcaagaaagtcactgtgtccctgctacaacaaa

SEQ ID NO: 825025 - DNA, 120 bp, Artificial Sequence
  ENSG00000232949_4 (sequence is synthesized)
gggagaaaagcaaagaaggcctggggttgagtgagacacagggtcccagccagcagctagaacacgaggagaaaagaagaaaggactcactgaaagggaattgctgaagaggacctttat

SEQ ID NO: 825026 - DNA, 120 bp, Artificial Sequence
  ENSG00000232949_5 (sequence is synthesized)
atctgagggctttactttgtgctttgtaatttccctttgtcatcctcatcttttaggaaactgattaaccactataatttacgtcgtattagcaacgccttagagaatgaaggaggaact

SEQ ID NO: 825027 - DNA, 120 bp, Artificial Sequence
  ENSG00000232949_6 (sequence is synthesized)
gtacttattcttggagcgtagcctggagagaggcagaagccttcaggagctgttactaggtagtaggaaatcactctctctagagtcctctgaaacagtctggaagagaatggatttcct

SEQ ID NO: 825028 - DNA, 120 bp, Artificial Sequence
  ENSG00000232949_7 (sequence is synthesized)
gctgttgtgcaggatgagggtttgagtacagtaatttaatttacttatttaaaaaatactggaagatggggagggaggatgggtcagattataatatgttcatatgtctaaggcaggaaa

SEQ ID NO: 825029 - DNA, 120 bp, Artificial Sequence
  ENSG00000232949_8 (sequence is synthesized)
ttagatacaagatgaaatctaagaaagttctgtgattgggtttctcccacagaaggaggagaaaatccctgcatctctggttatgcaaataatatgcaaattacagtgattacatacttg

SEQ ID NO: 825030 - DNA, 120 bp, Artificial Sequence
  ENSG00000232949_9 (sequence is synthesized)
ttcttaccaaacacaagggttttaaataagtttttcaaactccttaatgtctcccttccacaaagcataccaaaaaaaaaaaaaaattacaatagagtcaaaatgtgatctgtagacaaa

SEQ ID NO: 825031 - DNA, 120 bp, Artificial Sequence
  ENSG00000232949_10 (sequence is synthesized)
atgaaggacaaatggttttcccccctaaattttactccagggtacattttctcctctttctttgtcgaacaatgtgaagtaagggcttggattttgtcctgcagatggttttgcaatcag

SEQ ID NO: 825032 - DNA, 120 bp, Artificial Sequence
  ENSG00000232949_11 (sequence is synthesized)
ttctagccatttctctaagtctgggcttcaaatctgtcagttgagagtgatacagttgcctgtcccatggtggtgttaagtgaggctgagagcatcaaacaaatgtcccagctcctgcca

SEQ ID NO: 825033 - DNA, 120 bp, Artificial Sequence
  ENSG00000232949_12 (sequence is synthesized)
cagttgcatccttgacacgttccagtggtgcccgagcaacactgcaaagaccccctgggatgtctgttggcaagaaaaggtggagccactgccctggggggctgggaagggagttagaga

SEQ ID NO: 825034 - DNA, 120 bp, Artificial Sequence
  ENSG00000232949_13 (sequence is synthesized)
actactgtcttaacctaaaatttgggcagaatctgccttggatcaaatttaaaatcttttctgaatattagctgacttgattagaaactagttgtctctccccttctcagcagaagactg

SEQ ID NO: 825035 - DNA, 120 bp, Artificial Sequence
  ENSG00000232949_14 (sequence is synthesized)
tggaatgtgtctcctagcaacagagatgtgttactatcttatggtaggactgttttataaagcagcaatctccaacctttttggcaccagagaccagtttcatggaagatgatttctcca

SEQ ID NO: 825036 - DNA, 80 bp, Artificial Sequence
  ENSG00000232949_15 (sequence is synthesized)
ttggcaccagagaccagtttcatggaagatgatttctccacagacagggaagtggggggatggtttcaggatgactcatg

SEQ ID NO: 825037 - DNA, 120 bp, Artificial Sequence
  ENSG00000232940_0 (sequence is synthesized)
taagttcaaacgaggcgtataggcgaggacagcaggaaggctccaagtcaaacaaacggatggtacgaatttcgcctggtctagccctgccccaacggtgtgggtgtgggttgggtgctg

SEQ ID NO: 825038 - DNA, 120 bp, Artificial Sequence
  ENSG00000232940_1 (sequence is synthesized)
cagcccccgagcaaggggctgtcacagccacaaccagaggagctatggagctgctacggaggagggattccagagtcagcttgggcttgtcccaagggagcccttgggacagtgtctggg

SEQ ID NO: 825039 - DNA, 120 bp, Artificial Sequence
  ENSG00000232940_2 (sequence is synthesized)
gctgcgcggcctggttctcatcccttgcagcatctgctattttagccaggggccaccttcctccaatggcctgggagtagctagaggttagaggttacacccaccagaagggatgtaagc

SEQ ID NO: 825040 - DNA, 120 bp, Artificial Sequence
  ENSG00000232940_3 (sequence is synthesized)
ccaggaagtagtcagaaaggaaaggtcattctagagatggggccacctgaaaaaccttcaggaggaaggagaaaggaaatgggataagtgtcatgtcatactaaatatttattttctgca

SEQ ID NO: 825041 - DNA, 120 bp, Artificial Sequence
  ENSG00000232940_4 (sequence is synthesized)
gactgacttcggagtaattcttgagccaggaggggagaggttagtgttcaaattgctgagatcttaggtcaaaaagctacagaaaagaaatcactttgaaaaacacaatgactcagaggc

SEQ ID NO: 825042 - DNA, 120 bp, Artificial Sequence
  ENSG00000232940_5 (sequence is synthesized)
agtcaccccttgccagcaattccaagagctgaggaggcttcatgcctcaggacatggtgactagttgagtgaaccagagattgaggcagtggtttttacaggggaagaaacaagccttgg

SEQ ID NO: 825043 - DNA, 120 bp, Artificial Sequence
  ENSG00000232940_6 (sequence is synthesized)
gtgtatgggagcaggaaaggagggtgacagactggagaaatgataaaggccattttggaagcccacagggaagtggtcttgggaaacctgaagacactgggatattcagaaggccaaggg

SEQ ID NO: 825044 - DNA, 120 bp, Artificial Sequence
  ENSG00000232940_7 (sequence is synthesized)
caaggtgctgggagtgaaggcaggtcacctgaatgatactggtgccatttctgaagttggtgaaactccgcattacatcctgactcagagattccactgatgatttccaggaactaccaa

SEQ ID NO: 825045 - DNA, 120 bp, Artificial Sequence
  ENSG00000232940_8 (sequence is synthesized)
agccacggatcagctgagttacccgggctaatagcaggaggaaacagtgtcagagagggatctggctgatcttcaactccactaagttctccccaaggtatagccatccttatcatcaaa

SEQ ID NO: 825046 - DNA, 120 bp, Artificial Sequence
  ENSG00000232940_9 (sequence is synthesized)
ccctcttttctggtattctctcaatccagtctttcatactctattcccccaccatgtaatctgcatcctttcatttttcttttccacttcccttaccactgatcccatcattaccatatt

SEQ ID NO: 825047 - DNA, 120 bp, Artificial Sequence
  ENSG00000232940_10 (sequence is synthesized)
ttcctcataccttcttcccctcgaagtcgctcagcctgtccacgctcaatcaaagcctcagcctccttcacaaatgccactaaacccccaaaagggggagacagcaactcttcaatgaat

SEQ ID NO: 825048 - DNA, 120 bp, Artificial Sequence
  ENSG00000232940_11 (sequence is synthesized)
tcctggaaagacacaaacacatatacacaggtgtcctggtgtcagcagatttgcccaattctggcatcatgactaatgtagatccatctgaatggcatctttcagctgctgcaaaagtta

SEQ ID NO: 825049 - DNA, 120 bp, Artificial Sequence
  ENSG00000232940_12 (sequence is synthesized)
aggaaaatcctctatggagaaaaatatcctcaatcctaattttggcccatacagttcccctggttaagatcaaacaatgaactcaaagatcactagacacaaaagaagggcagctaccaa

SEQ ID NO: 825050 - DNA, 120 bp, Artificial Sequence
  ENSG00000232940_13 (sequence is synthesized)
gagagtcagcagacacaataagcaatagctgctgaccttaagaactatccgatacggatagcagttgtactgtgtgcaatgtctaaagttaaggataggccgggcacagtggctcacgcc

SEQ ID NO: 825051 - DNA, 120 bp, Artificial Sequence
  ENSG00000232940_14 (sequence is synthesized)
aggagagcccggagccggatccactctcagcctcaggaagcagcagcctccgctccgcggcgggtgtgctcggcagtcacagacccactcaggacacctcccgttgccgacgggctagac

SEQ ID NO: 825052 - DNA, 120 bp, Artificial Sequence
  ENSG00000232940_15 (sequence is synthesized)
ctgcatccgaagggcctaagcggggaggaaccgctttccaccactctccagggacctggggagggaatgtttaggccgtaggggtggaggacacaggaaacgtaacatttttccttaact

SEQ ID NO: 825053 - DNA, 120 bp, Artificial Sequence
  ENSG00000232940_16 (sequence is synthesized)
gcgcctctcttcttaggccttaaaggggtccccgtgtctctccagtctagagcctaagttcaaacgaggcgtataggcgaggacagcaggaaggctccaagtcaaacaaacggatgccca

SEQ ID NO: 825054 - DNA, 120 bp, Artificial Sequence
  ENSG00000232940_17 (sequence is synthesized)
aaaaaaaaaaaaaaaaaggatgtaaaaatgaccaattagtaagaactatgaggaatgaacagacttgaaaaaaggaaatttttttagatatgaaaagccagttttagaaagtcaacagat

SEQ ID NO: 825055 - DNA, 120 bp, Artificial Sequence
  ENSG00000232940_18 (sequence is synthesized)
agtcaacagattaacaagaattatacaatgaattagaatttataactgaagaaaggactcagaatgtagcacagacagaagatggaaaattttgagatagtaggagatacagaaatctaa

SEQ ID NO: 825056 - DNA, 120 bp, Artificial Sequence
  ENSG00000232940_19 (sequence is synthesized)
ttaatgtatctaggcactgaaattgatggctactaacatcacaaagagagccaagaagacattatgtgcttcctgatggaaatacataccactacctctcaaatatccctgtagaaaaaa

SEQ ID NO: 825057 - DNA, 120 bp, Artificial Sequence
  ENSG00000232940_20 (sequence is synthesized)
aaaaactaatttaaatctgaccaagcctttccatctaattacacacttatgagaaatacaccagacagaggaagtttggccacaccatggaatgcagtcagcaaaatctaaactgtacat

SEQ ID NO: 825058 - DNA, 120 bp, Artificial Sequence
  ENSG00000232940_21 (sequence is synthesized)
cattctagatgacaaatgactcaataactcagtttcttccaaaaataaattgcagaggagatggaagggaaatctatagactaaaaaaagacacatatatggactttatatggatcctga

SEQ ID NO: 825059 - DNA, 74 bp, Artificial Sequence
  ENSG00000232940_22 (sequence is synthesized)
attgcttgaacccgggaggcagatgttggagtgtgccaagatcgggccattgcactccagcctggcacttatga

SEQ ID NO: 825060 - DNA, 120 bp, Artificial Sequence
  ENSG00000232940_23 (sequence is synthesized)
atgaaataactgggaaaatctgaatagttattttagataagataatttttttaagtgtgataatgtattgtagtttttaaaaccatctgttaccaggtgtggtggcacacacctgtagtc

SEQ ID NO: 825061 - DNA, 120 bp, Artificial Sequence
  ENSG00000232940_24 (sequence is synthesized)
acttgagcccaggagttcgaggctgcagggagttatatcatgctactacactccagcctgggcactacagcaaggccctatctcaaaaataattttcttaataaaaataacattctgata

SEQ ID NO: 825062 - DNA, 120 bp, Artificial Sequence
  ENSG00000232940_25 (sequence is synthesized)
ttctgatacagatgaagtgataatattcatctgtatatgtataagatttaattcaaagtaactgggggacacagaaggaggataagcaataggtgttggtatagatgaaacaaaactgtc

SEQ ID NO: 825063 - DNA, 120 bp, Artificial Sequence
  ENSG00000232940_26 (sequence is synthesized)
cgtgaactgctatacaccgaatatcactgatgatgcctgggggttcactatgcttttctaatagcatagtgaaatttcccataataaaatgttaatttttgtttaatgtaaaagggagat

SEQ ID NO: 825064 - DNA, 120 bp, Artificial Sequence
  ENSG00000232940_27 (sequence is synthesized)
tcaaacaaaaaaactcataaaagcaaacaacccagacagaaagatctggtaagaagaaagtgaaattattattccatttaaaaataaattattaatactaaaattagccaggtgtggtgg

SEQ ID NO: 825065 - DNA, 73 bp, Artificial Sequence
  ENSG00000232940_28 (sequence is synthesized)
taaattattaatacagggagactgaagcagaagaatcacttgaaccgggaggcagaggttgtagtgagccaag

SEQ ID NO: 825066 - DNA, 120 bp, Artificial Sequence
  ENSG00000232940_29 (sequence is synthesized)
ggattacaggtgtgagccaccgtgctggcctcagtactattttttattgattatatgttgaaataataatattttggatgtagtggtttaaaaaattatttcatctgtttctccttactt

SEQ ID NO: 825067 - DNA, 120 bp, Artificial Sequence
  ENSG00000232940_30 (sequence is synthesized)
ttctccttactttttaatgtagcttctagaaaatttaaaattatttaagtggctcacatttgtggcatgcattatattcctataggagtactggtctggacttagatgaactttaagctt

SEQ ID NO: 825068 - DNA, 87 bp, Artificial Sequence
  ENSG00000232940_31 (sequence is synthesized)
tgcagtggcacaatcacagctcactacaacctcaactttcctggctcagtgattacaggcatgtgccaacatgtcccactcattttt

SEQ ID NO: 825069 - DNA, 120 bp, Artificial Sequence
  ENSG00000232947_0 (sequence is synthesized)
cctatcctatctgcagcctctagtccaaggctcccaagggccccacgatatctgatgcatcttagcacagagcaagctaatgccgactcatgccacatccccgttacacacaagaggtca

SEQ ID NO: 825070 - DNA, 120 bp, Artificial Sequence
  ENSG00000232947_1 (sequence is synthesized)
gagaggaagcagggcagagcagttttcctctgagccagacctcagaggtggccgtggtatttttgttttcccttccaccaaacaaaaggatctgtgtaaagcaaggcatcatcttactgc

SEQ ID NO: 825071 - DNA, 120 bp, Artificial Sequence
  ENSG00000232947_2 (sequence is synthesized)
aaggggagacatcgctggggtctggttagaagatctggctctattttctccaatgaaggtctttataggaaatctgcattagtgccttgtccatgttcatagaccctctgcttcatggca

SEQ ID NO: 825072 - DNA, 120 bp, Artificial Sequence
  ENSG00000232947_3 (sequence is synthesized)
gcgctgacttgaaggcccctaagcagcgaaggaaggggagcctctgtcccctccctagctggcttccctggcacatgctggtttccctccaattctgtggtgcacatcatgaccagcaga

SEQ ID NO: 825073 - DNA, 120 bp, Artificial Sequence
  ENSG00000232947_4 (sequence is synthesized)
ggaaagaattcagctggaccacctcaagctctgtgtgacggagttgaaagctttgctgatgtatatgttggtggtcaaggaaggctttctgaacacttacctggtgcccacagaggctct

SEQ ID NO: 825074 - DNA, 120 bp, Artificial Sequence
  ENSG00000232947_5 (sequence is synthesized)
gagagctggaagctggaaagagtcagtctggggtcctaaaaggtatcttctcttcagtgccaacatcaggggcatattggtgatagaaacagggtctctgcatggctacaggcaccatta

SEQ ID NO: 825075 - DNA, 120 bp, Artificial Sequence
  ENSG00000232947_6 (sequence is synthesized)
attggttcagttttcttccatttctcctgagctcaccctgaccctatgcactgctgaccaggaattctaacccgcagcatcgtgggtgggcccaccttgcagcctcatcacggttgagtt

SEQ ID NO: 825076 - DNA, 120 bp, Artificial Sequence
  ENSG00000287658_0 (sequence is synthesized)
gggtcagtgcttctttagggagtatggggagagggacacatcatgtgtgggatgaggccgcatggaaagcagacgacatctgcaggggacacatctatgagggtgtctatcacaattctc

SEQ ID NO: 825077 - DNA, 120 bp, Artificial Sequence
  ENSG00000287658_1 (sequence is synthesized)
ccagtctaaacaagaaatgagattgggagacatgttgctctgcagaattcccaggggttggaacaggaggatgaaaaaaggcttgaaattctgactgcaagtgggaagagagcaccaggc

SEQ ID NO: 825078 - DNA, 120 bp, Artificial Sequence
  ENSG00000287658_2 (sequence is synthesized)
agttgacccggacgctaaaggaaaagcttcgtgaaagtttcttgtagttttctttgatctgtatgacagttcattgtcccgaagagctatgtcatccttggatttgatggcttcactgtg

SEQ ID NO: 825079 - DNA, 120 bp, Artificial Sequence
  ENSG00000287658_3 (sequence is synthesized)
tactcctttttatttgaaagaaaaaagaagccaactgaaaagagatctgagcgctgatccccgtgagaaaggacaaagtcacatccaaagaagccgttatgctgcctttgttcctggact

SEQ ID NO: 825080 - DNA, 120 bp, Artificial Sequence
  ENSG00000287658_4 (sequence is synthesized)
gaagctttattgtgaaagatttcaagcattgggaagtaaattgctgggagcaagccccccaaaatctggctataaaccagccccaaaactgcccataaacaaaatctctgcagcactgtg

SEQ ID NO: 825081 - DNA, 120 bp, Artificial Sequence
  ENSG00000287659_0 (sequence is synthesized)
gagatcaccctggaggagaactccaagggtgggcggctaatgagggttggagaaaggtggacccatgggcggtggctgcccacggcctttgaagtttcatttgcagtgttttatgagccc

SEQ ID NO: 825082 - DNA, 120 bp, Artificial Sequence
  ENSG00000287659_1 (sequence is synthesized)
atgctggagtaaattgtacctgcaggctgctgcactttgccctccccagcaaaaggaggtggaattcacactagtaatgtctggctggagaacaccctagatgatgaatccagtgagggt

SEQ ID NO: 825083 - DNA, 120 bp, Artificial Sequence
  ENSG00000287659_2 (sequence is synthesized)
gccttctgtggaagcactggtttgctagcctctgaagggccatgggcccagcaccaggtgccctcagctctgaggccaggccgttacctgcattcaagatggacactggctagagaaagc

SEQ ID NO: 825084 - DNA, 120 bp, Artificial Sequence
  ENSG00000287659_3 (sequence is synthesized)
atgtccacagggctggtcagtaggaaaggggttgtgtttctggaagggtgcatctaacccaggggttggtgagcattttcctaacccagggccaggtagtaaacatttttggctttgcca

SEQ ID NO: 825085 - DNA, 120 bp, Artificial Sequence
  ENSG00000287659_4 (sequence is synthesized)
gtcatgcagtctctgtcacagccactgcactctactactttagcacaaaagcagccataggcaatacatttaaaaagacgagcgtgactgcgttccaataaaattttatttataaaaaac

SEQ ID NO: 825086 - DNA, 120 bp, Artificial Sequence
  ENSG00000287651_0 (sequence is synthesized)
agctttttcaaggctgctctttcttctgttctgctgcaagccactaatgcttctccatttacttcctgtcttctgaaaattcattaaaacttcttgtatgttgatgagggaaccgagatc

SEQ ID NO: 825087 - DNA, 120 bp, Artificial Sequence
  ENSG00000287651_1 (sequence is synthesized)
tgaagaagagaaatgacctatccaagttcccccagctggggccagttcttctgtttcacctagaattggatgttccaactcctgccgaggtcctctcttgggtcctgattttccttgcaa

SEQ ID NO: 825088 - DNA, 120 bp, Artificial Sequence
  ENSG00000287651_2 (sequence is synthesized)
ctgcctgaaacctgacttggtttgcaccagcgggtgcccaggcctccacagagtcttcggttctccaggtttcccatgccgccattcttgatcagttttcatctcacctctgtggtttct

SEQ ID NO: 825089 - DNA, 120 bp, Artificial Sequence
  ENSG00000287651_3 (sequence is synthesized)
acctcctgtagatgcttcaactccgccactgaagccaatgctgcctgcttcctccggtgacagcagcaaagcaggcagcagtggccttggaggctctggctggacccactgtcatgcatt

SEQ ID NO: 825090 - DNA, 120 bp, Artificial Sequence
  ENSG00000287651_4 (sequence is synthesized)
gtcttccacggttactcaggcacctttcctttacctggaaaatatctctgagctcaaacattcaactcacatcttggagccataacaaataaaggaagacggctttggtaactcagtaaa

SEQ ID NO: 825091 - DNA, 120 bp, Artificial Sequence
  ENSG00000287653_0 (sequence is synthesized)
ccctgggcccaagcaattctcccacatcgaccttcccacatcagcctccagagtaactagggctacagacacatatcacagcacccggctaatttttttttttttttctagagactgggt

SEQ ID NO: 825092 - DNA, 68 bp, Artificial Sequence
  ENSG00000287653_1 (sequence is synthesized)
gcacccggctaatttttttttttttttctagagactgggtttccccatgttgcccaggctggccttgt

SEQ ID NO: 825093 - DNA, 120 bp, Artificial Sequence
  ENSG00000287653_2 (sequence is synthesized)
aaaaaaaaatcattgcctttaattggtatagttagaacatttacatttaaagcaaatatttatggcactgcattaatattaatatcaatcatgattttattattttgtatttattgcact

SEQ ID NO: 825094 - DNA, 120 bp, Artificial Sequence
  ENSG00000287653_3 (sequence is synthesized)
aatatcaatcatgattttattattttgtatttattgcacttactcgttttttcttcctcttcattttttcattctctgatttaaattttgcatacaatttaatattatttcttctcttaa

SEQ ID NO: 825095 - DNA, 120 bp, Artificial Sequence
  ENSG00000287653_4 (sequence is synthesized)
gaaataaactctgctttctaaagaagaaaatatcgattatcttagagtttgtaatatacatttataggaatctgggtccactttcagatggctccttaaaagggaatatttccaactctt

SEQ ID NO: 825096 - DNA, 120 bp, Artificial Sequence
  ENSG00000287653_5 (sequence is synthesized)
gcttctgtttctttataaatttgctgtgatttaattcacttatctgtatgctgtaatcaaacaatacattgttactcttattactgtgaacaaaaaattaaatagtagataaagtaagaa

SEQ ID NO: 825097 - DNA, 120 bp, Artificial Sequence
  ENSG00000287654_0 (sequence is synthesized)
ggggcgggtagggctgcagcgctaggaaccgggtcaccgggtctaggtcaaagtcgccctggcaggtatagggctcttcatgcctttttctggagtgttattgaggtggaatcgcttttt

SEQ ID NO: 825098 - DNA, 120 bp, Artificial Sequence
  ENSG00000287654_1 (sequence is synthesized)
ctccctggtggcgccagttggatccttccagaatgagctcaacggagtctgacgccgaacactgttcttccgggacctaggtttagttcacaaattgggtatttctctccagggtgtttc

SEQ ID NO: 825099 - DNA, 120 bp, Artificial Sequence
  ENSG00000287654_2 (sequence is synthesized)
tgccagcctggcgagggcacgtttgcgtcgtttggctcattcactcttgctctctgttgttagtccccagaattcaaaagttggaaagcccgtgggcggcactattcttttcctactaat

SEQ ID NO: 825100 - DNA, 120 bp, Artificial Sequence
  ENSG00000287654_3 (sequence is synthesized)
ttgtagctttaataacacataaggggaagcacattagattgtatttacttatggagggagctttctcgttacgttttattttaagcttttctacaacactgcaaaaggggtttgcaaaaa

SEQ ID NO: 825101 - DNA, 120 bp, Artificial Sequence
  ENSG00000287656_0 (sequence is synthesized)
gaggtggccaagcggcctgggaagtgtgcagtgtgaccatcaagatgagaaataggaaggagccaggaggtccattccagatgcattactctctccatcctctccacagattccagtccc

SEQ ID NO: 825102 - DNA, 120 bp, Artificial Sequence
  ENSG00000287656_1 (sequence is synthesized)
ataagaggctccaaagcaacagcaataatgacaccatgccttgggctcctgcgtcggctggaaggcagaggaaggctgcagggaggattctggggtccagttgtgcaggagcccatgggt

SEQ ID NO: 825103 - DNA, 120 bp, Artificial Sequence
  ENSG00000287656_2 (sequence is synthesized)
ccagctgcgcacagtagggccgaggaagcttggtcctgggtgcaggtgtgtgttgagggactggaggccacggggcagacagtacagaggtcagaggggctgagcacctgaagggagggc

SEQ ID NO: 825104 - DNA, 120 bp, Artificial Sequence
  ENSG00000287656_3 (sequence is synthesized)
ttacctccttccctaactgtcttgttcagccccatcaaactctcacaaggaaaagtggccagagctcctgaacccttggatatctccccctgagccccaccaaccagaaaaaatacagta

SEQ ID NO: 825105 - DNA, 120 bp, Artificial Sequence
  ENSG00000287656_4 (sequence is synthesized)
actgggaagtgaaagaattgaacaaggcactgtgtctcccatgacagaacgcagggcacctgctacaccgaacaactctgtccatctacagatatgaagagaagatgctggccaggcagg

SEQ ID NO: 825106 - DNA, 120 bp, Artificial Sequence
  ENSG00000287656_5 (sequence is synthesized)
gcagcagggctcagcacaattcttcagaagagcagaactggagaaaatgattccatgcacaacagtacacaagaaacaagaagtaactaaaaacctgaattcatgctttcagtgagacac

SEQ ID NO: 825107 - DNA, 120 bp, Artificial Sequence
  ENSG00000287656_6 (sequence is synthesized)
aagagtctgctgcattgacaaaatgagagcaattaatcatgaaaaaggagcatcctgcaaaaaggaatcattggagatgaaaattataactgctgaacttaagaacactgggaggcaggg

SEQ ID NO: 825108 - DNA, 120 bp, Artificial Sequence
  ENSG00000287656_7 (sequence is synthesized)
agctgcccactggcagccagaggagagtgagcaggacccggagcgctggtttgataaatgcaccaggaacctgagagcataagccacagaggaggagactgtgagacaagaagaggagcc

SEQ ID NO: 825109 - DNA, 120 bp, Artificial Sequence
  ENSG00000287656_8 (sequence is synthesized)
cagagaaagcccactgtgcggagcctgctttccctgcatgggaaagagaccccatggataaggagggcagactggacactgaaatgtcagaagaggacacctattaaactgacctaaagt

SEQ ID NO: 825110 - DNA, 120 bp, Artificial Sequence
  ENSG00000287656_9 (sequence is synthesized)
gcagggaaagtgcccacacatgtttggactggagacaaactacaagagttgatgtccttgaggagggagactgggactatccaaagatggcatgagtcccccacacatgctctttcaaaa

SEQ ID NO: 825111 - DNA, 120 bp, Artificial Sequence
  ENSG00000287656_10 (sequence is synthesized)
ctttgccccaccttcatcaggaaatggcatctaattccctttcccttgaatccaggaagggcttgtgactctcctggaactgacagaatacagcagaaatgaggcagtgtgacttctgag

SEQ ID NO: 825112 - DNA, 120 bp, Artificial Sequence
  ENSG00000287656_11 (sequence is synthesized)
gctaggtcctgaaaggcaatgcagcttctgccttgtgagctattatagaacacacctgtggggctctgaaccactttgtaagacgtctgcagccaccatgctaggaggaagcccaagcta

SEQ ID NO: 825113 - DNA, 120 bp, Artificial Sequence
  ENSG00000287656_12 (sequence is synthesized)
cacagaggtatcatgtgcagttgttgcagctaactgagggcccaactgacagcactactctctgccaaatcagtaaattaagacaccctgacggctcctgccctggccattgggtcatcc

SEQ ID NO: 825114 - DNA, 120 bp, Artificial Sequence
  ENSG00000287656_13 (sequence is synthesized)
caacctctaagccttcctatctgaagctgcactttgtggagcagaaagaaacactccttcttgtgcctgttcggcattcatgactctcataatctgtgagtaaaaaaaaatggttgtttt

SEQ ID NO: 825115 - DNA, 120 bp, Artificial Sequence
  ENSG00000287656_14 (sequence is synthesized)
aaatcactacgttttgagataatttgtcgcacaacaatagtaagtagaatttcaacttgatgtataatggcttatttctctgcaaaaaaatctaaataaaatacaacaaaatgctaacat

SEQ ID NO: 825116 - DNA, 120 bp, Artificial Sequence
  ENSG00000287656_15 (sequence is synthesized)
tttttcatttggggaggtgggtacatgtgttatatttgttagacttttctttgaaagcttccttacttttatctaacatgaaatacaaattgttgaaacttccagtaaatttacaagtgc

SEQ ID NO: 825117 - DNA, 120 bp, Artificial Sequence
  ENSG00000287656_16 (sequence is synthesized)
taatgctaaaaaataattctaaaagacccacaaaaaagatatttacattttactttgtatatttaaggattaaaaaatggagatgaaaatacagaactataaagtgggcaataaagatca

SEQ ID NO: 825118 - DNA, 120 bp, Artificial Sequence
  ENSG00000287656_17 (sequence is synthesized)
caagcaggcatcactggaagtgctatagtaatggttctacacagtagcaaattccgatattgtttcccatgacttgtaaatgagctaaacattttcataatagtctggaaaatgttagca

SEQ ID NO: 825119 - DNA, 120 bp, Artificial Sequence
  ENSG00000287656_18 (sequence is synthesized)
tgctacagcagcattatttgtatgatatccattttagaataactatggattttggcctgataaaaacaggcatccaggaataatttgtcaatacactatgtcaggctttgaaatttgggt

SEQ ID NO: 825120 - DNA, 120 bp, Artificial Sequence
  ENSG00000287657_0 (sequence is synthesized)
acacacacacacacccgctgttacggcccccactgcagaccccagatcccgccagtccccggactcctcccggcgccccaggtttccacggccgcctgcagctcctcggctgaggctgcg

SEQ ID NO: 825121 - DNA, 120 bp, Artificial Sequence
  ENSG00000287657_1 (sequence is synthesized)
cttcgtaggggctgccgggctccgggacgcagtcctgcagtctttttctgactgcaggactgactgcaagactttctgactgcaagactgcaggactgcagtctttttcaccaccattcc

SEQ ID NO: 825122 - DNA, 120 bp, Artificial Sequence
  ENSG00000287657_2 (sequence is synthesized)
ttttttttttgctgttcaaacaggacttcaggaataaccgtggaagcgtaactgcagtagtgtctctgaggagaggagatctggatacagatacacacagagagaagatgataaggagac

SEQ ID NO: 825123 - DNA, 120 bp, Artificial Sequence
  ENSG00000287657_3 (sequence is synthesized)
ccaggaggaaggcggccatctacaagccaaggagagagaatgcagaagaaaccaatcctgtcaacaccttcaacctagcctccagcattgtgcaggaataaatttctgttgtttaagcca

SEQ ID NO: 825124 - DNA, 120 bp, Artificial Sequence
  ENSG00000254669_0 (sequence is synthesized)
gaacttttcactttcctgtcctttcaagcaacagaaatcaactagcaatcagagagtaacctacccatcctcttgggcaaaatttctttggttcatgaaatgctgcaaatattacacaat

SEQ ID NO: 825125 - DNA, 120 bp, Artificial Sequence
  ENSG00000254669_1 (sequence is synthesized)
tccatgtttcttctttttctaaagagggcagcaactgagtaggcattgaggttgagtgtaagaaaattctcccctactccataggtgctttcaggcatcatggctaatcagctagaggcc

SEQ ID NO: 825126 - DNA, 120 bp, Artificial Sequence
  ENSG00000254669_2 (sequence is synthesized)
gggagcttgagtagaacacatgactggttaactcttaaatcgtgctagacaaacctctccactgaagtactaatcaacttaaaatatcaacgtacccatggagccaaagcagcttgggga

SEQ ID NO: 825127 - DNA, 120 bp, Artificial Sequence
  ENSG00000254669_3 (sequence is synthesized)
gtcagaggaggtctcagggaaatagcgatgcttcaagagagttaaaggctataccagcctcttcccagagccacctttgcacaccttcatttgtgcacaaataaatctattatgattata

SEQ ID NO: 825128 - DNA, 120 bp, Artificial Sequence
  ENSG00000254665_0 (sequence is synthesized)
gcccaaacaactgtacattgtttattgagaacacccgtagatgggaaggagggatgccctgtaccgcatcgtggccaccactgactgggagccaggcccagagagcactggcagagctgg

SEQ ID NO: 825129 - DNA, 120 bp, Artificial Sequence
  ENSG00000254665_1 (sequence is synthesized)
gggtgggcttcccatgacacactgaccatctcggagggtgggaggaatgagaggactaggcctaagaccctggtgccatgctacaaatggggactgattggcctttgcctttcaaaaaca

SEQ ID NO: 825130 - DNA, 120 bp, Artificial Sequence
  ENSG00000254665_2 (sequence is synthesized)
gagggtatgggtatgcggactaccagcaaaaaatagaaacttgatttttttaaaaggtcctcctgtacataacaagacagcatctgctctccagggcccgggactggcagcggggacctc

SEQ ID NO: 825131 - DNA, 120 bp, Artificial Sequence
  ENSG00000254665_3 (sequence is synthesized)
tccagggaagatcagtggtttggctgagacagtcagctgcacaaaactggccagtcacgagcacccagcgaaacttcatccatgctctggcaggacaggaaagcacccggccccttggga

SEQ ID NO: 825132 - DNA, 120 bp, Artificial Sequence
  ENSG00000254665_4 (sequence is synthesized)
atatacaaatatttgccatattctctttgcttgttacaaaaaacagttaagaaagcttacagcagattatttacaaacagtatcctgggatatgatgaagccagcaaacatctgagactc

SEQ ID NO: 825133 - DNA, 120 bp, Artificial Sequence
  ENSG00000254665_5 (sequence is synthesized)
cataaaaacctcaagaaagcggcggatgcttttggaggccacagatttgcggaaggcctctcgctgaaaggccctctctcccttctcactctgtgtcagaaagagggagtagtgcccaac

SEQ ID NO: 825134 - DNA, 120 bp, Artificial Sequence
  ENSG00000254664_0 (sequence is synthesized)
actctaatgggggaacaatgagagcagcaagaaggggctagtggcctcttctagttccttccaacctggcagcaggcaagctcctattctgacacctgagcccttgtggtggggcccgtt

SEQ ID NO: 825135 - DNA, 120 bp, Artificial Sequence
  ENSG00000254664_1 (sequence is synthesized)
ctgagtcaaccagagcacaggccggggatagaggcaaggaggcagcaattcaacagtgaatttgggacctttggagcaatcaaggggaaggtggtggtgctgctgatggcggtggagagc

SEQ ID NO: 825136 - DNA, 120 bp, Artificial Sequence
  ENSG00000254664_2 (sequence is synthesized)
acaacaattctcagacctcacccactgtgtcttatcaagtgcatcatattttctagctgggtcagcacatgactattgtttctaacgcaaagaaaacataacacagggcatccattttgc

SEQ ID NO: 825137 - DNA, 120 bp, Artificial Sequence
  ENSG00000254664_3 (sequence is synthesized)
tggagggaattgactaggccaggctcagacactattgcatagtgggtatcttcaatacaaaggaagctgccccagttaaggaggcagaactaggaaaagaccgactgagaagaggctggg

SEQ ID NO: 825138 - DNA, 120 bp, Artificial Sequence
  ENSG00000254661_0 (sequence is synthesized)
tgttggtgaagcgccggggctgctaatgctccctcccctcttcctctttggctctctctctctctttttccagacaccttaaggaattcaacaacccctcccctgcacacaggcttcttc

SEQ ID NO: 825139 - DNA, 120 bp, Artificial Sequence
  ENSG00000254661_1 (sequence is synthesized)
cagccagatgccatgttgcaagatttcctctggagagggcctcttggcaaggaactgatgtctctggccagcagccagcgaggacctaagatctgtcaacagccatgcttatggctggtc

SEQ ID NO: 825140 - DNA, 120 bp, Artificial Sequence
  ENSG00000254661_2 (sequence is synthesized)
tagcagagccaggtgccaggcctggcgggagcatccttgtctcttaactgacagtgcctccacctggccttgcagctccactcgacaaatactaaataacaggctctggcatctcctgaa

SEQ ID NO: 825141 - DNA, 120 bp, Artificial Sequence
  ENSG00000254661_3 (sequence is synthesized)
gctctgcactcattaacacactgggaggaaggtagaagttccatggctttgggcccagatgagagaagaccctgagttgagtggaagcagcagtgcccctccttggcccctgcctggaga

SEQ ID NO: 825142 - DNA, 120 bp, Artificial Sequence
  ENSG00000254661_4 (sequence is synthesized)
attatcggtcttcttcctctttattcctccagcacccagctgggagcagaagggacaatgaattgtgactcggaaattaatcagatgagacctgatgactgaagtacatcacagagctag

SEQ ID NO: 825143 - DNA, 120 bp, Artificial Sequence
  ENSG00000254661_5 (sequence is synthesized)
gaagagagattactaagcaacacgccctttttttcagacatctcagttgacaacctgagcaatagctctgacctggaagcatccagctttgtagccaaagagaaaaagcgcagacctttg

SEQ ID NO: 825144 - DNA, 120 bp, Artificial Sequence
  ENSG00000254661_6 (sequence is synthesized)
tcccagaattctcatcaaaagtgtctttcatctcattggccctgtgaccatctgatccaagcctgcaatctgacccttccctcaatgttgacctcatccaggaagtgcctctctcccttc

SEQ ID NO: 825145 - DNA, 120 bp, Artificial Sequence
  ENSG00000254661_7 (sequence is synthesized)
aggaagacccacatctgaatcacctcagcatccaggatcctgccttgtccccagccctcacggtccaaatgccctggcagatctgtcctgacctgttcctattaaaggggctcagttaaa

SEQ ID NO: 825146 - DNA, 120 bp, Artificial Sequence
  ENSG00000254661_8 (sequence is synthesized)
gcctcatctgccacttcccctcttccctgcacacactctctggccactagcaactccaccccgttctatttagcccccagatctcactgcttgctcttctgtcattctgcaatgccagta

SEQ ID NO: 825147 - DNA, 120 bp, Artificial Sequence
  ENSG00000254661_9 (sequence is synthesized)
ccttcctcttcacctggcaaactcctatccatccttcaggtcctgatcaaatgacccctcctccaggaagcctttctctagatttccaaacacagtgactattttgtcctgtagtttcca

SEQ ID NO: 825148 - DNA, 120 bp, Artificial Sequence
  ENSG00000254661_10 (sequence is synthesized)
ctgattgacaaccatctttctgttctagtttcagcttccctgcactattgttaactatgtatctgtttccttccacctaccaagctgtatgtaccttgaataaatggtcaaggcgatttt

SEQ ID NO: 825149 - DNA, 120 bp, Artificial Sequence
  ENSG00000254661_11 (sequence is synthesized)
actgcctcctccctgctcctggccagcagcctgcggagctgggacccacactctcccagcactgggtgacaccgtcccccaaagtctgtggacacactgaacccgcccatggggctggtg

SEQ ID NO: 825150 - DNA, 120 bp, Artificial Sequence
  ENSG00000254661_12 (sequence is synthesized)
ttcagccaactacagatcactcaaaggcagacattctgggatcttccatccatcaagctgaaccagagtacaaggccaaaaccagtgaatgacaaagcaaccccatgcccagcttaagag

SEQ ID NO: 825151 - DNA, 120 bp, Artificial Sequence
  ENSG00000254661_13 (sequence is synthesized)
agagagtttgtcttgtaggagtcattagacactaatttgattctatttgcatgtgcacaccctgccctttgccaaacagggagagaatcacacttgagagctagcgctcagctcagtctc

SEQ ID NO: 825152 - DNA, 120 bp, Artificial Sequence
  ENSG00000254661_14 (sequence is synthesized)
ttctccacaccacgctagtgcaccaagaacaaggttataggtgtggcaaaaaaacaaaccctgccaatgctctaagtatatgtttgatgtaatcttatttctcataaaattaagaggata

SEQ ID NO: 825153 - DNA, 120 bp, Artificial Sequence
  ENSG00000254661_15 (sequence is synthesized)
atatttttaggtgatgcagagtatgagactgtcattaggttactctgaatctctttctctctctctcttcatggtaaaaattaagttccattaggaaaattcttcctccccttccttcct

SEQ ID NO: 825154 - DNA, 120 bp, Artificial Sequence
  ENSG00000254661_16 (sequence is synthesized)
cccattggtctttcctcctaagatccaggtagctctgagaaagtttgtttcatctatgcgttggcctgggaatcctcctcttgttaatctacacaaataaaatcatcttaaagatcgaaa

SEQ ID NO: 825155 - DNA, 120 bp, Artificial Sequence
  ENSG00000254661_17 (sequence is synthesized)
ctaaaccaatcaccatggcctcaggaatgcattgtgttgagtagtttaggctggggtcagttttatccccatccaaacaacagagctgaaatccgaggagaaatgatttcccaaagaaaa

SEQ ID NO: 825156 - DNA, 120 bp, Artificial Sequence
  ENSG00000254661_18 (sequence is synthesized)
caaaatgttgtacaaataatacataatctaacatcttaaaaaaggggaaatgattaaataaattatagcacaaaaattctgtgagatatataggcgatgattagatgacaatgtcaggtc

SEQ ID NO: 825157 - DNA, 120 bp, Artificial Sequence
  ENSG00000254661_19 (sequence is synthesized)
tataggcgatgattagatgacaatgtcaggtcagttcaataaatacatgttcattagttcccatatgccaggcactgaaataggcatctgtcttatatgtatacatatgtaacaaacctg

SEQ ID NO: 825158 - DNA, 89 bp, Artificial Sequence
  ENSG00000254661_20 (sequence is synthesized)
tatatatataaagaaagataaacaagatatggacccctaaaggaaactcactattttcagattgtaagagaaaacatttggatatatta

SEQ ID NO: 825159 - DNA, 120 bp, Artificial Sequence
  ENSG00000254661_21 (sequence is synthesized)
ccctaggactcagcctcctgaggaaccacttctctgtgtaaatacttaaacccatcccatggctgacacgcacgtggcccatggaaaagtggcttctgtaggacacacctcctccttttc

SEQ ID NO: 825160 - DNA, 120 bp, Artificial Sequence
  ENSG00000254661_22 (sequence is synthesized)
ccaaatggactttgttcttaaaatcctttaatgaggagcaagcaagcatcactcatctatctggatgtggactcagggccagaggcatttgatgatttattaattgacccaccaaatcta

SEQ ID NO: 825161 - DNA, 120 bp, Artificial Sequence
  ENSG00000254661_23 (sequence is synthesized)
gttcgtccccataggccagtgctaacaggccatttcatttattacttggcaaagtttgacctcatgaagcagatcccttttcaattacttcttacagaaaaatttcctttggcaattcag

SEQ ID NO: 825162 - DNA, 120 bp, Artificial Sequence
  ENSG00000254661_24 (sequence is synthesized)
aaggcaaattatcggtcttcttcctctttattcctccagcacccagctgggagtaggcagaagggacaatgaattgtgactcggaaattaatcagatgagacctgatgactgaagtacat

SEQ ID NO: 825163 - DNA, 120 bp, Artificial Sequence
  ENSG00000254662_0 (sequence is synthesized)
actctccaggctcaggtttccactcccccggctgcgggaaggacagtcaatcctgatttcattatcgaaagccttggaagacccttgactcatagatctcgcctgccttcttggaaagat

SEQ ID NO: 825164 - DNA, 120 bp, Artificial Sequence
  ENSG00000254662_1 (sequence is synthesized)
gacatgggcctcttgggggcattggggtctttgcccttcttcacctacataagaacccaaatgccttcagctatttcccacagaacccatacattttcccaaataaattatttagatcac

SEQ ID NO: 825165 - DNA, 80 bp, Artificial Sequence
  ENSG00000257319_0 (sequence is synthesized)
gtgggctgcgaccgcgctggggagcatagtgcggcgccaaccggtctgctgcgcgcccgccttgcgcccgcctgtcgccc

SEQ ID NO: 825166 - DNA, 120 bp, Artificial Sequence
  ENSG00000257319_1 (sequence is synthesized)
ccgcctcccgcagggctggagcgcgcggagccaggcagggaggaaaggccacccgggacggcggcggacttggaacgatattatttatttgcgttgggcgtttttttaagggatgggagg

SEQ ID NO: 825167 - DNA, 120 bp, Artificial Sequence
  ENSG00000257319_2 (sequence is synthesized)
agctgtgagtttctctggccgacagcgtaggctctgggagcgcaggggggagtctttccccctctctatgcagatctggacgggttttttttttgttttttgtttttttctggacggacg

SEQ ID NO: 825168 - DNA, 120 bp, Artificial Sequence
  ENSG00000257319_3 (sequence is synthesized)
gaaggtgtgtccagcccatccattcatgtcaccagccccacaaagtgacagacgcggccaacaataaggtggaacttcagttcatatgatgcaatgaaagctgcagacctgagatctgaa

SEQ ID NO: 825169 - DNA, 120 bp, Artificial Sequence
  ENSG00000257310_0 (sequence is synthesized)
gtggaaaaagcacttgaatctgtccaattgaatgaattgcactatgaattgaatgtgttactatccctttcacatcctatgtctaaaaacaaaaatgtttattaaacttctatagaatga

SEQ ID NO: 825170 - DNA, 120 bp, Artificial Sequence
  ENSG00000257310_1 (sequence is synthesized)
ttttcatcactatttccttggtccaaatacgtttataagggaattaaataacatagttggaaattttttaagccttcaattataatttttatacacatgtaagacaaaaaagtgagtacc

SEQ ID NO: 825171 - DNA, 120 bp, Artificial Sequence
  ENSG00000257310_2 (sequence is synthesized)
tacctttgctaatcacttttaaatttcaaatcttaggtcaacctaagatttttttttacactaaaaatatgaagttaaaatcaaatgttattttaaaatcagaaatactattgatggatt

SEQ ID NO: 825172 - DNA, 120 bp, Artificial Sequence
  ENSG00000257310_3 (sequence is synthesized)
gatttaaagacaagtaattttaatgttacagaatattagtaatacaatcttaaagcaaagtatgtttttatatctaacaactaactgattcagttaattgatttaatttgaaaggctgta

SEQ ID NO: 825173 - DNA, 120 bp, Artificial Sequence
  ENSG00000257310_4 (sequence is synthesized)
aagataataggtatgacagatttcctactaaggagacaaggccagggtagagcatattgctacagaaaagatagacattctttaaagtttcacttaaaagatctgcaaaagccaaaaaga

SEQ ID NO: 825174 - DNA, 120 bp, Artificial Sequence
  ENSG00000257310_5 (sequence is synthesized)
aacaaaaagtcacagatttatagatgagcaatgtttgatatataaaataaaaatattgttaaattctgacaagaacatgaaaacaaagccatgattcacccaccggaagcattagagcat

SEQ ID NO: 825175 - DNA, 120 bp, Artificial Sequence
  ENSG00000257310_6 (sequence is synthesized)
gttgggaatgcacaaaaattgatgcatcctcttttggtgatgattccaggcagagttgagtatcagtggccttagcaattatatgtaaaggcaatgctacttgcaagtttcccatcatat

SEQ ID NO: 825176 - DNA, 120 bp, Artificial Sequence
  ENSG00000257310_7 (sequence is synthesized)
aaaacctgtttatgatgttctgccaaatgaatatcactcttagatttaaacttgaaggtactctgaaaaaataaaactaagttaaacactgtttttaaaagcaacaattaaaaagccaaa

SEQ ID NO: 825177 - DNA, 120 bp, Artificial Sequence
  ENSG00000257310_8 (sequence is synthesized)
gttttaaagcagagaaacatttgcaataagaaagtacttgtgtacctttcatgtgtcagggactattcagtggtgttacttacttcgttatagtcacttcaattcaatgagagttaagtt

SEQ ID NO: 825178 - DNA, 120 bp, Artificial Sequence
  ENSG00000257310_9 (sequence is synthesized)
ttattatgccaataaagatgctcagatcttcattttctaatttaaagtttttgattactggcaaaatcatttcattagaaaaaaatatcaaacctgattttatatataataggattgtac

SEQ ID NO: 825179 - DNA, 120 bp, Artificial Sequence
  ENSG00000257310_10 (sequence is synthesized)
ttgactacatcatagcataagtttaatttttcttgttaatactttaaaaagtatttatgtaaataaacagtgcctgacacatgaattacttacaaaaaagactatcatttgaggctataa

SEQ ID NO: 825180 - DNA, 120 bp, Artificial Sequence
  ENSG00000257310_11 (sequence is synthesized)
acaataatatcacaatatacatactaaactcagaagataagtttgttaaaacatgttattactttttatgaaagacaactaaacatatgccatctataacaagaaaggtattgttagacg

SEQ ID NO: 825181 - DNA, 120 bp, Artificial Sequence
  ENSG00000257310_12 (sequence is synthesized)
tggttaaaattgctctgcagatatgagtctaataatgataaatgatatttaacctttgcaatcatcacatatcaatattactattactttcaacttacaactatgaaagcttaatgttaa

SEQ ID NO: 825182 - DNA, 120 bp, Artificial Sequence
  ENSG00000257310_13 (sequence is synthesized)
gaaattaagatttagaagggaaggggccagcatgtaattctaagtcttttgatttatagtccatattcaatgtatcactagtgaaatcatcttaaaatcctgactctgccactaatcttt

SEQ ID NO: 825183 - DNA, 120 bp, Artificial Sequence
  ENSG00000257310_14 (sequence is synthesized)
ttcagcttaggaagtcttttagctgatgtggctccaattttctcactcaatgttataatagggttaaatcaaatgtcccaaactcaagttctcacaggaggcacacagatatgcatgtaa

SEQ ID NO: 825184 - DNA, 120 bp, Artificial Sequence
  ENSG00000257310_15 (sequence is synthesized)
gcgaatttggccagatggggacttcctcaaactagagaatgtttgtcctttctaaaagtggcccctactcctcagttcaagtcagttgttcaatgttgctagttcttccatatttttcaa

SEQ ID NO: 825185 - DNA, 120 bp, Artificial Sequence
  ENSG00000257310_16 (sequence is synthesized)
gagaaacatgaaatccgaatttttatctaaaagcactatattttacaatttaattaaaacattttaacactgtgaagaccaatcatgtcagtttttacttctggactagtgtgtagagac

SEQ ID NO: 825186 - DNA, 120 bp, Artificial Sequence
  ENSG00000257310_17 (sequence is synthesized)
taatacaaaactggatgcaaactattaattattaggcatgtgccaagacaagagcaacatgaataattaaaaatttgtgtatgctgtagtctgaagtatttcattgataatacttttttt

SEQ ID NO: 825187 - DNA, 120 bp, Artificial Sequence
  ENSG00000257310_18 (sequence is synthesized)
ttgaatgaggagggtagtgttatcactagaatgcttaagaactcagcatatctgcattcaaaaaaacaatgactgaattaaaacacacaagatatgttgttaaacactaaatcagctttc

SEQ ID NO: 825188 - DNA, 120 bp, Artificial Sequence
  ENSG00000257310_19 (sequence is synthesized)
cgtgtctgcattttacaaatgctgaaacatttgtacatcccattgtctagaacaaaactcctgctttcattttgttcatcttgcttacactggaattaacaagttttaatatattatctt

SEQ ID NO: 825189 - DNA, 120 bp, Artificial Sequence
  ENSG00000257310_20 (sequence is synthesized)
aaaggatttaaaatacctttgtggaaatgtaagatgtttaataaaacctattcttatttggaaatacattggtcttagtttttctgagtccatgatacataccataccctattttggttt

SEQ ID NO: 825190 - DNA, 120 bp, Artificial Sequence
  ENSG00000257310_21 (sequence is synthesized)
gtaggaggaaaacaagtttatgtaatgaaatctaacactttcaggttaaaaaagtgtataatgtaatttaaatataaacatggaatccattaaataaaactaattttcttatctcccctt

SEQ ID NO: 825191 - DNA, 120 bp, Artificial Sequence
  ENSG00000285652_0 (sequence is synthesized)
actcctcagcaggctgctgagcgggcgtcgccgggccaggcggggcaaccatgctttccagcctccccacgcccctctcttcgccctttgtgtgcaagaccccagatcagcctggagagt

SEQ ID NO: 825192 - DNA, 120 bp, Artificial Sequence
  ENSG00000285652_1 (sequence is synthesized)
agctgttgtagacgaggttgaagaaaatttatgtttcgtatcaactgtatgaagaagttttagtcatcaccaacatggagagacaattctccctggatccgttgtgtttctacctgtctt

SEQ ID NO: 825193 - DNA, 120 bp, Artificial Sequence
  ENSG00000285652_2 (sequence is synthesized)
atgaccaaggcactaattgcccttttttctagactgtcttctcaagggtatttgtacagtaaatagtcttggaagatattggaagatagagatagtacctccatctgaaacaaagccttg

SEQ ID NO: 825194 - DNA, 120 bp, Artificial Sequence
  ENSG00000285652_3 (sequence is synthesized)
aaagctgtgatatctctctcctgaccaaaagctatctgtgggaattagagctcaggggaccagtcaatgcaagatatgcagatgctcatactgcccgctatgcctgagtgacaaaatcct

SEQ ID NO: 825195 - DNA, 120 bp, Artificial Sequence
  ENSG00000285652_4 (sequence is synthesized)
ttatctcgaagccaagagttttgcatcttccatcggcatccatgaaactacagccagctaacttgttagcctatcaaccaaaacaaaagtgatgtgtaaaccaaaggtccccagtgtcat

SEQ ID NO: 825196 - DNA, 120 bp, Artificial Sequence
  ENSG00000285652_5 (sequence is synthesized)
taagggcccagcagggcatctgaagatatgaagctgcctatgtgaggccacaagaactgatggtaattgtggcaaactagagaacatgctcagcctccacatgttctgatttcttttcat

SEQ ID NO: 825197 - DNA, 120 bp, Artificial Sequence
  ENSG00000285652_6 (sequence is synthesized)
actgcacaggcaaccaaaccatctgcttggctaccagtttgcaactcttgacattacataaaaccttctgccgaagctactcctctctcattcttcaaacctgagattttggggatcatt

SEQ ID NO: 825198 - DNA, 120 bp, Artificial Sequence
  ENSG00000285652_7 (sequence is synthesized)
ccagtttctggatgctcaagttgtgcactcacactgacctcccccaacagcacctgaaaacttccttatatctgacccacagtggactcaatccacaggactgagctgtgaagcatgccc

SEQ ID NO: 825199 - DNA, 120 bp, Artificial Sequence
  ENSG00000285652_8 (sequence is synthesized)
cagacccttacacactggctagccacctgttattctgatttgctccttctggttgctctccctgtgactgtgttagtggtggaagagatctaagttactccaagttaccggcagcaaatc

SEQ ID NO: 825200 - DNA, 120 bp, Artificial Sequence
  ENSG00000285652_9 (sequence is synthesized)
cataggctctccagcaacttcagcctttgccccctcagaagaaaaaattcaactgaagaagcacaaagcagaaaaagagaccagacagaggcaagtttcagagcagaagtggaagttaat

SEQ ID NO: 825201 - DNA, 120 bp, Artificial Sequence
  ENSG00000285652_10 (sequence is synthesized)
ttaaaaggcattagaacaggaaagaaaggaaagttcacttagaagagattcaagagggcatgtgaaggttaaagagagaggtcaagtccccatttaaccatgatcctaggacctttataa

SEQ ID NO: 825202 - DNA, 120 bp, Artificial Sequence
  ENSG00000285652_11 (sequence is synthesized)
gctcacctctttcccatgattcttcgcttagggtgggctgcccgcatgagcagagtcctccttacccttgggaagtgagcacgtgcagtgtgtttagggagttgtacacgtgaccatcta

SEQ ID NO: 825203 - DNA, 89 bp, Artificial Sequence
  ENSG00000285652_12 (sequence is synthesized)
acgtgcagtgtgtttagggagttgtacacgtgaccatctaaggctttcttcctttttctggtggaacctacctggaagatcatacttca

SEQ ID NO: 825204 - DNA, 120 bp, Artificial Sequence
  ENSG00000285652_13 (sequence is synthesized)
atttttgtctcttaatgtccatgcccaggaagttgcttttccctggggtctgcctttaattaacactttaatgttaacaggtgtggacaatcaggaactcgcctgtcactggtgcaggct

SEQ ID NO: 825205 - DNA, 120 bp, Artificial Sequence
  ENSG00000285652_14 (sequence is synthesized)
gacaatgtatcactttgagagaagcaatgcaataattgctgaatcatcacccgacatttctggtgggtgtggggagagacctctgctgttctactcatgcctatctacctgtaacagctg

SEQ ID NO: 825206 - DNA, 120 bp, Artificial Sequence
  ENSG00000285652_15 (sequence is synthesized)
taaccacaaacccaccgacttcagaatgttcttccaccctgatggggactggaggctgcaccctgtctacctgaacatgcagccaggtcccagaatctactgctactagaatcatggttg

SEQ ID NO: 825207 - DNA, 120 bp, Artificial Sequence
  ENSG00000285652_16 (sequence is synthesized)
acagcaggtctctcctctaattctgtgacctaagaatgcaatccccaccatataaacacctgaagcctagcagcatcttagagaaattttagggctccatccttccttctttatccaaca

SEQ ID NO: 825208 - DNA, 120 bp, Artificial Sequence
  ENSG00000285652_17 (sequence is synthesized)
aacattgttcctcagttcaccaaaactgtaatttaagaatatgcaatggataggccagaataggactttgttttccaccctctgaattatgtaggtttatctccacgtttgaagaaacta

SEQ ID NO: 825209 - DNA, 120 bp, Artificial Sequence
  ENSG00000285652_18 (sequence is synthesized)
tggatcatttgttgttgaccaccagagtgaaaaccactcataatatactgaccaggatactctgccctgtaaaagcggccagcagcttggtcaaactgtgagcggtccattttcatactg

SEQ ID NO: 825210 - DNA, 120 bp, Artificial Sequence
  ENSG00000285652_19 (sequence is synthesized)
cttggttgcaaaaattaagaggcatcttcactataaatactttcctacaactcagcaactttgtagcatatgcctatcaagtcactctgaaaaagatataagcaactctcacaatgagac

SEQ ID NO: 825211 - DNA, 120 bp, Artificial Sequence
  ENSG00000285652_20 (sequence is synthesized)
aaaacataataagaatattaaatcattaaactgttagtagcaattttctgcatctagtcctttcaaattatctattgctagaataataatccctgaaaatcatatcttacttctttcttc

SEQ ID NO: 825212 - DNA, 120 bp, Artificial Sequence
  ENSG00000285652_21 (sequence is synthesized)
tgatcttgtaatcctctaaaagctacaaaacaggacactaaagatagcttcaagtttgctgaaaggcagtacaagggaatagcaaaagagtttgttatatatttattgtcaaatagaaga

SEQ ID NO: 825213 - DNA, 120 bp, Artificial Sequence
  ENSG00000285652_22 (sequence is synthesized)
aataaaatactggcatcatgatttcaaaattagtcaaagaataattgacttaataaggctgcaataatttcttaactataaaacaacttatagaaaaaattttcaacccaaatcttcaaa

SEQ ID NO: 825214 - DNA, 120 bp, Artificial Sequence
  ENSG00000285652_23 (sequence is synthesized)
atactgcctacttcatgcaaagtgatccactcactgtctcctacaatcagcatatccattctcccagtgccatccattcctccatgctcacagccccagagttacagttcaagatttggt

SEQ ID NO: 825215 - DNA, 120 bp, Artificial Sequence
  ENSG00000285652_24 (sequence is synthesized)
gtggcttcccagcacagggagctgtaaacttgatagagctggactaacatcccacgaccaaaagcttagtggtcacttgggctctgggctattgaatgccatgttggaggatttacgcag

SEQ ID NO: 825216 - DNA, 120 bp, Artificial Sequence
  ENSG00000285652_25 (sequence is synthesized)
gcaggaaaaagaagatgctcagataaatttgaattttagataaacaacaaacaaaaattttcaaaataagtatggactatgcaatattagagacataatttaaaaatttaaagttaaact

SEQ ID NO: 825217 - DNA, 120 bp, Artificial Sequence
  ENSG00000285652_26 (sequence is synthesized)
tctaattagacatcgtatcttttctccagcaaccctggttgaaaagtcagttggctacagaggggaagaaagaagagtaacatttaacagtaaaagacagggcctcttttatcaatacta

SEQ ID NO: 825218 - DNA, 120 bp, Artificial Sequence
  ENSG00000285652_27 (sequence is synthesized)
gaaatggaagcaggaaggagctggttagcaacatcatcctcatggtgatggcactgcacctgccaggtcagatgatcaaatgtctgcaggagagtagcctgctagactatgggatagtgg

SEQ ID NO: 825219 - DNA, 120 bp, Artificial Sequence
  ENSG00000285652_28 (sequence is synthesized)
tagtgggtggaatataaggagtggactccagagggactttgcataggagctcaataaggatgcctgcaggctgggaagcagtcatttgacttatctgacccatcttatgtgattgcccta

SEQ ID NO: 825220 - DNA, 120 bp, Artificial Sequence
  ENSG00000285652_29 (sequence is synthesized)
actacttttggaagtagggcagagactctaagacattcccctgtctcatgaaagggaaccaaggaggtgaagaattggaagttcagagaaatttcgtggacgtttgagttacatgtgtct

SEQ ID NO: 825221 - DNA, 120 bp, Artificial Sequence
  ENSG00000285652_30 (sequence is synthesized)
ttgagtataattccagcctttgagatatcctgtggcttaaatgaactaaaaacagcaggcacaactatgtctgtcttgcatccacaagatccttcagcttcttcaagaaaagaatagaac

SEQ ID NO: 825222 - DNA, 120 bp, Artificial Sequence
  ENSG00000285652_31 (sequence is synthesized)
cttgttcatcattgactctccggtactggacacaaacttgtttcaaaagatatgactctaagtgtctatcgatttgatttgttatagttatgagactaaaaattgtatttctccaaagaa

SEQ ID NO: 825223 - DNA, 120 bp, Artificial Sequence
  ENSG00000285653_0 (sequence is synthesized)
ccaaagtgctgggattacaggtgtgatggtgtgtgcttgtggactcagctactcaggagctactgagatgggaagatcgcttgagcctggtgagtttggggctgcagtgagctatgattg

SEQ ID NO: 825224 - DNA, 120 bp, Artificial Sequence
  ENSG00000285653_1 (sequence is synthesized)
cagtgagctatgattgtaccactgcactctcgcttgggtaacagagtgagatactgtctctaaagaatatttaaaaataaatttgttgtaattccttcctttgacagtaatcataattcc

SEQ ID NO: 825225 - DNA, 120 bp, Artificial Sequence
  ENSG00000285653_2 (sequence is synthesized)
gagaggtcataggagaccccaaatttgtagtctgttgggcagaaatgcagataacttggggataccagaaacttgcagctctagtctgaaatgggaggcagtctcgcagtattgcactct

SEQ ID NO: 825226 - DNA, 120 bp, Artificial Sequence
  ENSG00000285653_3 (sequence is synthesized)
taacttgcagggtctacactaactccaggtagtcagtgtctgaattgaactgaatagtaggacatccagttagtgtcagataaattgctgtcggaacaaatggtgtgactacaatctgtg

SEQ ID NO: 825227 - DNA, 120 bp, Artificial Sequence
  ENSG00000285653_4 (sequence is synthesized)
aggagagttttgcgaaggtgagaattcacttcccagaatgtcttgcaaacatgtaaaactgggaacatttgagaactccagctgcacttcaggagaggccactgcacagacccatgatgc

SEQ ID NO: 825228 - DNA, 120 bp, Artificial Sequence
  ENSG00000285653_5 (sequence is synthesized)
agaaaggctgccaccacaggcctcccgtcattacgattatgggagggtacggcatcccgtgacttttgtttattttttttcaacaagtgtatagggtttactatatgctgggcattgtgc

SEQ ID NO: 825229 - DNA, 120 bp, Artificial Sequence
  ENSG00000285650_0 (sequence is synthesized)
ggcaaatggaaccaggatcacaggaaggtgctgctctgtccccactgcattggcaaacattagtaggccaataccagcgaagtacagaacatggagcaacagaaacttcaaaattactgg

SEQ ID NO: 825230 - DNA, 120 bp, Artificial Sequence
  ENSG00000285650_1 (sequence is synthesized)
tgggagcagacatggacaagccactttggaaataatctggcactgacagtaagctgaacatgcatccatgcatgacacaggaatttcatttctaggcagttgagcccaggagaagcttat

SEQ ID NO: 825231 - DNA, 120 bp, Artificial Sequence
  ENSG00000285650_2 (sequence is synthesized)
gtactgtgtgccaggaggtgtgagccagaacaaagaagccacgtgctccagagctgaagagcgcagcaagacgctgtgtatgatcccctccgggaggatgagcagtgaaactgcactgca

SEQ ID NO: 825232 - DNA, 120 bp, Artificial Sequence
  ENSG00000285650_3 (sequence is synthesized)
gctgctcatgaccctggaggaggtgaacggtgacaaaggaaatgggaggccccatggcctgtgcaggctcaccctggccggctggcgctgcggatccccatggagcaggaggagggcccc

SEQ ID NO: 825233 - DNA, 120 bp, Artificial Sequence
  ENSG00000285650_4 (sequence is synthesized)
tccgagagaaacagtatacgaggagaatgagaagctgccgcctgttcacaccgcctgtcacctccctctgtgttgcgccatgctgagacatggtacccctcgcccctggacacacacagg

SEQ ID NO: 825234 - DNA, 120 bp, Artificial Sequence
  ENSG00000285650_5 (sequence is synthesized)
gtttttccccaattgagcagatctcctatgtgaccaaaacatacttctccaaaccagaacgtgccccttcagatgtccccagctgtcccaactgcgtctctccttccttgtcccctcagg

SEQ ID NO: 825235 - DNA, 120 bp, Artificial Sequence
  ENSG00000285650_6 (sequence is synthesized)
ccccagcatggctggtcttgacagcctgggtgcagctgctggcaccacagattgctgaatctgggcctaacgctgcatatccatgctgagttgatgccaggtttggagccccatggaaat

SEQ ID NO: 825236 - DNA, 120 bp, Artificial Sequence
  ENSG00000285650_7 (sequence is synthesized)
gctgcctgtgtgcctcagacgcggccccaccactgtgctccatgggatgtcctgagaccactgtccactcctgagtctgagaccctatgatggctcatggcaacaccaacgacagtgagg

SEQ ID NO: 825237 - DNA, 120 bp, Artificial Sequence
  ENSG00000285650_8 (sequence is synthesized)
gtcccaaaaggtggctttccgtttccatcattcctcccgcatctgttggctttctaccagcagaaagagcttctccttttcccttattcatttgtatcagtatccactcagtcacttgtt

SEQ ID NO: 825238 - DNA, 120 bp, Artificial Sequence
  ENSG00000285650_9 (sequence is synthesized)
tattccataggctgtaacctgtttaagatcactattggtcgtgatgctcaagcccccaggtctggccagtatgagctcctgtaaactgctcctggttcttctgacacagccccaccattc

SEQ ID NO: 825239 - DNA, 120 bp, Artificial Sequence
  ENSG00000285650_10 (sequence is synthesized)
tttgaggtcttcctactctctggcatcatcagctgttctaggctcattttgtacttccctgcccagctctagaatcaaaggagctgacagtatttacaaaccaggacctgggctcgttgc

SEQ ID NO: 825240 - DNA, 120 bp, Artificial Sequence
  ENSG00000285650_11 (sequence is synthesized)
tcctggagcttcattacttctagggcctgtcagtggaaagagctaggaaggacacactggtgtgtgcaggtgcatgagccacttgcagccacttccacccctgtctgtgcacacccatat

SEQ ID NO: 825241 - DNA, 120 bp, Artificial Sequence
  ENSG00000285650_12 (sequence is synthesized)
tcaaaacacgcaggcacgagctctcccagacacctcagtctagctcttttgacatctgtcagtcgctttgctgttggggagagactgtgtcccttcaccctcagtgtatccccttgtttg

SEQ ID NO: 825242 - DNA, 120 bp, Artificial Sequence
  ENSG00000285650_13 (sequence is synthesized)
tggagctgacacaacgcagtcatttatctgacactgagactttcccgggcctaataccaggccaggcacctctgtccttttggtcacagcgtggcgtttaaatgagggctggtaccccca

SEQ ID NO: 825243 - DNA, 120 bp, Artificial Sequence
  ENSG00000285650_14 (sequence is synthesized)
cgggggaggcgagatggggttttcagattctcaagagctctaacatggaaaggactggatattcgagcactttgtatcatcacaatcatttgaagtaacaactaaccgccggcagcacca

SEQ ID NO: 825244 - DNA, 120 bp, Artificial Sequence
  ENSG00000285650_15 (sequence is synthesized)
gaagctccctttggaaatttcctgattggcacacctagcagaagagagtccctcactgacacagcgtccgactgaaatgttaacagaaatccccaggctacaaggctggacaaaaggtgc

SEQ ID NO: 825245 - DNA, 120 bp, Artificial Sequence
  ENSG00000285650_16 (sequence is synthesized)
ctgacttttaaatcttttgattacatacaggatggaaagactgtatctccaagtctaattgtgtggatttttaaccagtttttctagactctatttgtgtttttgaagtaaatacgtcca

SEQ ID NO: 825246 - DNA, 120 bp, Artificial Sequence
  ENSG00000285650_17 (sequence is synthesized)
tgtagtgatacaagcagaaaggaatgcagtggctatgctgctgaattgcctcctgtaaaccatattagcctaactttcctggacgtggtcctgaggctcggacacgcaaacacagaccta

SEQ ID NO: 825247 - DNA, 120 bp, Artificial Sequence
  ENSG00000285650_18 (sequence is synthesized)
gcgacacacacgtctgcccctaagagtcgtctggttggtaaaaaacaagggagcacagcaacttgctggctcaggaggcatcagacccacttgtctgaccctgtgtggggacggaagtca

SEQ ID NO: 825248 - DNA, 120 bp, Artificial Sequence
  ENSG00000285650_19 (sequence is synthesized)
gagatcagtcgccctcagtggatgaacatgggtgtccaggaaggacccctcaggggacctgcaccatccacaagaccatccacaaaaataactgggaacagctgaggagctctgttagaa

SEQ ID NO: 825249 - DNA, 120 bp, Artificial Sequence
  ENSG00000285650_20 (sequence is synthesized)
ggattgcttgtccacagggagttaaaaaatgtgtcctaaatgttgcttagtaaaacaaacaaccagaaaagcctctctattccaaacccatggtggggcataaacctgggagagctggaa

SEQ ID NO: 825250 - DNA, 120 bp, Artificial Sequence
  ENSG00000285650_21 (sequence is synthesized)
tgtcattgcagcactttgccacaggagcaaaaacacaacccccaccagaagggatggccgaccagggcatgacttgcgctgtctttctggtagtgactgatgccccagaaccctcgcaag

SEQ ID NO: 825251 - DNA, 120 bp, Artificial Sequence
  ENSG00000285650_22 (sequence is synthesized)
ggcttgtgccaaacattctccatgtgccccagccccagtggggtggcccagccctcagcacttacctcatctccagacctttgcagaacagaccagctgggagcctccatcctcccttga

SEQ ID NO: 825252 - DNA, 120 bp, Artificial Sequence
  ENSG00000285650_23 (sequence is synthesized)
cccaacttttcttgtttgtacagacttgggaagaaccagggaaacccagagttgaaagagacccactctactggaaatatatcccaatggcatttttaaaacgaagagctggggaatttt

SEQ ID NO: 825253 - DNA, 120 bp, Artificial Sequence
  ENSG00000285650_24 (sequence is synthesized)
aataaacaaacagcaaatgcaagcatgaataatgggcctgtatggacaggaagagagccagggcaggagacagcaaatgacaggccagaagccagatcccacgcccttctgttcttgtat

SEQ ID NO: 825254 - DNA, 120 bp, Artificial Sequence
  ENSG00000285650_25 (sequence is synthesized)
ggaacctcaagctaaacatggttgaaaagaactccaaagatttcgtgacatgtgaaaattacattaaatgcaaacttcagacttcagtgtctgtaataaagtttgattggcacacagcca

SEQ ID NO: 825255 - DNA, 84 bp, Artificial Sequence
  ENSG00000285651_0 (sequence is synthesized)
attacaggcacgtgccaccacacctggccctccccagcagccaagcagatgccaccatcatgcttcctgtatagcctgtagaaa

SEQ ID NO: 825256 - DNA, 120 bp, Artificial Sequence
  ENSG00000285651_1 (sequence is synthesized)
ttacgcagcctcaggcatttctttatagcaatgtgagaacagcctaatgcagtgggcaaaagaggcatgaaacagttttgaggggccttattacaatcatatgaagtaggtactatttat

SEQ ID NO: 825257 - DNA, 120 bp, Artificial Sequence
  ENSG00000285651_2 (sequence is synthesized)
tatcctcattttgcagatgatgaaattaaggcctaaaagaagtttggcattattagggtgcaagaataggggcagatggctgcagaaatgcatgtaaaaccttaacactaagctaactgg

SEQ ID NO: 825258 - DNA, 120 bp, Artificial Sequence
  ENSG00000285651_3 (sequence is synthesized)
cttgaattgtatctgcagtgctctctgagggattttaaatggggggtaacatgattagatctttccataatataaaagatagtgggagtgtccaaggttgaaatcagagggccctatttg

SEQ ID NO: 825259 - DNA, 120 bp, Artificial Sequence
  ENSG00000285651_4 (sequence is synthesized)
gaagctactagggtaactcaggtgagaaatcatgagagcatgaagcagaacttggtgacaatttggataaggagggtaagggaaaaagagaaatacaagacccagtaccaggattctgaa

SEQ ID NO: 825260 - DNA, 120 bp, Artificial Sequence
  ENSG00000285651_5 (sequence is synthesized)
tcctgcagtgaggtgaatgacagagccaattaccaaaaaatataggagaaagaggagtagggagctcaggggacaagtttttggtgtcacagtaaccacaacttccatccatctatttct

SEQ ID NO: 825261 - DNA, 120 bp, Artificial Sequence
  ENSG00000285651_6 (sequence is synthesized)
gtagcaccaagcactgctattactccaatgcccaggcaacaaatggaacattgcagggatcctagaggacctggaagacaaagtgtgacttactcaggagcagaacaaagtgtatgccca

SEQ ID NO: 825262 - DNA, 120 bp, Artificial Sequence
  ENSG00000285651_7 (sequence is synthesized)
caaacaccagaaaggaaactggctttttggactgctgcagttatcttggaacatgtaggatcacagaagctattaactccatggcattctactttcagccacccttatcaattcattcag

SEQ ID NO: 825263 - DNA, 120 bp, Artificial Sequence
  ENSG00000285651_8 (sequence is synthesized)
atttaatgtacctacaatacacacactgcaccataaaaccaaaacggggaggtcacagtatgatgggagaaccagctttctgctgacaggggctggctccaatgctggcttggtgggaag

SEQ ID NO: 825264 - DNA, 120 bp, Artificial Sequence
  ENSG00000285651_9 (sequence is synthesized)
ctccaatgctggcttggtgggaagaatacagagaacctgtctcaaaaactctatggaagaagagacagcctggcctcccaacctatatctttcttccatgctggatgcttcctgccctcg

SEQ ID NO: 825265 - DNA, 90 bp, Artificial Sequence
  ENSG00000285651_10 (sequence is synthesized)
tcttaattattgtaggaacataatacgtgttggattgggcagagtgattcctccaactttcttcaaaatcgtattagctgagcatgtgga

SEQ ID NO: 825266 - DNA, 84 bp, Artificial Sequence
  ENSG00000285651_11 (sequence is synthesized)
gattcctccaactttcttcaaaatcgtattagctgagcatgtggaggcttgtattgtgaattttagttcaagattgactgcaag

SEQ ID NO: 825267 - DNA, 120 bp, Artificial Sequence
  ENSG00000285651_12 (sequence is synthesized)
atactgtgagtgccccaactgtggaattgggaaagaaagaccctcctctcctgaacacacacccctactggagaagctggtctgtctgcaggagaaatttctgactttacctggagctga

SEQ ID NO: 825268 - DNA, 120 bp, Artificial Sequence
  ENSG00000285651_13 (sequence is synthesized)
gtcaagttagagagctaagctgagcgaaatacaggctgggaggtggaaagcctcagacaagttttcaagcccgtcttgccctccacctggaaacagacacggggatgttggaagggcatg

SEQ ID NO: 825269 - DNA, 120 bp, Artificial Sequence
  ENSG00000285651_14 (sequence is synthesized)
gtgaggcctgtgactgccggctttccccaacttccctgacaacctgtatgactcagcagaggcagccataattcttctaggtacacaactccagtgacccgggaatctcactgccatccc

SEQ ID NO: 825270 - DNA, 120 bp, Artificial Sequence
  ENSG00000285651_15 (sequence is synthesized)
gtacacaactccagtgacccgggaatctcactgccatcccccacagaagctgcagcaagatccccccaaggagagtctgagctcagatgtgcctagccccagccccaggtgatggtcctt

SEQ ID NO: 825271 - DNA, 120 bp, Artificial Sequence
  ENSG00000285651_16 (sequence is synthesized)
catataatcttgggagttctagggccccgcccaccaccggtccctcaccatactgctacagctgatgctttctggaaagtgccacctcttggcaggaggccaaccagcacaaaagtagag

SEQ ID NO: 825272 - DNA, 120 bp, Artificial Sequence
  ENSG00000285651_17 (sequence is synthesized)
ttggcaggaggccaaccagcacaaaagtagagcattaaaccaaagctaagaaccctcacagagtccactgcaccctctgccacctccaccagaaaaggcactggtattcatggctgggag

SEQ ID NO: 825273 - DNA, 120 bp, Artificial Sequence
  ENSG00000285651_18 (sequence is synthesized)
aaaaggcactggtattcatggctgggagacccatagacagctcacatcacaggactctgtgcagacaactcctagtaccaacccagagctgggcagactcactgggtggctagacccaga

SEQ ID NO: 825274 - DNA, 84 bp, Artificial Sequence
  ENSG00000285651_19 (sequence is synthesized)
acatcagcagaacaccctgtggaacacaaattgacagagtctacctacccaaatgagaaggaaccagaaaacctacccaggtaa

SEQ ID NO: 825275 - DNA, 120 bp, Artificial Sequence
  ENSG00000285651_20 (sequence is synthesized)
ctacccaaatgagaaggaaccagaaaacctacccaggtaatatgacaaaacaaggcttgtcgacaccccccaaaaatcacactagttcaccagcaatggattcaaaccaagaagaaatcc

SEQ ID NO: 825276 - DNA, 120 bp, Artificial Sequence
  ENSG00000285651_21 (sequence is synthesized)
actagttcaccagcaatggattcaaaccaagaagaaatccctgatttatctgaaaaagaattcaggaggttagctattaaggcaatcagggagataccagagaaaggcaaagcccaatgc

SEQ ID NO: 825277 - DNA, 120 bp, Artificial Sequence
  ENSG00000285656_0 (sequence is synthesized)
ggaactacgagtcccggcgagcactgcgaaggccacgcgcggctttctttcttctccaagcacggtggcagtcttctgatctctgctgcttttttttcctcataaaaacatcagccaagt

SEQ ID NO: 825278 - DNA, 83 bp, Artificial Sequence
  ENSG00000285656_1 (sequence is synthesized)
ctctgctgcttttttttcctcataaaaacatcagccaagtaatgtgtccacagaaaataaactcttagcctaggccaggcaag

SEQ ID NO: 825279 - DNA, 120 bp, Artificial Sequence
  ENSG00000285656_2 (sequence is synthesized)
cctgagcaacgaagtgagacctccatctctacaaaaaataaaactgatcatggtaaaattagctgagcatggtagtacacacctgtagtcccagctacatgagagactgagacaggagga

SEQ ID NO: 825280 - DNA, 87 bp, Artificial Sequence
  ENSG00000285656_3 (sequence is synthesized)
cttgcctctaaaaaaataaaactattagcctttcggtgagaacagttgctcagagagttgaggacattgggagcaatatcaatagtt

SEQ ID NO: 825281 - DNA, 120 bp, Artificial Sequence
  ENSG00000285656_4 (sequence is synthesized)
atatcaatagttgtggtgggccaaagagaagccctcgaaaatatatattcatgtcaaattcatccacttcaaatccctggaaactgtgaatgcgaccttatttggaaaaaggacccttgc

SEQ ID NO: 825282 - DNA, 120 bp, Artificial Sequence
  ENSG00000285656_5 (sequence is synthesized)
agatgtaattaagttaaggatcatgagatgagatcatcctggataacctcagtaagtcctaaatccaatgacaagttttcttgtaggagacatagacaagaagagaagatgatatgaaaa

SEQ ID NO: 825283 - DNA, 120 bp, Artificial Sequence
  ENSG00000285656_6 (sequence is synthesized)
tggaggcaaagattggagtgatgtggccacaagccaaggaaaccagcaaccaccagaagctgaaagaggcaaagaagaattctgcctcccagcctccagagggagtgtgaccctgctaac

SEQ ID NO: 825284 - DNA, 120 bp, Artificial Sequence
  ENSG00000285656_7 (sequence is synthesized)
accatgattcagacttccggcctccagaagaatgtctttttaagccactacgtttgtggtaatttgttatagcagccctgggaaactaatacagttgttaattaaaaaaacaagtcaagt

SEQ ID NO: 825285 - DNA, 120 bp, Artificial Sequence
  ENSG00000285654_0 (sequence is synthesized)
agtgtttcattggccagaatgatcacatggctgagctaaagtcaagggcagggaaatacaattcttccatggaggtggtggagggaaggagtgaagaattttgaaaagtaatttaatcta

SEQ ID NO: 825286 - DNA, 120 bp, Artificial Sequence
  ENSG00000285654_1 (sequence is synthesized)
tcacagtcattaaatgactggcttggcatttcaatacaaatacttttgactccaaatgccattgtctttcttttatggtagtgtttgaataattgaaaaactttccaaggcataagatgg

SEQ ID NO: 825287 - DNA, 120 bp, Artificial Sequence
  ENSG00000285654_2 (sequence is synthesized)
aagcagttgaaactttcaaacaaattagttattctcatctttctggccagacatgagacaacagtcccatgggattaatttttgctacatttgcattttgagcgagttccctgatacatt

SEQ ID NO: 825288 - DNA, 120 bp, Artificial Sequence
  ENSG00000285654_3 (sequence is synthesized)
agtggtgcccaacagtttgttatgcagactgtttcaaatcaggacagcagctctcacttcaagtctgatatgatccgcgtgaccatagctgaaaccttgaactttggaccttaaacaaag

SEQ ID NO: 825289 - DNA, 120 bp, Artificial Sequence
  ENSG00000285654_4 (sequence is synthesized)
tctgccatatatagcttacatattcctagcagaatgtggcctatcagtgacttgtccatctggcttggctaagctctctccataccacgctgagttagagggggaaaaagtcagtgaagt

SEQ ID NO: 825290 - DNA, 120 bp, Artificial Sequence
  ENSG00000285654_5 (sequence is synthesized)
tagccatgaaggagaactttctgcttggaaaagtgttaagatggttagtactactcacttcaaaatggataaacggtgtcgtgcaatcaataaatatgctccaagcattttttatttatg

SEQ ID NO: 825291 - DNA, 67 bp, Artificial Sequence
  ENSG00000285658_0 (sequence is synthesized)
tgcttatagaggttgctgagatcacaccactcactgcactccagcctgggcgactgtgctctctgtg

SEQ ID NO: 825292 - DNA, 75 bp, Artificial Sequence
  ENSG00000285658_1 (sequence is synthesized)
aacgcttgaacctgggaggtagaggttgctgagatcacaccactcactgcactccagcctgggcgactgtgctct

SEQ ID NO: 825293 - DNA, 120 bp, Artificial Sequence
  ENSG00000285658_2 (sequence is synthesized)
cagcctgggccacagagtgagaccctgccacaaaaaaaaagtaaaaaattaaactcattagtcaagcatgctagatatttataagtcctagttatccttgactatgtaaaacccagtatt

SEQ ID NO: 825294 - DNA, 120 bp, Artificial Sequence
  ENSG00000285658_3 (sequence is synthesized)
actatgtaaaacccagtattatcatacattaaatatcagacacatattacatgtagcaatcaatcttaaatgaagactgaagacttagatggcagcaaggaaacttaaatttacgcaatt

SEQ ID NO: 825295 - DNA, 120 bp, Artificial Sequence
  ENSG00000285658_4 (sequence is synthesized)
atgattcgtgattccaacttttcaaggggattaaggatgctatgactgaagactctaatccctgtaaatacccagggctcgcctcactccttcttccctctgtcagcccttgtttatttc

SEQ ID NO: 825296 - DNA, 120 bp, Artificial Sequence
  ENSG00000285658_5 (sequence is synthesized)
cttcagaatacttgtttcagtctaaatttcaatatttatcaaatacctatactccccactggaataaactccataaggagaccataagaacacctatgtctacctttgtatcccaacatc

SEQ ID NO: 825297 - DNA, 120 bp, Artificial Sequence
  ENSG00000231413_0 (sequence is synthesized)
aggtccagctcaactttggatgttgtgaaactcataaagctgcaatagcccacaacatgactgacagcataatgtagtataaagaacatcagatggggagtcagaagagctgggttccag

SEQ ID NO: 825298 - DNA, 120 bp, Artificial Sequence
  ENSG00000231413_1 (sequence is synthesized)
cgtcttcctgtcaacaaagaagacctcaagttgcatgttgttcaaaagccctttctgattccgaatgtctgtatgtctctgtagcaatgttctcatattgaaatttctctgtgcctatgg

SEQ ID NO: 825299 - DNA, 120 bp, Artificial Sequence
  ENSG00000231412_0 (sequence is synthesized)
aagagaagcaggcagcagagaccatgaggcccccctcagcccctccccgcagaggatgcatcccctggcaggggctcctgctcacaggctcatgggcaaaagggacttgccttgtctcag

SEQ ID NO: 825300 - DNA, 67 bp, Artificial Sequence
  ENSG00000231412_1 (sequence is synthesized)
tttactggtaatgctggaaagaggtaatggactgttggaaaaccattgttacattttgaaatgtgag

SEQ ID NO: 825301 - DNA, 120 bp, Artificial Sequence
  ENSG00000231419_0 (sequence is synthesized)
ggcctccctgcctaggttacatgcagtggtcatcccggtcgctcccacacccgtgtgggctctgggatcccctcttccagccagcccaggggacatctggctgtctcaggacccagccat

SEQ ID NO: 825302 - DNA, 120 bp, Artificial Sequence
  ENSG00000231419_1 (sequence is synthesized)
ctgtaaaaattaggcaggtcccttcagtatgctcctggtcaacaaagaaaaacttcaattttgagaatggcatctgtattccgaagtgttctctcagatgtttgagttccactaagtagg

SEQ ID NO: 825303 - DNA, 120 bp, Artificial Sequence
  ENSG00000231419_2 (sequence is synthesized)
ggaagaagatgctgcatacaggatggaatatccaggggaagacgtctaaggagagatgcccagctgggagtcctatgcaaggggaagaagatgctgcatacaggatgggatatccagggg

SEQ ID NO: 825304 - DNA, 120 bp, Artificial Sequence
  ENSG00000231419_3 (sequence is synthesized)
aagatttctaagaagagatgcccagctgggagtcctatgcaaggggaagaagatgctgcatacaggatgggatatccaggggaagatttctaaggagagacacccggctggaagtcaaga

SEQ ID NO: 825305 - DNA, 120 bp, Artificial Sequence
  ENSG00000231419_4 (sequence is synthesized)
tatgtcagttgtttccattataataaaaccactcatgttagatgagctgaactttcccttttccccagttcttacgatcaaaaagtggctgtcctaaatttcatcactcaatatccttgc

SEQ ID NO: 825306 - DNA, 75 bp, Artificial Sequence
  ENSG00000231419_5 (sequence is synthesized)
aaaagtggctgtcctaaatttcatcactcaatatccttgctagagtcttcctttgtcagccaggctggagtgcaa

SEQ ID NO: 825307 - DNA, 120 bp, Artificial Sequence
  ENSG00000231419_6 (sequence is synthesized)
gattacagttccaggtactgaatagaagctttacaaaagatcccggtaccggtaatagccctggggcgcccacttcacggggcctgcaggaagtcctgggaagggactgtttccacaagt

SEQ ID NO: 825308 - DNA, 120 bp, Artificial Sequence
  ENSG00000231419_7 (sequence is synthesized)
ggaacaagtgggccccccactgccctcgctgcctgcccctctctcctcattaaaccttcagagaacacaaaggagccgagagccccttttctctccatcttccaaagaagacttttcagt

SEQ ID NO: 825309 - DNA, 120 bp, Artificial Sequence
  ENSG00000231419_8 (sequence is synthesized)
ataaaaggtgccctaaatcctttgtgatgccgcccacaagcagcgtgcgctgacacaaagcaacgccgccggccactgctgcctgcagacaagaggccgactcttgtcctcgtctcgggt

SEQ ID NO: 825310 - DNA, 120 bp, Artificial Sequence
  ENSG00000231419_9 (sequence is synthesized)
cccaagaacgggagtaagtttgtggactggcacgcagacttgtgtgcggggcagcccctggagacacaggcagctgcgatgtgagtgtgtcaggcagaggttcagctttacgtcagtgtt

SEQ ID NO: 825311 - DNA, 120 bp, Artificial Sequence
  ENSG00000231419_10 (sequence is synthesized)
aaagaaaaaaacctgtgaagaaactattcaagacatgcaaaaggaagtgtttcccacgcacccagggcaggatgctcggtgaggggtggtggagccgtagagcaaacatccttcgagagc

SEQ ID NO: 825312 - DNA, 120 bp, Artificial Sequence
  ENSG00000231419_11 (sequence is synthesized)
caaatgtgcgtgacctttgacctttccccttcaggagtgtacagtgagggaatactcgggtaagcacagaaacacctgcaaaaacaactcacacattcgccagcagggagtcggtcaaac

SEQ ID NO: 825313 - DNA, 120 bp, Artificial Sequence
  ENSG00000231419_12 (sequence is synthesized)
caaccaggcccaggctgtggaatgttaggcggcggttaaaagtcacgagatacgcaccttcagatgggaaagatggacaccacctgtctcagcgggagaaagacagctgcagaagcttca

SEQ ID NO: 825314 - DNA, 120 bp, Artificial Sequence
  ENSG00000231419_13 (sequence is synthesized)
cacaatttagcccgattcccacgaataaacagaagaaagggcagacaagtttgtaccgacggaggaaggcactgggaccccgcttcagtcgggcacgagtttcccccagagaggggagga

SEQ ID NO: 825315 - DNA, 120 bp, Artificial Sequence
  ENSG00000231419_14 (sequence is synthesized)
ggcaggcagaggacttcactttctatgtaatctttgcctacagagtttgacgttttgtaactgtcctgtataatttgtcatctgaaagcctgaaaaaaatagccaattaaaaagctgcca

SEQ ID NO: 825316 - DNA, 120 bp, Artificial Sequence
  ENSG00000231419_15 (sequence is synthesized)
ttggtgatgagaaagaacgaagctattgccacgggtggaggaggggcttctgcagatcggcccccggccctgcaccttctgcctcccatcagggctgagtctcctcaggcggctgaatat

SEQ ID NO: 825317 - DNA, 120 bp, Artificial Sequence
  ENSG00000231419_16 (sequence is synthesized)
ttcccacctcaggcaaatggacactaagctcctgagtcagacaaaacagtgactccctggagggctgtgtgcccagccccttctcccccttcccacctgctttgctcttaggaaagtcac

SEQ ID NO: 825318 - DNA, 120 bp, Artificial Sequence
  ENSG00000231419_17 (sequence is synthesized)
caaaggctggttggtgtggctcattctaggtttgactccttaggaatgtggcttttaccagcgtgctgtatccctcctgacaacacagccatctggtggagcgtggagttcattggaaat

SEQ ID NO: 825319 - DNA, 120 bp, Artificial Sequence
  ENSG00000231419_18 (sequence is synthesized)
gcattttatttgcttgtagcatacatgtggctaaggctcagcacacacggagattcgcatatgtgtgcacacgccccacgcacacacccacacacgcatgtgcatcacatgaacgcgcgt

SEQ ID NO: 825320 - DNA, 120 bp, Artificial Sequence
  ENSG00000231419_19 (sequence is synthesized)
acacacactcctgcactcagtcctgctctattaacaggttcttgggctctgcagagctgacagaggccgtgttgggtgcggcaggacaaggctgggcgtgcaggcgcctcctccacaggg

SEQ ID NO: 825321 - DNA, 120 bp, Artificial Sequence
  ENSG00000231419_20 (sequence is synthesized)
cactgctcatgcgtcacagctgccagacggaggctccccaatggcgacgctctgacaggggtccgtgactctcctcagggagaggtggctgtttccaatgtcctccctggtgccctgtgg

SEQ ID NO: 825322 - DNA, 120 bp, Artificial Sequence
  ENSG00000231419_21 (sequence is synthesized)
ctggcaggaccctgcccaccctctccctccccgtccaagctctgttttcatctgaatgcagcagccacgactaacacgccaagtgtgtcctccatgctccagagcctcagatctggtcag

SEQ ID NO: 825323 - DNA, 120 bp, Artificial Sequence
  ENSG00000231419_22 (sequence is synthesized)
agcaagttcttactcagcatgcagatgtgaagtcaggctttattgaagtatttacacagctcattcccgccacgtggaggagtctgcgacattccacacacaatgacagttaaagacacc

SEQ ID NO: 825324 - DNA, 120 bp, Artificial Sequence
  ENSG00000231419_23 (sequence is synthesized)
tgctgaccactgggtcctgcttcccctgctcaccaggcatctgtcaggaaacagccggcccctctaccaggagaaaccagtcagctccgctgaacagtggcacatgtgcggttgagggga

SEQ ID NO: 825325 - DNA, 120 bp, Artificial Sequence
  ENSG00000231419_24 (sequence is synthesized)
gattgtcccctgagcacacctgatgactgatgactgcccacacccaaccaccgaccatcaacaaccagtgcctggtaaccacctgacacgtccactcacgcccacttcctcagcgtcccc

SEQ ID NO: 825326 - DNA, 120 bp, Artificial Sequence
  ENSG00000231419_25 (sequence is synthesized)
tctgggtcacagctcagtgtcggcacctggccactgacccaacaccttcagttaccacaaatctttgtttcctcaaaaacctgagagtaggtgggggatgctcccttttgtcctttgaaa

SEQ ID NO: 825327 - DNA, 120 bp, Artificial Sequence
  ENSG00000231419_26 (sequence is synthesized)
gctgggcaaggctgggggtgggtctgtccaaaccctacaggggaggaacagccgaggggccgcactgaacctggggtctgcagcgtccacctgcctccctctcgctccacatgctcagcc

SEQ ID NO: 825328 - DNA, 120 bp, Artificial Sequence
  ENSG00000231419_27 (sequence is synthesized)
gtcctttcctgggcacctggcctgggccgtttactccccagtatccgtctgtgatggatcctctgcggcccccagaaatggtgggttgttctgtagatccgaccgcctcacctgtctccc

SEQ ID NO: 825329 - DNA, 120 bp, Artificial Sequence
  ENSG00000231419_28 (sequence is synthesized)
caaaccaacctcgggttcattctcccagaagtccagggatgagcttgttgcagcagaggggtgtggccggcgtggcccagggtgtgcaggacagggtgcggacctttggggattgagggg

SEQ ID NO: 825330 - DNA, 120 bp, Artificial Sequence
  ENSG00000231419_29 (sequence is synthesized)
tctctggacactgctgctttgctgtcctaacagcccctctgtccggcctcattttaccggggatatgggttttgcaaaccaaggtgacactgacaggatgtgtgagcttccctgtggctg

SEQ ID NO: 825331 - DNA, 120 bp, Artificial Sequence
  ENSG00000231419_30 (sequence is synthesized)
cctcccggcacagctgtcccgacctttgacatcgcgccccagctggggtctgtgatgccaccaatgcacaggaacaagacattcatttttaagggaaaagtggagtcaaatgtgctcaga

SEQ ID NO: 825332 - DNA, 120 bp, Artificial Sequence
  ENSG00000231419_31 (sequence is synthesized)
acaactgagtcccacagtcggggcacctgggccagggctgggcagcttgctgaggtccatcgagcgctgtgggggccagggcttggcacacacatggagactgtgccctgatatccccac

SEQ ID NO: 825333 - DNA, 120 bp, Artificial Sequence
  ENSG00000231419_32 (sequence is synthesized)
ccttctgcagctggctcagcaacgtccccagacaccctccccacatctgcaaaccacccttcgcctgaaggagcagccgctagggctgctgagcgccagctctggggaggagggcttgaa

SEQ ID NO: 825334 - DNA, 120 bp, Artificial Sequence
  ENSG00000231419_33 (sequence is synthesized)
acagttttatatgttgttaaaataattcttatcctaagattatttttgttaaaaagagaataggtttccggttcccactcagctgtatcccgcaccccacgtaaccccatcaccaggggc

SEQ ID NO: 825335 - DNA, 120 bp, Artificial Sequence
  ENSG00000231419_34 (sequence is synthesized)
ccgcaggcctggccgcagctggcctggggctgagcgtcaggctctgcggctcccacagggcggcaggtgacctcctgaggcagagccagagctgctgagggtcccacggaacacctgtgt

SEQ ID NO: 825336 - DNA, 120 bp, Artificial Sequence
  ENSG00000231419_35 (sequence is synthesized)
ggagaggtcccctccttcatgaccttgctctcctgatctggttgtctcctcagcccgccttccgtggggaggcaaaacagccctgtggagttgggtggggcagggctcagccgggccggg

SEQ ID NO: 825337 - DNA, 120 bp, Artificial Sequence
  ENSG00000231419_36 (sequence is synthesized)
tgggcgccccaagagagaggacgggctgccctcctgttgatttctcctggtcctaacgtcaggggggccctgactggcttccctctgtcctgcagatgagggggctacccttatgggacc

SEQ ID NO: 825338 - DNA, 120 bp, Artificial Sequence
  ENSG00000231419_37 (sequence is synthesized)
tgggaggccgccctgatgtgggacggatgtcacccggtggtcgcccaggctcgtgctgggccacacaactgcgtttccacatttcctccttggctcccctattctcttgggccgggcgca

SEQ ID NO: 825339 - DNA, 120 bp, Artificial Sequence
  ENSG00000231419_38 (sequence is synthesized)
gtttcctcaggaagaggacggcctcccgcgcgctgccggcttcctcaggaagaggacggcctcccgcgcgctgccggcttccacaggaagaggacggcctcccgcgcgctgccggcttcc

SEQ ID NO: 825340 - DNA, 120 bp, Artificial Sequence
  ENSG00000231419_39 (sequence is synthesized)
tcaggaagaggacggcctcccgcgcgctgccggcttcctcaggaagaggacggcctcccgcgcgctgccggcttcctcaggaagaggacggcctcccgcgcgctgctggctttatctggg

SEQ ID NO: 825341 - DNA, 120 bp, Artificial Sequence
  ENSG00000231419_40 (sequence is synthesized)
gggatggactcttgcttcttttcccaactccaccaagagggaccgtcccaggacgtccttccccgggcatctggccctacagctgcctgaggtctccatcaccgttggcgccatcagtct

SEQ ID NO: 825342 - DNA, 120 bp, Artificial Sequence
  ENSG00000231419_41 (sequence is synthesized)
gctgtgcagccagctgttggtttggagagcctgaagaactgcagttcacgtctcatctaaaggagctgaaatgatattgcagctttttcttttggttgcgtgcagtgagaatctgggagc

SEQ ID NO: 825343 - DNA, 120 bp, Artificial Sequence
  ENSG00000231419_42 (sequence is synthesized)
atgagatgttagttggtacagggaggggtttccaggacccgcacgcccttgcggagtgcctgctggagggagccggtgtgtccaggacacccttgcggagtgtctgctggagggagccag

SEQ ID NO: 825344 - DNA, 120 bp, Artificial Sequence
  ENSG00000231419_43 (sequence is synthesized)
aaaatgccaacgccaaaaatgctgatgggtgacaaagtgtcacaggtgtgatgcattacaaatctcaggacttttgttcactggatttgaaaggtcaagcttcacaggaaaatgatgaag

SEQ ID NO: 825345 - DNA, 120 bp, Artificial Sequence
  ENSG00000231419_44 (sequence is synthesized)
tcccaaaagaccagaaatatatttcagaagatgccagttactactttaaatgtcaaaccaacatttcagaaataactttcaatgattatttcctgccaagaaggtgaacgctggagacct

SEQ ID NO: 825346 - DNA, 120 bp, Artificial Sequence
  ENSG00000231419_45 (sequence is synthesized)
taatggtggaagatggagggcgtctttccttctgttaagctgacaacttggcttccatcttgtgaggacctcaccctacctggtggcagaggacgtctgacgccctcaatcattgccgtt

SEQ ID NO: 825347 - DNA, 120 bp, Artificial Sequence
  ENSG00000231419_46 (sequence is synthesized)
acacttcccagcctggtggtcagtctcctggggtctgtgtgttaacaaaccatcgactggacaatcgcagttttccttatgaaggcttactttaaaaaggctctggattttcagaagcga

SEQ ID NO: 825348 - DNA, 120 bp, Artificial Sequence
  ENSG00000231419_47 (sequence is synthesized)
agtcgctttcatccccgattcagacccatcctagtggaggaaaaatcctaccagaagaagggctgaccataggaacttgccatttccttgaccccatcatatctgaggaaaaaacaacag

SEQ ID NO: 825349 - DNA, 120 bp, Artificial Sequence
  ENSG00000231419_48 (sequence is synthesized)
aaaaggtcaaaacccacgtgtacgcccaacgtcctgattgacgactttgcctgcagcttctgctttcctgaaattcgctgctgcctttagaacccttgtctgcagccagtggggagttca

SEQ ID NO: 825350 - DNA, 120 bp, Artificial Sequence
  ENSG00000231419_49 (sequence is synthesized)
ggacttaggcggagctgccccaccctcctgcttggcaccctgcaaatacatgccctcccttccatcgctgcagacctcagagtgggcgtccggtctcctgtgcgggatgagaatacacac

SEQ ID NO: 825351 - DNA, 120 bp, Artificial Sequence
  ENSG00000231419_50 (sequence is synthesized)
cctcccttccatcgctgcagaccttagagtggatgtccggtctcctgtatgggatgagaatacacgccttcccttccatcgctgcagagtggacgtctggtctcctgtgtgggataatac

SEQ ID NO: 825352 - DNA, 120 bp, Artificial Sequence
  ENSG00000231419_51 (sequence is synthesized)
acgccctcctttcaatcgctgcagacctcagagtggacgtccggtctcctgtgtgggataatacacgccctcctttcaatcgctgcggacctcagagtggatgtccggtctcctgtatgg

SEQ ID NO: 825353 - DNA, 120 bp, Artificial Sequence
  ENSG00000231419_52 (sequence is synthesized)
gatgagatacactccttcccttccactgctgcagacctcagagtggacgtccggtctcctgtgtgggatgagatacactccttcccttccactgctgcagacctcagagtggacgtccgg

SEQ ID NO: 825354 - DNA, 120 bp, Artificial Sequence
  ENSG00000231419_53 (sequence is synthesized)
tctcctttgtgggatgagaatacactccttcccttccatcactgcagacctcagagtggacgtccggtctcctgtgcgggacaagaatacactccttcccttccatcactgcagacctca

SEQ ID NO: 825355 - DNA, 120 bp, Artificial Sequence
  ENSG00000231419_54 (sequence is synthesized)
acagttttgttccgtcacaacttccacgacaggccagtgtgaggtttttgagctggtgctgactgaaaactgtcagctgcccaaggacctgggagctctgctccccactcctggtgtgcg

SEQ ID NO: 825356 - DNA, 68 bp, Artificial Sequence
  ENSG00000231419_55 (sequence is synthesized)
tgacctcaggtatgcctggacataagtgagttttatattgtattataagactatgatacagtaaaacc

SEQ ID NO: 825357 - DNA, 120 bp, Artificial Sequence
  ENSG00000231419_56 (sequence is synthesized)
agttttatattgtattataagactatgatacagtaaaaccatgaaatccaaatttataatatcacactacataatacaactgtaacctcaccgccctatcctgggatgtgtgtcattttt

SEQ ID NO: 825358 - DNA, 120 bp, Artificial Sequence
  ENSG00000231419_57 (sequence is synthesized)
atagccaattatggcccccagctttagttttcttttgcttattggagagtgtaattctcccttattctttttgctttctacagtcttgtgtacatcagttatctgtttttgtccttttgc

SEQ ID NO: 825359 - DNA, 120 bp, Artificial Sequence
  ENSG00000231419_58 (sequence is synthesized)
cagtgttcaaagtgttatttttcgtatttacttaagctcctgcagggagattagaatttcttcccctaagaagaaataagtaatagcggagacctgctgggcactggtggcgccaggctt

SEQ ID NO: 825360 - DNA, 120 bp, Artificial Sequence
  ENSG00000231419_59 (sequence is synthesized)
ggctctggggctgcccatccatcctcacagcatggcgactggagggtcttgccctgaggtcccgtgtgcggagcagggcttggcattcactcctaggcactgctgactcagtctgtcctg

SEQ ID NO: 825361 - DNA, 120 bp, Artificial Sequence
  ENSG00000231419_60 (sequence is synthesized)
gtggtgctgggaggccgaaacccgtcatgcatgtaaaccgcggggccccgtctggcatggtgcacctgtgctgggagtgcctatagagtaggaaaagtattcctggacctttaaaaaact

SEQ ID NO: 825362 - DNA, 120 bp, Artificial Sequence
  ENSG00000231419_61 (sequence is synthesized)
taggccaaaaaagtgttttggttgaatctttggccaaattggaactgcaaactctgtattatctccccttttgtgaaattctatggaaaattcgagcaaataaatatgcatttcccagtg

SEQ ID NO: 825363 - DNA, 120 bp, Artificial Sequence
  ENSG00000231419_62 (sequence is synthesized)
tggatctatttcttttcagttaattttgcttcatgtatcttgaagctctgttatcaggtgcatgcacatttgggattgttatgctttcctgatgaactgaccttctttcattatgcaagg

SEQ ID NO: 825364 - DNA, 120 bp, Artificial Sequence
  ENSG00000231419_63 (sequence is synthesized)
gattacagggcgctgggtgcccttccagggtgacctcacgggtgcccactgcagttcctgcttctccccacgggaactgagcgtgccgctgggaacacagcactcactgtgcacagttct

SEQ ID NO: 825365 - DNA, 120 bp, Artificial Sequence
  ENSG00000231419_64 (sequence is synthesized)
gcacatggacttatgtggacaccacctgcttgcattcatcccctcctcctcatctctcccttgctgagaggcagcgtgcctgccgaacgcttcgtgctgtttctgcaatgctcacttgcg

SEQ ID NO: 825366 - DNA, 120 bp, Artificial Sequence
  ENSG00000231419_65 (sequence is synthesized)
gtcacatagttagacatccggatgatggatagatgaggagacacagtgcagactgggcgtggctgaccaccacacgtgcccctggagccatgggccgccggcttcatttccagggtggtg

SEQ ID NO: 825367 - DNA, 120 bp, Artificial Sequence
  ENSG00000231419_66 (sequence is synthesized)
ttacaatcaaaagaatgaacacatcaagagtgatttcaagtccaaccccttccctgtgttttctgcacagcttggaggccgtgcccaggtcctggatgttcctggtgacctttcctcttt

SEQ ID NO: 825368 - DNA, 120 bp, Artificial Sequence
  ENSG00000231419_67 (sequence is synthesized)
gccctttgctctcccacttggagctccatgctactccctcctgttgtactgaacctggccctcgttgccccttacgagggaagtccttgtcctctcatggcttccttcttgtccccttcc

SEQ ID NO: 825369 - DNA, 120 bp, Artificial Sequence
  ENSG00000231419_68 (sequence is synthesized)
ctcagactcttcgtaataattatacaatactaattccaaatggaaactggaggcatggagcctatgccggcgtctccagcttctccagaggtaggaatggacactcaggtctccactgca

SEQ ID NO: 825370 - DNA, 120 bp, Artificial Sequence
  ENSG00000231419_69 (sequence is synthesized)
tgctggtggatttgggagagtgtgatccatccaagccatgcgaaaatctgcacgactgagtcatgggacagtggagctttgtgatatcgcgtgcttttaaatccgaaaggacagtcatga

SEQ ID NO: 825371 - DNA, 120 bp, Artificial Sequence
  ENSG00000231419_70 (sequence is synthesized)
tttaaggatttgaaagtcacacatttaacatctggattcacagtcataggtcttaaaccatgatagcttgtgcttctgaggtgcactgaattcatgcgtggctttcctagactttatccc

SEQ ID NO: 825372 - DNA, 120 bp, Artificial Sequence
  ENSG00000231419_71 (sequence is synthesized)
atggaaccttcacgtgtcaggctatgtagagccctgaatctcaaagggagagcttggtcccagcaggtctcattattttgtattatattttaatagtttattttccctcttgcttcttca

SEQ ID NO: 825373 - DNA, 120 bp, Artificial Sequence
  ENSG00000231418_0 (sequence is synthesized)
ttaccagttttgggtgcacatctggctttgacactttctagttatgtgacctttgaatctcagcattccaccaagacaatctccaaaaaaggaaaagcaaatgagcagggctgtttctga

SEQ ID NO: 825374 - DNA, 120 bp, Artificial Sequence
  ENSG00000231418_1 (sequence is synthesized)
ggatatgaaatactttacaattaaataaggaagaagaggaaacattccagacagaagcaatctcttactgcaagagaataagaagtaataagaattttcatcatttgaaatgcagccatg

SEQ ID NO: 825375 - DNA, 120 bp, Artificial Sequence
  ENSG00000231418_2 (sequence is synthesized)
tggcaattttatccatccagaacaactgacatacagtaaatacttaacatgtagcagattctgctgtgttttttgatgtcttgttatattaaatctcttcaaccacactatgagattcca

SEQ ID NO: 825376 - DNA, 120 bp, Artificial Sequence
  ENSG00000231418_3 (sequence is synthesized)
ttcccttacctgtgaagtgcggatggttgtgtggttgctgaggtgctgtccagcttggacatcgaggaattgtatgagcacctttgattgccttgcatgcagaaacaactctgaacccag

SEQ ID NO: 825377 - DNA, 120 bp, Artificial Sequence
  ENSG00000231418_4 (sequence is synthesized)
aatttctgcaaactgatcttcagccccagttccatacccacagacatggactccatatcctcagcaaagcacaagaggggaataataatagctctgtcacatttaatcttcaaagcaaaa

SEQ ID NO: 825378 - DNA, 120 bp, Artificial Sequence
  ENSG00000231418_5 (sequence is synthesized)
ctttctccatttagaaaatgagaaaatttcaactcagggagtttcagaaactttcccagggtatcgcagctgaaaaacagtagagccagcatttgaactcaggctgccggactcctttac

SEQ ID NO: 825379 - DNA, 120 bp, Artificial Sequence
  ENSG00000231418_6 (sequence is synthesized)
tgtgtgttcgaatccacgcagtgctgcaagacttgactaactcaccctgtacacccataactgtcagacatcagagtccattaagaagctgggaatcaattaattaacaattgattagaa

SEQ ID NO: 825380 - DNA, 120 bp, Artificial Sequence
  ENSG00000231418_7 (sequence is synthesized)
ctgttacaatgtatttaggatgcatttctgtatagggctgagcatacagaaattagccagatgtggtacttggtttccaggaactatttacagtaaaaaagcaaacacttatgaaatgct

SEQ ID NO: 825381 - DNA, 120 bp, Artificial Sequence
  ENSG00000279833_0 (sequence is synthesized)
tcttttgtgctgtgaatcaccccacgttcgcctggccagggtttctaacccaggttcgcaaggcccatgtggacacgtctgcagccacacatgctttcacggggcacatgggaacgtaca

SEQ ID NO: 825382 - DNA, 120 bp, Artificial Sequence
  ENSG00000279833_1 (sequence is synthesized)
cgcgaagggtaatgcgtgcacacctgtgcagccaggtgtgcatgagcgtttctgcacaggccaggtgatgaggggagggcagagctctcagcagaagggtctcagcggcgcctcctccct

SEQ ID NO: 825383 - DNA, 120 bp, Artificial Sequence
  ENSG00000279833_2 (sequence is synthesized)
gggaaggatagaagcctctctgaaggggaagggactcgccccaagtaacctcaacccttcctcctgccccttcctcccgccccactcacttttggtcaaaaccagcctccacagcccacc

SEQ ID NO: 825384 - DNA, 120 bp, Artificial Sequence
  ENSG00000279833_3 (sequence is synthesized)
gcaaagccagagaggagagttcaaggtaaagacccaattgaaacaagagaaaaggggaaaaccagccaaccaggctggggtggccactcaagggagagggtttgggccttccaatgctcc

SEQ ID NO: 825385 - DNA, 120 bp, Artificial Sequence
  ENSG00000279833_4 (sequence is synthesized)
tttaactcccagaaccagctgctgcgtcactagaggagaatgataatggtggtgtcccgggcaggtgatcctgtccccatcctgccctgggggtggtaccccaactcccagagcaactct

SEQ ID NO: 825386 - DNA, 120 bp, Artificial Sequence
  ENSG00000279833_5 (sequence is synthesized)
ctccatccccagcctgaggcctcgtggtaaacgtccctcagagaaagggcaggtggtgggagagtagtgggatcttctccccttttgctgctcggtatttttttaaataaaataattacc

SEQ ID NO: 825387 - DNA, 120 bp, Artificial Sequence
  ENSG00000279833_6 (sequence is synthesized)
ccgcccccaacccatccctatctctggaagtcccaccccaagcccaaaagaaaacagtttaagaagagtaaaaacggtgattcagaacttcccactgcggtctcggaagaagccctcagc

SEQ ID NO: 825388 - DNA, 120 bp, Artificial Sequence
  ENSG00000279833_7 (sequence is synthesized)
tgcctgggcctcgcggaaggtgacggtgatggagttggcggtgatgtcggtcacggtcacctcacttgaggggagcgcaggtgtccagggagggggcccctcggccaggtcggcatctgc

SEQ ID NO: 825389 - DNA, 120 bp, Artificial Sequence
  ENSG00000279833_8 (sequence is synthesized)
tgcagcgtcagacacacagatgggggcagcgttgacaaggtgggaagccatgcagaccacccaacccgaccccaactccagctcctcctctctgtgtcttcagtcagctcagggcctcac

SEQ ID NO: 825390 - DNA, 120 bp, Artificial Sequence
  ENSG00000279833_9 (sequence is synthesized)
acagggctggacacttgggaggagggcactgggtgcatcctccccacctagacaagagctcagccagagcgggacgacaggaggagccctgggctagtgttgggccctgagcccagaccc

SEQ ID NO: 825391 - DNA, 120 bp, Artificial Sequence
  ENSG00000279833_10 (sequence is synthesized)
gactggccccacaaagcactacaggccctctttggacattgaaccagctggaccttatgacccatagggccctttccagctctgagggtctctgggctggggccgccttaccctcctctt

SEQ ID NO: 825392 - DNA, 120 bp, Artificial Sequence
  ENSG00000279833_11 (sequence is synthesized)
cagggggctgcgcagcaggctcccactcgccagccgcctgcaggacgtctggggccggtggctcctgcaggaagagctcccgtcgatggctgtggctctccaggttgggcccgcggggcg

SEQ ID NO: 825393 - DNA, 120 bp, Artificial Sequence
  ENSG00000279833_12 (sequence is synthesized)
ggaacttcttgcgcgagagccgcaggtacttgtgggcctttcggggcttgcggagcgggaagggcagggtgggcaccaaggggcccttgtccaccagctcaggtgcccccgccttgacca

SEQ ID NO: 825394 - DNA, 120 bp, Artificial Sequence
  ENSG00000279833_13 (sequence is synthesized)
ccccctcagggctcccgctgccgagtgggcacgtcagggagaagcagagcttctccttgcccttggccttgtgggagctccgcaggtccatgctgtacagccgctgcgggggcaagccag

SEQ ID NO: 825395 - DNA, 120 bp, Artificial Sequence
  ENSG00000279833_14 (sequence is synthesized)
ggcagcgcgggtcagccccaccctcccacccgccacacctttgctcatgctgttcctcccacccggaatgcccttcccatgccatgtctacccactcaactccttcccatgccacggctg

SEQ ID NO: 825396 - DNA, 120 bp, Artificial Sequence
  ENSG00000279833_15 (sequence is synthesized)
gcctctgggccccacagagcactcgcgtcccagcgtttactcctttgatacccagcagagaagcatacaagaaggacaaactgaaaactggccaagagaaacaaatctggatgcattaag

SEQ ID NO: 825397 - DNA, 120 bp, Artificial Sequence
  ENSG00000279833_16 (sequence is synthesized)
gagttagccttcgttttaggaaaggcatctttgcttgccagagcacctccaaaactgacactgccagctcacccgggagatggtgcaggcagagggccaaggtgtgctcttggagttgct

SEQ ID NO: 825398 - DNA, 120 bp, Artificial Sequence
  ENSG00000279833_17 (sequence is synthesized)
tggggcaaagccaggccagcagcacacacagccccggatgcccatgctatccagccaaagggacagggctccacctggcctgcagatgcaccccgacccctccagggggctcctgggctc

SEQ ID NO: 825399 - DNA, 120 bp, Artificial Sequence
  ENSG00000279833_18 (sequence is synthesized)
tgtgattgcagcccgctctgctgattgcccgcgacacatctggagctggagggcaagtctgtccacccctggagtttgtaatgtcgggatttatcttatttacttggggagaatttacat

SEQ ID NO: 825400 - DNA, 120 bp, Artificial Sequence
  ENSG00000279833_19 (sequence is synthesized)
gaatctacaaaagattcatggtgccaagatgttgggagactctggatcactgggacagtaccttctcctgccacctgctaccagaggtcaggagctcccaggaagatagtgcagccatca

SEQ ID NO: 825401 - DNA, 120 bp, Artificial Sequence
  ENSG00000279833_20 (sequence is synthesized)
gatgggacctgtgaggtcaaacacctccaagctgagggaagggatgacacacgcaggtcccactcacagtcgtgcctgttaacggcatcacatgtccccaggtgccggctgctgcagtga

SEQ ID NO: 825402 - DNA, 120 bp, Artificial Sequence
  ENSG00000279833_21 (sequence is synthesized)
tgggaggagggctaaactgggaggggactgggaaaatactgcagtgcctgggaggcacatctggtaggcagctgactcaaaacccactcctcccagcgggctcacaggccatcagaagcc

SEQ ID NO: 825403 - DNA, 62 bp, Artificial Sequence
  ENSG00000279833_22 (sequence is synthesized)
aacccactcctcccagcgggctcacaggccatcagaagcctagtctggatcaccagaggtca

SEQ ID NO: 825404 - DNA, 120 bp, Artificial Sequence
  ENSG00000279833_23 (sequence is synthesized)
gcctgggcgacagagcgagactctgtctgggaaaaaaaaaaaaaaaaaaaaagaagcccagtacattctaccattctgcaaggcagggtcttctacgtccttggcaacctcatcacgaga

SEQ ID NO: 825405 - DNA, 120 bp, Artificial Sequence
  ENSG00000279833_24 (sequence is synthesized)
ttggcaacctcatcacgagagaactacagctactaaagggacgcgggtgccaacagtcaggtcctgggtaagctaccggcctccctgggcctcagtttctttctcagcgaaacaatgaag

SEQ ID NO: 825406 - DNA, 120 bp, Artificial Sequence
  ENSG00000279833_25 (sequence is synthesized)
agactgtaggagccagcctccgaggagggccccaaccacacccacctcctggaattcacacctatgcgccgtccattcccacacccagtgctgtgttgtgtgacttcccaggctagggca

SEQ ID NO: 825407 - DNA, 120 bp, Artificial Sequence
  ENSG00000279833_26 (sequence is synthesized)
taaaagacactgtggcttcttccctgctctctctctcaggtcacccactctgggaagctggtggctgcactgtaaggacactcaagcaaccctctggagaggtccacatggtgaggacca

SEQ ID NO: 825408 - DNA, 120 bp, Artificial Sequence
  ENSG00000279833_27 (sequence is synthesized)
gtccctgtcaacgtccagccctgactcgatggcacgtgagcagccccctcggaggcagatcccgcagccctggtcgagcctgcagatgactgcagcccagccaacaccttgactgcagcc

SEQ ID NO: 825409 - DNA, 120 bp, Artificial Sequence
  ENSG00000279833_28 (sequence is synthesized)
cagactagaaccactgaagaaccagctagcacaattccaaattcctgacccccagaagccatgtgaaataatcaatgtttattgctttgagttgccatgttagaggggaagagataacga

SEQ ID NO: 825410 - DNA, 120 bp, Artificial Sequence
  ENSG00000284309_0 (sequence is synthesized)
tctctccctaggaccggctgggactgatcgacccatcctcgccactgaagcagcgccagctcctcctctcctgcgcgcaggagaatctggagtggccggctttgtctccacccgcacaga

SEQ ID NO: 825411 - DNA, 120 bp, Artificial Sequence
  ENSG00000284309_1 (sequence is synthesized)
gaacagtgtcatcggcagtcaccatcggagcagagacgaccactgccactgctgccaccccttctcccctcccccgcagcggctcctgggagccccaggaagcctgacaagcaagcctgg

SEQ ID NO: 825412 - DNA, 120 bp, Artificial Sequence
  ENSG00000284309_2 (sequence is synthesized)
gagatgcaggccggaggtgccaccgtgttggtaccgctgggagaagccctgtccttcctggccagcttggtgccccacccacttgaagcagcctccttccctggcggttcttggggattg

SEQ ID NO: 825413 - DNA, 120 bp, Artificial Sequence
  ENSG00000284309_3 (sequence is synthesized)
tttgtcgctaggaccataggcttgtgacaagatacggggctgaaatgcttgctgcttacatgatcagtagcctggagaagtaacagaacatacacacgttataatactgattcttgtgat

SEQ ID NO: 825414 - DNA, 120 bp, Artificial Sequence
  ENSG00000284309_4 (sequence is synthesized)
ttcaaggtgatgaaaacctctctctttctggcctcaaatttctccttctggactcaaatcccttcagttttctatgggaggatactttaggagaccaaaccataaagaaaaacaagtatg

SEQ ID NO: 825415 - DNA, 120 bp, Artificial Sequence
  ENSG00000284309_5 (sequence is synthesized)
tgattgtcaaaaaaacaaaaaaattgaccgctcctctttccgctgccccaatcagaaagaggagctgtgatgtggtagaggggcacatggagggcttctgagggctggcaatgttctttt

SEQ ID NO: 825416 - DNA, 120 bp, Artificial Sequence
  ENSG00000284309_6 (sequence is synthesized)
ttttttttcacctgagtggtagtaacataaggtttcattttacaataggttattaaactctacgatgagttttgtgcacttttaagggtgtgtgtgtgtgtattacaccgtgttttaaaa

SEQ ID NO: 825417 - DNA, 120 bp, Artificial Sequence
  ENSG00000237819_0 (sequence is synthesized)
tccacccctggctggtttctgcttccacctgctgatctcacagagccctagaagtttggaattttattattcgttccagaaaggttacaaaacttgccctagatagctcaaaactggtga

SEQ ID NO: 825418 - DNA, 120 bp, Artificial Sequence
  ENSG00000237819_1 (sequence is synthesized)
agttgggattctcaagtctcacccctgcatcatatgccattctgcctctccaaggatgtctacacatcacactgcaagctatttggcatatgaaggtcttgacctgagaaaaccatcttg

SEQ ID NO: 825419 - DNA, 120 bp, Artificial Sequence
  ENSG00000237819_2 (sequence is synthesized)
agtaaacagtagaatcatgccaacctaatctgtgttaaaatgcttggaatgtgggagccgctgatgatgcctcttgtctgtgtgtctgactgaatcctttcttttctcagagcagcaaag

SEQ ID NO: 825420 - DNA, 120 bp, Artificial Sequence
  ENSG00000237819_3 (sequence is synthesized)
caaagcctgggaaccaggccaaatgcctgccacttaccttaaattgatcagccactttgagattaaaacccctgaaagctgccacaccgtgaaaacaaggcctccttcacattaaaggca

SEQ ID NO: 825421 - DNA, 120 bp, Artificial Sequence
  ENSG00000237819_4 (sequence is synthesized)
gggcccagtcgcgtcgggcctcccgagggggctgcgagtgtcagtcggctctccgcacgtgtccgcggcctcgcggagcagcactgcaagctatttggcatatgaaggtcttgacctgag

SEQ ID NO: 825422 - DNA, 120 bp, Artificial Sequence
  ENSG00000237819_5 (sequence is synthesized)
tccacccctggctggtttctgcttccacctgctgatctcacagaggtgaggtgataacagtgatgaaacaaaatcttcaaaccacagcacacactgcaagctatttggcatatgaaggtc

SEQ ID NO: 825423 - DNA, 120 bp, Artificial Sequence
  ENSG00000237819_6 (sequence is synthesized)
agtcgcgtcgggcctcccgagggggctgcgagtgtcagtcggctctccgcacgtgtccgcggcctcgcggagcagtccacccctggctggtttctgcttccacctgctgatctcacagag

SEQ ID NO: 825424 - DNA, 120 bp, Artificial Sequence
  ENSG00000255226_0 (sequence is synthesized)
gtctggggcaaccctgatttcacttgacccatgtaccttgggaccctcttgagaggagatatggcagagcagatgcaacggcacccctgagctgccctcagggggtcctcagccttggag

SEQ ID NO: 825425 - DNA, 120 bp, Artificial Sequence
  ENSG00000255226_1 (sequence is synthesized)
cagaatatggggataagaaggtgaaaccggcatgtttattaacacaatggaatattctgtggccaaatcaaaggaagacgttgaggattctggtgacacctggaaacgtactgctaaggg

SEQ ID NO: 825426 - DNA, 120 bp, Artificial Sequence
  ENSG00000255226_2 (sequence is synthesized)
aaaaaagcaggaccacaatgttatgtggatattgactgcgactatatataatgccagcgtggacttctcagagatggaatttggaggaatgtaatacagatgcaaatagagttttcccca

SEQ ID NO: 825427 - DNA, 120 bp, Artificial Sequence
  ENSG00000255226_3 (sequence is synthesized)
gcgactcctgggtaatggctgctaatggttccttatgtgttcttccgcccgtacgcctttgcattttcaacgtgtatgcatgtaccaaaattgatgtaactggcctccattacgggacat

SEQ ID NO: 825428 - DNA, 120 bp, Artificial Sequence
  ENSG00000255226_4 (sequence is synthesized)
ttaggttgttttccattatctactgctgtaaataatgctgcaaagatcaccttcagattcaaatatttctgcaggcagcgtcttagaaatgggattgctgggtcacagagaacatccact

SEQ ID NO: 825429 - DNA, 120 bp, Artificial Sequence
  ENSG00000255226_5 (sequence is synthesized)
taaaatttttaatgaacactgccaaaccgtcgtcagggaagacttccagcaagtctcgtactgatgtggaaatatctgttctcctcctttgaaagtgggtctggatcttaatttgtcgct

SEQ ID NO: 825430 - DNA, 120 bp, Artificial Sequence
  ENSG00000255226_6 (sequence is synthesized)
cccctaaaaaaagtctacaaagtcaatcgtgagaccagaccttgacctgttccgtttggcgctctggattgcggagcataccgaggagtcctggatggcagagcagatgcaacggcaccc

SEQ ID NO: 825431 - DNA, 120 bp, Artificial Sequence
  ENSG00000255226_7 (sequence is synthesized)
gggagccctggttgccataacaactgattggtcctctcctcttcctccacctctgccacagggctccagcttccctctgggggcaccactgttcttagatggcagagcagatgcaacggc

SEQ ID NO: 825432 - DNA, 120 bp, Artificial Sequence
  ENSG00000255226_8 (sequence is synthesized)
ctgttagtcacaagtcctgctggttccagctctgagacagctttcagagtactcctcctcctgttcccacattcacatccctaggggactctctcctcccagcgtgtctgttcccccgca

SEQ ID NO: 825433 - DNA, 120 bp, Artificial Sequence
  ENSG00000255226_9 (sequence is synthesized)
tgccccccacgctctgctcccctggcacctctgccatgctgctgccccagggcagatgtggccaaggggctcctctcctcccactcctcgtttgctccaggatcaaggacacacttcttg

SEQ ID NO: 825434 - DNA, 120 bp, Artificial Sequence
  ENSG00000255226_10 (sequence is synthesized)
cctgcttgcagccatgcagcaggaggctctctttattcctctttgcctgtgaagatagctgcctctggcaggaataccctttgctgcctcatctgcctggtcaactcctatcccccattt

SEQ ID NO: 825435 - DNA, 120 bp, Artificial Sequence
  ENSG00000255226_11 (sequence is synthesized)
cagattttgcccaagactttctaagacagtagaagaaaggtttccactcctttcccctcctgaaaactgtacagaaaccacaggagaacaggaatagaagcctgaactccgtctttggtg

SEQ ID NO: 825436 - DNA, 120 bp, Artificial Sequence
  ENSG00000255226_12 (sequence is synthesized)
gaacatggagacctccctactcttgaatctcaatacgtggagggggaagctgctggaggaggataaagcgctcagcagagaggagaaacatcaaacctctgtacttaccagtggggaagg

SEQ ID NO: 825437 - DNA, 120 bp, Artificial Sequence
  ENSG00000255226_13 (sequence is synthesized)
cactatagaaatgagctgattttctctacagagacccagaaagggtccaggatcagaggcaccaggtatcacaggaagtggggcaggacctgagaataggggtagggggtagtttgaaag

SEQ ID NO: 825438 - DNA, 120 bp, Artificial Sequence
  ENSG00000255226_14 (sequence is synthesized)
tctgtgtaaggagcagtagacttccaagtcccactccatcctatgcagccaggtgactgtcctccttactcccacgagagaccagaggtcctggtctcagagatgccaagtgtgaagaga

SEQ ID NO: 825439 - DNA, 120 bp, Artificial Sequence
  ENSG00000255226_15 (sequence is synthesized)
aggggtgaggtgtcctaataaaggctcccagcctccttccccacccacctccagggtaccagaatcaggcttatgcctgcatcctgcactaaccccatgcaaagattgaagtgtgttttc

SEQ ID NO: 825440 - DNA, 120 bp, Artificial Sequence
  ENSG00000255226_16 (sequence is synthesized)
actggaggaattaaacaagcccaaagaaatgactgacagatgcttatgctcaggggtctgtagcagataagctggtgggagcaactgagtgtccaattaacatgccacactcaggcactt

SEQ ID NO: 825441 - DNA, 120 bp, Artificial Sequence
  ENSG00000255226_17 (sequence is synthesized)
catacctccaactggccctgcagtggggaaccattaaataccaacacacacccaaagatcacggacacttgagggacactttctctcagtattctgaggaagatatgaaccaagaggaaa

SEQ ID NO: 825442 - DNA, 120 bp, Artificial Sequence
  ENSG00000255227_0 (sequence is synthesized)
tttgcctgctgccatccatgtaagatggggcttgctctccaccatgatttttaggcttccccagccaactgaaactagtcttttagaatccattcacaggacttgaatcctggatctgag

SEQ ID NO: 825443 - DNA, 120 bp, Artificial Sequence
  ENSG00000255227_1 (sequence is synthesized)
gatctgagtttgcaaaagaaatgaagctaatgaaagacaaggaacttctggtcttagttgagatgcaaaaagaatttcaaggagaagtcaaggaacaaaaaacaatggccaaaatcatgc

SEQ ID NO: 825444 - DNA, 120 bp, Artificial Sequence
  ENSG00000255227_2 (sequence is synthesized)
ccatgaatttcatccaccatataataaggtagatgatattcatttcccaccaggtgaaagctctcaagtctggaagtcctaaatcaagctgagggctgagccacgcttcttccaaagctt

SEQ ID NO: 825445 - DNA, 120 bp, Artificial Sequence
  ENSG00000255227_3 (sequence is synthesized)
ccaggagaggacccttctttgcctcttccagcttctggaaaacatttccatctggctttcctctgtctgacttaaacaatgattttccatcctacctgaacattataatcatctggaaga

SEQ ID NO: 825446 - DNA, 120 bp, Artificial Sequence
  ENSG00000255224_0 (sequence is synthesized)
tgtaggtgcacaaaacaaagggtttattgtagggcgagaagtaccgcgtggataataaggtcgtctgggaaggagtgacgtcggagtagagctgaaaggagagggagcgagtgggggagt

SEQ ID NO: 825447 - DNA, 120 bp, Artificial Sequence
  ENSG00000255224_1 (sequence is synthesized)
gcctagcacgttgaagagccgcaaagaggaaggagggcgcagggacagaggccgatgagaaaggcaggaccaccgcgcagcacactaaggacttgcgtttactccgagtgagatgcggtg

SEQ ID NO: 825448 - DNA, 120 bp, Artificial Sequence
  ENSG00000255224_2 (sequence is synthesized)
ctgagcatcggctgtgtagactgaggcgcgccggccgttgcccctcaagtccccgagccagcgctcagcccggctgccccgcagctcccacggccacacgattccccatcccgcgcgccc

SEQ ID NO: 825449 - DNA, 120 bp, Artificial Sequence
  ENSG00000255224_3 (sequence is synthesized)
actcgcctcgtgcgggccgtagaccacagccagtgccttggtgttgccctgctcaatgtaggccgagccgtcagcctgcgcgaacacgcccatccgcgcctggatcttgcgcagctcccc

SEQ ID NO: 825450 - DNA, 120 bp, Artificial Sequence
  ENSG00000255224_4 (sequence is synthesized)
ggcgcgccgcccgtccacccggtagccctggtccgacaagagctccagccccgccatgctgcccggccgccaggtccgctctctgcctacttctctgagccgcgggagaactacagctcc

SEQ ID NO: 825451 - DNA, 120 bp, Artificial Sequence
  ENSG00000255224_5 (sequence is synthesized)
aactacagctctccgcggccctgacctccgtggatctgcggtttccggcgttccgctgtcacttcctgtcctggtgaactggagttcaccgcggccccgacctccccggatctacggttt

SEQ ID NO: 825452 - DNA, 120 bp, Artificial Sequence
  ENSG00000255224_6 (sequence is synthesized)
ccggcggtccggctctacttctgtctccggggaactgcggcggcgctatcggggaagcagcggctgggcccgcagccgttcccggagctgtgccacgggtgccaggaggtgggcgcccgc

SEQ ID NO: 825453 - DNA, 120 bp, Artificial Sequence
  ENSG00000255224_7 (sequence is synthesized)
cgaaggaggaattgcccagtcacgccctcgtgaccagtggtgcctgcattcagcccttccccgcgccccaagtgtgaaagtggaaggatgaacccagtggggtgcgacactgacaggaga

SEQ ID NO: 825454 - DNA, 120 bp, Artificial Sequence
  ENSG00000255224_8 (sequence is synthesized)
aggcattgagcggtcctaggaaagtgaccaggctggtgtcccaggatggtccacacctggcacctctccagtcctctcatgccctccctttacaccgagcttccacactgcagtcaggtg

SEQ ID NO: 825455 - DNA, 120 bp, Artificial Sequence
  ENSG00000255224_9 (sequence is synthesized)
ggcctcccttttccctttgaggatgcagatttcctcatcctttccagagaggggttgtatgtctgtttatctcttgccacttaacctcagcggcttcaaataataaaaatcattctatta

SEQ ID NO: 825456 - DNA, 120 bp, Artificial Sequence
  ENSG00000226419_0 (sequence is synthesized)
aagacgagtcgggaaagaagagcaggttgatagactggatgctgctatggtaatctgcctcaggaaaatgccggactgttgtttgcaagctggttaagtgagcaaatcttgggaagattt

SEQ ID NO: 825457 - DNA, 120 bp, Artificial Sequence
  ENSG00000226419_1 (sequence is synthesized)
acagtggcgcgatctcggctcactgcagctaccgcctcctgggttcaagcgattcttgtacctcagcctcgcgagtagttgggactacaggcgaccgccacaacacctggctaatttttg

SEQ ID NO: 825458 - DNA, 120 bp, Artificial Sequence
  ENSG00000226419_2 (sequence is synthesized)
gcgattcttgtacctcagcctcgcgagtagttgggactacaggcgaccgccacaacacctggctaatttttgttgtatttttagtagagataggatttcgccatgttgcccaggctggtc

SEQ ID NO: 825459 - DNA, 120 bp, Artificial Sequence
  ENSG00000226419_3 (sequence is synthesized)
agtaagaaccactgctgttgctgttgctgtagctgcctgaatctatggcaaaaagccaggaaaaaaaaattgcttcacaccatgtgcaccgactcccctggagctggcaccaccagggcg

SEQ ID NO: 825460 - DNA, 120 bp, Artificial Sequence
  ENSG00000226419_4 (sequence is synthesized)
tctgcagagctatgtctgacagtcctgccatttcctaacttctcctgtgtggtcatccacctacctttgggaacctccagtcattactcacagagttggtctcatcctgggaactctctc

SEQ ID NO: 825461 - DNA, 120 bp, Artificial Sequence
  ENSG00000226419_5 (sequence is synthesized)
ttgcctctcccagtggttcattctccaagtctgagttatttggtcaaaaaaacctccaaatgcttcagacaactctcgcaaacttgtcatagcttttggtattccaggccacagaagagc

SEQ ID NO: 825462 - DNA, 120 bp, Artificial Sequence
  ENSG00000226419_6 (sequence is synthesized)
ccaggtgggtacatgggccctccaagtgtttgtttcctcaccactgtgagtgacaaatatgcttctttatccttaaaattgtccagccagtaactgttggaacacactgacctagatcca

SEQ ID NO: 825463 - DNA, 120 bp, Artificial Sequence
  ENSG00000226419_7 (sequence is synthesized)
cacatgcaaacacacctttcaagggcaaatgttaattcacaaagacaattgtaaaatctaagctaaagttcacaaatgggagctgcctttgaagtgaattcagcccacagacatctttga

SEQ ID NO: 825464 - DNA, 120 bp, Artificial Sequence
  ENSG00000226419_8 (sequence is synthesized)
agaatggagcctatggagaacacccatattcaacaacagtggctgactttcagcacgcagcagacagcctctgagagactttgttctgtgtctcacccttctcttatgcagtgaggaaag

SEQ ID NO: 825465 - DNA, 120 bp, Artificial Sequence
  ENSG00000226419_9 (sequence is synthesized)
ggagactctctaggccaggcagtaaccctgagagcttccctgacagaggattgctgagagactgagcagatgcaagaggaatgcctctgttcttccctcactgcctattttggccatctc

SEQ ID NO: 825466 - DNA, 120 bp, Artificial Sequence
  ENSG00000226419_10 (sequence is synthesized)
cctgcttttagactttgcagtggaggggccagaggcttgagccaagccaaagatacaggagaaggatctggaatccacctcagtgggtagggccaattaagacaagaggggtgtacacag

SEQ ID NO: 825467 - DNA, 120 bp, Artificial Sequence
  ENSG00000226419_11 (sequence is synthesized)
agggaaatgttcagaaaacaaacctcttgcaagaatctggaggtataacagggccaagtcttcatactgagttggtgggggcttcactttaatatgtgaatgttggaaagaggtgggata

SEQ ID NO: 825468 - DNA, 120 bp, Artificial Sequence
  ENSG00000226419_12 (sequence is synthesized)
cctcccaaagtgctgagattacaggcgttagccgccacgcctggccctcttcatcttcttttaaagccacccaccagtcacatcatggaggccccaccctgatgacctaacctattatct

SEQ ID NO: 825469 - DNA, 120 bp, Artificial Sequence
  ENSG00000226419_13 (sequence is synthesized)
catcatggaggccccaccctgatgacctaacctattatctaatcctgattacatcccaaaggccccacttctaatcaacatatgcattggggattaaagtttggaatacataaaatttgg

SEQ ID NO: 825470 - DNA, 120 bp, Artificial Sequence
  ENSG00000226419_14 (sequence is synthesized)
gagacacattcaaatcatagcaataggaaataccatctttggtggaaaaacatgtggcttagaaagcaagtctatggttttgatggaagtagcaaaatactttatcatcacaaagcggta

SEQ ID NO: 825471 - DNA, 120 bp, Artificial Sequence
  ENSG00000226419_15 (sequence is synthesized)
tctattgttgccaactttactttcccatcacattagccttgtattagatgaagtaaagaaatatgagtttttaagtaaattaggttaaccagaaatgcattaaattgttgtaagtaaaaa

SEQ ID NO: 825472 - DNA, 120 bp, Artificial Sequence
  ENSG00000226419_16 (sequence is synthesized)
ttaattaatggattaatataaacataaagaaaagtttccaaagaaggctttgtccttttaataattctgcaattgacatgaatgaagtcctagaaagtgtgttcatcaaacctaggaatc

SEQ ID NO: 825473 - DNA, 120 bp, Artificial Sequence
  ENSG00000226419_17 (sequence is synthesized)
aaagttgggaataagtgattttaaaaaaacagagagagtttgaaaactaagtttaacaaagttaaatgtaagatcctgcacttcaaactaagaaaaaataactgcactagtacaagataa

SEQ ID NO: 825474 - DNA, 120 bp, Artificial Sequence
  ENSG00000226419_18 (sequence is synthesized)
caaccatcggtctcacccctcagtttctgccagagaaaaaggaaaagtcaccgagaggcctgaccctgacgggtgggggagatgcgcgtgcggagtagcgggaagcgactgaggagcggg

SEQ ID NO: 825475 - DNA, 120 bp, Artificial Sequence
  ENSG00000226419_19 (sequence is synthesized)
gaatgggcagcatttgaatggatgcgggtgccgctggcacccgggaagacgctgggggccggcgctgtagagccgggcatgggctgggatgtgtttggattccaatccgggcctgacacc

SEQ ID NO: 825476 - DNA, 120 bp, Artificial Sequence
  ENSG00000226419_20 (sequence is synthesized)
agttcagtgacctcgggaagttccccaaccctccgggcctgtttcctccctctgaagtggcgacagtagtagaaccgacctcgtaggctcatcgggaggtcctgatgggagaacccatgc

SEQ ID NO: 825477 - DNA, 120 bp, Artificial Sequence
  ENSG00000226419_21 (sequence is synthesized)
ttattatcagtcattcaaagaaaaagagaatcctcaccagaaaatcttggaacatagaacagatggaaggtggcacttctggatatgcctttttacatctgaacttggaagagttaagaa

SEQ ID NO: 825478 - DNA, 120 bp, Artificial Sequence
  ENSG00000226419_22 (sequence is synthesized)
ttgttgaaggcccttctcactgatcaggggaaatagcttctgtcacagagctgcctactccaggagaaccaaaaatgaaagtaaacactcatattttgtaagtctgttcctcaacttcca

SEQ ID NO: 825479 - DNA, 120 bp, Artificial Sequence
  ENSG00000226419_23 (sequence is synthesized)
agcagtatggaggaaaagaagtgccacacccttctaggcatccaaattcaagcatttacaatgtacttcatgaagcagtaccctatacagcactaataacagcccaaacttgcttgacat

SEQ ID NO: 825480 - DNA, 120 bp, Artificial Sequence
  ENSG00000226419_24 (sequence is synthesized)
ttctacataacacattattcattaattcagaagaaaaatagaattcttaaaactcctaactttatttttaattaatataaaggaggaaccaacaacaacaaaaaattgtgtgggagttag

SEQ ID NO: 825481 - DNA, 63 bp, Artificial Sequence
  ENSG00000226419_25 (sequence is synthesized)
aggaggaaccaacaacaacaaaaaattgtgtgggagttagaaaataaggactaggcagaacac

SEQ ID NO: 825482 - DNA, 88 bp, Artificial Sequence
  ENSG00000226419_26 (sequence is synthesized)
ggaaaaaaaggactaggcaggcagatgtggggtggggcaaacaaaacatggcagccagcagaccagtctatttcagcatagtctctgc

SEQ ID NO: 825483 - DNA, 120 bp, Artificial Sequence
  ENSG00000226419_27 (sequence is synthesized)
atgtggggtggggcaaacaaaacatggcagccagcagaccagtctatttcagcatagtctctgctgcagtatttaagaaataggtagagccagccaggcgcggtggttcacgcctgtaat

SEQ ID NO: 825484 - DNA, 120 bp, Artificial Sequence
  ENSG00000226419_28 (sequence is synthesized)
tcattctccaagtctgagttatttggtcaaaaaaacctccaaatgcttcagacaactctcgcaaacttgtcatagcttttggtattccaggccacagaagagcccaggcagaatcagtgt

SEQ ID NO: 825485 - DNA, 120 bp, Artificial Sequence
  ENSG00000226419_29 (sequence is synthesized)
gagctaacgacatccttcctgacttctttctcagaattaggaaaccctgattagcatttagaacctcattttcacagacttcactcattaaaacatcaagacctaggtaacgcaccactg

SEQ ID NO: 825486 - DNA, 120 bp, Artificial Sequence
  ENSG00000226419_30 (sequence is synthesized)
caccactgaaatttcataatatggaggatatgtttaaatatgtttaaaatatgtatttttaactgtggttaaaatatgtttttaaaatgtttatgagtcaaaataattaaaattgccatt

SEQ ID NO: 825487 - DNA, 120 bp, Artificial Sequence
  ENSG00000226419_31 (sequence is synthesized)
ctttggtagctacagaaacagtgtttgttatcctttgttttcggtagacaggcaaaaatctgatggcgacattctctctttctgaagttggagagccaaccagcaaaaccttcagaaaga

SEQ ID NO: 825488 - DNA, 120 bp, Artificial Sequence
  ENSG00000226419_32 (sequence is synthesized)
aggcagcttctaccagagggatcttgtctcttattgctgctttcaatactttggagcctcagtgagaggactccctatgaaaccatggaattaaagttgccctttcagattttaaccttg

SEQ ID NO: 825489 - DNA, 120 bp, Artificial Sequence
  ENSG00000226419_33 (sequence is synthesized)
agatcaatgcacagtgggtcaaagtatagttattcaaagtcttagtaaagaggtaaaatggctccctggtaagcaagattatgctataatcttaaaataggctcacacctgtaatcccag

SEQ ID NO: 825490 - DNA, 120 bp, Artificial Sequence
  ENSG00000226419_34 (sequence is synthesized)
gcgttatctgaaaaaagaaagatgaaattacagtgtgttctctggaattcacctacttaacttacattctttcagttacttcaccatttctgtgatgtagtagataggaaggtgctattt

SEQ ID NO: 825491 - DNA, 120 bp, Artificial Sequence
  ENSG00000226419_35 (sequence is synthesized)
tgcccattttagtaacaataaacaatacaggaaaggattcttcttttaattgacacattgtaattgtacatattctaggttacagttttggtgtttccatacatacaaatgttgtatact

SEQ ID NO: 825492 - DNA, 120 bp, Artificial Sequence
  ENSG00000226419_36 (sequence is synthesized)
gatcaaatcagggtacttagcatatctctcacctcatgctattttgtaatatacaataccttattgttaacagcaaccctactgtgcaataaaacaccagaacttattcttccaatctaa

SEQ ID NO: 825493 - DNA, 120 bp, Artificial Sequence
  ENSG00000226419_37 (sequence is synthesized)
ttgtcactttgtacctgttgaccaacctctccctatcctcctttcctctctcccctttctagtctcagataaccactgttctctctgcttctaagatataaactctttctttaaaaaaaa

SEQ ID NO: 825494 - DNA, 120 bp, Artificial Sequence
  ENSG00000226419_38 (sequence is synthesized)
agcctaggaccccgactctggctgtggctgtggatgcttctgaacagtgctaagtggaagcccatgaaagaacagactgttctcaaggcccatggaggaaaagatgttacaagccatccc

SEQ ID NO: 825495 - DNA, 120 bp, Artificial Sequence
  ENSG00000226419_39 (sequence is synthesized)
accatagagccaggcccgcggcggttggcgcctggtgggtattaaagacgagtcgggaaagaagagcaggtaagagggtggggagactggcccagtgggttggggtgtgcacctcggcca

SEQ ID NO: 825496 - DNA, 120 bp, Artificial Sequence
  ENSG00000226419_40 (sequence is synthesized)
cgtggaaaagcgagaatgcagaggccggacgcttatggacgatgcatatgtggggccggatagaattgtggcaggcggcgctggggctgatgctcctcacccggattatcctctctaatc

SEQ ID NO: 825497 - DNA, 120 bp, Artificial Sequence
  ENSG00000226419_41 (sequence is synthesized)
ctcagccctgtgaagtgggcactgccctgaacattttgtaaataagggacccgaggctcagagaggtgaagtaactttccagacagcccagctcgtcagcggccagcatttgaagtcaca

SEQ ID NO: 825498 - DNA, 120 bp, Artificial Sequence
  ENSG00000226419_42 (sequence is synthesized)
ctccagagcctgtttttaacataatagccgctgtgaccgcataaccaacgtgtgtgttgaagtgatcaaataaccatggagtgtctttgatgtccaggacttttgagaaataccgaaaaa

SEQ ID NO: 825499 - DNA, 120 bp, Artificial Sequence
  ENSG00000226419_43 (sequence is synthesized)
gttgagcacttgctgcttgccaggaccctgcccttcccctcgtgtcttcctcccttccaggactcaccccctcacttaccctccccctcacttaccctccccctcaattctcacagcaac

SEQ ID NO: 825500 - DNA, 120 bp, Artificial Sequence
  ENSG00000226419_44 (sequence is synthesized)
cctgggaggtaggccttatggtttctgttttgcaaatgaagaacctgagattgaagaagagtagagattggaggatcagatcctgagaggtcccatgtgctttccaataacagttcagta

SEQ ID NO: 825501 - DNA, 85 bp, Artificial Sequence
  ENSG00000226419_45 (sequence is synthesized)
cagaaggcggaggttgtggtgagcccagatcgtttccccatctcaaaaacaaagagataggtagagctggccgtggtggctcacg

SEQ ID NO: 825502 - DNA, 90 bp, Artificial Sequence
  ENSG00000226419_46 (sequence is synthesized)
cactccatcctgggcaacaagagtgaaattccccatctcaaaaacaaagagataggtagagctaaggctgagttcggtggatcacttgag

SEQ ID NO: 825503 - DNA, 87 bp, Artificial Sequence
  ENSG00000226419_47 (sequence is synthesized)
gaaccccagaggcagaggttgcagtgagttgagatcgcgtcactgcagtccaacgacagagtaagactctgtcgaacgcttcttccc

SEQ ID NO: 825504 - DNA, 120 bp, Artificial Sequence
  ENSG00000226419_48 (sequence is synthesized)
tatgaaagatccccaaggaagagttgaatatcagaatgagggtcattttggcagtcccatccctgtatggagacagtcctttcgttgttacttttggcagatgaggatttgagtttaaga

SEQ ID NO: 825505 - DNA, 120 bp, Artificial Sequence
  ENSG00000226419_49 (sequence is synthesized)
aataataataaaataaaaaaaaaagagagacctggtggatttccgtacaacttcataatttccccctatccaagacccatggttccatttttgtcaccgtggccacagtggctgaaatgg

SEQ ID NO: 825506 - DNA, 120 bp, Artificial Sequence
  ENSG00000226419_50 (sequence is synthesized)
ttttgtcaccgtggccacagtggctgaaatggctcacttcatcttttgcactaaacagccttcagccccacactgcaccgctaaatggacaagttcttttttccctagtgtcttaaattc

SEQ ID NO: 825507 - DNA, 120 bp, Artificial Sequence
  ENSG00000226419_51 (sequence is synthesized)
atggcctcagtctgaggcctttagttttatactgctttgggagagtcctctttacagtcttagagatatacatatacctcttactgtttaccaccactaatttaatagcaagaaagaaac

SEQ ID NO: 825508 - DNA, 120 bp, Artificial Sequence
  ENSG00000226419_52 (sequence is synthesized)
accactaatttaatagcaagaaagaaactggaaatcttgtaggaatactctgttcctttttttgttttttgagacgaagtctcactcttgtcaccaggctggagtgcaatggcgcaatct

SEQ ID NO: 825509 - DNA, 83 bp, Artificial Sequence
  ENSG00000226419_53 (sequence is synthesized)
cctcggcctcccagtaaggaacactctttgttctatgctacctactaggacagctagtctactcagttaccccaaaaccaaaa

SEQ ID NO: 825510 - DNA, 120 bp, Artificial Sequence
  ENSG00000226419_54 (sequence is synthesized)
actaggacagctagtctactcagttaccccaaaaccaaaaggatagtaactcaacaagctcagaatacaccattctgcttgcagccattgttttcaccactaccccatttccccctgcac

SEQ ID NO: 825511 - DNA, 120 bp, Artificial Sequence
  ENSG00000226419_55 (sequence is synthesized)
acatagctcattaccttgtcacatgtacacttactatagtcacagcaggagctagaatctggagatgttacatgccacacaagaggtcagtgagaagcacaaaaccatacattgcaaatg

SEQ ID NO: 825512 - DNA, 120 bp, Artificial Sequence
  ENSG00000226419_56 (sequence is synthesized)
gccttcatctcatgttcccattaggctcagatgggctagataatggggttttgctcctgtttccaattcaaagatagtcaacctgggagctttctaactctatcatatgtatttcatttg

SEQ ID NO: 825513 - DNA, 120 bp, Artificial Sequence
  ENSG00000226419_57 (sequence is synthesized)
tttcaccagttactcatttgatcaacccagggaagaccatatcatgaatgaaacacagcccaagtatgctttaaccataacgtgggagtgcataattcaggctaccaagaccatttaaca

SEQ ID NO: 825514 - DNA, 120 bp, Artificial Sequence
  ENSG00000226419_58 (sequence is synthesized)
gaatccagtggaatgagggaagtctggactacaggagttagtgggggaattctcagtcactgcaaccatgcttctaaacaaaggccttcaccaagaacctagggcaatcttattccatct

SEQ ID NO: 825515 - DNA, 120 bp, Artificial Sequence
  ENSG00000226419_59 (sequence is synthesized)
gccagaacttatagggatatcactaaattatgcttagtcaaaattgggtaatttgtagtttataaatactataaaactgatatttaaatctaggtctacttaattcctagcttctgttct

SEQ ID NO: 825516 - DNA, 120 bp, Artificial Sequence
  ENSG00000226419_60 (sequence is synthesized)
taagtgctagattattttgattcatttattttgttcaaaatcttgacgttataggaaaggatggggatgaggaggatgatgaggcaggaaaatgcagaactgtttcatagtcccagcgct

SEQ ID NO: 825517 - DNA, 85 bp, Artificial Sequence
  ENSG00000226419_61 (sequence is synthesized)
gaggcaggaaaatgcagaactgtttcatagtcccagcgctgaacctttgtacaggctgtttcttcttcatataaagcacttcttt

SEQ ID NO: 825518 - DNA, 88 bp, Artificial Sequence
  ENSG00000226419_62 (sequence is synthesized)
cgggtcacttgaggtcaggagttcgagacaagcatggccaacatggtgaaacgcaatgtggtagtgtgcctgtagtcccagctacttg

SEQ ID NO: 825519 - DNA, 120 bp, Artificial Sequence
  ENSG00000226419_63 (sequence is synthesized)
ttcttccttccacttgataaactgtgtgcagaataacatggagatggaggagaggcaggtagattaagggggagcagttttagtaattctatgattcagacctctttttaattcagcttt

SEQ ID NO: 825520 - DNA, 71 bp, Artificial Sequence
  ENSG00000226419_64 (sequence is synthesized)
tagtaattctatgattcagacctctttttaattcagctttcctgctaattaatgtaaattagtaaggtttc

SEQ ID NO: 825521 - DNA, 90 bp, Artificial Sequence
  ENSG00000226419_65 (sequence is synthesized)
actccagcctgagcgacatttaataaggtttcataattattatatttaccaaccaggttctttctacataattattgtttaccttctaat

SEQ ID NO: 825522 - DNA, 120 bp, Artificial Sequence
  ENSG00000226419_66 (sequence is synthesized)
aaccaggttctttctacataattattgtttaccttctaataaattacttacaaaggccacctacaaatccaaattatatacaaaacgtttcatttcctatttccttcccagggatgcata

SEQ ID NO: 825523 - DNA, 60 bp, Artificial Sequence
  ENSG00000226419_67 (sequence is synthesized)
caaaacgtttcatttcctatttccttcccagggatgcataattattttggaaaaatcagt

SEQ ID NO: 825524 - DNA, 120 bp, Artificial Sequence
  ENSG00000226419_68 (sequence is synthesized)
agcctgggtgacagagcgagactgtctcttaggaaaaaaaaaaaaaaaatcattggcttgtaagttaaaatctttatcttgctctaccttctctggaatacctacatctctgatgttttt

SEQ ID NO: 825525 - DNA, 120 bp, Artificial Sequence
  ENSG00000226419_69 (sequence is synthesized)
taccttctctggaatacctacatctctgatgtttttttaacattacatattcacaagctttaccaattcatggaaaggattcctctaggattttggtggatctcttgaagcactaagaac

SEQ ID NO: 825526 - DNA, 120 bp, Artificial Sequence
  ENSG00000226419_70 (sequence is synthesized)
ctcaagcaaaaatgtatgcaatctttgtactttaaaattaaagcatttcaaccaggagcagtggctcatgcctgtagtcccagcgctttgggaggccaaggcaggatgattgcttgagcc

SEQ ID NO: 825527 - DNA, 120 bp, Artificial Sequence
  ENSG00000226419_71 (sequence is synthesized)
ttggagtttgagactagtctggccaacatagccagaccccgtttctttaaaagaaaaaaaaaaacaattagctgcatgtggtggcacacatgtagtatcagctttgggaggcccagatgg

SEQ ID NO: 825528 - DNA, 64 bp, Artificial Sequence
  ENSG00000226419_72 (sequence is synthesized)
gtggcacacatgtagtatcagctttgggaggcccagatgggaagattgcttgatctcaggaggt

SEQ ID NO: 825529 - DNA, 120 bp, Artificial Sequence
  ENSG00000226419_73 (sequence is synthesized)
cctgtctcaaaaaaaaatttttttaatagataaacattcaggcattccaaactcctaatgtattgtctactattaagaatgcatgctggctgaggcaggagttcaagaccagcctggcca

SEQ ID NO: 825530 - DNA, 90 bp, Artificial Sequence
  ENSG00000226419_74 (sequence is synthesized)
aaaaaaaaaaaaaaaaaaaagaatctctggaatttaacattcctttaaacttttagaagaatgcatgctggggtctgctcagtgattcac

SEQ ID NO: 825531 - DNA, 120 bp, Artificial Sequence
  ENSG00000226419_75 (sequence is synthesized)
agaagaatgcatgctggggtctgctcagtgattcacaaggcaggaaatctcttgagccaaggagtttgagaccaacctgggcaaagtggcaagaccctgtctctacaaaaaaattaaaaa

SEQ ID NO: 825532 - DNA, 120 bp, Artificial Sequence
  ENSG00000226419_76 (sequence is synthesized)
ctacttgggaggctgaggcaggagagtcatttgggctcatgtgtttgaggttacactgagctttgatcacaccactgcgctccagactgggcaacagagcaagaccttatctcaagaaaa

SEQ ID NO: 825533 - DNA, 120 bp, Artificial Sequence
  ENSG00000226419_77 (sequence is synthesized)
ctttgatcacaccactgcgctccagactgggcaacagagcaagaccttatctcaagaaaacaaacaaaaagagaattcagggctgggggcagtagctcacacctgtaatcccagcacctt

SEQ ID NO: 825534 - DNA, 65 bp, Artificial Sequence
  ENSG00000226419_78 (sequence is synthesized)
ttaatcccagctacttcggtggctgaggaaggagaatcgcttgagcccaggaggtagaggttgca

SEQ ID NO: 825535 - DNA, 120 bp, Artificial Sequence
  ENSG00000226419_79 (sequence is synthesized)
gtagaggttgcagtgagccaagatcgtgacactactccagcctggacgacagagcgaaactctgtctgaaaaaagttcaggtgggaggatcccttgaggacaggagtttaagaccagcct

SEQ ID NO: 825536 - DNA, 120 bp, Artificial Sequence
  ENSG00000226419_80 (sequence is synthesized)
cttgaggacaggagtttaagaccagcctgggcaatgtagcaagaccttgtctcttaaaaaaaaaaaaaaaaagaatgcaaaagccatagaaccttttcctaggagagaatgctaggagga

SEQ ID NO: 825537 - DNA, 120 bp, Artificial Sequence
  ENSG00000226419_81 (sequence is synthesized)
aggagggaaacagtatattttaaggtaaataagaaaggcctaatgccccgtggttagatttttctatctacatattggagataagtttaaattttgtgttagtgtttgggtattacttcc

SEQ ID NO: 825538 - DNA, 120 bp, Artificial Sequence
  ENSG00000226419_82 (sequence is synthesized)
tgccaacgtgaaaagttaacctttctaagacaatctctactaagaatttggactttttcaagatttttgcctacttctttcaaagagattgcaaaacgattttaactcactaaagaacat

SEQ ID NO: 825539 - DNA, 120 bp, Artificial Sequence
  ENSG00000226419_83 (sequence is synthesized)
ttttcacctcttgattgtccagtacaagtgtagtacagttctttttttatgtatcctccctttgtttttatagactggaaggtatccagaaataaggcattcagaaatggaggcacacat

SEQ ID NO: 825540 - DNA, 120 bp, Artificial Sequence
  ENSG00000226419_84 (sequence is synthesized)
agatgaaggcaaaggccattcctatgaaggcaggtctgtaggcagctggttatttgtttttctcagcctctcttggcattctaccttcatctggaaaaaaatttaaaaaggaggatactt

SEQ ID NO: 825541 - DNA, 120 bp, Artificial Sequence
  ENSG00000226419_85 (sequence is synthesized)
tataggtcctgtctcaagtatctgacttccctgggaagcttgattctcacattcaaaatacatggggagtttggttcagttaaattttatcacaccagaattgttgaaaagcaataaatt

SEQ ID NO: 825542 - DNA, 120 bp, Artificial Sequence
  ENSG00000226419_86 (sequence is synthesized)
attactgtataattggtgcctgtttgttatcttaggtattgttatttctgtttttaacttgtttggaaaaccatagaccataaacttttctgaacgttcgatgcagagctccaaccgaac

SEQ ID NO: 825543 - DNA, 120 bp, Artificial Sequence
  ENSG00000226419_87 (sequence is synthesized)
tagcaaagaacatttcctcaaagaaacggagtatttttttctgtaacaatgtaactttctgtctttcattcttcaaaatgtatcactataaatttcctacaaaaagagctatttcttctc

SEQ ID NO: 825544 - DNA, 120 bp, Artificial Sequence
  ENSG00000226419_88 (sequence is synthesized)
tcagtatcatacagattgatttgtatagatgtatatgtatggctgttaaattgtttgttggtataaaatggtgagtgtcagtataataatgatgataataaatagcggctaacatttaaa

SEQ ID NO: 825545 - DNA, 120 bp, Artificial Sequence
  ENSG00000255229_0 (sequence is synthesized)
taaagcattcctttcagctacgatacaacagaagcaaatatttgccactggaaaaaatattcaaagacactcttaggttaatctatagctgatgacagtcagtctagtctacatagcaag

SEQ ID NO: 825546 - DNA, 120 bp, Artificial Sequence
  ENSG00000255229_1 (sequence is synthesized)
cagcttcaagatatgattacttagctaagagggaaatgggacgtgactgctgcctcattcccacgcctctctggacctgataatttagaggaagctcacattcgcaagataaaaattttc

SEQ ID NO: 825547 - DNA, 120 bp, Artificial Sequence
  ENSG00000247675_0 (sequence is synthesized)
ctctggaccagacgccgcctgcacgggtggggacgctggtcgctgccgggggcaagtctgccgactccagaaagaaaggcgaaagaatagattgtgaagctaagtgctgtgagggaaacc

SEQ ID NO: 825548 - DNA, 120 bp, Artificial Sequence
  ENSG00000247675_1 (sequence is synthesized)
agaggcagctgagatgtcgtggaagtaacagcgaatgaagccaggatgctggattctgaccttggaactgttctgaagacacaggatctcattatgttacccaggatgatctcaaaccca

SEQ ID NO: 825549 - DNA, 120 bp, Artificial Sequence
  ENSG00000247675_2 (sequence is synthesized)
ctcccaaagtgctgggattacaggaggctgtttgatgcaagactcccacctgcgggtatcatagtccagggtaaggccattgggccaacccaggtctgtgttgatgaggaccttccgctc

SEQ ID NO: 825550 - DNA, 120 bp, Artificial Sequence
  ENSG00000247675_3 (sequence is synthesized)
atgaggaccttccgctcagaaccatccaagtttgcccgttcgatcttggcaatgtggccccagtctgtccagaagaggtacctgagacacaacagtgccatcatcatcaaggcatgggaa

SEQ ID NO: 825551 - DNA, 120 bp, Artificial Sequence
  ENSG00000247675_4 (sequence is synthesized)
gacagcacccagaggttgagagaacacagaggacccactaacaccatctttccacccagcccttcttccctggatctctcttctgctggccataaacttaccccttcctggggaaaacag

SEQ ID NO: 825552 - DNA, 120 bp, Artificial Sequence
  ENSG00000247675_5 (sequence is synthesized)
caatggcccggggctcatccaggctattgttgatcagtactttgcggcaggaaccatccagcctggacgcctcaatggtatttcgacctgtgtctgtccagtacaggttcctggccaccc

SEQ ID NO: 825553 - DNA, 120 bp, Artificial Sequence
  ENSG00000247675_6 (sequence is synthesized)
gatagagaccaggtatctatgagtacattcctcagcacccagcatgatagatgttcaataaaataattgcagaatgaaggaaccagttcttaggaggacacagtatttcctgctaactgg

SEQ ID NO: 825554 - DNA, 120 bp, Artificial Sequence
  ENSG00000247675_7 (sequence is synthesized)
acatagtggcggttgccaggggatgtcttgctagaagacaagtttatcattccccacatacctttgggaagagacaaggattgctaggtggtgatgataagaaacgcagatttgtcaaaa

SEQ ID NO: 825555 - DNA, 120 bp, Artificial Sequence
  ENSG00000247675_8 (sequence is synthesized)
tggtgatgataagaaacgcagatttgtcaaaaccaacctgtgcattttttaaaagttaaaaacaattttaaatacaagtagatatgaggtttcattatgttgcctaggctggtcttgaac

SEQ ID NO: 825556 - DNA, 120 bp, Artificial Sequence
  ENSG00000247675_9 (sequence is synthesized)
tcccaaagtgctgggattataggcgcgagctaccacgccagaccctaattgtgcacttttgcaaaggccctatgggcaggagggaactctacctcagaatggggagcatgtcactgtcac

SEQ ID NO: 825557 - DNA, 120 bp, Artificial Sequence
  ENSG00000247675_10 (sequence is synthesized)
ctaggggacttccctaaactgtatatgcctacctgtccccagtttgagattctaatacatcccttggggagagcaaaggggaatgttccctgttcctccatgtgagaatatctgccatgg

SEQ ID NO: 825558 - DNA, 120 bp, Artificial Sequence
  ENSG00000247675_11 (sequence is synthesized)
taaaccactcttactggtggcaggacatcatattcctaagctgtgttagggccacaaatttaaagactaaaaataaaacaacgaaaaaataaaaaacaacagctttgtaaaccaccataa

SEQ ID NO: 825559 - DNA, 120 bp, Artificial Sequence
  ENSG00000214719_0 (sequence is synthesized)
gggttcgcgtgctcttctgagctgtggtcgtcatggaccggaagcgtgtgcggcgcgcctgccttgaggccagcatcagggaagggtgtcccaggtgcaggcgaagcttccttcaggtgc

SEQ ID NO: 825560 - DNA, 120 bp, Artificial Sequence
  ENSG00000214719_1 (sequence is synthesized)
gagccggcaggtaacccgatcgcctcccccaggtgagtctccgatggaggtgtcaactacaagaccaggagcagagcagtcctggggctttgctggaaccattggcgtgggaatgctgtc

SEQ ID NO: 825561 - DNA, 120 bp, Artificial Sequence
  ENSG00000214719_2 (sequence is synthesized)
tcttccctcgcccgagagacgccagattcccagcgggcagcggactcggttctaaccttcctcgccccagcctctaggagcgctctgcacgcagtgggcgtctaataaatgcagtcggcc

SEQ ID NO: 825562 - DNA, 120 bp, Artificial Sequence
  ENSG00000214719_3 (sequence is synthesized)
gaagaagcaatttgctctcaggtctgggagtcagcaccggaatcagaatgtcctaagaaggaaagaaaactgagcgagccgggcttgggtgccgtgctgggcagtgaatgaatgaacctt

SEQ ID NO: 825563 - DNA, 120 bp, Artificial Sequence
  ENSG00000214719_4 (sequence is synthesized)
gccctggggttaacactccagtgggatgaacagacaaaccccacaagcactgcatacgacagcattctttccatctctcacctcctcatgcctcctgtggaaaaaatgaatgaacagatg

SEQ ID NO: 825564 - DNA, 120 bp, Artificial Sequence
  ENSG00000214719_5 (sequence is synthesized)
agaaaagttggagctggagaaagaccgtgttcctcgtgttctgtgagacctgggaaggctgctaaaacccagggagcaggagttctcctccctccatccttatccacagtctgggtccca

SEQ ID NO: 825565 - DNA, 120 bp, Artificial Sequence
  ENSG00000214719_6 (sequence is synthesized)
tccagaccctcctctccaaaccgggggtttgcgacaaagcaggtgagggaggcatttcattccagagcagaagaaggggtttcctcccccatcccactcccgtttcatttttaaggggaa

SEQ ID NO: 825566 - DNA, 120 bp, Artificial Sequence
  ENSG00000214719_7 (sequence is synthesized)
aagcagctccccatacggtgaggcaatgaggcggaccagcaggttcccggggatctctgcagccccgttgccataacaaccgaactcactcgcagcctctgataggggagtcagctggga

SEQ ID NO: 825567 - DNA, 120 bp, Artificial Sequence
  ENSG00000214719_8 (sequence is synthesized)
ccacagcttgggcaggaaagggatgagggagtaggaaagaaacttcaagatcaaccactggccctcacaccgagctgcgcacaccccaaggccaagggaggctggaaacccttgtcatcc

SEQ ID NO: 825568 - DNA, 120 bp, Artificial Sequence
  ENSG00000214719_9 (sequence is synthesized)
ttgggaaatgggggagggcactggtacccctgggacctccctcctgaatctgggcagctttaaacattttttttccaactttggaagacagttgtacaacctcgaaggagaggaggtgtc

SEQ ID NO: 825569 - DNA, 120 bp, Artificial Sequence
  ENSG00000214719_10 (sequence is synthesized)
ctcgaaggagaggaggtgtcacgattcacaaagcgtatggatcacacatggctctaggggacattctctttgctctgttttattttgagatagggtcttgctctattgcccaggctggag

SEQ ID NO: 825570 - DNA, 120 bp, Artificial Sequence
  ENSG00000214719_11 (sequence is synthesized)
ctctattgcccaggctggagtccagtggcatgatcacaccttactgcagcctcaaattactggactgaggtgatcctcctgcctcagccatgtgagtagctgggactacagacatgcacc

SEQ ID NO: 825571 - DNA, 72 bp, Artificial Sequence
  ENSG00000214719_12 (sequence is synthesized)
gttgggattataggcatgagccactgcatccagcatcatttcttttcattattattatgagtggtgtgacct

SEQ ID NO: 825572 - DNA, 85 bp, Artificial Sequence
  ENSG00000214719_13 (sequence is synthesized)
gtgcgattacaggtaccctccacaatgcctggctaatttttttttctttttgagacggagtcttcctctgtctcccaggctggag

SEQ ID NO: 825573 - DNA, 74 bp, Artificial Sequence
  ENSG00000214719_14 (sequence is synthesized)
attacaggtaccctccacaatgcctggctaatttttttttctttttgagacggagtcttcgaacctctgcttcc

SEQ ID NO: 825574 - DNA, 60 bp, Artificial Sequence
  ENSG00000214719_15 (sequence is synthesized)
caggcaggcgggtctcaaactcctgaccttataatccgcccacctcggcctccaaagtgc

SEQ ID NO: 825575 - DNA, 69 bp, Artificial Sequence
  ENSG00000214719_16 (sequence is synthesized)
cgtaagccaccgtccctggcctaaaggcaagtctcgaacttatgacctcaagtgatctgctcaccttgg

SEQ ID NO: 825576 - DNA, 66 bp, Artificial Sequence
  ENSG00000214719_17 (sequence is synthesized)
ttttttttttttaatgaagacagggtctcactacattacccaggctggtctcgagctcctggcctc

SEQ ID NO: 825577 - DNA, 120 bp, Artificial Sequence
  ENSG00000214719_18 (sequence is synthesized)
cctcctgagtagcttggattacaggcacaagccatcatgactggcttcctctttttttttttttttaatgaatatggtaaagtgcacaaatcataaatttcagcgtggtgaatttctaca

SEQ ID NO: 825578 - DNA, 120 bp, Artificial Sequence
  ENSG00000214719_19 (sequence is synthesized)
agtgcacaaatcataaatttcagcgtggtgaatttctacacatgtatacccatgtatccaccatgcagaccagaagaacatatttgtccctccaggaaattcccaaatgctctttctcag

SEQ ID NO: 825579 - DNA, 120 bp, Artificial Sequence
  ENSG00000214719_20 (sequence is synthesized)
tcaatatcctccaatttgacattttcatcatagattagttttgcctacccctgaactttgtgtaagtggaaatacatggtttggcatcttgcttttatgcaacattgtatctgtgagaat

SEQ ID NO: 825580 - DNA, 120 bp, Artificial Sequence
  ENSG00000214719_21 (sequence is synthesized)
ctattgtcatgtctgttttcctgttctttttctttgttgtataatattccattgtggagatgtatcacaatgtatttatcttactgctgatagatatttgagttgtttgcagtgaatggt

SEQ ID NO: 825581 - DNA, 120 bp, Artificial Sequence
  ENSG00000214719_22 (sequence is synthesized)
agcattttaaaatataataggtatattgaaaagtctgattcagttacaatcagtgtatggaatcacaagaagatccataagaaacaaggtgctggatttctccgttgtgttcgtcttttt

SEQ ID NO: 825582 - DNA, 120 bp, Artificial Sequence
  ENSG00000214719_23 (sequence is synthesized)
ccagtgccatcaaccacctcaaagacactggttaggttggatttatgcaaacttgggccaaaggacagttagaagacagtagctgaagaagcatctgtagggaatccagaaggagcattc

SEQ ID NO: 825583 - DNA, 120 bp, Artificial Sequence
  ENSG00000214719_24 (sequence is synthesized)
atgaagatgttacaagcccggaagcagcacatgagcactgagctgactattgagtcggaggcgccctcagacagcagtggcatcaacttgtcaggctttgggagtgatcagcttgaaatt

SEQ ID NO: 825584 - DNA, 120 bp, Artificial Sequence
  ENSG00000214719_25 (sequence is synthesized)
aatgttcagaaacacatgtgcaagggagctgtgccaagctcatgtcgcgaacaggcctcctgatgaagcttctcagcgagcagcaggaagcaaaggcattgaatgtagaatgggatacgg

SEQ ID NO: 825585 - DNA, 120 bp, Artificial Sequence
  ENSG00000214719_26 (sequence is synthesized)
accaacaaaaaacaaattatattaatgagaacatggaacagaatgaacagaaagagcagaagtcaagtgagctcatgaaagaagttccaggatatgactataagaacaaactcatcttcg

SEQ ID NO: 825586 - DNA, 120 bp, Artificial Sequence
  ENSG00000214719_27 (sequence is synthesized)
caatatctgtgactgtcatactaataattttgattataattttttgttttatagaggtaaagacaataattaattcaggttttcaaaatacaatcctgtgtttgtgtggattcagaatcc

SEQ ID NO: 825587 - DNA, 120 bp, Artificial Sequence
  ENSG00000214719_28 (sequence is synthesized)
gaggttggatttatgcaaacttgggccaaaggacagttagaagacagtagtaagtcttcagtccagggaccaaatcggcacaggaggacaagttgtggactgcagtcatttatttgataa

SEQ ID NO: 825588 - DNA, 120 bp, Artificial Sequence
  ENSG00000214719_29 (sequence is synthesized)
cttctgtcatttaaggctgaggtgtgctttgttcttttactgcaatgtatattccaggattgttaaaggatcctcgcttccaggaggtctctgtgaaataaaaccaagttaatcccacta

SEQ ID NO: 825589 - DNA, 120 bp, Artificial Sequence
  ENSG00000214719_30 (sequence is synthesized)
gagagagggaggaacggggtggagggagggaagcgtgtgcaggggccaggagcgccaggctgctcgggcttcccggcccccgcagcccgccaggagctgtggccccgctcgtgccaaggc

SEQ ID NO: 825590 - DNA, 120 bp, Artificial Sequence
  ENSG00000214719_31 (sequence is synthesized)
agaggcctgccctcctgctgctggcgctgtcacctccccgtgctcctgcctcctgagtccctgagggcctcctgtcatctggaactggaaatgttagtgaagtgacgttttgtgaatatt

SEQ ID NO: 825591 - DNA, 120 bp, Artificial Sequence
  ENSG00000214719_32 (sequence is synthesized)
tattggcctttgcgtctttgtcttcattttcagtgctggcttttctgttgggtcatttgtattcttacgttgatttgaagaatttaaaaaggtattctataaattaatcctttatggggt

SEQ ID NO: 825592 - DNA, 120 bp, Artificial Sequence
  ENSG00000214719_33 (sequence is synthesized)
catttgtagtgcagatagttgtttcttagtctggtcattgtaccttaattatatttcacatttctttcttgctggtaaataagaagctaattgattttatagattgattttgtatcgtgt

SEQ ID NO: 825593 - DNA, 120 bp, Artificial Sequence
  ENSG00000214719_34 (sequence is synthesized)
tacctggcttaattcacatattcatagccatcatttttggattgtggtgggtttttcatgtacttatgtacatgtagttatgtacttacgtacttacgtacttaaatacttacgtactta

SEQ ID NO: 825594 - DNA, 120 bp, Artificial Sequence
  ENSG00000214719_35 (sequence is synthesized)
gtgtcagccacgcgtgtgtctccatccttgtgcctgaagcctgtatcttctctccagtatcaccatcccgtaatgactgaagcccacgtctgcccttgtgtattgtcacctggtctgtcc

SEQ ID NO: 825595 - DNA, 120 bp, Artificial Sequence
  ENSG00000214719_36 (sequence is synthesized)
tctgcctgcactttatgccccctgtcagaagtctccatttcttggtcctgcagcccgtgccagccgtgtgagtctccatcctgtgtgcttgcagcacattgcttgccttgaatgttgcca

SEQ ID NO: 825596 - DNA, 120 bp, Artificial Sequence
  ENSG00000214719_37 (sequence is synthesized)
tctccttagccttcaggcagtagcagtcctccagtgcctcaatccctgtgtttgcagcccattctgatgtttttgtccgtctgtcccctgagcttctgcccatgccagcttatgtttgct

SEQ ID NO: 825597 - DNA, 120 bp, Artificial Sequence
  ENSG00000214719_38 (sequence is synthesized)
acattctctgtccccctaatccgtgtccacagtcagtgttttcatccatgctttttgggccatgtctgcactcgtgtgtctccttcccctgtgccttcagcccatttctgtcctttttct

SEQ ID NO: 825598 - DNA, 120 bp, Artificial Sequence
  ENSG00000214719_39 (sequence is synthesized)
ggatcatttctcccgggagactatgcccaaaactcctatccccagtgtttgtacgtgcagccagtctatttcgttgagtatctccgtctgttgttactgcagcagaggcgtgtcattgag

SEQ ID NO: 825599 - DNA, 120 bp, Artificial Sequence
  ENSG00000214719_40 (sequence is synthesized)
tgtgcctgcttcccatgcctgtcttcctgtgtctccagcccttgtccatgcagcccacattaggactcttgtgactccacccttcagcctacagccacatctaccttcgggtatctttat

SEQ ID NO: 825600 - DNA, 120 bp, Artificial Sequence
  ENSG00000214719_41 (sequence is synthesized)
cagcgagctccctttttgtctggatcccctgtgattgtagcccaggtcttctctcctgtgcctgcagcccgtgtctgcccttgaatgtccccatcctctgtgcttgtcacccactggcca

SEQ ID NO: 825601 - DNA, 120 bp, Artificial Sequence
  ENSG00000214719_42 (sequence is synthesized)
ggcctagcatgtttccactctgtgcctacacccatgtctgcctccagggtctccactcatggtgccacagtttggttcccggtccctatcctcctggggtggattctggcattgtgttgg

SEQ ID NO: 825602 - DNA, 120 bp, Artificial Sequence
  ENSG00000214719_43 (sequence is synthesized)
gagggagaaggtgacccatgaaagcgaagcctggaatgatgtaatgggcaaggaggctgccattcagcaggctgcacagtggcagagaagacatggccagtcagaatcctccctgcatcg

SEQ ID NO: 825603 - DNA, 120 bp, Artificial Sequence
  ENSG00000214719_44 (sequence is synthesized)
gggcactcacgtggggctgtgcctggtgtggggagtaaggggaagctggagtaggaggtctggagccacctggccctcttgggcctgagaccctccccactgcaggggctccatcacttc

SEQ ID NO: 825604 - DNA, 120 bp, Artificial Sequence
  ENSG00000214719_45 (sequence is synthesized)
cctggtggtcctgcctcctgggatcctgccctgcagtgtttctgcagggatcctctcacctggaacttgcagtggcgggtttcatgtgaggtagagtttagcaaatgtttattggcgtct

SEQ ID NO: 825605 - DNA, 120 bp, Artificial Sequence
  ENSG00000214719_46 (sequence is synthesized)
gggccttacttttcttcatatgctttgctcattttgtgcgtgtttttgtagggtcctttttttatatttatttgaaggatttatcttaaatctgcaaattgatcctttattggctcattt

SEQ ID NO: 825606 - DNA, 120 bp, Artificial Sequence
  ENSG00000214719_47 (sequence is synthesized)
ttgtcatagatacttgttctctagtttgatcattattttctattggtttcatactagtatatagtaatctggttgataacaataatgtatccagtaagttattaattgaaacagttttgg

SEQ ID NO: 825607 - DNA, 120 bp, Artificial Sequence
  ENSG00000214719_48 (sequence is synthesized)
ggtttccaaggattgtctaggcatgtaatagtgtcatatacacataatgacaattttttttgtttaaaaattaatcctaatgcctttttatttcctactgtattgtttctccactacaat

SEQ ID NO: 825608 - DNA, 120 bp, Artificial Sequence
  ENSG00000214719_49 (sequence is synthesized)
gctgattaaagagtgatagcaggcatcctcgtctgttcttgcactgggggaaaaagcttcccataattctctgttagttatgttatttgttattggctagtattagactttatcagattt

SEQ ID NO: 825609 - DNA, 63 bp, Artificial Sequence
  ENSG00000214719_50 (sequence is synthesized)
tgttatttgttattggctagtattagactttatcagatttcatcaaattaaggaagttgtcgc

SEQ ID NO: 825610 - DNA, 120 bp, Artificial Sequence
  ENSG00000214719_51 (sequence is synthesized)
cctgcctcagcttcccgagtagctggcagggaaaacccagctgcagcctagacctagcccagatagtaaattagcagggctgggagtctctgtcatatcagcagtcatatgtcttaaaac

SEQ ID NO: 825611 - DNA, 120 bp, Artificial Sequence
  ENSG00000214719_52 (sequence is synthesized)
aaaccagaatctacccagattatatatatatatcttgtatctgccgctgccattaccttcttttcactttatgtcaaaaaaaggaaaagaatcccagcactgaggcaggaggattgcttg

SEQ ID NO: 825612 - DNA, 85 bp, Artificial Sequence
  ENSG00000214719_53 (sequence is synthesized)
gcaggaggattgcttgagcccaggagtttaagtctgcagtgagctgtgatagcaccactcgaaaaaaagaaaagaaaagaaaacc

SEQ ID NO: 825613 - DNA, 120 bp, Artificial Sequence
  ENSG00000214719_54 (sequence is synthesized)
gatataatagcaaaatttctcccacccaaaactatgtcaacaattggatgtactcactgagtcaccccttactctgccactaatttatttccttgttgcttaaatgatgagagacatata

SEQ ID NO: 825614 - DNA, 120 bp, Artificial Sequence
  ENSG00000214719_55 (sequence is synthesized)
aagacagccaaaagagagaagtattgtcttgtagacttactagattcacatagtatcatccttctccagtgtgtaaggtgttgtctaaataggtccagttaaagaactacagggtagcca

SEQ ID NO: 825615 - DNA, 120 bp, Artificial Sequence
  ENSG00000214719_56 (sequence is synthesized)
tttttaaaaaaaaattttggccacgttttcaaattcacaggggagggggaatgtctcatactccagccctcctgagcctaggccctctgtgagatgtgtcaccatttcttggacaccata

SEQ ID NO: 825616 - DNA, 120 bp, Artificial Sequence
  ENSG00000214719_57 (sequence is synthesized)
tgagacattccccctcggattagagatgctcaacctgcatcaacaaatctaaagcctgcatctggctaccctggggcgagtcctgtttacagtgcctattcctggagctcgcctcttttt

SEQ ID NO: 825617 - DNA, 120 bp, Artificial Sequence
  ENSG00000214719_58 (sequence is synthesized)
gccttttgtttgattatgtgatgtattacttttcccagcaggccagtgctagcatactggaagagggatttaataagctggcacccttgatgctatgctcctaatccaaccttatttgcc

SEQ ID NO: 825618 - DNA, 120 bp, Artificial Sequence
  ENSG00000214719_59 (sequence is synthesized)
tcattggccatttccattatggtggcagccctccattccagccacagcagcccctcagcgtcccccagtcacactgtccccattgctgctcatctgtgcctttgtccatctacaatgccc

SEQ ID NO: 825619 - DNA, 120 bp, Artificial Sequence
  ENSG00000214719_60 (sequence is synthesized)
tctacaatgcccttatttcactctgcctgtgggagtcctgtgaatctctccaaagccaactcagttcatctttctgcttgaaaccttccctgaataggccaggtgcggtggctcacgcct

SEQ ID NO: 825620 - DNA, 74 bp, Artificial Sequence
  ENSG00000214719_61 (sequence is synthesized)
tcgagaccatcctggctaacacagaccatgtgtcgtcccagctacttgtgaggctgaagcaggaaaatggcatg

SEQ ID NO: 825621 - DNA, 120 bp, Artificial Sequence
  ENSG00000214719_62 (sequence is synthesized)
cgggcgtgtgtcgtcccagctacttgtgaggctgaagcaggaaaatggcatgaacctgggaggtggagcatgcagccagccaagatcgggccgctgcactccagcctgggggacagagcg

SEQ ID NO: 825622 - DNA, 120 bp, Artificial Sequence
  ENSG00000214719_63 (sequence is synthesized)
gggccagtcagactgcgcccgacaggtgatggggagcggcggccgggctgggcagccgccgggtgggcgagctggcgcggggtacctgttgacttgggaagggccaggatcgcgatcaat

SEQ ID NO: 825623 - DNA, 120 bp, Artificial Sequence
  ENSG00000214719_64 (sequence is synthesized)
atgaacagacaaaccccacaagcactgcatacggatgtttagcagcatctctggcctctgcccaccagatgccaggagcacaaccacagttttgtcaagcaaaagtgtctctggacatta

SEQ ID NO: 825624 - DNA, 120 bp, Artificial Sequence
  ENSG00000214719_65 (sequence is synthesized)
ccaaatgtcacctgagtacaaaaatcacaccagttgagaaccactgctctctgatgattcactatgatctgtgtaataattctcacactaatctttgctagagacaaaaaggacttgcta

SEQ ID NO: 825625 - DNA, 120 bp, Artificial Sequence
  ENSG00000214719_66 (sequence is synthesized)
aaggacttgctatataattttagtacctttctactggtcaaattttaatcatatttcaaaatgaatagcaaagaggtttataatcaagttttataaaaattccaaatgtaataaagttat

SEQ ID NO: 825626 - DNA, 120 bp, Artificial Sequence
  ENSG00000247679_0 (sequence is synthesized)
agtgcaggggtggtggagaggggactgtgccagttccctggacaatcccagctgcttcatcttggactgacatggacaccaggcagtaacaccagctcttgggagttggtgggaacaggt

SEQ ID NO: 825627 - DNA, 120 bp, Artificial Sequence
  ENSG00000247679_1 (sequence is synthesized)
gtaatatcaaagctcccagctctgcactctcctgtcacataggaagacctcagaaaatggaggttccttcctttccacctgcactgggggagtgcaatgagcagaagaaaagcgaaggtc

SEQ ID NO: 825628 - DNA, 120 bp, Artificial Sequence
  ENSG00000247679_2 (sequence is synthesized)
cctccaccttctgagatcagctgacacctgagcttaggtgcatccctagccctgcagcctgttgcttcccttgaccgccacccccacctccatcttcaaggctgtgctgggcactccagg

SEQ ID NO: 825629 - DNA, 120 bp, Artificial Sequence
  ENSG00000247679_3 (sequence is synthesized)
ctgggcctgacgcgttccaaatctgcagctcccctcactctgcatcctgggcctccaccactctccaggagagtgggagacgcctgagccatgggtggcgagaagcggcagtcctgtgcc

SEQ ID NO: 825630 - DNA, 120 bp, Artificial Sequence
  ENSG00000247679_4 (sequence is synthesized)
gcctcagtgccccacttgcctccttcgtggaatggacttgacatccctgccttgctggccagggcgtggccgaaacctacccaggatgtaggagcacctggcacagcgcttggccagtga

SEQ ID NO: 825631 - DNA, 120 bp, Artificial Sequence
  ENSG00000247679_5 (sequence is synthesized)
ggcggtggttgcaataataataaccatcccttgttgaacattcaccagataaccaaattctccacaccgcatttcacttaggcctccctacctaagagctgggtcctaattcactggttc

SEQ ID NO: 825632 - DNA, 120 bp, Artificial Sequence
  ENSG00000247679_6 (sequence is synthesized)
tgtacatcaggaaggcaaagcacagacagagcacaccaccacctgcagctgtctcctgcctccagtgcatcagagtctggagcgcgttgcttctctggagggagataaagacacagtggc

SEQ ID NO: 825633 - DNA, 120 bp, Artificial Sequence
  ENSG00000247679_7 (sequence is synthesized)
tcctggcttttgtctctgccatttctactaaaaccactctgctcaaggctgtcatcagtgtctccactgcccagccctggactgtcagagccactccgggacatctgcaccagatgcatg

SEQ ID NO: 825634 - DNA, 120 bp, Artificial Sequence
  ENSG00000247679_8 (sequence is synthesized)
agtttcctgatacagcgaaatctcagcaggagttgacacccacctgcctggtgctctgggatgaatttctgcacagatgcaacctctgtgggtggaagccaggatgaagtatatgcatct

SEQ ID NO: 825635 - DNA, 120 bp, Artificial Sequence
  ENSG00000247679_9 (sequence is synthesized)
gtgaagactggccttccatctgttttctgatgcaaccaaaatgcttcagggctcgtcttatctggaggtttgatggctacagacgtgaggggcttccaggtagagctcagacctgagact

SEQ ID NO: 825636 - DNA, 120 bp, Artificial Sequence
  ENSG00000247679_10 (sequence is synthesized)
tctggtcccctgtctggacatctgtatgaagacggagaagcaccagccaacctctccacaaccctcaccaagttctcatggaacatcctctgatggtccctctcggtgctgggttctggc

SEQ ID NO: 825637 - DNA, 120 bp, Artificial Sequence
  ENSG00000247679_11 (sequence is synthesized)
aggagaaagagaagtcagggaacagaagagctgctctgccaaagtcatacccttcttggagacacagggaactccatctctcattctcactagcaatttgctgtggcaactcaaatgttt

SEQ ID NO: 825638 - DNA, 120 bp, Artificial Sequence
  ENSG00000247679_12 (sequence is synthesized)
ttccagatggaacataagcagacgtgatgtgtttgccttccaggtctaacccatgcaaagcctcctgggaacacacctcacgctattttctattccatcaggtggatatggatgatgatt

SEQ ID NO: 825639 - DNA, 120 bp, Artificial Sequence
  ENSG00000247679_13 (sequence is synthesized)
aggaactagggtgaggtggagccagaaaacacaaggagcctggatccctgaatgaccacatggacatacacatgctgaagactgccttgtaagcaggaaataaacatctactgtattgaa

SEQ ID NO: 825640 - DNA, 120 bp, Artificial Sequence
  ENSG00000247679_14 (sequence is synthesized)
ctgtgcccagccagttttctctttcaacactttacatatttcacccttttctcttcttgcttgcgtggtgtctgacaagaaggctgtaattcttattcgtttcctgtataagtaagctgg

SEQ ID NO: 825641 - DNA, 120 bp, Artificial Sequence
  ENSG00000247679_15 (sequence is synthesized)
gtttttttctatggcttctttcaagattttgtgtttgtctctggttttctacagtttgaatatgatatatgtaggtgttgatttttttttttaagtatgtatcctatttggtgttctcta

SEQ ID NO: 825642 - DNA, 120 bp, Artificial Sequence
  ENSG00000247679_16 (sequence is synthesized)
agcttactggatccgtggcttggggtctgcctttacttttggaaaattgggagccattataactttcacgatttttctgctctgttctccctttcttctccttgtggtgtttcaattgtg

SEQ ID NO: 825643 - DNA, 120 bp, Artificial Sequence
  ENSG00000247679_17 (sequence is synthesized)
catataccttttgaaaatatcccacagttcttgtataatctgtttttttccccatttttttctttgcattacagtttgggaaggttctattaacataccttcaggctgattttttcctca

SEQ ID NO: 825644 - DNA, 120 bp, Artificial Sequence
  ENSG00000247679_18 (sequence is synthesized)
tctatgtccagtctactgatggtcccatcaaatgccttcatcatctctgttatagtgttttctctttctctttctttccttcctttttctttccctccttccctcccttctttctttctt

SEQ ID NO: 825645 - DNA, 85 bp, Artificial Sequence
  ENSG00000247679_19 (sequence is synthesized)
tcctttttctttccctccttccctcccttctttctttcttccttcttttgtttgttttgttgttgttgttgttgttgttttaagt

SEQ ID NO: 825646 - DNA, 88 bp, Artificial Sequence
  ENSG00000247679_20 (sequence is synthesized)
tgattctcatgcctcagcctccacagtagttgggattagatagttttaatacagactggacttcaccatgttgcccaggctggtcttg

SEQ ID NO: 825647 - DNA, 120 bp, Artificial Sequence
  ENSG00000247679_21 (sequence is synthesized)
aactcctgagctcaggcagtccacctgtctcggcctcccaaagtgctaagatggagaaagctgccatataaagagttatcttagggggaccagggcaagatctgagggatcagttagttg

SEQ ID NO: 825648 - DNA, 90 bp, Artificial Sequence
  ENSG00000249942_0 (sequence is synthesized)
gcagtggcaccatctcagctcactgcaacttccatctcctgggctcaaggaatcctcccatgaagtttgctgacgcctgatatggagcac

SEQ ID NO: 825649 - DNA, 120 bp, Artificial Sequence
  ENSG00000249942_1 (sequence is synthesized)
aagtttgctgacgcctgatatggagcactagaaagaaattatttttccaagcatcaacccggaagtcccagcataccgagggtggcagacatcatttcttcaatgaacttagtatttaga

SEQ ID NO: 825650 - DNA, 120 bp, Artificial Sequence
  ENSG00000249942_2 (sequence is synthesized)
aagatatcttcactccaagcatcaagtcttttctgtcctgcaaaagtcttaagtcaaaccagaatccactagtagagggcacctttggattcaacagtaaaaggagaatctacaaaacca

SEQ ID NO: 825651 - DNA, 120 bp, Artificial Sequence
  ENSG00000249942_3 (sequence is synthesized)
gggcagtgatgggtatagaagcctgaccttgctctaagttcaagcaatgattaatctagcttccctcctggtgggtgactgaggcctttgcctgaggacaactttaaagagatattgaat

SEQ ID NO: 825652 - DNA, 120 bp, Artificial Sequence
  ENSG00000249942_4 (sequence is synthesized)
gaagctatgatacctgtagcagttactgccattttggacccataaactgacaatccttaaacattaccaggagggcagagcggaaagaacattgatgtcatcactgagttgctggattac

SEQ ID NO: 825653 - DNA, 120 bp, Artificial Sequence
  ENSG00000249942_5 (sequence is synthesized)
cttactctagaaatagccaactctgcatgtttggttatttttttaaaaagtcttctttattatttacatcattttgaatgggctctaactctagctcttatagtaaaaagcatttgaact

SEQ ID NO: 825654 - DNA, 120 bp, Artificial Sequence
  ENSG00000249941_0 (sequence is synthesized)
gagggttctgccctcatgaccttttcaccttccggaggtcctgcctcctagccccatcaccttgcgggtccccatcgccctgttcttgcgacatcctgggaaagcgaccccggtggccga

SEQ ID NO: 825655 - DNA, 120 bp, Artificial Sequence
  ENSG00000249941_1 (sequence is synthesized)
ttgagcttccaggtatcctaaagtctggttcaaatgtagtaagtcccaaccgtactctgtgcagcacctgggcactgctgtgtggtggaatatcctgtcctgttctggttattgatcact

SEQ ID NO: 825656 - DNA, 120 bp, Artificial Sequence
  ENSG00000249941_2 (sequence is synthesized)
gatcattacataaggagcttctacacatgtgcaccattaaagacccaccacatcattatgctcttggattccactggccaggaagttggcaaggtggggaggctggcttatctctgatcc

SEQ ID NO: 825657 - DNA, 120 bp, Artificial Sequence
  ENSG00000229699_0 (sequence is synthesized)
gggagccaccacccctgccagcaaaatgtcttctgcaaggagaccctcttccaattgttcctttccagagcatagctctgactggtagagcctccgtcacagtgcgcaccctgactgcaa

SEQ ID NO: 825658 - DNA, 120 bp, Artificial Sequence
  ENSG00000229699_1 (sequence is synthesized)
aacagactaaatgaagacttggccatgcaagcaaggggaggtgagacctgatactgccagagaaggaatagggcactgtcaactcgctaactgggtcctagtattggctatgtaacccta

SEQ ID NO: 825659 - DNA, 120 bp, Artificial Sequence
  ENSG00000229699_2 (sequence is synthesized)
gacaagttactttacatttctagacctcagttcagcagttggaacacgtggactttggattttcttcttcctggaacttcctttatgcactcatgtttgttactcacccatgtatttatc

SEQ ID NO: 825660 - DNA, 120 bp, Artificial Sequence
  ENSG00000229699_3 (sequence is synthesized)
cattgtccatgtctgcttgtcagttttagttacctcctacccccacctgtccaaggtgctcttgtcctcagaagatcccactggcatgaataagacagacttggaaacttttatcctaga

SEQ ID NO: 825661 - DNA, 120 bp, Artificial Sequence
  ENSG00000229699_4 (sequence is synthesized)
taaaactggtctggaacacataaaaagtatttccccaacaattttgattcacttcaattcctgaaatctaacttctgactttcaaagaaaattccactttggcagctgtacaggtaccaa

SEQ ID NO: 825662 - DNA, 120 bp, Artificial Sequence
  ENSG00000229699_5 (sequence is synthesized)
caacagtttacccttacctggaagaagagccttggaggagaaaacacaccatgtcgtttactttcaactagggaaaatttcctagcagcagcagaaataaggcaaagtcccctgccagca

SEQ ID NO: 825663 - DNA, 120 bp, Artificial Sequence
  ENSG00000229699_6 (sequence is synthesized)
ccactcccaactcaggtcccacagccctgtcctccccaggtgcctgagccctgtctcccacccttcatacagtagaagtccagctgttaataccacttatgccagcaagactgcgcagca

SEQ ID NO: 825664 - DNA, 120 bp, Artificial Sequence
  ENSG00000229699_7 (sequence is synthesized)
aagcagaaatgaccctcagaagccaccttctctgacctggacaagaggatactgcatcccccgcccacttccatccccttacttccagcaataatagggaccaccacacaacctagaaga

SEQ ID NO: 825665 - DNA, 120 bp, Artificial Sequence
  ENSG00000229699_8 (sequence is synthesized)
tgctacctgtcttcagattcaagatggaagatattgtcatagtctactggggtctcctccctgaatctacagcccctcccagcttttcacccaggagacaacatggtttagacagagtgc

SEQ ID NO: 825666 - DNA, 120 bp, Artificial Sequence
  ENSG00000229699_9 (sequence is synthesized)
cctgcaagaacacagaacattcacatctctgcctcaatggaattcaaaaacttcattaacgtttctaggagcaaacattgtttaaaaaaattaacacatgaaaactgcttaaatcaatga

SEQ ID NO: 825667 - DNA, 120 bp, Artificial Sequence
  ENSG00000229699_10 (sequence is synthesized)
aaaatttgccagaattctttacagcacaactccacattctttgatgaagacaatcacattgtctgtttgtattttctccctaataatctccataaatcctaacaaagctcaccccttcct

SEQ ID NO: 825668 - DNA, 120 bp, Artificial Sequence
  ENSG00000229699_11 (sequence is synthesized)
ctggactttgaacctattccaagacctatgatgttttttttttctctctctgcttcccaatcaaacatatgtatccctgactggtcatgtctctgctctttgctggagatgtaaaaaagt

SEQ ID NO: 825669 - DNA, 120 bp, Artificial Sequence
  ENSG00000229699_12 (sequence is synthesized)
caagagagacaaagtcacagagagacaaaggacaaatggaggaaagtggagactgaatggtaaatccttggaaggaccctagaggcaatcaggggccacccaagagtgacaaggggacct

SEQ ID NO: 825670 - DNA, 120 bp, Artificial Sequence
  ENSG00000229699_13 (sequence is synthesized)
ggttcaagtcagaaggtcttctttttccctctggttgcccagtctcagtctctgatttcagctgcctccagacccacctctacatgaggcacctatccatttctgattagggactcgcca

SEQ ID NO: 825671 - DNA, 120 bp, Artificial Sequence
  ENSG00000229699_14 (sequence is synthesized)
tgcaaggaaggtgaggagagtacacaaaggagccatcagtgtcagggctgcaggagggatgagcatgtgacaggccctgcaaggttcatagatgtgtgagtgctcagcatctgggaccag

SEQ ID NO: 825672 - DNA, 120 bp, Artificial Sequence
  ENSG00000229699_15 (sequence is synthesized)
aattgtgagcctggctctgcacagagcccagtctgttggggatggaccccagagacagttattactgcagcagttctcacactacttggccttgaaaataatttacacacttaagattat

SEQ ID NO: 825673 - DNA, 120 bp, Artificial Sequence
  ENSG00000229699_16 (sequence is synthesized)
taaggaccctaagtagattttattcatgtgatttacatctattgatatttcttgtattaaaaattaaaactagaaaataacacattttacataagtagatattgcactagctggcagagt

SEQ ID NO: 825674 - DNA, 120 bp, Artificial Sequence
  ENSG00000229699_17 (sequence is synthesized)
gatgatgtcattgcatatcatctactctccggaaaattctaccatagactaatgaaaaaatatgagtaaaaaagtcaaataatgtcagcattatgattaaaattgttttgatctcactga

SEQ ID NO: 825675 - DNA, 120 bp, Artificial Sequence
  ENSG00000253949_0 (sequence is synthesized)
cattgctcctgttgctcgatcatctgaccaaagaagatggaaatccagcaggttttatccaaaggaactgagtctttggtggaccaacccagacagggggccacaatcagaaggttggtg

SEQ ID NO: 825676 - DNA, 120 bp, Artificial Sequence
  ENSG00000253949_1 (sequence is synthesized)
agccctgcctgcttgtgaacgagcatagatttcagcagctgagggtgtgatggctgtggaggtggtctgggccagtgacctgaggactggaaaatcattgacaatctgatatggaagatg

SEQ ID NO: 825677 - DNA, 120 bp, Artificial Sequence
  ENSG00000253949_2 (sequence is synthesized)
gctacacacaacgttatcgttcttcctggctcgtaagtgaagataagaggctatggcagtgagatttccatttgttgaaatgtatgctataaaaattcaatgttttcttgctagacccta

SEQ ID NO: 825678 - DNA, 120 bp, Artificial Sequence
  ENSG00000253948_0 (sequence is synthesized)
gatccggaagtggcgctccggggagaaggtggctgcggctgctggggccgctgcgccggcggcggttcccgatgtggaggtccgtcttgggtggggaggcacccaggtcgctggttcgat

SEQ ID NO: 825679 - DNA, 120 bp, Artificial Sequence
  ENSG00000253948_1 (sequence is synthesized)
gcagaggaagaaaccacacctagcacgtaaagccctgaaaaaatagaggtgtacagtagagttttccagaggctacatgacatgcagtatcacaacggaagcaaatataagaacccacct

SEQ ID NO: 825680 - DNA, 120 bp, Artificial Sequence
  ENSG00000253948_2 (sequence is synthesized)
gtctcctgttaaaatgcaaaatgtaaaacaataccactttgctaactgtttttgtttggggaaatatagttcataaaaatatttatgttaacatgtaatttaggttaaaataaattaata

SEQ ID NO: 825681 - DNA, 120 bp, Artificial Sequence
  ENSG00000253948_3 (sequence is synthesized)
aatatttgtaaattgtctgttttaatttctaatatggtaaatacagatagatataacccatataaacaaaacctgtttggggtcctcaataatattgaagagtgttatacaggggtccta

SEQ ID NO: 825682 - DNA, 120 bp, Artificial Sequence
  ENSG00000253948_4 (sequence is synthesized)
gctgctctaagtcttccttatccattaaagtccaaatgaaagctgggaacagtagctaatgcctgtaaccccagtgctttgggaggccgacataggaggattacttgaggccaggagttt

SEQ ID NO: 825683 - DNA, 120 bp, Artificial Sequence
  ENSG00000253948_5 (sequence is synthesized)
gagaccagacagggcaacatacggagaccctgttgctacaaaaataaatttaaaacgtagttggtcatggtggcacatgtctgtagtcctaactacttgggaggctgaggcaggaagatc

SEQ ID NO: 825684 - DNA, 120 bp, Artificial Sequence
  ENSG00000253948_6 (sequence is synthesized)
tgggtgacaaagcaagaccctgtctctgaaaaaataaataaaatagttttaaacttagaaaaaaaaggttcatgtcaaagccttcctactcgataagactttttgaccactgcaactaga

SEQ ID NO: 825685 - DNA, 120 bp, Artificial Sequence
  ENSG00000253948_7 (sequence is synthesized)
gaccactgcaactagagaggatcttgtctgtctctgaatactacacacttatggcacttacacacttatggctcttttttatcattcatctagtacagaccttgtgccaaaaaggaatat

SEQ ID NO: 825686 - DNA, 120 bp, Artificial Sequence
  ENSG00000253948_8 (sequence is synthesized)
gaaacgttagaagtcggcggtagagtgaaggaaagagcgttcgttatctcaggccgaaagcagtaagtccccaccaaagcggccgttcgcctcctcttagaaacagagaaaaactccagc

SEQ ID NO: 825687 - DNA, 120 bp, Artificial Sequence
  ENSG00000253948_9 (sequence is synthesized)
ggactcccagctccagctgcgacttcctcacaagtacaacacccttcgccaagcgaagtgagggaggaagacgtagtgaccagaagagagcgggtccctcagagtggaagaatgaagtga

SEQ ID NO: 825688 - DNA, 120 bp, Artificial Sequence
  ENSG00000253948_10 (sequence is synthesized)
ggcgggctccccttcggccgcagtagcccttcaccaacccagccaccccgcgaggccctcgcttcccggaacccagccggatctgccaccatagaaccaaagctagaagacctcccgtcc

SEQ ID NO: 825689 - DNA, 120 bp, Artificial Sequence
  ENSG00000253948_11 (sequence is synthesized)
cgctcccgctccctctgcactccaccctcggctcacacgccagagtaccgccgcgtcccctccacctccaagtccctggcacccgcccccgccggcagtgctgctcctgtaccgcgccac

SEQ ID NO: 825690 - DNA, 120 bp, Artificial Sequence
  ENSG00000253948_12 (sequence is synthesized)
ttccgggtgtgtcccacttggtgctcaaaacaaactgtccctccacggctgccactctacgcagccggaccggatttctcaggctggagaagctactctgcgcgtcttcgtgaaggagaa

SEQ ID NO: 825691 - DNA, 120 bp, Artificial Sequence
  ENSG00000253948_13 (sequence is synthesized)
ccacacctagcacgtaaagccctgaaaaaatagaggtcttcttttatggaaaaagatgcacgcaaagactataggccaagtacaacaacaagatattacagcaaaaggaacctctcagac

SEQ ID NO: 825692 - DNA, 120 bp, Artificial Sequence
  ENSG00000253948_14 (sequence is synthesized)
tgaaggtacccactatgcagactctggtgcttattatttccaagaacatcttatactttcactacagttttatgaactacatgtctccaaaatttatatgaatgataggtactcatcatt

SEQ ID NO: 825693 - DNA, 120 bp, Artificial Sequence
  ENSG00000253948_15 (sequence is synthesized)
ctgcaaattatttttttcccatacaacattatgtgcttgagattaatccatgctgatacgtttactgctaaacgggtcattttaactactatatggtgttctattatgtgaatattgatt

SEQ ID NO: 825694 - DNA, 120 bp, Artificial Sequence
  ENSG00000253948_16 (sequence is synthesized)
atttatttacccattctcatgctaggggacattgatttttttttagtttttctctattacaaacaatatttcagagaatattcctgcccatgtatctttctgcagatgtgtttgagtttc

SEQ ID NO: 825695 - DNA, 120 bp, Artificial Sequence
  ENSG00000253948_17 (sequence is synthesized)
ccatattcttactgagatggttggtcaagttatgtatttattttttcattttctttttttattttgccccgggcaggaaatgaagtgttaatcaagttgacaagagcatcatctttctat

SEQ ID NO: 825696 - DNA, 120 bp, Artificial Sequence
  ENSG00000253948_18 (sequence is synthesized)
ttctaaccttttctagatttaaacagatagaaatatggcagaattcttttagaagtcaagaagactaacataaaataaggagctttcagatggatcttgatcagaaccacataaaaatat

SEQ ID NO: 825697 - DNA, 120 bp, Artificial Sequence
  ENSG00000253948_19 (sequence is synthesized)
ggccatgtcctgtcatcgcattatgaaatttacaacacagcactgtcaatatgtgatgttgcaaaaacacagtgccacatggtaaacattgccgaggtctgtgaataaatccctctgaga

SEQ ID NO: 825698 - DNA, 120 bp, Artificial Sequence
  ENSG00000253948_20 (sequence is synthesized)
gcttatgactctttatgacccagttcacaaatgaaataacttttagagtagagaaacattgactttttagatcaagataatgggaaatgttaaattctgacccataacaccaactgaact

SEQ ID NO: 825699 - DNA, 120 bp, Artificial Sequence
  ENSG00000253948_21 (sequence is synthesized)
actgttttaatgctgtccttaaataggcaacatgtctattagtttaatttggtgttctaaatgctggatcttatgcaattcctttagccttgtatttaagatgatctatttggaaagata

SEQ ID NO: 825700 - DNA, 120 bp, Artificial Sequence
  ENSG00000253948_22 (sequence is synthesized)
ggttatgggaaaactttcttagtctcagcccctgcaattaaacagtttatgtttcctcattcaacaaatattaaaatataataaagaatatgaaagtatttatattatctacttaacata

SEQ ID NO: 825701 - DNA, 120 bp, Artificial Sequence
  ENSG00000253948_23 (sequence is synthesized)
gtttttttccctatattcattttcttatttagataaaagatgtagggcatgaacaatgcagtttcactgggaggtttaccttggtaaaaagacaggagctattacattctatcttgtcaa

SEQ ID NO: 825702 - DNA, 120 bp, Artificial Sequence
  ENSG00000253948_24 (sequence is synthesized)
tgatccatggataatgggtcagcaggggatttaagaactgtatctttcagttcttgccagagagatacatcaatgtgcactgatgtgagctataatatgacacaccttgcagaaccctca

SEQ ID NO: 825703 - DNA, 120 bp, Artificial Sequence
  ENSG00000253948_25 (sequence is synthesized)
aaacccttcaggcactctaagctgcttttatgaagatacgggactaaaggttgtcagttaaggatggtattttgtaaataatttcggtaacagaatgatttccctatttctccatattaa

SEQ ID NO: 825704 - DNA, 120 bp, Artificial Sequence
  ENSG00000253948_26 (sequence is synthesized)
attctaatgcataagaattaatcctcaggtttaaaagtccttagttttgttttgattatttccattacattagcagcagatctgtttttaccgatagggtaaaacagacccaatatatgc

SEQ ID NO: 825705 - DNA, 120 bp, Artificial Sequence
  ENSG00000253948_27 (sequence is synthesized)
gttggtttatacatacattattttatatatacattgtttattgttaagtgggggtggagggaagcaagttgaaaaatagtattacagtagatcctatttgtgtgtgattgtccagattag

SEQ ID NO: 825706 - DNA, 120 bp, Artificial Sequence
  ENSG00000253948_28 (sequence is synthesized)
ttggggtgggagcagataataagaaatttaccttatacacttatatactgtttgaatattttaaaataagtatgattgtttttatcatctaaaaaataagtaaatttacttttcaatgta

SEQ ID NO: 825707 - DNA, 120 bp, Artificial Sequence
  ENSG00000253948_29 (sequence is synthesized)
ttacagtcttctgtgtggtctttaaaattttaagaaagttttaagaaattaaattaacagtcttctgtagggtctttaaaattttgagaagttttaagaaaataaatgatatgtgtttca

SEQ ID NO: 825708 - DNA, 120 bp, Artificial Sequence
  ENSG00000253944_0 (sequence is synthesized)
acccggggcggctccttccgaaggctccactccagcggctcgctgcgggagaccaaggccagccgccgtcccaggggacggccctcggggaacctgaatgacgtgcgaggccgtacctcg

SEQ ID NO: 825709 - DNA, 120 bp, Artificial Sequence
  ENSG00000253944_1 (sequence is synthesized)
ctcggggcgctggactccgctcgggcgctcccgctctccgctcccgctctcgggtcccaatcccgacgctccgcgcgctcccggactaagtgcggacgcgccccacgccccccggcgcca

SEQ ID NO: 825710 - DNA, 120 bp, Artificial Sequence
  ENSG00000253944_2 (sequence is synthesized)
gacagcgctgcacctgttgccacgtgcgacgcggcgctcagcggctgccactgccgccggcgcacctggctgcaccgcgcgtcccgggaccacgctcgtccccgcaggagcccggggctc

SEQ ID NO: 825711 - DNA, 120 bp, Artificial Sequence
  ENSG00000253944_3 (sequence is synthesized)
gggccgcgtcagtcaacgaacattcgagatcctgtcatgtgtcagacactgtgcggagagctggagataaaactgtcaacaagatgaatgcagcctctaaaataaagagtttctaatcca

SEQ ID NO: 825712 - DNA, 120 bp, Artificial Sequence
  ENSG00000253947_0 (sequence is synthesized)
gtttccaaggaagactaagaaaactgcaaaattaaagtgcactgcaacatgaaatgctgctggtggccaggcgagatcgtggtgtcaaaaaggcaagatggaatctcacgctatcaccca

SEQ ID NO: 825713 - DNA, 120 bp, Artificial Sequence
  ENSG00000253947_1 (sequence is synthesized)
ggatggagcgcaggggtgtgatcatagcttactgcagcctccacatcctgggctcaagagattcttccatctcaacctcccagattactgggattataggtatgaaccactgcatctggc

SEQ ID NO: 825714 - DNA, 120 bp, Artificial Sequence
  ENSG00000253947_2 (sequence is synthesized)
cattttttaaagagaaaaatcaattgctgagggctttggatatactacatatgctattatctgtaaatggatgattttctgtgttatacatattattttagaatcaaaataagtctggcc

SEQ ID NO: 825715 - DNA, 120 bp, Artificial Sequence
  ENSG00000253947_3 (sequence is synthesized)
aataactgcactcaattctcttgcctcataaatgtaacatgtccaaaactgaacttttgttttctgccacaaaaacctgttccttcttcagcacatgacattgctattcacccagacatc

SEQ ID NO: 825716 - DNA, 120 bp, Artificial Sequence
  ENSG00000253941_0 (sequence is synthesized)
ggcctggtgaggccctcacagaccccctccctcacctgtgctgtctctggattctccatcacaactagtgcttcctgctggagctggatccgccagtcctcagtcaagggagtggatcag

SEQ ID NO: 825717 - DNA, 120 bp, Artificial Sequence
  ENSG00000253941_1 (sequence is synthesized)
cacaaattctaacccactcctcatgagctcagtcaccatctccagatccacgtccaagaaccaaattttcttttagctgagttctgtgaccaacaatgccacaaccttgtattactgtga

SEQ ID NO: 825718 - DNA, 120 bp, Artificial Sequence
  ENSG00000275005_0 (sequence is synthesized)
ccataagtgtaattggctgcctttcaataggacataacagacttcaagttaaatggaaactattaaagctcaaatgatttctgccgttgtttcatgacaaatgtacagttttattattat

SEQ ID NO: 825719 - DNA, 120 bp, Artificial Sequence
  ENSG00000275005_1 (sequence is synthesized)
gagtattcattcttgtacagtggtcgacagcgatttgaatatacatgattattcacatgcccgatgatctagaatggtatatatcatcacagttaaaagaggtaaccaaggtgacgttgc

SEQ ID NO: 825720 - DNA, 120 bp, Artificial Sequence
  ENSG00000275005_2 (sequence is synthesized)
cattagatgtagctacttcaaaaagcggggaaaagaagatgaattttaatgcatgggtaattgctcaacatgaccgcattcctaataaatttttgtatattagaaaaaaagaacagaata

SEQ ID NO: 825721 - DNA, 120 bp, Artificial Sequence
  ENSG00000275005_3 (sequence is synthesized)
tatttgtgtatgatgcatgaaacagaaaaaaaactcagatgaaatgcatgcaattaattttatggtaaaatcattttatgactatgcaccttataataaatataatttgttagagcacaa

SEQ ID NO: 825722 - DNA, 120 bp, Artificial Sequence
  ENSG00000271938_0 (sequence is synthesized)
taaagagtacagggcagctgtatttgctgagacgtggaaattttccggtgtattctaagtaataaagtgcagaagagtgtgagtagggctgtgtgtatgtggtatgtgtgtttgcatctc

SEQ ID NO: 825723 - DNA, 120 bp, Artificial Sequence
  ENSG00000271938_1 (sequence is synthesized)
gaaagaaaacttgcttttcaccgtactagaatcttctgcaccttttgaattttgccgtttatactatgtctttacctgtaaagaaaaaagaactttgaaataaagttgcatttgcttgaa

SEQ ID NO: 825724 - DNA, 89 bp, Artificial Sequence
  ENSG00000272420_0 (sequence is synthesized)
cacgcctggttaatttaaaaaaatttttttttcttttactcttaaactcctggtctcaagcaatctgcccacctgggcctcccaaagtg

SEQ ID NO: 825725 - DNA, 120 bp, Artificial Sequence
  ENSG00000272420_1 (sequence is synthesized)
acaggtgtgagccaccacgcctggccctctgttaatgtattaattataactctttgttttgttatttgagggattactttagggttttacaactcgttaagtaaaaggggatcatcataa

SEQ ID NO: 825726 - DNA, 120 bp, Artificial Sequence
  ENSG00000272420_2 (sequence is synthesized)
tcttttttattttattctttactcctggcaagctgtgacacagttattttcaagagatgtaatatactacttcatgcgtaagaactgtacaattatataccttttttgccagtcccaatt

SEQ ID NO: 825727 - DNA, 120 bp, Artificial Sequence
  ENSG00000272420_3 (sequence is synthesized)
ttatgcagttgttttcatacattttatgttcatatatgtaataaaattaataatacgttgttatttttatttaaatgaccacttaggttttaatgtgtacttaataaacagtaagcagtc

SEQ ID NO: 825728 - DNA, 120 bp, Artificial Sequence
  ENSG00000271930_0 (sequence is synthesized)
attgaactcaatttttgctgggaatgaagatgtaaatgttttgaaaaactagaatcgcattttcctaaattttaaaaatgattgttcttcaccaattccagatggattctttattctttg

SEQ ID NO: 825729 - DNA, 120 bp, Artificial Sequence
  ENSG00000271930_1 (sequence is synthesized)
ccaatgggttgcagatgcccactgttttaaccaagttggtttactgcgtatgaaatgaacatttgccgattaaagcttaaatattggaagaaatttctcctggggcattccacgcgtctt

SEQ ID NO: 825730 - DNA, 120 bp, Artificial Sequence
  ENSG00000271930_2 (sequence is synthesized)
ttgccacctctgtaaacaaacttcgtttagaaaacagcaggcgaaagcagactacacatgtagtcataattgaccaaaagtatgtacaaaactgtttaaaattggggaaagagtgattta

SEQ ID NO: 825731 - DNA, 120 bp, Artificial Sequence
  ENSG00000271930_3 (sequence is synthesized)
tgctggagaatgcagtctagacctgaattattttactttacggtgaaggtagttgtattgaatgtgttaagatgtgcaaattaagccggcgagcgaaccaaataaaaatactaaatgccc

SEQ ID NO: 825732 - DNA, 120 bp, Artificial Sequence
  ENSG00000271931_0 (sequence is synthesized)
agtgcgacaaggcaggccacgccccctcgctccgcctccgcagcttcgggtagacacacacaaacaaccagcttgctgcagcctggcacaaagagggcgcactgcgcaggcgctgccagc

SEQ ID NO: 825733 - DNA, 120 bp, Artificial Sequence
  ENSG00000271931_1 (sequence is synthesized)
gagctcttttgggaagaatcggtcccgcgaacaatgaaattgggtttccgccccaccctctttactcctccccagcacgcccctgcgcttcgccgggctagggagtggtggtactgaaat

SEQ ID NO: 825734 - DNA, 120 bp, Artificial Sequence
  ENSG00000271931_2 (sequence is synthesized)
ggtggggaagggagggggcagggggagggcggcaggaagaacgggggctgggaagaggggatgactttggcaaggccacggttgcctcctccgctgctgaccttggggaagtatccgttt

SEQ ID NO: 825735 - DNA, 120 bp, Artificial Sequence
  ENSG00000271931_3 (sequence is synthesized)
tattttcagcccaacataacagcgttatcattttaaaacaaagatttctaagtacgctgtaaggatttcttccctagcaatcgtgaagaaaatcagtctacatttaaattttatctactg

SEQ ID NO: 825736 - DNA, 120 bp, Artificial Sequence
  ENSG00000271933_0 (sequence is synthesized)
gaattctaggcaagtgatatacttctgggcccatttccccatctgtaacataaggattccgtgttcagactacagcgttgacccttagactacctgcttgaaagtgccccggatgcatct

SEQ ID NO: 825737 - DNA, 120 bp, Artificial Sequence
  ENSG00000271933_1 (sequence is synthesized)
taaaatgtaggctcctgggtctttctttgctcctaatgattctacccctaggaataagaccaagaacgtgtgttttaacgaacactccaaaagctaagaactattgctttaagatacccg

SEQ ID NO: 825738 - DNA, 120 bp, Artificial Sequence
  ENSG00000271933_2 (sequence is synthesized)
agcgtcctccgagctctgcaactgaactattaagggtcttaaaattcggcacccggcctttgggaaaacacccagcgcttttggaactttcgtgccattacatcatctcaacctatggct

SEQ ID NO: 825739 - DNA, 120 bp, Artificial Sequence
  ENSG00000271933_3 (sequence is synthesized)
gtcctgtatcttcctcagtactcagtccactggttggggccgaagaggtccagctcagagtgacctccatgtggcgtaacagcccagagtgggaatcccgcttctgacaggttagaagtg

SEQ ID NO: 825740 - DNA, 120 bp, Artificial Sequence
  ENSG00000271933_4 (sequence is synthesized)
accttgtgaggagtgtggatctctaagactcagatgtcgttgctataaaatggggaaaatactaccgaccctaatccaagggcttatgcctccgtgagcattgatgagtttgggtgcctg

SEQ ID NO: 825741 - DNA, 120 bp, Artificial Sequence
  ENSG00000271933_5 (sequence is synthesized)
gtccccgagaaagttcacccagcccgctagattcagatgagaacccggcagcaaacttccctgtcaacccacaacacctctgcccctgccccaggtgccgctaccagcgcagcggctgta

SEQ ID NO: 825742 - DNA, 120 bp, Artificial Sequence
  ENSG00000271933_6 (sequence is synthesized)
cggcctcgccgcaaggatgactcagcaccttgttgcccgaggacagaagcacagctacactgagcccttgcccgcctgaccagggccttgtgccgccgccctctccaccaggtcacccac

SEQ ID NO: 825743 - DNA, 120 bp, Artificial Sequence
  ENSG00000271933_7 (sequence is synthesized)
aggactgcgaccccaacgcgcaggccggccctgacgcagccagcagcaccgctgcttccagcccttccccccgcacccagcggtcccgtgagggcggctgtcaggaccaccggggatccc

SEQ ID NO: 825744 - DNA, 120 bp, Artificial Sequence
  ENSG00000271933_8 (sequence is synthesized)
gggcgcccgccggccagccggagcagtacctcggtccccggtcaccttcgcctcgcagtttcccttccgggcccctagcgtcggcctcaaagagcacagttcctccggcgcactgcatga

SEQ ID NO: 825745 - DNA, 120 bp, Artificial Sequence
  ENSG00000271933_9 (sequence is synthesized)
aacatcgaaaggacgtaaatagtacgagcagccaatcacgggcaggcctctgtcggaaaagcggccacactgggggaggcggggttccgggttgaggaggcggggttccaaattggtggg

SEQ ID NO: 825746 - DNA, 120 bp, Artificial Sequence
  ENSG00000271933_10 (sequence is synthesized)
gcggggccagttgaggattgttgcagggaacgtcatagtcagcgtccattttgcgtgtgggcatgggagtcgtctcggccatctttgttttgggcagtggagctctgttttgcttttgtt

SEQ ID NO: 825747 - DNA, 120 bp, Artificial Sequence
  ENSG00000271933_11 (sequence is synthesized)
ttagtcgtttcactcgccgcagctataagaattatgtaaaaattgaaagaaagtaatgttagagttaaaaattattccgtttattccgttcctttttgaaggcctttttgtcccttaatt

SEQ ID NO: 825748 - DNA, 120 bp, Artificial Sequence
  ENSG00000271933_12 (sequence is synthesized)
tatcgtgagataaatatcttttcaaatgtgtctgcttctgagccgagtcatccggtttctggggtctcatgccaaatgttagatggtgacatccagaaaagattttttctagatggtttt

SEQ ID NO: 825749 - DNA, 120 bp, Artificial Sequence
  ENSG00000271933_13 (sequence is synthesized)
ttcattgctttgtgactttcccgcccacattttcaagtttcaccctaaacctgtgtaataggcctgataacagccgcctctgccttgcacccaggattgctctgaggactaagatgtttc

SEQ ID NO: 825750 - DNA, 120 bp, Artificial Sequence
  ENSG00000271933_14 (sequence is synthesized)
cattgcgcgtaatttgataggtgaagagctagttgtggaatacgcgagagagttactttctttttcactctccctctatttcaacagatatttactgaatgctcaacttcgtaccaagct

SEQ ID NO: 825751 - DNA, 71 bp, Artificial Sequence
  ENSG00000271933_15 (sequence is synthesized)
tcaacagatatttactgaatgctcaacttcgtaccaagctctgttctagaaatatatacaaatgaatccgg

SEQ ID NO: 825752 - DNA, 82 bp, Artificial Sequence
  ENSG00000271933_16 (sequence is synthesized)
acccaggaggcggaggttccagtgagcccagatcccgcaactgcactccagcctgggcgatagagggagactcagtctcagc

SEQ ID NO: 825753 - DNA, 120 bp, Artificial Sequence
  ENSG00000271936_0 (sequence is synthesized)
caccggccttctcttttccttttaacccaacagaaagtccatcagctcccttctctttctcttctggctctgtggtcagttgtgttaatgtccctcagcgccacggggagtgcgggggcc

SEQ ID NO: 825754 - DNA, 120 bp, Artificial Sequence
  ENSG00000271936_1 (sequence is synthesized)
atgagcccctggcctaggggatattgatttgattcaagatgtttgtgccttcactctatcccctcccaccttcactcccatgcttccttcaccatcctggagggggtcggacggaagagg

SEQ ID NO: 825755 - DNA, 120 bp, Artificial Sequence
  ENSG00000271936_2 (sequence is synthesized)
tgaggaactgtcttcctgtgtgactgaggaaggagcctgaatagagaaggcggtggcctgaccaggctcacgtgtggggctgggtgaagggaagccccattccttaggagcttgggctct

SEQ ID NO: 825756 - DNA, 120 bp, Artificial Sequence
  ENSG00000271936_3 (sequence is synthesized)
taggtcccagggctgcttctcaggaggccctgtgggctgtgggcacagagcggggatcgtgcaggcggcactcacgtggcgggagaagtagtagaagctgagcatcatgaggaacaccat

SEQ ID NO: 825757 - DNA, 120 bp, Artificial Sequence
  ENSG00000271936_4 (sequence is synthesized)
aggggcagcctgctgggcagagcgtgtgcaactgaaagggctgtcatctgcctcctggagggggcctgattccctccaactagatggtgctgcttcctgccaccccagccctagagctca

SEQ ID NO: 825758 - DNA, 120 bp, Artificial Sequence
  ENSG00000271936_5 (sequence is synthesized)
ccccggctccttaggccctttcacatcaagtcgggctcccccgggcagtaaaattttcttaactcactgggctcctctccaacagccaggcaacccctggcccctcctggctgcacctgg

SEQ ID NO: 825759 - DNA, 120 bp, Artificial Sequence
  ENSG00000271936_6 (sequence is synthesized)
tattcacatcagggctgctccccaggtatttaagaaacactgcattgcctgactgatcacagaggtagctacaaccatgcaggaatttggagaagcaagagacatcagtgatgggatttc

SEQ ID NO: 825760 - DNA, 120 bp, Artificial Sequence
  ENSG00000271936_7 (sequence is synthesized)
atagccatgggactggggtacaatctcaccatggctttttaccttgttcatacatatttttatgtggagctgtggttagtttccattaccgtatggtatttcactgcatgaatataccag

SEQ ID NO: 825761 - DNA, 120 bp, Artificial Sequence
  ENSG00000271936_8 (sequence is synthesized)
ttatgtatccatttcctgttgatgtcatttgggttgttttcatttgttttgggggagggggtatgtctattacgaacagtgccactttggacattctcatacatatatcctgggacatga

SEQ ID NO: 825762 - DNA, 120 bp, Artificial Sequence
  ENSG00000271937_0 (sequence is synthesized)
cctccccgctccggcggcggcagggcgctcgaggcaagcccgggcagggggacgagctgcaggtgacgccctggttggctggagcgtgccaggccttccccctacggcgcctgcgcacag

SEQ ID NO: 825763 - DNA, 120 bp, Artificial Sequence
  ENSG00000271937_1 (sequence is synthesized)
ccagggcgtggattcaaccttccgcggtgccctgcctctagctgacgtcagcaccctggtaactgctgcaccttcgccgcgcgctttgagcccccgcccctccgccttcttaccggccgc

SEQ ID NO: 825764 - DNA, 120 bp, Artificial Sequence
  ENSG00000271937_2 (sequence is synthesized)
cggcgcgctcggctgagagctttaggaggcgcgagcgagcactccgactaggccggagggactcggaaaatgatggtccggcaggtggtgggtcctgacccaagggcctgcaaggaacgg

SEQ ID NO: 825765 - DNA, 120 bp, Artificial Sequence
  ENSG00000271937_3 (sequence is synthesized)
agaagggcaaccgagcacgcgctggatcttggggaagaaggggaaagggactgctggaggaggcgcgcatgcgccgtgcggtccttcgccccgggcgccctggcagggggcgaggctctg

SEQ ID NO: 825766 - DNA, 120 bp, Artificial Sequence
  ENSG00000271937_4 (sequence is synthesized)
cggaactcccggagctggcgccagggaacaagtctcagtggagagcctcgaattttaaaagtctcatttaagtatttcttttggttttccttgtataaatatagctaacttttaaacatt

SEQ ID NO: 825767 - DNA, 120 bp, Artificial Sequence
  ENSG00000278878_0 (sequence is synthesized)
gtctcctctttcgcctcctgcaccttgagagccctgggctactctgtcacagcccctgttgccctgcgatctgtaggtccttggggacgcatagttaaggtgccaggacatcctggaagc

SEQ ID NO: 825768 - DNA, 120 bp, Artificial Sequence
  ENSG00000278878_1 (sequence is synthesized)
tgggaaatgatttcttccagaccatggctggagaaggaaagaaggtgtgttttgcctgattcagggactatagagagaaccaagttctgcaggcctgtcatctaagtctcaggtgagtat

SEQ ID NO: 825769 - DNA, 120 bp, Artificial Sequence
  ENSG00000278878_2 (sequence is synthesized)
taagatgtggcagtattctgttttgaagcgaggaccatgattggcaagcttgccacttggtcaagtgcttaccctctaaagatgtcttccttggtctttgcctccagctgggtgtcacaa

SEQ ID NO: 825770 - DNA, 120 bp, Artificial Sequence
  ENSG00000278878_3 (sequence is synthesized)
actctgaactggattccaaggctttcatgaatgcacttatgtttgctgtggcagctgcattatgtcgtgggggatgtggatgcagaacctcccattctgtcgtcttgcttatgttactct

SEQ ID NO: 825771 - DNA, 84 bp, Artificial Sequence
  ENSG00000278878_4 (sequence is synthesized)
ggtgattttcagattcaaaagttctaaaataaattgctcaaatttacacattatgtaagctgttaataaaatttcttgtaggtg

SEQ ID NO: 825772 - DNA, 120 bp, Artificial Sequence
  ENSG00000278878_5 (sequence is synthesized)
ggcagaaaggaatcattaagatttctattcttttttagtctgtatctaaatgaccatatattttaattccaaatatttactttatacttcagtaatgctcattgtattttgcaaaattta

SEQ ID NO: 825773 - DNA, 120 bp, Artificial Sequence
  ENSG00000278878_6 (sequence is synthesized)
tattgttcttttatttgaaaatataaggctttttttagctcctgaaatctatattatagtcatatagttttattatagtatttgataagaagagcagcaacatattgagaacagaataaa

SEQ ID NO: 825774 - DNA, 120 bp, Artificial Sequence
  ENSG00000278878_7 (sequence is synthesized)
attctgctgtctttttaatgattatttattaaattcttctcattaaagcctattattaatgattgtaatgtatttactgtataattttactgcaatttattaaatgccaatgacttctaa

SEQ ID NO: 825775 - DNA, 120 bp, Artificial Sequence
  ENSG00000230454_0 (sequence is synthesized)
ctggcaggagatgaaaggctgctgccgcccggtcggaaggacatcggcgccccccaggcccggtccccgccccagttcctcgggcctttcctgctgcccctgcctgcgagggccgacgac

SEQ ID NO: 825776 - DNA, 120 bp, Artificial Sequence
  ENSG00000230454_1 (sequence is synthesized)
tccctggcgctgcatccccagagccctcccagcctaagaagccccatctttctgtctccacgcatggagaactgcagctgtgaggcccaggacccttagcaggacatgcagagctgggca

SEQ ID NO: 825777 - DNA, 120 bp, Artificial Sequence
  ENSG00000230454_2 (sequence is synthesized)
gggacccaggctcatgctcccagcgtggggtgagttgtctccagcctgtggagactgccatgaagttgatctgcctcccagagggcctggcccacttgaaataattgctccggctactga

SEQ ID NO: 825778 - DNA, 120 bp, Artificial Sequence
  ENSG00000230454_3 (sequence is synthesized)
aggatcctgcgcccaacccaggtccccgccttctttcagaggcccaggcctggaccccgctgagccgcagatgtgcgagcaggagcgccagagccccgatgcccgcccagcaggaagcgg

SEQ ID NO: 825779 - DNA, 120 bp, Artificial Sequence
  ENSG00000230454_4 (sequence is synthesized)
gcgggagatggttccttccttctgtcctgagggggaaccctgcacagagggaccattgagggcctggcattgtctgcctaactcacccagtgcctccctccctgggtgggccatgcgggg

SEQ ID NO: 825780 - DNA, 120 bp, Artificial Sequence
  ENSG00000230454_5 (sequence is synthesized)
ccttgacaggattgccctggtgccgtcttggcagtgggtctgggtgggatcctgggggcagggcttccctgagtgcagacagctaggcctccacctgccccggcctcccacccaggctca

SEQ ID NO: 825781 - DNA, 120 bp, Artificial Sequence
  ENSG00000230454_6 (sequence is synthesized)
gatttccagggcataaggctccattgtcccagcactggtggaggcggcctgtcaattcagccttgtgtttggtggttgggaaattcccagccatggggggctgcaggcaggaaggggctg

SEQ ID NO: 825782 - DNA, 120 bp, Artificial Sequence
  ENSG00000230454_7 (sequence is synthesized)
cccaggtgtcctgcaccccaactgaagggactccatgaggttggttcctgggcatcccctgctgcctggagctgtcccaggctggacctcaaccattcatcaaccctcaggagcagttgg

SEQ ID NO: 825783 - DNA, 120 bp, Artificial Sequence
  ENSG00000230454_8 (sequence is synthesized)
tgcagacctagatgccaggtgcagaagggggaaagggccctctccagggttacagcagggatcaccgaggctgcaggggctgccaaggcctggaagaagtcccatgttccagggagcccc

SEQ ID NO: 825784 - DNA, 120 bp, Artificial Sequence
  ENSG00000230454_9 (sequence is synthesized)
atggcttctgatgtcaggaaaacttagtcctctcagttccccagaatcatttcaccccaccccacccaaactgagtggcaaaccagttgagtagagaatacaagccctgactccagctgc

SEQ ID NO: 825785 - DNA, 120 bp, Artificial Sequence
  ENSG00000230454_10 (sequence is synthesized)
ctggtcagtggcatagccagccaagtcctagcaaccctaggagtcagggagtcagggaggaggcaaggacaagactacagtattgtttggctgagttctgggtctggccccactccccaa

SEQ ID NO: 825786 - DNA, 83 bp, Artificial Sequence
  ENSG00000230454_11 (sequence is synthesized)
tattgtttggctgagttctgggtctggccccactccccaaaactgaccccaatctctgtgtctgctgccctaaaaagagaccc

SEQ ID NO: 825787 - DNA, 88 bp, Artificial Sequence
  ENSG00000230454_12 (sequence is synthesized)
ttgtgccactgcactctagcctaggtggctaggagaccctgactggatgtagtggctcatgccttaatcccagcacttttggaggcca

SEQ ID NO: 825788 - DNA, 78 bp, Artificial Sequence
  ENSG00000230454_13 (sequence is synthesized)
aggcaggaggatcacttgaggccaaataaaaacaaaagatcctagcggtcctcatctctaccatggactaccagaggg

SEQ ID NO: 825789 - DNA, 120 bp, Artificial Sequence
  ENSG00000230454_14 (sequence is synthesized)
atcctagcggtcctcatctctaccatggactaccagagggaaggcagcacctctcatcacccagggggatggcctccagtcagctgggtggggaacacagagccctgcccagaggcttga

SEQ ID NO: 825790 - DNA, 120 bp, Artificial Sequence
  ENSG00000230454_15 (sequence is synthesized)
acctggcaccacaggggtctggaattacacagaagacgggtgacagccaaggtggatcatgaacggtgagaagtccagcaggtgacaaggggaagggtctaaagggtggagggcacagcg

SEQ ID NO: 825791 - DNA, 120 bp, Artificial Sequence
  ENSG00000230454_16 (sequence is synthesized)
caagcaaagtcttggcaacaaaagagctaatgcatcccagaaatggggcaggtggagtactggaagctacaccaagcttcagagtggtcctgtggcctcggtgtggtagctcaggcctat

SEQ ID NO: 825792 - DNA, 120 bp, Artificial Sequence
  ENSG00000272425_0 (sequence is synthesized)
gatgatcaaaaaaggaaaaaaattaatcactaaggttggagaatatgtttatttaaacctagtgtctcccttaaattttataactagatttttgaccctcactcatctggctttccttgc

SEQ ID NO: 825793 - DNA, 120 bp, Artificial Sequence
  ENSG00000272425_1 (sequence is synthesized)
tatagacatgctttgcatacccagcttctagccacatcttccctaagaaaatttcacctggaatcagttccaaaagaaaatcttaagagatagagtatggatctgcatgttgtcagctac

SEQ ID NO: 825794 - DNA, 120 bp, Artificial Sequence
  ENSG00000272425_2 (sequence is synthesized)
ctaaagcagcaaaaattcctagatgagaataaaatcagggaaccttgcagtttaaggcacaccttaaatattaaatttttaatccttcaatgcatccagccaaaacaagaaattgcaaat

SEQ ID NO: 825795 - DNA, 120 bp, Artificial Sequence
  ENSG00000272425_3 (sequence is synthesized)
agctaccatccatcaatgcaaggtttttttggtttgtttttcataataagattggttttaattaaagcacttataaagatggagttatattttgaactttgtccttttacttaaagcagt

SEQ ID NO: 825796 - DNA, 120 bp, Artificial Sequence
  ENSG00000272425_4 (sequence is synthesized)
tagagtcttacacatcataactgccacggctaaccattaaaattttccagctccttaaatgatccatcataaacttgtgcttgctgagttaactggactagaggatagctggagggaaaa

SEQ ID NO: 825797 - DNA, 120 bp, Artificial Sequence
  ENSG00000272425_5 (sequence is synthesized)
tgaggcattgcaaaagttacagtaataaaaagtgaatggcttcaaaataaggcagaggacataatggctcattttataataaaagctttcagtataaaattcatacatttcccttactta

SEQ ID NO: 825798 - DNA, 120 bp, Artificial Sequence
  ENSG00000272425_6 (sequence is synthesized)
tatagatcttcctactttccagacatgtgtattattgtatattacatttgtcaatagctcatggcaacagatacacatagtttgggataacccttttatacctcatatgagcagtgttca

SEQ ID NO: 825799 - DNA, 120 bp, Artificial Sequence
  ENSG00000272425_7 (sequence is synthesized)
aaggtttaaaagcacaactccaaagggcacagcttgaaatggagcgggaggatgctagcaaagccaccccaataaacacaaaatcttagtaaaagcactatgtttaccaggcaatgcaac

SEQ ID NO: 825800 - DNA, 120 bp, Artificial Sequence
  ENSG00000272425_8 (sequence is synthesized)
ttcaaaacaaattccttagcaaccccaacctcttcaagcccgcttctaatcacattattactcctaagcctccttatatacaaaatcttaggctggccaagcccaaacacacagacacat

SEQ ID NO: 825801 - DNA, 120 bp, Artificial Sequence
  ENSG00000272425_9 (sequence is synthesized)
tctctgtccttaaaaaatttcaaacataaaaaacctccaaatgatatgttcccactggaagaggccaaattcttttcttgtagattacccttttctatttttcattcctacctcccatgc

SEQ ID NO: 825802 - DNA, 120 bp, Artificial Sequence
  ENSG00000272425_10 (sequence is synthesized)
agtattcctagattctcacaccatttgatcatttctctattttgatatttatctataagaattaatgatttttttcaagtcaaatctacaaaaccgtggatttgcttgcctctaagctat

SEQ ID NO: 825803 - DNA, 120 bp, Artificial Sequence
  ENSG00000272425_11 (sequence is synthesized)
ttatctcagtgagtcaggcccactgcttccatttttctggattagctttgaagaagaatcatcagcacttaataacctacctaaatccgactgaagatgctttcttgatcctatctctgg

SEQ ID NO: 825804 - DNA, 120 bp, Artificial Sequence
  ENSG00000272425_12 (sequence is synthesized)
tcctcctactttggcagtgggaagagctaccctataactcctcagagtcatgcacagagctgtaaaaccagcatgcagctgattttgtgcacttctctgaaggacccaagcagcaggatg

SEQ ID NO: 825805 - DNA, 120 bp, Artificial Sequence
  ENSG00000272425_13 (sequence is synthesized)
ggtaccttttgttcacccacccatagacaccacaggacactttttgttcacctgctcacttctgcattgaccaaacttaaagatacagattcaacagtatgtaggggaagtttccagtaa

SEQ ID NO: 825806 - DNA, 120 bp, Artificial Sequence
  ENSG00000272425_14 (sequence is synthesized)
agtatattctgttttctacattggttaaatattgtaatttcatgcgggaactgggaggctaagtagttgttaccattaagaagagcaactgtgatcttacttccagcctattttggaagg

SEQ ID NO: 825807 - DNA, 120 bp, Artificial Sequence
  ENSG00000272425_15 (sequence is synthesized)
tgggataaaaaatatttgtgccacaaatctcaaatcttgtctcctatcttacaaccttgaaatacatagttaattctgcagggtctcagacatcctactgagttgccaaatattgaacac

SEQ ID NO: 825808 - DNA, 120 bp, Artificial Sequence
  ENSG00000272425_16 (sequence is synthesized)
caagctgggcttgtcaacactcagggctacaaagaggagatctcaaaactaccatggcctcaggattctgaatgtgggtctgaaatccctacttcttactttggattaaaagctcacctg

SEQ ID NO: 825809 - DNA, 120 bp, Artificial Sequence
  ENSG00000272425_17 (sequence is synthesized)
agctacacacatctgttgtcctagaatggatatttttatttagatatcaaccaattcaacttcactcctttattgagtcagtcaagaaatcaataaaattgacttcaaaaattgaaatca

SEQ ID NO: 825810 - DNA, 120 bp, Artificial Sequence
  ENSG00000248015_0 (sequence is synthesized)
cgcaggttcagaacaaagggcttgagcaagaggacgaagcccagggcccaacggggacagcaggagtggaaacaggggaagacgccaggggcatgggcagagctcctgaccccaggatgg

SEQ ID NO: 825811 - DNA, 120 bp, Artificial Sequence
  ENSG00000248015_1 (sequence is synthesized)
acctctctgtgctgtcaagtcacagggaggcccaggctgccctctccactgcccccggggtgacctgaaccgtgcagaacgctgaacaaatcaacgccctttccagggaagcggaatcca

SEQ ID NO: 825812 - DNA, 120 bp, Artificial Sequence
  ENSG00000248015_2 (sequence is synthesized)
gcgcatgagctaatgccgcacgcagcacagggtggccaagaacaggactctgtcccctgtcccacatgagcgccacctccaagcctgcctaccgtggaccactgtcaaggtgaacgcccg

SEQ ID NO: 825813 - DNA, 120 bp, Artificial Sequence
  ENSG00000248015_3 (sequence is synthesized)
gggggatggccctcgtgggaccacgtgaggtgcaagagtcccacgggatcaccagatataaagaatgttcccggtgcgatgtgaatttcaggtaggaccatatgaaactgctgtaaacca

SEQ ID NO: 825814 - DNA, 120 bp, Artificial Sequence
  ENSG00000248015_4 (sequence is synthesized)
ctgagagaaggccggctcctgtgctctgcactctggcccagggctgctgttccgctggctgacgccctgtccccaccccagcatgtcctgcttccaggctgcttgacccggctgggctgg

SEQ ID NO: 825815 - DNA, 120 bp, Artificial Sequence
  ENSG00000248015_5 (sequence is synthesized)
gtgcctcttccccacccccgccccagtctcccgggccccatcccagcctggcccgtcataactgccgatccccagaactgtccctggtgtgcagcaggcatgcagggtgggcctgcagag

SEQ ID NO: 825816 - DNA, 120 bp, Artificial Sequence
  ENSG00000248015_6 (sequence is synthesized)
cgaggtcccagcaccggcggcatctggcgctgaacacaggaagatgggacgtttgctgaatgaatgcacgtccctgatgaggcctggacttcgacggatgaaggggctggtggggtggag

SEQ ID NO: 825817 - DNA, 120 bp, Artificial Sequence
  ENSG00000248015_7 (sequence is synthesized)
tcagggttccccgaaagccctgggtggagagggtccccaaagtggggtcagacagcctgtgaggctcacagtcctgccctgcagccctttggtttggaccaggtgccacctccccatctc

SEQ ID NO: 825818 - DNA, 120 bp, Artificial Sequence
  ENSG00000248015_8 (sequence is synthesized)
cctggccccagccctcagctaaccagcccatgccaccgcctggaaatgggccagagggcagtggcgacctgcccaagtccacacgcaggccacaggccacactctgaaccccggggcagg

SEQ ID NO: 825819 - DNA, 120 bp, Artificial Sequence
  ENSG00000248015_9 (sequence is synthesized)
ctcagacgggctttgctcagcctgccttagggcatagagggagactgagtcagggccctcccaggaaggatgggtgtgcggccttccacgctcgggactttgggccacgatgtccacccc

SEQ ID NO: 825820 - DNA, 120 bp, Artificial Sequence
  ENSG00000248015_10 (sequence is synthesized)
agggtcttcgcagagcagcgggaaaggaccctgctggcaggcacagtgcccgtctctgcccccggctctgctccaaccgcccccagcccaagggcggcacgccgcagggggtctgtgatc

SEQ ID NO: 825821 - DNA, 120 bp, Artificial Sequence
  ENSG00000248015_11 (sequence is synthesized)
cccccacgtccccggctcctttcacccacacaccacactgggaggcggcagcccgagggcaggtttattgacaacctcacgggacacaagcaggctggggacaggacggcgacaggctcc

SEQ ID NO: 825822 - DNA, 120 bp, Artificial Sequence
  ENSG00000248015_12 (sequence is synthesized)
ggcggcggcggcggcggcgctacctgcggtaccagatctgcagcctccgctcccgcttgatcttcctctgcagctgcaggatgccgtagagcagggcctcggccgtaggtgggcagcctg

SEQ ID NO: 825823 - DNA, 120 bp, Artificial Sequence
  ENSG00000248015_13 (sequence is synthesized)
cagggaccttgcctcagtctcgcttcccgcagccggagcccgcgtgaccgcgtgcacagcgcagccggctcggctttggaagggtttcccgggccggcctctgaaggtggaggctgacag

SEQ ID NO: 825824 - DNA, 120 bp, Artificial Sequence
  ENSG00000248015_14 (sequence is synthesized)
ccctgggtgggcgcagtgccagggactgggagccggcgcaggggaggtccctgcaggaagagtggggtcctcccctgggcaaggccccactgccctccacccgtggctcatcccgggctg

SEQ ID NO: 825825 - DNA, 120 bp, Artificial Sequence
  ENSG00000248015_15 (sequence is synthesized)
tcacagggacctctcggacaagacgctgacctcactaacccggcccccggccccagccctcaggactcaatgggggccagcgctcagcagacacacttagcagtggggagcagggcccgg

SEQ ID NO: 825826 - DNA, 120 bp, Artificial Sequence
  ENSG00000248015_16 (sequence is synthesized)
ggctgccctggacggagatggaggcagggaggctgggcggagggaggggaggtggcccagagcccgggcatcccacgaggacccgatgaccctctttctgagccccaagccagagctctt

SEQ ID NO: 825827 - DNA, 120 bp, Artificial Sequence
  ENSG00000248015_17 (sequence is synthesized)
ggctccactaagaggcagcgctccgagtcggcccatccataggatgggggagcccgccgtctgctgggggtgtgggactccctcacaggggccgccgggctccgtgtggcgctggccctg

SEQ ID NO: 825828 - DNA, 120 bp, Artificial Sequence
  ENSG00000248015_18 (sequence is synthesized)
tctccagctccctcgtgggcggtgcggtcccggccctacctgggatgtagatgtccacgggcacgatgcggtcgcagcccctcaccaccgagtaggaatagtggtagtagcctcctccgt

SEQ ID NO: 825829 - DNA, 120 bp, Artificial Sequence
  ENSG00000248015_19 (sequence is synthesized)
tggcgcagctgttggggaggcaccgtgaggggagtgtgccgaagacccgcctgcccaccctccctccacgaggcctcgccccatccccacccgccttcaactgcaggccaggcacctacg

SEQ ID NO: 825830 - DNA, 120 bp, Artificial Sequence
  ENSG00000248015_20 (sequence is synthesized)
aggctggaacttgtcacggagaagcaatgagcaaacacgcacaggctcccagagcctctgtgggaccagtggggcgcaagctcacacgtggctgataactcggggaaaagtgctcccctc

SEQ ID NO: 825831 - DNA, 120 bp, Artificial Sequence
  ENSG00000248015_21 (sequence is synthesized)
ccgagggggctcctgaccaccgattcccggggctgggatgtgtcagatcacatgtgtcaacaaaaagccacttcagacagccacagtgccaacacccagcccctgtctatggggcggctg

SEQ ID NO: 825832 - DNA, 120 bp, Artificial Sequence
  ENSG00000248015_22 (sequence is synthesized)
agcctcaccctcgcctgattccggctctgtcagtgaggcgctggggtccacccggggcagggagctggaaaccccaggagaccacacagactccactcccagcactgcttcccacagccg

SEQ ID NO: 825833 - DNA, 120 bp, Artificial Sequence
  ENSG00000248015_23 (sequence is synthesized)
taaaaatggacataccctgaatgcccagcagtgggagacggttatgaaaactctggaatattctaattaactgtttagaattagattagtaatatgtccacacagtgggatattattcag

SEQ ID NO: 825834 - DNA, 120 bp, Artificial Sequence
  ENSG00000248015_24 (sequence is synthesized)
ccaagaaaaggcacgaggctcggacacaggccacagcacggatgcaccttgaggacgtcgcgctcagtgagagacgccggacacagaaggccatgcggcgtgtgatcctgtttctgtgaa

SEQ ID NO: 825835 - DNA, 120 bp, Artificial Sequence
  ENSG00000248015_25 (sequence is synthesized)
atgtccaggacgggcccatccacagagacagggaggggaggtgtgggcaccggggctcggaaggggatgcagagtgactgctgatggggacagcatttcatttgggggtgatgagaatgt

SEQ ID NO: 825836 - DNA, 120 bp, Artificial Sequence
  ENSG00000248015_26 (sequence is synthesized)
tctggaattagaggtggtggcctaaaaaccactgaactgctcgctttaaaagggtaaacttatcaagacctgatctctacagaaattttaaaaagtaggcacagtggagtacatctgtaa

SEQ ID NO: 825837 - DNA, 72 bp, Artificial Sequence
  ENSG00000248015_27 (sequence is synthesized)
agaaattttaaaaagtaggcacagtggagtacatctgtaatcccagcactctgagaggctaaggttggggga

SEQ ID NO: 825838 - DNA, 120 bp, Artificial Sequence
  ENSG00000248019_0 (sequence is synthesized)
gtaaagcaagtaaaatgtattgttttgccagattaaaaaggtggtttaaaggtggtaaagagaataggagctttccattaataagctccattcaacaaacatttaataatctacataagt

SEQ ID NO: 825839 - DNA, 120 bp, Artificial Sequence
  ENSG00000248019_1 (sequence is synthesized)
gctacatttgaggagttaaaaacaaaccccactacatttaattttgcacagaaattgccaaattattttaactaactttgaggcctcagaattctcatccatgaaatgagattggatcag

SEQ ID NO: 825840 - DNA, 120 bp, Artificial Sequence
  ENSG00000248019_2 (sequence is synthesized)
atgatttctaaggttactttgagctctaaaattttataattccattactgagagagtgcctgaacatagagatacccaatacatatttctaaagatttgttgcatgaatgatatcttatg

SEQ ID NO: 825841 - DNA, 120 bp, Artificial Sequence
  ENSG00000248019_3 (sequence is synthesized)
ctgcttctaaaacactatgatttttctaagatagtttccttttccccttcattaccaatgctttagaagacttaaatcttctgcataggcatttctggatttgcctacccacctaccaac

SEQ ID NO: 825842 - DNA, 120 bp, Artificial Sequence
  ENSG00000248019_4 (sequence is synthesized)
cttccctcccctgaaaactttcagatgcttcttcattgttttagtcatttaccactttaatgaaattatctggcaactttattgtggtgggtggggatcaatgacggtgtaatgaggcaa

SEQ ID NO: 825843 - DNA, 120 bp, Artificial Sequence
  ENSG00000248019_5 (sequence is synthesized)
ttagcaaattctgatagttccatctactccatgtgaaagtctcttgatgttttatatggtactcttattaataatcccagagagcaggggttggcaaactatggcccatgggctaaaatg

SEQ ID NO: 825844 - DNA, 120 bp, Artificial Sequence
  ENSG00000248019_6 (sequence is synthesized)
gtttttacattttaaaagggttgaaaactttaaaactggaaggatacatgacagagactggatggcctacaatgcctaacatattatctagccctttacagaaaacaactgaccaatcct

SEQ ID NO: 825845 - DNA, 120 bp, Artificial Sequence
  ENSG00000248019_7 (sequence is synthesized)
tatgagaccagacttgcaaaaattacagtaacagagtgaaaaaccttcttgaagtgttaggaggaacttgagtcataatttgatgttgaatcagagagaacaactgtttgggcttatttg

SEQ ID NO: 825846 - DNA, 120 bp, Artificial Sequence
  ENSG00000248019_8 (sequence is synthesized)
cctcagaggtaagaaaatcaagttttaactaagattaacccacagaagtagatattaatactaaggtttcgacctaataataactaacctgtattaattgtgtgcagtgtaccagaccca

SEQ ID NO: 825847 - DNA, 120 bp, Artificial Sequence
  ENSG00000248019_9 (sequence is synthesized)
tatgagatcctgcaccaacatttgctatgcactaactagtttaattgccattaccagggtcctcctggctctgctatttactagctgtttgaccttgggcaggtttcttaacctatgtct

SEQ ID NO: 825848 - DNA, 120 bp, Artificial Sequence
  ENSG00000248019_10 (sequence is synthesized)
cattttcttcctcttcaaaatgagaacagaaatagtgcctacctcatggagttgttgtgaggattaaatgaattaatggaaagcatatagaatagcgcttagcacataataagctctcag

SEQ ID NO: 825849 - DNA, 120 bp, Artificial Sequence
  ENSG00000248019_11 (sequence is synthesized)
tacttagaattaccattatcccagtttttcacatgaaggaattaattagagaaaatagttgctcattatcacaaaatagtgggacctggacttgaccattaatctgtgttatgcccagct

SEQ ID NO: 825850 - DNA, 120 bp, Artificial Sequence
  ENSG00000248019_12 (sequence is synthesized)
gctagagatgggcaacaaattggattaaggctgctcagtagccaaataaaaaggaatgttgtaatgtggcaggtaacttctttgaccacatatctgcaaagacatcgcaccgagttccac

SEQ ID NO: 825851 - DNA, 120 bp, Artificial Sequence
  ENSG00000248019_13 (sequence is synthesized)
gtatctgcaaagacatcgcactgagttccacgtatctgcaaagacatcacactgaattttgttttgctgccagtgtgcaattcagtagtgatcagtgcagttctcatgtcatttgcagtg

SEQ ID NO: 825852 - DNA, 120 bp, Artificial Sequence
  ENSG00000248019_14 (sequence is synthesized)
ggtctcaagtgaagctggaggtctctgttggtagttagtagccaggaaccaggtatgcttaatgccttgcattgcatagaacaattcctctttatcctgcccaagatgccagtgggcact

SEQ ID NO: 825853 - DNA, 120 bp, Artificial Sequence
  ENSG00000248019_15 (sequence is synthesized)
ggtattaggaggtgaggtctttgggaggtgattatatcataagggcagaaccctcatgagtggtattagttcccttataaaagagaacccagagaggtgccttgccttccctaccatgtg

SEQ ID NO: 825854 - DNA, 120 bp, Artificial Sequence
  ENSG00000248019_16 (sequence is synthesized)
ccagagaggtgccttgccttccctaccatgtgaggacacagcaagaaggcacaatctgtgagaaagtaggccctcgccagacaccaccagtgctttgatcttggatttcccagcctccag

SEQ ID NO: 825855 - DNA, 120 bp, Artificial Sequence
  ENSG00000248019_17 (sequence is synthesized)
cctagtgtttggcattttgttatagtggcttgactggactaagacaggcccctttgtaaaacactgagagagggatggacttcataccctttaggggatccttctctgtagaattctttt

SEQ ID NO: 825856 - DNA, 120 bp, Artificial Sequence
  ENSG00000248019_18 (sequence is synthesized)
tttcagaagatttttttttttcttttattaataagctttttatttttgaatacttttttattggtacatagttgtacgtattatggggtacttgtggtattttgatacaagcatacaatg

SEQ ID NO: 825857 - DNA, 120 bp, Artificial Sequence
  ENSG00000248019_19 (sequence is synthesized)
aatgcataatgattaaatctgggtaattaagatatcaaaacatctatcatttctttttgttggttacattccaaatcttctagctatttttaaacatacaataaattattaactatagcc

SEQ ID NO: 825858 - DNA, 120 bp, Artificial Sequence
  ENSG00000248019_20 (sequence is synthesized)
accctattgtgctatcaaacaatagagcttattccatttaactgttatttttgtacccattaaccaacctctttttatccctctcctcctagtatttgcccagcctctggtaactatcat

SEQ ID NO: 825859 - DNA, 88 bp, Artificial Sequence
  ENSG00000248019_21 (sequence is synthesized)
ctctcctcctagtatttgcccagcctctggtaactatcattctattctctacctccatgagagcaactttcttagctcccacatgtga

SEQ ID NO: 825860 - DNA, 120 bp, Artificial Sequence
  ENSG00000248019_22 (sequence is synthesized)
atgttgctgcaaatggattcagaatccatggctggaagaggtagtaaggccattgggagggcatgcctctcctcagcccacccccaccctgtgtgggtctccattctgaaatttccattc

SEQ ID NO: 825861 - DNA, 120 bp, Artificial Sequence
  ENSG00000248019_23 (sequence is synthesized)
agatgacccggtcctaggcagggaccaaaattccttgtcagctgaggaagtcctgaagaaacatcctgaagatgatgactgcactgccatcgtgggcagatgcagcttccatctacctga

SEQ ID NO: 825862 - DNA, 120 bp, Artificial Sequence
  ENSG00000248019_24 (sequence is synthesized)
gggctgaaggggaaaacctttcacacacgtgaggaaggcgcagctctgtggaaaggtcactagaatggcagcggcagcaaatagggctccaatgcacgtttgcagttaactgggtccaag

SEQ ID NO: 825863 - DNA, 120 bp, Artificial Sequence
  ENSG00000248019_25 (sequence is synthesized)
gagagcatggccctccacagcaagtttgctctatagaataaagtcctgagcttgtttttatcacagttagacagagaatggtctcttgtttctcagttatccagggaagaacagtgtata

SEQ ID NO: 825864 - DNA, 120 bp, Artificial Sequence
  ENSG00000248019_26 (sequence is synthesized)
ttctctgtagatgagtgttgtctaatgtagtgattaatctctgctagtgttaggaaagctccactactgtgtgtgtgtgtgcgtgcatgcgcgtgcgcatgtgcacatactgcagtcttg

SEQ ID NO: 825865 - DNA, 120 bp, Artificial Sequence
  ENSG00000248019_27 (sequence is synthesized)
actttccaattacaaaatgcctaagtcaggtcacattgtcttcttccagccagtttctaaggcaggcaatggaaacaggagccgatgccaaatggtctagaggcagaagggctgcatgct

SEQ ID NO: 825866 - DNA, 120 bp, Artificial Sequence
  ENSG00000248019_28 (sequence is synthesized)
ttgcagggccagccccaaggctgccttccagagctgcactttctctggggacagtaaactctcaccgcagctgccagccccctgtgcttggccatgcccctcacatggacttggaatcag

SEQ ID NO: 825867 - DNA, 120 bp, Artificial Sequence
  ENSG00000248019_29 (sequence is synthesized)
tgtctctcttgctgatgagcacctccaggagcctcagtttcgcctttatgtgcttatattcactgtattcttcagccataggagtgcggtcttccttctggacatttctaatgcaaataa

SEQ ID NO: 825868 - DNA, 120 bp, Artificial Sequence
  ENSG00000248019_30 (sequence is synthesized)
tttgggacacttaagtgactttgaaatccatccaaaggttactctgttccttcactccacacagctcaggcatttccatgttggtctcagctgccatctcaatggtttattctttttaca

SEQ ID NO: 825869 - DNA, 120 bp, Artificial Sequence
  ENSG00000248019_31 (sequence is synthesized)
tgttggagcagatctggacctcccaaaatgttttgaggagaagtgggcttagaggggttttccctgctctgtgagagaaggaatttagcaaggattaatttttctaagaaggtggcacaa

SEQ ID NO: 825870 - DNA, 120 bp, Artificial Sequence
  ENSG00000248019_32 (sequence is synthesized)
gttttgatgtgatttgctggaaaatagtaatagtcacaatttatcttattcccccaagagaatgggatgatgttcccatggaaccttgctcatcctgctagcaataacttgtattctctt

SEQ ID NO: 825871 - DNA, 120 bp, Artificial Sequence
  ENSG00000248019_33 (sequence is synthesized)
tctgattcacacaaacaaggatcagagggtgatggtgggggaaatgataccaggaaatacagttcgttttttgcagggattcagaatgtgttgctggacttcaagataggaagaatcttt

SEQ ID NO: 825872 - DNA, 120 bp, Artificial Sequence
  ENSG00000248019_34 (sequence is synthesized)
gccttgatggctgatgacagtaaccaccccatctaccatcatctattaaggatttactgtgtggtcactttacagtcatccaagtaaattttcataatcacctgattacatgggtaccgc

SEQ ID NO: 825873 - DNA, 120 bp, Artificial Sequence
  ENSG00000248019_35 (sequence is synthesized)
ttttcagaaaaagaaacagatttctggagggtaagtaacccaaatcgtacagctgagccatctgtctgcatctcaagcattgaggcagcattcggcctccgagggtgttgtcaaatgtgc

SEQ ID NO: 825874 - DNA, 120 bp, Artificial Sequence
  ENSG00000248019_36 (sequence is synthesized)
tggtctctgttaactcagggttttggattaatgggtggagctgctcattttcacaaacacccaggatgcagtctgcaccctctatttaaagtgaggtccctggacgagcaacacggcagc

SEQ ID NO: 825875 - DNA, 120 bp, Artificial Sequence
  ENSG00000248019_37 (sequence is synthesized)
acctggctgcttgtcagcaatgcagaacatcaggcactccctggagctacagcacaagatccccaggcaggcgcatgtgcatccaagtttgagccgcactgctttctgccactacggagg

SEQ ID NO: 825876 - DNA, 120 bp, Artificial Sequence
  ENSG00000248019_38 (sequence is synthesized)
aatgtatcctttactctcttcctccccttcgtctcatcttgtttggtaattttaaattatttaaaagttatagaaaatcatagtgcctcaaaatggcttaccaagaaatactcaaagctg

SEQ ID NO: 825877 - DNA, 120 bp, Artificial Sequence
  ENSG00000248019_39 (sequence is synthesized)
taggatcagaagcttgacatgaagatttctgtgcatctttgaattgctttacagaaattaaagaaaaatccagacatctaaaagattataatttcagaattcatagtaacatggggatct

SEQ ID NO: 825878 - DNA, 120 bp, Artificial Sequence
  ENSG00000248019_40 (sequence is synthesized)
ggcagctgcagcataacacggagtcacccttgctgtctaagccttgtggctggaggggaagagtgaggaccaagctgtcaacaatcccagacctgccaagccccatttgtctgtgtgcct

SEQ ID NO: 825879 - DNA, 120 bp, Artificial Sequence
  ENSG00000248019_41 (sequence is synthesized)
gccaggattctaagactgcatttgggaattttgacttttactgaatgtgaaattctgtgtatatatagccttggtgagctgacccagtcagggatgactctgatgtacttttgtcttaca

SEQ ID NO: 825880 - DNA, 120 bp, Artificial Sequence
  ENSG00000248019_42 (sequence is synthesized)
ggtatagttatcaaaccaaggaaccaatattgggaaattactattcatgaaacttcactctttttttttgattttaccagtttttccactgatgtctgtcccaaggtctaattgaggatc

SEQ ID NO: 825881 - DNA, 120 bp, Artificial Sequence
  ENSG00000248019_43 (sequence is synthesized)
ccacagtgcatgtatttcaacaggcttttagtaaatattgggattccaggctttgtctctggctagatatgagagtacaaatcctctgtgcccctccacctccccagacagtcatgctgt

SEQ ID NO: 825882 - DNA, 120 bp, Artificial Sequence
  ENSG00000248019_44 (sequence is synthesized)
acaatcttgggacatagggtaaagtgaagggcctcttcgggcaggcaggtaagtcatcaggccactccatgggccctgggagaccatcagcacacagttgggcccttcctcagcaagcag

SEQ ID NO: 825883 - DNA, 120 bp, Artificial Sequence
  ENSG00000248019_45 (sequence is synthesized)
ctctgtgttctcagcagtatgagtaagcattgaggcctcaatagttggcaaaaagcagatcttcctgtgggaaaaatactttgaataaggaagaaaaaggagatttgtattatataagtt

SEQ ID NO: 825884 - DNA, 120 bp, Artificial Sequence
  ENSG00000248019_46 (sequence is synthesized)
tggctgtctctaatttaaagaaagttaaactttattgcacaacgactactagttctttcttcttcttcttccttctcctcctcttccttctcctttttctgtctcctcctacttctcctt

SEQ ID NO: 825885 - DNA, 120 bp, Artificial Sequence
  ENSG00000248019_47 (sequence is synthesized)
gtcctttttctcctcctcctcctccttcccttctcctcctcctcctctttctccttcccttctcctccttctcctccttcctctatctttttctcctcctccttcttctctttcctttct

SEQ ID NO: 825886 - DNA, 120 bp, Artificial Sequence
  ENSG00000248019_48 (sequence is synthesized)
ccttcttctcctcctccttctcccccccttctctttctcctcctccttctccttctttcttctccttcttttcttctcctcctcctccttttctcctctcctcctccttttttcttctcc

SEQ ID NO: 825887 - DNA, 120 bp, Artificial Sequence
  ENSG00000248019_49 (sequence is synthesized)
ttcttctcctcctccttctcttccttctcattcttccccttcttcttttccttcgtttcctccccccctccacctcctctcaaatttagttttccacggaatcccccatcctttggaaat

SEQ ID NO: 825888 - DNA, 120 bp, Artificial Sequence
  ENSG00000248019_50 (sequence is synthesized)
tttttttttgcttagtatctgttcatttcttccagaatcatagtttggaattaatggacacatagtagttaatcagatgatagagattaaagtgaagggaggcatacactggaatagcaa

SEQ ID NO: 825889 - DNA, 120 bp, Artificial Sequence
  ENSG00000248019_51 (sequence is synthesized)
aatatgtttgcagtgaaacccaatgaatagaatacttcatgttagggtgaagtattggaggaaaaacaaatactttcattaaaatcaaagctactcttcagaatttcattattttctttt

SEQ ID NO: 825890 - DNA, 120 bp, Artificial Sequence
  ENSG00000248019_52 (sequence is synthesized)
aatgagaaatgtatgtgttggtcgtcttgtcgtctttgactcttaaaatgtaaccaagcaaattttaaactacatctctaaagtgcctaagtgtgatgcctacgttacctttaacttaac

SEQ ID NO: 825891 - DNA, 120 bp, Artificial Sequence
  ENSG00000248019_53 (sequence is synthesized)
ttcgttagtggcagaggttccatgagttatgagtactctgctctgtgaatgtctccatttttgaggtgcctttgtggagtattgatagggaccattcctgggctccacttacagacttct

SEQ ID NO: 825892 - DNA, 120 bp, Artificial Sequence
  ENSG00000248019_54 (sequence is synthesized)
gttggggaataggatctcacaaagcagaacaggagtttgtgataaggaagaggacaaagagagcaggtccttgtgttcttcaaaaacggtgaacattatcctactgattttggaccaagg

SEQ ID NO: 825893 - DNA, 120 bp, Artificial Sequence
  ENSG00000248019_55 (sequence is synthesized)
gagttctccagtgggaagtgacacagaacctaccacagtgccttccaatccaggtttttggtaatgagtgatgaatgaatcccatgagagcagagccccgtggagcgggtggcaaatgtt

SEQ ID NO: 825894 - DNA, 120 bp, Artificial Sequence
  ENSG00000248019_56 (sequence is synthesized)
gctctctgactacagttctctccttagggatgctaacacagactgcctcagatgcaggcagggctgcttgtccacactgatcaggcatggatttgcattaacatctgtagtgccctttac

SEQ ID NO: 825895 - DNA, 120 bp, Artificial Sequence
  ENSG00000248019_57 (sequence is synthesized)
ttgtgcagtgagatactgggatatacaacagaataggtgctggaagaggcatccactacagtgtgggcagactctttggatctgtattaataacagcctctcccgtggattagctagtcc

SEQ ID NO: 825896 - DNA, 120 bp, Artificial Sequence
  ENSG00000248019_58 (sequence is synthesized)
aggctttggtgctttatttcctcccaaaataatggagtgtgtactccttagttatgtgtagcaccaagaaaattaatccagatgtcatcttttttgtttccccctccagcgtggctggat

SEQ ID NO: 825897 - DNA, 120 bp, Artificial Sequence
  ENSG00000248019_59 (sequence is synthesized)
acttggcagggcacagaatcacatggtcttcagatcttctaaaagctgattttcctgggcctaatcccatgagagttggagacagtctatgataattactgattcagctcctgctggtgt

SEQ ID NO: 825898 - DNA, 120 bp, Artificial Sequence
  ENSG00000248019_60 (sequence is synthesized)
cttttcttcaggattaggaggatcagaaagcaagagcagattctgaaacactgtaaccccattccctactgggtcataagaggctggtgctcttgaggacgaaggtcggcagcaggtgcc

SEQ ID NO: 825899 - DNA, 120 bp, Artificial Sequence
  ENSG00000248019_61 (sequence is synthesized)
aactaggtactggcttctggtcccagcagagctggcctgccacagcccaagcgtcttgttttggttaaaaaatgagtctcttggcctttcatgcctgggcgttctccggaactcagatgt

SEQ ID NO: 825900 - DNA, 120 bp, Artificial Sequence
  ENSG00000248019_62 (sequence is synthesized)
ttgtgaaccaggttcagggactctcaagttcaagtcactggcagattggagaaaagacctagaagttctaagtgtctgaggtaatgagaggagggacgcaaagcctcattcaatgagact

SEQ ID NO: 825901 - DNA, 120 bp, Artificial Sequence
  ENSG00000248019_63 (sequence is synthesized)
gcaaagtcacctgaatgggaaagcttgccctattgctggcctcggcaatggcaccttcaggttgtcccctgtacgggttgatgagggagtggaggaccccaggtcccttcttaatgtcag

SEQ ID NO: 825902 - DNA, 120 bp, Artificial Sequence
  ENSG00000248019_64 (sequence is synthesized)
ccttggccacaggtttcgatgaaatttagtatgttgattaggagctgccaaaatcagagcaactcccctcccaaggggacgtttagttttcagttgttaaaaatacaccctgagacagaa

SEQ ID NO: 825903 - DNA, 120 bp, Artificial Sequence
  ENSG00000248019_65 (sequence is synthesized)
cgagtggcccttggtctcaagactggggctggatttagacaagtaatgaaaatgtttcacccagaaggcaacatgcaactgagtttttatatagttaatctggcatcctgtatgataaga

SEQ ID NO: 825904 - DNA, 120 bp, Artificial Sequence
  ENSG00000248019_66 (sequence is synthesized)
aggctaagaaatgcagaaattctctctgctaagtatgaattcacattgagctctcatacaccaaaatcttttattcatacttaatgttttctcattcttatatatttcatctcgtgaaat

SEQ ID NO: 825905 - DNA, 120 bp, Artificial Sequence
  ENSG00000248019_67 (sequence is synthesized)
tttaaatttttaattagcaactggtccacaacttagtttttttttttttttttttttccaaaaacagatagttaatactcctacttatcataaaactgtgttagaattcagcagctggat

SEQ ID NO: 825906 - DNA, 120 bp, Artificial Sequence
  ENSG00000248019_68 (sequence is synthesized)
tacataatactattataataagcctttattattgagtaactttacatacataatatttatatgcacaagtatttgagagcttataggtcaagccctgtgctaagtactttgtacccatga

SEQ ID NO: 825907 - DNA, 120 bp, Artificial Sequence
  ENSG00000248019_69 (sequence is synthesized)
tctgatagaacccttataacaccttgatgagatgcagccattttctacacactacacatgatgaaaccagcacaggaaatcagataacttgcctgctcttggccaccacgcggtgcgctg

SEQ ID NO: 825908 - DNA, 120 bp, Artificial Sequence
  ENSG00000248019_70 (sequence is synthesized)
ctgctttgtgttttatgggaaattgcacatggcaaacattcaaccataggcttcctgcctttattattaaagggcaaatatgggtaaggaggatagcatggggcttgatttgttcaatga

SEQ ID NO: 825909 - DNA, 120 bp, Artificial Sequence
  ENSG00000248019_71 (sequence is synthesized)
cctaaaaataaactgatcttattcataccctgccttgttctaggaaaggattctagtggcttctcagcagagggcagggcaaggaacaggtgctcaggaattggagcatctggcacgcag

SEQ ID NO: 825910 - DNA, 120 bp, Artificial Sequence
  ENSG00000248019_72 (sequence is synthesized)
gcccccactgcactctgaggggcttcactctcctcagacacgaagtcatggaaccagagcttatctcctaagtccctcatagttctaaacttttttgacaattaagttaacgtcctccat

SEQ ID NO: 825911 - DNA, 120 bp, Artificial Sequence
  ENSG00000248019_73 (sequence is synthesized)
tgacattttcttaaaacctgggtggtttgcgtaattctacatgtataagatatctgtgcataatgtgacttagaataatataaaaaaggataagccaaaaaataggcttagatgaaagac

SEQ ID NO: 825912 - DNA, 120 bp, Artificial Sequence
  ENSG00000248019_74 (sequence is synthesized)
tggaaagatacacgtcaaaacattaattctgacttgtctttggttattattgttttgggaattactacttaaatttgcttacctatattttctaaatactgtgcaatgggtgggaaatga

SEQ ID NO: 825913 - DNA, 120 bp, Artificial Sequence
  ENSG00000248019_75 (sequence is synthesized)
aaagcaagtgtttaggtataaaaatatatgagacatatccaaatcagagatcctaaaagtaaattcatacaataattgttaaactaaactgaaatacaatatattttaaatgacaaagtt

SEQ ID NO: 825914 - DNA, 120 bp, Artificial Sequence
  ENSG00000248019_76 (sequence is synthesized)
ggtactatgccagcttaggggaaggggtggcacagtgttaaatgactgttcatcctacctgtcatggcttctctcaattctgtgtgccttggtggtttctctgcttcccctctgagttct

SEQ ID NO: 825915 - DNA, 120 bp, Artificial Sequence
  ENSG00000248019_77 (sequence is synthesized)
ggtatattcatggtggtattcttgtcattgaatggtttctaattgtatttttgtcagggacgtgatgctgggggattgtctgttccaccatcttgctaatatcactctgaaactctattt

SEQ ID NO: 825916 - DNA, 120 bp, Artificial Sequence
  ENSG00000233222_0 (sequence is synthesized)
ggaaagagggttgaagaaactatgatttcttctggaaccaaaggattggctcctagctgttcaggggaagagagctggaagctggggactgatatcaaggatgagagggcctggagctgg

SEQ ID NO: 825917 - DNA, 120 bp, Artificial Sequence
  ENSG00000233222_1 (sequence is synthesized)
cccactccctgcagggaggaaacacactggctcctatgctctgtctagaactattcaccctcccaattcacgcttcttgggcttggctacagtgcctcagaaataattgatgatttgaca

SEQ ID NO: 825918 - DNA, 120 bp, Artificial Sequence
  ENSG00000233223_0 (sequence is synthesized)
tcggcatggcggcagtcactgccgtcacttagtcgccgatcaaggcttggactaagggcccacggtcactcgagtaggacttggatcggatgctgaataaaactcaccgtgaagcaagtc

SEQ ID NO: 825919 - DNA, 120 bp, Artificial Sequence
  ENSG00000233223_1 (sequence is synthesized)
ggcaggacaaggaaaaccccgtcaaagatttgcataaattttgctgctctcctgctggggggggggggggggcagttcgtcacatttaataaaattctctccctcccttctcccgactgc

SEQ ID NO: 825920 - DNA, 120 bp, Artificial Sequence
  ENSG00000233223_2 (sequence is synthesized)
cactttgtattgttcgaagttgagagagaaggagccggagtctccgaggtggcgttgggtgggggcgctactagctcccgttctctcagcgtctctagagggaagggcgccggtgggagc

SEQ ID NO: 825921 - DNA, 120 bp, Artificial Sequence
  ENSG00000233223_3 (sequence is synthesized)
aggagagtctgcaccgggcaggcctccttaggtgccgggttgcgcgcagggccctgtgcttgtctcgcctccggttggctcaggcctcggagcatgagtgcgccggcaactgctgggccc

SEQ ID NO: 825922 - DNA, 120 bp, Artificial Sequence
  ENSG00000233223_4 (sequence is synthesized)
cagacccccaagagtctccggggagccgaggcctggcgaggcagtcccgggattcgccccctccccgctggcccgagggcgcaccacgtgctgggcagagacttcggcgaggccgagtgg

SEQ ID NO: 825923 - DNA, 120 bp, Artificial Sequence
  ENSG00000233223_5 (sequence is synthesized)
accctgcagcgctgcttgggaaagggcaccttggactacctggtgggggcgttgtgcttcgttaccgaccgccgggacgccaacccacggtgcccacccgtgcgtcattccgctgtggat

SEQ ID NO: 825924 - DNA, 120 bp, Artificial Sequence
  ENSG00000233223_6 (sequence is synthesized)
cagccctttggcggcccccctccaaagtctacaaggtcacacggatgtctgcaggcagaggtgggataggagcatgccaggtgctgcgagggtttaatcgggctcttctgctggccttga

SEQ ID NO: 825925 - DNA, 120 bp, Artificial Sequence
  ENSG00000233223_7 (sequence is synthesized)
aggacaggacattctcattgctcaggagccactggcgctgcctttgggaatgaagttccacagccccccactcattgctttggctgtctgctgcatttgaaactgtacgagggtcaggaa

SEQ ID NO: 825926 - DNA, 120 bp, Artificial Sequence
  ENSG00000233223_8 (sequence is synthesized)
ctgcggggatgaatggctctaccggcttgccacggatggggaactggagcagccagtggccccaagaggaggaaggaagggaggcacggcagacccaacaccagctgtgccaggctttgg

SEQ ID NO: 825927 - DNA, 120 bp, Artificial Sequence
  ENSG00000233223_9 (sequence is synthesized)
ggggtgaacccatgaggcatcgtcacacactgacattttcatccctcctcagcagctgcttccggctccctgagacccagccatggaaggcatagaaaggcatgtgacaagaaactcatg

SEQ ID NO: 825928 - DNA, 120 bp, Artificial Sequence
  ENSG00000233223_10 (sequence is synthesized)
cgccgggacgccaacccacggtgcccacccgtgcgtcattccgctgtggatcagccctttggcggcccccctccaaagtctacaaggtcacacggatgtctgcaggcagaggtggggctg

SEQ ID NO: 825929 - DNA, 120 bp, Artificial Sequence
  ENSG00000233220_0 (sequence is synthesized)
agagacgagaaacgctggggcgaactgacaggcccagatttaggagtcatgacgaagatcctgagacgcttattcagtctgcagagaagccaaaaggagattcacataatggcccaatga

SEQ ID NO: 825930 - DNA, 120 bp, Artificial Sequence
  ENSG00000233220_1 (sequence is synthesized)
ctgaaggcctctttatttcgtgctctgctgttcgtgtaaaacccaatcgcagagcgggtctcaggcggcgctcgcctgcgtttctactctcagccaatcagaaaacccgactcttcgcat

SEQ ID NO: 825931 - DNA, 120 bp, Artificial Sequence
  ENSG00000233220_2 (sequence is synthesized)
tggggtcaagcccccgctgcggcccgcgtgctaacggggaggaagcttccagctgtgcctgggtgtctcgggcgccgagggcagcctgcgcccgtgctaagcccgcctcccgcgcgcccg

SEQ ID NO: 825932 - DNA, 120 bp, Artificial Sequence
  ENSG00000233220_3 (sequence is synthesized)
agggcccggtgtcccggaagacgcgcgggggtgaggcggccctcgcgtccgcccgccccgccacagattgcctccgaagtggcctggccgtggagcgccggcgaaaaccgaactcccgcc

SEQ ID NO: 825933 - DNA, 120 bp, Artificial Sequence
  ENSG00000233220_4 (sequence is synthesized)
cggctcccggagtcgggagcctgccggggtctcgccctcaggacccccagggagcggccgggcgccgcctatcaccctgacccaccgcaccttgagagcgctttcactgcgcctcttttt

SEQ ID NO: 825934 - DNA, 120 bp, Artificial Sequence
  ENSG00000233220_5 (sequence is synthesized)
caggcttccacatcctgctgtcccttaaaattgccttcacaaagggcagccaagagcccagctttggagagatacccagctccaactacccactggcaggcaatacgcagggcagctaga

SEQ ID NO: 825935 - DNA, 120 bp, Artificial Sequence
  ENSG00000233220_6 (sequence is synthesized)
tggcagagagaccttggaccttcggaccttcggggagcggttttcccttcggtgatatctaccttgctatgttcgtgatatctaccttgctacgttattttgaagattaagtgagctctt

SEQ ID NO: 825936 - DNA, 120 bp, Artificial Sequence
  ENSG00000233220_7 (sequence is synthesized)
actttaccgagtaaagtgctttgcttagcacactgtctggaacttaaatgagaagtactgacaatataacttacaaaaatcctaaactattgcctgagaaaaagagggagacaggacagc

SEQ ID NO: 825937 - DNA, 120 bp, Artificial Sequence
  ENSG00000233220_8 (sequence is synthesized)
agggagacaggacagctaagcaaaagacgagaatagaaaacacccacagcgtgaaaaactgtaaaattaactcaatagtattctctttactgttttttgttttgttttgttgttttgttt

SEQ ID NO: 825938 - DNA, 120 bp, Artificial Sequence
  ENSG00000233221_0 (sequence is synthesized)
accttgaagaagctccggaggaagtgcacgacgctgagcatggtggccgccgggacgcccggagcccggccgcagcactacgagccgcgccgccgagccggctccaccgacgccaccccg

SEQ ID NO: 825939 - DNA, 120 bp, Artificial Sequence
  ENSG00000233221_1 (sequence is synthesized)
ccgccctagggtccgcccccgcgccctcgcccggacgctccgcccccgcaaacctggccactggaggcacgtgaggtccaggctcctgccctgcccgcccctgggctttggtcacccgcg

SEQ ID NO: 825940 - DNA, 120 bp, Artificial Sequence
  ENSG00000233221_2 (sequence is synthesized)
cgcgggactgggcacgcacaggcacacagcagagccgtccacagacccggcccaggggccgccgggatcatcccgcccagtcgagctcttgggcccccttgaagcctaggagtgttttct

SEQ ID NO: 825941 - DNA, 120 bp, Artificial Sequence
  ENSG00000233221_3 (sequence is synthesized)
cagagagaaagcagcacgcttcttgcgcatttgcacatctccaacgcagcgcttcggcctgtcctccgcactggagactcaggtgcctccgccctcctgagagcaggggcggcctctctg

SEQ ID NO: 825942 - DNA, 120 bp, Artificial Sequence
  ENSG00000233221_4 (sequence is synthesized)
ctgagagttctgattgtcaagctcccagaactttcagagttcagtccgcccagcgttcttgtttaccagttgaggaaacggaggcccagggaggctgtgcagcgcgccggcactcacaca

SEQ ID NO: 825943 - DNA, 120 bp, Artificial Sequence
  ENSG00000233221_5 (sequence is synthesized)
cctggtggggacaaatgtggactaggatatctgggaccgaagtcttggcctccagctccctcttgcctcccacttacctttccagagatggagtttcaccacgttggccaagctggtttt

SEQ ID NO: 825944 - DNA, 120 bp, Artificial Sequence
  ENSG00000233221_6 (sequence is synthesized)
ggcctcccaaagtgctgggattatacatgtgagccaccgtgcctggccttgagttacattttcatggggacttgggacaatcggaaatgcatccaccacacttgcagactgactggtgat

SEQ ID NO: 825945 - DNA, 120 bp, Artificial Sequence
  ENSG00000233221_7 (sequence is synthesized)
gcatccaccacacttgcagactgactggtgatcctgaaatgatggcgtgtgggagaggcatgggcttcctttaagagccgccagagccagggcaggggcaccttgtgccttgacataagg

SEQ ID NO: 825946 - DNA, 120 bp, Artificial Sequence
  ENSG00000233221_8 (sequence is synthesized)
aaggctcccctgccaggatagacagaagagctgccgaagaggtggagccaggcaggggccacaggcccgtgaaggtctcagcagagcccccaggagagttggacttgctgcaagcagagc

SEQ ID NO: 825947 - DNA, 120 bp, Artificial Sequence
  ENSG00000233221_9 (sequence is synthesized)
ctatggctctgcggttccaggagaactgtttgtgccccttgccccactgcctgccagctgtccccaaaaggaccagaggatcagagtagcccactccagacgaggtgcgggcaccatgct

SEQ ID NO: 825948 - DNA, 120 bp, Artificial Sequence
  ENSG00000233221_10 (sequence is synthesized)
gttaccatctgctgcccctctttccatctttccatcttacttcctgcgtggcccagcatccaggctgtctagggccgtgggagacctggagagccattaaaaacaacaactggcagcaca

SEQ ID NO: 825949 - DNA, 120 bp, Artificial Sequence
  ENSG00000233221_11 (sequence is synthesized)
gttacctgtatttctctcaccacctgaggaaattggggttcaaaggggtaaagcaccttgtgtgttggccccaggggtgaagcaggaggggccaggcctctaggaggactggcacagttg

SEQ ID NO: 825950 - DNA, 120 bp, Artificial Sequence
  ENSG00000233221_12 (sequence is synthesized)
ggtcaaggacaggggagccaagaatgtggggtgcggtcaggacctgggatggccaagcagtgtgaggtgagccagaggcccaaggtctctgagatgctgcacagaggggcattgaaagga

SEQ ID NO: 825951 - DNA, 120 bp, Artificial Sequence
  ENSG00000233221_13 (sequence is synthesized)
gccaggatttgaggaggagaagggaggaggtgggggaggagggctcttatgcagacctggggtgtggggaggggatgttcactgacccccccgccccaccctcacccgcaggaccgtggc

SEQ ID NO: 825952 - DNA, 120 bp, Artificial Sequence
  ENSG00000233221_14 (sequence is synthesized)
caggctccaccctggaggcagcagagcgaggaacgtctaatggggatcccgtgtggatgcctttagggagctctgctgtatacctgttacctctcaccctcaatcacacctctggggcct

SEQ ID NO: 825953 - DNA, 120 bp, Artificial Sequence
  ENSG00000233221_15 (sequence is synthesized)
ggagctgctggggacacattgactggaaggggcttgggggcacaaggagtgagagccagagaagggcagggcagcccagggattggcagagctggcctcagaagctattggtgccactga

SEQ ID NO: 825954 - DNA, 120 bp, Artificial Sequence
  ENSG00000233221_16 (sequence is synthesized)
gattcaagtaccccctgcttcttccccaagtcacagacagggtgaagacagaggcaggattcaagcccagagcccatgcactgccctcattccctgactggagtgtattcctggcagggt

SEQ ID NO: 825955 - DNA, 120 bp, Artificial Sequence
  ENSG00000233221_17 (sequence is synthesized)
gacctggaaggggcccccccagcacactagctgacctacttctgcctggtctgagaagcctgtcctacatcactcaacctgaacacaggggaggcaggggaagaggcaggagggtcctcc

SEQ ID NO: 825956 - DNA, 120 bp, Artificial Sequence
  ENSG00000233221_18 (sequence is synthesized)
tatgaccaggaccacccccagggcccgtgctgcggcaagggcaaggacccctgcctccttgtgcccctgctccccacgtctgaacgtggacaggactgaggttgccctctgtaaggactg

SEQ ID NO: 825957 - DNA, 120 bp, Artificial Sequence
  ENSG00000233221_19 (sequence is synthesized)
tggaggctccaggctgggagaaggtggaaggtcccagagccccggagcctggctctgctgcctaatgctggagcaagtcacctgacccgcctagcctcagtgttctcatttgtgaagggg

SEQ ID NO: 825958 - DNA, 120 bp, Artificial Sequence
  ENSG00000233221_20 (sequence is synthesized)
gctgatgatagtgccagctctcagagctgttgtcttcacccttggctttcagtgtcatggtcgtgaagcccactcatacgtgacctcaatgagatggccaggtatgtttatcagcacttt

SEQ ID NO: 825959 - DNA, 120 bp, Artificial Sequence
  ENSG00000233221_21 (sequence is synthesized)
tgggataatgattctcccctcccatggtgactgtgaggggcatgagtgtggccagcgtgcagccgagaaaacagatgtgagccctctcgtttaggaagggaaggtgggacaggcaggcag

SEQ ID NO: 825960 - DNA, 120 bp, Artificial Sequence
  ENSG00000233221_22 (sequence is synthesized)
gactccttgtgggcacctgttgagggggcctcaccaggctgcatggcctcaagggctgctttcattgattcatctacagtgtatagttatttccaatcaactcaatacagcattcatttg

SEQ ID NO: 825961 - DNA, 120 bp, Artificial Sequence
  ENSG00000233221_23 (sequence is synthesized)
ttacctttccaggaagaggcccacgaaagctaagaccccaaggcccatgtgcaccatactgcagccctgctctgtccaccatttctgagatcggcgccccacagagggagagcatctgcc

SEQ ID NO: 825962 - DNA, 120 bp, Artificial Sequence
  ENSG00000233221_24 (sequence is synthesized)
cagactggctttttgcacccctgctcaagcctgcaccctcgtccaagtcctagccccactgaacgctatgcctggtcagcagtgcgtgtcaggggtgcctggcagagtgtgcattttccg

SEQ ID NO: 825963 - DNA, 120 bp, Artificial Sequence
  ENSG00000233221_25 (sequence is synthesized)
tacacccaacctgtctctgcctctccccaggccctcacagcaaccaggccaggcgagaagcttgggagatagatactcagaggaggcactgtggggccatctgaagatcctgcgtcccct

SEQ ID NO: 825964 - DNA, 120 bp, Artificial Sequence
  ENSG00000233221_26 (sequence is synthesized)
gtcacagcctttatgtcactcagggtccatgactgtgctagaagcatgtccctgaggcccatggtggtgggaggagggtgtgggattcggatctgggcacctggctgtgctgcacaccag

SEQ ID NO: 825965 - DNA, 120 bp, Artificial Sequence
  ENSG00000233221_27 (sequence is synthesized)
ttgtgtaatcatgatcatctgctctaaacacgtatctttaacattcgagaggaatgaccgcctggtggggttgccatggagagtacgtgagaaattaaacctcacaggtgcttagcaaaa

SEQ ID NO: 825966 - DNA, 120 bp, Artificial Sequence
  ENSG00000233221_28 (sequence is synthesized)
taaagtgctaatcccctggcgaggggggaggtccagtgaaaatacacaacccctggccacaggttccattgttgtctggactcctctgaccagtggacagccctggacctgggttctcag

SEQ ID NO: 825967 - DNA, 120 bp, Artificial Sequence
  ENSG00000233221_29 (sequence is synthesized)
acctgagtcagaaccacgtggaggacaccatagagcttaggctgctgcccctcaccgctgcccccctctcacaggatctggggtggggcctgggaatttgcattttaacatgtttccaag

SEQ ID NO: 825968 - DNA, 120 bp, Artificial Sequence
  ENSG00000233221_30 (sequence is synthesized)
tgaccctgaagctgctggccctgggaccacacttagagaacccctggttcaggctatggggcctgggccaggctcgccgtctagcagaggatcagaccccaggttggagcataaccgtca

SEQ ID NO: 825969 - DNA, 120 bp, Artificial Sequence
  ENSG00000233221_31 (sequence is synthesized)
tgatggctccattcatcaggcacctgctgtgtccccgcacgcccagatccctgccacagcgcagcctccctagagaagtgacatccaatgctcgaggggaaataaatcaaaggtagttta

SEQ ID NO: 825970 - DNA, 120 bp, Artificial Sequence
  ENSG00000277695_0 (sequence is synthesized)
acctgggttcttcatcagcccatccttagatcttagtgcacatatgcacctaatgaagtctcactcttatcgccgtagctatagtgcaatggcgctgtctcagctcactgcaacctccgc

SEQ ID NO: 825971 - DNA, 120 bp, Artificial Sequence
  ENSG00000277695_1 (sequence is synthesized)
cagcctccgtagtagctgggattacaggatcctgccaccacacccactaatttttgtatttttggtagagaatgggtttcaccatgttggacaggctggtcatgaactcctgacctcagt

SEQ ID NO: 825972 - DNA, 120 bp, Artificial Sequence
  ENSG00000277695_2 (sequence is synthesized)
tggcctcccaaagtgctggattacaggaagagacacagacaaaaacatccgatattggaatattccttcgtgaataaatataaaacttatggagagggaggaagatattttgaaaggaaa

SEQ ID NO: 825973 - DNA, 120 bp, Artificial Sequence
  ENSG00000277695_3 (sequence is synthesized)
aaaatcattggactttattgctcaaagccaaaagaaattgttttttgtggcaaaagtaaaacaagatggagtttcgctcatgttgcctaggctagaatacagtggcacaatctcggctca

SEQ ID NO: 825974 - DNA, 120 bp, Artificial Sequence
  ENSG00000277693_0 (sequence is synthesized)
ggagaagatgtggtggcttccgtttgttggtggaggaggtggcaggcctcggcggttcatctgggttgctctaaatgacactgtttgattattctgatagccgaagaatattccccagtg

SEQ ID NO: 825975 - DNA, 120 bp, Artificial Sequence
  ENSG00000277693_1 (sequence is synthesized)
tttcttcatgtggctgcagatggcaggatttcccaaagctttatggctgaaacatattccgtggtgtatctgtatggcagtttcttcatccctgaagctgtgtacggacagcttggaagc

SEQ ID NO: 825976 - DNA, 120 bp, Artificial Sequence
  ENSG00000277693_2 (sequence is synthesized)
tgtcactcctgtcctcacaacgacaacaaaaaacaccttgaacaaactgaaaattacaacttttcttagatccatcagagacttgaggttaacagggaaaaccgttatcccccaaattgg

SEQ ID NO: 825977 - DNA, 120 bp, Artificial Sequence
  ENSG00000277693_3 (sequence is synthesized)
ctaacaggatcggaggctggccactggagccagaaccacggtgggaagacttacatgtaaacaacaaatcgctggaggctccatgcacataaacttgagaattaagaattaagggagccc

SEQ ID NO: 825978 - DNA, 120 bp, Artificial Sequence
  ENSG00000277693_4 (sequence is synthesized)
agtcttagggggccctacactttcatgaacctccaagagctctgccagacgctcttatgcacatcagagaaaaattccctcctgcttcccacagggaaggggaaaagtaactactttgaa

SEQ ID NO: 825979 - DNA, 120 bp, Artificial Sequence
  ENSG00000277693_5 (sequence is synthesized)
atatgccctgggtgttccgttctccttagcaaaagcctgccccagggaaaccatttcacaagagtctaaccaccttgggctttagcagggcctaacacctgttagaataagaataaaaat

SEQ ID NO: 825980 - DNA, 120 bp, Artificial Sequence
  ENSG00000277693_6 (sequence is synthesized)
tgcatcaaacttttcttcagaacccatgcaagcaagcaaaaaaattccaccaaactaaaattctgtatcctgcaaaattatctttccaaagtgaagaaaaagactttctcagagaaacac

SEQ ID NO: 825981 - DNA, 120 bp, Artificial Sequence
  ENSG00000277693_7 (sequence is synthesized)
ggtggcaggcctcggcgcttggaagctgtcactcctgtcctcacaacgacaacaaaaaacaccttgaacaaactgaaaattacaacttttcttagatccatcagagacttgaggttaaca

SEQ ID NO: 825982 - DNA, 120 bp, Artificial Sequence
  ENSG00000277693_8 (sequence is synthesized)
gtgatggggcttctagctgacatggtagttgtactgtgaattttttcaggaacctctagctgtttttcatagtgtgtatactaatttacatccccaccaatagcatttaagaggtttctc

SEQ ID NO: 825983 - DNA, 120 bp, Artificial Sequence
  ENSG00000277693_9 (sequence is synthesized)
ttctgtaagtctacactggctgtcacctttaaaaatttgtgttttgtttgtctttggtagtattcattctgagtggaatgagatggactcttagtgtggtttttgtggacatttttgtga

SEQ ID NO: 825984 - DNA, 120 bp, Artificial Sequence
  ENSG00000277693_10 (sequence is synthesized)
ggattggtgatgtcgagaaagttatttgagaaatccccacatcgttttccatggtgtctgaactagtttgcatttctaccaacagcagaccagcatcctctcctcctctgcctcgctggc

SEQ ID NO: 825985 - DNA, 120 bp, Artificial Sequence
  ENSG00000277693_11 (sequence is synthesized)
attcattcttgtggactgtgtcataattgtcattccgaccagtgtgaaatactatctcatgggccttttgctttgcatttctctgatgattactgaggtagagaaatgtcctgtccgttg

SEQ ID NO: 825986 - DNA, 120 bp, Artificial Sequence
  ENSG00000277693_12 (sequence is synthesized)
ttgagatgtgtgttttcatgccctttgccctttcttcactgagtttttgttttgctgatttatttgcttaacatttttgaggtagatcctggaaatcagacttcatgagatgcatatgtg

SEQ ID NO: 825987 - DNA, 120 bp, Artificial Sequence
  ENSG00000277693_13 (sequence is synthesized)
gggacattttctcccattgtgtaggctttctgtttactctgttggtaatttcttctgctgttcagcagctcttttatatattaggtcccacttgtcaataattgttttagttgcacttgc

SEQ ID NO: 825988 - DNA, 120 bp, Artificial Sequence
  ENSG00000277693_14 (sequence is synthesized)
ttttggggacttaggcatatccatgctgtgccaaatcctctgtcaggaagtgtatttcctaggttcccttgcaggcttttaatagtttgaggtcttgcatttacagctttcattcatctt

SEQ ID NO: 825989 - DNA, 120 bp, Artificial Sequence
  ENSG00000277693_15 (sequence is synthesized)
gcgttaatttctgtacatggtgagacacaggggcccactgtttttcttctgcaactggctagccgttttatcccagcaccatctattgagaggagggagttctttctccaaagcttgttt

SEQ ID NO: 825990 - DNA, 120 bp, Artificial Sequence
  ENSG00000277693_16 (sequence is synthesized)
gtgtggtttttgttgaagatgaagaaatagtgtcaacctggtgtttgatgtccaatgttcaccaggctccaggtggacacctctagaagtagatctttacagatgagaacctggaactgg

SEQ ID NO: 825991 - DNA, 120 bp, Artificial Sequence
  ENSG00000277693_17 (sequence is synthesized)
tttgctgacccgttttagtcggaatgaattcctgaccttcttgtcaggaggagacagaaacctgatcatctgtagtgtacggtggtatcgtgattacttaaatcatcaaatgtggttatt

SEQ ID NO: 825992 - DNA, 120 bp, Artificial Sequence
  ENSG00000277693_18 (sequence is synthesized)
gggaatgatgtgttttttcaagtggtatatgagaggtaaaattgctattgtagttgactgttgcagttataattttgtcaacatggtctgtaagagtgcaatggagtcggcccggcgtgg

SEQ ID NO: 825993 - DNA, 120 bp, Artificial Sequence
  ENSG00000277692_0 (sequence is synthesized)
ctatgtaccctgctgtccaaatgacggcactgagtcagtgagaggtttcataacttgcccaaggccacagaactggatggagaaagactgcagagattcaaacccaggcctgctgacatg

SEQ ID NO: 825994 - DNA, 120 bp, Artificial Sequence
  ENSG00000277692_1 (sequence is synthesized)
cagagccaatgagaatatattatcttgcagtgcagtttatgggatatatgtgtccctttgggaattcctgggtgtctgctggtggcctgttaacttggttcttgaatatgcactttgctt

SEQ ID NO: 825995 - DNA, 120 bp, Artificial Sequence
  ENSG00000277692_2 (sequence is synthesized)
tgcactaacttctgaagataatctataataaaagcactgtgattaaaaaacagaaaaacacacaccaaaaatgtataggtttgtctgttggtgcttctgacaagaaaataaactcatgaa

SEQ ID NO: 825996 - DNA, 120 bp, Artificial Sequence
  ENSG00000277692_3 (sequence is synthesized)
tctcattaactttaaaaaaatcacatctacttaaggtttaatgactaaagccaactttctaacatatctgtaccgttctctgaacatactgttttcacacttaactacgatgttgtcact

SEQ ID NO: 825997 - DNA, 120 bp, Artificial Sequence
  ENSG00000277692_4 (sequence is synthesized)
tgtttctgtctgattctgcaagggcagagaccttgaaatattcaaatctggattcccccatggtttgacccagctgaagtcaggcagtgttcgctgaaagaaataaaggtgtttccataa

SEQ ID NO: 825998 - DNA, 120 bp, Artificial Sequence
  ENSG00000249052_0 (sequence is synthesized)
aaatcacacgcctatagacaatcaggacactatcatgataaaaatcaattacagcttctgttcttgtctctggaaccacactgtacctactagaagctgcaccagcaaaaccagtgtttg

SEQ ID NO: 825999 - DNA, 120 bp, Artificial Sequence
  ENSG00000249052_1 (sequence is synthesized)
tatcctgtttctacactcatggagccagttattgaactatggaacagctgttgatttcatttcaccaaaagcaagtgccttaatgcccacatttgccagatgcttcctgttcttgaacat

SEQ ID NO: 826000 - DNA, 120 bp, Artificial Sequence
  ENSG00000249052_2 (sequence is synthesized)
gtgtcttcctgttaatcccatagcagctccaattgctagaacccagtgaaatttcgggatacttctatagaaacacttgtaaagctactgtgttttgtcaggaaagaatattttaccagc

SEQ ID NO: 826001 - DNA, 120 bp, Artificial Sequence
  ENSG00000249052_3 (sequence is synthesized)
aagtaagaagggcttaggagttccatgaagcatgcgctaaggcaagcaagttgtaaatgcattttcttgaacattttatgcgacagagaaaccagcagttttagagcacaaaatacactt

SEQ ID NO: 826002 - DNA, 120 bp, Artificial Sequence
  ENSG00000249054_0 (sequence is synthesized)
cacacaacggggtttcggggctgtggaccctgtgccaggaaaggaagggcgcagctcctgcaatgcggagcagccagggcagtgggcaccaggctttagcctccctttctcaccctacag

SEQ ID NO: 826003 - DNA, 120 bp, Artificial Sequence
  ENSG00000249054_1 (sequence is synthesized)
agggcaggcccttcagctccattctcctccaaggctgcagagggggcaggaattgggggtgacaggagagctgtaaggtctccagtgggtcattctgggcccagagatgggtgctgaagc

SEQ ID NO: 826004 - DNA, 120 bp, Artificial Sequence
  ENSG00000249054_2 (sequence is synthesized)
tcccacacctgcctgtgaaaatggattcctctctcacctgggagagccaggtgctgccccgagaaggatgcatttatggcttcatgaagtctttcctgacccccgatgctgctgactata

SEQ ID NO: 826005 - DNA, 120 bp, Artificial Sequence
  ENSG00000249054_3 (sequence is synthesized)
gagattatgtacgtaaaacaccaggtgcctaacccggcacagagcaggagggctaagcgtgacatccagcatgtggtcagtggaatccagtattcctacccacctctctagtctcccctc

SEQ ID NO: 826006 - DNA, 120 bp, Artificial Sequence
  ENSG00000249054_4 (sequence is synthesized)
cacccctctccctttcagaggcaccaagctgcttgtggtcttgtctattcccactccctgcccgactgaacattttctctacctcctgatcatcagcagcagaaactggctgctcttcct

SEQ ID NO: 826007 - DNA, 120 bp, Artificial Sequence
  ENSG00000249054_5 (sequence is synthesized)
cctgggtagacagccagactgtatttcccagctgcccctgcagtgagatgtggccatcggagccagcattggccaatggactctgcatgggagtgacgcatgctgcctccaggcttgtct

SEQ ID NO: 826008 - DNA, 120 bp, Artificial Sequence
  ENSG00000249054_6 (sequence is synthesized)
ctaaaacctcccacgtgtcctccacctgctcttcccacctccaaggagcacggcaattgtggaagacccagattagtgatggcagaaccatagatgggaggaacctgggtccctgactta

SEQ ID NO: 826009 - DNA, 120 bp, Artificial Sequence
  ENSG00000249054_7 (sequence is synthesized)
aagtatcatggatttggatgttcccttagtgagaaataaacttccattgtgtttaagcctttatttgtttatagttggttacagcaactgccttcttttaattaaaacactcctgctgct

SEQ ID NO: 826010 - DNA, 74 bp, Artificial Sequence
  ENSG00000249054_8 (sequence is synthesized)
accttgggcaagttcttaaacccttcaaagcctcatttttctccaatcataaaagggaaagatggtaatatttt

SEQ ID NO: 826011 - DNA, 120 bp, Artificial Sequence
  ENSG00000249057_0 (sequence is synthesized)
gttacagtcttccatttcagagaggcaatcaaaagttgtgagagaaagagttgtctttagagtctgtcaaatcatttcattttaagctcttcatttcacatttccatcatgtaaagtacc

SEQ ID NO: 826012 - DNA, 120 bp, Artificial Sequence
  ENSG00000249057_1 (sequence is synthesized)
ttaattacagaatcctttttattttctaattaagtattgtaatacagtcaaggattttagttctgtagacacttcgtaatatgcttaagagcacttaatattttgaactttgggcaatcc

SEQ ID NO: 826013 - DNA, 120 bp, Artificial Sequence
  ENSG00000249057_2 (sequence is synthesized)
gtaattagaatgggaagcatgccggatgccttttattgcttccatctgtttaaagataatgaaaataagaaattggaaaaaaaaatcttccaggagactgtagattattagctacagaat

SEQ ID NO: 826014 - DNA, 120 bp, Artificial Sequence
  ENSG00000249057_3 (sequence is synthesized)
attcctttcttttgaaaaaattgggtaatcccttaaagatatttattgatagtcccttaaagatatgaagatatttagtgaagtctttgataattttttgttttgttttgttttgagaca

SEQ ID NO: 826015 - DNA, 61 bp, Artificial Sequence
  ENSG00000249057_4 (sequence is synthesized)
tttgttttgttttgttttgagacagagcctttgttacccaggctggagtgcagtggctcaa

SEQ ID NO: 826016 - DNA, 120 bp, Artificial Sequence
  ENSG00000268601_0 (sequence is synthesized)
gtcttcattcatccttcacatttactgagcacctactatgtgcaaggcactgttccagttgctgggcatgcagcagggaactaaagtggcaaaaattcccaccttcaaggagctagcctt

SEQ ID NO: 826017 - DNA, 120 bp, Artificial Sequence
  ENSG00000268601_1 (sequence is synthesized)
tttgatgggctagcaatccaaagcgaactttggattttgcttgtgtatttattagagacaaggtctcgctctatcccaggctggagtgcagtggcacaatcagctcaccgtggcctcaat

SEQ ID NO: 826018 - DNA, 120 bp, Artificial Sequence
  ENSG00000268601_2 (sequence is synthesized)
tgccattgcattgaagcctgggcaacacacagagactctgtctcaaaaaaacaaaaaaaagaatgcgttggagaagtagaaggctgccataatcatatataagggtgtatgtgtgtgtgt

SEQ ID NO: 826019 - DNA, 120 bp, Artificial Sequence
  ENSG00000268601_3 (sequence is synthesized)
tcatatataagggtgtatgtgtgtgtgtgtatgtgtgtatatatatgttgtatgtgtatataattatatgcacatataattacatgtaatatatgatataacattttcattgaggtataa

SEQ ID NO: 826020 - DNA, 120 bp, Artificial Sequence
  ENSG00000268603_0 (sequence is synthesized)
ctgtgggtcccaccacccccgggctcggcgccagggcggaaggtccgggggtgccgttcaggccacgtcgacgcgagcgaagctctggtccatgcccaggctgttctccacgtacacctc

SEQ ID NO: 826021 - DNA, 120 bp, Artificial Sequence
  ENSG00000268603_1 (sequence is synthesized)
gtacttgccgctgtcctgaggcgtggcccggcgaatggtcagcgtcgtggtggtgctgccgatctcgaagaacaccctgcggaagggcggcggggaggagggcggagccgtggtcagtac

SEQ ID NO: 826022 - DNA, 120 bp, Artificial Sequence
  ENSG00000268603_2 (sequence is synthesized)
ttcctcgctgcccagtccccgcccccgtcactccagccagatttctgggctcagtcccacccaggttccagccccaggccctggccgtgccgcaggtcccggccctcgcctgtcatcctc

SEQ ID NO: 826023 - DNA, 120 bp, Artificial Sequence
  ENSG00000268603_3 (sequence is synthesized)
ctcgatgtcctccccgtccttggtccagcctacgtcgggcgcaggctctcccaggatctccgcagtcagcgtcacggtggtgcctttgcgcgccttagtgttgtcgggtcccttttgaat

SEQ ID NO: 826024 - DNA, 120 bp, Artificial Sequence
  ENSG00000268603_4 (sequence is synthesized)
cttcgtcgggactagcggaaggaaaggggagcgaaaccccgtgaaggacccggagatgaggcagggcatcacctcaccggctaatacccggcactaaatacagatgcatttaaactcgca

SEQ ID NO: 826025 - DNA, 120 bp, Artificial Sequence
  ENSG00000268605_0 (sequence is synthesized)
ccaggcggaagggccttgcgggttgtgttctcagcaaggaggagccgggagagaggtgcgggagccgccaaggtctcaggcaaggtcagggactgacggcaggaaagttgggggagcagc

SEQ ID NO: 826026 - DNA, 120 bp, Artificial Sequence
  ENSG00000268605_1 (sequence is synthesized)
atcagaggataacgggcccaaggctctgggctcaccgcaggcactccctcgccttctccgcctcttcccggggcccagtgctgccccctgcctgcttcacaggagccccaggaagctccg

SEQ ID NO: 826027 - DNA, 120 bp, Artificial Sequence
  ENSG00000268605_2 (sequence is synthesized)
ttgaagtcccctgatgtggggggaaaaaccaacgcagccctaatcctgaagctgagggtatctgtgaggccctggtccagagggcaggcaaaggcagggattgaggcctgctctccccag

SEQ ID NO: 826028 - DNA, 120 bp, Artificial Sequence
  ENSG00000268605_3 (sequence is synthesized)
tgctgaggatagaaagctgtttctccaggcctccagagcacagtctcaagggatgcccgccccacaccaccgcggcgggcgaggttgcctttcaggcggtccagaagcagttggctgtgt

SEQ ID NO: 826029 - DNA, 120 bp, Artificial Sequence
  ENSG00000237101_0 (sequence is synthesized)
gaacaaaggggatggatttcagaaacgtttctaaatcataaatgactgaaccagaagaactgaagctgatgtcagatttctcgcttgggtgatgaggaacaaggcaggaagagcagcaat

SEQ ID NO: 826030 - DNA, 120 bp, Artificial Sequence
  ENSG00000237101_1 (sequence is synthesized)
gaggatagaggtggaagggcagctcaggaatttccctggagttttcccatcttgagacttcggtcttggaagacagaatggctgtgacataatgtggactttttacttccacctctagga

SEQ ID NO: 826031 - DNA, 120 bp, Artificial Sequence
  ENSG00000237101_2 (sequence is synthesized)
aagcgttctttggaacacctttgctgagtctctctctcctccgctcaagggattccgctgacacattgcattcttgggagaaccttccaattccaattatggactagctgctcctaccct

SEQ ID NO: 826032 - DNA, 120 bp, Artificial Sequence
  ENSG00000237101_3 (sequence is synthesized)
gtgctcttcgcttggtgactattcttatcccttttcagcccttctcacactgttttgtgactgtctctttatctgtattaagttggatatgaatttggctcctttcacacagaccaaaat

SEQ ID NO: 826033 - DNA, 120 bp, Artificial Sequence
  ENSG00000237101_4 (sequence is synthesized)
ataaatagcttaagcaatataaagatcacacacacaagtgaggcaaatgaccatctgagggttgaggaaactctgctgcaagggttgcccacgatcctggtttcttgtgttttattactt

SEQ ID NO: 826034 - DNA, 120 bp, Artificial Sequence
  ENSG00000237101_5 (sequence is synthesized)
cattccctaggatgttgtctccatttacaaggccaaaacaggttcatcatcagctcatcactctctagtcccgggaagggcagcatggagttaaaatgacagaggaagaaggcattttca

SEQ ID NO: 826035 - DNA, 120 bp, Artificial Sequence
  ENSG00000237101_6 (sequence is synthesized)
cacaaggctggccagatgggaagaatcttcagcttcagcttcagcttggcctcattcatttgaaaataaaatgtttacatgaggccgcgcctgtgtccagctgaaagtgggtccttcaga

SEQ ID NO: 826036 - DNA, 120 bp, Artificial Sequence
  ENSG00000237101_7 (sequence is synthesized)
gcgtgtgggggattctctgccggcttgatgggctagctcctctaagccggctgctggagacatcaccggctgagggactcctgcaaacgttcatacatgatttgatcctgaaaggaggga

SEQ ID NO: 826037 - DNA, 120 bp, Artificial Sequence
  ENSG00000237101_8 (sequence is synthesized)
gaacacagaatacagagaccgtcactgcttgttttgggctgaatggtgccccccaaaattcacatgctgcagtccgcacccgcaggacctcagaatgtgattgtaactggagagagggtc

SEQ ID NO: 826038 - DNA, 120 bp, Artificial Sequence
  ENSG00000237101_9 (sequence is synthesized)
tttatagaggagactggattaaaatgaggtcatacaggtagactcttatccaatatgactgctctccttacaaaaagaggggattagggcacaggagggaagagcatgtgcgcagaggga

SEQ ID NO: 826039 - DNA, 120 bp, Artificial Sequence
  ENSG00000237101_10 (sequence is synthesized)
aaagcacatgcaggcgctgggagaagacagccatcagtgaggacaaaggctccagaagaaccaatcctgcccaacactctccagaactgtgagaaaataaattttccactttttaagcca

SEQ ID NO: 826040 - DNA, 120 bp, Artificial Sequence
  ENSG00000277527_0 (sequence is synthesized)
gtgcagttccttgattgacctgtcctgatgcagtgcctgactgtagttctgcagctccactgaagaagaggcactgaggactagaggcagccaggggattgcaactcaaagaggttttct

SEQ ID NO: 826041 - DNA, 120 bp, Artificial Sequence
  ENSG00000277527_1 (sequence is synthesized)
agaaccagttacttccaaattatgttcaattaggcaacagaactaaagaatatgcctctgatctacttatttctcagcctgaatgctgacttcatagactttcaaaacaaagtaataggt

SEQ ID NO: 826042 - DNA, 120 bp, Artificial Sequence
  ENSG00000277527_2 (sequence is synthesized)
gaggagcaaaggaagtagttctgctgacggttcaggacctgctgtgtgggtagggtggttcactagtcatcctgaaagagcatgagaaggagaaatactgtctgtggctgacttcggcct

SEQ ID NO: 826043 - DNA, 120 bp, Artificial Sequence
  ENSG00000277527_3 (sequence is synthesized)
gcagcaaatcctgttgaaacctgcaaagttgttataaaaacagatggaccaggacttccacaataactgtttggatgggcagttaaattatttagccatttctacaatgtgactgtaacc

SEQ ID NO: 826044 - DNA, 120 bp, Artificial Sequence
  ENSG00000277527_4 (sequence is synthesized)
cagttacaggaagaggtttgtgtactctccagtgactcttagcaggaagctgcctatgcaagtacaaaatgggtggaatgatggtctttagctgatagcagaaatggacagtcggccttc

SEQ ID NO: 826045 - DNA, 120 bp, Artificial Sequence
  ENSG00000277527_5 (sequence is synthesized)
accaacccaccctaccttgtgtctcatacacagcaagttttaaagatttccaggaaacatatcttaccaacttccttagtaactaattccggaagaaatgaagaaatccacctgcaagct

SEQ ID NO: 826046 - DNA, 120 bp, Artificial Sequence
  ENSG00000277527_6 (sequence is synthesized)
agaaatgaaatccgcttgatggcacagaatattcaagtgagtttctaactcagttaacaatatgataaaaccaaatatatgcacatgcaaaattattaaagatttgtttatgtgagactc

SEQ ID NO: 826047 - DNA, 120 bp, Artificial Sequence
  ENSG00000277527_7 (sequence is synthesized)
gggtggttcactagtcatcctgaaaggtaagctctgacatggagacattcaagcatgagcagacttagtcctctggaacaacagtttctaacttttttggcaccagggactggttttgtg

SEQ ID NO: 826048 - DNA, 120 bp, Artificial Sequence
  ENSG00000277527_8 (sequence is synthesized)
tgtggaagacgatatttttccacagaccaaaagacggggagatggtttggggaggattcaagaacataacgcttattgtgtactatcatctattgctattattattacattataatatat

SEQ ID NO: 826049 - DNA, 85 bp, Artificial Sequence
  ENSG00000277527_9 (sequence is synthesized)
agcatcaggtgttagattctcataaggagcccacaacctagatccttcgcatgcacagttcacgatagggtttacgcctctatga

SEQ ID NO: 826050 - DNA, 120 bp, Artificial Sequence
  ENSG00000277527_10 (sequence is synthesized)
aatgaagcttcactggctcaccagccattcacctcacactgtgtggcccggttcctaacaggccaccaatcaataccgatctgtggccgggggttgcggacccctgctctggagcgttcg

SEQ ID NO: 826051 - DNA, 120 bp, Artificial Sequence
  ENSG00000277527_11 (sequence is synthesized)
attggcattggtgccaaccattcacctcaaacttgcctcatttgagatgcaaataacataagtgacaaagccggtttttaatctgttgggatcactgctctaaagatgcagtgaatgaga

SEQ ID NO: 826052 - DNA, 120 bp, Artificial Sequence
  ENSG00000277527_12 (sequence is synthesized)
atcacaataagaagtagagaagtgtttgcatgtcaaattaaaaatgacttttttcctggattttcctcatgtaattaaaacacaagtaaagttgggttatgaagcttttaactattaaac

SEQ ID NO: 826053 - DNA, 120 bp, Artificial Sequence
  ENSG00000277527_13 (sequence is synthesized)
tatttggctagcataaggattagccagaaagggaccgaatactttttttttttaggtttttgaagtgatcgtatcaccatgagaaaaaaatcctcactcttgaggtaaatgttataatcg

SEQ ID NO: 826054 - DNA, 120 bp, Artificial Sequence
  ENSG00000277527_14 (sequence is synthesized)
tacttgtgataaaaatcattcctggtttgttctaatctcaatacaatcttggctgtgtatttaatattttaaaagttttctacaagattttttacaacaataaaatattaatttttctct

SEQ ID NO: 826055 - DNA, 120 bp, Artificial Sequence
  ENSG00000277527_15 (sequence is synthesized)
agccagggaaagtcagggagggaagacagaggagcccagccactcacattctttctggctcccagcaatcacccagtcaaatgtggggctgctggtgaggacaaaaggacccggcagaac

SEQ ID NO: 826056 - DNA, 120 bp, Artificial Sequence
  ENSG00000277527_16 (sequence is synthesized)
aggtgcacctgggaggggggttcagagccaagagaccaagagccctccctcaggacagccggggaggccaactggaccccagactcaactcggcaaatgggggcaactccaacgatctac

SEQ ID NO: 826057 - DNA, 120 bp, Artificial Sequence
  ENSG00000277527_17 (sequence is synthesized)
ttccacaacactgagtaatttctagccacagagccccacgcatgcagttttagtattataaaaatgtgaagacaaattagtcaagtcagggcactaaataaaattaaaaattcttgtcct

SEQ ID NO: 826058 - DNA, 120 bp, Artificial Sequence
  ENSG00000277527_18 (sequence is synthesized)
gtgatgagaagtgcatcgcagggtaacgaatgctgtgttattagccaccaaatgctccacacgatgctgcagtctttcagaagcaaagggcacattgaaataaaatcacactaaaagtgt

SEQ ID NO: 826059 - DNA, 120 bp, Artificial Sequence
  ENSG00000277526_0 (sequence is synthesized)
gctctctcctggcgcctccctcctcgctgaacgccaacagtgctcttcctcagatgctcgatttgactggtgtgaggtacaaaacagtcacgaaagtgaaatcatgagactattaccgat

SEQ ID NO: 826060 - DNA, 120 bp, Artificial Sequence
  ENSG00000277526_1 (sequence is synthesized)
gtaaatggcagattcacctcaagaaggagatacttaagaaggtctcagagacagattatgccacttctggatctactgaagtctgagtcacacctgagaaacacagatgcaggagaaatc

SEQ ID NO: 826061 - DNA, 120 bp, Artificial Sequence
  ENSG00000277526_2 (sequence is synthesized)
tcctaatatattcagaattgatgtgtaatcccccataaaatacatcgtttccattgtaaaaatcagtgatgcaaacccacttcacgcgcagcacccacctgcaccgtaccacacaacgct

SEQ ID NO: 826062 - DNA, 120 bp, Artificial Sequence
  ENSG00000277526_3 (sequence is synthesized)
atttacatgatggacaaattgtgaaaatcccattgaaggatgaacagataaagacaatgtatgtacctatctacaatgaaatattattcataaaggaagtctcattttcagcaacctgga

SEQ ID NO: 826063 - DNA, 120 bp, Artificial Sequence
  ENSG00000277526_4 (sequence is synthesized)
gaacaccatgctaagtgaaataagccaggcacagaaagaccaggcctgcatgagctcgtcctgatgtgaaacctaagggagtccaactctcaagtaccgagactagactgcggttagcag

SEQ ID NO: 826064 - DNA, 120 bp, Artificial Sequence
  ENSG00000277526_5 (sequence is synthesized)
gagctcggggagaggaatgcgaggagatggtgctgaagcagcacagaccctgagctatgcaaagtgagtgagttctagagaccgctgcacaagggtgcctgtcgtaagatggggagtgcg

SEQ ID NO: 826065 - DNA, 120 bp, Artificial Sequence
  ENSG00000277526_6 (sequence is synthesized)
cgctcaaccatggcttaagagggtcgatttcatgtcacgtgcttcttacaacagtttctaaaaggatgaattcattcttctagaatcacaattctaaataaaaataactccagaaaaaaa

SEQ ID NO: 826066 - DNA, 89 bp, Artificial Sequence
  ENSG00000277526_7 (sequence is synthesized)
gctctgtcatccaggctggagtacgtggaatccgccttccagattcaagtgattctcccaggtagctggaactacaggcacctgccacc

SEQ ID NO: 826067 - DNA, 65 bp, Artificial Sequence
  ENSG00000277526_8 (sequence is synthesized)
aactcctgaccataagacctggccccaaaatgaaaatcttcatagtaaacataaaacaaataagc

SEQ ID NO: 826068 - DNA, 120 bp, Artificial Sequence
  ENSG00000277526_9 (sequence is synthesized)
caaaatgaaaatcttcatagtaaacataaaacaaataagctacccattaactaatataagtaatcatattttaaagggaactactaaagtcacatcaatagagtataacacctgtgtaaa

SEQ ID NO: 826069 - DNA, 120 bp, Artificial Sequence
  ENSG00000277526_10 (sequence is synthesized)
agtgtttaagttaatttctctataaaggcattaatgttcaaatgtcttctaagaatattagaaatttttaaaaagtgctttgtaaagattattcgaacactgcattttttttttatcctg

SEQ ID NO: 826070 - DNA, 120 bp, Artificial Sequence
  ENSG00000277526_11 (sequence is synthesized)
agtttgttctttgttgaatgtatcttaaagtttcttggtactagtgtatttaagctttaatacatacatgtataggtatatattttaagtgctttataatctaaagtgctttcaggcacc

SEQ ID NO: 826071 - DNA, 120 bp, Artificial Sequence
  ENSG00000277526_12 (sequence is synthesized)
tgccagtgttcatttttaaatggatttctgcctcgttaaaaatcagtatttcaaacattgcagttttttacgtggtgactgggtgtggggctcctttgagggactgtgagggtctggact

SEQ ID NO: 826072 - DNA, 120 bp, Artificial Sequence
  ENSG00000277526_13 (sequence is synthesized)
gtagcggaagttatgggtagtgaaagggctgcatgaacaaatttgctgtcccaaattttgtgattccttttgagctaatgttcttgggaagggtgtaacgtctgtctctagattcacatt

SEQ ID NO: 826073 - DNA, 120 bp, Artificial Sequence
  ENSG00000277526_14 (sequence is synthesized)
ttttgcatgtggatatcttgtttttttagcactgttttttttgaatgaactatcccctttccattgcactacttttgttcctttgtcaaaaaccacttgagtatatgtgggtccctttct

SEQ ID NO: 826074 - DNA, 120 bp, Artificial Sequence
  ENSG00000277526_15 (sequence is synthesized)
ggactctctaatctgtgctactgactgatgtgttcattctttctccagtaccacactgtcttgattattgcagctttatactaattcttgaagtcagttagcattgttagcattgctgta

SEQ ID NO: 826075 - DNA, 120 bp, Artificial Sequence
  ENSG00000277526_16 (sequence is synthesized)
agtatgtgtcaatcttggatgaatactgtcccaatgctcctaaaactcctctgtctctctctgcctgtataaacgaaatcttaacttttctacttcagaacatgactctattcctctgaa

SEQ ID NO: 826076 - DNA, 120 bp, Artificial Sequence
  ENSG00000271204_0 (sequence is synthesized)
tacactcatccctgccattagcattcaggaccaatcttctatagcctatacgccacactggtctaggacagcacctaaataatactcatgctataaaaaattcatcaagttatatatttt

SEQ ID NO: 826077 - DNA, 120 bp, Artificial Sequence
  ENSG00000271204_1 (sequence is synthesized)
taaaaacatccctaaaattatctttttcctttactgaaaagaatttcaggatcccctctctctcactgcctctcttcacacacacctaccttagttggtcacctattttgtaaacatatc

SEQ ID NO: 826078 - DNA, 120 bp, Artificial Sequence
  ENSG00000271204_2 (sequence is synthesized)
ttctttaaaaaaagaaagaaatggcagtacatgaaaaactgcttcgtaaacagaaactatattatttatatttgtagcatttttttccccttgaggttaatttcctttgcttcccataac

SEQ ID NO: 826079 - DNA, 120 bp, Artificial Sequence
  ENSG00000271204_3 (sequence is synthesized)
tggaagccaatgattcagtgccattatataagcttattttccctcttggaaatagtaaattataagaggtttgacccaaaaatatacatcaaaattaggcagtattcggtgtttagcctc

SEQ ID NO: 826080 - DNA, 120 bp, Artificial Sequence
  ENSG00000271204_4 (sequence is synthesized)
catctgccttgtcttcttgtctttagttgtgcaagtagatgctgatgatttctggcagagctaaagtaagtaaatcatgtgaatttattttttttcctcataaaacagatggcatggtct

SEQ ID NO: 826081 - DNA, 120 bp, Artificial Sequence
  ENSG00000271204_5 (sequence is synthesized)
agctctgggcttgtatgtttcatgaagtacatgggtctgagtgcgtatttattttgtgagccaaggtttatgccttcttctataattttctttcaccgaaaattacctggagagctagaa

SEQ ID NO: 826082 - DNA, 120 bp, Artificial Sequence
  ENSG00000271204_6 (sequence is synthesized)
actccatttgtgtcagtgtaagaagctttagaatctatatccagaccaaggccatggaacaatgtagattcactcagtaaaaactcactagcggccttctttgtactagtctgtcacctt

SEQ ID NO: 826083 - DNA, 120 bp, Artificial Sequence
  ENSG00000271204_7 (sequence is synthesized)
tgcttggctttgggaagcttcaaactagggcagtttatgtttgggagtgaccagtcaaatagcaagacagacataggcaaggatgtaatttttaaaaatttaagtggggaatggtgaagc

SEQ ID NO: 826084 - DNA, 120 bp, Artificial Sequence
  ENSG00000271204_8 (sequence is synthesized)
tctgcgagtcagaatttttgctgccacccctcattttgaatctctattctgcattttttattcttttttttaggaaggaggaagaaaaatttctcctgaagaattcattggaaattaaaa

SEQ ID NO: 826085 - DNA, 120 bp, Artificial Sequence
  ENSG00000271204_9 (sequence is synthesized)
ttaacttgcgtattttgtattctttggaatgtgatgaagactgatttgaaagggcagtgctggatttggtcaggcataggaaaggaagacatgcagtcgtcctgcctagctcatccccgc

SEQ ID NO: 826086 - DNA, 120 bp, Artificial Sequence
  ENSG00000271204_10 (sequence is synthesized)
cacgatggagaagtggggttgctttcgttgtactttttttcatttgtttcttgccaagcccagtggcttctgttataacatgtggcagcttctcccttggagactgattcagtccaagtt

SEQ ID NO: 826087 - DNA, 120 bp, Artificial Sequence
  ENSG00000271204_11 (sequence is synthesized)
accataatatttaggaccagctacagagacgtttcttcccctaaacccatgccaaatctaaatcaaactatcttcttctccttagccgttcaaatagctccagctcttatataaaaatac

SEQ ID NO: 826088 - DNA, 120 bp, Artificial Sequence
  ENSG00000271204_12 (sequence is synthesized)
gagaaatacacaggcctcttttcgttttattcctgttcaaacagataaacaaacaaggcacatcatgcctaggttgctttgagcttgatcacttcctcctaaagcagtcttacgctgtgt

SEQ ID NO: 826089 - DNA, 120 bp, Artificial Sequence
  ENSG00000271204_13 (sequence is synthesized)
tgattttaagaattgcaacttaggtgttctagaacatattctgagagcatagtcatagtctgtgatctcagaatatgtttgcttccttctagaacatctgagttctagaaattgcgtaca

SEQ ID NO: 826090 - DNA, 120 bp, Artificial Sequence
  ENSG00000271204_14 (sequence is synthesized)
ataaactgctgtcagtgctgctggaggaaggaagagtaactctgacatcactggccttcaacaggtgtggcgctgagcttctgggcctcagaagccctgacttctagaggctgggggcca

SEQ ID NO: 826091 - DNA, 120 bp, Artificial Sequence
  ENSG00000271204_15 (sequence is synthesized)
gcggggcagggaggtgatctcatcatggatggccacagatcatccacctgccaaacagttaaccctgaacaagtcatgtcaatttattttgcttttaaaaaagaaagtctgcaaaataga

SEQ ID NO: 826092 - DNA, 120 bp, Artificial Sequence
  ENSG00000271200_0 (sequence is synthesized)
cgcccggggcggggcaccggggtggcgcagggggcgggggagggagcccggggccgcgggaggcgggctccaaggagggaggacggttgccctggctgtttacgtgcaggtgaattccta

SEQ ID NO: 826093 - DNA, 120 bp, Artificial Sequence
  ENSG00000271200_1 (sequence is synthesized)
ccgcgcgtggtggggacagccgccactgacggggagggagatccggacagaccggtgtggttggaggcctgcgtgtagagcgagacccaagatcaaggaaattgaggaggatatcgatga

SEQ ID NO: 826094 - DNA, 120 bp, Artificial Sequence
  ENSG00000271200_2 (sequence is synthesized)
aagcgttgggtcaatccgcttaacactttgtctttttgcccctttcctttcctgttctctcatccctcctttgttttctctattcgctgacgcaaaataaaatattctaaaacgtgtaaa

SEQ ID NO: 826095 - DNA, 120 bp, Artificial Sequence
  ENSG00000271201_0 (sequence is synthesized)
cctgaccccggggtcagaagctgaggactcagatgttgacttttagggcgctgacacagtggtcgatccgctctcctctggaaggcggtcactctttgcagacctgaaaattctttcctc

SEQ ID NO: 826096 - DNA, 120 bp, Artificial Sequence
  ENSG00000271201_1 (sequence is synthesized)
gtgggaaaaacatctggttcttggaacactaagaagacctccagaatcatgtaggtgattacgtctactataaatcttgcatttccaaacaagttctctatctacttttcatcaatgtgt

SEQ ID NO: 826097 - DNA, 120 bp, Artificial Sequence
  ENSG00000271201_2 (sequence is synthesized)
tcgtgaagcttcagggtaaatgaaataaggcagtcactaaatagtgaaaaaagtcacctatttactcatgttcagatgactcccgggtttcagaatcaaagaattggacagagaagcaca

SEQ ID NO: 826098 - DNA, 120 bp, Artificial Sequence
  ENSG00000223751_0 (sequence is synthesized)
aatgcagcctctgtgtggtttcaagaatggacatctgagttctggcctgtgtccatttcaacatattcactgtttgaaagtgaatattcagtttgactcgtttaatttcagaagcactga

SEQ ID NO: 826099 - DNA, 120 bp, Artificial Sequence
  ENSG00000223751_1 (sequence is synthesized)
gaactgaacttagaacagaagagcactctaaatagagagaagagaggagattgttgaggcagatggaaagcatcacaggagaagtgtgtggccctcgcctgtggaggtgaagctccagca

SEQ ID NO: 826100 - DNA, 120 bp, Artificial Sequence
  ENSG00000223751_2 (sequence is synthesized)
attgctaaaagcagttcccattttatgttttctttctttggtattcccaaaatgcaaaaaaagtatgtcttagggccgatatccccttttgaaattacatcgttaggatttctgccatct

SEQ ID NO: 826101 - DNA, 120 bp, Artificial Sequence
  ENSG00000223751_3 (sequence is synthesized)
ttggaaccaggaaaagagatcatgggaaggcatatcggggacggagcccacgcttcagggccattctgctgggctttcctacagtgacctcaccatcaccaccaccaccgacaacgacat

SEQ ID NO: 826102 - DNA, 120 bp, Artificial Sequence
  ENSG00000271208_0 (sequence is synthesized)
gttcggtggaaataagcattctgttatttttttcttagcacattttttgtcttctcttccattcagttatgttgaaagctacgtgttggatctgttttttagttatgacattagatcttc

SEQ ID NO: 826103 - DNA, 120 bp, Artificial Sequence
  ENSG00000271208_1 (sequence is synthesized)
atctgagattatctaaactacgttggttttcttttgattacaatctctttttttttttaatctgctaacacaagctcatgtttatctagaaaatgcgctttctcctcaaagtcatgaatc

SEQ ID NO: 826104 - DNA, 120 bp, Artificial Sequence
  ENSG00000271208_2 (sequence is synthesized)
ctcagctagtcactgagtagctgtcataaacctatgacataaacctactgtcatataccgatgacagtagagtattgaaaaaccaggtgcaccaggttcttgttttcattcttgataggt

SEQ ID NO: 826105 - DNA, 120 bp, Artificial Sequence
  ENSG00000271208_3 (sequence is synthesized)
tctaagttcattaaaccagtctcgcagttactcagagaatcacaaaaccaagtgttcctcttattatcttgcttagctcattttgggtaaaatgcatcaaacggcagaatgaaaaataaa

SEQ ID NO: 826106 - DNA, 120 bp, Artificial Sequence
  ENSG00000223754_0 (sequence is synthesized)
aaaaccagctctaggcttactgggaacgagagctacggaaccgtcctgtgttcccagggctgcggggaccgtaatcctcactgtggcgagtgccatttctccactgctagatacgacagg

SEQ ID NO: 826107 - DNA, 120 bp, Artificial Sequence
  ENSG00000223754_1 (sequence is synthesized)
actttttggtcagatttagggcagaggagcatcaggaccagagtcagacaacctctatgaaaccacggaccacacggagcatcggcgcacccggccactccagctgtccccttacgccta

SEQ ID NO: 826108 - DNA, 120 bp, Artificial Sequence
  ENSG00000223754_2 (sequence is synthesized)
ggaagccaggtgctgaagatgacacaggcccatgagataggatccgaaagaccgcaccgagagggacagcctgctgacccactgggacagtgccaggacataagcaaaacttaactgcta

SEQ ID NO: 826109 - DNA, 120 bp, Artificial Sequence
  ENSG00000223754_3 (sequence is synthesized)
ctgcatttaaacctcagtccacttgggtctactagtgtagcccacccaaccattaagggtagaactgaccacagtcacattaagatctgatataaacaagtgggactatatcaaactaaa

SEQ ID NO: 826110 - DNA, 120 bp, Artificial Sequence
  ENSG00000233485_0 (sequence is synthesized)
aaaataaggcatttgggatgccgatgttaaaaggagaaggtaatcagagaagaaaaaaggaagtcggtggagagttctgcgaagattttgaagatttctagcagagaagcagggggttct

SEQ ID NO: 826111 - DNA, 120 bp, Artificial Sequence
  ENSG00000233485_1 (sequence is synthesized)
ggagaagggaatagacttggccagatacccaggaagacttcctcaacagatgtcccatcatgctgagattcaacgcgacattttagagtcatgcaaccatgtgagaaaaaaagtcccagt

SEQ ID NO: 826112 - DNA, 120 bp, Artificial Sequence
  ENSG00000233485_2 (sequence is synthesized)
aacctttgttggggctggagggcaggatcccgaggtcccggaggagctgctccacctcctccagccaggacagcgcgtgcctcaggacgtccagcaccaccttctggagccccgagacag

SEQ ID NO: 826113 - DNA, 120 bp, Artificial Sequence
  ENSG00000233485_3 (sequence is synthesized)
gtgggctcacctggaggtgctgaagaaggtcgacctccttcttcaggtcatggctgcaacaggatattttcatgcaagcctgcaaagaggtgagatcatgaggagcccaggccctgtggc

SEQ ID NO: 826114 - DNA, 120 bp, Artificial Sequence
  ENSG00000233485_4 (sequence is synthesized)
cagaaatagcccctgacgtgaccttcgaggaacagcgttcttgactctgccacgaagcaggcagcgccacgtattggccgccttgggaggactcagtttttttcttttttaaaattttta

SEQ ID NO: 826115 - DNA, 120 bp, Artificial Sequence
  ENSG00000233485_5 (sequence is synthesized)
tgttttgacaggtttttttttaatactctaatttggacttttgatggtcaaagcgaacccccttttaggtctatgaaaccccagagccaaagtaccatcaacagtttggctgcaatgaga

SEQ ID NO: 826116 - DNA, 120 bp, Artificial Sequence
  ENSG00000233485_6 (sequence is synthesized)
agcaaatgtggctacttcttttttccattcgtcagaattcctgccaagatcaacacacaagctggtcggaaagcgtggtttcctgatttgaaagagtgctgacaagccagcatttgcaca

SEQ ID NO: 826117 - DNA, 120 bp, Artificial Sequence
  ENSG00000233485_7 (sequence is synthesized)
aactccccaaacaggagctgctgatttccagagaaagcagaagccaccgcctgctctgataagccatgtcccagggtgggggccgcagggctgtggccaagtcctcccgtccctgctcct

SEQ ID NO: 826118 - DNA, 120 bp, Artificial Sequence
  ENSG00000233485_8 (sequence is synthesized)
ccagagtcaaaagcaacggtgtggaaaccgccttttgtggctgggccaaaacaagaaaatgcaaataaaaagcaggaatgtttctttggtttctctggaaataacataggggctatgaaa

SEQ ID NO: 826119 - DNA, 120 bp, Artificial Sequence
  ENSG00000233485_9 (sequence is synthesized)
acaatttctttttggctggggatgcgggccgctcaaagtcagtaattgaagatgctcaggcatcttttttggacacgccaagttctcccgggaggcatttttttaggccctttgtttttt

SEQ ID NO: 826120 - DNA, 120 bp, Artificial Sequence
  ENSG00000233485_10 (sequence is synthesized)
cttctccaacaagtttctccaacaagaggaaaaagtggatagaaaagccaagcatttctgcccaacttgctccaaaaaagctgggcaatttcccaaataagccgcacaaaaattagacaa

SEQ ID NO: 826121 - DNA, 120 bp, Artificial Sequence
  ENSG00000233485_11 (sequence is synthesized)
agagaccatttgtggaaagcgtaaggaggggccacctggcagctgtccagcgacgtcctcagcttctcgatgttctcggtggtctcctcctgcttggagttgctcagctgggtctctttc

SEQ ID NO: 826122 - DNA, 120 bp, Artificial Sequence
  ENSG00000233485_12 (sequence is synthesized)
tgtaacatacaggggtggggggccctgagggaaggggaatgggagaggggagagatgcaacttaagtccctgtctaagcacgggaggacagaggtcctgatatgtcttggtgatggctgt

SEQ ID NO: 826123 - DNA, 90 bp, Artificial Sequence
  ENSG00000233485_13 (sequence is synthesized)
cgggaggacagaggtcctgatatgtcttggtgatggctgtcaagggggacgttggtcctgtcaccagggaatgagtcccagaatcagaga

SEQ ID NO: 826124 - DNA, 62 bp, Artificial Sequence
  ENSG00000233485_14 (sequence is synthesized)
ctggtttcgaactcccgacctgtccttgccgatcagagattatttttatgatccaaaggcct

SEQ ID NO: 826125 - DNA, 120 bp, Artificial Sequence
  ENSG00000233485_15 (sequence is synthesized)
tccttgccgatcagagattatttttatgatccaaaggcctgtcttgtggccctgagtttgttccagattcttctgtgttgtatagggattcagaacactgagcctgatattatgggctca

SEQ ID NO: 826126 - DNA, 120 bp, Artificial Sequence
  ENSG00000233485_16 (sequence is synthesized)
taagcagcaggtcaggttctcccacacccactgagagcagcccacggcacattttcccatctgtgctttgacacagggggctagaaagtgtagtggaagaacagcaaggcaatcattaca

SEQ ID NO: 826127 - DNA, 120 bp, Artificial Sequence
  ENSG00000233485_17 (sequence is synthesized)
gccagacatccaccctcactgccactgtcaacttttctcctctgaaggaacgcgccagaacgcactggctgtggggaggcggctccctttctcccagtgctaatggaggcgaaacatgca

SEQ ID NO: 826128 - DNA, 120 bp, Artificial Sequence
  ENSG00000233485_18 (sequence is synthesized)
tgtctggagaccagaagtaagcccgaatggtttaatttgattttcacagacacatttcaagggagttttaactggcttttactttaaaagccaggaaatcccataaaatcaaaacaaatc

SEQ ID NO: 826129 - DNA, 120 bp, Artificial Sequence
  ENSG00000233485_19 (sequence is synthesized)
tttatggtgtagcaacagtgtgaaaaatatgccaccaacaaaaacagaaacatatgctcccagggtctggaatccagatccacgaagaagaagaagaggaaagtgaaggagccacgtggc

SEQ ID NO: 826130 - DNA, 120 bp, Artificial Sequence
  ENSG00000233485_20 (sequence is synthesized)
agggacggcagactaacctgttggtcggtgacgggcttgtcccggaacggcttcgcccgtccataggtggccttgatgacttgacttctgaagtgctccagctgcagcagagagggggca

SEQ ID NO: 826131 - DNA, 120 bp, Artificial Sequence
  ENSG00000233485_21 (sequence is synthesized)
acagtgtcagggggtcagcaggggccggcaagtgggggcagcgtttccatggcagggtgcgggaaacaccacttagcagggtttgcacgcctgaatgaccattccgcgttatcagaatct

SEQ ID NO: 826132 - DNA, 120 bp, Artificial Sequence
  ENSG00000233485_22 (sequence is synthesized)
tcaccgctcacggggagtggcgggacccacagaagaaaagagaacagcaggctttaattactttttaggcacgcctgcctaacccgaacgatgcctgtggtcagtgcacacacatgtctc

SEQ ID NO: 826133 - DNA, 120 bp, Artificial Sequence
  ENSG00000233485_23 (sequence is synthesized)
aaaccctcagaagagcctcttgctgccaattatccaatgggaagtctggggccgggagcgctcttccgtaattgctaagttggcaccagactgtgaaataaatattgaggctgtcagtcc

SEQ ID NO: 826134 - DNA, 120 bp, Artificial Sequence
  ENSG00000233482_0 (sequence is synthesized)
gagacataggcacgatgattactacaaccacccttccctggaaagttgcttttcctttgataatgcttggaagacccaattcacacaagttgaaaagtctcaggaagattccgttggata

SEQ ID NO: 826135 - DNA, 120 bp, Artificial Sequence
  ENSG00000233482_1 (sequence is synthesized)
attatcaagaggagggccggggagactgtttcaagatggctgcttggtgctactcgtcaacttgggaccctatgtgtacaccagcattttcctgagttctctaattgtttgtagtttgtc

SEQ ID NO: 826136 - DNA, 120 bp, Artificial Sequence
  ENSG00000236471_0 (sequence is synthesized)
agtaattattgtagtaggttgtagcggattcagtaaatatatccagttcctattctatattctttctaggtgttaggaatgctcccaggaggtacaaaagctatcagtcgctgcaccgaa

SEQ ID NO: 826137 - DNA, 120 bp, Artificial Sequence
  ENSG00000236471_1 (sequence is synthesized)
aaaagtccactgctgtatgttaggtgacttcccaaagctgctcactacttcttcttattctgttttctcaaccccacaaaaatccaatcactgaaatcctgaactcttttgatagtggca

SEQ ID NO: 826138 - DNA, 120 bp, Artificial Sequence
  ENSG00000236471_2 (sequence is synthesized)
tgagtgttaagtaaattgcacacctcttgtggaattcattttcacttaatcatgctaattatgtggagacttgtttgttgttgttctttgtttttttaagtaaatcaatacctaaatttc

SEQ ID NO: 826139 - DNA, 120 bp, Artificial Sequence
  ENSG00000233480_0 (sequence is synthesized)
gaagccctcaggggcctcttactcactcaccctttcctgtgttggggagcttctcctggctccgcgtttatcccagacaggctgctgcccagctgcactcctctctgttctctgtgtcgg

SEQ ID NO: 826140 - DNA, 120 bp, Artificial Sequence
  ENSG00000233480_1 (sequence is synthesized)
cttgctgccttgatcgagtccgacacggtttcttagatatcagcttgtagggtcagtgttcaccagccctttgtctcctccctgtgagagcagcgcgcaggagctacttccaggccgcca

SEQ ID NO: 826141 - DNA, 120 bp, Artificial Sequence
  ENSG00000233480_2 (sequence is synthesized)
tcttgactcaacccctcttaatgattcctgtgtctccggcttttagaactgaagcagttataagaatatagacatattccactcagtcggagtgttcataaagcgatattaagcaccata

SEQ ID NO: 826142 - DNA, 120 bp, Artificial Sequence
  ENSG00000233480_3 (sequence is synthesized)
ctatatctcagcaacatgcatatgtttgaatggagttcatgaaagagaaagacagttacccatagaaaaaaacaacactgaacttgggaagacttcaacctcttcactctccaacctcca

SEQ ID NO: 826143 - DNA, 120 bp, Artificial Sequence
  ENSG00000233480_4 (sequence is synthesized)
cttcttatactccacatagccatcatctaccacagtcattcatctggacttcaagtctgccctgctgggaagtaggtcaccacctctacactgggccactgtcaagatccaaaatgtgct

SEQ ID NO: 826144 - DNA, 120 bp, Artificial Sequence
  ENSG00000233480_5 (sequence is synthesized)
aaaacttagtcaccactctatttggtagcaatccaaagtggaccaaaacatttcctaagtaataccaaggtcaaaaatataatgtcgatatgtcaaattttgatctctgtgagtggatac

SEQ ID NO: 826145 - DNA, 120 bp, Artificial Sequence
  ENSG00000233480_6 (sequence is synthesized)
tagtaaatggagagttgttatgagtaggatgagaggaaagttgttggttgtttcataaaagcaaagaaaattaaggaaataaaagtaagccatcaacaagtacatgtccagcattaggag

SEQ ID NO: 826146 - DNA, 120 bp, Artificial Sequence
  ENSG00000233480_7 (sequence is synthesized)
ctgaagcagttataagaatatagacatattccactcagtcggagtgttcataaagcgatattaagcaccatactatatctcagcaacatgcatatgtttgaatggagttcatgaaagcca

SEQ ID NO: 826147 - DNA, 120 bp, Artificial Sequence
  ENSG00000273148_0 (sequence is synthesized)
agtttagttccaggatccacactcctccaccatagtcaggagattcagggaaagttggcagggttcagctttcaagttgacccttgatgaaccatggtcaatcctgttaagaggcgtgaa

SEQ ID NO: 826148 - DNA, 120 bp, Artificial Sequence
  ENSG00000273148_1 (sequence is synthesized)
agccaatcccagccaatgagactggggagaaatcactgaagaacttgtggaaaacagaccctctggataaaagacacgtgtggggaaaaaggggctttttaatgttattctggatgtttc

SEQ ID NO: 826149 - DNA, 120 bp, Artificial Sequence
  ENSG00000273148_2 (sequence is synthesized)
ccaaaagtactgctgctgccttgcctccctgacagacactggccttaggatgacatgcggcaggaaggaaggacggatctggggtttttcaagactcactgagatgcacaaggaaccaac

SEQ ID NO: 826150 - DNA, 120 bp, Artificial Sequence
  ENSG00000273148_3 (sequence is synthesized)
cctcaagtagccaactcgttcctgtttgcatgtgtcgactgaaaagaatcaaaataaacaaaatataactatttctaagaggttacaacttgcaggcaggaagcaggcctctacctgagg

SEQ ID NO: 826151 - DNA, 120 bp, Artificial Sequence
  ENSG00000273148_4 (sequence is synthesized)
ccataaagcatactttgaaggagaaaaggtaggtatttatgctaggtggagaggtaggatatacgtattctgtagcatacaggagaagcctatgaaaattcatggaggaaactcgttaga

SEQ ID NO: 826152 - DNA, 120 bp, Artificial Sequence
  ENSG00000273148_5 (sequence is synthesized)
gacacgcactgggcttacatatgaagaatatccaaaagcggatgacctgtgttcactctggggtgaagatttaacatttaaatgtattataattaggctgtaaatgcaaaaaggtgaaac

SEQ ID NO: 826153 - DNA, 120 bp, Artificial Sequence
  ENSG00000273148_6 (sequence is synthesized)
agtagctgtcaggttggaaccataaaaccaaaaggagggcatcggcggttaggtgaagaaaagaagtcttttggccttttttcctcttcaagtcagcttttgataagatctagtaataat

SEQ ID NO: 826154 - DNA, 120 bp, Artificial Sequence
  ENSG00000273148_7 (sequence is synthesized)
aaggggatgggtgtggctgcaggtgggacatgtcggttctctgtcctgtcacagctaagaactaagaactttagagtctttcagccatagagggtcctgtcatccattgaagggatcagt

SEQ ID NO: 826155 - DNA, 120 bp, Artificial Sequence
  ENSG00000273148_8 (sequence is synthesized)
ccattgggattttgccagttttagcattgatgctgtgtcctgggaaacccctgaatacttatcatagcagaagttcagccactgtagccctacctcaggaccgcttttatgggaaagaat

SEQ ID NO: 826156 - DNA, 120 bp, Artificial Sequence
  ENSG00000273148_9 (sequence is synthesized)
aattcctttaactgcttgagccatttgagttgtggctgcttttggtacttgtaataaattgaaagcatcttgaatgttctgggacagtaaaagaatgtgcctttgtttctgacagcaatt

SEQ ID NO: 826157 - DNA, 120 bp, Artificial Sequence
  ENSG00000273148_10 (sequence is synthesized)
ataaaatcaattatatgtttatattctaaaaaatgttttgagtaatgctgacatcattggaaaagtgcatcacttagaaaatgtatctgtgtgtcaattttgtttgttcaaaatcagttt

SEQ ID NO: 826158 - DNA, 120 bp, Artificial Sequence
  ENSG00000273148_11 (sequence is synthesized)
cattaatttgtgggaagatacaccttgtacattttacctaattaaaaaaaatattgccagttgagtatacttgtgatatattcaaagataaataaactttttcaattttagatattcata

SEQ ID NO: 826159 - DNA, 120 bp, Artificial Sequence
  ENSG00000231880_0 (sequence is synthesized)
ctgacatcctgcagcacaatcacccggttgtgggcctccttcaggttggaagtgaacatggatcggaagaagcagctctgagctgagaggaccagccgatggagctgaaactcccggcct

SEQ ID NO: 826160 - DNA, 120 bp, Artificial Sequence
  ENSG00000231880_1 (sequence is synthesized)
tccaccgaaatggtgacatcagcaaagagctcctcctctagacacagtttcatgatgccttgagccacacggcctgaatgtgaccgatctttgaaagtgtagttcacaaagtagttctca

SEQ ID NO: 826161 - DNA, 120 bp, Artificial Sequence
  ENSG00000231880_2 (sequence is synthesized)
aacaccatcttgagtaacctgaggaattcacagccatagtctgtgaatccaactgtccaactcagggagggaaaaggaagaagtgagagcaaagtgggtccagattggccttagtcctgg

SEQ ID NO: 826162 - DNA, 120 bp, Artificial Sequence
  ENSG00000231880_3 (sequence is synthesized)
ccctgtccatgatgtccctgacgctatcctttaaccaaatctgggttcgttatccccagtggcgcccctccgctaatgatataaataaaagttccaactctgggtgttttcctgagaaaa

SEQ ID NO: 826163 - DNA, 120 bp, Artificial Sequence
  ENSG00000231881_0 (sequence is synthesized)
acactcatgttcggcagcaagcacggacagtcctgcccggaggcagggggatggcccacatggccctggtcttccagagaagcccagcgtctggcctcttcccctcagcgctggtcacat

SEQ ID NO: 826164 - DNA, 120 bp, Artificial Sequence
  ENSG00000231881_1 (sequence is synthesized)
tctccccaccttcccctccaagcagcccacctggggtaggtgctgagtcccctgctgctgcctcccccgggtgaaagcagagtaaacagtccccctctcccccgcctccctggggagggc

SEQ ID NO: 826165 - DNA, 120 bp, Artificial Sequence
  ENSG00000231881_2 (sequence is synthesized)
tggaggaaagaaagggaagtgacaaaagctgccctatccctgtccttcctcactgctgggtctaggacacttattctggggaaagtggcgtctgaggatgtggctgcagtggccagttgc

SEQ ID NO: 826166 - DNA, 120 bp, Artificial Sequence
  ENSG00000231881_3 (sequence is synthesized)
tggcgccagcagaaatccccaagcccgtcagtagactctgttcagacgcgttcgctgaccatggcactgagtaagtgctgaggagacacctgaggacccaggtcacgcccctgcctgccc

SEQ ID NO: 826167 - DNA, 120 bp, Artificial Sequence
  ENSG00000231881_4 (sequence is synthesized)
tctcctcccagacaggcccctcctagggctcagaccattccagttcctcttgtcagaccctgagaaggcccagggcatccacccctacagggaaggctcaacaggaaagaaagaaacaca

SEQ ID NO: 826168 - DNA, 120 bp, Artificial Sequence
  ENSG00000231881_5 (sequence is synthesized)
caggaactgggctcagagcccagctgcgtgctcttgggcaagttacttaacctctttaggcctcaatttctcaactataaaatgggactaagactagctgcctgttgagctgttgtgaga

SEQ ID NO: 826169 - DNA, 120 bp, Artificial Sequence
  ENSG00000231881_6 (sequence is synthesized)
taagtgagtgcactggcctggatctgcagacggtggacaacagccaacggcagccggatgtggcattgtgctgctgcctttagcagctccaggcagtaactactgagtatcagggaagaa

SEQ ID NO: 826170 - DNA, 120 bp, Artificial Sequence
  ENSG00000231881_7 (sequence is synthesized)
ctgagacctcagagaagggagagaaccaggattgcttgaggcagggcgttgggaaggccccacttaccctctggcagttgcaatctaaaaggaacaaagaggctttgtggcagatcctgt

SEQ ID NO: 826171 - DNA, 120 bp, Artificial Sequence
  ENSG00000231881_8 (sequence is synthesized)
ctcctaatatccattcctcgtttatttcccaacttttagccagacccccatggaataaagactagactacctagcttcccttgcagctaggtatggctagatgactgagttctggccaat

SEQ ID NO: 826172 - DNA, 120 bp, Artificial Sequence
  ENSG00000231881_9 (sequence is synthesized)
ggaatataagtgtgacttctaggaagcttccttgaagggaaggggcatgtccttcttcaggctttcttcttccttcctgctggctggggctccagcagccatcttgggcaatgaggtgac

SEQ ID NO: 826173 - DNA, 120 bp, Artificial Sequence
  ENSG00000231881_10 (sequence is synthesized)
cctggaaatggaaaccacacctagcaggtcagaaagatagaaggagtctctgaccacatcccagaaatattttacatgagcaaaaaattcactatttatcttgtgtaaaccaaaatttaa

SEQ ID NO: 826174 - DNA, 120 bp, Artificial Sequence
  ENSG00000231881_11 (sequence is synthesized)
ctgatacaagcttctcctctggtgaaataatctcgactcatgtgtggctgggcagagtaggatggatgaggtgtctagaagagaagagttaccaggggtgtgatgtccccatccaggagc

SEQ ID NO: 826175 - DNA, 120 bp, Artificial Sequence
  ENSG00000231881_12 (sequence is synthesized)
agagttaccaggggtgtgatgtccccatccaggagcacttcctcctacttgccctgtgaggtcaggaggaaccctgttgggaggacttggctccaggaggatggatggatggatggatgg

SEQ ID NO: 826176 - DNA, 120 bp, Artificial Sequence
  ENSG00000231881_13 (sequence is synthesized)
atggaaaggagggaagagcccaggtaaatgcatgagatgaggagaaatacctagaaggaggaaataccctgggaaaacacttcagatgacagagagccaggctaggggtgtggggatagc

SEQ ID NO: 826177 - DNA, 120 bp, Artificial Sequence
  ENSG00000231881_14 (sequence is synthesized)
agaacaggatggcctacctgactcactgcccaagtcggactctcagttttcccacctgtgctttgggaatgggccttatcgcctcactcagggccagcgtgaagtgattcaaaaaccaaa

SEQ ID NO: 826178 - DNA, 120 bp, Artificial Sequence
  ENSG00000231881_15 (sequence is synthesized)
ccaaaactaaacagagaatcagtgtagcattaaatccgttgtcagcccagacaaaacccttctctgtgcctgggattcctataaagtaaggatacccgtggaccccacctcacctggctg

SEQ ID NO: 826179 - DNA, 120 bp, Artificial Sequence
  ENSG00000231881_16 (sequence is synthesized)
ttgtgagtattcagcgaaagggctactgtaatgtgctcatcacagtgtctggcacaaggcaagtgctcagtaagcagtcagtgctattattgctgctgttgaaatcctgccctggggtgt

SEQ ID NO: 826180 - DNA, 120 bp, Artificial Sequence
  ENSG00000231881_17 (sequence is synthesized)
gaggaacaagaagctgccacttgattggtctgtggcatgagttagggaaagaaacctggactcctcactccagaataatatctccagcgctttggggacctaaaggaccaggtaatgcct

SEQ ID NO: 826181 - DNA, 120 bp, Artificial Sequence
  ENSG00000231881_18 (sequence is synthesized)
tgggagcaccacaccataaacacacatcaggatcctgacggcataagatggaatgggggtagtagggagacctggcagggtgggggcagccaaggcttaaattttggtaccactgcctgg

SEQ ID NO: 826182 - DNA, 120 bp, Artificial Sequence
  ENSG00000231881_19 (sequence is synthesized)
gacccctggagggacagctgtcaggtcaggccctgacccccaagctctcctccttggccaggccaggtccacatttggtcacaagaagctggcaagaggccagacagggccgcagatgcc

SEQ ID NO: 826183 - DNA, 120 bp, Artificial Sequence
  ENSG00000231881_20 (sequence is synthesized)
atggagagggcaaacacaggcccgacggaaagggggaaaaaatcgggcttgttctgcctgggcaagagcaggctcaggggtgacatcaacgccatgataagcagttagatgagttaatgc

SEQ ID NO: 826184 - DNA, 120 bp, Artificial Sequence
  ENSG00000231881_21 (sequence is synthesized)
ccagggatgcttttcctgaagttccccagagaaagttgggggttaaatgatgagtgtgttggcagatttgtaccctcaaaaaattacgagtgtgaccactgttaacaatgagcagggact

SEQ ID NO: 826185 - DNA, 120 bp, Artificial Sequence
  ENSG00000231881_22 (sequence is synthesized)
ttaagaggagaactaaggagctgtcatttctctctggagaagtgaaggagaagaaatgatcttacattaaagtaaacacgattccggatgacctaagggagaattctgactgcccatgac

SEQ ID NO: 826186 - DNA, 120 bp, Artificial Sequence
  ENSG00000231881_23 (sequence is synthesized)
atgagctctctgtgtgcaaggagctgtggactgagtccagaactgaatagggcacacagcttcagtggcctgtcctgaaaccccagcacagcctccaagttctgggcttctgttcccacc

SEQ ID NO: 826187 - DNA, 120 bp, Artificial Sequence
  ENSG00000231881_24 (sequence is synthesized)
tgtgttaaatcagacaaggtaacgattatggatagggatttaggaatcatacagagatcagtttgaaggcactttggacaagttacctaacttctctgtcctttgtttcttcctctgttt

SEQ ID NO: 826188 - DNA, 120 bp, Artificial Sequence
  ENSG00000231881_25 (sequence is synthesized)
ggaagaaaaaaaaaaaacagaactgggtgcagagggttgctgggaagattaattcagtggatgccagcttagagcctggcacccaggacgagctccataaatattctccagtggggctat

SEQ ID NO: 826189 - DNA, 120 bp, Artificial Sequence
  ENSG00000231881_26 (sequence is synthesized)
ttttctcctgtctgggcagggattggacagtatctcttgagttcttttcaagtctagaatgccttgattccacaatcctgtgactcactgattctgcttctggggtctgaggactgggat

SEQ ID NO: 826190 - DNA, 120 bp, Artificial Sequence
  ENSG00000231881_27 (sequence is synthesized)
gagttggttgcacagctctgccctgcagggcccaggcccagcacctggacatagcccagcctatagtctgcaccattttatttctaccagtggactttgccttgcccatcatgtgccctc

SEQ ID NO: 826191 - DNA, 120 bp, Artificial Sequence
  ENSG00000231881_28 (sequence is synthesized)
agcctcatgggcagccttgtggccacaggtggccctgccagctgtccctgacctctgctctgcaccttcacctggagcagggcagtgcaagcccctccggctaactccttcctcacacct

SEQ ID NO: 826192 - DNA, 120 bp, Artificial Sequence
  ENSG00000231881_29 (sequence is synthesized)
acattcccctgacaatgtcacatgctgtgcaagttggcagggccagaggggccacagatgccaacaaaaacaccattcctgtggagggagaagagcccatgggtgttatttttaacctgc

SEQ ID NO: 826193 - DNA, 120 bp, Artificial Sequence
  ENSG00000231881_30 (sequence is synthesized)
tgattagaggccacagctctgcccctgggggtcctgggactaagggctctgaggggcatgtgagttgtcaggcctcacctcaatgactcccaagggtattgggctgcagaaaccccagcc

SEQ ID NO: 826194 - DNA, 120 bp, Artificial Sequence
  ENSG00000231881_31 (sequence is synthesized)
cttctaccactttgatggagaagtgggaaagggagacacagatcaagacatgccccatcttgcccactggtttcaactggggctgaacccagccaggaagagcaaatgtgccacgaatca

SEQ ID NO: 826195 - DNA, 120 bp, Artificial Sequence
  ENSG00000231881_32 (sequence is synthesized)
cagaacattaaacctagagatgggtcctctccagtccctgcgttatacagataaggaaactgagacctgagggaggaggcccaaagtcacactgctggtcaacactagcttcctaccccc

SEQ ID NO: 826196 - DNA, 120 bp, Artificial Sequence
  ENSG00000231881_33 (sequence is synthesized)
ttgcccacctgttgtagacctggagtttgacaaggacatttctataactctccaaggccacatcctgggggtcaccttgctccaccctctgtccaggtgacccatcttgcctctgccctc

SEQ ID NO: 826197 - DNA, 120 bp, Artificial Sequence
  ENSG00000231881_34 (sequence is synthesized)
tccccagtctgccctaccccaatgggctgagcttctgacaaccccatgatgagggctccaggccctggctcaccctgcaaggacttcctaagtgcccaagcagtgccccctagaggccag

SEQ ID NO: 826198 - DNA, 120 bp, Artificial Sequence
  ENSG00000231881_35 (sequence is synthesized)
tggcagcactgatcagcacagcgggcagcgccatcatggctggaggcccaggcgaagacgtgcaggccagggcgtgcctgtgtggggggaacaggaccgagcttctgccaagggcccgct

SEQ ID NO: 826199 - DNA, 120 bp, Artificial Sequence
  ENSG00000231881_36 (sequence is synthesized)
gccggctgttgctgagcttgtgctcgccagaggggtgggggcggcaggcagacaatggaccccacggcccagcctcctggccttggccccttgagctgggcaggcagccgctggccaaag

SEQ ID NO: 826200 - DNA, 120 bp, Artificial Sequence
  ENSG00000231881_37 (sequence is synthesized)
cagccgcctccattggtccctcacgtagcccacgtcctgcctgctgggtggcccttatcaccgggtacgtgccagagttccacatgcccacactccacagtggggaggggactgtgggcc

SEQ ID NO: 826201 - DNA, 120 bp, Artificial Sequence
  ENSG00000231881_38 (sequence is synthesized)
caggaggaatgggaccagtgggaagttaggcttcctgtttccctgcatcccattcccaaggaggggcttgagcaggtcctgagtaccccttgatgagtctctcgttctcagagagatctt

SEQ ID NO: 826202 - DNA, 120 bp, Artificial Sequence
  ENSG00000231881_39 (sequence is synthesized)
agccgcatctcgccaagtcccaactctcaacaactgttctccccttggaatgaaggggttgggtggaagagaagaaagaaagaggccaacagcttcatttgaatgttctaggtcaccagt

SEQ ID NO: 826203 - DNA, 120 bp, Artificial Sequence
  ENSG00000231881_40 (sequence is synthesized)
tcacaaataccaactgttcctcttaacaagcttatacaagaagtagtactatactatgcttattactgtctggggaaacaggcacagagaggttgagtgacttacccacaaccatacagc

SEQ ID NO: 826204 - DNA, 120 bp, Artificial Sequence
  ENSG00000231881_41 (sequence is synthesized)
tggtagggacagagtcaggattcaaatccgagcagaccgactccacagctaaaccactcctcaacaaagcagggtcgtgactggctggtgctcagccctctaccccacagaaatgatggc

SEQ ID NO: 826205 - DNA, 120 bp, Artificial Sequence
  ENSG00000231881_42 (sequence is synthesized)
tttggggtcagacagacatgggctcaggcctggaaatgcatgctctagggccagtgaaggccctctctgggccaatgtttccttacctgtgaaatgggtgcagtgatgcagtgaggaagg

SEQ ID NO: 826206 - DNA, 120 bp, Artificial Sequence
  ENSG00000231881_43 (sequence is synthesized)
tacagccacatgtgcctcactggtggaagctgctgcacaaatcctcctccccttcacccagcagagctcaaagcctcctttgactgaataattagaatgtcttctgcctcgccgcctgaa

SEQ ID NO: 826207 - DNA, 120 bp, Artificial Sequence
  ENSG00000231881_44 (sequence is synthesized)
gcccaccatcccagcctccacttcctctgtccaaacctacagagcggctccattccctggcacttgaggtctgctgcaagcccctagcatgcccggccaggtagccccggcacgcttgct

SEQ ID NO: 826208 - DNA, 120 bp, Artificial Sequence
  ENSG00000231881_45 (sequence is synthesized)
cagcccacgcactgtttaaccttccacaggcactgggttctccctgtcttccccccgaggaagaccgtgagtgcccgctgtggggccaggggaggatggggccggatgagcccctgcctc

SEQ ID NO: 826209 - DNA, 120 bp, Artificial Sequence
  ENSG00000231881_46 (sequence is synthesized)
cctggtatgtgcacacatgtacagtcaggccttattcaaggagcttggaccctgggcccagtctcagttggctaccagagctgtgtggctctgtacaggtcctttcacgtcacgggggct

SEQ ID NO: 826210 - DNA, 120 bp, Artificial Sequence
  ENSG00000231881_47 (sequence is synthesized)
gtttcctcatatgtcaaatggacatctacatcccggctggtaaagacacagtgaagccacatctgggacacacccctcccagaaaacttcctcgtgatttctgctagcagattaggacta

SEQ ID NO: 826211 - DNA, 120 bp, Artificial Sequence
  ENSG00000231881_48 (sequence is synthesized)
cagcgtgtgtgggcagggaagggatctggctgggaggacaggcgaaatggacatagacgtcagagaaggcaggaagcagaggggtttccccaccatgatgaggctgcacaggcaggggaa

SEQ ID NO: 826212 - DNA, 120 bp, Artificial Sequence
  ENSG00000231881_49 (sequence is synthesized)
gaaaggccatgggggctgagtcactggctgtgtctaatctgctgccttcccagccactgacaatgaagtgaccacaggcggatcacaggagatcacaggagggaggtggccaaacaggac

SEQ ID NO: 826213 - DNA, 120 bp, Artificial Sequence
  ENSG00000231881_50 (sequence is synthesized)
aagaaagggagctgcagggactctagaggaagtagcctgagaggcaaggctcagcccctgccctcagagggaccctgagctgatggggtagcagacacagctgctgccttcagtgagctc

SEQ ID NO: 826214 - DNA, 120 bp, Artificial Sequence
  ENSG00000231881_51 (sequence is synthesized)
ccagtctgacaggggagacattcttttgtctcaggagagaaaggagctctgccttcagggaactcccaatctgacagggaagttttatcactttctgccttaagggaattacaactgtga

SEQ ID NO: 826215 - DNA, 120 bp, Artificial Sequence
  ENSG00000231881_52 (sequence is synthesized)
ctggggactcagcctctgttcgcagggaaccccagcttgaggtgtctatgtctgagggagcaggtgcctgagtgagcgctgtgcatttgtgtgttgacacccttcctggcttccttcaga

SEQ ID NO: 826216 - DNA, 120 bp, Artificial Sequence
  ENSG00000231881_53 (sequence is synthesized)
ccctccaatctgatgggagagacacagctctgctcttaaggagctcctgtaagatgggggagacatagtccccacatcaggcggccactaaaatgaagggggagacttagctcctgccct

SEQ ID NO: 826217 - DNA, 120 bp, Artificial Sequence
  ENSG00000231881_54 (sequence is synthesized)
ctgtcctcagggagccctgtctgcccccacgggcactcaggttaagcatgcatgtgtgtgcacatgggaatgcatgcaggccctgctctagccctctcaggcaccactccccaccatgcc

SEQ ID NO: 826218 - DNA, 120 bp, Artificial Sequence
  ENSG00000231881_55 (sequence is synthesized)
cacctgagaactcctcaaagtaaggaaggagaatccttgttcgagcccaggctaagggggcttccacagaggggcttctgggagcctagaagacagagggtgggggagacagaagtgcta

SEQ ID NO: 826219 - DNA, 120 bp, Artificial Sequence
  ENSG00000231881_56 (sequence is synthesized)
ccacatctagggtggctgggctcactgtcctgaacagctgagctgcatctgccttcctcatctccaactcctgatccctgatacaccccagcctcacatgtccgctgagacgcggtacat

SEQ ID NO: 826220 - DNA, 120 bp, Artificial Sequence
  ENSG00000231881_57 (sequence is synthesized)
ggtatctcccacacgtatgcgcggctccagcacatgggagagggtggctggggcttggagctcaaaggagcctcttcttttcctccccgtggccctcatgttgcctttcacacacccact

SEQ ID NO: 826221 - DNA, 120 bp, Artificial Sequence
  ENSG00000231881_58 (sequence is synthesized)
ctgggtgatgggaggggagtgaccagtccaccccgagtcactatgactcggtctccccacctggaaccctcatactcggttcacagtctccatgaagggacagtgagcagactgggagtc

SEQ ID NO: 826222 - DNA, 120 bp, Artificial Sequence
  ENSG00000231881_59 (sequence is synthesized)
agcggggaggaggcccacaacaagtcgggagctccagttcacccactcaattccttcctagggcaggaaaccttcaggagagcagaggatggggctgggtgggaaaataacatgcaaggg

SEQ ID NO: 826223 - DNA, 120 bp, Artificial Sequence
  ENSG00000231881_60 (sequence is synthesized)
aggaagcagggagcacagggcatttcccctcaagtgggagttccccgagggcagggctgtgtctcccctcagactggggcaccctgaggactgggttgtgtctccccttagactggggca

SEQ ID NO: 826224 - DNA, 120 bp, Artificial Sequence
  ENSG00000231881_61 (sequence is synthesized)
ccctgaggactgggttgtgtctccccttagactggggcaccctgaggacggggctgtgtctcccctcagactggggctccttgagtcagggctgcgtctccctcagactgggggtccctg

SEQ ID NO: 826225 - DNA, 120 bp, Artificial Sequence
  ENSG00000231881_62 (sequence is synthesized)
agtcagagctgcgtctcccctcagactggggcaccctgaggactggattgtgtctcccctcagactggggctccctgagtcagggctgtttcccgcctcagactgggggtccctgagtca

SEQ ID NO: 826226 - DNA, 120 bp, Artificial Sequence
  ENSG00000231881_63 (sequence is synthesized)
cggctgtgtctcccctcagactggggctccctgagtcagagctgcatctcccctcagactgggggtccctgagtcacggctgtgtctcccctcagactgggggtccctgagtcagggctg

SEQ ID NO: 826227 - DNA, 120 bp, Artificial Sequence
  ENSG00000231881_64 (sequence is synthesized)
tctcccccctcagactggggatccctgagtacagggctgtgtctccctcagactggggctccctgaggatggggctgtgtcttcctcagactggggcaccctgaggatgggactgtgtct

SEQ ID NO: 826228 - DNA, 120 bp, Artificial Sequence
  ENSG00000231881_65 (sequence is synthesized)
cccctcagactggggctccctgagtcagggctgtctcccccctcagactggggctccctgagtcagggctgtctcccccctcagactggggctccctgagtcagagctgcgtcttccctc

SEQ ID NO: 826229 - DNA, 120 bp, Artificial Sequence
  ENSG00000231881_66 (sequence is synthesized)
agactggggcaccctgaggaccggattgtgtctcccctcagactggggctccctgagtcagggctgtctcccgcctcagactggggctccctgagtacagggctgtgtctccctcagact

SEQ ID NO: 826230 - DNA, 120 bp, Artificial Sequence
  ENSG00000231881_67 (sequence is synthesized)
ggggctccctgaggatgggactgcgtctctcctcggactggggttccctgtggacagggctgtgtctccctcagactgaattccatgaagacaggcactgtgtcaatcccatcaaactag

SEQ ID NO: 826231 - DNA, 120 bp, Artificial Sequence
  ENSG00000231881_68 (sequence is synthesized)
gtcagaactagatctcctttagcatctaaaacaggcaactcatccaccatccccaacatcatctgggggttttcagactgggtggggtggggcatctacttcccaccaggccaccctcct

SEQ ID NO: 826232 - DNA, 120 bp, Artificial Sequence
  ENSG00000231881_69 (sequence is synthesized)
gaggaaggacaatcatgcttactggcaggggcttcctcagtgagcagcctgttcccagttcacccactcacccctctgggtggtctctcccacagtctagccccagtctctcacgttaaa

SEQ ID NO: 826233 - DNA, 120 bp, Artificial Sequence
  ENSG00000231881_70 (sequence is synthesized)
tcaccatgggtagctgggcaggcgagacccacaggatgtgtgggcagggcctgcctggacctggtggggggtgtatagctgagagcacaggcattttgtagcatgatctcatgcccactg

SEQ ID NO: 826234 - DNA, 120 bp, Artificial Sequence
  ENSG00000231881_71 (sequence is synthesized)
ccctcagctaggggctcttcaggaccatttgagcatggggagtgggcagacaagcctgggcagctataccagtggcctgaggaagccaagcttggcaggttcctgcttccatgagtccaa

SEQ ID NO: 826235 - DNA, 120 bp, Artificial Sequence
  ENSG00000231881_72 (sequence is synthesized)
atcagcacaggaagtgggtcccaacaccattagctttcccttatcctatgctgtagccacctggattagcagagggagaggcctcctaccccagtgggtccctgtgagggggcagcccga

SEQ ID NO: 826236 - DNA, 120 bp, Artificial Sequence
  ENSG00000231881_73 (sequence is synthesized)
ccttacagtgtatacatttggtagtgaaggaagcaggaaacagctggacaggcctgggaatccctccccactccctagtcacctttcaatacgaggagctgggctttcccagccctctat

SEQ ID NO: 826237 - DNA, 120 bp, Artificial Sequence
  ENSG00000231881_74 (sequence is synthesized)
cccctactcctccctgcctcctcttgacctcctgtgcctttttcagggaaataaaacacagagccatgtggagattggggctggacttctgtgctctcctttttccgttggcaaccccat

SEQ ID NO: 826238 - DNA, 120 bp, Artificial Sequence
  ENSG00000231881_75 (sequence is synthesized)
ctccaggctggcaggatcagagtcggtgcctcccacctaacactgacaattgggcattgccatggctgagggcaccctaagatatcaaccccattacacagatgggcagactgaagtctg

SEQ ID NO: 826239 - DNA, 120 bp, Artificial Sequence
  ENSG00000231881_76 (sequence is synthesized)
aggctgtcacagagtcaggacagatcatgtcttggaggtgatgcagccaggcttgtggtcaatacccactctgcctgagtcagggtagctcctctctcggccagactgtgagctccctga

SEQ ID NO: 826240 - DNA, 120 bp, Artificial Sequence
  ENSG00000231881_77 (sequence is synthesized)
gctcagggactggtccccagcttcctgaaaggggtttgctgggtaggattgaatgagggcttgctatgtactgacctgtgctggtcctggggtggggttctgtgtccccatcagcctagc

SEQ ID NO: 826241 - DNA, 120 bp, Artificial Sequence
  ENSG00000231881_78 (sequence is synthesized)
cagtttagctgcagggcctcctcacctctggacccttccttgaccacaggtctccctagttagttcctggaacccagactttcggtgcctggggagggagggtctagggtggcatgggca

SEQ ID NO: 826242 - DNA, 120 bp, Artificial Sequence
  ENSG00000231881_79 (sequence is synthesized)
gctgtgcatccaggccagaatgggccacctggagaagtccccagggcctggtgcaggagcccgctcccccagctggcagaaggacaggtggaagcccacctgctgtcccccgcttctggg

SEQ ID NO: 826243 - DNA, 120 bp, Artificial Sequence
  ENSG00000231881_80 (sequence is synthesized)
tcacagtcagttggctgagctaggcccagcttgggcaggttctcccacatccagtgccccctccccctcaccccaccctggcctgatccctttttcaagtacagtctttgctccagccag

SEQ ID NO: 826244 - DNA, 120 bp, Artificial Sequence
  ENSG00000231881_81 (sequence is synthesized)
atgtctgagcacagtcttgttcccaagaaacccatgccctgccccacaatctctactcatcctgccctctctccctcctgtccccataggagccatctccccagggccactggctcacca

SEQ ID NO: 826245 - DNA, 120 bp, Artificial Sequence
  ENSG00000231881_82 (sequence is synthesized)
cacttcctgcagagctttgaccctctaggagagcaagcccctccccaggccagggaagggtctcagcagaggcagcagggaaggggcaaggatccagcttccccagtaacctagcatgcc

SEQ ID NO: 826246 - DNA, 120 bp, Artificial Sequence
  ENSG00000231881_83 (sequence is synthesized)
tctgtcttccagcaagtcaccaaaccactctcctatctgtccctattgtcagcctatcccatccctcaaggcagcaagttcttaggttggcttcccactgtgtgggcaaacacgcggcct

SEQ ID NO: 826247 - DNA, 120 bp, Artificial Sequence
  ENSG00000231881_84 (sequence is synthesized)
cactcttactggaagccaagacttgctccaactgggctcggcaggagagagttctcaagaagcccaaccctcaaatacatactctgtaacctagatggaggctctcacagaacctgccag

SEQ ID NO: 826248 - DNA, 120 bp, Artificial Sequence
  ENSG00000231881_85 (sequence is synthesized)
aggcaatcactaaccctgctttacacacctaaaggtagctttttaaactttaaaaaatttgtgataaaatacgcagaacatttaccattttaaccacatttaagtgtacatttcagtggc

SEQ ID NO: 826249 - DNA, 120 bp, Artificial Sequence
  ENSG00000231881_86 (sequence is synthesized)
attaaatacattcacattacatacgttcacattacatatgttcacattgttgtgcaaccatcaacaccatccatctccagaattcttttcattttacaaaacagaaactctgctcattga

SEQ ID NO: 826250 - DNA, 120 bp, Artificial Sequence
  ENSG00000231881_87 (sequence is synthesized)
ccattctactttctgtctctatgaatctaactaccttagttacctcattaaagtggaattatacaatatttgtccttttgtgatttgctgatttcacttagcacaatgtccttaaagttc

SEQ ID NO: 826251 - DNA, 120 bp, Artificial Sequence
  ENSG00000231881_88 (sequence is synthesized)
ttgctgatttcacttagcacaatgtccttaaagttcatccctgttacagcatgtgtcacaattttcttcctttttaaggcttaataatattccattgtatgtatgtaccacattttcttt

SEQ ID NO: 826252 - DNA, 65 bp, Artificial Sequence
  ENSG00000231881_89 (sequence is synthesized)
cacagtggcttgatcccggcttactgcaacctccgctacccaggttcaagcgattctcctgcctc

SEQ ID NO: 826253 - DNA, 120 bp, Artificial Sequence
  ENSG00000231881_90 (sequence is synthesized)
gcgattctcctgcctcagtctccagagttaactactttttaaaaaaaccaaagtaatatattctcgtggcaaaaagtctgaacagttcagaaacacataaagtgaaaagtggacttttcc

SEQ ID NO: 826254 - DNA, 120 bp, Artificial Sequence
  ENSG00000231881_91 (sequence is synthesized)
aaaagtggacttttccatcccttctcactctggtcatggaaagccctttctggtgactctgaaattttagaggcagaagggctaactggtttttatccattttttacacatatagtgaca

SEQ ID NO: 826255 - DNA, 120 bp, Artificial Sequence
  ENSG00000231881_92 (sequence is synthesized)
tactcctcatcagtacttctcaaacacgagtatgcatcagaatcatacagagaacatgttaaaaccacagactgctgggctccagccctagtgtttctgatcccgtagttctacggtggc

SEQ ID NO: 826256 - DNA, 90 bp, Artificial Sequence
  ENSG00000231881_93 (sequence is synthesized)
tccagccctagtgtttctgatcccgtagttctacggtggcccaagattccaggtttcttttttgtttgttttttcagacagggtctctcc

SEQ ID NO: 826257 - DNA, 120 bp, Artificial Sequence
  ENSG00000231881_94 (sequence is synthesized)
tccctgaaacctccacctctcaggctcaagcgatcctcctgcctcagcatccctagtagctgggactacaggctaattttttgtagagaggttttgccatgctgcccaggctggtcttga

SEQ ID NO: 826258 - DNA, 120 bp, Artificial Sequence
  ENSG00000231881_95 (sequence is synthesized)
gattacaggcatgagccactgcaactggctgaagattctggatttctaataggctccatgcccatgctggcagagggcacacccttcatggagtagcaccacccaaggaatgtcttgcca

SEQ ID NO: 826259 - DNA, 120 bp, Artificial Sequence
  ENSG00000231881_96 (sequence is synthesized)
aaggaatgtcttgccacttgcttttctacttagtgaatatcaacacacaacctcaacctcactcttttcaaccactgcatactattggtgtttggaggcatcataacatatccaatccgt

SEQ ID NO: 826260 - DNA, 120 bp, Artificial Sequence
  ENSG00000231881_97 (sequence is synthesized)
gccctattaatggacttaatgttgcttccagtttttcaggtttggaagcaaaactgcaatgaacacacttgtatgtatactttgaacacttgtgacatttataacagtgcatctgataaa

SEQ ID NO: 826261 - DNA, 120 bp, Artificial Sequence
  ENSG00000231881_98 (sequence is synthesized)
ttcctagatatggaaccctcgagtccatggtttgtgaattaattcttctcatgtatactgccaatccccttcacaggtgcaactgtcctcccccccagctctgaggatgtctgtgtccac

SEQ ID NO: 826262 - DNA, 120 bp, Artificial Sequence
  ENSG00000231881_99 (sequence is synthesized)
acagtgaggggttgcccattttagttgttgtcaatcaaattggcgaaaagagaatcttctcatgtcttcattttgatttcttctattttgactgagggtgagcattttcacctgcttgtt

SEQ ID NO: 826263 - DNA, 120 bp, Artificial Sequence
  ENSG00000231881_100 (sequence is synthesized)
aaccattagtatccccttaccggtttatgtgctttgcccatttttctattcgtttttattttccttattgacttgtaaaaactcatcggtcatctatgttaaaaatattttttccagacg

SEQ ID NO: 826264 - DNA, 120 bp, Artificial Sequence
  ENSG00000231881_101 (sequence is synthesized)
gttgtctttagaattcaggatattacattaaaaacacatttttttttcagagatggagtctcactgtggtgcccaggctggcctcaaattcctgggctcaagttatcctcccacctcagc

SEQ ID NO: 826265 - DNA, 120 bp, Artificial Sequence
  ENSG00000231881_102 (sequence is synthesized)
ctcccaaggagctgggactacaggcatgtaacacaacaccctacgtcatattttaatacagccaattttaaaaaattctttccctttgtgactcctaggttttgtgtcaaactttcccca

SEQ ID NO: 826266 - DNA, 120 bp, Artificial Sequence
  ENSG00000231881_103 (sequence is synthesized)
atccaagaacatacacttttagactttcagatgttttcttctagtaattttatggtttcctttttacatttaaatcttcactccatcgggatttatttcagaataagagatgaagtgggg

SEQ ID NO: 826267 - DNA, 120 bp, Artificial Sequence
  ENSG00000231881_104 (sequence is synthesized)
agctggatttcttttttttcccccttaacagctaaccagttgtccaatttgattgaataattcatcttttctcctctgatctaaaatgtcattttatcatatatttaatttccatttgtt

SEQ ID NO: 826268 - DNA, 120 bp, Artificial Sequence
  ENSG00000231881_105 (sequence is synthesized)
cacgggtgtgtgtctggcctctactctgctcctttgatctgcctgtctgttcttgtgccagtacccaactattttattattggagctttctacaacattttagtagcactagtcgtccct

SEQ ID NO: 826269 - DNA, 120 bp, Artificial Sequence
  ENSG00000231881_106 (sequence is synthesized)
caacagatgtgattttcggacatctcagcccacagccaaacagaaacaagttgagaatagggtgggtttggtggtctgccctggaggcaggcaaagtgatggtaacagaagtgatagttt

SEQ ID NO: 826270 - DNA, 120 bp, Artificial Sequence
  ENSG00000231881_107 (sequence is synthesized)
atacggagagagttgatgaagtgataaagtactataaaagtagacacaagaactacgaaaatgtagccttcatggaatgagccgttggtgtggggccaaaaaaggccttggattttcact

SEQ ID NO: 826271 - DNA, 120 bp, Artificial Sequence
  ENSG00000231881_108 (sequence is synthesized)
gtattacaaccaggatactgatggacccttgtaaccacaaccctgagtcatgaagactcacatgttctgtaacctctgattaaaagcccggaaagcgtgtaatatccactagtgattcct

SEQ ID NO: 826272 - DNA, 120 bp, Artificial Sequence
  ENSG00000231881_109 (sequence is synthesized)
atccaaaatatctctttttaaggtttcagatattaatgtctggaaaactagtatgaaatggttcattcttggatggtgacataaacatgacatgttactggcctctttacagttttctca

SEQ ID NO: 826273 - DNA, 120 bp, Artificial Sequence
  ENSG00000231881_110 (sequence is synthesized)
aagcccaccttcaaattccaaggagctgccagctccgggatttgaattcactctatccatggaaacaaagctgagggaaatgtccccagactttcagccagttcaaacacaataataaaa

SEQ ID NO: 826274 - DNA, 120 bp, Artificial Sequence
  ENSG00000231881_111 (sequence is synthesized)
aaaggtttacctcatacatgcctccaacatatgaggcatgttataggcagattatattttaatcctcaacagccccgctgggtgaatgctgtactcccattacacagaaaactgaggctc

SEQ ID NO: 826275 - DNA, 120 bp, Artificial Sequence
  ENSG00000231881_112 (sequence is synthesized)
agaggggtcaaacaactggggccagtttaagttagtacgtgacaaagagctctcagctacctccacctgcacattccacagaccagtccccttcagttcactcccacagggaggttcaaa

SEQ ID NO: 826276 - DNA, 120 bp, Artificial Sequence
  ENSG00000231881_113 (sequence is synthesized)
acaccaccgaccctattcagacatccctttgcaaggccctgtcacctgtcttgcccaatgcccacctagccaggagagccaggatgcacagtgaggaaggtggaatgaggtgccaacgta

SEQ ID NO: 826277 - DNA, 120 bp, Artificial Sequence
  ENSG00000231881_114 (sequence is synthesized)
gcccatccagggaaggaagacagccccccccccccggccacccacttgccagtggcccaggtggcaggccagccacttgccaatccccttcctgatcagggattcaggaagtgaagagag

SEQ ID NO: 826278 - DNA, 120 bp, Artificial Sequence
  ENSG00000231881_115 (sequence is synthesized)
tgcccctggaagtcaggagacacctccaagatgaaggccctgcctgccatagcctgacacagcctccctgtactccctgggttgtcccaggacgcagactctgtgcttaccataccacac

SEQ ID NO: 826279 - DNA, 120 bp, Artificial Sequence
  ENSG00000231881_116 (sequence is synthesized)
ctttgtcagtggtgtgggcagggcccagcagagtcctggacaccccagggagtaggagctgtgcaggtaacataggagggggtgaaagggaaatgaactcccttgggagttccccatccc

SEQ ID NO: 826280 - DNA, 120 bp, Artificial Sequence
  ENSG00000231881_117 (sequence is synthesized)
agaggaaataaaagtcaaagcactcctttgttttttcttcccaagcccttataaggggctttatggggcttgcctaggtttgaggtgcagcagaggcaggcgggtgagggcctccaggct

SEQ ID NO: 826281 - DNA, 120 bp, Artificial Sequence
  ENSG00000231881_118 (sequence is synthesized)
gagagatcctggggcaaaagtgaaactatatggtcatgaacacgggcatgttctgaactctgtgaaaccctagcccaggacctggctgactgtacaatccgtcacccggcacaccgtaac

SEQ ID NO: 826282 - DNA, 120 bp, Artificial Sequence
  ENSG00000231881_119 (sequence is synthesized)
agaagaccctactacgcgcagaggacagtactattggggtggcaactgaaaagggtcctggctggaggcggggtttgctggaggggtaacagagcgtgcgcggagtggagagggtacgga

SEQ ID NO: 826283 - DNA, 120 bp, Artificial Sequence
  ENSG00000231881_120 (sequence is synthesized)
ggtacggaggctcaccgcccagcatccccaaccccggcgctcagaagagcagcgcgctccggagctcggcgcgcgcgatcaaagccggcgccgcacgcgcacgcgcgcccgcagccgctc

SEQ ID NO: 826284 - DNA, 120 bp, Artificial Sequence
  ENSG00000231881_121 (sequence is synthesized)
gcgccgctccggctcccgcgcgcgcgcacttgaggcctcccttgtgcgtctcctccattcgctacgtgcagaatggtccgtcggcagcagctgcagcgctgggtgggagggggaggagga

SEQ ID NO: 826285 - DNA, 120 bp, Artificial Sequence
  ENSG00000231881_122 (sequence is synthesized)
gaggaggaggggagggggaggcggcgcccaggtctcggggaggggccgcggcggccctggagatagaggggtgggggcgaaggggtgggcccccgcagcggggaggacagagggagagtc

SEQ ID NO: 826286 - DNA, 120 bp, Artificial Sequence
  ENSG00000231881_123 (sequence is synthesized)
ctcgatgctcagccttccccctcccccgctcccgcttctttctgcgaggccattacggccatctcccggcctgagcctcctggaaccaagccgaccaagaggggtttcctccgtgttgtc

SEQ ID NO: 826287 - DNA, 120 bp, Artificial Sequence
  ENSG00000231881_124 (sequence is synthesized)
tcgtccccaaaacccagaatccagacccaagaaagaaccactcctgctgacccctcctcccgctacccgtcccaaccgcattcccaagctttcgtggaggtgacccaacagcaagcactt

SEQ ID NO: 826288 - DNA, 120 bp, Artificial Sequence
  ENSG00000231881_125 (sequence is synthesized)
ccccactccgcctttcatggggtggggtccctaagaggtactgcagactaactcctcttttcatctcttaccccacctggaggaagaggcatggccaggatggacaccagagcacatttc

SEQ ID NO: 826289 - DNA, 120 bp, Artificial Sequence
  ENSG00000231881_126 (sequence is synthesized)
ccagcatttccaaggggaaagggcagcatctcagcatgcagactccaacatggccacagaaaggtcgagtggcgcagaggagcaggctgctgcccaggcccctagggccacttccaaagg

SEQ ID NO: 826290 - DNA, 120 bp, Artificial Sequence
  ENSG00000231881_127 (sequence is synthesized)
agtgtgaccacgactaggttgctgtggactcactcgcattacagggctgcgccctatacacctgtttgtaaagggtcctcctagaatgtaatggtgagggaccaccaagcggtggaccaa

SEQ ID NO: 826291 - DNA, 120 bp, Artificial Sequence
  ENSG00000231881_128 (sequence is synthesized)
gaattccaaacagaccagctccctgccttgccaggaaaccagatgtggcccagatgtccatagcagttcctcccacagggtgggacaccagctattctgtgcaacccctcccaacccttc

SEQ ID NO: 826292 - DNA, 120 bp, Artificial Sequence
  ENSG00000231881_129 (sequence is synthesized)
ttccagggtcagggaggaaagctggcaacctccgttgtcccttcccatttgggttgctagaagggagcaactcactcatcctcctcttcctgccaagagccacctgggcttacctctcca

SEQ ID NO: 826293 - DNA, 120 bp, Artificial Sequence
  ENSG00000231881_130 (sequence is synthesized)
gcagccacctaggttcaacctgtggtctaacctcaagccctctgctgacaggttaagtcaagatcgccgggaaggaaggcgtccagtttcattacacacacagacgtacacacacacccg

SEQ ID NO: 826294 - DNA, 120 bp, Artificial Sequence
  ENSG00000231881_131 (sequence is synthesized)
acaccgacccacgcgcctgggctctgcacagtggctagaccccaaaaagccgattctcctgttccctccgtggtggcctcagtcttttggcggcgccctctgctggccactaggaagtgc

SEQ ID NO: 826295 - DNA, 120 bp, Artificial Sequence
  ENSG00000231881_132 (sequence is synthesized)
aggaaaaaacagtctgcccatagacgcttggtggatctgggaaaggggacaagaggcagagaaacaagtgaaaagtgggagctgagagcagcgctgggctggccacaaacaagcgaggca

SEQ ID NO: 826296 - DNA, 120 bp, Artificial Sequence
  ENSG00000231881_133 (sequence is synthesized)
tggtgacgccttcctggagaggatggcccaagcccaggtccctggcatggtggggcaggggcctgagtcacagcctggcgtgaccctgcccagtccccaggaatggccagctcgtccaga

SEQ ID NO: 826297 - DNA, 120 bp, Artificial Sequence
  ENSG00000231881_134 (sequence is synthesized)
ggtgagacccaggtcaacaatccatcagtctgcctcctgccaccaggtatcctccccatcacgtcctacacgtggggtgggccaggacagtgctgggcagagctagtgttgggcctgtgc

SEQ ID NO: 826298 - DNA, 120 bp, Artificial Sequence
  ENSG00000231881_135 (sequence is synthesized)
ctgggggccaccaagggggcccggagaaaagaatggaggggttttcacttcctgagcagcaggaggagccagctggggttaaagacaggagggactggttgggcctacaggcatttggag

SEQ ID NO: 826299 - DNA, 120 bp, Artificial Sequence
  ENSG00000231881_136 (sequence is synthesized)
tctctccctgcctgctgggtgagggaggcagcaggtgccaagaactgctagcttctaggacctgaccctcaagttgcttctcctgctgaggggcttctagggtcaccctcagggccttga

SEQ ID NO: 826300 - DNA, 120 bp, Artificial Sequence
  ENSG00000231881_137 (sequence is synthesized)
catctgcacacatctgcacaggcccttcaccagggacttaacctccaaaggcagctcctgctcccagccttcacaggcccccctagggcccaagtccccagacccaacctcagtctgcaa

SEQ ID NO: 826301 - DNA, 120 bp, Artificial Sequence
  ENSG00000231881_138 (sequence is synthesized)
gctggccaagtcagaggtcctggctgcctggaccactcccaagcagtaaatggcactgtgggcttcctccatcctgtcttccccgccccacttcattgattcactgacttccaacttact

SEQ ID NO: 826302 - DNA, 120 bp, Artificial Sequence
  ENSG00000231881_139 (sequence is synthesized)
ggtcaggcccccttccagaccctgcctggatgaagaggactcccagaagcagtgattgaaggcctaggaggatacagagagccaggtgctttaattggagcaggtgccccatgaagaatc

SEQ ID NO: 826303 - DNA, 120 bp, Artificial Sequence
  ENSG00000231881_140 (sequence is synthesized)
tgttgaattgtgatttgacatcagcatgggaaggagaattccgaaggcagacaaatgagcctttgctccctcctctgcctgctggcacggtgcccaccagtctgagttctgtcctgcacc

SEQ ID NO: 826304 - DNA, 120 bp, Artificial Sequence
  ENSG00000231881_141 (sequence is synthesized)
ttcctgcagaaatgaagcagccactctggcagccttgggtcccctccaggctcatccactctgtggtggggtgtcctcctccttttctcccttacagctcctttccctttttctgtgctg

SEQ ID NO: 826305 - DNA, 120 bp, Artificial Sequence
  ENSG00000231881_142 (sequence is synthesized)
ccttcacttcaagcatgagctgagggtgactcctggtggccattcatataactgcagaatcctgaccattgtcaccgccacctggaagtgcatgaagtcgagtgtgcaaggaagccattc

SEQ ID NO: 826306 - DNA, 120 bp, Artificial Sequence
  ENSG00000231881_143 (sequence is synthesized)
ttcacactttccctacacctcccaactccctgtcagggccctggggagcctcaggggtggccactccccggggactccaccctccgaagttccacctctaagggcttcacttgcctgatg

SEQ ID NO: 826307 - DNA, 120 bp, Artificial Sequence
  ENSG00000231881_144 (sequence is synthesized)
ggtggggacgatcaaggaggcctctgcccagatcctgcagcaccaggcctgccccaggcaaaaagcaggacagtggctactcttccctcaagtgccactgaacactttgcaggcatcatt

SEQ ID NO: 826308 - DNA, 120 bp, Artificial Sequence
  ENSG00000231881_145 (sequence is synthesized)
ttgtccaattcttatcactggagcccattatcacaaagaagaaaccaaggttaagcaacttgccaagggtcacacagctcctcagtgcccaaatggtgaaatgaatacaggtgacactca

SEQ ID NO: 826309 - DNA, 120 bp, Artificial Sequence
  ENSG00000231881_146 (sequence is synthesized)
gtgggacaccagaccagcccctgggggacagaagaggcctataggaaggagcctgccatggggttagaagcctcagattctgacccgaccttgccccaactagtggggtggcctccatca

SEQ ID NO: 826310 - DNA, 120 bp, Artificial Sequence
  ENSG00000231881_147 (sequence is synthesized)
agggcctctgctcactgagcctcagcctcctcgatggcatcatggggcggaggacagagcaggattctcagattggctgtacatgggaatcactgggaggatttttcaaatacccatgtt

SEQ ID NO: 826311 - DNA, 120 bp, Artificial Sequence
  ENSG00000231881_148 (sequence is synthesized)
tgcccagccctgactaaggaaatcaaaattggtaggggttggctaagacaaaggtaattttaagaaaatatttctaggtgattctataggcagccagggttgagaatgggtcctctagga

SEQ ID NO: 826312 - DNA, 120 bp, Artificial Sequence
  ENSG00000231881_149 (sequence is synthesized)
ggtcctctaggagttccccatcttcagacttcccagccctctagaggtcagctccccagggctcccctctgtcctaagggctctccagataaacttttttttttttttgagacggagtct

SEQ ID NO: 826313 - DNA, 63 bp, Artificial Sequence
  ENSG00000231881_150 (sequence is synthesized)
gctgagactacaggtgcctgccaccacacgtggctaattttttttgtttttttttagtagagg

SEQ ID NO: 826314 - DNA, 120 bp, Artificial Sequence
  ENSG00000231881_151 (sequence is synthesized)
cgtgagccaccgcacccggcccagagaaactatcttagcttgtctacccagacccacaagaagctgcctcccaaccacccaaggggacacaggcccatcaaccctttccagagggggcac

SEQ ID NO: 826315 - DNA, 120 bp, Artificial Sequence
  ENSG00000231881_152 (sequence is synthesized)
agtaggcttgagactcttgagtctctgacccccagcctggcctctggggtggggggagagaaagtcatagggagcttaacctcaacaggatgaaggcgccataattagggtcaggcggtt

SEQ ID NO: 826316 - DNA, 120 bp, Artificial Sequence
  ENSG00000231881_153 (sequence is synthesized)
ggctcagcctgcggaaatccccagcttagtagggatggggagtggcactgcagcctgcgggagggttcagggcagaagtgagggggcagggggagcccaggcacatggaaacccaggacc

SEQ ID NO: 826317 - DNA, 120 bp, Artificial Sequence
  ENSG00000231881_154 (sequence is synthesized)
taggccccaattgcatcctgagagggcccactgggggcttctcaacacagttcactccctccctggggttgctgaaccccagggagggagggaaaggctgaccagccccccaaccccaga

SEQ ID NO: 826318 - DNA, 120 bp, Artificial Sequence
  ENSG00000231881_155 (sequence is synthesized)
gaccctactgctccctcaggctggggtgcatcaggatcatccccctaccccagcctttgtcaggaggaggagggcaccggtgggaaaaggctacgtgagtgttcccagggcgacccaggc

SEQ ID NO: 826319 - DNA, 120 bp, Artificial Sequence
  ENSG00000231881_156 (sequence is synthesized)
ttttctcctgactgtaatcctcaggccttgagagagggatcgctttccactgtggaatgtaacaaaggggacaaaatggggcaggggaggggggcagaagccagggagggaagcttgcag

SEQ ID NO: 826320 - DNA, 120 bp, Artificial Sequence
  ENSG00000231881_157 (sequence is synthesized)
ggtggtacttttagcccccaaaaggccctccaggaggcagctgcacagagagaacccccctgcccccatgactccctgagcctgtcatccagctcaccccagggcacagggtctcatcct

SEQ ID NO: 826321 - DNA, 120 bp, Artificial Sequence
  ENSG00000231881_158 (sequence is synthesized)
gggttgtccaggtgtccccccgcagactcctgccatgaatcccagtgcagggggatttggatgatcacctttgccagccactcattttgcaggggaggaaatattccaagagatgaaaac

SEQ ID NO: 826322 - DNA, 120 bp, Artificial Sequence
  ENSG00000231881_159 (sequence is synthesized)
tagccaagaccacgcagcaccagaaccactcccagaagccccggcttccccagagactgcttcagtgagccggcaaaaactgaagcctgcagcctcaggagttcccacacacacctaggc

SEQ ID NO: 826323 - DNA, 120 bp, Artificial Sequence
  ENSG00000231881_160 (sequence is synthesized)
cagaatccctctgccccgcagcaggacacccctccctcttgccctccagggtcatgggctagacatggcaaggtaagcagaaggcagatgcatactagtccacacaagcttgtgacggct

SEQ ID NO: 826324 - DNA, 120 bp, Artificial Sequence
  ENSG00000231881_161 (sequence is synthesized)
gggactaggggccaacctagtggctcccacgttgagaatcaacgccaattccaggaagccttcccggctaacccccaaaaagctggcaatacttccctcccacaacacagccttggctct

SEQ ID NO: 826325 - DNA, 120 bp, Artificial Sequence
  ENSG00000231881_162 (sequence is synthesized)
cgaaggctgtcctctcccccagcctcactctgactcatcatgtaggtcccgcatgggcctcagttctcctggccatgggctctccccataccttaacctgggaaccgttgtgggcaggac

SEQ ID NO: 826326 - DNA, 120 bp, Artificial Sequence
  ENSG00000231881_163 (sequence is synthesized)
catgtgggacaaaaaggtcctgtgcccaacccagcaccaatcacagggaggcctggggataagcaggggctcttggaaagggggcagaactcagctcaagtcacagaacctgggaaggac

SEQ ID NO: 826327 - DNA, 120 bp, Artificial Sequence
  ENSG00000231881_164 (sequence is synthesized)
cttcagtggaaagccgcttcaaatgtcatctgggatgagcatggtggctcacacctgtcgtctcaacactttggtgaaactgaggctggaggattgctcaaggccaggagtcgaagacca

SEQ ID NO: 826328 - DNA, 120 bp, Artificial Sequence
  ENSG00000231881_165 (sequence is synthesized)
gcctgggcaacatagcaaaaccttgtctctctgtgtatttttttaatattaaaaaaaaaaaatttaaggtcatctggtccagtccctcgtgcctcccagttgggaggcactgaacttctc

SEQ ID NO: 826329 - DNA, 120 bp, Artificial Sequence
  ENSG00000231881_166 (sequence is synthesized)
aacactgcagaaacaggcatctcttcatatatttagtcattcagtcatccatccaatgaaccttgcccaactatcttctacatctccgcagcccaggcaacccaatccattctcaaggca

SEQ ID NO: 826330 - DNA, 120 bp, Artificial Sequence
  ENSG00000231881_167 (sequence is synthesized)
cagactaaatccttaccaaatagagtcaagggtccatccatttcctctcctgggcctaacatggtgctaagtggaagtaaaaggtgctgatcagcaacggccacccacttttatgttgca

SEQ ID NO: 826331 - DNA, 120 bp, Artificial Sequence
  ENSG00000231881_168 (sequence is synthesized)
cggtggcattctcacctggcttgcacatcaccaggtgatgttcatttcagactcagccaccattccagacaggttgtccctcactggcagatgggaagctgaggctgagcaggtgaaatg

SEQ ID NO: 826332 - DNA, 120 bp, Artificial Sequence
  ENSG00000231881_169 (sequence is synthesized)
gtcttgcagctggaagaaaggtagggccaggacttggcccaggcagctaagctcccagccccagattcattttacacacccactcccagccctccaccagcttgggtttcatgtggaaac

SEQ ID NO: 826333 - DNA, 120 bp, Artificial Sequence
  ENSG00000231881_170 (sequence is synthesized)
aggatttcccccgggggaatgaaaatttgattttggcccctaattataaaaataataacagtgaagatggatcagaggcctgctggtctcagtgctgtgctgattttgctaaatgcacag

SEQ ID NO: 826334 - DNA, 120 bp, Artificial Sequence
  ENSG00000231881_171 (sequence is synthesized)
gtgtcaagtgttgcccacagaaccccccacccctcctcggggccaggctcacaatgcccttggctggcacagctgcacatgcagacacacacgcacgcacacacatgcatgcatgagtcc

SEQ ID NO: 826335 - DNA, 120 bp, Artificial Sequence
  ENSG00000231881_172 (sequence is synthesized)
ctgcacgtcccaggagatgtgtcccacccccttcattcccctctgataacccagcagcttccagcaggacagacacgtacccttcaggctggccatgtcaggcacgtgccagaccagctg

SEQ ID NO: 826336 - DNA, 120 bp, Artificial Sequence
  ENSG00000231881_173 (sequence is synthesized)
ccagggcccagaacctcaggcctgctgggctctagaaggtgactttctccatagctgaccctgttcaacctcaggaaggatgataactctccgggatgtgagggatgtgagaccccaccc

SEQ ID NO: 826337 - DNA, 120 bp, Artificial Sequence
  ENSG00000231881_174 (sequence is synthesized)
aaaccctctgcggagtcagtgtccatgcaaggctttgactaagaccttgctgaggcctggagaactcgcgtgcttcctctaaagcccagaccgaagacacctcctctggaaagcctacgc

SEQ ID NO: 826338 - DNA, 120 bp, Artificial Sequence
  ENSG00000231881_175 (sequence is synthesized)
tgaccggtgatggctgtcctgccagatggccaagctgcattctgccaggacaggctcatacccttcgggctggccatgtcgggacgtgccagaccagctgccagggcctggggcctcttt

SEQ ID NO: 826339 - DNA, 120 bp, Artificial Sequence
  ENSG00000231881_176 (sequence is synthesized)
tgaggctttgacttggcccccaccctggttcgtggacctgttatttccccatgctgagcttcaaggttctgaggccagagacagggtcctagtcaagtttgaggcctcagatccaacacc

SEQ ID NO: 826340 - DNA, 120 bp, Artificial Sequence
  ENSG00000231881_177 (sequence is synthesized)
atgacccagcccagtgcttttgtgcgtggaatgaaggaatcctgaccatgctgggctgagacctgccagggcaagggccccaggagtaggcacagggccctggggcatagccatcctgcc

SEQ ID NO: 826341 - DNA, 120 bp, Artificial Sequence
  ENSG00000231881_178 (sequence is synthesized)
ctggcctatccctgccccatgcctgagccctatgctaagagcaagttcctgttgcaagctgtaccctgtcccagacacgtggcatttaccaaaagggcagagacagtgagaagggcctcc

SEQ ID NO: 826342 - DNA, 120 bp, Artificial Sequence
  ENSG00000231881_179 (sequence is synthesized)
cctgtgccatccactcacaaaggggctggaaaggccagcaagaaggagaggagtcatatttcaaagggctctgaagatgtcacaatgacggcaatgctcaccacctcaaaccgcccaagg

SEQ ID NO: 826343 - DNA, 120 bp, Artificial Sequence
  ENSG00000231881_180 (sequence is synthesized)
agccatatccagactagacaatataagaaacagctgcagagcagccagaggacagcaaccctaccccagaaatggacatgagagataaacagacaattaaacaattgaggccaggagttc

SEQ ID NO: 826344 - DNA, 120 bp, Artificial Sequence
  ENSG00000231881_181 (sequence is synthesized)
gagaccagactgggcaacatagtgagaatctgcctctttaaaaaaatgttaaaattagctgggcaaggtagggtagtgtgtgcctatagtcctaactactgaggagactgaggtgggagg

SEQ ID NO: 826345 - DNA, 64 bp, Artificial Sequence
  ENSG00000231881_182 (sequence is synthesized)
agactgaggtgggaggatcacttgagcagaagttgaaggctacagtgagctatgatcacaccat

SEQ ID NO: 826346 - DNA, 120 bp, Artificial Sequence
  ENSG00000231881_183 (sequence is synthesized)
ctgaaaatcattatacatcactctacctctagtagatgggaaaaattcgaaagctggataaagcccagcattggtggggatgtgagtgacagccccatccccacagggcatgtactaggg

SEQ ID NO: 826347 - DNA, 120 bp, Artificial Sequence
  ENSG00000231881_184 (sequence is synthesized)
gaatttggcagctcattcatagagtgggtggacaggaaaatgtgtggctgcacatcatagggttccatgtagcagttggaagcaacaaggctagattttattttgattgattgattgact

SEQ ID NO: 826348 - DNA, 84 bp, Artificial Sequence
  ENSG00000231881_185 (sequence is synthesized)
agcaacaaggctagattttattttgattgattgattgactgcactccgtcacccaggctggagtgcagtagcataagtgatcct

SEQ ID NO: 826349 - DNA, 120 bp, Artificial Sequence
  ENSG00000231881_186 (sequence is synthesized)
atcaccatgcccagctcaaggctagattttatacagtgttgactcaatgagatctataacacaatgacatttatcaaagtaaaaagaaaaatacgtgcttacaaaagagtaatgcccacc

SEQ ID NO: 826350 - DNA, 120 bp, Artificial Sequence
  ENSG00000231881_187 (sequence is synthesized)
tgcaggaaccatacaaacaaaggcatcaaagacagtaaaatggggaaacaaaagaagggtgtgaggaagggaggaaaggaataaacaccaaacgagaaaggtcagtgatgccagtgagcc

SEQ ID NO: 826351 - DNA, 120 bp, Artificial Sequence
  ENSG00000231881_188 (sequence is synthesized)
tgccatggcctgagtaacactagccacacccccggtccacaatgaggaccacatctgaggtccacagggaggaacagtccccaaggtcctcagcgcaggctcaggtggagccaggagccg

SEQ ID NO: 826352 - DNA, 120 bp, Artificial Sequence
  ENSG00000231881_189 (sequence is synthesized)
cttccatgagggtcagatctgggcctaacctcagagcttgcccctccccgcaccctccacagcagaggaggctcttggccaaagtcaagctgctgtacacgcagggtcgcacccaccttg

SEQ ID NO: 826353 - DNA, 120 bp, Artificial Sequence
  ENSG00000231881_190 (sequence is synthesized)
ggccccttttatgccctggaagtggaagaggacagacctcaaactagagcagtgattctgccctgagctgggtgccaggagaaaatgggaagcaagtcctcactcttacaaaagttcctg

SEQ ID NO: 826354 - DNA, 77 bp, Artificial Sequence
  ENSG00000231881_191 (sequence is synthesized)
ttttgggggcaaaggcgcatattgagacccccatctctaaaaacattttttttttaattagctggatatggtggctt

SEQ ID NO: 826355 - DNA, 90 bp, Artificial Sequence
  ENSG00000231881_192 (sequence is synthesized)
ctcaagaccagcctggccagcatattgagacccccatctctaaaaacattttttttttaattagctggatatggtggcttgcgtctgtag

SEQ ID NO: 826356 - DNA, 120 bp, Artificial Sequence
  ENSG00000231881_193 (sequence is synthesized)
cactgcactccagcctgtgtgacagagtaagaccctgtctcaactttttaaaaaaaaattcctggaattcaggtaattttttttttctttaaggagagtctttatctttagacacacatt

SEQ ID NO: 826357 - DNA, 120 bp, Artificial Sequence
  ENSG00000231881_194 (sequence is synthesized)
cacacatttagaaaaatctgtgaaatgatataatgttataaatgtgcttcaaaatctaggtgtggtggcaggggagagggggcaagtaggtggatgaaaccagcttggtgataaattgat

SEQ ID NO: 826358 - DNA, 120 bp, Artificial Sequence
  ENSG00000231881_195 (sequence is synthesized)
agctgctgagtctgggaatgagtgcgtggggttcattataccttattctctatttgtgcacgtgtttcagagtttccataataaaaacttcaaaaagaaaaacttcccagtaagaaactc

SEQ ID NO: 826359 - DNA, 120 bp, Artificial Sequence
  ENSG00000231881_196 (sequence is synthesized)
tcccatgtgaggggactagcccctgacctcagggaaccccacccagtctgccaggggacacacaacccctgccctgcatcttcttagcctgcctcggctggccaggggccgcattgtagg

SEQ ID NO: 826360 - DNA, 120 bp, Artificial Sequence
  ENSG00000231881_197 (sequence is synthesized)
acacagccatgggggtcctgacaaatgctcagcctcggacctggccttatcactgaagccaagggtcaggcactggagccacatctgagcagacctggttctggttccagctccaccttg

SEQ ID NO: 826361 - DNA, 120 bp, Artificial Sequence
  ENSG00000231881_198 (sequence is synthesized)
cacgtagcctgaggcacctcacctgaaccacacctgcctggatccaagtcctgggtcattatcagtgagaaagtcctcctgctcttactgtggctgctcctctcactgcctctgcctcca

SEQ ID NO: 826362 - DNA, 120 bp, Artificial Sequence
  ENSG00000231881_199 (sequence is synthesized)
cgtctgtatgatgaggactggaatcaccaggagcctctgactcaggagagcaccaggaagcctgcgtgggccagatgcaagccaggaaggacagggctggggaagaaggaggcagaagcc

SEQ ID NO: 826363 - DNA, 120 bp, Artificial Sequence
  ENSG00000231881_200 (sequence is synthesized)
tctatcctgccctcccggaacacagaggtatccagatggggaaacctaggcaaagagagggtaagtaactttcccaaagtcactcagcttgcacacagcagagctaggatttggccccag

SEQ ID NO: 826364 - DNA, 120 bp, Artificial Sequence
  ENSG00000231881_201 (sequence is synthesized)
ccagcctgccttgagtttgtgctcttacccaccccagcgcactctcagacagcatggcctggcttttcctgagccagcgcttctgattccccctggggtataacagctgataccctgttt

SEQ ID NO: 826365 - DNA, 120 bp, Artificial Sequence
  ENSG00000231881_202 (sequence is synthesized)
ataccacaacacctgggatgggagcttcacccaggggtggcagtgctagtacccgggcagcactcccaccttgtctcttactcgggaaagcagagcagaaggtaagcgggaataacgcta

SEQ ID NO: 826366 - DNA, 120 bp, Artificial Sequence
  ENSG00000231881_203 (sequence is synthesized)
tcagagggatgggtttttaactcattattttctcttcttcttttttgttgttgttgttgagatagggtgtcactcccatcacccaggctggagtgcaatgccacaatcttggcttactgc

SEQ ID NO: 826367 - DNA, 66 bp, Artificial Sequence
  ENSG00000231881_204 (sequence is synthesized)
acccaggctggagtgcaatgccacaatcttggcttactgcaacctccgactcctgggatcaagtgg

SEQ ID NO: 826368 - DNA, 120 bp, Artificial Sequence
  ENSG00000231881_205 (sequence is synthesized)
tcatttaaatcactcataaaaagttaaccaagatctgggccaagtgcagtggctcaaaaatatatatacaaaaaaaattagcagggcatcgtggcacacttgtggtcccagctactcagg

SEQ ID NO: 826369 - DNA, 71 bp, Artificial Sequence
  ENSG00000231881_206 (sequence is synthesized)
cgagattgtgccactgtactccaggaaagttatccaagatcggcaacaaagtagtcatgaaacacccttac

SEQ ID NO: 826370 - DNA, 120 bp, Artificial Sequence
  ENSG00000231881_207 (sequence is synthesized)
atccaagatcggcaacaaagtagtcatgaaacacccttacaaccagtcacagcaaggccctggagaatctctttggtctactgaatgcaagcagctggggcatccgctcccagctgaaac

SEQ ID NO: 826371 - DNA, 120 bp, Artificial Sequence
  ENSG00000231881_208 (sequence is synthesized)
atgctgaaagaggagtggataagagcacaggtctcagggtgggtgctgccacttccaagctgtaaaaccctggaccacagattagttcacctctctgggcctcagttttcccatccgtaa

SEQ ID NO: 826372 - DNA, 81 bp, Artificial Sequence
  ENSG00000231881_209 (sequence is synthesized)
attagttcacctctctgggcctcagttttcccatccgtaaagtggggtgataatagcatctccttgcaaagttgttagaag

SEQ ID NO: 826373 - DNA, 120 bp, Artificial Sequence
  ENSG00000231881_210 (sequence is synthesized)
ccagccccatgcagatggcagcccaggggggtcatactagtccttctgtccttatgttggcggacagagatctctactctgaaacctttgtaggggcctggacagctttgggagcctgag

SEQ ID NO: 826374 - DNA, 120 bp, Artificial Sequence
  ENSG00000231881_211 (sequence is synthesized)
ttttcgtgcccagcctcacgtacgtgccctgccataggccgtgcccccacccccacacccctcaccccacagaacaagcgcctagtgactgcagaaacagacacccagtcatggcacaca

SEQ ID NO: 826375 - DNA, 120 bp, Artificial Sequence
  ENSG00000231881_212 (sequence is synthesized)
aaggcacccacaccaggccagccatcatggctgcccccctggcagccaccctggagggcagacagatgccttcacaagccattttgtctttctccagcttggtgccaggactgggggtgg

SEQ ID NO: 826376 - DNA, 120 bp, Artificial Sequence
  ENSG00000231881_213 (sequence is synthesized)
gggaaagggtttctcctgagacttctctgagtaagggggcccacagaggggtttccttatgtaccccagctgtggcctcttgccccctctctcctgtaacccatgtttacagaggcctcc

SEQ ID NO: 826377 - DNA, 120 bp, Artificial Sequence
  ENSG00000231881_214 (sequence is synthesized)
aagtgctctaccctgcatggggacctgcccaggcgagggggtcacaggagcctccaacccaggaggggaagtgagagataaagcccctaaggaagggacacctaagtgcctccccaacca

SEQ ID NO: 826378 - DNA, 120 bp, Artificial Sequence
  ENSG00000231881_215 (sequence is synthesized)
gggtctgtccttcgtgtcccaagtgtgtgtagtggagggagtgctccccagtttcctgggggttgaggtggggcggtattctaaacctttggaaatggaatagaactacctaaagtatat

SEQ ID NO: 826379 - DNA, 120 bp, Artificial Sequence
  ENSG00000231881_216 (sequence is synthesized)
gaaattagatactacttgggacactatgtcttggttctgtatgtcctgggacagtgtaaaaagtgatcacaaaattttcaacatcacagtctaaaataaaaacctgcctcttgtctgcct

SEQ ID NO: 826380 - DNA, 78 bp, Artificial Sequence
  ENSG00000231882_0 (sequence is synthesized)
ggccattgtcctgcctcaggaggagattctactgtctcagcctcccgagtagctgaaactacaggtctttagataata

SEQ ID NO: 826381 - DNA, 120 bp, Artificial Sequence
  ENSG00000231882_1 (sequence is synthesized)
ccaatcagaatatctttgaagccacctatgacctggaagcccccaccttccccttttctggaacgaaccagtgtacaacttatgcttattgattggtgtctgtatgtaacttctgtcccc

SEQ ID NO: 826382 - DNA, 120 bp, Artificial Sequence
  ENSG00000231882_2 (sequence is synthesized)
ctaaaatacataaaatcaagctgtgacccaactaccttggacacatgttctcaggaccttccaaggctgtgtcatgggtcgtggtcctcacatttggctcagaataaatctcttcaaata

SEQ ID NO: 826383 - DNA, 120 bp, Artificial Sequence
  ENSG00000231883_0 (sequence is synthesized)
cagggtcccactctgtggcctaagctggagtgcagtggcagtatcagggcccgctacatccttgacctcctgggctcaaacaatctctcatctcagcctcccaagtagctggcactatag

SEQ ID NO: 826384 - DNA, 90 bp, Artificial Sequence
  ENSG00000231883_1 (sequence is synthesized)
caatctctcatctcagcctcccaagtagctggcactatagggatggaggcctcactttgttgccagctggtctcgagctcctggctaatg

SEQ ID NO: 826385 - DNA, 120 bp, Artificial Sequence
  ENSG00000231883_2 (sequence is synthesized)
tctttttttgatctgcccagtaccaaccctcatttgggaatcgctctttctgttcctttaacctgatgattcctgtgggagcagctgtgctctgacatggcctggccctgcctagggctg

SEQ ID NO: 826386 - DNA, 120 bp, Artificial Sequence
  ENSG00000231883_3 (sequence is synthesized)
cagggagatccgggtacccaccaattaggacagacattggctgaaaaacaattgatatgggtgcagcagtgcacgcaggctgaagagcacccttgtttgagaagaaggaacatagggatt

SEQ ID NO: 826387 - DNA, 120 bp, Artificial Sequence
  ENSG00000231883_4 (sequence is synthesized)
ccctctttgggggcagaagttggaaactgtgcattggggagccctgttttcttcctgtagacaaatctcattgtggtgaataggaatgaggccaacggcaagatctggagatggaagaag

SEQ ID NO: 826388 - DNA, 120 bp, Artificial Sequence
  ENSG00000231883_5 (sequence is synthesized)
ctcctgaagatgttgaaacccctggtcccagctgttctgtgggccagctggattcctgcccttctatagctgtattgctcaatcctttcctgggatctgggagaaaataaatttcatttt

SEQ ID NO: 826389 - DNA, 120 bp, Artificial Sequence
  ENSG00000231889_0 (sequence is synthesized)
cagacctgggacctacatctgcttcccctgaggaaatgacctcattcttgatggctgctgctaacttatggtgagatgctgggtccctgcccaataccacatggacatccaatcaattta

SEQ ID NO: 826390 - DNA, 120 bp, Artificial Sequence
  ENSG00000231889_1 (sequence is synthesized)
cccagggacaagtccactcaagagcatcatttagaagagggaaaaggcactggggttatttgtttttggagtatgtgcttaaggaaatctagagtattcccacgagcattctgctgagat

SEQ ID NO: 826391 - DNA, 120 bp, Artificial Sequence
  ENSG00000231889_2 (sequence is synthesized)
gaacaatcagatgacctcgtgtgagatttggaggagagaaggaaatggagagcatgcgtctgccgcttctgtggtttctgtcggtaagcacagtgatgaggtgctgagttttccccagaa

SEQ ID NO: 826392 - DNA, 120 bp, Artificial Sequence
  ENSG00000231889_3 (sequence is synthesized)
tgtcctattaccagcttcacaagcgtcgagggcagggcatgggcatctattgttcaccagtggagatctatctggcacagaaccgatccaaccattgcagtggtcacagcggtgttggct

SEQ ID NO: 826393 - DNA, 120 bp, Artificial Sequence
  ENSG00000231889_4 (sequence is synthesized)
ttctgattctcaaccttcctgaccgccagaggagacagcctctttggtggccctgttctgtggtattgtgctaaccggtggtgggactaaaactgtctctataatgttttatttcttaaa

SEQ ID NO: 826394 - DNA, 120 bp, Artificial Sequence
  ENSG00000231889_5 (sequence is synthesized)
aaaaaattctgaagcaaatgtgacaatatgttaacattcttaaaatctgggtagtgggaacatggatgttgttatttgtggtgtgtttgaaattgtgtcatattataaattttaaaaaaa

SEQ ID NO: 826395 - DNA, 120 bp, Artificial Sequence
  ENSG00000231889_6 (sequence is synthesized)
tgctggaggcctcataaatattctagggctacaatgccctgcaaaaaacccatcagcactggcaaccctgaccctcttctctgtggttagatgggagccagggccaagggacatgcaagg

SEQ ID NO: 826396 - DNA, 120 bp, Artificial Sequence
  ENSG00000231889_7 (sequence is synthesized)
ttcggggccgttttggcggctatgcaggattggcaggagctgcgatgctcacacttgcctcgccgaccgccatttcacatccagcagaggaggcgggggcagccgctgagacggtttttc

SEQ ID NO: 826397 - DNA, 120 bp, Artificial Sequence
  ENSG00000231889_8 (sequence is synthesized)
gattgttgcttacgcttttcatatttttacccaaggagtaatcaggaattctaaaagtcttatgtaacaggatttaaaataaaattacacagaatctcaactgtactatattttgaaaat

SEQ ID NO: 826398 - DNA, 120 bp, Artificial Sequence
  ENSG00000231889_9 (sequence is synthesized)
aatctcaactgtactatattttgaaaatatgaatgattaagattattttttatatttttattaatatagagaaaataatttctataaaatatgctttcagctaatgggggatcccattcc

SEQ ID NO: 826399 - DNA, 120 bp, Artificial Sequence
  ENSG00000231889_10 (sequence is synthesized)
ggattttcaaataggaaaatcaaaaggcccaaagagacagctcactggtgaccatgctttgggattttcatagtttgagtaattcctatgggctctaccacccagcgagttaaagaagac

SEQ ID NO: 826400 - DNA, 120 bp, Artificial Sequence
  ENSG00000231889_11 (sequence is synthesized)
aagattccacccccagggggttgtggttctgggaatgtgagcagcttgttttcaggagatctgcatcttgatctggcctgctattaggatctgtggtggtggtgcctgtctggttttagt

SEQ ID NO: 826401 - DNA, 120 bp, Artificial Sequence
  ENSG00000231889_12 (sequence is synthesized)
tgtttcttttatcttacacagatttttgtaagttatttgcatataaaggtttttgaaaagtgaatgttttatgggggcatcttgcttatacaaagaaaaattaaaactgttttaaaataa

SEQ ID NO: 826402 - DNA, 120 bp, Artificial Sequence
  ENSG00000231889_13 (sequence is synthesized)
ggcggctatgcaggattggcaggagctgcgatgctcacacttgcctcgccgaccgccatttcacatccagcagaggaggcgggggcagccgctgagacggtttttcacaaggctttctcc

SEQ ID NO: 826403 - DNA, 120 bp, Artificial Sequence
  ENSG00000231889_14 (sequence is synthesized)
atatttacgtgcttgtaactctggcatgacctttgctccagtctctaccagagggcggtgcctggattgaagtggaaaagccctgttttccagccatgacccagggagcaagcactgact

SEQ ID NO: 826404 - DNA, 120 bp, Artificial Sequence
  ENSG00000231889_15 (sequence is synthesized)
gagagcggggctggagggcgaagaagcccaggagagttcctggctcagaacccctctctgaggctcccaatacagagcccaggccccacacccagggcctctgagtatttttgtttattg

SEQ ID NO: 826405 - DNA, 120 bp, Artificial Sequence
  ENSG00000231889_16 (sequence is synthesized)
tatgtaaaatactagtgtatttttgtttaagtctcacaggtaaacaggttctctcatactttgccaagggaaatgtgatctgtgcaatttggcaataactatcagaattttaaaagctta

SEQ ID NO: 826406 - DNA, 120 bp, Artificial Sequence
  ENSG00000231889_17 (sequence is synthesized)
caagttcgaaatttgcccctgaattaggacccttgacacatttctaacccatccaagtagagatcgttcttttacatttgtgtgttatacaggtgcattttagtggttaccaggttgcca

SEQ ID NO: 826407 - DNA, 120 bp, Artificial Sequence
  ENSG00000231889_18 (sequence is synthesized)
ctcccaaagtgctgagataacaggtatgagccaccatgccctgcgaaattattctttttgagacagagtgagactctgtcacccaggctggggtgcagtgacccaatctcaactcactgc

SEQ ID NO: 826408 - DNA, 71 bp, Artificial Sequence
  ENSG00000231889_19 (sequence is synthesized)
tctacacccagctatttttcatatttttttggagacagggtttcactatattgcccaggctggtctcgaac

SEQ ID NO: 826409 - DNA, 60 bp, Artificial Sequence
  ENSG00000231889_20 (sequence is synthesized)
tcaagctaaattattctttgtgtcatcccttttctttccttcactttcagataactcagt

SEQ ID NO: 826410 - DNA, 120 bp, Artificial Sequence
  ENSG00000231889_21 (sequence is synthesized)
tgtcatcccttttctttccttcactttcagataactcagttttcttaactactgtagggcaaatgtctgagtcatttagttcagtgttcctcaaccaggggtgatttttgccgccctagg

SEQ ID NO: 826411 - DNA, 120 bp, Artificial Sequence
  ENSG00000231889_22 (sequence is synthesized)
ggacatttggcaaaatatctggaggcatttttgattatcacatcttacaatgcatagggcagcccctgcagcgcaaagaattatcaggtccaaagtgtcaatagtgcaggtgttgaaaaa

SEQ ID NO: 826412 - DNA, 120 bp, Artificial Sequence
  ENSG00000231889_23 (sequence is synthesized)
ccctggcctagtttaaagtaaatttgtacccagcccttcatccagtctcttgcctttatgaaaccatgatggaaaagaaactcattccctttcagaggcatttggaaggcctaagtaagt

SEQ ID NO: 826413 - DNA, 120 bp, Artificial Sequence
  ENSG00000231889_24 (sequence is synthesized)
acggcaaactttggagtcaattgcatcaaccatacaaagtcccaaaaggctttatatgcaggtttctgcaatttctccatagaaccttcctgggtacaaggtaggcacataaatatttgt

SEQ ID NO: 826414 - DNA, 120 bp, Artificial Sequence
  ENSG00000231889_25 (sequence is synthesized)
ggctaaaagacatattttatttctttctctttaaaccaaagtcagatttatcatgtggtgagagatgaatttcctgaacagagatctctctattcattttaaccaattaatttactcagt

SEQ ID NO: 826415 - DNA, 120 bp, Artificial Sequence
  ENSG00000231889_26 (sequence is synthesized)
tactcagagaagcaaaacttttctgaaacaacttccacttccataagttagcagtaatagtcttaaggaaggaattgatagcctataaattaaagatgatgtttgaggaacaagaaataa

SEQ ID NO: 826416 - DNA, 120 bp, Artificial Sequence
  ENSG00000231889_27 (sequence is synthesized)
aagaaactttcagaatagagtaatattagaactgatgcctgagctttccaggaccctcatttaaattacatatccagaattgatattggagcatttccaatggattatattatagatagg

SEQ ID NO: 826417 - DNA, 120 bp, Artificial Sequence
  ENSG00000231889_28 (sequence is synthesized)
caggaggagaccaaacacacatagagtaaggatagataaaattcccaatttaaataattaagatgcaaaatctcagaagctaggtatctatttggatcaacatatctcagggtagtttcc

SEQ ID NO: 826418 - DNA, 120 bp, Artificial Sequence
  ENSG00000231889_29 (sequence is synthesized)
ttcccctggccccaaagtttattgcattttaatattcacagtgtaaatcacattccagaaaaactcccactaaaaagctttttactgagactgggcagggtggctcatgcctgtaatccc

SEQ ID NO: 826419 - DNA, 87 bp, Artificial Sequence
  ENSG00000231889_30 (sequence is synthesized)
ttgtcgctacaaaaaattaacaattagccaggcgtggtgatgtatgcctgtagtcccacttactcaggaggctgaggcaggaggatc

SEQ ID NO: 826420 - DNA, 89 bp, Artificial Sequence
  ENSG00000231889_31 (sequence is synthesized)
ggtgatgtatgcctgtagtcccacggagcctaggaagttgaagctgcagtgagccatgatcaccactgcactccagcctgggtcacaga

SEQ ID NO: 826421 - DNA, 120 bp, Artificial Sequence
  ENSG00000231889_32 (sequence is synthesized)
ctcaaaaaacacacacacagaaaactttgttattgacactggattctcctagattttgctttattttacatcctcattccagaggccagaaaagactacttattctcagatgtgtaaata

SEQ ID NO: 826422 - DNA, 120 bp, Artificial Sequence
  ENSG00000231889_33 (sequence is synthesized)
tagataagtccttctgtttcttcattttctcaataaaatgtatttttccaattttaaaagtttttaaatgcatagcatggaaaacatggaggacaataaagaaaaatatagaacattcag

SEQ ID NO: 826423 - DNA, 120 bp, Artificial Sequence
  ENSG00000231889_34 (sequence is synthesized)
ggctatgcaggattggcaggagctgcgatgctcacacttgcctcgccgaccgccatttcacatccagcagaggaggcgggggcagccgctgagacggtttttcacaaggtgaccatgctt

SEQ ID NO: 826424 - DNA, 120 bp, Artificial Sequence
  ENSG00000231889_35 (sequence is synthesized)
atgcaggattggcaggagctgcgatgctcacacttgcctcgccgaccgccatttcacatccagcagaggaggcgggggcagccgctgagacggtttttcacaaggtgcattttagtggtt

SEQ ID NO: 826425 - DNA, 120 bp, Artificial Sequence
  ENSG00000231889_36 (sequence is synthesized)
ggtaagaaaatccgcccgcgtgaggagggaggcgaggcgcagatctcgtgccgctgcggcctcgcgggagggaagggcgggcgggcggcggaacgggcggggccgggtgcggacgcagcc

SEQ ID NO: 826426 - DNA, 120 bp, Artificial Sequence
  ENSG00000231889_37 (sequence is synthesized)
ggcccttctcaggtaacgccgcggctccgcgcgtggcccgggggcggtgcgaagggtgggggcgcgcgggcgcgggcttcggcctataaaagggccgccctggcgttcccccttcccgaa

SEQ ID NO: 826427 - DNA, 120 bp, Artificial Sequence
  ENSG00000231889_38 (sequence is synthesized)
cgtgccgcgcgagccgcggtgccccctcctctttgctgctgcagtgtctgcgccgggccatttaatgagatttattcacgcacggctcttctcagctttgcgaggggttggcagatccag

SEQ ID NO: 826428 - DNA, 120 bp, Artificial Sequence
  ENSG00000232688_0 (sequence is synthesized)
attcagccccaggtttgaattttttctagttttcacacacacacacacccacaaaaaggcataatacctgtaagaaggaaagcagtcctctagaattgaagtgtttgaaaaaaagctatg

SEQ ID NO: 826429 - DNA, 120 bp, Artificial Sequence
  ENSG00000232688_1 (sequence is synthesized)
tttgaatggtaggaccgtatctgctattcagtttttgaaatacagctgtgccatgtgcactgaaccttcacactgggactcagctgccatgcttcaccttgggtataatgatgacagagg

SEQ ID NO: 826430 - DNA, 120 bp, Artificial Sequence
  ENSG00000232688_2 (sequence is synthesized)
ttgagaaaggtgactccctccattgatgtatttcgccatgattacctcccaccaaatgatactaatactcctgaaaatacttaacatttataaaatgtttattttctgattcatgccaaa

SEQ ID NO: 826431 - DNA, 120 bp, Artificial Sequence
  ENSG00000232682_0 (sequence is synthesized)
cagagtttccttggtactctgttttcctacatcattttgggattctggaaagtaagattttgtctttgcttctggagtgatttctgtatggcttccatttgcttcaaatttgccagcttc

SEQ ID NO: 826432 - DNA, 120 bp, Artificial Sequence
  ENSG00000232682_1 (sequence is synthesized)
tcctttgagatatgagccatacctgtcatccagtcgatctagtaacccaccagttactcttcgagcttgagcgcaggactctaggtttccacttgatgtctcattctgccaacctgtaat

SEQ ID NO: 826433 - DNA, 120 bp, Artificial Sequence
  ENSG00000232682_2 (sequence is synthesized)
tgaagacatttccagttctgcttgctgaacacgcttaagaatagcctgtactttttcttctgtcatctcctcagactctactccttcttcaagttgaatgtcctcaaatagagatttgag

SEQ ID NO: 826434 - DNA, 120 bp, Artificial Sequence
  ENSG00000232682_3 (sequence is synthesized)
tttctcttccatcatctcctcatcaggaccagattttcctttctcctgctgctcagagcttactcctagttttctaggctctgctggtttaacatcttttggggacccagccaaatttcc

SEQ ID NO: 826435 - DNA, 120 bp, Artificial Sequence
  ENSG00000232682_4 (sequence is synthesized)
aaggtattgaggatactcactcagacatacattctccaactggctctcatctacatccactgcttcaggcatttctgttaaaggcactgagtcttccagtttgctgtcttctaaggaagc

SEQ ID NO: 826436 - DNA, 120 bp, Artificial Sequence
  ENSG00000232682_5 (sequence is synthesized)
gtcttctgcagttacgactggaggtccatctgcggaatgctctatgttcccctgggaaggcactagcccatcactcagtctactaggggttctaaggggagattctatgctagagatatc

SEQ ID NO: 826437 - DNA, 120 bp, Artificial Sequence
  ENSG00000232682_6 (sequence is synthesized)
tttggactgactggaatgaattagaatacatcaaacaaaaacacatggaatgactaaaattatatcaggcatgaaaaatgtatgatgaattacagattaatgtcaataaatttatcggtt

SEQ ID NO: 826438 - DNA, 120 bp, Artificial Sequence
  ENSG00000232682_7 (sequence is synthesized)
tagttcaattaaatgtaacacaatgaaataaaaagcctagtgcaaactccaataaaatagaatactaattaagatatcaattgtttctgttttggaaattatgatacaataagtaaatat

SEQ ID NO: 826439 - DNA, 120 bp, Artificial Sequence
  ENSG00000232682_8 (sequence is synthesized)
ctaaatatataaagtttatatatttaagtttatataaagaccaatataaagttagttgtcattacatgagatacttattatctttctatatttagcatgcgaagttcatactgtggtgga

SEQ ID NO: 826440 - DNA, 120 bp, Artificial Sequence
  ENSG00000232682_9 (sequence is synthesized)
atgcgaagttcatactgtggtggactgaatacagcaagccacaagaaaccaatttttatcattaattacctacaacttttatattaattacctacaacttattttaagaactgtacatat

SEQ ID NO: 826441 - DNA, 120 bp, Artificial Sequence
  ENSG00000232682_10 (sequence is synthesized)
gagcaaagcaacctagttcttctttcacatgaaattatagcacagaaaaacggatttaatctttggaaagaaatgattgtttgttagattttagagcagtggcactgggaaaaaaatttt

SEQ ID NO: 826442 - DNA, 120 bp, Artificial Sequence
  ENSG00000232682_11 (sequence is synthesized)
aaacgatgttaagaaaaggattgaaaaaacagaccaagtttaaaagactccatgtagttttagggtgttgtacaaaaacagatatgaccaagatgaaagggttgtggagtacatgaaggt

SEQ ID NO: 826443 - DNA, 120 bp, Artificial Sequence
  ENSG00000232680_0 (sequence is synthesized)
atggagggcggagggacagccaccctgttgtgtagctcggagcagctgtgtccttcagtgcaggtccagccaagagccgtgggccacagatgacgctggtggggaagcagagggcagact

SEQ ID NO: 826444 - DNA, 120 bp, Artificial Sequence
  ENSG00000232680_1 (sequence is synthesized)
aggcagaggcaaggctttcctgtgccctgagctgtcagagatgggccagggccttcagcttcctcgatagggcagaagtgaccacgctggctccattcagcaaaggacgtggacggagct

SEQ ID NO: 826445 - DNA, 120 bp, Artificial Sequence
  ENSG00000232680_2 (sequence is synthesized)
gccgggcttgtctgagaggaggagaaatgtggaattgagtgaggctctctaagaaggttctgctggagttgagaaaaattagggtgaggcacctccccgattttatgtcctttttcctgg

SEQ ID NO: 826446 - DNA, 120 bp, Artificial Sequence
  ENSG00000232680_3 (sequence is synthesized)
gtccagcctcctgaacagctaccattcgcttctgtgagacacctgtcggtgcctccttttccagcccttaatggaacgttcctctcccagccacctcagacttcccataccaccctccct

SEQ ID NO: 826447 - DNA, 120 bp, Artificial Sequence
  ENSG00000232680_4 (sequence is synthesized)
tgccctccggccacatgaagacaaggcgctaacaaacatggcgttctgcaaattgcaccatcgccaactcctgtcttactctcacagaggataataacctgtgcagagagagggtctcct

SEQ ID NO: 826448 - DNA, 120 bp, Artificial Sequence
  ENSG00000232680_5 (sequence is synthesized)
gtcctgaagtcacagcccggatctccaggctggctctgctgcctctgaatgatttgtgggtcacacacgccaacagcatcgccaagggctgacatcagcctgcttgagccacggaaactg

SEQ ID NO: 826449 - DNA, 120 bp, Artificial Sequence
  ENSG00000232680_6 (sequence is synthesized)
aatgggcaaggatgagttccccagcacagagggaggcatcctctgtcaagaccatctgcgcatgtgctgtgcagtctccagtctgcactgtgagcagtgtgtctcaacggcttttgagaa

SEQ ID NO: 826450 - DNA, 120 bp, Artificial Sequence
  ENSG00000232680_7 (sequence is synthesized)
ctgcttcgagaggggaccagatgcgcagagacaagcttccagcctggctagggacggaccctctggggatgctcctctctggccgggcagcagtagaagcacctgcctccatccacatcc

SEQ ID NO: 826451 - DNA, 120 bp, Artificial Sequence
  ENSG00000232685_0 (sequence is synthesized)
aagccccttcctcctctccagaagtacgtggatttttcagttttctgccctaactgttatcccactgtggctcatacctgccctccccactaccctaccctaatactctacctgcactgc

SEQ ID NO: 826452 - DNA, 120 bp, Artificial Sequence
  ENSG00000232685_1 (sequence is synthesized)
tcttctgctattcattacaaaccatccatttgtcaatgctctagtcccagaactctttctggtaactcccttatcgatcaccctagccctccttctagccctactggtcaacgcttgggt

SEQ ID NO: 826453 - DNA, 120 bp, Artificial Sequence
  ENSG00000232685_2 (sequence is synthesized)
cccagaactcttccctgtgattcccttatccgttctcctgttcctcctcctagccctccttgccaacgctctggtcccagaactcttttctgtgactaccctgtctgtccccctactcct

SEQ ID NO: 826454 - DNA, 120 bp, Artificial Sequence
  ENSG00000232685_3 (sequence is synthesized)
cctcccagccctacttgcaaatgctgtcgtcccagagctgtttcctgggactcctctacctatgcctctacccctcctccttagccctacttctttctagtaccctgtactctagtcccc

SEQ ID NO: 826455 - DNA, 120 bp, Artificial Sequence
  ENSG00000232685_4 (sequence is synthesized)
agcccccagccctgccatccccaaccagaccttatggttcacaagtctcatcttggagatggtttccctgctcccggggcagttctggaacagttcaggatggccaggactgtggattcc

SEQ ID NO: 826456 - DNA, 120 bp, Artificial Sequence
  ENSG00000232685_5 (sequence is synthesized)
cccctgcctcatcagccagcctgcatgagcctctacatttgttcctggcttctccatggaactcggtctacagccacaaagcaaaccacagggccagtgacagagaaggcagaggggagt

SEQ ID NO: 826457 - DNA, 120 bp, Artificial Sequence
  ENSG00000232685_6 (sequence is synthesized)
gtggagtgggaagcacctaacctgttctcaaggaggggaatgattggccaagatgagtttcaatcgtatgtccactacctcctggcctgccacttggctgtgagtcctttctgggcggtg

SEQ ID NO: 826458 - DNA, 120 bp, Artificial Sequence
  ENSG00000232685_7 (sequence is synthesized)
tccaggggcggttccagtgatcaggcaggtgctgagaagcacaggcagtttttccatctgaaaaatggaaataacaacccaccactccgtgagtcttttaagaattgaagatttgcttaa

SEQ ID NO: 826459 - DNA, 120 bp, Artificial Sequence
  ENSG00000232685_8 (sequence is synthesized)
agcatgtagctcagaggaggtatacaataagtaatgtctatcatcgccctactagtcattacctaatgatcatgagcattcacttgttcttctcgccagatggtcctaccctgatgtatt

SEQ ID NO: 826460 - DNA, 120 bp, Artificial Sequence
  ENSG00000232685_9 (sequence is synthesized)
tcttgggttccttctaaatggaagtggaaagtaaggttattcttcatccattcagcttgtgaaaatgtgtgttataatgctgttaaatcaatggcataacattgtctaccctttagaaaa

SEQ ID NO: 826461 - DNA, 120 bp, Artificial Sequence
  ENSG00000232685_10 (sequence is synthesized)
ctcatctggactcactgggagaagtgattcactagaattctcattggaagaaatgacaggaaagctccctccaatatctcaatttccaccccactcagtacctggttttatgattccaca

SEQ ID NO: 826462 - DNA, 120 bp, Artificial Sequence
  ENSG00000232685_11 (sequence is synthesized)
gaggtgggaggggactgggcagggtgggtgacagtaggggaatgggtgacaacaccaaaatctactccagcaggatgaggggatacttgccaggagacagcatgggatgccattgcctag

SEQ ID NO: 826463 - DNA, 120 bp, Artificial Sequence
  ENSG00000232685_12 (sequence is synthesized)
agttggcagaaggaccaggagcaggcaggcagcgagagaacacccagagtgctcctgatcggaccaagctgcatggaggccacaatgggacacctgagggaaaaggtgaccccagatgag

SEQ ID NO: 826464 - DNA, 120 bp, Artificial Sequence
  ENSG00000232685_13 (sequence is synthesized)
tgagaactacctgaccagaccaagcagcacagaggccacggtgagacacctgagggagaaggcgaacccagataaggctcatcgggttccgatcttgtgagaactgcagaaggcgaccac

SEQ ID NO: 826465 - DNA, 120 bp, Artificial Sequence
  ENSG00000232685_14 (sequence is synthesized)
agatgaggctcatcagaactagatcttgtgagaactgcctgagcagaccaagcagcacagaggccacagtgagacacatgagggagaaggtgaacccagatgaggctcatcaggaacaga

SEQ ID NO: 826466 - DNA, 120 bp, Artificial Sequence
  ENSG00000232685_15 (sequence is synthesized)
tcttgtgggaaccagagaggacaaccccggatgaggtccatcagaaccagatcttgtgggaactgcacttcaaagtgctacagacccacaaacactacatgcagcatcacatgaatgccc

SEQ ID NO: 826467 - DNA, 120 bp, Artificial Sequence
  ENSG00000232685_16 (sequence is synthesized)
tctgcaagggtgaggggcctggcaggatggaggaaataccagagaggggggatgcgccctgaaaaaaaggagagccctggggactgcggaaggtggagtgtgcgtctcattaaaggagaa

SEQ ID NO: 826468 - DNA, 120 bp, Artificial Sequence
  ENSG00000232685_17 (sequence is synthesized)
gataccttctcacaccctacctccttttatagactttaggagcaatgtctttggagggggcctcacctacatcacatcagatgcattaaatatattaaaaagcattcacatctcatgaaa

SEQ ID NO: 826469 - DNA, 120 bp, Artificial Sequence
  ENSG00000232684_0 (sequence is synthesized)
ggaggcgatgggtccacctgtgagtggagtacagaacgtgggggaacagcttcccaggagtctggggctcaacctctccaggaggccctgaaggtggcctgagaaagttctgcctctcgg

SEQ ID NO: 826470 - DNA, 120 bp, Artificial Sequence
  ENSG00000232684_1 (sequence is synthesized)
gggggcagcgtggagcacaggagccgcagtgagtcctgcctggctctaagcaccactttccaagcatgcagctttggcagtttcttggcacgctggctgaagacatgttgcccacaagct

SEQ ID NO: 826471 - DNA, 120 bp, Artificial Sequence
  ENSG00000232684_2 (sequence is synthesized)
gagggaggtccttacccgtggacgccaagctccgggaggctgcagtggcggcagctgagtctgcaggtggagaggtgcagggactgttttgcctccacctccttcaatacctacttttct

SEQ ID NO: 826472 - DNA, 120 bp, Artificial Sequence
  ENSG00000232684_3 (sequence is synthesized)
ttccagcaacagtcccttcccttacgctcccgaatccaccctggccctgaggctgcacctgagtaccacatcctgaccccacttgtttgcaagacgtctgcatgtccacaagtgcagcgt

SEQ ID NO: 826473 - DNA, 120 bp, Artificial Sequence
  ENSG00000232684_4 (sequence is synthesized)
tcatctcatctcaacaagcgatccctccggagcagacgggtgatccctaccaccttctgaacactcctactcatcatctcggtaacaccctctacctgttccatacctaggccagaggtt

SEQ ID NO: 826474 - DNA, 120 bp, Artificial Sequence
  ENSG00000232684_5 (sequence is synthesized)
ttcaccccggccacacgtcagtaccacttaggaagttaaaaaaaaaaaaactatgccaatgcaagccaatgacagaaaaaaatcaattacccgattttaaaataggcaaagaacctcaat

SEQ ID NO: 826475 - DNA, 120 bp, Artificial Sequence
  ENSG00000232684_6 (sequence is synthesized)
agacatttgtagcaagaaggtctaataaggagatgaaaagtgctcaaattaaaaccacaatgaggccaggcacagcagctcacagctgtaatcccagcacttagggaggtcaacgtagga

SEQ ID NO: 826476 - DNA, 120 bp, Artificial Sequence
  ENSG00000232684_7 (sequence is synthesized)
acgtaggaggatcacttgagttcaataccagcctgagcaacctaatgagaccctccctctccaaaaaaagttgtctttttttttttttttttttaattagccaggcatggtggtgcacgc

SEQ ID NO: 826477 - DNA, 90 bp, Artificial Sequence
  ENSG00000232684_8 (sequence is synthesized)
ccaggaggtcgaagctgcagtgaggtaagagagcgaggtgctgtctctaaaaaacaacaacaaaaccccacaatgagatactacctacac

SEQ ID NO: 826478 - DNA, 120 bp, Artificial Sequence
  ENSG00000232684_9 (sequence is synthesized)
acctacacggagcaggatggctgctaccaaaacactagacagtgccaagtgccggtgaggacgtggggaaccagagccccagttacccggggaggacgcggggagccggaaccccagtta

SEQ ID NO: 826479 - DNA, 120 bp, Artificial Sequence
  ENSG00000232684_10 (sequence is synthesized)
cccggtgaggacgtggggaaccggaaccccagttacccggggaggacgtggggagccggaaccccagttacccggtgaggacgtggggaaccggagccctgtgcactgttggtgcaagtg

SEQ ID NO: 826480 - DNA, 120 bp, Artificial Sequence
  ENSG00000232684_11 (sequence is synthesized)
tgaaacgacacggctgctatggagacagcacggaggttcctcagagaattaaacataggtatgacccagcacaggatccagcagtgccacctctgggcgcgcatccaaaagacacgaact

SEQ ID NO: 826481 - DNA, 120 bp, Artificial Sequence
  ENSG00000232684_12 (sequence is synthesized)
cagtacgtggaggagacgtcagcacacgatcaccgccgccagcattcacagcggcctacggcagacgcccaagagtccatcacaggtgaacggacaagaaaaacgtggtgtatacacaca

SEQ ID NO: 826482 - DNA, 120 bp, Artificial Sequence
  ENSG00000232684_13 (sequence is synthesized)
acagaacgtgattccgccacaaaacgacacaggatgagtccactgaaatgacgtatctaaagtggtcaaaatcacagacagagaaagcagaacggtggtcaccagggcctgggggagggg

SEQ ID NO: 826483 - DNA, 120 bp, Artificial Sequence
  ENSG00000232684_14 (sequence is synthesized)
aggtggggacacctagtttaacggcccagaggctgagttttgcaagacggagaatttctggagttccgctgcacgacaatgtggaggtgctcaatactgctgaactgtacacttaacatg

SEQ ID NO: 826484 - DNA, 120 bp, Artificial Sequence
  ENSG00000232684_15 (sequence is synthesized)
gctatgatggtcagttccatgcatgctttttttacaattcaaaactttagaaaattatttaaaacataacaataccaagcctgggtcctgcctctcaccgctcctaatctttttgtttta

SEQ ID NO: 826485 - DNA, 120 bp, Artificial Sequence
  ENSG00000232684_16 (sequence is synthesized)
tgcttctcgatgatccttttgtttttttggctttcctcactcattctcatatgattctaatatatagctgtgaggaggaacacctacaaattataaactaaaatttgaaactgtctctga

SEQ ID NO: 826486 - DNA, 120 bp, Artificial Sequence
  ENSG00000232684_17 (sequence is synthesized)
ttaggggatgtatatttattgtgcatccttttattctcttcatactagggtacacagtaagagcttagtactcactaaacattcacattattaccaactgaataaaagaatgaatgatta

SEQ ID NO: 826487 - DNA, 120 bp, Artificial Sequence
  ENSG00000244327_0 (sequence is synthesized)
attccttaaaaattaaaaatagaaatatcatatgatctagcaatcccattatggggtatatatctaaaggaaattaaatcaatatgttgaagagatatctgcactcccatgttcattgca

SEQ ID NO: 826488 - DNA, 120 bp, Artificial Sequence
  ENSG00000244327_1 (sequence is synthesized)
tcattgcagcatcttcacaacagccaagctatggaatcaaactaagtgtccatcaacatgggaatgaataaagaaaatgtggcatatgtatgtatacttatacacacacacacacacaca

SEQ ID NO: 826489 - DNA, 120 bp, Artificial Sequence
  ENSG00000244327_2 (sequence is synthesized)
cacacacacacaatggaatactattcaggctagtcttgaactcctaggctcaagccattctcctgctcagccttcccaagtgttagtgtaacaaacatgagccactgtacccagtctatg

SEQ ID NO: 826490 - DNA, 120 bp, Artificial Sequence
  ENSG00000244327_3 (sequence is synthesized)
tcattaggtacacttaattttgaaggagtttgttttttcaaaaatcaaactacttttaattgataaagcttgaaaaacagagtctcaggctccgcagaaagatcctgaaaagatgtttca

SEQ ID NO: 826491 - DNA, 120 bp, Artificial Sequence
  ENSG00000244327_4 (sequence is synthesized)
aaaatcttttaaacattttgactgctttgaaggggggtgtctaaatttgaatatgtaagtacttgtattggcgatgaagtaatctttttatgtcatagctatttttaatgggtgaaaatg

SEQ ID NO: 826492 - DNA, 120 bp, Artificial Sequence; identical to SEQ ID NO: 603515
  ENSG00000244327_5 (sequence is synthesized)

SEQ ID NO: 826493 - DNA, 120 bp, Artificial Sequence
  ENSG00000261235_0 (sequence is synthesized)
ccgtgggcgtaggaccctccgagccagaatgccatgagccatgtcttgtgatgggcaccccatgaccatgtgtgaaaatgctgactcacctcccatgctgctgacattcaccagcctccc

SEQ ID NO: 826494 - DNA, 120 bp, Artificial Sequence
  ENSG00000261235_1 (sequence is synthesized)
cattcaccagcctccctttggattttctaagaagaggcaaaaacgtctttgtgacctccacagttccaaagaagttcacggccatgcattgtttgtagtcagtcataagaagaagctccc

SEQ ID NO: 826495 - DNA, 120 bp, Artificial Sequence
  ENSG00000261235_2 (sequence is synthesized)
catcagttggaaagccaagcaccccagcattgttgatcacagcccacagtcctggagacagaaaaccataatgagtgagtgtctggaagaggaagtgaataacacaacctgcaatacctg

SEQ ID NO: 826496 - DNA, 120 bp, Artificial Sequence
  ENSG00000261235_3 (sequence is synthesized)
tctactgactgtcagctgaacatcttggttaagactcagactgcctgattcttctcttccacttacaagccttgggaaagtcacatataaccatgtggaacctccacttcctcacatgga

SEQ ID NO: 826497 - DNA, 120 bp, Artificial Sequence
  ENSG00000261235_4 (sequence is synthesized)
agcaggagaaccaaatgacaactcggaggaaatgatcaggactgagaaggagaggagaaaatccaagaggccagaccctcacgtggaccctattgtctcttccttccaacctcccagcct

SEQ ID NO: 826498 - DNA, 120 bp, Artificial Sequence
  ENSG00000261235_5 (sequence is synthesized)
ataaacacctgtgctaagcccagctgcccagcccaggccccatctgtgggtgaggcctgagacttttcgaccttgccttggctgagcaccgttattaccacatgcctaagacccgtgctc

SEQ ID NO: 826499 - DNA, 120 bp, Artificial Sequence
  ENSG00000261238_0 (sequence is synthesized)
tttctcctcgaaggccgagactttttttttttaaatgtagaaaaccagtacaaatttacaaaacacactatataatgctctcttatctctagtttgcttttttgtgtacaaactgttaac

SEQ ID NO: 826500 - DNA, 120 bp, Artificial Sequence
  ENSG00000261238_1 (sequence is synthesized)
ctgaacagttttccggtgcaaaaggtctcaccagaaactttaggaaagatgagtgtgactgcgggaagcagaagaaactaagctgagaaaacccggaaaaatactcggcgcagctgctgc

SEQ ID NO: 826501 - DNA, 120 bp, Artificial Sequence
  ENSG00000261238_2 (sequence is synthesized)
ggtcatctcacctccatctaccccgcgtgctcgctttcgcttggggtggaaagcggggttcaggggctcttttcagcggactgagaaatcgcagaggccgtggggaccccaagtcaggat

SEQ ID NO: 826502 - DNA, 120 bp, Artificial Sequence
  ENSG00000261238_3 (sequence is synthesized)
tcccctttcccgacatcaggggtaaagggagcgggggtcccttcgcttcactgtgccccagctctaccgagaggcaggcctctgggaaacgagccggggacctgggggcccgggcggccg

SEQ ID NO: 826503 - DNA, 120 bp, Artificial Sequence
  ENSG00000264608_0 (sequence is synthesized)
tccgtctcaaaaaaaagaaatctgatagacttcacttgtaatggatatttaattctatatttcatgttatcttttgtaagaatttaagattagtcaacaccaatcctatactcctctaga

SEQ ID NO: 826504 - DNA, 120 bp, Artificial Sequence
  ENSG00000264608_1 (sequence is synthesized)
aaagtatctttgtagctctactcattatttcttatctctaacctaagttactttattacatattaatctgttcatttgttcacttgctcattgatgtaataaattagtaatctcaattta

SEQ ID NO: 826505 - DNA, 120 bp, Artificial Sequence
  ENSG00000275580_0 (sequence is synthesized)
atgagatttgtttccattgtgttcctgagggcaactcattttactccaggagagaaatgtaatagtgatgtaggttgtattcaaacagtaactaactgaatggccaatttatccactgga

SEQ ID NO: 826506 - DNA, 120 bp, Artificial Sequence
  ENSG00000275580_1 (sequence is synthesized)
atttcctgctttcaacttattgttctggcaacctgtagtctgaaagacagcattgtcttcaggcatcacatgatatccatgagatctgatcatactacacaaattaccctgcattcagga

SEQ ID NO: 826507 - DNA, 120 bp, Artificial Sequence
  ENSG00000275580_2 (sequence is synthesized)
tttgctgatatgaattaattctgcatggtattatttaaaaataaaacatccttaggctgaatccaggttactttcaaattttggctttgagatttcattctgcatagtaatattttttat

SEQ ID NO: 826508 - DNA, 120 bp, Artificial Sequence
  ENSG00000275580_3 (sequence is synthesized)
catttaataaacattcaacattaacacattagtcctcaaatctaaaaggaaagtagtggaagcctcattttaaataattgaagcagcgaaaactaaaccttatgaaatctcatattgatg

SEQ ID NO: 826509 - DNA, 120 bp, Artificial Sequence
  ENSG00000275580_4 (sequence is synthesized)
aatgtttcagcatgacttaaaaatatgattgtacaaagaatattatagaagcattaatgtaatcaaaagaaagaaaattatcataatcccattctccaaaaaataaaaattattttcatt

SEQ ID NO: 826510 - DNA, 90 bp, Artificial Sequence
  ENSG00000275582_0 (sequence is synthesized)
ctttgtttcaggtagtacagtcatgaaattgagtaagtctcttaaaaaaatgaaagtccacagatcccattgtggaaggtgcggtggcac

SEQ ID NO: 826511 - DNA, 74 bp, Artificial Sequence
  ENSG00000275582_1 (sequence is synthesized)
aagaccccatctcaaaaaacaaaaaaaagaaaggcatattgaccatctttggttttggtgtgtataaataaaat

SEQ ID NO: 826512 - DNA, 120 bp, Artificial Sequence
  ENSG00000275582_2 (sequence is synthesized)
ggcggccagcagctacaggacaaggcacagctgaaatacagaggcaaggctgtttgtcttaatagttcactatacagtttgttttaggcagctttctgtaccttttattttataataaaa

SEQ ID NO: 826513 - DNA, 120 bp, Artificial Sequence
  ENSG00000275582_3 (sequence is synthesized)
atatagaagatacagttaaccattatatatatatatggggggggtccactgaagactaggatgctactatcaagacagaaacaggtggttataaactacaacgtgctaagatgagaataa

SEQ ID NO: 826514 - DNA, 120 bp, Artificial Sequence
  ENSG00000275582_4 (sequence is synthesized)
aggatcaaagaggaaacgcttgagagaatctatacgaagctttcacaacaaaagttaaagtgacttcaatgtgagggcaagaaaatatttcaaggctcagagaggctaaaataatcaaag

SEQ ID NO: 826515 - DNA, 77 bp, Artificial Sequence
  ENSG00000224194_0 (sequence is synthesized)
gcccatgagaagttcacacttaaacccccagctgtttcctgtggggccccagatcatttgaccctaagaacaacaga

SEQ ID NO: 826516 - DNA, 120 bp, Artificial Sequence
  ENSG00000224194_1 (sequence is synthesized)
tctcaactcacccacgtcagacttgagtgaaatgaactctgagcatgtctgcttctcccagcaaacttcagctaatccaaggacagtcattaacttgttattctaagtaatcctctgttg

SEQ ID NO: 826517 - DNA, 120 bp, Artificial Sequence
  ENSG00000224194_2 (sequence is synthesized)
aaagctgtgagccgcctggggtggacgagggcagggttttcaagcacaaaaatattggacctgcggctcccatgaggacagacagcctccccagaggaggggagggattcgacagcctca

SEQ ID NO: 826518 - DNA, 120 bp, Artificial Sequence
  ENSG00000224195_0 (sequence is synthesized)
ccaggcccagatgagggtcagcatggggaccactaccgtgaaaaggcaagacaaagatggtccagatcagcacagaaacagaaccgccaaaggcggcacgggagccctgaccagggcctg

SEQ ID NO: 826519 - DNA, 120 bp, Artificial Sequence
  ENSG00000224195_1 (sequence is synthesized)
taaagcccctgtcaaacaggacagaatgtggtaacagaacagaggacaatgagcacacagatgagttccagcgactttagcacgctaaacacatggccaagtcggcctgagaaggtgggg

SEQ ID NO: 826520 - DNA, 120 bp, Artificial Sequence
  ENSG00000224195_2 (sequence is synthesized)
aaagtgggtgaagctaatgcttaaatacaaaactgcctcccatttgctaagcactaactaagtgctttacttatagtatcttacttaatcctcacaatgattaaatgaggtaggcaccac

SEQ ID NO: 826521 - DNA, 120 bp, Artificial Sequence
  ENSG00000224190_0 (sequence is synthesized)
agttgttgaacagcagaagatgctccaacctaaatactgagagtcttaaaagccaggcggaaggctggagggtgctggggaagttcaggctgtccccagaagtcaacttatacgaccttc

SEQ ID NO: 826522 - DNA, 120 bp, Artificial Sequence
  ENSG00000224190_1 (sequence is synthesized)
atgctggactacacatgtcatctcccggagcagcaggcggtggctgggacggcagcacagagaaagcccggcacaggctccgctcagagcctcaggatgtggggaggcttctacagatga

SEQ ID NO: 826523 - DNA, 120 bp, Artificial Sequence
  ENSG00000224190_2 (sequence is synthesized)
tcatccccacctggaggtgtttctgggctggaacagagacacaccccaagacatgccaagttcctgtctaaggaacaatctccagttccttggcagattgctaataaatatttccagtag

SEQ ID NO: 826524 - DNA, 120 bp, Artificial Sequence
  ENSG00000224190_3 (sequence is synthesized)
gaaggagaccttatctggaaccaagaggcatgtctgtaagaaactcttatgaagttgtcggggttcaagttggccttcctgttgttcaacctggtggagaatgttcctgtgggccttggc

SEQ ID NO: 826525 - DNA, 120 bp, Artificial Sequence
  ENSG00000224190_4 (sequence is synthesized)
agcaagtcagcattcttcgttggcatggagtcctaggaaaaagaggctctccaccctgaagccagtcgcatatcaccccaataaacagttacaacgcctctgccaacacaggatcccaaa

SEQ ID NO: 826526 - DNA, 120 bp, Artificial Sequence
  ENSG00000224190_5 (sequence is synthesized)
gagagtcttaaaagccaggcggaaggctggagggtgctggggaagttcaggctgtccccagaaggtgactgtgaggataaaacaaattaggaaggaggaggacagaaccctcgttctgct

SEQ ID NO: 826527 - DNA, 120 bp, Artificial Sequence
  ENSG00000224190_6 (sequence is synthesized)
aaaagaggtacggggcaccttgaacacaccgggcaagcaaagaagaatgcacgcgtctcctctctccaggaagggctcctttcagagacacgctttgtagctcagctgtttgggggccgt

SEQ ID NO: 826528 - DNA, 120 bp, Artificial Sequence
  ENSG00000224190_7 (sequence is synthesized)
ggcaggcacctgggccctggtcacacagtggctgtggagcctgtccctgtcccttgggagcagcctgtgcctccagctcttcagccttccgctgctcccacttgctggctgtggctgtgg

SEQ ID NO: 826529 - DNA, 120 bp, Artificial Sequence
  ENSG00000224190_8 (sequence is synthesized)
ttttgtcccagggctgctgctgccagccagcaggtctctgatgtcaccagccgcaggtctaggggtcaccctaaaaacatgcgcctcactgacccccttacagctcctctcctgagaagg

SEQ ID NO: 826530 - DNA, 120 bp, Artificial Sequence
  ENSG00000224190_9 (sequence is synthesized)
tttctgggtgcatttatccatatggggagcctccccggcaggccacaggggagcaaggagagattccttcctggttacccacccaaccatgcttcatgctccagaccaagtaggttttct

SEQ ID NO: 826531 - DNA, 120 bp, Artificial Sequence
  ENSG00000224190_10 (sequence is synthesized)
gggtcctagtaaagtcttccaattcccccaagctgtgaaagcccagaggcggctgtcatcttctgtgctgtggctgtttccaaagccagggccgctgtgggacgctctcccctggtttgc

SEQ ID NO: 826532 - DNA, 120 bp, Artificial Sequence
  ENSG00000224190_11 (sequence is synthesized)
ttttcatcggaagcggctgcagctcttctgggctttaccgccgccggggccctcctattttcttcaccatattgaaaaggcatttcctaaattcataatgttttagacacattgtggtct

SEQ ID NO: 826533 - DNA, 120 bp, Artificial Sequence
  ENSG00000224190_12 (sequence is synthesized)
cgggattgaattgtgaagtctgcatggacgggggtctggcctgcccttcaactctgcccccatttccttaaggaattggtgaatgcagatactctacttttatattttgacagctgcctg

SEQ ID NO: 826534 - DNA, 120 bp, Artificial Sequence
  ENSG00000224190_13 (sequence is synthesized)
tgttttctcatttgattctcataaccctgggaagtaagtaaggccagaatttttattcccatttctcagataaggaaatggaggttagagaaacatgaatgaggcacatttgccatgcaa

SEQ ID NO: 826535 - DNA, 120 bp, Artificial Sequence
  ENSG00000224190_14 (sequence is synthesized)
cttagcacctggaacctgacctcaggattctgagttctagcacagcctttctccactctccaggctctccaccctgaagccagtcgcatatcaccccaataaacagttacaacgcctctg

SEQ ID NO: 826536 - DNA, 120 bp, Artificial Sequence
  ENSG00000224190_15 (sequence is synthesized)
gagactttccagaaaagggcacagatggacagagcatcctatggttctggaaccagatgtataatcttaagtctgttttttccccctttcagaattagcattcctttatctcattcctaa

SEQ ID NO: 826537 - DNA, 120 bp, Artificial Sequence
  ENSG00000224192_0 (sequence is synthesized)
attctaagctaatttagttggtgtaatgtggtccctcaagggtagttgcaggtgcattcacttgacctctacgaaggatgaacatttcccatgagttttccacttgtgtttcatccttgc

SEQ ID NO: 826538 - DNA, 120 bp, Artificial Sequence
  ENSG00000224192_1 (sequence is synthesized)
ctttgcttcagtttcctgtgagacaaattggagtttgacatccctcctcaagatgcctcctccaagaccagagttccctgtggctgagctgtgtgtgcagagagcacctttctctctcct

SEQ ID NO: 826539 - DNA, 120 bp, Artificial Sequence
  ENSG00000224192_2 (sequence is synthesized)
tccccagtggctaggacttaacaccaaagggtgctcaggaaacaaatggaagcagggcactaaccaactccaggaggactgggagcatgtttcccgctgaatccctgccatcttgaccac

SEQ ID NO: 826540 - DNA, 120 bp, Artificial Sequence
  ENSG00000224192_3 (sequence is synthesized)
tgcctggcaagagaagacactctaccaacatttttttagtgctgcatcccttggagggcatgaggcaaggccacgtgagacacagtcggtgctagattcctggaggcagagctgagggta

SEQ ID NO: 826541 - DNA, 80 bp, Artificial Sequence
  ENSG00000248839_0 (sequence is synthesized)
ggttcgtccaagccggacgcctgcagcagccacctcctgggcctcacggcggggccggagaaggccagggctggggcggg

SEQ ID NO: 826542 - DNA, 120 bp, Artificial Sequence
  ENSG00000248839_1 (sequence is synthesized)
cctgggacaaatccgccgctcggaacccgcccagcccgaccacgcccgggaagggggcccctcttcaaaccgccgggaacatggaaccgcgacgcgacccctgcccggcgacgcagattc

SEQ ID NO: 826543 - DNA, 120 bp, Artificial Sequence
  ENSG00000248839_2 (sequence is synthesized)
agcatcctttcattgggctgtgaacagaaagtccttgatttcctcaattttcggaggcatggcgacaaggcacgcagggagcaggcgcggaccgggacagcgtgcggcgaccgggaaaaa

SEQ ID NO: 826544 - DNA, 78 bp, Artificial Sequence
  ENSG00000248837_0 (sequence is synthesized)
ccatccacgttagatgcccagacatgtggaactctgatataagtcttttgaggtacagcctggcacaaaaaggatgag

SEQ ID NO: 826545 - DNA, 120 bp, Artificial Sequence
  ENSG00000248837_1 (sequence is synthesized)
ataagtcttttgaggtacagcctggcacaaaaaggatgagatttgtgggcagaattttggaagaatatctcccgagagaacattcaggacagagccctacatctccccgagaagaggtga

SEQ ID NO: 826546 - DNA, 120 bp, Artificial Sequence
  ENSG00000248837_2 (sequence is synthesized)
tcttctttcagggatgaactgctgtcctcatcagacgccttattttgtttagaattcaagctcacttgacaggttattgtgaagattaaatgaattaatacatgtgaagcaactgtaaca

SEQ ID NO: 826547 - DNA, 120 bp, Artificial Sequence
  ENSG00000248837_3 (sequence is synthesized)
actcttgacatgcgtgggctggacttccagaagaaacgttgtcagaactctgcccaactgaaaacaagcctactaaaaataaataaataaataaaattttaaaaaattgattaattaaaa

SEQ ID NO: 826548 - DNA, 120 bp, Artificial Sequence
  ENSG00000248837_4 (sequence is synthesized)
ttgtgaggcttccccagccatgtggaaacatattcgcagagcacccactaggtgccagtaaatgtatgagaagtcctgtggaataagactgaagttgtccttgccttcaagcaacttgca

SEQ ID NO: 826549 - DNA, 120 bp, Artificial Sequence
  ENSG00000248837_5 (sequence is synthesized)
tgcaattgcctaagaacacagtttaaaaccacaaaactaagccttggaaatcacatgctgtcatttctgcgatcggtcataaccagtcctgattccatgttagaggagactacataagga

SEQ ID NO: 826550 - DNA, 120 bp, Artificial Sequence
  ENSG00000248837_6 (sequence is synthesized)
cacaggtaccagaagatgaaaaatttggagtctagtgaaaagaagtgacttgctcaaaatcacacagcacatgaagaacagagcctctatgatgaatttcttgacagatcaagaactact

SEQ ID NO: 826551 - DNA, 120 bp, Artificial Sequence
  ENSG00000248837_7 (sequence is synthesized)
ttggactttatgtcttattactcaaggaagacatttcctaagctacagaggccatagatagtgattcctctgatggatcttggcaaagtaagtggaaaactttctggaaagaattcacaa

SEQ ID NO: 826552 - DNA, 120 bp, Artificial Sequence
  ENSG00000248837_8 (sequence is synthesized)
aagacttcagtggaggaagtaactgcagacatggtggaaatagtgagagaactagaattagaagtgaagcctgaatatgtaactgaattgctgcaatcttacgatgaaattttaagagat

SEQ ID NO: 826553 - DNA, 120 bp, Artificial Sequence
  ENSG00000248837_9 (sequence is synthesized)
aactgaattgctgcaatcttacgatgaaattttaagagataacgagttgtttcttatgaatgagcaaagaaaatggttttttgagatggaatctactgctggtgaagatgctctaaacat

SEQ ID NO: 826554 - DNA, 120 bp, Artificial Sequence
  ENSG00000248837_10 (sequence is synthesized)
tagaatattacataaacttagttgataacatggtggcagggattgagaagattgactccaatttagggagagaattactactgcaggtaaaatgctgtcggacagcgttgcatgctacag

SEQ ID NO: 826555 - DNA, 120 bp, Artificial Sequence
  ENSG00000248837_11 (sequence is synthesized)
gcgttgcatgctacagagaaatctttcatcagaggaaaaatcaattgatggagaaaacattattgtcatcttattttaagaaattaccacagccaccccaaccttcagcaaccatctctg

SEQ ID NO: 826556 - DNA, 74 bp, Artificial Sequence
  ENSG00000248837_12 (sequence is synthesized)
tcagcaaccatctctgattgattacaacttgctaaatgctcagattattattagcatattttagcaataaaata

SEQ ID NO: 826557 - DNA, 120 bp, Artificial Sequence
  ENSG00000248837_13 (sequence is synthesized)
ctttcagtcatggcagaaagcaaaggggaaataggagactaaccagcatgggctacatcaaaaaggctgccatctactttctgctgggtaggggcaccagagagacttgtcagaaactag

SEQ ID NO: 826558 - DNA, 120 bp, Artificial Sequence
  ENSG00000248837_14 (sequence is synthesized)
aaggaaggtagagtgcgaaatctgagtgttaattccctggcttcatcaaaggacactggtcttcacaaggaaacagactacatgattctccttttgggcttcagtaaaaaccccctcctt

SEQ ID NO: 826559 - DNA, 120 bp, Artificial Sequence
  ENSG00000248837_15 (sequence is synthesized)
tcatcccttagtctagggatggtaagaggtcagcagctaagaattctaggttctttgtggttttcccgtatacatgtctttgatgatagcccctttggaaataaattctcctagactttt

SEQ ID NO: 826560 - DNA, 120 bp, Artificial Sequence
  ENSG00000248837_16 (sequence is synthesized)
agccatgtggaaacgtgagtccgttaaacctcctttcttttatacattacccagtctcggatatttcttcatagcagtatgaaaagggactaatacagcatctctaagcaatattcgcag

SEQ ID NO: 826561 - DNA, 120 bp, Artificial Sequence
  ENSG00000248837_17 (sequence is synthesized)
tgaaatccggccattgaattacactgcactataaacttcatttgttcttgggtgcatagtgatttgctataataatgatcatccatttgccagacagctgagattttttaaaagcttgat

SEQ ID NO: 826562 - DNA, 120 bp, Artificial Sequence
  ENSG00000248837_18 (sequence is synthesized)
tctgtgtgttagactttggcattttttctagcaattctacaacagcatacacacttttatttttcattaacaccattgtgaatatgcccatctctaaaatttcaagggggttcacttaag

SEQ ID NO: 826563 - DNA, 120 bp, Artificial Sequence
  ENSG00000248837_19 (sequence is synthesized)
ctactgagttttatggacagaagggccaagaaaagtccccaaagaagagtgcatgctgtcaattgccaattatttttttttctaatgaaagccaaacaattccagacaaacccttttcta

SEQ ID NO: 826564 - DNA, 120 bp, Artificial Sequence
  ENSG00000248837_20 (sequence is synthesized)
agaaatgaactacatatctggatccaaataaatactcatctgataagaatctaaaagctctactgaattacagtggatgagaacatgatgatggtgattctttgaagattactgaggaaa

SEQ ID NO: 826565 - DNA, 120 bp, Artificial Sequence
  ENSG00000248837_21 (sequence is synthesized)
tttttctcctggaaccctgagtcctcaaatcaaccctatctgaaatgtgccattattgctacattttataatagaggaagacagatggcttatataatttgatgaagatcacatgttttg

SEQ ID NO: 826566 - DNA, 120 bp, Artificial Sequence
  ENSG00000248837_22 (sequence is synthesized)
taagaagagctgggattggaactgtagcagtctagcttttcagatcatgctcttaatcaccacaataagtatcaataagtgtcaataatcactataataagtggcattgtagcataatga

SEQ ID NO: 826567 - DNA, 120 bp, Artificial Sequence
  ENSG00000248837_23 (sequence is synthesized)
cactctacttagagcaatagcttagttcaagtcatcttttcctatgaaactttccatttatttgactattactgtttcatagaacctacccctcaagtttattgagggtcatacttaaat

SEQ ID NO: 826568 - DNA, 120 bp, Artificial Sequence
  ENSG00000248837_24 (sequence is synthesized)
tttctatgcttatgctcttttttaatactcacagaaagagtgtacctatctagggggcagagactacaggttcagttttttaacccacggcaagtagtcctatcctgagaacatggtaca

SEQ ID NO: 826569 - DNA, 120 bp, Artificial Sequence
  ENSG00000248837_25 (sequence is synthesized)
cagtttaaaaccacaaaactaagccttggaaatcacatgctgtcatttctgcgatcggtcataaccagtcctgattccatgttagaggagactacataaggacacaggtaccagaaggag

SEQ ID NO: 826570 - DNA, 120 bp, Artificial Sequence
  ENSG00000248837_26 (sequence is synthesized)
ctgccatagagtggaaaatcttgggtctggcagcaactccaactattctttcttcttagctgtgtgaccttggatgagtcacttaacttctgtgtatcaacattatctccatgagagtag

SEQ ID NO: 826571 - DNA, 120 bp, Artificial Sequence
  ENSG00000248837_27 (sequence is synthesized)
ttaccatgtttgtgccccatgtatcttgtgtgaaccttggaatctattagacatttgaaaaatatgtgttaaatagataaatgaatgtgtatttcaaaaataaactttacttttagaaga

SEQ ID NO: 826572 - DNA, 120 bp, Artificial Sequence
  ENSG00000248837_28 (sequence is synthesized)
atgaaattcataggcatggattctctcacacagcaactttatacacaaagatgagaatagaagaaaggtcatttccaaagaaagtgacatttattctgtattcactgaaaagccaaaaga

SEQ ID NO: 826573 - DNA, 120 bp, Artificial Sequence
  ENSG00000248837_29 (sequence is synthesized)
aacaacaaaggagacttagctgaaacttttggcctcatatcagagagttcatgtttgtctttagacaaacagataaacaaacggaatctgggagaggaagcattaatttgacttgcaagc

SEQ ID NO: 826574 - DNA, 120 bp, Artificial Sequence
  ENSG00000248837_30 (sequence is synthesized)
aaatcattttatactaaataaatgaagattttgtatgctatccagtttctttgagatgtatgtgccttataaagatgttcctaaaagattcaaagccatgaaaagcatccgtgcacttta

SEQ ID NO: 826575 - DNA, 120 bp, Artificial Sequence
  ENSG00000248837_31 (sequence is synthesized)
ttaaggtgtacctctggttaatttatgatggagtcagcaaagaagtagtccagtagggctttctacctgtgaaaagaacatggtttgaagccaccaagcaaatctaaactgtcatctttg

SEQ ID NO: 826576 - DNA, 120 bp, Artificial Sequence
  ENSG00000248837_32 (sequence is synthesized)
tacttactagccacgtggctttgggcaagatgtagcctgtcagaactccaatttcctcatctgcaaaatgtggtagattccaattacatgtatgaaagtgaaataaagcattgcctataa

SEQ ID NO: 826577 - DNA, 120 bp, Artificial Sequence
  ENSG00000248837_33 (sequence is synthesized)
gtctccatagactcttcttggttgtgatggtttctcacgcttttcttggttttgaagacgttgacaattttcttccattgggatttgcttgatgcttttctcatgattacactggaactg

SEQ ID NO: 826578 - DNA, 120 bp, Artificial Sequence
  ENSG00000248837_34 (sequence is synthesized)
tgactttttagaaggaagatcatagaggtaaagtgtcatttttattgcatataaagcttattattaacataacttcttaccaccgttgaagattttcaggttcccttactgtaattcttt

SEQ ID NO: 826579 - DNA, 120 bp, Artificial Sequence
  ENSG00000248837_35 (sequence is synthesized)
tcactgcgtacagtctacacttaaggagtggaagtcatgttccatctcctttaaagtggaatctctacataattcacttgttattcttcttcattggagacgtgtctctttttcctcatt

SEQ ID NO: 826580 - DNA, 120 bp, Artificial Sequence
  ENSG00000248837_36 (sequence is synthesized)
aatttatttaataatttatttataatatgaatacattgttatttattttatacttttgcatataatccaataccattttaatttgttgctcaaattgtttcagatttggccattggcaac

SEQ ID NO: 826581 - DNA, 120 bp, Artificial Sequence
  ENSG00000248837_37 (sequence is synthesized)
caactctttcaaatggctactgtgcacatatgacatatcaccatccagtttttaaaaccttttttactttctaccattaacatgatgctccaagcttatcttgtacatttcctgctgcag

SEQ ID NO: 826582 - DNA, 120 bp, Artificial Sequence
  ENSG00000248837_38 (sequence is synthesized)
tccaagaatcagctgtttatcaaaaacctctggtttattttattggagaacagtattagaaagtaatatctaggtgctagatgtggtcattgctgctgaggtgtaatttctattttgctc

SEQ ID NO: 826583 - DNA, 120 bp, Artificial Sequence
  ENSG00000248837_39 (sequence is synthesized)
cttttagctgacagagcaaggaaactgtcaaactaattctaaaatggttgcactattttacattcctatcgccaatgactaagagtttctgttgtgctgcatcctcaaatatcagcattt

SEQ ID NO: 826584 - DNA, 120 bp, Artificial Sequence
  ENSG00000248837_40 (sequence is synthesized)
gatgtcagatgtttggattttagccattttaataggtttgtgctatctcattgttgtactaatttgcaattttaaaatacaaaaggttttaaacatttttttaatatccttatctgtaca

SEQ ID NO: 826585 - DNA, 120 bp, Artificial Sequence
  ENSG00000248837_41 (sequence is synthesized)
tctcctttggtgaagtgtctgttcagatattttgcctgtttttaaattgggttgtttgttttattattgtggaaaattcaccgttctttgtatattttgaaaataaggcccctatcaaat

SEQ ID NO: 826586 - DNA, 120 bp, Artificial Sequence
  ENSG00000248837_42 (sequence is synthesized)
atgcattttaccataattttatcccagtctatggcttgtcttttcattctctttacattgatatttacagagaagaatgtttaaatttttaataataaagttcaacttatcaattttttc

SEQ ID NO: 826587 - DNA, 120 bp, Artificial Sequence
  ENSG00000248837_43 (sequence is synthesized)
atgtgctaggcttgctttaaaatgatacatacaaataagataaagcaaagagacttggctttaacattcagtaaaacaataatgtgtttcttaataataaacatttgcacgtaaatgcgt

SEQ ID NO: 826588 - DNA, 120 bp, Artificial Sequence
  ENSG00000248837_44 (sequence is synthesized)
cccattttaagaaaaagatactttacctatgctgtttgtaagttatgtttccttataaattctattttcttagcaactctctctagtttcagagatgtctttctacttcccctttgtttc

SEQ ID NO: 826589 - DNA, 70 bp, Artificial Sequence
  ENSG00000248837_45 (sequence is synthesized)
actttttaaattatttatttatttatttatgattttggctcaccgcaacctctacctcccgggttcaagc

SEQ ID NO: 826590 - DNA, 120 bp, Artificial Sequence
  ENSG00000248837_46 (sequence is synthesized)
ttattgaatacctactagttgcttatcattttataaagtataggacatagagcctgccgtcagtgaacttctaatcatgtgggaaatgcagacaataaacaaatgatgcaaaatttatat

SEQ ID NO: 826591 - DNA, 120 bp, Artificial Sequence
  ENSG00000248837_47 (sequence is synthesized)
ttaacttataaatataaaaaaagtatgttttagtgtatataatgtgtcagtttttgagtgttaaatttgacagtgaatgaaattgacatagcatacttatagacatctgattgaaccttt

SEQ ID NO: 826592 - DNA, 120 bp, Artificial Sequence
  ENSG00000248837_48 (sequence is synthesized)
caattgcctaagaacacagtttaaaaccacaaaactaagaaaaagagagagcgagcgagagaaagaatagctacatgtgattatctgaagctgaaagccaagcacaagttagatagcagc

SEQ ID NO: 826593 - DNA, 120 bp, Artificial Sequence
  ENSG00000248837_49 (sequence is synthesized)
aagtgagatttcaacactcccatgacttcgaagatgagcagtgggaatcgcttttatttggtgaggtagaacactttttcaaaaacgtgacaggaaatgtataataaaaagtattcagct

SEQ ID NO: 826594 - DNA, 120 bp, Artificial Sequence
  ENSG00000287519_0 (sequence is synthesized)
gtgatcctggcatgcagttctctgctgatctgactgactaggatatttataggaatcacaaatgcagatgactacaggggccaggtgagaagaaacatcagaagcacttgaaggaccaga

SEQ ID NO: 826595 - DNA, 120 bp, Artificial Sequence
  ENSG00000287519_1 (sequence is synthesized)
aggtgggtgttctagggatggggaggcaatctgcaaaatggctttttagaaaatttcctccagagttatctgtctcattaacaatggttttttgtcttagaattttctctttcattttat

SEQ ID NO: 826596 - DNA, 120 bp, Artificial Sequence
  ENSG00000287519_2 (sequence is synthesized)
aaactgacatgatttgttcaattatgaatgtacactgatctagtccttcaataatccatcacacgttttacccatgtcttctataggcaccttttctttggtgttaatgacatcatcttc

SEQ ID NO: 826597 - DNA, 120 bp, Artificial Sequence
  ENSG00000287519_3 (sequence is synthesized)
atcgtcactattattgtgatcatcttgatccagaacaatttcagctatttcaccattggtcaatgaatgaacaactggaggctcattatcaatgttaaaagcttctttgatatctacttc

SEQ ID NO: 826598 - DNA, 120 bp, Artificial Sequence
  ENSG00000287519_4 (sequence is synthesized)
ttccagcttactgatgcatatatattattattttgcatatataaggtcagacattcatgttttcctcacttgacatatgaaatccttcaaagtcactacttagttcatcatcatcatcac

SEQ ID NO: 826599 - DNA, 120 bp, Artificial Sequence
  ENSG00000287519_5 (sequence is synthesized)
tgcacatagtcacaggttagaggttgcaggcatgcaaaactgtatctttagtcattgtcttccaagcattggcaacagcatgtatggcatctttcatgctaaactctttttgcaaacctt

SEQ ID NO: 826600 - DNA, 120 bp, Artificial Sequence
  ENSG00000287519_6 (sequence is synthesized)
ccacacccacacctcttgtcactgctgctagcatgctgttcaggaaagtgtttttatatttactcttcattgatctaaggataccctggccacatggttgaattaataaagtcacatttt

SEQ ID NO: 826601 - DNA, 120 bp, Artificial Sequence
  ENSG00000287519_7 (sequence is synthesized)
ggggaaagtagatggcataaacatttttgatgagaatttcagcaggagggtgaatagaacagttgtcacgtgtaacaaaatcttgcagtcatcctccagtttagcttccctgcagtgagc

SEQ ID NO: 826602 - DNA, 120 bp, Artificial Sequence
  ENSG00000287519_8 (sequence is synthesized)
atgaacttctggtacaaaacattggagcaccaatcagaaaatatgtccctggtgatctgtgcacttttgttagcataataatagtctggtaagaaatccactcccttaaaatagtgaaga

SEQ ID NO: 826603 - DNA, 120 bp, Artificial Sequence
  ENSG00000287519_9 (sequence is synthesized)
cataagcttttgcctgtcacagcaagtttacaatgtgtttgtgtgctgcattagcatatcccagtacagttattctgtccttggcatccttaattcctataggggctttctcatcagctg

SEQ ID NO: 826604 - DNA, 120 bp, Artificial Sequence
  ENSG00000287519_10 (sequence is synthesized)
tagtcagtgtcttcctggggcagtaacacaaaacagtgatgttttataagcattatagacttgttctggtgtcagattttcatcagtgataacttgggcacgctcatcaatcattgctgc

SEQ ID NO: 826605 - DNA, 120 bp, Artificial Sequence
  ENSG00000287519_11 (sequence is synthesized)
tttatgatcagcagatgctttatcacctcaaattgtaaaaaaaataatgttgtgtcttaaatgtatgcagccagatatattgaatattcacagttcccttcaatttccagttcatcataa

SEQ ID NO: 826606 - DNA, 120 bp, Artificial Sequence
  ENSG00000287519_12 (sequence is synthesized)
ggcaagtgttcactgcatcgctgaccgatccaatttttcaatacatgatcaagaccattatttttagttttatgcagtgtttttctgtttttactaatttttattcattatttttagcat

SEQ ID NO: 826607 - DNA, 120 bp, Artificial Sequence
  ENSG00000287519_13 (sequence is synthesized)
agaactccaactgtttatccttctattgtttcaggtcatatatggtggtcattctgacaccatactcttctattaagatgtttcacattcgcaccactgtccagtttctccaacagcttg

SEQ ID NO: 826608 - DNA, 120 bp, Artificial Sequence
  ENSG00000287519_14 (sequence is synthesized)
actttctgtgctatcctataaacataaatgcttcctcttttgttggtatctgcaggccttttgaacattttttcagcaacatctttacaccacagggtagaaaataaacaagaaaacaca

SEQ ID NO: 826609 - DNA, 120 bp, Artificial Sequence
  ENSG00000287519_15 (sequence is synthesized)
aggagcaatgcatgtaggtctttactacatgtagggcattttggggaaccggctgttggcacatccagtctgcacatgtgctattttattacgttttatgggtgtgctttcatggaggaa

SEQ ID NO: 826610 - DNA, 120 bp, Artificial Sequence
  ENSG00000287519_16 (sequence is synthesized)
tttggtcatgcacagaaaatatatattgcagctgaactggggtggaagggtcttttttcccttggagacattgaataaactctgtgttgtatgcctgcatttttactgtgatccatcact

SEQ ID NO: 826611 - DNA, 120 bp, Artificial Sequence
  ENSG00000287519_17 (sequence is synthesized)
tgttgtatgcctgcatttttactgtgatccatcacttggggtcaggtgtatcagactttggagaattttggatttcaaattagggatgctcaacctttgtgtgtgtgtgtgtgtgtgtgt

SEQ ID NO: 826612 - DNA, 120 bp, Artificial Sequence
  ENSG00000287519_18 (sequence is synthesized)
ctgggattacaggtatgagctaccgcgcccggccaacctttgtgcattcttaatcccatccacagcatctcaagttaagtaacttggccaacaaagtgcaccaagtgggcgtgataatga

SEQ ID NO: 826613 - DNA, 120 bp, Artificial Sequence
  ENSG00000287519_19 (sequence is synthesized)
gataatgatagcaatgacatgaggaaactgtttccaaaggggattaggcaacctccccaaagtcgctcactaagaaagtggcagagccagttctaactccatagtccaaaagcagcactg

SEQ ID NO: 826614 - DNA, 68 bp, Artificial Sequence
  ENSG00000287519_20 (sequence is synthesized)
gcagagccagttctaactccatagtccaaaagcagcactgtcagcctggaaagactacagaaacttat

SEQ ID NO: 826615 - DNA, 120 bp, Artificial Sequence
  ENSG00000287517_0 (sequence is synthesized)
agttgggggtgctcttggctacaagtagcaatgttatgaacgcatttgctgtcttgttaataagaactccctgggctggtcttttctgctcagtcaggctcagctgattggtgacagtga

SEQ ID NO: 826616 - DNA, 120 bp, Artificial Sequence
  ENSG00000287517_1 (sequence is synthesized)
cattgcccttcctggccatacattgactcttcaatgccatgcacatgtgcgctcaggaccacacacagagcagcaggaagggggcatgaggcaaggcctcctccttccaagactctggcc

SEQ ID NO: 826617 - DNA, 120 bp, Artificial Sequence
  ENSG00000287517_2 (sequence is synthesized)
aagtgcccatgcatatgactggtgcaggatgctgccagtccagggacgacatttcgaggaccactggcttcagtgatcttgagctgggtacatgaccacccaaaccaatcaaagggaaaa

SEQ ID NO: 826618 - DNA, 120 bp, Artificial Sequence
  ENSG00000287517_3 (sequence is synthesized)
agcaggactccccagggagcaggagttctcagccctggtgcaggctggagccacctagggagctttgaaaactacccatgcccacgagggacagaatcgggatgatgaagatgttctaaa

SEQ ID NO: 826619 - DNA, 120 bp, Artificial Sequence
  ENSG00000287517_4 (sequence is synthesized)
accggattacggtaacggttgcacaacctgggaaacttaaaaatcattcaatggtacacttaaaatgggtgaattttatgttatgtaaattatatctcaataaacttgtttaaaaaaaaa

SEQ ID NO: 826620 - DNA, 120 bp, Artificial Sequence
  ENSG00000287516_0 (sequence is synthesized)
ccgggagtctctgcactctgcaccctcgggggcccaggggacccccttgcccttgcaggcttgtatctgctcctgctgcctagcctctccccactgccggcgcctgcctggatctcggag

SEQ ID NO: 826621 - DNA, 120 bp, Artificial Sequence
  ENSG00000287516_1 (sequence is synthesized)
cagggttggggccgtgccccagcactgacagcccggccaggtgtgtgcacacacggggcagtgctgatatgccagtcacctgccacctcggccgcctccggaccttgggcaccaaaaagc

SEQ ID NO: 826622 - DNA, 78 bp, Artificial Sequence
  ENSG00000287516_2 (sequence is synthesized)
aggaggaagcattcccatgtgaaagatgagctccctataaaagcaacgctcttatcatcgagaacagaaagttgaagc

SEQ ID NO: 826623 - DNA, 120 bp, Artificial Sequence
  ENSG00000287516_3 (sequence is synthesized)
aaaagcaacgctcttatcatcgagaacagaaagttgaagccaagagagagctccacaagctgaccttgttaaactaacccttatcttcttagtcgcttctttacccaattaactacccta

SEQ ID NO: 826624 - DNA, 120 bp, Artificial Sequence
  ENSG00000287516_4 (sequence is synthesized)
gccgaagcccctttgccttattacattttgcaacagtgttcgttgtccaattcagtatacaagtgagtgactctggatgctttttggggtcttcgtttccttatgagggcttctgtgcca

SEQ ID NO: 826625 - DNA, 120 bp, Artificial Sequence
  ENSG00000287516_5 (sequence is synthesized)
gatacggcagcagcaggcagtcctgagcggccgctgccatcgcgccggctgcagcggaaagcaacaaagcaccatcttggaagcagagagccaccctcaccagaactgaatgcaggcacc

SEQ ID NO: 826626 - DNA, 120 bp, Artificial Sequence
  ENSG00000287516_6 (sequence is synthesized)
gtgaccttgaacttcccagcctccagaacttgctgccaggacctgcagaactccagatggattcccctggctgacacttgaaagatttttgctctaacttaatagaaatgacagactggc

SEQ ID NO: 826627 - DNA, 120 bp, Artificial Sequence
  ENSG00000287516_7 (sequence is synthesized)
aaagccatagttaaatcagctggaggagccacaaatcaaatcatctttacagaaagatgtgagtgcacatggaaatttatggagtctctcagcattgtagaagagcctctgtttcttctc

SEQ ID NO: 826628 - DNA, 120 bp, Artificial Sequence
  ENSG00000287516_8 (sequence is synthesized)
actggttcctgtcctcctcagcttggtatataactcctgagggctgaatacctggttgctgaaggatccagtccctgccctataaccgaggaagaatttctacttccccttcctgtccag

SEQ ID NO: 826629 - DNA, 120 bp, Artificial Sequence
  ENSG00000287516_9 (sequence is synthesized)
aagtgatattcccagatgaagtgagaaattatatgctctctgggaaatggctatctgcaaagacttgtggcattctactttctggatatattgccttatgtctggcaaactgtactgatt

SEQ ID NO: 826630 - DNA, 120 bp, Artificial Sequence
  ENSG00000287516_10 (sequence is synthesized)
agagaaccaataaacctccatcctgaggacaaaagtaattttgtgaaactgcatgaagtttctctagagagagagacttcacaaagcccagtggtcacagctgtgcagtggaaccgaact

SEQ ID NO: 826631 - DNA, 120 bp, Artificial Sequence
  ENSG00000287516_11 (sequence is synthesized)
actttgaatctctgccatcaaaggaaagaatctcaggattttctgctacagaagcatgatcgtgtttaaattcttaaaatgctgcattagcaagaattctccacagaaacagactctctc

SEQ ID NO: 826632 - DNA, 120 bp, Artificial Sequence
  ENSG00000287516_12 (sequence is synthesized)
tctagagttgagagagagagagagttaatataggaattggctcatgggacaatggaggccaagaagttccagaatctgatgtctgcaagccagcaaacaaagccaataatgtaatttagt

SEQ ID NO: 826633 - DNA, 120 bp, Artificial Sequence
  ENSG00000287516_13 (sequence is synthesized)
ctgagttcaaaggcccaagaatggaggtactgatggtataattcctgatctgagtctaaaggcccaagaaccaggaacactcatgttaacagaaaatgaataggccaggtgcagtggctc

SEQ ID NO: 826634 - DNA, 120 bp, Artificial Sequence
  ENSG00000287516_14 (sequence is synthesized)
cgggcctggggcggtgccgcacttgcacacggagtgtggggggccaggcctgggaccaggagctggggccgggcttcggcgcagaggcaggaagaggaagcggcacccgcttcggggacc

SEQ ID NO: 826635 - DNA, 120 bp, Artificial Sequence
  ENSG00000287516_15 (sequence is synthesized)
cagccggcggccaggccaccgcgcccacccggccgatggcaccgtgttcctgcgcctcgggagggaggaggctctgcgcgggactgcaggttctgccccgcatcggagtgatcgctgagc

SEQ ID NO: 826636 - DNA, 120 bp, Artificial Sequence
  ENSG00000287516_16 (sequence is synthesized)
ctgacgctctcgaaggctgggcctggggcccgcaatctactccggaggctttcccactgggcagggtcgctagcagggtgagagaaagccccgggccatccccgagtgccggggccacag

SEQ ID NO: 826637 - DNA, 120 bp, Artificial Sequence
  ENSG00000287516_17 (sequence is synthesized)
gaagaatttgtggcgacatcatcccttccccaggtgccacccgggtgcagtgaggacctggagcccctgccccaggctgtgaggagacttgaccagagctgcctgaatgctccacggagc

SEQ ID NO: 826638 - DNA, 120 bp, Artificial Sequence
  ENSG00000287516_18 (sequence is synthesized)
aggtgtccactttttgggccttgacttaggtttctataaaacagagtttttcctagtcctgtcttctctcatcagggatttaccccacagaccatgacactatgatatcagtatcttccg

SEQ ID NO: 826639 - DNA, 120 bp, Artificial Sequence
  ENSG00000287516_19 (sequence is synthesized)
tatccttgcaggtctttctaggtacatgaaatgagccacaataacctgattcatatcatggtcttgatacttagcatagctttacattcaatgcctcccataaaatctctttgtatttta

SEQ ID NO: 826640 - DNA, 120 bp, Artificial Sequence
  ENSG00000287516_20 (sequence is synthesized)
agaggagccattattaataactcaaaagaatgagttatgaaagcacagcattatctaaaattaatacactataaatgaaggatgtgttacaaatgtagacttttcctctttctataattt

SEQ ID NO: 826641 - DNA, 120 bp, Artificial Sequence
  ENSG00000287516_21 (sequence is synthesized)
ctctcgtcctaatctggaggctctatcctcacttatagcagctggtaagaaatcttggaattttcctgtataaggtaattttattttttctggtaaatagcatttcatatctcacaatct

SEQ ID NO: 826642 - DNA, 120 bp, Artificial Sequence
  ENSG00000287516_22 (sequence is synthesized)
aagttttaacttcttacctatagtgtttctttcctccaaactgtctgtcttccttatctttccctatagatgtgagtgcacatggaaatttatggagtctctcagcattgtagaagagcc

SEQ ID NO: 826643 - DNA, 120 bp, Artificial Sequence
  ENSG00000287516_23 (sequence is synthesized)
aaatcaccacagtaagatcatagcttcaggacctaagtagctcctggggatgggaaagagatgactgactgaggtggttgatgggattcttacaggaccccactggaaatcggactgttc

SEQ ID NO: 826644 - DNA, 80 bp, Artificial Sequence
  ENSG00000287516_24 (sequence is synthesized)
gcccaaggctctctgactgactctgcccgattgcctcagaagccccgtagaccatcatggacgccgagctttaggtaact

SEQ ID NO: 826645 - DNA, 120 bp, Artificial Sequence
  ENSG00000287516_25 (sequence is synthesized)
cgagctttaggtaactctcacagtggaggcaacaaagcaccatcttggaagcagagagccaccctcaccagaactgaatgcaggcaccgtgaccttgaacttcccagcctccagaactat

SEQ ID NO: 826646 - DNA, 120 bp, Artificial Sequence
  ENSG00000287516_26 (sequence is synthesized)
agatggaggcacactgacagcagatggaggacataaagctgacagttaagagacatgtgaatgggttgatggggaatgatctctttgtgaagtctgttgttggcaacacattgcggcaga

SEQ ID NO: 826647 - DNA, 120 bp, Artificial Sequence
  ENSG00000287516_27 (sequence is synthesized)
agaaacagctcagtgatggtccccacagctgccattctccagtcttgaagttggtgtatgacctcactgtgaccgaccccctatgggctgacaatgtggaaaacagtaatggtcaagaaa

SEQ ID NO: 826648 - DNA, 120 bp, Artificial Sequence
  ENSG00000287516_28 (sequence is synthesized)
tcctccctgtccttttgtgttccaggcagagagccacccttccccatgtgacttggggaagactcatggatgagctccttgagaacctatgacgaagccagacacaacccctcctagggt

SEQ ID NO: 826649 - DNA, 120 bp, Artificial Sequence
  ENSG00000287516_29 (sequence is synthesized)
ctgaaagtttgtgtccttccaaattcatatgttgaaatcctaacccccgaggtgatggtatcaggaagtggggccttgggaggtggttaggtcataagattggagctcttatgtatggaa

SEQ ID NO: 826650 - DNA, 120 bp, Artificial Sequence
  ENSG00000287516_30 (sequence is synthesized)
tcagtgatttaaaaaggccccagagagctgccttgctccttaagacatgtgaggatacagcaagaaggtgctgtccatgagaaagctggccctcaccagaaaccaatcctacagatgcct

SEQ ID NO: 826651 - DNA, 120 bp, Artificial Sequence
  ENSG00000287516_31 (sequence is synthesized)
tgatcttggacttcacagcctccagcactgtgagcaatgagtttttgttgtttataagccacctagtctatggtattttgttatggcagcttgaacagactaagccaaccctccaaattt

SEQ ID NO: 826652 - DNA, 120 bp, Artificial Sequence
  ENSG00000287516_32 (sequence is synthesized)
tcattctttggtcctcactgactaatctgaacaaactgctcatcaacttaacttgttcaaacttaatgaggcttctctccctccccaggcctttgaactttggctggcccctgagcttaa

SEQ ID NO: 826653 - DNA, 120 bp, Artificial Sequence
  ENSG00000287516_33 (sequence is synthesized)
gcaagcactaaaacacagaacatctctcctcagtgatccttccctgttcaaattgtctgttcacaccacctgctcatcccactcccgcacagccactcctctctagtattctctactcct

SEQ ID NO: 826654 - DNA, 120 bp, Artificial Sequence
  ENSG00000287516_34 (sequence is synthesized)
ccgcacagccactcctctctagtattctctactccttcacataaaaagagaagcccttagccgggtgcagtggctcatgcctgtactctcaacactttgggaggcccaggtgggtggatc

SEQ ID NO: 826655 - DNA, 89 bp, Artificial Sequence
  ENSG00000287516_35 (sequence is synthesized)
cgtttctactaaaaatacaaaaaaatttagccaggcgtggttgtgtgtgcctgtaaacccagctagcgtgggagtcagaggttgcagtg

SEQ ID NO: 826656 - DNA, 82 bp, Artificial Sequence
  ENSG00000287516_36 (sequence is synthesized)
ctgggcgacagagtatccctttcctgcctgagctttgagacacctgcggaggctatggtcagagcattctccttaaggcaat

SEQ ID NO: 826657 - DNA, 120 bp, Artificial Sequence
  ENSG00000287516_37 (sequence is synthesized)
cctgcggaggctatggtcagagcattctccttaaggcaatagtgaccctcttccttttgcaatagaatttatgaatggactgtctcttgacttaagtccagatttgtttcttcacttgac

SEQ ID NO: 826658 - DNA, 120 bp, Artificial Sequence
  ENSG00000287516_38 (sequence is synthesized)
agaggaaagctacacattttattctatctttagtcttagaattctaagtatgattttattcttgtattcatctattaaacaaatacccacatatcaatatatatcgaactcactcttcgt

SEQ ID NO: 826659 - DNA, 120 bp, Artificial Sequence
  ENSG00000287516_39 (sequence is synthesized)
gctggagataaaataagaacaagctttctcttccatgaaccattaccctattaggggagtgggtgggagacagataaggagaaaataaatgtcaaattatatgaagtgctttggagaaaa

SEQ ID NO: 826660 - DNA, 120 bp, Artificial Sequence
  ENSG00000287516_40 (sequence is synthesized)
gtaaagcaaagtacactagtgccccctatccacggtggatacattccaagacccacagtggatgcccgaaactgtggatagtgttgagccctatatatatatattctgttttctcctaca

SEQ ID NO: 826661 - DNA, 120 bp, Artificial Sequence
  ENSG00000287516_41 (sequence is synthesized)
ccctatatatatatattctgttttctcctacacatatgtacctgtgataagtttaatatatgataaacttgataagatttaccatacaattacctttttctcttttcttctttttttttt

SEQ ID NO: 826662 - DNA, 120 bp, Artificial Sequence
  ENSG00000287516_42 (sequence is synthesized)
gccaccatgcccagccacaatttattttctttccttaagtcgaagactttcactttttcacttaatggaagcaacgtatggcttctctttggcatgtcctgattgtcagcatcactactg

SEQ ID NO: 826663 - DNA, 120 bp, Artificial Sequence
  ENSG00000287516_43 (sequence is synthesized)
taaggataacttaccacaatcactacaataaggtgaaatcagtctgacaacccggacaacgatgaagtgactaatggacaggtaacatagacatcatgaacacgctggacaaagggatga

SEQ ID NO: 826664 - DNA, 120 bp, Artificial Sequence
  ENSG00000287516_44 (sequence is synthesized)
ttcacatcctggggggacaaagcagaaaagtgtgagtttcatcatgctgcacagaacggcacaaaatttaaaacttatgcattgtttatttcttctttctttgttgtgacagggtcttgc

SEQ ID NO: 826665 - DNA, 84 bp, Artificial Sequence
  ENSG00000287516_45 (sequence is synthesized)
ggctcactgcagcgacctggcccaagtaggtgggactacaggtgcatgccaccacacaaggctaatttttgtattttttgtaga

SEQ ID NO: 826666 - DNA, 60 bp, Artificial Sequence
  ENSG00000287516_46 (sequence is synthesized)
ccaccacacagaaatcatgagctcaagcaatctacctgccttggcctcccaaagtactgg

SEQ ID NO: 826667 - DNA, 120 bp, Artificial Sequence
  ENSG00000287516_47 (sequence is synthesized)
acaggtgtgagccactgcgcctggcctgaattatttatttctaaaatttttcatttactattttcagaccacagttgactgcaggtaactgaaattatggaaaccaaaacccttagtggg

SEQ ID NO: 826668 - DNA, 120 bp, Artificial Sequence
  ENSG00000287516_48 (sequence is synthesized)
tgggtaagggggcaccactgtaagaagaggtatctgggcttggggatgagttggtattgtaaatatggtaatcagataagatttcgtgaacaccatagaccttgtattagtctgttcttg

SEQ ID NO: 826669 - DNA, 120 bp, Artificial Sequence
  ENSG00000287516_49 (sequence is synthesized)
aaacttacaatcatggtggaaagcaaaggggaagcaggcacatcttacatggccagagcagaaggaagagagagagggagggagaagtgctacacacttttaaacaaccagctttcacag

SEQ ID NO: 826670 - DNA, 120 bp, Artificial Sequence
  ENSG00000287516_50 (sequence is synthesized)
gaattcactcactatcataggaacagcaccaagggggaaggtgttaaaccattcaggagaaactgcccccatgattggataatcatcttccaccaggccctacctccaacgttggagatt

SEQ ID NO: 826671 - DNA, 120 bp, Artificial Sequence
  ENSG00000287516_51 (sequence is synthesized)
acaattcgacatgagatttgggcagggacacagatccaaaacatatcagacctaaaagcagtcatggagaccactaacaagcgcaaagcccctgagatgtgcgttcagggtgttcacaaa

SEQ ID NO: 826672 - DNA, 120 bp, Artificial Sequence
  ENSG00000287516_52 (sequence is synthesized)
agagcaaagaggccgatgtggctggaagatagtaagcacgggatatgagataaaatcagagaggcagtgtgttctaggtcacgcagggcttgtgggctatcgtaaagacttcagctttta

SEQ ID NO: 826673 - DNA, 120 bp, Artificial Sequence
  ENSG00000287516_53 (sequence is synthesized)
ctctgaatgagatggaaaactaacaagcgttttaagtagtagtgctatgatctgaataacattttaaaagatctactcttgattctgtgtggagaataggctagggaaagaccaaggaca

SEQ ID NO: 826674 - DNA, 120 bp, Artificial Sequence
  ENSG00000287516_54 (sequence is synthesized)
gaagcacagagtccatttgggaatctacggcaacaatatgtgcaagggaagatggtgaccaggaccaagatggtgaccaggaccgtgtggaagggcagggtgtggaggtcagaatcagga

SEQ ID NO: 826675 - DNA, 120 bp, Artificial Sequence
  ENSG00000287516_55 (sequence is synthesized)
cttgagtttggagcacattatgcttttcatgtttattacacatcaaagtggagatttctagttggaaattagagaggtgagagagagagagaagttgtgactttgggagggagatcttta

SEQ ID NO: 826676 - DNA, 120 bp, Artificial Sequence
  ENSG00000287516_56 (sequence is synthesized)
cagatttttgatgttaatatctctgaaaggactctttctaattatttacacaattaagacaattaactaagtcaaacgattatttcattaatgattgactattgttaagccaaatattat

SEQ ID NO: 826677 - DNA, 120 bp, Artificial Sequence
  ENSG00000287516_57 (sequence is synthesized)
taactttgtctacttgatctgttttgcctgatatgctgactatgcttttgcctcaagcttttgcgctttgttccctctgtctatcagagttactcaaagtgcaaccagatgaaaagcaag

SEQ ID NO: 826678 - DNA, 90 bp, Artificial Sequence
  ENSG00000287516_58 (sequence is synthesized)
agccaggccgtttttgggaagccgaggtgggaggatcacgaggtcaggagttcaagagcagcgtggccaatgtggtgaaaccccgtctct

SEQ ID NO: 826679 - DNA, 79 bp, Artificial Sequence
  ENSG00000287516_59 (sequence is synthesized)
ctgagcaagagccagagtgcaaatgaacacagtgcttccttcgtcaagaaagtcttgcaataaaagagaaaaatgtcag

SEQ ID NO: 826680 - DNA, 120 bp, Artificial Sequence
  ENSG00000287516_60 (sequence is synthesized)
ttcgtcaagaaagtcttgcaataaaagagaaaaatgtcagctgcagtgaacagtgtccttcatgatggagctggtttgcgttctgaggaaattgcaacctcctcaccactaactggaaca

SEQ ID NO: 826681 - DNA, 120 bp, Artificial Sequence
  ENSG00000287516_61 (sequence is synthesized)
aacataccacagaccatactttgagaagtaaaattctagagcatcgctgaagcaaccccaagtaactacacggctcttcttcattccattcaggtccctgaacaaatgtcatgtcctcag

SEQ ID NO: 826682 - DNA, 120 bp, Artificial Sequence
  ENSG00000287516_62 (sequence is synthesized)
agaagcatacacttctgaaacagctggcttcagtccctctctcttttagttttctttgtagcatgtatcattatttaactttatattatgtaattatttgtttaatatctctccattaaa

SEQ ID NO: 826683 - DNA, 120 bp, Artificial Sequence
  ENSG00000287516_63 (sequence is synthesized)
gcaagctcaattagagttgcaacttgctctgtttcattcagttatatccccagcacctagaaaattgcctggcacataggaggtacgtaataatgaaaatgaatgaatagtactaaaaag

SEQ ID NO: 826684 - DNA, 120 bp, Artificial Sequence
  ENSG00000287516_64 (sequence is synthesized)
gatgaatataggtatactaatatcaaagtccctgctgtttaaaatgttgtgttcatctaataaatctgtgaccttctttaacagctcattttccttattttaggtttatttcttataagc

SEQ ID NO: 826685 - DNA, 120 bp, Artificial Sequence
  ENSG00000287516_65 (sequence is synthesized)
actgtcaaatgctccttcaggccactaaatcaccacagtaagatcatagcttcaggacctaagtagctcctggggatgggaaagagatgactgactgaggtggttgatgggattcttaca

SEQ ID NO: 826686 - DNA, 120 bp, Artificial Sequence
  ENSG00000287516_66 (sequence is synthesized)
tctgcctttcactatgacaataaatgtcactgatttgctttaatggtagaaaagactacagagagagagagtaaaaataaaaaatgtattaatatgggagaatatacacccagaggaatt

SEQ ID NO: 826687 - DNA, 120 bp, Artificial Sequence
  ENSG00000287516_67 (sequence is synthesized)
tatgggagaatatacacccagaggaatttttgaaaatagtttctccatcacagaagcaaaactagagctgggtggtttatactgggtgatatagtttggctgtgtccctacccaaatctc

SEQ ID NO: 826688 - DNA, 88 bp, Artificial Sequence
  ENSG00000287516_68 (sequence is synthesized)
tgtgggaccaggtagagataattgaatcatgggggtggttttccccataccgttctcacggtaatgaataagtctcatgagatctgat

SEQ ID NO: 826689 - DNA, 120 bp, Artificial Sequence
  ENSG00000287516_69 (sequence is synthesized)
tgaatttagcatcattccagtcctggttttagctcaagcctaattggaggagagtagacagcaaccagctgtaatacaaaaagcaaccatttggaatcagagctagattcaaatccaggt

SEQ ID NO: 826690 - DNA, 120 bp, Artificial Sequence
  ENSG00000287516_70 (sequence is synthesized)
ctcatcacttcatacaatgttacctttgggcaagttattctgtctctttgggcttcaagtggcctttccaaaatgtcatctacatcataaaagtgttgctgatattcagtgaaatattcc

SEQ ID NO: 826691 - DNA, 76 bp, Artificial Sequence
  ENSG00000287516_71 (sequence is synthesized)
aattagctagaccacaagaatgaacccaagaggcagaggttgcagtgaactgaggttgcgccactgcactccagtc

SEQ ID NO: 826692 - DNA, 82 bp, Artificial Sequence
  ENSG00000287516_72 (sequence is synthesized)
aggttgcagtgaactgaggagaaaaaaagaagagagattaatgtctcggctccataaggaaagagaaaatgcattcttctga

SEQ ID NO: 826693 - DNA, 120 bp, Artificial Sequence
  ENSG00000287516_73 (sequence is synthesized)
gatgggaaagagatgactgactgaggtggttgatgggattcttacagcccctgtcaggcttcaatttgcaaagctccatagtggatccctaaacctctccacacaggaaattgtgcagga

SEQ ID NO: 826694 - DNA, 120 bp, Artificial Sequence
  ENSG00000287516_74 (sequence is synthesized)
gactgggggaaaggtgacgaggcaggtatcaaatattttctagttctttgccggaggccctggccagtgggcatactttagaatgaggataaacgaaaagagcacctcttacccatgatt

SEQ ID NO: 826695 - DNA, 120 bp, Artificial Sequence
  ENSG00000287516_75 (sequence is synthesized)
atggtggatggagtcaagaccaggcatggacaagatgccagtggagagtgctggagggtgagaaccatggacacctaagtcaacatgtcatcaaagcgaaaacagcctgaacctggagtc

SEQ ID NO: 826696 - DNA, 120 bp, Artificial Sequence
  ENSG00000287516_76 (sequence is synthesized)
aaaggattagcaagataaagagatcaagcacaagaaggttggaaatggctagagggaacatggacttggtgaaggccattgccagtggccaagtggctatgtcctgcagctggactgaaa

SEQ ID NO: 826697 - DNA, 120 bp, Artificial Sequence
  ENSG00000287516_77 (sequence is synthesized)
gtggccaagtggctatgtcctgcagctggactgaaaggataggatgccataaggtgcttctggaagtcccttaaaagtcctgcacagaggctggctgcagtggctcacacctgtaatcct

SEQ ID NO: 826698 - DNA, 120 bp, Artificial Sequence
  ENSG00000287514_0 (sequence is synthesized)
gggacaagagtgacaataaacaaggaagccatgcgcatggagaagtaatcacgcattgaggcaagtgctgcaaaggaagacggtgccgtgtaaagaaaatatatagggtggtggtgctta

SEQ ID NO: 826699 - DNA, 120 bp, Artificial Sequence
  ENSG00000287514_1 (sequence is synthesized)
atttcaataggggggttggagaagtcttctccgagggggtgacattgaggttgagatttgatggatgagaaggagcgagctaggacaagagaagaagagagacagtgttctcagtggagg

SEQ ID NO: 826700 - DNA, 120 bp, Artificial Sequence
  ENSG00000287514_2 (sequence is synthesized)
gaccttcttgtgcagagggcgtgagctggaaccagaccagcagttccaaggaacggagaagctgccgtgcagggctggagtgtgatgagcaaggcaggaacagcacatcatccggtgaga

SEQ ID NO: 826701 - DNA, 120 bp, Artificial Sequence
  ENSG00000287514_3 (sequence is synthesized)
gaagcagacagcggccaggccacacagagccctgcagggcacgctggcagagttgcttgaaatgaagccgttccctgaaaagcacacatgaatttcccctgcggaaaattcaaacagaca

SEQ ID NO: 826702 - DNA, 120 bp, Artificial Sequence
  ENSG00000287514_4 (sequence is synthesized)
cacttgaggatttccactaaattctctctggcccccagagcactggggaagcatgtgagacctgtgccatcccggaactgtggcgacaatggtagttaacgtccatcatctgcaggcacc

SEQ ID NO: 826703 - DNA, 120 bp, Artificial Sequence
  ENSG00000287514_5 (sequence is synthesized)
ttcaggatgtggagcatgcagagatgactcacgcccacaccggtgacctccaacacaccagggaaggcaggaaaaggctgtgtgccaggatcttgttctgggctagaaaagtatgcctgt

SEQ ID NO: 826704 - DNA, 120 bp, Artificial Sequence
  ENSG00000287514_6 (sequence is synthesized)
tcgttacccgacctttgctaagtacaccaactaatggagcgagagacatgaaagatcttcacaggccatgtggaaatgtaattcaaacccagcccgaggaggtcatagtgttcagcaagt

SEQ ID NO: 826705 - DNA, 120 bp, Artificial Sequence
  ENSG00000287514_7 (sequence is synthesized)
aaacatggagcctgctgaagctgggaatgcaaagtgtgcaagaagcctgcctatgggaacctacggctcagcagggagacatgaaatagctgggaacgccccctgcacagtgtaaagggc

SEQ ID NO: 826706 - DNA, 120 bp, Artificial Sequence
  ENSG00000287514_8 (sequence is synthesized)
gtgctaccttgggaaggggacagaaacagaggagaggggggatcctggccagcaggggtgtcacagaaggctttttaaaggagggggccttggagctgaactttgaggccagtggcattc

SEQ ID NO: 826707 - DNA, 120 bp, Artificial Sequence
  ENSG00000287514_9 (sequence is synthesized)
gaacacatccacgggtctccctttcggatttcagtgccctcttggccttgggctgatgagctaagttgctactggagaatgacctttcacaggaaattcagaaccccagtcatcaatgtt

SEQ ID NO: 826708 - DNA, 120 bp, Artificial Sequence
  ENSG00000287514_10 (sequence is synthesized)
tgactaccctgtcaccaagtccctccattgccctggcttgatgtggctgcgagaagtcacctgttcaggcccctcctgcctcctccacacactgacctccctcagactcagaacagccga

SEQ ID NO: 826709 - DNA, 120 bp, Artificial Sequence
  ENSG00000287514_11 (sequence is synthesized)
tgctgccctctgaggcctgcccctttgcacaggctttgcccacatctgggctcctggattcctcagaagccggctcctggggcctgtccagcaaggcttggaagcccgggtccccaaaga

SEQ ID NO: 826710 - DNA, 120 bp, Artificial Sequence
  ENSG00000287514_12 (sequence is synthesized)
cctgctagttaatgagttctgcaaaaactaggtctgtctgtaatcgaaatgggagtacaaggctcacacggtccctgaattaattcagtcctgttagaaagggagcaaggcagagtttct

SEQ ID NO: 826711 - DNA, 120 bp, Artificial Sequence
  ENSG00000287514_13 (sequence is synthesized)
tattcctgtctcctgctgccacactgaggcagttgttaacaatgccctctgcccaccccggacccctcctccatttaaataccagtctgatgggcaaagagagcatttaatgactgctcc

SEQ ID NO: 826712 - DNA, 120 bp, Artificial Sequence
  ENSG00000287514_14 (sequence is synthesized)
agactaaaaagttcctattattttattcccttcttactcctgcccaatttccttccagatggggcaggtgggtataaaatatatggagctggaattacaatagcaagaagacaggtgggg

SEQ ID NO: 826713 - DNA, 120 bp, Artificial Sequence
  ENSG00000287514_15 (sequence is synthesized)
aaattgaatgtggttggaaaatttgtccgtatgcctacaggtgtgtcttatgagatcttgcaggctaccaccacccccgctaccccagcctggccattctccaaatggtctgggaatggg

SEQ ID NO: 826714 - DNA, 120 bp, Artificial Sequence
  ENSG00000287514_16 (sequence is synthesized)
gaatatgagtggccaagacttcccctcctgttggagtggtctgagtatccaggcagaaggaaaggagatatttagcaagggggcgcttagaatggcagccttgaagaggtgcaggcagtg

SEQ ID NO: 826715 - DNA, 120 bp, Artificial Sequence
  ENSG00000287514_17 (sequence is synthesized)
ctgacttgacactaccttcaccatcaggtgttgggcccccagtacgataccacagagtctttatgccttccttctggattctcttctttcctctccttactcagatgccacctccattgg

SEQ ID NO: 826716 - DNA, 120 bp, Artificial Sequence
  ENSG00000287514_18 (sequence is synthesized)
gaagtcttccttgattaccccagagttagtttctccgtcctttctgctcctctctctgcatccctattaaatgtgttattggtctatgatgttctgcattacaacctgtgtttgatggct

SEQ ID NO: 826717 - DNA, 120 bp, Artificial Sequence
  ENSG00000287514_19 (sequence is synthesized)
ggtgacttcctgtacagaggagatttagggacatgcatgcttgagaaagactcctgttctccacttgcttgctgtgtgactgtacaaatttctattatctctgtaactccatctgcaaca

SEQ ID NO: 826718 - DNA, 120 bp, Artificial Sequence
  ENSG00000287514_20 (sequence is synthesized)
tgaggacaaaaaaatctacgtcacaaggctgctgtaaggagtaagatccagcttccttctctccacctcagccatttacagtcactactattgggaaactagggctctggagtcagatca

SEQ ID NO: 826719 - DNA, 120 bp, Artificial Sequence
  ENSG00000287514_21 (sequence is synthesized)
gcctgggtttgaatcctggctccaccactttccagctgtctttggccctgttacaatccttctgtgcctcagtttttcatctgtaaaatggtggtaactcctatcccatatctcatacac

SEQ ID NO: 826720 - DNA, 120 bp, Artificial Sequence
  ENSG00000287514_22 (sequence is synthesized)
ttcttgggagaataaactagggtaatgcacgtagattgctcagcataggcctggcaacattctgaaagttagctatcattattggtagtgttgtcactaaaactgtgagttggtggagtc

SEQ ID NO: 826721 - DNA, 120 bp, Artificial Sequence
  ENSG00000287514_23 (sequence is synthesized)
cgaaatctcagcctagtatagtgcccagagcccagtgagtactgagtatataaaaaggaaaatgtttcattgtaaactgggaaccatgatccaaatgtaatgctcagaaatgtcacccct

SEQ ID NO: 826722 - DNA, 120 bp, Artificial Sequence
  ENSG00000287514_24 (sequence is synthesized)
tgtcaattatgaatgattaggacatgatgcaggtgacttgagcctgcatcagagaccatgggcttgggagatgcccaggggtgcctgcccctttggctgtcacagtctccagttcttcca

SEQ ID NO: 826723 - DNA, 120 bp, Artificial Sequence
  ENSG00000287514_25 (sequence is synthesized)
gactatgccaggtgcaggtgagctggaggtaacagacactcacccactgatagccagaagtctaacccaggaggaaagaaaacccagggctgccagttcacacacagttgggagcacttg

SEQ ID NO: 826724 - DNA, 120 bp, Artificial Sequence
  ENSG00000287514_26 (sequence is synthesized)
ctagtgagtcatggtcaatggccaaacagatgagaagaaccaaggaaagggttggcatttgctggggtctgctgattcccaagctctggcctgtggtgaagcagcagaaatgtgccaagc

SEQ ID NO: 826725 - DNA, 120 bp, Artificial Sequence
  ENSG00000287514_27 (sequence is synthesized)
tcatctattatttgtttcttgtctttgctcaatcagcatataagagagtacgaattccatctgccgtgttcacagcgccatccccagaacctacaacagtgtcggcttctagtaggtgat

SEQ ID NO: 826726 - DNA, 120 bp, Artificial Sequence
  ENSG00000287514_28 (sequence is synthesized)
cgctaaatattttttgagtaaataaacgaatgactcatgtcgtgctggagggggactgtgggacaagcatccaggaggactggagatctccaggagggacgtctgagcaaacaagaatgt

SEQ ID NO: 826727 - DNA, 120 bp, Artificial Sequence
  ENSG00000287514_29 (sequence is synthesized)
cccacacgtggaggtcactaagcccaggctgtgtctgagatggttctaagagagtaagagagaatgcacagaaagaaaccggatcacctcctatgcccccagcgcctgcacaaagcctgg

SEQ ID NO: 826728 - DNA, 120 bp, Artificial Sequence
  ENSG00000287514_30 (sequence is synthesized)
cacacagcaggtgttgcgtgttggttgactgaattaatagatgaacctgctcttcggcgaggagtgagacttcctgtgcataaggggctcgagcaggaagacagctggccgagagcgtgc

SEQ ID NO: 826729 - DNA, 120 bp, Artificial Sequence
  ENSG00000287514_31 (sequence is synthesized)
gctggggtccagaaggttgcctcagcttcacaggtcactgcaggggctgccccggagcccactgaacccagttgtattaaccatttggtggctgacaaggagctgatcttgggtcctgaa

SEQ ID NO: 826730 - DNA, 120 bp, Artificial Sequence
  ENSG00000287514_32 (sequence is synthesized)
gaaaggaatggatggatcttggcccaggacagctgctgtgaaaggtccctttagacgagagaagccacacccattcacttactggacccaggctggtggtggagtcataaaagtggccct

SEQ ID NO: 826731 - DNA, 120 bp, Artificial Sequence
  ENSG00000287514_33 (sequence is synthesized)
ggacccagaagaggaggccatgcccagacgcactaccatcagccaggggcgttgagattccgtcccaggacaatgatcatcagcctgacttccgattctgattcagggagttaatggcaa

SEQ ID NO: 826732 - DNA, 120 bp, Artificial Sequence
  ENSG00000287514_34 (sequence is synthesized)
agctgagactggaggctgggccactggacctttctacaagatccttccagtctctccttgatcttgactttgttaacattttaactctttcataactgtttgcagaggatcagaaagaca

SEQ ID NO: 826733 - DNA, 120 bp, Artificial Sequence
  ENSG00000287514_35 (sequence is synthesized)
gagtggacttcgggtcagagggaacaacgctggctaacggggctgttactctgtactgggccctgggccagatgcttcatgtgcattaactcactggatcctcacaacagtatccccact

SEQ ID NO: 826734 - DNA, 120 bp, Artificial Sequence
  ENSG00000287514_36 (sequence is synthesized)
gtgcagatgaaaacgccgaggcacagagaggttatgtaatttgcccatggtcacacagctagtgagtggtgaagccaggatcaaacccaggcagtctggcgcctcagcctgagctcttcc

SEQ ID NO: 826735 - DNA, 120 bp, Artificial Sequence
  ENSG00000287514_37 (sequence is synthesized)
catcactccagagagcctgtgccaggtcttgggaaacaggcagggaatagtctgttgatgtttcctgggtgccctgctgccactgccctggctcagcccacatctctcgcacctgaccgc

SEQ ID NO: 826736 - DNA, 120 bp, Artificial Sequence
  ENSG00000287514_38 (sequence is synthesized)
attccagcctctccactgagtaccatggctgtagcgtagcccacccaaccatccgctactcccgcctgcaggaccatgccaacacagagagcctcctgacacgacactcccgttgttcct

SEQ ID NO: 826737 - DNA, 120 bp, Artificial Sequence
  ENSG00000287514_39 (sequence is synthesized)
ccccagccctctttaatggctcccaattgtctgatttctgggtgttcccaacccatctagtctgatctcccaccacacctttcatggatcctgacagccaaacaaggatttaccaacttg

SEQ ID NO: 826738 - DNA, 120 bp, Artificial Sequence
  ENSG00000287514_40 (sequence is synthesized)
ttcatacaacacttttcccaccttccagcctttatccaagctgttcttcctgcctggaatgcctgttctcacccgcccatggctctttcatgactgcttcccaggccctgtgcttggcag

SEQ ID NO: 826739 - DNA, 120 bp, Artificial Sequence
  ENSG00000287514_41 (sequence is synthesized)
gtgctcaccaacgggatactatgtgtccatgttgctttgttgcagaggaatttttattttttctctttctggatcctaaaaagaatacaagttcacattagaaaatctggaaaattgaga

SEQ ID NO: 826740 - DNA, 120 bp, Artificial Sequence
  ENSG00000287514_42 (sequence is synthesized)
caatctctcagagaaaaattaaagatagcctgaaatcctacatccactgtcaatattttgatatatatcttttcaatctttcttttcatttttaatattgtgaaatatttcaaacacaga

SEQ ID NO: 826741 - DNA, 120 bp, Artificial Sequence
  ENSG00000287514_43 (sequence is synthesized)
attgtgaaatatttcaaacacagacagaatggagaataatataacattctctggtgcatccaccttttcttttatcaacccagtagtttttcttttcttttttttttattattatacttt

SEQ ID NO: 826742 - DNA, 120 bp, Artificial Sequence
  ENSG00000287514_44 (sequence is synthesized)
tccctgagtcaccttgtggaaggctgcctgcctaccaggaatgctacatttaacatggggtatgacttatgtgggtcctctccttgggtctcacaaggctgacatgtgagtgagaaacag

SEQ ID NO: 826743 - DNA, 120 bp, Artificial Sequence
  ENSG00000287514_45 (sequence is synthesized)
atttttattgtgttaagacattgaaggtatgggatatgtttcttacatcagttgatatcgccttaaccaatataccagtttgcactgtgaatgagaaaatgagtctgcatccacaatgtc

SEQ ID NO: 826744 - DNA, 120 bp, Artificial Sequence
  ENSG00000287514_46 (sequence is synthesized)
catgctttaagagcttctaggagttttaggagtttatttgccatgctctataaagtctgcacaatgttttaattccacttcacagaaaggttttctttccaaaccctcttcaggggcctt

SEQ ID NO: 826745 - DNA, 120 bp, Artificial Sequence
  ENSG00000287514_47 (sequence is synthesized)
ccctattaaaaaagcccatttatagaaactactacttagcatttttggaacttgttatcctattcagcagagtctaagtcaggaggctttgaactcggacaattactgctcttgattaac

SEQ ID NO: 826746 - DNA, 120 bp, Artificial Sequence
  ENSG00000287514_48 (sequence is synthesized)
aacaagaactgatgagttggcctttctagtgtgctaagcaaactcagccaagcagaaaatatcactgaaggggaaacaacgggaagtgattttcttggttgcattatgcgccgtcgcgat

SEQ ID NO: 826747 - DNA, 120 bp, Artificial Sequence
  ENSG00000287514_49 (sequence is synthesized)
atttacacatgtttgtggataatgtgggaacctctgctgcttgcatgcccttccagatgacaccactgggcttgaaacgccatgtttcccacctgacctgggctgtaaatgtcatcctgt

SEQ ID NO: 826748 - DNA, 120 bp, Artificial Sequence
  ENSG00000287514_50 (sequence is synthesized)
caaccctttcaagttctagcccctccaggtaccctggggccagcacctaggcctagagatttgtttgtttgtttgttttttagagatagggtcttgctatgttgccctggctgatctgaa

SEQ ID NO: 826749 - DNA, 120 bp, Artificial Sequence
  ENSG00000287514_51 (sequence is synthesized)
cctcctgagtagctgggatcacaggcatgaaccacccaacccagctggggttagagagtaacagcagccttggcctcatattgtaagacagctcagtggccggatagatgggtgttcatt

SEQ ID NO: 826750 - DNA, 120 bp, Artificial Sequence
  ENSG00000287514_52 (sequence is synthesized)
cagctcagtggccggatagatgggtgttcatttcttctcgccctcgccagcactaggtgtttttaaaaaatgatttttgtgaagtcaaatagtgttttcagtgtcggattgaacattgtg

SEQ ID NO: 826751 - DNA, 120 bp, Artificial Sequence
  ENSG00000287514_53 (sequence is synthesized)
ctcatttatgagtgttctgtggatacctttacccatgtctctattgagggtggtaggatttttcataaaattgcatgcacatttttcatgtattaaaggcattatgccttttcacattct

SEQ ID NO: 826752 - DNA, 120 bp, Artificial Sequence
  ENSG00000287514_54 (sequence is synthesized)
ttagatttttccaacttctttatctttgtattttgttaaatgtttttggatacataaaactaaaaaaagaaaatcataagattaaatatttcaatcttgtcctttgagacttttccatct

SEQ ID NO: 826753 - DNA, 120 bp, Artificial Sequence
  ENSG00000287514_55 (sequence is synthesized)
ttttaagcttataaagtcatatttcatatggaagtttgaaatatattcatctataaccccattcattctatttaaaactttttaaagaaactcttggctccactaggaatttttttggat

SEQ ID NO: 826754 - DNA, 120 bp, Artificial Sequence
  ENSG00000287514_56 (sequence is synthesized)
ggaaggtatgaggtaaggatcttcctgggggccacatttgggagttcagatctgaggggcagaagcctctggctttggacaaacaggggcaggtgtcactggggttaggggtggcatagc

SEQ ID NO: 826755 - DNA, 120 bp, Artificial Sequence
  ENSG00000287514_57 (sequence is synthesized)
acgggcagaggtagtgttgatgggtgaagagcaggtcccagctgggactgctctcaggatctgggggtctccttcttctcaaatggtgtcatggactaaattgtgtcacccccacattta

SEQ ID NO: 826756 - DNA, 120 bp, Artificial Sequence
  ENSG00000287514_58 (sequence is synthesized)
tatgttgaagtcctaaccctcagtaccttagaatgtgactgtatttggagactgggtctttgagaggtaatgaagttaaaatgaggtctttagggtgggccctaatccagggtgactgat

SEQ ID NO: 826757 - DNA, 120 bp, Artificial Sequence
  ENSG00000287514_59 (sequence is synthesized)
gcctgtgtaagaagagattaggacacagacgcatccagagggaaggaggtgtgaagacacagagagaaggctgagaagtaaccaaccctgcctgacaccttcatcttggacttccagccc

SEQ ID NO: 826758 - DNA, 120 bp, Artificial Sequence
  ENSG00000287514_60 (sequence is synthesized)
cagaatttcgagaaaataaattgtttcggccacccagtgtgtgttcctgtgctctgtaccctaacagactcacacaggcaggttctttgctaaacgtcctcagagctggtctgtagtgga

SEQ ID NO: 826759 - DNA, 120 bp, Artificial Sequence
  ENSG00000287514_61 (sequence is synthesized)
gcttgcagaggcccccatcacgatctgctgggaagaccaagcaaggagagcaacgtcaacttttaaaaattatcttcaaattgtgtgtaatgcacgtgcactgaagaaaaatcaggacat

SEQ ID NO: 826760 - DNA, 120 bp, Artificial Sequence
  ENSG00000287514_62 (sequence is synthesized)
gcaggtggcaggtggcgccggcacttagccaccaagggtggaggagggccttcaggaggaggaaactagcggcgagcagggggtcagaggagcatataagagagtacgaattccatctgc

SEQ ID NO: 826761 - DNA, 120 bp, Artificial Sequence
  ENSG00000287513_0 (sequence is synthesized)
ggcaccttccgctggtcggcgtggacgcgcgtcgcgggatagcctgggggccagggccgcagggtagcctcgatggctcttcacacccccacctccctgcacccaccttgaaagcttcgt

SEQ ID NO: 826762 - DNA, 120 bp, Artificial Sequence
  ENSG00000287513_1 (sequence is synthesized)
gtccactcacccattcatgcactcacttatacattcatttattcctaagtatttatgagcgcctgcgcccaccacgtgctggcaagaattgggtttctccccttcctgggaagctgtaat

SEQ ID NO: 826763 - DNA, 120 bp, Artificial Sequence
  ENSG00000287513_2 (sequence is synthesized)
aacccacaaccagcctacgaagcccatcccgcgtcatacactcaatgtaaacaaaagcaaagaaaacattgaagagctcggggtagtcttaccggaaaactgagaagaaaaacaacaaat

SEQ ID NO: 826764 - DNA, 120 bp, Artificial Sequence
  ENSG00000287513_3 (sequence is synthesized)
tgatagacaggtgcctgcctaactacctgactgctagaggacacatgtcccagggctgatacaagagcctgccacccttggagagtctgggatgaaaactctctgaaaatggcattccaa

SEQ ID NO: 826765 - DNA, 120 bp, Artificial Sequence
  ENSG00000287513_4 (sequence is synthesized)
tggaactgactttaagccctgggctggaccccaaggccttccaataccgtccttcctgtgcttgaaagcgtgggtagatctttccggtcactgaggcctgctaaagtccttcacaggcag

SEQ ID NO: 826766 - DNA, 120 bp, Artificial Sequence
  ENSG00000287513_5 (sequence is synthesized)
ctcctgtagtgatgagaatatagtacaagtcaaatataggttgtgaacgtcatcacactctgcaagagctgcttctgcctttgtggttgcacaatccctaaggaggccctacaagaagat

SEQ ID NO: 826767 - DNA, 120 bp, Artificial Sequence
  ENSG00000287513_6 (sequence is synthesized)
cacagtccccagccacacctgcagcctgtcctggacactggtgacgaacacagggtttgtgcaagctaaagaaactgctctccatacgggcgtgcctcacctctgtttgaaagatcagta

SEQ ID NO: 826768 - DNA, 120 bp, Artificial Sequence
  ENSG00000287513_7 (sequence is synthesized)
gggaatgactagcttggatcaatccacattctgaattccctggagagaggatctaataggctggcagcagctctccaccctggtgcactgagcaatagctaaggggcagtgtgctctgcc

SEQ ID NO: 826769 - DNA, 120 bp, Artificial Sequence
  ENSG00000287513_8 (sequence is synthesized)
tttgacaccttgattttccttcaaggcttctgctctggactcgccatctgtgagacttcctacccacccaccccttaaaaaacacacacacacttttaattgttaattttagatttgtac

SEQ ID NO: 826770 - DNA, 120 bp, Artificial Sequence
  ENSG00000287513_9 (sequence is synthesized)
aaccactgaacaaaacataactatttaacaagttctatatgtttaatgtcgaaagtgttttctgtgtctagtctacagtaagttctcaataaatagtaatttgaatgaatgaataaagaa

SEQ ID NO: 826771 - DNA, 120 bp, Artificial Sequence
  ENSG00000287512_0 (sequence is synthesized)
gctgggattacaagcgtgagccactgcgtctggcctccactcttttgaaaatctttaccaagggatgtcttggttctctttcaatggcggagacagcatatgtgtttgtgcattacttga

SEQ ID NO: 826772 - DNA, 120 bp, Artificial Sequence
  ENSG00000287512_1 (sequence is synthesized)
tgcattacttgaagatcttccactctaccagatgaaactgggaaaggacaatgtaccaaagagtatccaagcacagaagggaatctcagtttgaagttagaattgaatccaagaggaaga

SEQ ID NO: 826773 - DNA, 120 bp, Artificial Sequence
  ENSG00000287512_2 (sequence is synthesized)
gaagcatccttccttcagtgcctttgtggtggtgcttggtgagagatagtggtgaaggcattgcctaaagagagaggcactaacaggcagaggagtggttgagaccagtaagaactgccc

SEQ ID NO: 826774 - DNA, 120 bp, Artificial Sequence
  ENSG00000287512_3 (sequence is synthesized)
tgcctggtggagcagaggcagaagctgatgcccaggctctgcagcatctatagggaacttggtgcctgcagtgctcatcaaatgatccagaggcctccttgaacactgcaaaacccagaa

SEQ ID NO: 826775 - DNA, 120 bp, Artificial Sequence
  ENSG00000287512_4 (sequence is synthesized)
gtgtttgtgagcatatgtgagacacccactgaagatgcctaaaaacacctctagaaactgacattttaaaaggagactgaagtcctgcattatgcaggtgctgtgagcctgtgactattg

SEQ ID NO: 826776 - DNA, 120 bp, Artificial Sequence
  ENSG00000287512_5 (sequence is synthesized)
gactattgggttattccacttaatgtgacttacttgtatctacaagctagtggaagctgggtgccatagttcagatatttttcccccaaaacctcatgttgaaatttgatccccagtgtt

SEQ ID NO: 826777 - DNA, 120 bp, Artificial Sequence
  ENSG00000287512_6 (sequence is synthesized)
ggcctaatggaaaatatctgagtcatggaggtggatgctttatgaatggattaacctcctcactgtgggggtggtgagttcttactctcttagttcccatgaaagctggttgttaaaaag

SEQ ID NO: 826778 - DNA, 120 bp, Artificial Sequence
  ENSG00000287511_0 (sequence is synthesized)
ggtgacgggcagtgacccttgcaggagtcttgtattgcacatccttctcagtttaccaggaacaatggatctacttaatctgtttcaattccagagatgttcagcttgatgagggcacac

SEQ ID NO: 826779 - DNA, 120 bp, Artificial Sequence
  ENSG00000287511_1 (sequence is synthesized)
gtagaaaccaagcaactttgggtcacaagggccgctgcttctgggtcacagcccaagggaggcatgccatgggctccctggcctgcttccattgcctgctggctaagcgatgcagagaac

SEQ ID NO: 826780 - DNA, 120 bp, Artificial Sequence
  ENSG00000287511_2 (sequence is synthesized)
tacagcagctgcctcagacccagaggctaagccaagtgttcaggatggcagagccattggaccagctgtggactctatgcctctgaagatgtactcaagaaataaactggattacgttta

SEQ ID NO: 826781 - DNA, 120 bp, Artificial Sequence
  ENSG00000287510_0 (sequence is synthesized)
acttgcagccacgctgagcagctcgccccagctcctctccccaatgccatagagtctttgcgtgtcctgctacctagacctagagcacccttcccattctgcttactgctgccttctcat

SEQ ID NO: 826782 - DNA, 120 bp, Artificial Sequence
  ENSG00000287510_1 (sequence is synthesized)
ccttcagactccacttggtgacagcctccaagaggctttctctggccctcaggccacgtctgaggtcccctaggctttccctatcgtggcagcccttttgcagatctgtccctcctaccg

SEQ ID NO: 826783 - DNA, 120 bp, Artificial Sequence
  ENSG00000287510_2 (sequence is synthesized)
cagactggggggaactggaggcgagtctcatctgttgaggtcttccccagtgtccagagcaggacccagccccaggggagtggagtgcacgcctgattagggagacatcagggtgcatca

SEQ ID NO: 826784 - DNA, 120 bp, Artificial Sequence
  ENSG00000287510_3 (sequence is synthesized)
tcttgggctgtggttcatgatcagacagcattgggtcaggaccacccctcgctcagcatggcccatgggaggagtttctggatggagcaactagggctgaatttttgcttgaccacaagc

SEQ ID NO: 826785 - DNA, 120 bp, Artificial Sequence
  ENSG00000287510_4 (sequence is synthesized)
gttatgcagccacactgaccacagagcaactgaataggtgagcattggattgttgatgacaactcttcagcagaacaattgtgtgtttgaagggactgttttatgatgaaataactgtta

SEQ ID NO: 826786 - DNA, 120 bp, Artificial Sequence
  ENSG00000287510_5 (sequence is synthesized)
tttcctggagctaattgttgaatgacagtttgtcaactgtttaaatgaatttcatttgaattaacaattatacagccactcagaggtcctacattcgccagagttggcatccagttgatg

SEQ ID NO: 826787 - DNA, 120 bp, Artificial Sequence
  ENSG00000287510_6 (sequence is synthesized)
ggttcatttgaattaaatggtttggaggctaacgtgattttttaaattgaatttcatcactattctgtgtattctatttatcactattctaaatgactcatggttggctaattgattatc

SEQ ID NO: 826788 - DNA, 120 bp, Artificial Sequence
  ENSG00000287510_7 (sequence is synthesized)
atgtaagcaagctatttgaagaaattgattacatatatttatatatagggggtaactaattaatgattacttgattaaattgctatgtgaactgacaactatttataaatcaatgcaata

SEQ ID NO: 826789 - DNA, 120 bp, Artificial Sequence
  ENSG00000230864_0 (sequence is synthesized)
tgaccacccggaactggcgctggcccgagcgctgcgcgcagccccggttcccgcctgcgtctctcccgccacacctcccctcaagcagagggagccggttccgacctaggcctgcccaga

SEQ ID NO: 826790 - DNA, 120 bp, Artificial Sequence
  ENSG00000230864_1 (sequence is synthesized)
gaggggccccttcagcgcagtggtgggctgaagagctccttgagcatggccagagtgaacgcccatgccgaggaggcgctgagagcgagggagggctgctagcacgttgtcacctctcag

SEQ ID NO: 826791 - DNA, 120 bp, Artificial Sequence
  ENSG00000230864_2 (sequence is synthesized)
aaggacatgaggaaaatatcttcctacaatgccccatgttccatctctgttgatgtttggttggagtaatgtagatggtcaccaaatatgttgcactattgattttcaacggaagagctc

SEQ ID NO: 826792 - DNA, 120 bp, Artificial Sequence
  ENSG00000230864_3 (sequence is synthesized)
actgcagcttgctggagcggaaacccacaagcaaaagcaacacggggaaccaacattgagcttttctacagcaaaggatcgttgaaagttttataggccaggcactgtggcttatgcctg

SEQ ID NO: 826793 - DNA, 120 bp, Artificial Sequence
  ENSG00000230864_4 (sequence is synthesized)
tgataccagcgctctgggaggccaaagcaggaggatcgcttgaccccgggagttggtgaccagcctaggcaacaagttacatcaacagctgccaagtgtcttccaccaatcaaccttgac

SEQ ID NO: 826794 - DNA, 120 bp, Artificial Sequence
  ENSG00000230864_5 (sequence is synthesized)
ctacaattagaactcttcagttttgtagtggaaaaataaggacattcaaatttcagaatacatccttcgaagaataggatgtgccaggatcaattgctaagctgaaaagctagcagtgac

SEQ ID NO: 826795 - DNA, 120 bp, Artificial Sequence
  ENSG00000230864_6 (sequence is synthesized)
caaagaacaccaacaaagaaacccagcctccaaaagagaaaagtcattctgacataacagctacagaactgacaagtgttaaggacaaacatattaaaatttttatgctttcagagtcta

SEQ ID NO: 826796 - DNA, 120 bp, Artificial Sequence
  ENSG00000230866_0 (sequence is synthesized)
ggcgctgtggagccgcgcagggtctagggcgactctctgagggagccgcggccgccaggctccgtgggttttggttcaggcgccggtgtgcccaaggatgttgtagaactctgtctagcc

SEQ ID NO: 826797 - DNA, 120 bp, Artificial Sequence
  ENSG00000230866_1 (sequence is synthesized)
acagtgtggggatggggagctcccgccgacagactctgttgctttctggcttggccgctggttgtcccttgctcctggaaggtcaccatattgatgccaaactcagtgtggatgcccaat

SEQ ID NO: 826798 - DNA, 120 bp, Artificial Sequence
  ENSG00000230866_2 (sequence is synthesized)
tggtagagtgcactacagcccagaactcatggactcaagtcagcctcccaagtccctgggactacagattcctgaatgatccggcggcatggcagaggtggtgcctactgatatggctcc

SEQ ID NO: 826799 - DNA, 120 bp, Artificial Sequence
  ENSG00000230866_3 (sequence is synthesized)
gatgactggaggaacaccagggtccttggtcttgcgccaatgtagcccccacagaggcaaagatcggagtgatatggtacaagccaaggcatgctggcagccactagaagctggcaagga

SEQ ID NO: 826800 - DNA, 120 bp, Artificial Sequence
  ENSG00000230866_4 (sequence is synthesized)
aggattgtcccccagaacctcagtagtgtggttctgctaacaccttgctttcagcccagtgaaactgatttcatacttttgccttccagaactataagagaataaatttctattgtctta

SEQ ID NO: 826801 - DNA, 120 bp, Artificial Sequence
  ENSG00000230866_5 (sequence is synthesized)
agattataatggagctgaaaaattcctgacattgtagctgttgtagtatggcagcacgacacatttctcacatgtttgcagtgatgatggtggtgtaaacaaacctattgtactgccaga

SEQ ID NO: 826802 - DNA, 120 bp, Artificial Sequence
  ENSG00000230866_6 (sequence is synthesized)
aaacaaacctattgtactgccagacgtataaaagtattagaaaaatgtggaaccagcccaaatgcccatcaaccaacgagtgtataaagaaattgtggtatatatatatatatatgatgg

SEQ ID NO: 826803 - DNA, 120 bp, Artificial Sequence
  ENSG00000230866_7 (sequence is synthesized)
gctatgagaatgcaaaggcataagaaagatacaatggactttggggacacaggggaaagacggggagaggggtgagcaataaaatactacaaattgggttcagtgtatacagctcgggtg

SEQ ID NO: 826804 - DNA, 120 bp, Artificial Sequence
  ENSG00000230866_8 (sequence is synthesized)
cagtgtatacagctcgggtgatgggtgtaccaaaatctcacaaatcaccaataaaaaacatactcgtgtaaccaaataccacctattcttcaaaaaaccatggaaataaaaaataaaaaa

SEQ ID NO: 826805 - DNA, 120 bp, Artificial Sequence
  ENSG00000230866_9 (sequence is synthesized)
tctctgagggagccgcggccgccaggctccgtgggttttggttcaggcgccggtcacttcacccaggcctcggtgtcatcacggacagctttcagaaaggggagacagcctggacatggt

SEQ ID NO: 826806 - DNA, 120 bp, Artificial Sequence
  ENSG00000230866_10 (sequence is synthesized)
ccaggggttcaagaccagcctgggcaacgtagtgtgcccaaggatgttgtagaactctgtctagccacagtgtggggatggggagctcccgccgacagactctgttgctttctggcttgg

SEQ ID NO: 826807 - DNA, 120 bp, Artificial Sequence
  ENSG00000249122_0 (sequence is synthesized)
agtaatggattaaacggggacagcggtcccccagccttgtgcttctttgcaggatggtggctgcttggttagcctgagttccagagtgaggacatcatgaagtaaagatctcagctgacc

SEQ ID NO: 826808 - DNA, 120 bp, Artificial Sequence
  ENSG00000249122_1 (sequence is synthesized)
cacaatggacatatatttccttagagtctcagggaaggcttctggaagaggtgtattttcaagtgaagataccgagagcccagtatcacagaggaagaaagtactggtggtgacacagca

SEQ ID NO: 826809 - DNA, 120 bp, Artificial Sequence
  ENSG00000249122_2 (sequence is synthesized)
tccacccacaagaaagctgccttggtcctggtactcaagggctctatgttgcctccatcatatccagaattaactccaataacatgttcttgcattcttcgtcagcacagcaagggagct

SEQ ID NO: 826810 - DNA, 120 bp, Artificial Sequence
  ENSG00000249122_3 (sequence is synthesized)
aactgaaaggcatgtcgggaacactggaatcattcaatgtcttaaactactcagccttgaaatacatataaaaatgagttagaattcaaaaactttaaaaatatttctttttctgggctt

SEQ ID NO: 826811 - DNA, 120 bp, Artificial Sequence
  ENSG00000282728_0 (sequence is synthesized)
tggactccccttttctcctcccccgtctccaggaggagggaaaagggaaggaggagggggtttcgggaatataggggcagagggaggagaaagtgggtgttgaatgtggctggaccggag

SEQ ID NO: 826812 - DNA, 120 bp, Artificial Sequence
  ENSG00000282728_1 (sequence is synthesized)
ggatctccacctcctgggtcgggggcgggggagggcggcgctggtcagctcctgcccttggcctccatcctgtcgtcaggggaactgtggctgtcgtttgtcccagcgagcggcaagtgg

SEQ ID NO: 826813 - DNA, 120 bp, Artificial Sequence
  ENSG00000282728_2 (sequence is synthesized)
ggagcgcaagaaaaagtagtaattgttaggagatctcgtctcctaactcggggagttctccaagagagttctccaacttctgtccgaggactggagacgcagagtactcacaagtccggc

SEQ ID NO: 826814 - DNA, 120 bp, Artificial Sequence
  ENSG00000282728_3 (sequence is synthesized)
acttgagtggctgcggctgcgacggcaatttagtgacacgcggctcctttatctcccgactttttctctggcatcaaactcgtgcatgctgtgaagctctcagtccctcgctgagttcca

SEQ ID NO: 826815 - DNA, 120 bp, Artificial Sequence
  ENSG00000282728_4 (sequence is synthesized)
ctgccccctcactaaaaccctggggctagtcggacctctcggtacagcccattcccaggaagggtcggacttctgctggctccgtactgcgggcgacagtcatctccgaagatctcagat

SEQ ID NO: 826816 - DNA, 120 bp, Artificial Sequence
  ENSG00000282728_5 (sequence is synthesized)
cccagtagtgcgggagcactagccgcctcgggttgtagatttcactcaaatgacaagtgaagctagttctcattgagaatgccacccacacgcacaaatacaacaaggcttaccccgatt

SEQ ID NO: 826817 - DNA, 120 bp, Artificial Sequence
  ENSG00000282728_6 (sequence is synthesized)
agctgtgctaatgactcatagtttatctcaaccatgtataaagaatgcagaagactccagaaggtgggggagccactagaggattccatccaggacaccacatttaattgttatgatgtc

SEQ ID NO: 826818 - DNA, 120 bp, Artificial Sequence
  ENSG00000282728_7 (sequence is synthesized)
ttgtgctcctcttggctgtgagagtttctcagattttccttgtatttgatgaccttgacagtccttaggagtactgagatgggggtttcacgatattgcccaggctggtcccaaactcct

SEQ ID NO: 826819 - DNA, 120 bp, Artificial Sequence
  ENSG00000282728_8 (sequence is synthesized)
ggcctcaagctatcctcctgccttgacgttcgaaagcactgagattttcctctctgtcctgccgccatgtgaagaaagatgtgtttgcttccccttccaccgtgattgtaattttcctgc

SEQ ID NO: 826820 - DNA, 120 bp, Artificial Sequence
  ENSG00000282728_9 (sequence is synthesized)
agcctccccagccaagctgaactgcaatgaggaagcaataaaggactctgagcaagagaacgatgtatataggccattgttttggaagattcatcacaaattcatgtgcaagtagattgg

SEQ ID NO: 826821 - DNA, 120 bp, Artificial Sequence
  ENSG00000282728_10 (sequence is synthesized)
aggaaggaagtatcaacagaaagaaaggccaattatgagaccattgcaatactatatgatgagagcatcagagacaataaccaaggtcttatagataccaagtgaggaatctgggattag

SEQ ID NO: 826822 - DNA, 120 bp, Artificial Sequence
  ENSG00000282728_11 (sequence is synthesized)
aagtcagtctatttcattggaaaggctgttttcagtctttttcactggaaaagttgtcatcctgtgtctttcttatagtacatatattacagtaataaaactttattttccttttcaaaa

SEQ ID NO: 826823 - DNA, 120 bp, Artificial Sequence
  ENSG00000282728_12 (sequence is synthesized)
tctaagccggtcttacccaccagtggctgaaaagctttggaagatgaagatgatctggccaaaagagaagatgagttcatggacctaggggatatgtgacctgtttattgagtgattgtg

SEQ ID NO: 826824 - DNA, 120 bp, Artificial Sequence
  ENSG00000282728_13 (sequence is synthesized)
aaagaggaatgtgggagattgggacagctgatccccggattcatgtcacgctgcagctaatgctggctggatccttagcctggcactctgttggaataaacctgggtctttgggaaaaga

SEQ ID NO: 826825 - DNA, 120 bp, Artificial Sequence
  ENSG00000262766_0 (sequence is synthesized)
gttgaccttgaattatgccgagcgacgcctacaaacccaccgctcaggccttcaccaggattgttcccattccacttccttgcccagtcttaggcttcattcctttttcttgctaacgct

SEQ ID NO: 826826 - DNA, 120 bp, Artificial Sequence
  ENSG00000262766_1 (sequence is synthesized)
gcttcctcaccctctcttgtctctgcgtcttctttttccatttgtccctggcagccatccgcagagagaagaccttccagaaacaacaggcttccctttcctaaagttctgctgccttct

SEQ ID NO: 826827 - DNA, 120 bp, Artificial Sequence
  ENSG00000262766_2 (sequence is synthesized)
tctagccaacactaggaaagggcattgccaggccagaacacactgtgccctctgaagaccacacgccctttaccacctgtgccctttgcttggaatgctttttcttccctttctccttgt

SEQ ID NO: 826828 - DNA, 120 bp, Artificial Sequence
  ENSG00000262766_3 (sequence is synthesized)
ttgcctgcctagctcctactcatcctcttagcttcatatcctttgtgatgtcatccttgattccccttcaggcaaacacttcttgtgattcatcactgtgtcctctgtacccggcaacaa

SEQ ID NO: 826829 - DNA, 120 bp, Artificial Sequence
  ENSG00000262769_0 (sequence is synthesized)
cggaagggactagaccttccgcaatgagttcctgccagaccttggaccttaacttgcttctgacacagactttgctagaagcttccagagcagggctgagcacctacagatgactggaga

SEQ ID NO: 826830 - DNA, 120 bp, Artificial Sequence
  ENSG00000262769_1 (sequence is synthesized)
acaccaaaggcaggccaggtgggaatggatggcgggaaaagccctgtgaatctcaaggcaccacacagggcacagagggagaccccaggtaacatgcacatggtcaaaaaatggaacaat

SEQ ID NO: 826831 - DNA, 120 bp, Artificial Sequence
  ENSG00000262769_2 (sequence is synthesized)
atgaacaagatagtaagcaaagtcttactgcaatgcccttccagtttgccccagtaccagccctgcctcctccagatttcacatttcaagaaaatcctagcactcaccggtcggtagtaa

SEQ ID NO: 826832 - DNA, 120 bp, Artificial Sequence
  ENSG00000262769_3 (sequence is synthesized)
cacgtgatccttacagcttaacagcaggacactgaaggctacagcaaagagcactgaaggtaaaaacggcagaagaaacaacacagtgaacaagaagatccacaggaagtggaggagcct

SEQ ID NO: 826833 - DNA, 120 bp, Artificial Sequence
  ENSG00000262769_4 (sequence is synthesized)
gggttttgcatgcagagactgcaccaagagcctcgggtaaaggggtctcagcacctgtaatcagcagggaaacggtagaggacttccgtgcctgctccatgtctccagcacccagagcgt

SEQ ID NO: 826834 - DNA, 120 bp, Artificial Sequence
  ENSG00000262769_5 (sequence is synthesized)
ttcctacccggacactggcagccacactgaagcctgcagggacctaaaataaaaaggaaacctgcaacaatgagtgagaaactgcagagcgagaacacgtgcagagaagcagcctcatgc

SEQ ID NO: 826835 - DNA, 120 bp, Artificial Sequence
  ENSG00000262768_0 (sequence is synthesized)
ggcgtgcgccgcctctgcagtaaataagatgaggaaagcgaggcaccgcggggccaagtcacttgctcaggggcacgcagcaggggttctgcctgagaagccgtaagctcacgtccctaa

SEQ ID NO: 826836 - DNA, 120 bp, Artificial Sequence
  ENSG00000262768_1 (sequence is synthesized)
agctccgcagcaggggctttggatccttgtgaatttcagctcctccaaggcttgaggaaagaattcaagaaaggtccagtggagcctcgtggaagcgcagagcagtgctccagcaggagg

SEQ ID NO: 826837 - DNA, 120 bp, Artificial Sequence
  ENSG00000262768_2 (sequence is synthesized)
gagccctcggcaacaaggatgagactggaacaatagagacaggagggagttctaggggccgatttaagtcaactggaagctggatgttggtgggcgttttcgcttttttttttttttaat

SEQ ID NO: 826838 - DNA, 120 bp, Artificial Sequence
  ENSG00000262768_3 (sequence is synthesized)
gctagagcacagtggctaaaaaaggtgggctctggggccagcctgcctgggttccaatgcacttgctggctgtgtgcccttgtgcaagttacttaacctctctgtgtttcagcttccata

SEQ ID NO: 826839 - DNA, 120 bp, Artificial Sequence
  ENSG00000262768_4 (sequence is synthesized)
actataagaaaaggaatattagcacgttttcccaacagagcccatggggggttcaatgagatatggaagcacccccacactgtcaggcacaggcaaatgctcaataaatgttcattatta

SEQ ID NO: 826840 - DNA, 120 bp, Artificial Sequence
  ENSG00000260619_0 (sequence is synthesized)
taggcatgagccaccatgcccagccaggaaaacacaattttaattattatgtttaactctgtgagtatgctcttctgcccaaaaataatggtggtgaccaggaatggacacctgcctcag

SEQ ID NO: 826841 - DNA, 120 bp, Artificial Sequence
  ENSG00000260619_1 (sequence is synthesized)
aaaaataatggtggtgaccaggaatggacacctgcctcagactgggccagtcacattctctactgaaaatctgaaattccaacaaaaggcaacgagttagttgctaccaatatttagcaa

SEQ ID NO: 826842 - DNA, 120 bp, Artificial Sequence
  ENSG00000260619_2 (sequence is synthesized)
ctacaatgaatgattcgtgtctatgtaattaaattttttaagtgagtaaatttaggggctggtaaaacccaggaagtatgcagtacgtctattcttacattggattaaaaagcaacaaaa

SEQ ID NO: 826843 - DNA, 120 bp, Artificial Sequence
  ENSG00000260619_3 (sequence is synthesized)
gtgcaaaatggtaaatactcattacctctctcagcccatccccaggcctctcctcctatgccttcccatgagtcagtcattagagggttaatgtttggcacaatggtgactgtacccatc

SEQ ID NO: 826844 - DNA, 120 bp, Artificial Sequence
  ENSG00000260619_4 (sequence is synthesized)
agctcatctgcctcagttctgattaactggtaattgtgctactccagtttttcaacattttgaatattacccccgcctgcttccaaatagtactagaaagtcttgcttcaccctcctctg

SEQ ID NO: 826845 - DNA, 120 bp, Artificial Sequence
  ENSG00000260619_5 (sequence is synthesized)
ttgtggaatgatgcatgccaggatgagctcaggttaagacactaattagatctgagattcaactttaccatccacagtcactgaatcacttagaggtggggttagtattaaccccagagc

SEQ ID NO: 826846 - DNA, 120 bp, Artificial Sequence
  ENSG00000260619_6 (sequence is synthesized)
actgaagagacttgtggcttcacttaggccatgagcacacaatctttcacatctgtcctctccagtctacactgcaccacctggtacctggcacagactcttgtcccatctgagtgctcc

SEQ ID NO: 826847 - DNA, 120 bp, Artificial Sequence
  ENSG00000260619_7 (sequence is synthesized)
tcgctccagacttttcaatgcattttccatttggctcccaatttaaccatcctgagtgcctcactgattaacctagatggtgctgtggcggaagaaggactccaagaagactggaccttg

SEQ ID NO: 826848 - DNA, 120 bp, Artificial Sequence
  ENSG00000260619_8 (sequence is synthesized)
ttatccagtacacctcggcttagattcttgccttgccgctgcactagctgtgcagcctcagacaaattgtgtaattgtaaaaccaggatttcctcttatttaaattggagagattatcat

SEQ ID NO: 826849 - DNA, 120 bp, Artificial Sequence
  ENSG00000260619_9 (sequence is synthesized)
catcatcacatcatccctttgggcccggatctcctgtaatctgcatgaaatttactgcatattgtttatctgctctgccagagtaaggatattgttatattcatttttgcatcagtgcct

SEQ ID NO: 826850 - DNA, 120 bp, Artificial Sequence
  ENSG00000260619_10 (sequence is synthesized)
aatggaatcaagttccaaacactaaagtaagtttcaaatatccaaatgttgaaaatgcaattgatccagatgttttcatatcagtggattatatgccgaattgatttcctccttagagga

SEQ ID NO: 826851 - DNA, 120 bp, Artificial Sequence
  ENSG00000260619_11 (sequence is synthesized)
aagtcagtagccctgaaactttctacacattcccaacaatttctgtaaaactttcaatgatcttattctctataactagatatgtgggccaagaatcccaacacgtttgccccttaactt

SEQ ID NO: 826852 - DNA, 120 bp, Artificial Sequence
  ENSG00000260619_12 (sequence is synthesized)
tgaagctggcaatatgaattaccagggtgacccctcccagtagagcacatgatcagccacagctgtgcatgttttttagtatgactgcactaggatagggctccaagccactgggtggag

SEQ ID NO: 826853 - DNA, 120 bp, Artificial Sequence
  ENSG00000260619_13 (sequence is synthesized)
caatgtgctctggggagaaagctcatgacatttcccctatgatttcacaaaagaaaaaatctttttcttatgagttgtttctgctcaacgtcaataggaaaggtcatagcttagcgtgtt

SEQ ID NO: 826854 - DNA, 120 bp, Artificial Sequence
  ENSG00000260619_14 (sequence is synthesized)
tacatacagatgcatgcatgaatatgtagaatatcagccactcctacggtgtgagagaatttaaattgcactggtcctaagagtgaaggaaagcaggcgtagttgcctactcaacctcca

SEQ ID NO: 826855 - DNA, 120 bp, Artificial Sequence
  ENSG00000260619_15 (sequence is synthesized)
ctttattcttttccctttataacaatcctaatttcatttgagatgacaatgtatacagctagaagacaatttctcagcctcccttggagagctaggttccagccaatgagatgtaaacag

SEQ ID NO: 826856 - DNA, 120 bp, Artificial Sequence
  ENSG00000260619_16 (sequence is synthesized)
aaatgtatgcaatgttcaagtaggctgcttaaaagaagttgactccacttgaaaggtgtgcttggtttggcctgccttctcccttcctctggttgaatgtcatcttgatgactggagctc

SEQ ID NO: 826857 - DNA, 120 bp, Artificial Sequence
  ENSG00000260619_17 (sequence is synthesized)
caggagccatcctggaatttctgaccttgagggtggaagccacaggctaatatgatagaaggatgaggaagaggctgagtaccagatggctgagaagccactataccagccctagtttcg

SEQ ID NO: 826858 - DNA, 120 bp, Artificial Sequence
  ENSG00000260619_18 (sequence is synthesized)
agtttacactgcttctgtgaaagaaaagtcaatcacaataaaaccttttatcttgtttaaaccaccttaaaaagtcagttttcttttatatgcagcctactaatcctatccaaacaaggc

SEQ ID NO: 826859 - DNA, 120 bp, Artificial Sequence
  ENSG00000260619_19 (sequence is synthesized)
ttgaataaggtttactacagctcttttttgttgtaatagcagaaaaattggtaataaatgcccatcaataggaaaataaactattaatttaacaataccaaataaaactgtgcagcagta

SEQ ID NO: 826860 - DNA, 120 bp, Artificial Sequence
  ENSG00000260618_0 (sequence is synthesized)
gaataaggagatgaagtagtgtctccctccattcaatcctcaaacaattgagagaggaaattcacctttatcatctgagtgtagcaaacaccaagaacagaatacattttgaatgagagg

SEQ ID NO: 826861 - DNA, 120 bp, Artificial Sequence
  ENSG00000260618_1 (sequence is synthesized)
aagagactggaaaatcaactcagggaaaacaagtgagatactgaacaccaaaaatcctgggatgaatggtgatttctatgagcaaagcccagagattgttaactgaataaacaggtacag

SEQ ID NO: 826862 - DNA, 120 bp, Artificial Sequence
  ENSG00000260618_2 (sequence is synthesized)
gtcgtaggaatgtctgatgattggctggcatatctcgtaaatcatatatcacaacaaacatcttcaccacagtcttattaggattaaataagattcaactacaaaaataaagagaatatt

SEQ ID NO: 826863 - DNA, 120 bp, Artificial Sequence
  ENSG00000260618_3 (sequence is synthesized)
ccctgaggaacaaaattaattcatagcaggaaagactggaactgggtcacttgcaaaaagaatgcattcctgaatgtcaaattcactaagcagaggaaatatcttctgtaatttactgaa

SEQ ID NO: 826864 - DNA, 120 bp, Artificial Sequence
  ENSG00000260618_4 (sequence is synthesized)
gaaaacatcaaattcattataaataagacctatgggttggatagtctcagaacatctctatttcttaagtcacttggaaaatgtatgtatatctgcacaaatagaatcgtctgaaaaaaa

SEQ ID NO: 826865 - DNA, 120 bp, Artificial Sequence
  ENSG00000260618_5 (sequence is synthesized)
aacatcttcaccacagtcttattaggattaaataaggtcaaagttgttgcagcagcagtagcaggagaaagggctaagttctatatgtatgtgagagaatgattattgcaattgtaggct

SEQ ID NO: 826866 - DNA, 120 bp, Artificial Sequence
  ENSG00000260618_6 (sequence is synthesized)
ataaaacacataccacttgtattgttcctgaaggaggtactcgataaccccttttaccaagggactctaaagtaatcacacccttgaaataaaagaagacaaattgagtacaaactgatg

SEQ ID NO: 826867 - DNA, 120 bp, Artificial Sequence
  ENSG00000260618_7 (sequence is synthesized)
atgtaatttattaaaatttcagaattctatttctatggaaaaacattcatattgaattaatagagatacattctatgtttctacccctaaggaaacattttactgttcctcctggtgatg

SEQ ID NO: 826868 - DNA, 120 bp, Artificial Sequence
  ENSG00000260618_8 (sequence is synthesized)
tcgctataaagaatatataacatcaatggccacagcactcaaaattactattaagatataggaataaaagaaagaagttcctaactaaaaaggaaataaaggaaggtaataggacccttc

SEQ ID NO: 826869 - DNA, 120 bp, Artificial Sequence
  ENSG00000260618_9 (sequence is synthesized)
ccatgtatcttgagggagaggggaaatgaagaagcaagtaatttattggtcttcgggcatgtaaaaagtcacaagtgtaggaaagtaagccttggccaaaaataaagtcaattcttcagt

SEQ ID NO: 826870 - DNA, 62 bp, Artificial Sequence
  ENSG00000263494_0 (sequence is synthesized)
aatgggttttgagataaaaatctgtcttgtcatcctcctgaggtggagcagattgcattttc

SEQ ID NO: 826871 - DNA, 120 bp, Artificial Sequence
  ENSG00000260613_0 (sequence is synthesized)
ggggaggagaggaggccctaggcctggacccccttgcaccactttgggtcaggagatactgggcctggactgccttccactgccgggcggggatgggaggctccaggcggccgcgctttt

SEQ ID NO: 826872 - DNA, 120 bp, Artificial Sequence
  ENSG00000260613_1 (sequence is synthesized)
tccagtccgcggtccccaccggccggttcccctcttccccccacttcgaggcctgcaattgtctgctgtactggctcccagtgctgaaagctattatgagaaataccactgcgatgagtc

SEQ ID NO: 826873 - DNA, 120 bp, Artificial Sequence
  ENSG00000260613_2 (sequence is synthesized)
ttcacatacaagtgtcaggtgcaccatttgacggtcccaccagcagcatgagagagttccagtgtctccacatcctcgtcaacactcactacctgactttttgggtctagctctccaggc

SEQ ID NO: 826874 - DNA, 120 bp, Artificial Sequence
  ENSG00000260613_3 (sequence is synthesized)
gttccagtgtctgccatggctcttggcctgccaggaagtatccttcttactacttgtgaggctgaggctttgtgtgccagagtacaggtgcccggccagtatgggtctgagggttgtgtg

SEQ ID NO: 826875 - DNA, 120 bp, Artificial Sequence
  ENSG00000260613_4 (sequence is synthesized)
ggcattggttcagcacacaagccacaacccttgttccttaaaggtgggcgtgttgtggaagcacaggaaagttattctcaaatatgacacccatgtaaggcctgggctccactattaatt

SEQ ID NO: 826876 - DNA, 120 bp, Artificial Sequence
  ENSG00000260613_5 (sequence is synthesized)
tgtctgattatatcctggtgacaaggaggacaaatttctactgcaacaatgcaaattactacgtttttattaaaagtaaatgtcagtaaaactatttttcctgaattctgaagtgagaaa

SEQ ID NO: 826877 - DNA, 120 bp, Artificial Sequence
  ENSG00000260613_6 (sequence is synthesized)
aacaccatttaaagaacgttttaatgtttgtgaaaggatagtctcctaaagtagattgttgcagataccgggtaaaaataaaaattaaataaattaaaggtgagatagatcaaagaagaa

SEQ ID NO: 826878 - DNA, 120 bp, Artificial Sequence
  ENSG00000260613_7 (sequence is synthesized)
gctttcagcctgcagatataaccattctggagagcagtgatgcccccagaaccgcatttttggctggtgcaaaatggggggcagtggttgtgtctggggccaagtttctgtcctgtatag

SEQ ID NO: 826879 - DNA, 120 bp, Artificial Sequence
  ENSG00000260613_8 (sequence is synthesized)
cctagagatggttatgtagcgggggactgagctactaagtgaaggcatagatagttatgtagaaacagaggagggtagaatcaactccatgctagattgtaactggaggtacaggtatca

SEQ ID NO: 826880 - DNA, 77 bp, Artificial Sequence
  ENSG00000260613_9 (sequence is synthesized)
tcaactccatgctagattgtaactggaggtacaggtatcagtatgaactcaaggtttgctaagaggtatcagaaaag

SEQ ID NO: 826881 - DNA, 120 bp, Artificial Sequence
  ENSG00000260613_10 (sequence is synthesized)
gctgagtgtaaatggaatcatattctgtaatcttttgagatttctttcttccatttaaaattatgtgtttgagatttggccgtgttggtggtggaattcattcatttctgttgctgtgtg

SEQ ID NO: 826882 - DNA, 120 bp, Artificial Sequence
  ENSG00000260613_11 (sequence is synthesized)
ctattccattgcgtggatacacctcactttgtccattttaccgtcctttgatatttaagatttctcccagtatttgctattaaaaacagcgttaaaataaaaaaaaaaaaacaccaaaaa

SEQ ID NO: 826883 - DNA, 120 bp, Artificial Sequence
  ENSG00000260613_12 (sequence is synthesized)
acccgttagcactcactccgtttcccctccctgagaccccggcaacctatttgcttattctgggcatttcatgtaaacggaatcattacaatatgtgatcttttgtggctgcgtcatgtt

SEQ ID NO: 826884 - DNA, 120 bp, Artificial Sequence
  ENSG00000260613_13 (sequence is synthesized)
ttcaagggttcttcatgatgcagcacatgtcaatacttggtttttactgccaaattatatgccatctatgtatatgccagatttatccattcatgacctgttttcacttttcagctatta

SEQ ID NO: 826885 - DNA, 120 bp, Artificial Sequence
  ENSG00000260613_14 (sequence is synthesized)
tgagaaataccactgcgatgagtcttcacatacaagtgtgtatgtggacacatattttcatttcttggggatatgcctcagagtggacttgctgggacctatggacgctctgtgttcagc

SEQ ID NO: 826886 - DNA, 120 bp, Artificial Sequence
  ENSG00000260612_0 (sequence is synthesized)
ttttttgtgcgaaaatccatctgccctcactgcaggttcatcattacaaaaatcactgtttagctcaaaccaagagacagagaagtcatcatgatctctcctttctgtctccttcctgta

SEQ ID NO: 826887 - DNA, 120 bp, Artificial Sequence
  ENSG00000260612_1 (sequence is synthesized)
gcagctgtgcttcccctctctggtatgtacacacgcacacaccttctttatgccaggagcttttccagatcttcactacaaaatgggaagtctggagaagggaagctcatgcctatcaga

SEQ ID NO: 826888 - DNA, 120 bp, Artificial Sequence
  ENSG00000260612_2 (sequence is synthesized)
tgttgggagaggaagcagatgagacttatatttacttatttatatctagtacgcactccagtgatccacaaagtcatctttgggcctaaatcccttgttattctaccaataggttaagca

SEQ ID NO: 826889 - DNA, 120 bp, Artificial Sequence
  ENSG00000260612_3 (sequence is synthesized)
gatttggatattcctaattttggttccaaataaacaggcagtgtttacctagcttcaaagtttggagaatttttctgtgaacattttgatatttttcaaatatggggacaattgaattga

SEQ ID NO: 826890 - DNA, 120 bp, Artificial Sequence
  ENSG00000260612_4 (sequence is synthesized)
tgaattgaaattcagatctgaatactatttgttgtattgttaaatgtctattactggctaaacttttctattttcctctaattacatgaaggtgccaactaaatttaatattagaaacaa

SEQ ID NO: 826891 - DNA, 120 bp, Artificial Sequence
  ENSG00000260612_5 (sequence is synthesized)
ctatgaattttaactaactcatacataagattatagaaatgttgcttatcaaacagtaccaaagggcacttctgcataaactagataactgccagggcctacacccttccccttttcaat

SEQ ID NO: 826892 - DNA, 120 bp, Artificial Sequence
  ENSG00000260612_6 (sequence is synthesized)
cgggactatcacactctcccctttctcaatcaagggactgtcagggatcatcagaataacagaaaacctaaagctaccaacctccaaaacacagagttgacagccaggcacagtgactca

SEQ ID NO: 826893 - DNA, 120 bp, Artificial Sequence
  ENSG00000260611_0 (sequence is synthesized)
aaagagactttgggtaggctggctacaggccaggttgtgggtagtgatctcattgtgggggctgcgctggtttgcatttttcaggaggctcttgtgtcctctggcaagaatccctgaaca

SEQ ID NO: 826894 - DNA, 120 bp, Artificial Sequence
  ENSG00000260611_1 (sequence is synthesized)
tggcttggactccagtgtgggccctctagtgctcccaggtgaggcttgatttccctttgctttcatgtgaagttcttagtgcgcctccacaacactcctggacacctttttaggcttgca

SEQ ID NO: 826895 - DNA, 120 bp, Artificial Sequence
  ENSG00000260611_2 (sequence is synthesized)
atccccccagatggacactgagacactctcaacctcacatgcccctgtgagaatccagatccaggtgtgagtcctctgctgtgccttggacttgcctttggggtgtttcctgcttttccc

SEQ ID NO: 826896 - DNA, 120 bp, Artificial Sequence
  ENSG00000260611_3 (sequence is synthesized)
agacagccatactgagaaggagcagcaggaatatactgataaatactcaacatataaagttggtgagttgcaattatgtctgtgatatttccaataaccatggtgaaaggaagacactgt

SEQ ID NO: 826897 - DNA, 120 bp, Artificial Sequence
  ENSG00000260611_4 (sequence is synthesized)
attttaaatgtagacaaactgatttctctggagtcggaaaaactgaaagacttcttggataacatcatttttgctcacaacataatgacatatagtaaacaaacttccatgaatagccct

SEQ ID NO: 826898 - DNA, 120 bp, Artificial Sequence
  ENSG00000260611_5 (sequence is synthesized)
aaacactatttctgtaggatctatgatgggacacttcagatcccattgaggactgtagtgaaaaaactaatatcccatgataaaaactagaaacaagctacctgtgaaagtgctttgcaa

SEQ ID NO: 826899 - DNA, 120 bp, Artificial Sequence
  ENSG00000260611_6 (sequence is synthesized)
tgtgtggattcatctgacagagttaaaactttgttttgattgagctagttagaaatactctttttgtagaatctatgaagggatatttcaaagaccattgaggcctatagtgaaaaagca

SEQ ID NO: 826900 - DNA, 120 bp, Artificial Sequence
  ENSG00000260611_7 (sequence is synthesized)
actatcccacgataaaaactagaaacaagctatctgtaaaaacaccttgcgatgtgtggattcagttcacagagctaaaccttttttttggttcagccagttggaaacacatttttgtag

SEQ ID NO: 826901 - DNA, 120 bp, Artificial Sequence
  ENSG00000260611_8 (sequence is synthesized)
aatctatgaaggattatttcagaatccattgaactctatagtgaaaaaccaaatatcctgggataaaaactagaaagaagatctttgtgatgcatggattcatttctcagagttaaacct

SEQ ID NO: 826902 - DNA, 120 bp, Artificial Sequence
  ENSG00000260611_9 (sequence is synthesized)
ttgtttttattcagcctgttggaaacatcctttttattgaatctaagaaagaacatttcaaagcccattgatgccagtagtgaaaaattgaatatcccacaataaaaaattgaaacaaga

SEQ ID NO: 826903 - DNA, 120 bp, Artificial Sequence
  ENSG00000260617_0 (sequence is synthesized)
gagcagccgcggtcagaccaagaggacaggtgtgggtgtgagtgtggatgggtctccaggtgcgggtgggagtgtggatgggtctccaggtgcgggtgggagtcgtggatgggtctccag

SEQ ID NO: 826904 - DNA, 120 bp, Artificial Sequence
  ENSG00000260617_1 (sequence is synthesized)
gtgtgggtgggagtgtggatgagtctccaggtccccctctgtccctcctgggtccccccacttcctggggcctgaaatccccaagggaggcttgctggttgggggtgggaggaatggtct

SEQ ID NO: 826905 - DNA, 120 bp, Artificial Sequence
  ENSG00000260617_2 (sequence is synthesized)
ctctgcccagccagcaccgtggcctggtcatccctggagcgtttcacctggaccatccaggccagacataaatcaggctgagtcaacccccccaggagactcggggtcactgcagggccc

SEQ ID NO: 826906 - DNA, 120 bp, Artificial Sequence
  ENSG00000260617_3 (sequence is synthesized)
tctccctgacccccaggatggctatccctaccccgccccctcagcgactcacagctgggtcccaggagctggtccaggcggggcacaatatgcaggcagatctggagggcgagatgggcc

SEQ ID NO: 826907 - DNA, 120 bp, Artificial Sequence
  ENSG00000260616_0 (sequence is synthesized)
cataaggagctttgacaaggacccactgtctggccccatcttcagagattccaataggtctggggtgtgcacaggcactggcgtctttaaaatctccctgtgtgaattcaacatgcaacc

SEQ ID NO: 826908 - DNA, 120 bp, Artificial Sequence
  ENSG00000260616_1 (sequence is synthesized)
aggattgaatggagaactgctgctcgaagtttgataatgaggtgataatgaggaagaacatgcctcagcaagtcagaaaaaggggcttaggggagggccagtggctcctccttcggccag

SEQ ID NO: 826909 - DNA, 120 bp, Artificial Sequence
  ENSG00000260616_2 (sequence is synthesized)
gccagctttcttctgacaaggacttgttttcacaactgtccagatccgcagatgggcacaagatgatggaatgaagcagcgggggacaacttctggctggagtggcttggaggctggagc

SEQ ID NO: 826910 - DNA, 120 bp, Artificial Sequence
  ENSG00000260616_3 (sequence is synthesized)
aatgccgctggcacatctcccagaacagggtaccaggacccctgtgaagatacccatggttcaatcatcaggacctacagatccttccatgttaaggacaacaccaataatactgagaaa

SEQ ID NO: 826911 - DNA, 120 bp, Artificial Sequence
  ENSG00000260616_4 (sequence is synthesized)
gcaaacggcagattggcagtgttaaaggataacaacgtgccaacagaatattaagaaagaaaacttctttgcaaaagttgatagagagactacaaatatcagtcaaattacaaacagaca

SEQ ID NO: 826912 - DNA, 120 bp, Artificial Sequence
  ENSG00000260616_5 (sequence is synthesized)
acagaggacagcatttggaaacgacttcccgaggcaagcactattcagtgccccacttccctctccccatgcccctttgcaaagatctattacattaataaatttctttaaatgctaaaa

SEQ ID NO: 826913 - DNA, 120 bp, Artificial Sequence
  ENSG00000265265_0 (sequence is synthesized)
ggccattgcacttttggacaactctactaaatggattttcctcatgccattgcataactgctacctgccaccagagcctcagaaatacatggttttccatcaagcactcatggaacatgt

SEQ ID NO: 826914 - DNA, 120 bp, Artificial Sequence
  ENSG00000265265_1 (sequence is synthesized)
ctccaagatcaactaaatataaaacaagctcccagctgaggcagctgctctcgcctcttctttcactcgctcctggcagcacagcaatctctgcaagttacttggaccctcaggactcct

SEQ ID NO: 826915 - DNA, 120 bp, Artificial Sequence
  ENSG00000265265_2 (sequence is synthesized)
tgttcaagtgcaatggaggaccatgcagatggcagggaaaaccaaagaaagctcaggtggcccatcatggctgtcatcggtggaagaacgtctctatttaacactgaaccttagtaatga

SEQ ID NO: 826916 - DNA, 120 bp, Artificial Sequence
  ENSG00000226134_0 (sequence is synthesized)
aacaacagatgacacgagatgtccctgctggggagaaaaacttgatgatcccattggcaaaccagctcctgagatttgtatcaaggcctctgcatctcacagctaccttgtgtctcctct

SEQ ID NO: 826917 - DNA, 120 bp, Artificial Sequence
  ENSG00000226134_1 (sequence is synthesized)
attgaaaagctgctgggactttcagagacattctactaatggcaagttctgagtgccatcatgaagaatttcaggaagagacgtgatttgaccttagtgttttaaatgggcatggtcctg

SEQ ID NO: 826918 - DNA, 120 bp, Artificial Sequence
  ENSG00000226134_2 (sequence is synthesized)
acccagttgcagggttggctggatgatgggctgatatgaggacaactgctccatcgtgctcagcgctgctgggttgtactgcatgaggagccaagctcagttttatttccctgcctcttt

SEQ ID NO: 826919 - DNA, 120 bp, Artificial Sequence
  ENSG00000226134_3 (sequence is synthesized)
gcaaacaattattctagcaacatgcactaggcatacagaaaataatatgaaatggattctgatgttttttgtgcttggattagtttgcttcactgtagcccttgaactcttgaaacagaa

SEQ ID NO: 826920 - DNA, 120 bp, Artificial Sequence
  ENSG00000226134_4 (sequence is synthesized)
gtatcaagaacctgctattctcttagtgggctctgaccatgtggtgccccagaagttatctccaaatatacttcaaaatatcaggcagaggtttcctgtctaaagttaccatgtgccata

SEQ ID NO: 826921 - DNA, 80 bp, Artificial Sequence
  ENSG00000226137_0 (sequence is synthesized)
gatcctgggggaggagaggggaggcgcggcgcgggctggggccctgggagcagcctgagggggcccgggcaacagccggg

SEQ ID NO: 826922 - DNA, 120 bp, Artificial Sequence
  ENSG00000226137_1 (sequence is synthesized)
ggtggcgcaggaagaaggagcagaaggtgcggggaggagagcggggggcgccggcggcagcgcgcgtggaggcggcacttcgcgaagtggcacttcggggcgggcggcccgccgggtcgc

SEQ ID NO: 826923 - DNA, 120 bp, Artificial Sequence
  ENSG00000226137_2 (sequence is synthesized)
gcggggagcggctcggacgcaggacgccgcgggccgggcttacaggtgggagaggccccgaccccgccgcttcgcaggccagcttcctgctgtgttccctgcacccaccgatctcacacg

SEQ ID NO: 826924 - DNA, 120 bp, Artificial Sequence
  ENSG00000226137_3 (sequence is synthesized)
cagccctaggacagacgtccactggcctgagttgggtctggggccaacacggagcaggtgggggtagagcagctctgctcgcctggaggaaagttgaatggctggaaccaagatgacaga

SEQ ID NO: 826925 - DNA, 120 bp, Artificial Sequence
  ENSG00000226137_4 (sequence is synthesized)
tggaggctggcaggcaaacacgggaggcctcctcactccaagaggggagtcagcctggggacagttcttctccaggccctgctgctcccatcagctgcaacacaggagaggtaggcttct

SEQ ID NO: 826926 - DNA, 120 bp, Artificial Sequence
  ENSG00000226137_5 (sequence is synthesized)
ccggaaaagctcccacggtcctggatcccgctccaccttctagaagctcccagcgttacttcctgagctggcctgcacatcgttgcgctactcccgtccaaggggggacatattcggtga

SEQ ID NO: 826927 - DNA, 120 bp, Artificial Sequence
  ENSG00000226137_6 (sequence is synthesized)
ccgactcagaacgcagcctgcttcccgggtggccagtggctcagcagtctcggtgcctgagcctgctccctccgcccggcggctgggcaggtggctgaatgcgggctggaggccttccct

SEQ ID NO: 826928 - DNA, 120 bp, Artificial Sequence
  ENSG00000226137_7 (sequence is synthesized)
gagaagacggttatccatgctgtacatggaagtgaccagctcggcacctgaggagacacaccgcggccgatgacaggcgcagagcaggacgtggtgaggtcctcatacctaggaatgcag

SEQ ID NO: 826929 - DNA, 120 bp, Artificial Sequence
  ENSG00000226137_8 (sequence is synthesized)
aacaagggcaagaaactcggtgcccgcctggcatctgccctgcaccagtggcctccaggaagttctccaccaaggatgttccccaggcactctgtgctcgccttcaccagcgtcctgtga

SEQ ID NO: 826930 - DNA, 120 bp, Artificial Sequence
  ENSG00000226137_9 (sequence is synthesized)
ggtctttcacactgatggggaagcctttctaaagggtattagggggcttgggggctgggggtgctgagtaccaagggtcccaggaagagacaggccaggcttatgggctgggcatccaga

SEQ ID NO: 826931 - DNA, 120 bp, Artificial Sequence
  ENSG00000226137_10 (sequence is synthesized)
gatcgccctgacgccagctccaggtggagttaggagggcactcttgtcccgacgcatttacagaccactccctcttcttgttcccctcgactctgagagtgtggtggggtagctgtggaa

SEQ ID NO: 826932 - DNA, 120 bp, Artificial Sequence
  ENSG00000226137_11 (sequence is synthesized)
cctgactgcttgcctgaaggttgggcagcgtggctagaaattgcggcccagacctgggatctcacccacacctctatgagacgtcctgaaggaaaccatcgactgagcggagaggcttcg

SEQ ID NO: 826933 - DNA, 120 bp, Artificial Sequence
  ENSG00000226137_12 (sequence is synthesized)
ccttgcccgcctcctcccaggaaggaagagcggaagaggcgtcgccagccaccgagactgccagccaccaccccctcccagactctctgtccccaccccagaccagggtcaccttcttcc

SEQ ID NO: 826934 - DNA, 120 bp, Artificial Sequence
  ENSG00000226137_13 (sequence is synthesized)
tgcactgggggtggggtgcggtaggtttcgcaatccagactgtggggtgggggtgggagcaggtgtgtgtaaatgagcagctcgtcaggagtcactgagaaggaggcagatggagctggt

SEQ ID NO: 826935 - DNA, 120 bp, Artificial Sequence
  ENSG00000226137_14 (sequence is synthesized)
acccagcaggtctcctctcataagcgtcaaccctcgcctgggcgggctgggggatcctcagcaccccagctctgagccaggggtctgcaacccgggcaccagcgatgggccctcatgcac

SEQ ID NO: 826936 - DNA, 120 bp, Artificial Sequence
  ENSG00000226137_15 (sequence is synthesized)
acagggcgccgagcggggccggaggcaagagtgacttcagacaggaacccgacgccacagccggtgacgcggaccctgggtcagccagcacgatgggccgctggggagaggagggctgga

SEQ ID NO: 826937 - DNA, 120 bp, Artificial Sequence
  ENSG00000226137_16 (sequence is synthesized)
aagtggcttcatctcaacgtcacatgggggggggtctcagatttaattacaggatgacagcctttgcttttcaagcaagctgttctcctggcaagccaggcgaaggattggggagttttg

SEQ ID NO: 826938 - DNA, 120 bp, Artificial Sequence
  ENSG00000226137_17 (sequence is synthesized)
ctaaacagaaggagccctttctgaggtgaccacccgtcaaaacttgaacccgcttccacctccgtctccctcttcccgaccagcctcacccagcctcggctgaatgtggcctgagagtag

SEQ ID NO: 826939 - DNA, 120 bp, Artificial Sequence
  ENSG00000226137_18 (sequence is synthesized)
ccacttgtccgcaatcacagggacgttttatgcctgtcaagggagcttcctctctcctcttcctccccctcccaccttctgcctggcagctttgccttctctccaagagaagggtccacc

SEQ ID NO: 826940 - DNA, 120 bp, Artificial Sequence
  ENSG00000226137_19 (sequence is synthesized)
caatcagaactcctcttccttttcattcctggattaaagcacttgtaatcagtaaccagaaagttccagagcgggagagaccggaaggcactggagtgctatcggacgggtgtctggggc

SEQ ID NO: 826941 - DNA, 120 bp, Artificial Sequence
  ENSG00000226137_20 (sequence is synthesized)
agagccaggagggcgagcctcttctctccccgcctgcccttgctcacttccccctccatgccaggtgctgtgggagcagctgggcctggccggggtcggcgggtgaagctatccgcatgg

SEQ ID NO: 826942 - DNA, 120 bp, Artificial Sequence
  ENSG00000226137_21 (sequence is synthesized)
tgtctggagcaccgtttctttgcttcctggatgggctggatgggctcccgtgttcttcaccaatggcagcgttaccagcaccaatggcagcgttaccagcaagaaggcaaaggcaggagc

SEQ ID NO: 826943 - DNA, 120 bp, Artificial Sequence
  ENSG00000226137_22 (sequence is synthesized)
acatcgagggtgggagccagggctgtggggtcaggagtcccgctccttgccgcgggaagcctggctcagccacctccagcacacttcggctttgtccagcataaaaggcagagcgacgtt

SEQ ID NO: 826944 - DNA, 120 bp, Artificial Sequence
  ENSG00000226137_23 (sequence is synthesized)
ttcactgcaggctgtttcccaccagggcaagtgggacagggcgagtgctgacgtctgcaggcatggtgtgcatttaggggtgggcggcaccgagggggcatcatttggcataggcgggcc

SEQ ID NO: 826945 - DNA, 120 bp, Artificial Sequence
  ENSG00000226137_24 (sequence is synthesized)
cgggggccactgggctagatgactggctggttgctgggggcaggtgtcacagcctctctgagcaccctctaagtggaggacagaacattgttgggaggagtccaggcataaagtgacata

SEQ ID NO: 826946 - DNA, 120 bp, Artificial Sequence
  ENSG00000226137_25 (sequence is synthesized)
aacagcgcagagaatgggaccagcgcacctgagaggtgatcattagcctcagcaactggatgggacattccgaagagctcccagccaacacagatggtcactccagaggctgacatttaa

SEQ ID NO: 826947 - DNA, 120 bp, Artificial Sequence
  ENSG00000226137_26 (sequence is synthesized)
tgccattgcactccagcctgggcgacaagcgaaacttcgtctcaaaataaataaaagtaaggggcacagggagggggccccagctcgtgccccttctgtgtgggctgcacatggtgactt

SEQ ID NO: 826948 - DNA, 120 bp, Artificial Sequence
  ENSG00000226137_27 (sequence is synthesized)
acatggtgacttccttccagagagcacagagtgggaggtaggcaaggcgtctccacagtggagagcccgacccactgtctcagcccagaggtcaaggctggcaccatcaccgagaggtca

SEQ ID NO: 826949 - DNA, 120 bp, Artificial Sequence
  ENSG00000226137_28 (sequence is synthesized)
cacgggcagatgtgacagggcgcttcaccactgggctcttcctcccagacccataacccttgtcttagtattagaaaaacactggcagaccgggcgcagtggcttacacctgtaatcgca

SEQ ID NO: 826950 - DNA, 84 bp, Artificial Sequence
  ENSG00000226137_29 (sequence is synthesized)
actggcagaccgggcgcagtggcttacacctgtaatcgcagcattttgggaggccgaggtgggaagattgttcaagagcagtaa

SEQ ID NO: 826951 - DNA, 120 bp, Artificial Sequence
  ENSG00000226137_30 (sequence is synthesized)
gcttcgcaggtaagcccgccgggcgggcggcgaccccccggccggcccctcggggcagagaggagaaccctgggggagggggtgctgcaggaggaccctggagagagctcggccctggag

SEQ ID NO: 826952 - DNA, 120 bp, Artificial Sequence
  ENSG00000226137_31 (sequence is synthesized)
cttggcgacaaaccaagaccctgtctcgaaaagaaaagaaaagaaacattaggcaaatcccaacagggggacactctacagaaaaaccgaccagccctcctgaaaacttcccaagtcatc

SEQ ID NO: 826953 - DNA, 79 bp, Artificial Sequence
  ENSG00000226137_32 (sequence is synthesized)
gaaaaaccgaccagccctcctgaaaacttcccaagtcatcaaaaccaaggaaagtgggctgggcgcggtggctcacacc

SEQ ID NO: 826954 - DNA, 120 bp, Artificial Sequence
  ENSG00000226137_33 (sequence is synthesized)
ggtgacagaatgagactctgtctcaaaataaaaaaaaccaaaaaccaaaaaacaaccaagcaaagtctgagaaactgtcacagcctagaggaacctggagacagctgatccctaaatgtc

SEQ ID NO: 826955 - DNA, 120 bp, Artificial Sequence
  ENSG00000226137_34 (sequence is synthesized)
acctggagacagctgatccctaaatgtcacgtgggatcctgggtggggtcctgggagagaaagaagacattggagggaaactgaggaaatatgaataaagtatgggctttagttaataat

SEQ ID NO: 826956 - DNA, 120 bp, Artificial Sequence
  ENSG00000266513_0 (sequence is synthesized)
agctcccctggacctacgccgtcgtccccccaccgtccttccacgggggcgcaggaaggagtgggacggagcatcggtgcctttttcattagaatagacacaaagcccaattaataaaga

SEQ ID NO: 826957 - DNA, 120 bp, Artificial Sequence
  ENSG00000266513_1 (sequence is synthesized)
cccagagaagaggaagggaagaacaagacccaggggttagaagagagaagaacaagagcggattctcagccatgggaccgcagcttgtgaaaggggagctttgtttatttattgtctaat

SEQ ID NO: 826958 - DNA, 120 bp, Artificial Sequence
  ENSG00000266513_2 (sequence is synthesized)
gtcgaatagcttatattgctagcataatagagtacattttgaccagaaagcttttatcccttttcatgtggtagtgattgttcggtgcttctctatagaaaagttaaaccatcctcaata

SEQ ID NO: 826959 - DNA, 120 bp, Artificial Sequence
  ENSG00000266513_3 (sequence is synthesized)
cggtgaatattatctttccattctttcacccaaggcataagaaattactataatttaccatggcataaaggtacaaactcagttccaatgtccagctttgaactagatggtgaaccacac

SEQ ID NO: 826960 - DNA, 120 bp, Artificial Sequence
  ENSG00000187621_0 (sequence is synthesized)
acatgtccttaaccttggcacaacaaatctctaaatcgattgagacctgtctcagatacttcttggtttacaagatggaggctgaaattaaagagaaagatcctcactcaactcacagag

SEQ ID NO: 826961 - DNA, 120 bp, Artificial Sequence
  ENSG00000187621_1 (sequence is synthesized)
gagcagaatgggaagaggacttagtgagaattccctgaacacaggagaaaaccgaagcccagagagtggatggccaagtccaaggtcacacagccaagtgcatccgagcagcgcaggatc

SEQ ID NO: 826962 - DNA, 120 bp, Artificial Sequence
  ENSG00000187621_2 (sequence is synthesized)
caggtttcctgccccagtgctctttctgcagcccatgccacctgttttcatgctatctcagttcaccttccagctacacacctgcaatcagaaacagaaagtctgagagtgtgtgtggag

SEQ ID NO: 826963 - DNA, 120 bp, Artificial Sequence
  ENSG00000187621_3 (sequence is synthesized)
ccaaagaggggacagcagtggtgaggccagtttcatgtcttgtgatttattttctccctttctttttggactttaatcttaagtggacagcaatttggaacagtgtcagcaccttgttgg

SEQ ID NO: 826964 - DNA, 120 bp, Artificial Sequence
  ENSG00000187621_4 (sequence is synthesized)
attgtgctgtttgggagaggtgacacagagtattttaaaagagcaggttaagaacttttcacaaggaatcaattgagagaaaataaaatagaaacagactgtcccacatttgggctgagc

SEQ ID NO: 826965 - DNA, 120 bp, Artificial Sequence
  ENSG00000187621_5 (sequence is synthesized)
tacaggcacgagccaccgcacctggcctcaaacaagctttttaattgcattcagaagtgcaccaactaggcacagacctctggcatggagacagaatgggaggttcttggtgtctggcct

SEQ ID NO: 826966 - DNA, 120 bp, Artificial Sequence
  ENSG00000187621_6 (sequence is synthesized)
tggcatggagacagaatgggaggttcttggtgtctggcctggtcttgcagaaatcagggagttgtggggaccaggcagccactgtgcatcagataggagtttcagcagcaggcaacagaa

SEQ ID NO: 826967 - DNA, 120 bp, Artificial Sequence
  ENSG00000187621_7 (sequence is synthesized)
agcctgccaatgtagctgaaataagaagggcttatttttatccctgaacagaagcttccagcactggttcatcagatcagggcactgagctggcatccccatttatacagttttcctttc

SEQ ID NO: 826968 - DNA, 120 bp, Artificial Sequence
  ENSG00000187621_8 (sequence is synthesized)
cttcacctttgtaagatgcctggcacagctctgagcatcaaatatctgtgccatgtgggagcacacgaggggacaagtggggaatagggtctcctctgtcctctgtccccaggctggctt

SEQ ID NO: 826969 - DNA, 120 bp, Artificial Sequence
  ENSG00000187621_9 (sequence is synthesized)
ctctcgtggtagaaggacccccacagcaccaggcctcataactaccctgctggtaaactgcaggtgctgtcacggcttcctgccttcgtatatgaaatgttccttggcagctggactgct

SEQ ID NO: 826970 - DNA, 120 bp, Artificial Sequence
  ENSG00000187621_10 (sequence is synthesized)
gtttgtttaccgcacgcacagctctgctgcctcttggttacaccagtgagctattgctccatgacaagccacaccgaaatgtagcaagcacttattgttgcccacatgtgtcaagtcagt

SEQ ID NO: 826971 - DNA, 120 bp, Artificial Sequence
  ENSG00000187621_11 (sequence is synthesized)
tgagtgtttctgccaaccggggcctggcttggcccaccttggctgagcttgctctggtgctagggtcagctagacaggtcggcaggagaccagctgctctagaagagcctggacaggatg

SEQ ID NO: 826972 - DNA, 120 bp, Artificial Sequence
  ENSG00000187621_12 (sequence is synthesized)
aattggttctccttccacgtgcatcttgcatccctccagccaaggatttgaacccaggtctcgtctgactccaaatgcaccaagaggatggagcccagagtgacacagaggaagaggccc

SEQ ID NO: 826973 - DNA, 120 bp, Artificial Sequence
  ENSG00000187621_13 (sequence is synthesized)
ctggatggatgcatggggaagatcacgggaattacaagtgacatcctgaagtatgatcacaaatgtttcaaattaagccttcctgctaagtttccagaggtgtgtggctcggacgaagtg

SEQ ID NO: 826974 - DNA, 120 bp, Artificial Sequence
  ENSG00000187621_14 (sequence is synthesized)
tttccagaccctgatctactgcatgtcctgcctgttgctggttctttgcagcagtccattgaccaatgctgtctacagcttgagagcctctgcaggccagggctgctctgtgcacatcct

SEQ ID NO: 826975 - DNA, 120 bp, Artificial Sequence
  ENSG00000187621_15 (sequence is synthesized)
aaacaggcccttcttttctctcatttacacatatgtgaagaagacacagcaagtgagaaaacgtgaccgaaagccacgcggacaggtggccgcagggccaaacccaacttccgtgatgtg

SEQ ID NO: 826976 - DNA, 120 bp, Artificial Sequence
  ENSG00000187621_16 (sequence is synthesized)
atctggctacagtttggagcccacatatttcaatagttatccccaggcctggcacgtcaaagaggctccagaaatgtttgctgagtgagtgatgaatcagcaatttctgattttctccta

SEQ ID NO: 826977 - DNA, 120 bp, Artificial Sequence
  ENSG00000187621_17 (sequence is synthesized)
aacttagagaataagtggcttgtctgcagtcacccagggcgtccctgacagaggtacaagtaaagcccagatctctgcatctctggttcaaggccttttgtactacacaccgctgtctct

SEQ ID NO: 826978 - DNA, 120 bp, Artificial Sequence
  ENSG00000187621_18 (sequence is synthesized)
ttgtcatcattaaaagcaaggctcaagggacatgttttctagccttagttccccatctacaaaatgggcctcatggaatggaatgtctccacttcactccagcatcaacaagtggggaat

SEQ ID NO: 826979 - DNA, 120 bp, Artificial Sequence
  ENSG00000187621_19 (sequence is synthesized)
tctgatggattcaattcgacttctttccatgggcgtgttctaagcagcctctttgttccagaagctgccctcagccagagttggataagccaatcctcactccccagcctcctctggata

SEQ ID NO: 826980 - DNA, 120 bp, Artificial Sequence
  ENSG00000187621_20 (sequence is synthesized)
gggatgaagaccccactggggttggaagtgcagaggcagacaggtgtatggagtcacctgtaaattgattcaagtgagccaggaaagcagcaaaggaaagagaaacctgagtgacgacgt

SEQ ID NO: 826981 - DNA, 120 bp, Artificial Sequence
  ENSG00000187621_21 (sequence is synthesized)
ggtggaggaacagggctggaaagaggctgctggctgtctggcttcgcagctctggcctcctaatcagcctcgctcttgtctctggtgttctctggctcttgtccatctgtctgtgtttct

SEQ ID NO: 826982 - DNA, 120 bp, Artificial Sequence
  ENSG00000187621_22 (sequence is synthesized)
ttttgccagctattgactaatctttgctgaagctgagctagaattctggtgtttataagcaggtaactagctgagcactagttgataactttggagttagtggataaccacagggctggg

SEQ ID NO: 826983 - DNA, 82 bp, Artificial Sequence
  ENSG00000187621_23 (sequence is synthesized)
gttgataactttggagttagtggataaccacagggctgggctactaagctttttcagttgaaaaataaataaataaataaat

SEQ ID NO: 826984 - DNA, 87 bp, Artificial Sequence
  ENSG00000187621_24 (sequence is synthesized)
cctttgtcctgttttctacaggttagaagcaaggcacaagtcatacctacattcaaggagaggggaccatgcaaaggataaactgca

SEQ ID NO: 826985 - DNA, 120 bp, Artificial Sequence
  ENSG00000187621_25 (sequence is synthesized)
tacattcaaggagaggggaccatgcaaaggataaactgcagaaaggacgtggatgaagcagagaggcacgtgcctgtctcattcgcctctggatctgctgcatccaggactgtgccagca

SEQ ID NO: 826986 - DNA, 120 bp, Artificial Sequence
  ENSG00000187621_26 (sequence is synthesized)
caaagtgggagcccgataaatatttattgaagaaatgaaaggtgacaaaaggcagaaggagggagaccccaaaaagagttacactggaagaagagcccctccttccttcaagccaagtca

SEQ ID NO: 826987 - DNA, 120 bp, Artificial Sequence
  ENSG00000187621_27 (sequence is synthesized)
tccccttgggctctcaccacttcagtttataccttgcctgtagtccagtctctccagcatcaattccatcagcacaaagacataatttaattccttctaccttaaaaaaaaaaaaaaaaa

SEQ ID NO: 826988 - DNA, 120 bp, Artificial Sequence
  ENSG00000187621_28 (sequence is synthesized)
aaaaacagctctccctctcttagggtgagatgaagtggttggcaacaggccaatgctactttcagaggcgtttgaatcagagtgactccattttgaataggggttgagtaaaataaggct

SEQ ID NO: 826989 - DNA, 82 bp, Artificial Sequence
  ENSG00000187621_29 (sequence is synthesized)
cgtcacaaagaccttgctgataaaacagattgtgataagaaaagccagtcaaaacccaccaaaaccaagatggcgacaaaag

SEQ ID NO: 826990 - DNA, 120 bp, Artificial Sequence
  ENSG00000187621_30 (sequence is synthesized)
agccagtcaaaacccaccaaaaccaagatggcgacaaaagtgatctctggttgtcctcactgctgattattcactaattataaaattaacatgataaaagacactcccaccagcaccgtg

SEQ ID NO: 826991 - DNA, 120 bp, Artificial Sequence
  ENSG00000187621_31 (sequence is synthesized)
tcccaccagcaccgtgacagtttacaaatgacatggacacatcaggaagttaccctatatgtctaaaaggggaggagccctccattccaattgtccacccctttcctggaaaactcatga

SEQ ID NO: 826992 - DNA, 82 bp, Artificial Sequence
  ENSG00000187621_32 (sequence is synthesized)
ttagcatataatcaagaaataaccatgaaaatagccaaccagcagccctcagggctgctttgcctatggagtagccattcta

SEQ ID NO: 826993 - DNA, 120 bp, Artificial Sequence
  ENSG00000187621_33 (sequence is synthesized)
caactccctgggcctgctgagcacctcttgcctttctgcctttgcgtatgctgttccctctgcctggaattccatgtcttctgcctttgcccacctcatcttaaggcctctgcttagatg

SEQ ID NO: 826994 - DNA, 120 bp, Artificial Sequence
  ENSG00000187621_34 (sequence is synthesized)
caatttctttgggctcttattagcagcatccaaatctgtgctggtttcttctcacgcttactctgcatcataatttttctgtttactcgttaatcccctcccactcctgccagtacctaa

SEQ ID NO: 826995 - DNA, 120 bp, Artificial Sequence
  ENSG00000187621_35 (sequence is synthesized)
agtaaaatctacacgggcttggcacattgtggatgctcaatgaagatttgttaaatgagtgaatgattaaatgaaataagccccagcttggaacccagagctgtaatttccggttgtggt

SEQ ID NO: 826996 - DNA, 120 bp, Artificial Sequence
  ENSG00000187621_36 (sequence is synthesized)
ccctgtcccctgcccaggggctgtctaagggctcatctctcccaggagcccctgtatcatctcagtaactagaccagtaccatatccgacttcccctgactttgaaataattttcacctg

SEQ ID NO: 826997 - DNA, 120 bp, Artificial Sequence
  ENSG00000187621_37 (sequence is synthesized)
caatcaggtgcgcttccctagaacctctctcgctgttctttgcctttctccttcccccgccttgtatctccgtggtcctgccaaaaatcagaagctcattattaaaccagaagcttcctt

SEQ ID NO: 826998 - DNA, 120 bp, Artificial Sequence
  ENSG00000187621_38 (sequence is synthesized)
gcattatcccagagactacagacagaaaatatttgcttctatctcaactgaggactgacatagtaaagactccttgagatgttagctgtcaaggaggggaataaaagtttttcatctgca

SEQ ID NO: 826999 - DNA, 120 bp, Artificial Sequence
  ENSG00000187621_39 (sequence is synthesized)
agaacccaccaattccggacacagtgctgagaatcatgccttgaaatctagcagctctgttaaaaactgagcaaggtgtacttcggggttgtgttgagaaggttggtgttcagctaaatc

SEQ ID NO: 827000 - DNA, 120 bp, Artificial Sequence
  ENSG00000187621_40 (sequence is synthesized)
gctaaatcaggagggaaggccaaggaaaatcaggcttggcacctgtcaacagcttgttttcatttcctttccaatttaagaatgtgtttaacattctatcccagacaatgtgatggtcat

SEQ ID NO: 827001 - DNA, 120 bp, Artificial Sequence
  ENSG00000187621_41 (sequence is synthesized)
gaagtctctgtcagagaggaaagagggagttaatctataatgaagatcaacagtgaagaggaaaggggtcttccctggaacgcttcagtcatatacgacattttacacaacaataatgga

SEQ ID NO: 827002 - DNA, 120 bp, Artificial Sequence
  ENSG00000187621_42 (sequence is synthesized)
cctgtgtaaggaggtatgtgtgggagaagattccagaaggtcttgagacactccagatgaaggttggtgtggggctgtgctgctggagcaccagagagtgaaaagaggttatctccctct

SEQ ID NO: 827003 - DNA, 88 bp, Artificial Sequence
  ENSG00000187621_43 (sequence is synthesized)
tagtttcagcctcccaagcagctaagactacagttattttattcttatgagcttgtgggctccatctaccaacctctgggcaaatgct

SEQ ID NO: 827004 - DNA, 120 bp, Artificial Sequence
  ENSG00000187621_44 (sequence is synthesized)
accaacctctgggcaaatgctcatctgacttccatagacacacagcaagcagacaaccacacaaagaggaagagggagaatatttaccagccatggaacatctgctctgtgcttatatct

SEQ ID NO: 827005 - DNA, 120 bp, Artificial Sequence
  ENSG00000187621_45 (sequence is synthesized)
agacaacagatttacatcccagacacattcacactgggccaagagcagctgccattgcagattcgagtcacgtccttttttccttccttctccttcttggagttacaacagaagctgggg

SEQ ID NO: 827006 - DNA, 120 bp, Artificial Sequence
  ENSG00000187621_46 (sequence is synthesized)
gtcatccacggacagcaaggctaacagaacgctgtaacatgtgcccacttggactctgggagttgcagacacccacccataggtgctgccatgggtccggagcccaaaaagtgcttgccc

SEQ ID NO: 827007 - DNA, 120 bp, Artificial Sequence
  ENSG00000187621_47 (sequence is synthesized)
tggctcctgcacctgcccgtctgcatgctccccctccggtaaggggtttgaggatgtggcggctgaacataagagctatgcccctgtcacacatcatgggacaggggtcagggaactctc

SEQ ID NO: 827008 - DNA, 120 bp, Artificial Sequence
  ENSG00000187621_48 (sequence is synthesized)
ccatttcactttcaaatattccaggtcccctttttgttcgggagccagagtctaatggagacagagatagaaaccctgaaataggatccaggcaatataaacctacacgctgtaagccaa

SEQ ID NO: 827009 - DNA, 120 bp, Artificial Sequence
  ENSG00000187621_49 (sequence is synthesized)
agcgatcctcctgccttggcctcccacggtgctgagactacaggtgtgagccaccactcccagcctgatttatattttataaagaggcaacgatggagtacacagctgagcaatctcttg

SEQ ID NO: 827010 - DNA, 120 bp, Artificial Sequence
  ENSG00000187621_50 (sequence is synthesized)
atctcttgcatttctggaccttgagcatcaggaagcttagggagggtgaaaactcagaagaaagctcagagttgagacctttgattttttgcccagagagtccagctaacacactttata

SEQ ID NO: 827011 - DNA, 120 bp, Artificial Sequence
  ENSG00000187621_51 (sequence is synthesized)
acccaaaaggccttacaaatatttcagagcagaggcagcatttttgcactggataaacaaaggtacggtaatttcttcatagtttattttcattacaagtaattcttttcctgaagaaaa

SEQ ID NO: 827012 - DNA, 120 bp, Artificial Sequence
  ENSG00000187621_52 (sequence is synthesized)
atttatatttcagatttatttcccctctcaaaggggaggggagttataatattctgtttccatagcaccattcctcaagatcaaacccaggcaggcatttttacagcacacacttccata

SEQ ID NO: 827013 - DNA, 120 bp, Artificial Sequence
  ENSG00000187621_53 (sequence is synthesized)
tgtcattgctaatcctcgcaaccttgaggaaactgaggtgcaaaggggttgaggaatgtgttcaccatcccaaagccaacgaagtgccagaacccaaatccaagcttggctgtctcatcc

SEQ ID NO: 827014 - DNA, 120 bp, Artificial Sequence
  ENSG00000187621_54 (sequence is synthesized)
ccaaggacgtactctttatgccgttccttatgacttttcatgcagcaggtgcaaggcagcaagaatttggctcttctgacatttatcaggcacctggtatgtgccaggcctactgtaaac

SEQ ID NO: 827015 - DNA, 120 bp, Artificial Sequence
  ENSG00000187621_55 (sequence is synthesized)
cccaagatgacatggtccatgtctatccattcagcatcagagagactgttatcaggacttgaggcctgagacacagccctgaatcagatgcaggcctctggtgtttgcaaaggatgcgtg

SEQ ID NO: 827016 - DNA, 120 bp, Artificial Sequence
  ENSG00000187621_56 (sequence is synthesized)
agtatgtgtatgtgtatgcgtgcattgtgtgtaggggtgtgtgtatgttgggggttgggggcagaaaatgctccctgaactgttggtattaaggcagatctttgatggagggactggggt

SEQ ID NO: 827017 - DNA, 120 bp, Artificial Sequence
  ENSG00000187621_57 (sequence is synthesized)
gtggagacttgaaccctagtttcaaagtggggacctcgaacactagtatggccagcagacaggctggagttgctgaattgtcagctaggtctttaatccactccccttctctaaatcagg

SEQ ID NO: 827018 - DNA, 120 bp, Artificial Sequence
  ENSG00000187621_58 (sequence is synthesized)
gtggaattggactcagggctggttcagggctgaggtttccgggggatgaatgattccagacagtgggaaggggtgatggatgatgaacctggcaagtcacaggactatggacttggctgt

SEQ ID NO: 827019 - DNA, 120 bp, Artificial Sequence
  ENSG00000187621_59 (sequence is synthesized)
atgttgcatgtatgtgtaagatctgagttgagacctttgatttttgcccagaaagtccagctaacatactatataagccagtgagaccagccagtgtctgttcattgcctctgccttgcc

SEQ ID NO: 827020 - DNA, 120 bp, Artificial Sequence
  ENSG00000187621_60 (sequence is synthesized)
cctatgcctgcccgcctcctatagcaggtccctatagcataatgaaaatgcgaacaaccttttctctggacactggggaatctagtctggtggataaagatggatggctgttaaacgatc

SEQ ID NO: 827021 - DNA, 120 bp, Artificial Sequence
  ENSG00000187621_61 (sequence is synthesized)
gtcaacagccacttcctccctggggcttaacaggcattccttgaagcctgccccgggcagttagtccttcccttttgtgtgaactctcggctgttttcgttgtctgcacacagagcagtg

SEQ ID NO: 827022 - DNA, 120 bp, Artificial Sequence
  ENSG00000187621_62 (sequence is synthesized)
gtctagggagcgaagggttttggaatggaccttttcctttcttagcttgctgtagggattgtgcttcagctaagtaaagtggaaaaacagaagtacaaaagcaacagccccagatctaag

SEQ ID NO: 827023 - DNA, 120 bp, Artificial Sequence
  ENSG00000187621_63 (sequence is synthesized)
ggcaccgtagctctggaatctggattttattccagattcaaccctcagcagggagttgaagtggtcagccctgtgctttacaaggctgattgggcagcacccatagtagaattgtcaata

SEQ ID NO: 827024 - DNA, 120 bp, Artificial Sequence
  ENSG00000187621_64 (sequence is synthesized)
taaagtaattgaaaggatcagaatccagggttttcgttgtttttaagtttttaagttttaaaaacaaagttgtttttgttcgtttttaagtttacttctctttaatcggtctcactttat

SEQ ID NO: 827025 - DNA, 89 bp, Artificial Sequence
  ENSG00000187621_65 (sequence is synthesized)
cgtttttaagtttacttctctttaatcggtctcactttattgaccaggctggtttcgaactcctgggcttaagtgatttctcctgtgtg

SEQ ID NO: 827026 - DNA, 120 bp, Artificial Sequence
  ENSG00000187621_66 (sequence is synthesized)
attcaagccaaaagctgggaatggccatctgagaaacacagactctaggaaaatggggccagggccctgaagttaaaagttaaagtcttgcttacataggcagaaagcaaagacatttag

SEQ ID NO: 827027 - DNA, 120 bp, Artificial Sequence
  ENSG00000187621_67 (sequence is synthesized)
taaccttgtagaacattttcttgtataacttttcttgttttaactttcttgtttaacattttctatgcaaggctggtttatgagttacaacctataattaattataggttgttcccctgc

SEQ ID NO: 827028 - DNA, 120 bp, Artificial Sequence
  ENSG00000187621_68 (sequence is synthesized)
agaatggcagaatggcacagcagagagaagaaaaggaacatctgaatgttgagaggaatttggctgggggcggttggagaggagattagccactggacagccaaactccaggggaagatc

SEQ ID NO: 827029 - DNA, 120 bp, Artificial Sequence
  ENSG00000187621_69 (sequence is synthesized)
atcctgctgagagccacctccaccactcagtgaaaccgctgcattcatccttcaagtttatgtgtgacctgattcttcctggacattggacaaagacctaggtccagtgaactgtctaac

SEQ ID NO: 827030 - DNA, 120 bp, Artificial Sequence
  ENSG00000187621_70 (sequence is synthesized)
gagtgaggctgatgtgataacaaaagtctgaatacaaggtgggagacaattattctgactgaaagggaggcaagagttctgccataggcttgatgctgtgtgcccctggcttcctaactc

SEQ ID NO: 827031 - DNA, 120 bp, Artificial Sequence
  ENSG00000187621_71 (sequence is synthesized)
atttgcaaatggaaaatactattccattgtaggaaccttctttttccatgtgtctggggaaggagaaagaatggctgggctgaatgaatttatcccttggtcctcttccaacaaagctca

SEQ ID NO: 827032 - DNA, 120 bp, Artificial Sequence
  ENSG00000187621_72 (sequence is synthesized)
gctatgaaagataaatccagctctccccaccccctctcagtggagctggggagaaatcaaaagcccctctgccaataatgagaccaaagtttgcaagggcaggacgagcccgtgctaaca

SEQ ID NO: 827033 - DNA, 120 bp, Artificial Sequence
  ENSG00000187621_73 (sequence is synthesized)
gagaaagtgttgtttcctcaatttggttttagactgtcttgtcctatgggggagaaaagatctgcccttgggagaggtgccaactttatagatctattaataaaagaactggcaggctta

SEQ ID NO: 827034 - DNA, 120 bp, Artificial Sequence
  ENSG00000187621_74 (sequence is synthesized)
cagttcttgccaatgaggaaacttgaatgagagaagccaggctcaaccttggccaacagactggagcccatcaccctaacttcaccccgcttctccttacccaaccgtcaaaggctaggc

SEQ ID NO: 827035 - DNA, 120 bp, Artificial Sequence
  ENSG00000187621_75 (sequence is synthesized)
agcacccacccagcagcttccacctggctgaagcctgcacctgcttcagaccaagggttagatggaaatttggcatgggaagagagggctcacctgtgggcaggatagactctatccaag

SEQ ID NO: 827036 - DNA, 120 bp, Artificial Sequence
  ENSG00000187621_76 (sequence is synthesized)
aaggagaactgaaaaatgaaaacctatgagacaaggggtgatcctgaaggcaggcaggagaaagggctggagggagaggcactggggaatttttcctggtgaatactgaagttactagat

SEQ ID NO: 827037 - DNA, 120 bp, Artificial Sequence
  ENSG00000187621_77 (sequence is synthesized)
gttttgtcttgcaaaactcaagggaaaactctcaaactctaatgtttgtctattctgtgtccaaactgtccttttgaaacggacccacctttcagtaaagaaacttgcattggcctgccc

SEQ ID NO: 827038 - DNA, 120 bp, Artificial Sequence
  ENSG00000187621_78 (sequence is synthesized)
gctggggaacaaccagaggaggaggaggacagagggagagaatactttttttaaaaatcccaaacaaaaccaaattctatacatgtatatctcgagtgagtaaatgtgtaacactcagca

SEQ ID NO: 827039 - DNA, 120 bp, Artificial Sequence
  ENSG00000245025_0 (sequence is synthesized)
atgaggatttaacctctggtcattaggtcctgcctgctacctttgtttcaggttagctcaatcccaggcctaaccagcgttttcctggagcccaccccagggccaggccctctcagctag

SEQ ID NO: 827040 - DNA, 120 bp, Artificial Sequence
  ENSG00000245025_1 (sequence is synthesized)
aacatctctctcagccttacctcccgggtggagctctccacaaatggccccccaaacatggcagccatccagtcacagctggaaatcaacaggggcttgtgggcgctgatggtgccatca

SEQ ID NO: 827041 - DNA, 120 bp, Artificial Sequence
  ENSG00000245025_2 (sequence is synthesized)
tccaggatgaaggtcacatctgtccagaagaagcatcacaggaggactggtgaaagaagctgggagaacaagccccaaggggagccacggagcctcctcctgaacccagaagattcgggg

SEQ ID NO: 827042 - DNA, 120 bp, Artificial Sequence
  ENSG00000245025_3 (sequence is synthesized)
cacggaacaaacccgctcccagctggggaaaaccaggcttcaagagcatggcagccgcagctccaggacaccaggagctgagacagacaggcaatgctaatagcaccaatgcagaacccc

SEQ ID NO: 827043 - DNA, 120 bp, Artificial Sequence
  ENSG00000245025_4 (sequence is synthesized)
cttgctttccaagcctgttccatacctgagaaggtgccttttgccaagcactccttaacccggttggtccggcggacgtggaaggccttggtgatctcctggttcatgaaggcctcattg

SEQ ID NO: 827044 - DNA, 120 bp, Artificial Sequence
  ENSG00000245025_5 (sequence is synthesized)
ttgagaatgttggccaccatcatgcgcagatcaaagacctcgagcagctcagcaatgtgggcaatgtgcatgaggtcacgctcgttctcatctagctcccccgtgtacaggtacttgagg

SEQ ID NO: 827045 - DNA, 120 bp, Artificial Sequence
  ENSG00000245025_6 (sequence is synthesized)
acagcccggaagggccccggctggatggaactgtccatcttcaccaccaccatcagccgggatttgtaggtgagaggatcttctgccatctcttcctggatgctcacaaaagctcggctc

SEQ ID NO: 827046 - DNA, 120 bp, Artificial Sequence
  ENSG00000245025_7 (sequence is synthesized)
caggaagacagcacacgacccctgcccggcggctagaggccttccctacctcccataagcaaagcgacggtctttgtggtggtctccaaaggtgtcccagaggcgcagagagacgctgac

SEQ ID NO: 827047 - DNA, 120 bp, Artificial Sequence
  ENSG00000245025_8 (sequence is synthesized)
atcatctaccacgtctcgggagcgttccagcacctggggacggggaggaagagtgggactcgaaggcagcagttttggggacctctgcgtgccacctcaggataagcgccggctgacacc

SEQ ID NO: 827048 - DNA, 120 bp, Artificial Sequence
  ENSG00000245025_9 (sequence is synthesized)
tgggggccccagacatcactgggcatggagggacaaggctggcatcgcccactgtgcaccctgcacaactttcatccacgtaaaatctctgtagaatctataacaagggtggcctccaag

SEQ ID NO: 827049 - DNA, 120 bp, Artificial Sequence
  ENSG00000245025_10 (sequence is synthesized)
ctgaccaggagtggaagagaccctaagcaggtggaagagacactaagagggtagcagagaccctaagggggtggaagagaccctaagggactgctatgggtgtggaaggggcctctttgg

SEQ ID NO: 827050 - DNA, 120 bp, Artificial Sequence
  ENSG00000245025_11 (sequence is synthesized)
gagctgacccttgttcctggctttccttgcaaactgcatgtttgtgagcctctggtcttttgctatcagctgccagcttctttgctcctctcagcttgtatctcttccaagccccagccc

SEQ ID NO: 827051 - DNA, 120 bp, Artificial Sequence
  ENSG00000245025_12 (sequence is synthesized)
tccagtgctccccattacttaaggctgtgactacatacaatgcggtaccccagacaaagatggagtcccaggcaccagctcagtccctgaaaacacaaccagccagagacacttccctgg

SEQ ID NO: 827052 - DNA, 120 bp, Artificial Sequence
  ENSG00000245025_13 (sequence is synthesized)
ggcagacttggcttaaacctctctccaggggctccttcctcttcagctgcccccaacccatcctgtcccacccctagagggctcccgtgagctctggagacaccaagctatgcctcagga

SEQ ID NO: 827053 - DNA, 120 bp, Artificial Sequence
  ENSG00000245025_14 (sequence is synthesized)
agcccccaagcccagactcatggcgtggacccccagccaggtagtcctgcagccttacctcctggcacacacgatattggtcgatggcccatactgtgggcacatgcgtggccagcagct

SEQ ID NO: 827054 - DNA, 120 bp, Artificial Sequence
  ENSG00000245025_15 (sequence is synthesized)
ggtactgggtgagggtggcattgcaagcgcgggcacagatgagcctggtcttacccacggcgttgtcccccaccacaacgcacttgatggtctctacgtttggcctttcataatccatgt

SEQ ID NO: 827055 - DNA, 120 bp, Artificial Sequence
  ENSG00000245025_16 (sequence is synthesized)
cagaatccattaaacgggacctgagggagaggagggaggcggtcaggacggcatggcatgccagctcgccgtgggccagggccagcacccgcagctctcctcagccaggctgccccctct

SEQ ID NO: 827056 - DNA, 120 bp, Artificial Sequence
  ENSG00000245025_17 (sequence is synthesized)
gcaagccccggagctgacaggaggaggaaggagtgggcaacgttctgggcaagagctctgcgagggtccaaggggccaggagcccattcaggctgagaggagcagtgtcaccagatgggc

SEQ ID NO: 827057 - DNA, 120 bp, Artificial Sequence
  ENSG00000245025_18 (sequence is synthesized)
cacctgtccccttcctgctcccacgatcctccagctgtgcgtctggatgaaggagacctacgcgagatcaccagtggagcttgccgaggccctgccctgtcccctctccagagagggcag

SEQ ID NO: 827058 - DNA, 120 bp, Artificial Sequence
  ENSG00000245025_19 (sequence is synthesized)
ctcactcatctgctctcctcctccttccccggcagagcagtggcagcagaacaacaaacagctgagagaagcagagtcggccacgtccccaccccttcccagcatgcctgagggcagggc

SEQ ID NO: 827059 - DNA, 120 bp, Artificial Sequence
  ENSG00000245025_20 (sequence is synthesized)
tcaaccccagaccccagtcccctttatggagatgcaagagtttttcctcccagcctctctaggatggggaggttcctggatgcacctgaccagcccaggggcctccctttctctattcgg

SEQ ID NO: 827060 - DNA, 120 bp, Artificial Sequence
  ENSG00000245025_21 (sequence is synthesized)
ggtctgtcctgttgcccatgtgtcatgctcagctacaggtccagctttcagatgcgggtgaggggaaccacaggcctatgatgatacagtcagtggccaatgggcctctacttcccctac

SEQ ID NO: 827061 - DNA, 120 bp, Artificial Sequence
  ENSG00000245025_22 (sequence is synthesized)
ggggggctgtcctcccagcaccctgcccccagcgtcagagagtgagatccacctccaccctcttctgcccttcccattcctagggaggatgatcctcaggctgaagatcccaggcagctg

SEQ ID NO: 827062 - DNA, 120 bp, Artificial Sequence
  ENSG00000245025_23 (sequence is synthesized)
gcactcctaggtgatgttcactaaactggctacatgggcgatgggattgccagaaagcaaaagatcagaaatttgagcctgaatttctgggcaaatgcttgcctcagttgccttcgatgt

SEQ ID NO: 827063 - DNA, 120 bp, Artificial Sequence
  ENSG00000245025_24 (sequence is synthesized)
tgagcagagaggaagtggcttgtccacccccagagagggatggcttgaatgaacaaacagaaggcacttctgtagtcagatgtcatgttcgtgtttaaaaatctgtcgccaggaggccct

SEQ ID NO: 827064 - DNA, 120 bp, Artificial Sequence
  ENSG00000245025_25 (sequence is synthesized)
ggcctcggcatccaccctcctgggattagggagcaggggcagggccagcgtgattaggacgcttggtttcgccagcgtcatctgcccgccccactcacattcctgtgtgtatgaaagtcg

SEQ ID NO: 827065 - DNA, 120 bp, Artificial Sequence
  ENSG00000245025_26 (sequence is synthesized)
tctgggggggctttagcagcccggagtcatccctcctaggctaaggaaggctgagctctgagtgctggaggctgcccaggcaccctggctgctgagccatccagcccagagccaggccac

SEQ ID NO: 827066 - DNA, 120 bp, Artificial Sequence
  ENSG00000245025_27 (sequence is synthesized)
cagcaacaacagggaggctccattcctgctgggctgtaactggatgccagcatgcagggatgcagaccgaaatatccaagtaacgatagcaactgggatccgtgcgagtggatgcatctc

SEQ ID NO: 827067 - DNA, 120 bp, Artificial Sequence
  ENSG00000245025_28 (sequence is synthesized)
agcaacctaagcaaaaagtgcagcaaggacttctcaatgagacaacctcctccgcctttttggaatgttacaggatctggacccttcaacgaggtctccatgcagtgccctcatggtctc

SEQ ID NO: 827068 - DNA, 120 bp, Artificial Sequence
  ENSG00000245025_29 (sequence is synthesized)
cagggcaactgtaccaccccttctctctcctaaccctccctcagcagacaaccgttttttgtttttgtatttttttgagacggagttttgcgcttgacacccaggctggagtgcagtggc

SEQ ID NO: 827069 - DNA, 120 bp, Artificial Sequence
  ENSG00000245025_30 (sequence is synthesized)
agaactgttaagaactgttattctaaccacaggcttcctcctcccaattctctctcctgaactgaggaccgggaaccccactttgacagttcctgatctcaagttgaggaatgtgctggc

SEQ ID NO: 827070 - DNA, 120 bp, Artificial Sequence
  ENSG00000245025_31 (sequence is synthesized)
gccaggaggcagcatctgggctgtggtttctgttttgtcgagtgaataccaaaacagatataatcccaaatacaaaatatgtgcagctggaggataaagattaaaacccaagagccaaaa

SEQ ID NO: 827071 - DNA, 120 bp, Artificial Sequence
  ENSG00000245025_32 (sequence is synthesized)
gaacttctttctcaagttccgattctcccagcatgtaggtctgtagacagaagcgggggaatgaggaggcctaatggagggatgccagttctcaaattcaggagcaccttgacagtgaga

SEQ ID NO: 827072 - DNA, 120 bp, Artificial Sequence
  ENSG00000245025_33 (sequence is synthesized)
ataatgccagaacaccagcagagcagtgctgggccaagttcagctactttgtgatgaaaacactgctgcccacctgtgctatgtcacctctagagttaagcagtggtcagccaatcaaca

SEQ ID NO: 827073 - DNA, 120 bp, Artificial Sequence
  ENSG00000245025_34 (sequence is synthesized)
agtggaaattgacaaatactgtgccatgagtttagacatcagaccttctgggttgcgcaaccccttccatccattccccagccccttcagcagtccccttgtccttcagctgcctctctg

SEQ ID NO: 827074 - DNA, 120 bp, Artificial Sequence
  ENSG00000245025_35 (sequence is synthesized)
tttgtatcatctcaccctttctaccctgtcccaactgcctgactggcaaacttcactgtcctatctaggaagaggcaagtcacttatattttctgggcatcagtctccccctctgggaaa

SEQ ID NO: 827075 - DNA, 120 bp, Artificial Sequence
  ENSG00000245025_36 (sequence is synthesized)
tgggtatgaagacattggaagagtctcctgaaccgtggttaatttgtgccaagagaggctgggctgaaaggaggtatttgtcttcttatgtaatgtggtattatataatgctagattgca

SEQ ID NO: 827076 - DNA, 120 bp, Artificial Sequence
  ENSG00000245025_37 (sequence is synthesized)
tatctatatgtgtaattatatctgtctttaagatacagactggcccaattcaagtgttagaactcttagtctaatcaggcctgtcttaaaggaggatcctgtcctggagagagtgtgcca

SEQ ID NO: 827077 - DNA, 88 bp, Artificial Sequence
  ENSG00000245025_38 (sequence is synthesized)
accaaagtactgtgctgggattccaggcatgagccaccacggtcggccagaaacacctttaaaaagacaatactacatcatgatcagg

SEQ ID NO: 827078 - DNA, 120 bp, Artificial Sequence
  ENSG00000245025_39 (sequence is synthesized)
ggaagcacggaggccagcaggaccggagcccccagcctcatccacgctctcgcacacgtcaaagctggctgctcggagcaggaagtctcgcccatggtggtggtggtgatggtggtggtg

SEQ ID NO: 827079 - DNA, 120 bp, Artificial Sequence
  ENSG00000245025_40 (sequence is synthesized)
ttgatcagagtggccctggtggtcctctgggtgggtgccccctggctccgaggggccccccagctccccctcactcaggtccatgaggaacaggtcatagaacttggaggaagaggtgga

SEQ ID NO: 827080 - DNA, 120 bp, Artificial Sequence
  ENSG00000245025_41 (sequence is synthesized)
gaggtagatcttgtgggcaaagatgcgcacccgctcctgcagcaccaggatgacgtccgcgcagagcgggtcctccaggaggtgggcggggcactcctcgctgctggagggagggtcggg

SEQ ID NO: 827081 - DNA, 120 bp, Artificial Sequence
  ENSG00000245025_42 (sequence is synthesized)
caccacgatgatcgggggcggtggcttggggggtaggaagggtgcctgcagcagaggccgctgcacattgcggaggtgggacttccagaactgcaggtggcggcgggagatgagtgcagc

SEQ ID NO: 827082 - DNA, 120 bp, Artificial Sequence
  ENSG00000245025_43 (sequence is synthesized)
tcggatggcgttgtcaaagacgtccttgatgccgaactgggccaccacgctggtctcatagtaggggatgcccagctccttggccacctcccgacccttctctgggggcaggatttcatt

SEQ ID NO: 827083 - DNA, 120 bp, Artificial Sequence
  ENSG00000245025_44 (sequence is synthesized)
aggtttgatgggcctggtaggttcaagaaggaaaccaagcttgtgttggtggtggagggaggctgcctgttcttccacaggctggagggactctgctcaggatctgggtgccaatcccca

SEQ ID NO: 827084 - DNA, 120 bp, Artificial Sequence
  ENSG00000245025_45 (sequence is synthesized)
cccactcctgccctgctctgtctggccaaatcccatcaagctccttcaaggtccactccaagccctttttcttccagaaagctttccctactatgccaggccccagtgacctccccagta

SEQ ID NO: 827085 - DNA, 120 bp, Artificial Sequence
  ENSG00000245025_46 (sequence is synthesized)
caaagccgtgacagcactgcctctctggcaattagcaggcaatgcttcacatgggtatttaacatgctcacatatttagtttatccctcagcaaaattataggactttttcatgcaaata

SEQ ID NO: 827086 - DNA, 120 bp, Artificial Sequence
  ENSG00000263146_0 (sequence is synthesized)
ggcaggggtctgagactacttttgagaagagaaacaacgcaaaacgatcgctggagggccagagccctggtcgaaggtgccctagcttttatgacctggttaattgtgtctcctttttat

SEQ ID NO: 827087 - DNA, 120 bp, Artificial Sequence
  ENSG00000263146_1 (sequence is synthesized)
agcaagtccagagccagctggactcgcagcctctggcccggcggcaccaactcctcactgggtcattttgagcgcgctgtgcccaccttttctgttgcgtgtggacgtggggaggatctt

SEQ ID NO: 827088 - DNA, 120 bp, Artificial Sequence
  ENSG00000263146_2 (sequence is synthesized)
ctaagtccctccaacgaaggcaagtgtgagactctggccctttatttgtaagaagcaagccttcagattgcagaagtgtcgcgcgggtcgccgtgcgttgcgcgagtgggaagatggagg

SEQ ID NO: 827089 - DNA, 120 bp, Artificial Sequence
  ENSG00000263146_3 (sequence is synthesized)
ctttcccgggatttcggggatgacacgggggccagtggtcctgtctggtgtgaaccgtcagcacagatggcctcctggagcttccccgagtcgttcgctgggggaagcgggcggtgagcg

SEQ ID NO: 827090 - DNA, 120 bp, Artificial Sequence
  ENSG00000263146_4 (sequence is synthesized)
gggaggaatccccgcctgctccatcggacccggcctggcgcggctcgcggcgctcggcgggctcccttccattctagaatcttcccgcttgcttcccagcccgcgttcttccgcctgcct

SEQ ID NO: 827091 - DNA, 120 bp, Artificial Sequence
  ENSG00000263146_5 (sequence is synthesized)
ttaattgtgtaagtttgacgaagtcagagctttgggttccaggaaaagcgcaggagggtcatagaggaagggagggcgcaggttggagtcaggtccaaacagtccctatcgccacttttg

SEQ ID NO: 827092 - DNA, 120 bp, Artificial Sequence
  ENSG00000263146_6 (sequence is synthesized)
agccctgcgtgggcgccgtcccagattccgggcggtgcggggtgcagagatctggagagacttgcgggctccccagcgcaggctgctctgggatttcgttggaagatccggcagagcctt

SEQ ID NO: 827093 - DNA, 120 bp, Artificial Sequence
  ENSG00000263146_7 (sequence is synthesized)
gcggccgccaggatgtgcccccggccccgtcgtcgccgcgcccgcgcccctcgccccagtacgtcttttttcgtttcctaaatttcttatttttgtccttgcaagtggtcctgtctggtg

SEQ ID NO: 827094 - DNA, 120 bp, Artificial Sequence
  ENSG00000263146_8 (sequence is synthesized)
ggaaatggtgcgcacgagtaatttctgcggtgcacccttttaaaaattgacaagtgaacaagatcaattttttaagaaagcaaaggtagaaaacaaaaggcgtgcgacttcttgactggc

SEQ ID NO: 827095 - DNA, 120 bp, Artificial Sequence
  ENSG00000263146_9 (sequence is synthesized)
ttgttcccgcctttcttccttctctatactcagatcagaaacttttctttaattgctcttattcagtgcgacaacttttaataaaagcatttgcattttaagcctgagttgcaaccatag

SEQ ID NO: 827096 - DNA, 120 bp, Artificial Sequence
  ENSG00000263146_10 (sequence is synthesized)
atttattgcgaagtgacaacgtgtctatggaatattttcgcagatgagacaggacatgcgctctagtcgtgcccagattaaagcgacgctgggccatgtgcctgtgtagtgcagactcgg

SEQ ID NO: 827097 - DNA, 120 bp, Artificial Sequence
  ENSG00000263146_11 (sequence is synthesized)
aggggcacacacatactcgtcaccacatgaccactgtctattaatattgtcatacctaaacactcgcaaaaacaaaagttgcttttcttccctgtaattaaatctaatttgttaattgtc

SEQ ID NO: 827098 - DNA, 120 bp, Artificial Sequence
  ENSG00000250149_0 (sequence is synthesized)
aacactcaaccctagacgctgccgtggggtcagagcccatgctcccaacgacctgcccgtctgcatgctcctcccctaggggtttgagctgctgcagcagagcgccaaagaagcaagcca

SEQ ID NO: 827099 - DNA, 120 bp, Artificial Sequence
  ENSG00000250149_1 (sequence is synthesized)
gaacttttcctgtttcaactgggacctcgcccaggatcccggaagggattccagcatttgtcccagcatgttttatgcagaaagaagtgatcaaggaaagtgtccaagacatggtaagcc

SEQ ID NO: 827100 - DNA, 120 bp, Artificial Sequence
  ENSG00000250149_2 (sequence is synthesized)
aaatgtagaatgaggcagtcatagtgagaggattgtccactctgttatgcatgattgagagtcatatttattcctaaactacattcttttattattactgttaacttttctctgaagtcc

SEQ ID NO: 827101 - DNA, 120 bp, Artificial Sequence
  ENSG00000250149_3 (sequence is synthesized)
tgattgtgaagacttaatttgtgtaattaaaggagcggaacaaaaaaataaggatacatcaaaattgcattgatatgatgaaatggcaagaatgaatctcataattaggagaccagaagc

SEQ ID NO: 827102 - DNA, 120 bp, Artificial Sequence
  ENSG00000250149_4 (sequence is synthesized)
atcagagacccaagcaccaaaattggaaaacattttttcacagggccctgtcatttctgcatatcttgtgataagaggtactaagggcactttgttgtagattatctttccaaagatatt

SEQ ID NO: 827103 - DNA, 120 bp, Artificial Sequence
  ENSG00000250149_5 (sequence is synthesized)
tataaaaggaacaagtttgaacaacgtctccttctagagcaaaagataggcatgctttcttcccattataaaaatgcagattcttttaactcaaggttccttttgtttaatttcaaccac

SEQ ID NO: 827104 - DNA, 120 bp, Artificial Sequence
  ENSG00000250149_6 (sequence is synthesized)
catgtgctagcatccatctagtctattctgcaccatcccatgggatggaggggtaaaggaaactgatgcaaatttgtgcatgttcatgttgcttgctgtacactgacacagaaatcgtct

SEQ ID NO: 827105 - DNA, 120 bp, Artificial Sequence
  ENSG00000250149_7 (sequence is synthesized)
accttatagtagtatccacagagcttgttagatgtcaacttaggtaacatctcaaacctttcatacttctgcacagttttgggaatgaagatgggatgctgacagaaatacagctttctg

SEQ ID NO: 827106 - DNA, 120 bp, Artificial Sequence
  ENSG00000250149_8 (sequence is synthesized)
aaaagaaaacataagggcgtggtaggccaattaacctaatttgaaggaacaccatcagaataaatagcaaatgtgttgaacaaactgtatggtaaattgggcaaaatagtcctcttcttt

SEQ ID NO: 827107 - DNA, 120 bp, Artificial Sequence
  ENSG00000250149_9 (sequence is synthesized)
attgcctgttgatgagaagaaaacaggacagtagttagaagatgagtacttgaaatagtttcagagacaagttcctgaacaatatccttattgtttactatcctttaggcggagaatttc

SEQ ID NO: 827108 - DNA, 120 bp, Artificial Sequence
  ENSG00000250149_10 (sequence is synthesized)
ttaaagaactggtggtcagccttgttccatttgattgcaacaactagtgctaagatatgtcctctttcagacaatagttagaaaagcatgtgcctaagctgaatgagaacaaaaaaaaaa

SEQ ID NO: 827109 - DNA, 120 bp, Artificial Sequence
  ENSG00000227260_0 (sequence is synthesized)
gagtttggttctcccttctttgtcaattcccctgtctcctgaatgtctcattctcaaactaattttgcttgaaattgtggctggagatggtatgtttgaaacttaatatgatgaacatag

SEQ ID NO: 827110 - DNA, 120 bp, Artificial Sequence
  ENSG00000227260_1 (sequence is synthesized)
aacaggaagatttcaacacctttttagcaaaagatgttcacataaacctgaaatgaatatagccaaagaggacgtggtctttcagcacctccagctaaaaaatgctgcagaggaacttcc

SEQ ID NO: 827111 - DNA, 71 bp, Artificial Sequence
  ENSG00000227260_2 (sequence is synthesized)
tcctgacctcgtgatctgtccagcctttgtcatcatttcagatagggtgaaggaatggtttaagtcgcctc

SEQ ID NO: 827112 - DNA, 120 bp, Artificial Sequence
  ENSG00000227260_3 (sequence is synthesized)
atcatttcagatagggtgaaggaatggtttaagtcgcctccaaggtatcttgttgggggtgaggggtacagaggggtcttactgaatggtgatgaaaaaggggacacaagcgaaaaatca

SEQ ID NO: 827113 - DNA, 120 bp, Artificial Sequence
  ENSG00000227260_4 (sequence is synthesized)
acattggagaaaagataactaaaccctgggaagcttaaggaacaaagtgtaacaaaacaacatggattgttttataaaatactttgagatatccaggattaaaagtatgataaaaaataa

SEQ ID NO: 827114 - DNA, 120 bp, Artificial Sequence
  ENSG00000250141_0 (sequence is synthesized)
agttagaggcagtgttatgctagagctgtcccttagcgagctgattttaaagcttgaaatcggccatggataaattcccagaagtggaagacattgccaagtttttcttcagaaagatgg

SEQ ID NO: 827115 - DNA, 120 bp, Artificial Sequence
  ENSG00000227269_0 (sequence is synthesized)
gaggagatgacctcaagacaagcagcttccatgcaatactgcagcaagggcttactttcctgagcatttcccacgctccaatcactgctctaattcctttagatgtgttaactcacttcc

SEQ ID NO: 827116 - DNA, 120 bp, Artificial Sequence
  ENSG00000227269_1 (sequence is synthesized)
agccaaggccaaggcccccagaatgaaaaactgacgcagccaccccttcctgtgccagagacaggagaagggagggagactgacggcctttgttctctgagcaagaccgtaaagcacttc

SEQ ID NO: 827117 - DNA, 120 bp, Artificial Sequence
  ENSG00000227269_2 (sequence is synthesized)
gcctacaggccacaagagggcgatggtggtccacacataagatcttcccaaagagccagccaaaaacgcctgcctggagaatctggaggttgtgaaaggtgactttgttaaggaagggcg

SEQ ID NO: 827118 - DNA, 120 bp, Artificial Sequence
  ENSG00000258795_0 (sequence is synthesized)
atttgcatcaggcctctttggaaaagtcagagccttctaggcaagaaaggagagggagaaagttgccggccaagtgatgaataggaataaaagtcctaaaaatacaggttctatggcata

SEQ ID NO: 827119 - DNA, 120 bp, Artificial Sequence
  ENSG00000258795_1 (sequence is synthesized)
gcccaaactttgataaaccaagtgaagatctagatctgcagagaaacactaatcctgacttaggagcctggtgtgaaaaatcagaaactgccaagggaaactgtactcaaaagagcactg

SEQ ID NO: 827120 - DNA, 120 bp, Artificial Sequence
  ENSG00000258795_2 (sequence is synthesized)
gatatggggtcattgaggagcaggtggactctccactgggaaatggaaaacatcaacttttaaccctagtttttcaaccatagcactattgacaattaggcctaggtaattctttgttgc

SEQ ID NO: 827121 - DNA, 120 bp, Artificial Sequence
  ENSG00000267643_0 (sequence is synthesized)
tcttgaatacgttaagaaagtcttgtttgtgtagaagagtttcaaatcatgtgagtgatgaagggacccttctgttgaaccttggtgtgcattttaggtccattttgggtttactccttt

SEQ ID NO: 827122 - DNA, 120 bp, Artificial Sequence
  ENSG00000267643_1 (sequence is synthesized)
ctgctctctctgttgccctcctccttccacctggagcatggcccagcatcaggttggcgcatgctgtgatcagctacctccatgcaccacaccaagcaaagctctctgggtgacacagtt

SEQ ID NO: 827123 - DNA, 120 bp, Artificial Sequence
  ENSG00000267643_2 (sequence is synthesized)
gccaccaccagggcactgacccttactctgtgttctcctagctcctcctgagggtgctgtaggagacatctgcaaaaaagaagatgctggcaatatgccatcaacctcagaggggagtat

SEQ ID NO: 827124 - DNA, 120 bp, Artificial Sequence
  ENSG00000267642_0 (sequence is synthesized)
actcaccgcgctcacactcgccgcgctcacactcgccctctcgcgcgcgcacacccgtgcacactcgccgcgcgccccctactccagccacgccctgaaaccctcgcgagacccctctcc

SEQ ID NO: 827125 - DNA, 120 bp, Artificial Sequence
  ENSG00000267642_1 (sequence is synthesized)
ctccaactcagcccccaaattcctggggcgctgcccactccgtgcaggccgttccacccgcttcccgctgtcccgctcaggccgaaagccgcggacacggtggcctttggaacttgtgta

SEQ ID NO: 827126 - DNA, 120 bp, Artificial Sequence
  ENSG00000267642_2 (sequence is synthesized)
ggagtccgccccgcacctcgacgcctctgtcctgtgcgctcacgcgtgcacactcactcacacacacaccgcactactctcctctgttggactgccttaaccctgtctctgcttggctgg

SEQ ID NO: 827127 - DNA, 120 bp, Artificial Sequence
  ENSG00000267642_3 (sequence is synthesized)
gggaactcccagagccttgttgaaagggtacagagccagtgtcttcggatacagaactaataatgttacttcacattgtctccatgtatatataccagcatcactctacatattaaataa

SEQ ID NO: 827128 - DNA, 120 bp, Artificial Sequence
  ENSG00000267642_4 (sequence is synthesized)
tagggaagtatccttttttccattttccttttttattaaaaaacctataaatatgaaaaatctaatatttatttgcagctcctcaacacgtgatcttacgtgttccctgggatatgtgca

SEQ ID NO: 827129 - DNA, 120 bp, Artificial Sequence
  ENSG00000267642_5 (sequence is synthesized)
tctttttgttggcgaccatagatgtaaaagatatttgcaaaagatatttcaaacttgggtgtaattcaagcagtctccaatagcagagacaatatgccttgaagaacacctatgtcagga

SEQ ID NO: 827130 - DNA, 120 bp, Artificial Sequence
  ENSG00000267642_6 (sequence is synthesized)
aggctcaccctgcaacagttctcaggaagatctttccaggagatctgcccgggaagagcagacatgcaacagattcaatcctgtgggaagattactctgtcaagaaagagcaaggatagc

SEQ ID NO: 827131 - DNA, 120 bp, Artificial Sequence
  ENSG00000267642_7 (sequence is synthesized)
cattcacaggattgcaccatgaggctcatggattagaaattaagatgatagcaatgagatcaagagtgttaaaagcaggagcagagtgtagttgtggggcttgcctgcaatatctgattg

SEQ ID NO: 827132 - DNA, 120 bp, Artificial Sequence
  ENSG00000267642_8 (sequence is synthesized)
ggcattagctcacagtggagaagtctgatgggagaggagtgcaaaggaatgaaggaacataatatccatggttggctttggatcccaagtatgactctgttgcaagacccattggaagtt

SEQ ID NO: 827133 - DNA, 120 bp, Artificial Sequence
  ENSG00000267642_9 (sequence is synthesized)
ataatagaggttgtgctacatacttcttccatcagtctggattggctctgaattgaagataattattcctgcagtatgtagagaaagagccaagaaagagattgattacaaatggaagat

SEQ ID NO: 827134 - DNA, 120 bp, Artificial Sequence
  ENSG00000267642_10 (sequence is synthesized)
atttcagtgtaactgtcaagttagcttatatgctgatctttatctgttagattatttagtagtatctaggtatctactagatttcctaaaggcagtcagtcacaggggcttccaaataaa

SEQ ID NO: 827135 - DNA, 120 bp, Artificial Sequence
  ENSG00000267642_11 (sequence is synthesized)
aaatacttcagattatgacctggatttgagacaaaattccaccattcactatctgtgtgaactaaggaagttgtttatttattgtgaaccaaagtttctttctttctttctttctttttt

SEQ ID NO: 827136 - DNA, 120 bp, Artificial Sequence
  ENSG00000267642_12 (sequence is synthesized)
ctctgtcacccaggctggagtgcagtgatatgatctcagctcactgcaacatgtgcctatctgcctcctgggctcaagtgattctcgtgcctcagcctacctagtagctgggattacagg

SEQ ID NO: 827137 - DNA, 120 bp, Artificial Sequence
  ENSG00000267642_13 (sequence is synthesized)
tgggattacaggtgtgtaggtgtgtgccaccactccctggctattttttgtattttcagtagagatggagttttttccatgttggccaggctggtcccgaattcctggcctcaagtgatc

SEQ ID NO: 827138 - DNA, 120 bp, Artificial Sequence
  ENSG00000267642_14 (sequence is synthesized)
agtgtggggattacaggtgtgagccaccccactcagctccctcagtttctttaagtgtgaggtgaagataataatctgtatctcatagctttcctctgaagattaactatattattttaa

SEQ ID NO: 827139 - DNA, 120 bp, Artificial Sequence
  ENSG00000267642_15 (sequence is synthesized)
tgaagattaactatattattttaaaagatttttaacacagtgtttgacatacactaagtgcttaataactgatagctattattaatattatttttaaagcctcagtattctatgaatgaa

SEQ ID NO: 827140 - DNA, 120 bp, Artificial Sequence
  ENSG00000267642_16 (sequence is synthesized)
caaatatatctaatctcaaatgtttatattttgaaaactatctaggcttacactgatcttattcatgcaataaagaggatagttctggagactgcgcattcagggaagacagaatgggtt

SEQ ID NO: 827141 - DNA, 120 bp, Artificial Sequence
  ENSG00000267642_17 (sequence is synthesized)
agatgtactttcctattcctgctgataagtacagttaaaaatcctggacatcttatatacacaaaaatataaaaatgttgaaaggtgaaaaggaagaagtaaattggcttgagaatttgg

SEQ ID NO: 827142 - DNA, 120 bp, Artificial Sequence
  ENSG00000267642_18 (sequence is synthesized)
ggacccaagggacagtacataaatgagttccctggattttgtattttggtttttgtctcatatatcctagacagggtattaaagaagcagactaccaagagatgccaaggtgcagaaaaa

SEQ ID NO: 827143 - DNA, 120 bp, Artificial Sequence
  ENSG00000267642_19 (sequence is synthesized)
aagcaccagcaaaggtctactgtctctaagcaaaggaccaggaaagggacagccaaggaagacacaacacttactgtgctatgccagccaaataccccaagaagaaacccatggctctgt

SEQ ID NO: 827144 - DNA, 73 bp, Artificial Sequence
  ENSG00000258791_0 (sequence is synthesized)
gaagctgtttttccctctttggggtctcagagagattggtggcaaggactcctgggaagagaaaagctgaagg

SEQ ID NO: 827145 - DNA, 120 bp, Artificial Sequence
  ENSG00000258791_1 (sequence is synthesized)
gattggtggcaaggactcctgggaagagaaaagctgaaggacactctggcaagaggccaaggtgagagcctcgtgggaatttcacaaattttatagaagcagaggagtgctatttgagca

SEQ ID NO: 827146 - DNA, 120 bp, Artificial Sequence
  ENSG00000258791_2 (sequence is synthesized)
aggggcggataacacctacaatccactcaggatttccaagcatagccggatgcagaagtactcatacttcactacagaatcacctggggagcttttaaccttctgattctagtgtttccc

SEQ ID NO: 827147 - DNA, 120 bp, Artificial Sequence
  ENSG00000258791_3 (sequence is synthesized)
tgtttttaaaattctccagaagattttaatgcagtacaagtaagaagacaggactgcaattcacaagaacagtatatcctggtgattcctcagaacagaacagactcaaaaaaaaaaaaa

SEQ ID NO: 827148 - DNA, 120 bp, Artificial Sequence
  ENSG00000258791_4 (sequence is synthesized)
aaagaagaagacaaaaacaaagataacatgaaaccagattccacaaccatgtttcaagtgacctatgtgagtcaggcccatgagacacatactacaccagtttcagtgaagcctcacaaa

SEQ ID NO: 827149 - DNA, 120 bp, Artificial Sequence
  ENSG00000258791_5 (sequence is synthesized)
atttaggggggtagaggaaagggtcctatgcccatttcatagatgaacaaactaaggacttaatagatttcaacaatttgttcaaagtctctaccttaaaggattttggggttctggttt

SEQ ID NO: 827150 - DNA, 120 bp, Artificial Sequence
  ENSG00000258791_6 (sequence is synthesized)
ttgtttttacctgccctggtaactcttctaagaatgagccaagaagaagacaaccttctaagatacttttcctgccctccaagggctgtggagaatctgatagggttggagctgccctct

SEQ ID NO: 827151 - DNA, 120 bp, Artificial Sequence
  ENSG00000258791_7 (sequence is synthesized)
cgactcactcatcaaagggcatctatctagaagccctgctccttcagggacatctgaggttgatgagctgatccaataagccatcagagctggaatagtagtagttaacaatggctctct

SEQ ID NO: 827152 - DNA, 120 bp, Artificial Sequence
  ENSG00000258791_8 (sequence is synthesized)
gaaggacactctggcaagaggaaaccccgagccaaacgtatggccacctctgaccactcgaccagcccagcatggtgtacatttctgggtagcttatcacgccttccaagcattgccttt

SEQ ID NO: 827153 - DNA, 120 bp, Artificial Sequence
  ENSG00000258791_9 (sequence is synthesized)
atcttccttctccccatcaagcctgtattgttttccttttgaatcataagcacttttgttaaatacctcaaatctttcgagaacagcaaggagcaaaataaacttaacttctctgagacc

SEQ ID NO: 827154 - DNA, 71 bp, Artificial Sequence
  ENSG00000258791_10 (sequence is synthesized)
ccatgagtatgactatgtgctgagtcctgtgagtcctcctactgaatcatcaaagccaggggggaagctgt

SEQ ID NO: 827155 - DNA, 120 bp, Artificial Sequence
  ENSG00000258791_11 (sequence is synthesized)
ctgtgtgggcaccagtctttacatccatgttccctctccctcgaggacccaggttgacctgtccaagagctctctcatcatgctgaattttggtgacagcatagggtgagcctgtggatt

SEQ ID NO: 827156 - DNA, 120 bp, Artificial Sequence
  ENSG00000258791_12 (sequence is synthesized)
ctacagctcagcaaacctccagccaagtagtttcccttcatatggttccccagtctttacatgtggcatccaagaagggaaagtatcccctctcccttgatgagatgtcagcccctcacc

SEQ ID NO: 827157 - DNA, 120 bp, Artificial Sequence
  ENSG00000258791_13 (sequence is synthesized)
acacatggcctgggtgctaggaggacccatacgggctagggaggggccactgggaggggaatgtgtagggggcagaccccatctagctgcttcttgatgagcctggcatggagtgtttga

SEQ ID NO: 827158 - DNA, 120 bp, Artificial Sequence
  ENSG00000258791_14 (sequence is synthesized)
tccaaatcttgacagcacattggtggctgttgtcactgtgtggcaggacttgcagttgagcttcttgtgccttggacttcttgtgacttggacctcagcctccattgaagaccgtaacac

SEQ ID NO: 827159 - DNA, 120 bp, Artificial Sequence
  ENSG00000258791_15 (sequence is synthesized)
aagtcccaacttacaaacaaatgagggaatgaatgagctttggcattggaaaaacctgggttcaaatcctggctactctacttcctgtgtcagttgcttcacttttctaaatataaattg

SEQ ID NO: 827160 - DNA, 120 bp, Artificial Sequence
  ENSG00000258791_16 (sequence is synthesized)
tcagagagattggtggcaaggactcctgggaagagaaaagctgaaggacactctggcaagaggcatcagagtcaaagctctacacaaggacagtggctgtgatggttaaaggaagggctg

SEQ ID NO: 827161 - DNA, 120 bp, Artificial Sequence
  ENSG00000258791_17 (sequence is synthesized)
gatgtgaaaatagctgatggaggagtcagagagcctggcaagtgattgttgagatgaaaagaaatgaaaatgccaagatccccagcctgttactggaaggaaagtgactccattaatccc

SEQ ID NO: 827162 - DNA, 120 bp, Artificial Sequence
  ENSG00000258791_18 (sequence is synthesized)
ttcagaaggagcaggttctgcttagaggattggtgtgaaaataaggttattatttgacatattgagttgaaaacatctgcggaacatgaacaaagaaatgccttaaagcctgtaatccca

SEQ ID NO: 827163 - DNA, 71 bp, Artificial Sequence
  ENSG00000258791_19 (sequence is synthesized)
caaacaaacaaaaaatgtctaaaaggaaagtggtaatataacctacagcagtgtactgggttgaataaggt

SEQ ID NO: 827164 - DNA, 120 bp, Artificial Sequence
  ENSG00000258791_20 (sequence is synthesized)
ggtaatataacctacagcagtgtactgggttgaataaggtccccccaaaatggatatgtacctggcacctcagaaagtgatcttacttggaaatggacttatcaaacttatacatctgat

SEQ ID NO: 827165 - DNA, 120 bp, Artificial Sequence
  ENSG00000258791_21 (sequence is synthesized)
tctgatggttttataaagggcagttcccccacacaagctctcttgccttctgccatccatgagtatgactatgtgctgagtcctgtgagtcctcctactgaatcatcaaagccagggggg

SEQ ID NO: 827166 - DNA, 120 bp, Artificial Sequence
  ENSG00000258791_22 (sequence is synthesized)
gattggtggcaaggactcctgggaagagaaaagctgaaggacactctggcaagaggtaataagttagtccttgcaaaatggccatgggctggatgacaaggaaagaagcagccattacag

SEQ ID NO: 827167 - DNA, 120 bp, Artificial Sequence
  ENSG00000258791_23 (sequence is synthesized)
gacacagtgggtgaaactgacacaagcttaagttttctaggagcaaatgtatctcataatcaattttaagttttttttttgttcgcaatttccatatattatacccaagcactcagcaaa

SEQ ID NO: 827168 - DNA, 120 bp, Artificial Sequence
  ENSG00000258791_24 (sequence is synthesized)
cagtctaacctgcatttggagaattaacccattgtccatgtttctgcaaagcctcatgaagagagatattaagggaacaagaggtgccctgcaaagagatgaagctccaggctaaggcca

SEQ ID NO: 827169 - DNA, 120 bp, Artificial Sequence
  ENSG00000258791_25 (sequence is synthesized)
gttagtccttgcaaaatggccatgggctggatgacaaggaaagaagcagccattacaggacacagcatcagagtcaaagctctacacaaggacagtggctgtgatggttaaaggaagggc

SEQ ID NO: 827170 - DNA, 120 bp, Artificial Sequence
  ENSG00000258791_26 (sequence is synthesized)
gatatgaatactaaaaacaagtgtagcctcttgttgctagaggaagctagaaaatcaaagttgcacatgcttgttttttgtaacaaattacagtcaggctgaatgtactatttatggcct

SEQ ID NO: 827171 - DNA, 120 bp, Artificial Sequence
  ENSG00000258791_27 (sequence is synthesized)
gcttaactgacttaacaatatattgtatcattaaaaattctgctacaactcagtttgtactggctgctaattattctgttgtatggaaaaactataatttattttaccaatattctatta

SEQ ID NO: 827172 - DNA, 120 bp, Artificial Sequence
  ENSG00000267644_0 (sequence is synthesized)
ctcaaaaagaaaaaagaaagaaagaaaacgaaataccccataaaacattcaaactatattggaaatatataaaataccggagaagcccttgttttgatataagtaggtctgagtcattga

SEQ ID NO: 827173 - DNA, 120 bp, Artificial Sequence
  ENSG00000267644_1 (sequence is synthesized)
ccagtcttttggaaacgtcagttcaagtgggcaatcgttaaaaacagacacgtgtaggtcctggtcactttgttttgacttcaaacaaaattcacactcaggcactagtttttctttggg

SEQ ID NO: 827174 - DNA, 120 bp, Artificial Sequence
  ENSG00000267644_2 (sequence is synthesized)
tatcttgactcaaatccctctttgactttcttgcataaatcacacccacaatcctataattcatcacctattattttcaatttatttaaacttaaagacagttgtgaagcaatctgatgt

SEQ ID NO: 827175 - DNA, 120 bp, Artificial Sequence
  ENSG00000267644_3 (sequence is synthesized)
gaacagttctagatttttaggattttccctgaatagtttatctttcacatctaattcaacatgtcagcaaatctttttgtgtattacttccaaagcatttaacgtcatttgcaaggaaac

SEQ ID NO: 827176 - DNA, 120 bp, Artificial Sequence
  ENSG00000267644_4 (sequence is synthesized)
aattctttatgcactcacatttcatcagtttatgtaatatttaatttaattatatgattacaatgacagtacacctggcataaacaggctagggacacacccaatcaactcttggtaaac

SEQ ID NO: 827177 - DNA, 120 bp, Artificial Sequence
  ENSG00000267644_5 (sequence is synthesized)
cgacaactcaacccagagcagaggtagctgagttcttgcttttctagaccaggggtcagcaaactatggccctgtgggcctgtttttatacatcctgtgggttaaaaatgccttttaggg

SEQ ID NO: 827178 - DNA, 120 bp, Artificial Sequence
  ENSG00000258793_0 (sequence is synthesized)
cttcggtaaacgttacttatgtgcgtctcataaatcaggtgtctgagttctcaggctgtggctgcagtctaccattgaattacatcccgtgagcaatgttgtccgatttcaccggccagc

SEQ ID NO: 827179 - DNA, 120 bp, Artificial Sequence
  ENSG00000258793_1 (sequence is synthesized)
acgttcttctcgagtgtgggattggtttttgcaagacctcgaaaggattttgataagccacctgcttaaggccggctgaaaaagaagaaaggagggcatatgtgggtcagctcactcgga

SEQ ID NO: 827180 - DNA, 120 bp, Artificial Sequence
  ENSG00000258793_2 (sequence is synthesized)
atagaagaggaatcagcttttcttgtgcacgtgcaacagtggaagtgatggctgactgtgtgttggctccataagaagaacatcacagaaagcaaaatggtgccagctcaacaccagtat

SEQ ID NO: 827181 - DNA, 120 bp, Artificial Sequence
  ENSG00000258793_3 (sequence is synthesized)
gaaaaacctgttaattccaatcacaattcattctttcattcagctcatggaagccaagcagggctttgggacattcattctggcaaagtgaaacaactgactttttgtgaatgctattta

SEQ ID NO: 827182 - DNA, 120 bp, Artificial Sequence
  ENSG00000258793_4 (sequence is synthesized)
agttgtttaaattttccacattggaaataaagtcattgcatttttgtgaggataaaacacaaattgtggtggagtccagcgtcatggtaacaataatattcctactaaattaagacacta

SEQ ID NO: 827183 - DNA, 120 bp, Artificial Sequence
  ENSG00000258793_5 (sequence is synthesized)
atgaaacagaaatgtgattggaacaggtcatggtgcacacacaatttgttattgcatataaataaatgtcaatattctataaattgacatttatagacgtacgtgacaaaatttacaaaa

SEQ ID NO: 827184 - DNA, 120 bp, Artificial Sequence
  ENSG00000267646_0 (sequence is synthesized)
agaacgcaacggaccccagcaacaaaggagtgcagagactctgagtgcggccttctgcttccccggattgacagttggcagggccccgtcccagggcccctgattggatggggttccagg

SEQ ID NO: 827185 - DNA, 120 bp, Artificial Sequence
  ENSG00000267646_1 (sequence is synthesized)
ctccgcccctcagccctgagtgacagggtaagccctgggtaacggagccctgcagagcccggctgattaatcctagctacagcctttctaaggctaagctcactccctgcgccctggtcg

SEQ ID NO: 827186 - DNA, 120 bp, Artificial Sequence
  ENSG00000267646_2 (sequence is synthesized)
ttggctatctgcatttcagccaaacttgctacttattgttagaaggggcactgttagcttcctcgatctttcagaaatgtgtgctgggaattccagactcggtgttcaatggagtcattc

SEQ ID NO: 827187 - DNA, 120 bp, Artificial Sequence
  ENSG00000267646_3 (sequence is synthesized)
ctttgcctcatagcaggaaggaaatccaggccaggccaggccaggcaagactgcaccaggagggagaggcaggtgtcctctacagggcgggaattggggatgagacttcctcacactccc

SEQ ID NO: 827188 - DNA, 120 bp, Artificial Sequence
  ENSG00000267646_4 (sequence is synthesized)
cccgtcccacccctgaatatggaaccgcttcctccccctagacttcattttcaccagcagaagttctcacctggggtcagtttaagcttctaacctaagtaaactattaccttcacaaac

SEQ ID NO: 827189 - DNA, 120 bp, Artificial Sequence
  ENSG00000267646_5 (sequence is synthesized)
cctttctccaggtgacatgtcagacaaatcttactgagcctgatcttcacagattatctttgtatgtacaaattacagtctgtcgccgggaccctttgcacgtaaaaaccaaacactgcc

SEQ ID NO: 827190 - DNA, 120 bp, Artificial Sequence
  ENSG00000267646_6 (sequence is synthesized)
cccgcaaaacgtccctaggctctaggtacagccccagtaaggacagaacctccccccaacccccctacacaaagtgcacctgcacgtgagtctcctgctttccagggctctgtagcttct

SEQ ID NO: 827191 - DNA, 120 bp, Artificial Sequence
  ENSG00000267646_7 (sequence is synthesized)
caggatccacattccttccgcagctgttctgagcagctggaggccacctgcagtagagggcaggctgcccgggaaacacccaggggagctccctttccctccctttgccggctccagact

SEQ ID NO: 827192 - DNA, 120 bp, Artificial Sequence
  ENSG00000267646_8 (sequence is synthesized)
ggcctcagcagggtgtcactggccttaggctctgctgccccctacaggttattcacttcattgatcggttacctgagacaaacaccctcagttccactgtacgtatgtataaagtgggga

SEQ ID NO: 827193 - DNA, 120 bp, Artificial Sequence
  ENSG00000267646_9 (sequence is synthesized)
aggaaaattctaagataattgaagtgaattaaaagacttgcaggcagggtgcgggggctcacgcctataatcccaacccttttggaggctgaagcgggaggactgcttgaacccaggagt

SEQ ID NO: 827194 - DNA, 120 bp, Artificial Sequence
  ENSG00000267646_10 (sequence is synthesized)
cttgagcccaggagtttgaagcttcagtgacctatgatctcgccactgtgcttcagcaagagttgtgatagttgtatcagataaaatagactttaaataaaaaacagtacaaaaagacaa

SEQ ID NO: 827195 - DNA, 120 bp, Artificial Sequence
  ENSG00000267646_11 (sequence is synthesized)
agaagatcatgagatactgataacagaatcaattcagcaagataatatagtaatactaaatatatatgcatccaacattggagaggccaaattaataaagcaaatatttctagacctaaa

SEQ ID NO: 827196 - DNA, 120 bp, Artificial Sequence
  ENSG00000267646_12 (sequence is synthesized)
gaaagatatagatagcaatacaataatagtatgggacttcagcacctcacacacagtagtagatatatcatcaagacagacaatcaacaaaaaaattggacttaagttggactttggacc

SEQ ID NO: 827197 - DNA, 120 bp, Artificial Sequence
  ENSG00000267646_13 (sequence is synthesized)
aaatggagctaacagacgtttacagaacccaacaactgcagaatatacattcttctcatcagtacgtgaaacattctccaaggtagaccatatgttaggccacaaaactagtctcgacaa

SEQ ID NO: 827198 - DNA, 120 bp, Artificial Sequence
  ENSG00000267646_14 (sequence is synthesized)
attttaaagtcaaaatcatttcaagcatcttctcagactgctgaataaaactaaaaatcaataccaagaggaactttgaaaactgtataaatacatggaaattaaacaatgtgctcctga

SEQ ID NO: 827199 - DNA, 120 bp, Artificial Sequence
  ENSG00000267646_15 (sequence is synthesized)
atgatctctgagtcaaagaagaaataaaaacagaaaataaaaattttgtttgaaatgaacaaaaatggcaacacaacatatcaaaacctctgggatataggaaaagtcatgctaagaggg

SEQ ID NO: 827200 - DNA, 120 bp, Artificial Sequence
  ENSG00000267646_16 (sequence is synthesized)
aagtttatagaattatatgcctctgtcaaaaaagtaacaaattaacaacctaacatggtaccccatggaactaggaaaacaagaacaaaacaaatccaaagttggcagaaaagaaataac

SEQ ID NO: 827201 - DNA, 120 bp, Artificial Sequence
  ENSG00000267646_17 (sequence is synthesized)
aaagatcagagcagaattaaacaaaatcaagactaaaaaacaacacaaatgataaacgaaacaaaaagttggttctttgaaaatatcaacaaaagtaataaactgctggctagactaacc

SEQ ID NO: 827202 - DNA, 120 bp, Artificial Sequence
  ENSG00000267646_18 (sequence is synthesized)
aagaaaaaaaagaagattcaaatgaacaaaaccagaattgaaaaagaagacattacaccaataccacagaaataccatcagagactactatgaacaactatatgctcacaacctagaaaa

SEQ ID NO: 827203 - DNA, 120 bp, Artificial Sequence
  ENSG00000267646_19 (sequence is synthesized)
cctataggtttttttgaaacgtataacctcccaggattgaaccaagaagaaacagatatcctgaatagaccaataataagtagcaatattgaatcagcaataaaaaaattcccaaaaatg

SEQ ID NO: 827204 - DNA, 120 bp, Artificial Sequence
  ENSG00000267649_0 (sequence is synthesized)
gttctcctagatccatgctcgcactgaggtgagaaatgagaagccagggccgggagcctcctgggggttggctgccaacgccaggcaggcggggaatggtgattttcgcttgtatcgtgg

SEQ ID NO: 827205 - DNA, 120 bp, Artificial Sequence
  ENSG00000267649_1 (sequence is synthesized)
aggatgccacgcacagacgtgaatagaaagagcctggaccgtgtcctgaggtcagcgactgaggtcctgggtggggccagccaggacctgcccgggggctactgccctctgaatcaatac

SEQ ID NO: 827206 - DNA, 120 bp, Artificial Sequence
  ENSG00000267649_2 (sequence is synthesized)
ctccagggaccctacgttgacacccatggcctcccactctccacccctcagtcctgcgtgcggcacgtagtgctcactgggcgtctgtgtagggggttgaaggctgaggctggaacaagg

SEQ ID NO: 827207 - DNA, 120 bp, Artificial Sequence
  ENSG00000267649_3 (sequence is synthesized)
acggtccttcctcttccccttctcagccacatctggggctccgtccctgcagccaaggctccctggcgctgtccttggtgctgacgcggttctggaagtgcggtgccagggtggctggtg

SEQ ID NO: 827208 - DNA, 120 bp, Artificial Sequence
  ENSG00000267649_4 (sequence is synthesized)
cggctcccgatggaaaagccccaccaaccccacaaagcagactcgggagagaacacgccaccgtctttagcgaatcttaccaacccagggccaaagcgccctgcaccccagagcagcact

SEQ ID NO: 827209 - DNA, 120 bp, Artificial Sequence
  ENSG00000267649_5 (sequence is synthesized)
cgtggtgggaacacaggctgatgtaataaacagaaaagtgactgcgggggatggggaaggcgggatgtccttagcgtcccatggaaaaaacatatttcctccagatgggatcatcgataa

SEQ ID NO: 827210 - DNA, 120 bp, Artificial Sequence
  ENSG00000267649_6 (sequence is synthesized)
atcaacttgtaagagagctggggttctcctagatccatgctcgcactgagggaaaacccagtctctctcggcgctgaggagaaaacatggcacagcccttctcagtcctctagcaaccct

SEQ ID NO: 827211 - DNA, 120 bp, Artificial Sequence
  ENSG00000267649_7 (sequence is synthesized)
ggactctgcaggagaaaagagagattccctacatttgtttctatgagagaagggaaggctggagcaggggagtgggggaaatctctgcagtcctctcggaaagcaaacccttctacacct

SEQ ID NO: 827212 - DNA, 120 bp, Artificial Sequence
  ENSG00000267649_8 (sequence is synthesized)
gtgatcccatgtgatttagcagagccctgagttaaaactaggccatgatgacacttggtgacacaaacatctgacaaaagagctgtaccctttatattttcaaagactttctacaaatta

SEQ ID NO: 827213 - DNA, 120 bp, Artificial Sequence
  ENSG00000267649_9 (sequence is synthesized)
atttaatgggcaatggacttgaagagacactttaccaagaatatccaaatggccacaaacacacacacatacacacaaatgggaatgtgttcaacttcattagtcattatggaaattaaa

SEQ ID NO: 827214 - DNA, 120 bp, Artificial Sequence
  ENSG00000267649_10 (sequence is synthesized)
ccacaaggaagcaccagaacactgcagcagaagaactaaaatggaaaagacgaacaaccaactatctgcaagaatatggggcaaatgaagcttcctcacattgctggcaggatggtaaac

SEQ ID NO: 827215 - DNA, 120 bp, Artificial Sequence
  ENSG00000267649_11 (sequence is synthesized)
tggtaagctgctttgagaaatggtttgtcagtaactacgaaagcctaaggtacgtataccatcactcagcgattccactgctaggcagacatctgagggaaaaaacttcctgtgtgctcc

SEQ ID NO: 827216 - DNA, 120 bp, Artificial Sequence
  ENSG00000267649_12 (sequence is synthesized)
aaaagacatggacagaaatgttcatggtagcttcattcatagtatcccaaaactagaaacataaaatgttcatgaagggagggatgaaacaataagttgtaatacattcatgcgataaat

SEQ ID NO: 827217 - DNA, 120 bp, Artificial Sequence
  ENSG00000258798_0 (sequence is synthesized)
cgcagctgccgcccgctctgggcttggggacctcggccctgcgcctttccgcactcctggcaggtgcagccccaggaggcaatggggcaggcaaactggatggtgccccaggtgtagcaa

SEQ ID NO: 827218 - DNA, 120 bp, Artificial Sequence
  ENSG00000258798_1 (sequence is synthesized)
taatctgcaaaatcaagataagaccattttccccatgtgacttgacaagacaatattaaagctcaaggtgatgcatgtaaaaagattgtggaagccataaagctttatagagatacataa

SEQ ID NO: 827219 - DNA, 120 bp, Artificial Sequence
  ENSG00000280080_0 (sequence is synthesized)
agttggaacctcccactgacagccagaacgatgagccactcccgaagagctgctcctactcaggaccaatgccacactccaggattccccacctcccgtgaaaccagtgggagcatatgg

SEQ ID NO: 827220 - DNA, 120 bp, Artificial Sequence
  ENSG00000280080_1 (sequence is synthesized)
caggccaggatctgtggatctttacaggctctggacacatggcgaacacacatccccagaaagagcccagctcccactcaggcatcacagatctgtctgctgttgcctgaaagcccctgg

SEQ ID NO: 827221 - DNA, 120 bp, Artificial Sequence
  ENSG00000280080_2 (sequence is synthesized)
tccccagaaccaggccagctgcagctctcaggaggtagccacacccgggctagtgccactggcagctgcaccaaaggtgtatgagcggtcacatgataacctgaacgctgaggcccaagg

SEQ ID NO: 827222 - DNA, 120 bp, Artificial Sequence
  ENSG00000280080_3 (sequence is synthesized)
actggcaggtgctcaggtgtcgaaaccacagaatcccattaccaggctctgttctctgaaggaacagtcaatcttgaagatcttcactaagcagagcatctgaggtttaccggcttgaag

SEQ ID NO: 827223 - DNA, 120 bp, Artificial Sequence
  ENSG00000280080_4 (sequence is synthesized)
gggggatgatctgtcctcgggtaaagctcatctctccagattacagcaaggatgggaatctgaagcccaccacatccttctttccaagtcaaagaacgtaacactgagagggctctgagt

SEQ ID NO: 827224 - DNA, 120 bp, Artificial Sequence
  ENSG00000280080_5 (sequence is synthesized)
gcaaactaagagttcagcaaaccagaatagcctctctggagggcacccgtgcctctgccggtgctggaccctgcgggtccctggtctatgagcttccccagaaaccctccaatctcatcc

SEQ ID NO: 827225 - DNA, 120 bp, Artificial Sequence
  ENSG00000280080_6 (sequence is synthesized)
acgcagctgccagaatgaatgttcaaagataagaacctgagcacagtggctgggggtttcgcacacccctgggactcgaccccaagcttctccttctcagcactgcagcccaagccgccc

SEQ ID NO: 827226 - DNA, 120 bp, Artificial Sequence
  ENSG00000280080_7 (sequence is synthesized)
tgcaccttggattccaggccggcccttctgctgccctctctgaatgcccggcctcaatctagcctcctcctcatcccgcgagacatggctaaaacatcacctcaccctggaggcctcccc

SEQ ID NO: 827227 - DNA, 120 bp, Artificial Sequence
  ENSG00000280080_8 (sequence is synthesized)
tgacccctataaggggacaggtccctacagcagcccaggcttcctcttgataatgtgaatgttaattactttaattaagactttaaattactcctctaaaatctgtcttccgtgctacaa

SEQ ID NO: 827228 - DNA, 120 bp, Artificial Sequence
  ENSG00000280080_9 (sequence is synthesized)
ccacaaactccaagaggacagggatcaggctttccttgttctcctgccccactcccacagcacagggccaggagatgctctgtcaacactggctgcgttgaaccgaagtcatctccccac

SEQ ID NO: 827229 - DNA, 120 bp, Artificial Sequence
  ENSG00000280080_10 (sequence is synthesized)
cgcagcgctctgcaccacacccagcaccagggcaggtgctccatgaagggccgcgtgaatgactcaacttcagccccataaggaatctggacagcacaccacgcaagttaaacgcttctt

SEQ ID NO: 827230 - DNA, 120 bp, Artificial Sequence
  ENSG00000280080_11 (sequence is synthesized)
tacaacataatgaaaggcggacttggactgtactaatgaacattccccaaacctaggaagctagatctaaaaaggactacaaatgcaataatcacatgtgaaatccaggaccgaacttct

SEQ ID NO: 827231 - DNA, 89 bp, Artificial Sequence
  ENSG00000280080_12 (sequence is synthesized)
catctgcatcaacctccttaagtgctccaaacatttttatatgtccacttaatagttgactgacagaaataaatggtatgttttacaca

SEQ ID NO: 827232 - DNA, 120 bp, Artificial Sequence
  ENSG00000282828_0 (sequence is synthesized)
agatctgcttggacttcagcaaaagctaaaagtatccttcaacaggctcctgaaaaatgagatgtcatccattggaactgaactcctcaatgggaagatgtaccttgcttccttttcacc

SEQ ID NO: 827233 - DNA, 120 bp, Artificial Sequence
  ENSG00000282828_1 (sequence is synthesized)
gtccaccaagattctaagtttcctgaggctttctagtcatgcgttcagttaagcctgcagaactgctcataggaagaagggacttgccttgtctcagatgagtctttggacttagacctt

SEQ ID NO: 827234 - DNA, 120 bp, Artificial Sequence
  ENSG00000282828_2 (sequence is synthesized)
ggaggggccaagggcagactgataacgtttggctctgtgtccccccccccatccaattctcatctcgagttgtgatccttagtgttggaggagagacctgtgggaggtgactggatcatg

SEQ ID NO: 827235 - DNA, 120 bp, Artificial Sequence
  ENSG00000282828_3 (sequence is synthesized)
gggtggatttcccctatgttcatctcatgatagtgaataagttctcatgaaatctggttgttaaaaatgcatgtggcacttcccccctgctacctctctctctcctcctccaccatgaga

SEQ ID NO: 827236 - DNA, 120 bp, Artificial Sequence
  ENSG00000282828_4 (sequence is synthesized)
tccaccatgagacgatgtgccttgattcccctttgccttctgcgatgattgtaagtttcccaaggcctccaagtcttgcttctggttaagcttgcagaactgtgagtcaattaaaccttt

SEQ ID NO: 827237 - DNA, 120 bp, Artificial Sequence
  ENSG00000258654_0 (sequence is synthesized)
gggcatcaccacacccactgcttttgcaccaggtctgctctcacccccgcctctcgctcacaggggcccttgtcatgccactgggttcacctgcatgatgccggggagcctcccatcgca

SEQ ID NO: 827238 - DNA, 120 bp, Artificial Sequence
  ENSG00000258654_1 (sequence is synthesized)
ggaccctcggtcacactggcaatgtcccttttgccatgaaaagtagcccattcacagtcccgggattaggatgtgggccttttggggggcaccattctgcccactgtggagggtgtgcag

SEQ ID NO: 827239 - DNA, 120 bp, Artificial Sequence
  ENSG00000258654_2 (sequence is synthesized)
gagtgaccagacctcagggaggctctcaaattgacctcatccccagcacaaagtccaggagggatggcatgaggtgtccaggatgctggagcttggtgggggctggacagggactctgct

SEQ ID NO: 827240 - DNA, 120 bp, Artificial Sequence
  ENSG00000258654_3 (sequence is synthesized)
ggccccatagactttccttccccaaactcggatcccctgaaacagagaggtgaggcttaggggtgaagggcgagcaacttctgcaataagatttccatgatgcctgaccatgtctgtaag

SEQ ID NO: 827241 - DNA, 76 bp, Artificial Sequence
  ENSG00000258654_4 (sequence is synthesized)
gttgatcatagcccactgcagcctcaacgttccagcctcaagcaatcctctctcctaggcctcccaagtagctggg

SEQ ID NO: 827242 - DNA, 120 bp, Artificial Sequence
  ENSG00000258654_5 (sequence is synthesized)
caagtagctgggactacaggcatgtgtcttgggaggcaattttttttttttttttaagagacgagggtctccccatgttgcacaggcctggcaggtgtttctgatagtcacaaagcccct

SEQ ID NO: 827243 - DNA, 120 bp, Artificial Sequence
  ENSG00000258654_6 (sequence is synthesized)
aggtgtttctgatagtcacaaagcccctgctactggggaaagggaaaggaagccccagctaagacccaattaagaaaatcccagaaccaagaacgaatcgactgttcggctttggtaatc

SEQ ID NO: 827244 - DNA, 120 bp, Artificial Sequence
  ENSG00000258654_7 (sequence is synthesized)
cctcccgattttccagcatgactagtggtgacaatattgggtctcaatgggtctctcctgcctccagtccagtgcccttttttggggaccattattggcttttggggaccctgaaggagg

SEQ ID NO: 827245 - DNA, 120 bp, Artificial Sequence
  ENSG00000258654_8 (sequence is synthesized)
aatggcctgattatgcaatttggctggagtggaacgtccccatgacgacatggcaatgagtcttccccagcaggcagatgccagatgcagtggtgaccacacctgccatctgggaggatt

SEQ ID NO: 827246 - DNA, 120 bp, Artificial Sequence
  ENSG00000258654_9 (sequence is synthesized)
gaggattgcggcaccaggggcgctcaggattgggccgggctgcttctcagaagaggggacattgagcccaagcaggctgcactcctgcttggacggaaggtgcatgggtggggagggtaa

SEQ ID NO: 827247 - DNA, 120 bp, Artificial Sequence
  ENSG00000258654_10 (sequence is synthesized)
tcacaccaatagagacatggatggacttgtgcagaacataaatactctctttgcttatgtctatgttactcaaaggaaccatggaaataacaaattcccaattacaatgcagtaaacttt

SEQ ID NO: 827248 - DNA, 120 bp, Artificial Sequence
  ENSG00000258654_11 (sequence is synthesized)
tgggacagccctccccctccccctgggactccatggcctgtgctgtcctcctgcccaagaagcttccctctgaggcatctcgggtccgggtccgtcctgctcacccagggccaggagccc

SEQ ID NO: 827249 - DNA, 120 bp, Artificial Sequence
  ENSG00000242082_0 (sequence is synthesized)
gcatgccagaggctagagtcatctaccgcgcatgctggaggctggagcctacagtggctcacctcgctgctgcggttggtggccgcgagggtgactacagcgcagccagaatggtgaaaa

SEQ ID NO: 827250 - DNA, 120 bp, Artificial Sequence
  ENSG00000242082_1 (sequence is synthesized)
ggtggcagaataggcttatctgactttgcctgcccagttgctccgtgccaggaggaggagccacttattccatgctggaggctggagctgggggcaccgcagctcaccttgctgtggttg

SEQ ID NO: 827251 - DNA, 120 bp, Artificial Sequence
  ENSG00000242082_2 (sequence is synthesized)
gtggtggcgatggagactacagagcaccagagcgagagtggtcacggctgaacaatttcaagaagcgagtcgatgtctcatctccctatcttatcttgaaaaacccgtgtacctaagtcg

SEQ ID NO: 827252 - DNA, 120 bp, Artificial Sequence
  ENSG00000242082_3 (sequence is synthesized)
tggatgtgtctgctgcatccgctgcatcagttcacttctgaaggaaccccatgaggaaggtgtaatgtgctcctttcgctctgtggctactcagaagaatgacatcaggcccgatttcca

SEQ ID NO: 827253 - DNA, 120 bp, Artificial Sequence
  ENSG00000242082_4 (sequence is synthesized)
gctgggaaagatggattctaaaatcaaggaactggagccccagctgacaattctatatcagaacccaaagacgctgaagttccaaggagtgggctggcctgtcctgtagaagctacctca

SEQ ID NO: 827254 - DNA, 120 bp, Artificial Sequence
  ENSG00000242082_5 (sequence is synthesized)
tcgatgtgcaggccctggatgagaagctgctcatcatcatcgccctgcagttcctgcacggctactacaagcccatcctgttcgagcccaaccagacctggcccgggcacgtggctgtgt

SEQ ID NO: 827255 - DNA, 120 bp, Artificial Sequence
  ENSG00000242082_6 (sequence is synthesized)
ggcaggacacgtgctccatcgtggccatcttgctaacatcacgcagaaggtgcaccccgtcatctgatctctcaccagctaccctttgactgcacccaggctctggccgtacccaagccc

SEQ ID NO: 827256 - DNA, 120 bp, Artificial Sequence
  ENSG00000242082_7 (sequence is synthesized)
ataggtggggtggtggtctttgtcgtcagctcgctgttatacctgaaccagagcattcccccgtacggtgtggctctcagcagcctcaccacaggcaccgcagctttcccgctgtgcacc

SEQ ID NO: 827257 - DNA, 120 bp, Artificial Sequence
  ENSG00000242082_8 (sequence is synthesized)
cagctgggtgtgtgaatccccctggactgcgcccaggccaccttcatctcccatgacaagatggtcatctccctcaagggcagtcagatctacatgctgaccctcatcaccgatggcatg

SEQ ID NO: 827258 - DNA, 120 bp, Artificial Sequence
  ENSG00000242082_9 (sequence is synthesized)
cgtagcgtccgagtgttccacttttgacaaggcggccaccagcgtcctcaccaccagcatggtcaccatggagcctgggtacctgttcctgagttcttgcctgggcaactctctcctcct

SEQ ID NO: 827259 - DNA, 120 bp, Artificial Sequence
  ENSG00000242082_10 (sequence is synthesized)
caagtacaccgagaagcttcaggagcccccggccagtgctatctgtgaggctgctgacaaggaagagcctccctcacagaagaagcgagtggacacatggccagctggtcagccagggac

SEQ ID NO: 827260 - DNA, 120 bp, Artificial Sequence
  ENSG00000242082_11 (sequence is synthesized)
aaatccgtgtcacaggacgacatggacgagattgaagtgtacggcagcgacgcccagtcgggcacacagctggccacctacctttgaggtgtgtgacagcatccttaacattggaccctg

SEQ ID NO: 827261 - DNA, 120 bp, Artificial Sequence
  ENSG00000242082_12 (sequence is synthesized)
caccaatgctgccatgggtgagcctgccttcctgtctgaagagtttcagaacaaccctgagccggacctggagattgtggtttgctccagccacaggaagaatggggctctgtcggtgct

SEQ ID NO: 827262 - DNA, 120 bp, Artificial Sequence
  ENSG00000242082_13 (sequence is synthesized)
gcagaagagcatccagccccaggtggtgacaacctttgagcttcccggctgctacgacatgtggacagtcatcgccctggtgcctaaggaggagaaagagaatcccaagggggagggcac

SEQ ID NO: 827263 - DNA, 120 bp, Artificial Sequence
  ENSG00000242082_14 (sequence is synthesized)
ggagcaggaacccagcacccccgaagcggacaatgaccaccgcagacagtgattcctgattctgagccaggaagactcaaccatattcccgcagatggggcaggagatcatggagctgga

SEQ ID NO: 827264 - DNA, 120 bp, Artificial Sequence
  ENSG00000242082_15 (sequence is synthesized)
caccagtggctttgccacgcagggccccacggtctttgccgaaaacatcggggacaaccactacattgtccaagtgtcgctgctgggcatccacctgctggaaggaatgaatcagttgta

SEQ ID NO: 827265 - DNA, 120 bp, Artificial Sequence
  ENSG00000242082_16 (sequence is synthesized)
cttcatccctgtgggcctggtcacccgcaacatgcagtgcactgtaggcaacccctgcgtggtcatcatgagtgccgacggccgcgtcaccatgttcctgctgaaaagcacactcctata

SEQ ID NO: 827266 - DNA, 120 bp, Artificial Sequence
  ENSG00000242082_17 (sequence is synthesized)
gtggctgccacgaccacctggtgctgcacaagcccccgctgcaccatcagcccaacgtgatcacgctgtgcctgtaccgagacctcagtggcatgttcaccactgagagctgcctgagcg

SEQ ID NO: 827267 - DNA, 120 bp, Artificial Sequence
  ENSG00000242082_18 (sequence is synthesized)
gggctcacgatgagctagggggccacagtggcttggaggccgagagcctgggctcggagactagccccacagtcggtgatgaggaaatgctgtgtggggatttgggatccctcttcagtc

SEQ ID NO: 827268 - DNA, 120 bp, Artificial Sequence
  ENSG00000242082_19 (sequence is synthesized)
ccagcaaggaggtggcccgaagaagcagccagcccctgccgactgggactctgtacccttccagacagagcccatccactggtgcctgctgttgcaggagaatggcaccatggtgacctg

SEQ ID NO: 827269 - DNA, 120 bp, Artificial Sequence
  ENSG00000242082_20 (sequence is synthesized)
ccagctccccgactggcggctggtgttcttggtgaagaacttccctgtggggcagcgggtcctcatggacagctcctttggagagcccaccacacagggcgaggcccgcagggaggaggc

SEQ ID NO: 827270 - DNA, 120 bp, Artificial Sequence
  ENSG00000242082_21 (sequence is synthesized)
catgtgccaggaggagctgcctctctcgtcaaggaggtgctgctggttgtgctgggcagccgccagagcacaccttacctgctggtgcatgtggaccaaaagctgcttatctacaaggcc

SEQ ID NO: 827271 - DNA, 120 bp, Artificial Sequence
  ENSG00000242082_22 (sequence is synthesized)
ttcccccacgactctcggctcagccagggcaatctcaaagtccactttaagaaggtccttcacaacatcagcttccgtgagaagaagccgaagccatccaagaagaaagcaggtggccgc

SEQ ID NO: 827272 - DNA, 120 bp, Artificial Sequence
  ENSG00000242082_23 (sequence is synthesized)
acagaggagagggtcgggcccggggccgcgtggcgtgtttccactacttcgaggacatttatggctactcaggagtgttcatctgcggcccctcacctcactggctcctggcgacagact

SEQ ID NO: 827273 - DNA, 120 bp, Artificial Sequence
  ENSG00000242082_24 (sequence is synthesized)
gaggggtgctgcggctgcaccccgtgggcatcaatggccctgtcaactctttcgctctgttccacaatgtcaactgtccccgcggcttcctgtacttcaacagacagggcaaactgagga

SEQ ID NO: 827274 - DNA, 120 bp, Artificial Sequence
  ENSG00000242082_25 (sequence is synthesized)
tcagcgtccttcctgcctacctgtcctatgattccccgtggcctgtcaggaagatcccgctgtgctgcacggtccactgtgtggcttaccatgtggagtccaagatgtacgctgtggcca

SEQ ID NO: 827275 - DNA, 120 bp, Artificial Sequence
  ENSG00000242082_26 (sequence is synthesized)
ttgagaccattgagagagatgagcagtgcatccacccccaggaggcggccttatctatccagttcatctccctagtctgctgggaggctattcccaatgccaggattgagctgcagaagt

SEQ ID NO: 827276 - DNA, 120 bp, Artificial Sequence
  ENSG00000242082_27 (sequence is synthesized)
gggagcttgtgaccagcacgaagacagtgtcgctgcagcaaggagaccaggtcaggcttcaaaggctacgcgtggccgccgggacctgcctcatgcaggaggaggaggaggtcatgtcct

SEQ ID NO: 827277 - DNA, 120 bp, Artificial Sequence
  ENSG00000242082_28 (sequence is synthesized)
gagggcggatcttgatcatggatgtgactgaggtggtgcccgagcccagccagcccttgaccaagaacaagttcagagtcctttacgagaaggagcagaaggggcccgtgactgccctgt

SEQ ID NO: 827278 - DNA, 120 bp, Artificial Sequence
  ENSG00000242082_29 (sequence is synthesized)
gcactgcaaggccacctggtgtcggccatcagccagaagattttcctgtgaagcctgcgggccagcgagctgacgggcatggccttcatggtcgacaggcagctctacatccaccagatg

SEQ ID NO: 827279 - DNA, 120 bp, Artificial Sequence
  ENSG00000242082_30 (sequence is synthesized)
atcagcgtcaggaacttcatcctggcagccgacctcatgaagagcatctggctgctgttaccaggaggagagcaagacgctgagcctcgtcatgtgatgccaagaccctggaggtgtaca

SEQ ID NO: 827280 - DNA, 120 bp, Artificial Sequence
  ENSG00000242082_31 (sequence is synthesized)
gcgtggacttcatggtagacaacacccagctgggttttctggtgtctgaccacgactgcagcctcatggtgtacatgtacctgcctgaagccaaggagagttttgggggcatgtgcctgc

SEQ ID NO: 827281 - DNA, 120 bp, Artificial Sequence
  ENSG00000242082_32 (sequence is synthesized)
tgcgctgggcagacttccatgtgggtgcccacatgaacgcattctataggaccctgtgccagggagccactgaggggctcagcaaaaagtcagtggtgggagaataagcatatcgcgtgg

SEQ ID NO: 827282 - DNA, 120 bp, Artificial Sequence
  ENSG00000242082_33 (sequence is synthesized)
ttcgccacccaggatggtggcatcgggctgctgctgcccatgcaggagaaaacctactggaggctgctgatgctgctgaacgtgctgccacaccacacaggcctcaacctccgcaccttc

SEQ ID NO: 827283 - DNA, 120 bp, Artificial Sequence
  ENSG00000242082_34 (sequence is synthesized)
cggatgctgcgtgtggacctccgcaccctccagaatgctgtgctgcaagctgcacggggagctgctcaaccgctacctgtacctgagcaccatggagcagcaagctggccaagaagatca

SEQ ID NO: 827284 - DNA, 120 bp, Artificial Sequence
  ENSG00000242082_35 (sequence is synthesized)
gcaccatatccgacatcatcctggatgacttgctggagacagatggcgtcactgcccacttctagctccatggatgtcgctgccaccaccacaccgcactacctcccaccaccttttttg

SEQ ID NO: 827285 - DNA, 120 bp, Artificial Sequence
  ENSG00000242082_36 (sequence is synthesized)
aacaaaacacaaggaatatatactttctggaagaccatctgatactatgtatcaagaatctcaaaaatattcatatactataatgcaataaggccatttctaaaaatttaccctgagaag

SEQ ID NO: 827286 - DNA, 120 bp, Artificial Sequence
  ENSG00000242082_37 (sequence is synthesized)
ataatccagacctgtgctacaatttccattacagagacatctgttgtaatattgtttacggaagggggaaacagaaaacagcctccatgtccacagaggaatgattaaatatgtggtaca

SEQ ID NO: 827287 - DNA, 120 bp, Artificial Sequence
  ENSG00000242082_38 (sequence is synthesized)
cctacaggctggagtgtaaaatggacacaaaaacaagaagaaatgctcatgagaaaacacagtgatagacgccttttctaaacagtttctgctttgtttgggacaaccctccaggtcatc

SEQ ID NO: 827288 - DNA, 120 bp, Artificial Sequence
  ENSG00000242082_39 (sequence is synthesized)
caaaatggaagctgaatcataacaggtggactacgttttgtaaaactgatttgacactaagaaaacttactgattgaaatgactgaactctgctctttcaagatattccttttaattttt

SEQ ID NO: 827289 - DNA, 120 bp, Artificial Sequence
  ENSG00000242082_40 (sequence is synthesized)
ttggcaaagctagatatactttttgatttggaataatatatctcaatgaattcattaataaggtcatatagttcatttgtattctgattctaggtataaattttcactttttagattttc

SEQ ID NO: 827290 - DNA, 120 bp, Artificial Sequence
  ENSG00000242082_41 (sequence is synthesized)
ttaagttataattatgcttataatttgttttggcatctcttatgactatcaaactgatgatttaaaatacttattcccaatgtaagtgacatgatttactcacactacattatgaaataa

SEQ ID NO: 827291 - DNA, 120 bp, Artificial Sequence
  ENSG00000242082_42 (sequence is synthesized)
ttttttcattcaaaattaaacttcagttgtccttctctttctctccttttctaatccaacaaatcagatctatttttatatttgtttatattttttaatcaactacacatccctttaaat

SEQ ID NO: 827292 - DNA, 120 bp, Artificial Sequence
  ENSG00000242082_43 (sequence is synthesized)
ctgtttattgctttagaatttgaaggttcaaaaaagagaagggcctattaagaaactgtacagaagttagtacatatttctggacactttcaaacatgtatttccttaagtcaacctctg

SEQ ID NO: 827293 - DNA, 120 bp, Artificial Sequence
  ENSG00000242082_44 (sequence is synthesized)
agtgtgatcttttaataaaactcatgagtctcccggaaatgataggttagaatagaaattattttaacttctgctttcttatatggattaaaaacttgtgcataatcgaattcatagatt

SEQ ID NO: 827294 - DNA, 120 bp, Artificial Sequence
  ENSG00000242082_45 (sequence is synthesized)
ctaatataacaaaattatcctgaaatttcactaataaagggggaaaactgtgaaggattttaagctctcatgatgttcatcactcttgaataacagatgctcatagatttccggttttat

SEQ ID NO: 827295 - DNA, 66 bp, Artificial Sequence
  ENSG00000242082_46 (sequence is synthesized)
cactcttgaataacagatgctcatagatttccggttttatgtatttacttatttcatcttggctca

SEQ ID NO: 827296 - DNA, 120 bp, Artificial Sequence
  ENSG00000242082_47 (sequence is synthesized)
caggcgtgagccaccgcgcccagcccgatttctggttttattttaaagttctatttcaaaggtctaaatctcaaagaaagtctatcttaaaattgaattaggcaactcataaaaacttcc

SEQ ID NO: 827297 - DNA, 120 bp, Artificial Sequence
  ENSG00000242082_48 (sequence is synthesized)
tctatcttaaaattgaattaggcaactcataaaaacttccatgacattcatatcacatcttcagagctgtggcccacagctggttaggcagggggaagggaaatgaaagcagacagcttt

SEQ ID NO: 827298 - DNA, 120 bp, Artificial Sequence
  ENSG00000242082_49 (sequence is synthesized)
ggtgaaagaaagaggtttagggccccactggatcatctcttatatgggactacaagaactccctgggtctaggtcacttagcgtgttagggtctactgtgaaaagactttgagaacatct

SEQ ID NO: 827299 - DNA, 120 bp, Artificial Sequence
  ENSG00000242082_50 (sequence is synthesized)
ctctaattttgaactatgacaactaagtttccaaaagggagaacctaaaccttagaccccaaatggctttacaaaatcatttgagctgtgaataatctcatagcataatggtgaatccct

SEQ ID NO: 827300 - DNA, 120 bp, Artificial Sequence
  ENSG00000242082_51 (sequence is synthesized)
aggtttagtctaacttcgatcaagattctgtatttgggccaaaattcaaactgtttatgagtggtgtttattcactttgtttttctattcattgtttgttataatatgcacatttcttac

SEQ ID NO: 827301 - DNA, 120 bp, Artificial Sequence
  ENSG00000242082_52 (sequence is synthesized)
caccaaagccaaagacaagggaactctagttcacttctacgtctgtacttctccagaggattctaggtgggaaccagggttcactcaccgtccagctatcaggagctctttctccgacgc

SEQ ID NO: 827302 - DNA, 120 bp, Artificial Sequence
  ENSG00000242082_53 (sequence is synthesized)
ttgcttccgcatcttggtgtagaggtcaatggtgaagagggtgctggcgctgttgaagatggaggtcagggagctcatgagagaggccagcatgaccgaaagcatcaggcctcgcagtcc

SEQ ID NO: 827303 - DNA, 120 bp, Artificial Sequence
  ENSG00000242082_54 (sequence is synthesized)
gctttgtttggggtaagtgttccacctttaccatccctaaatgctctagtatagtatagtcttaatcacatgtttatttgtatgcatctattattactttataaaatctttgaaaaccaa

SEQ ID NO: 827304 - DNA, 120 bp, Artificial Sequence
  ENSG00000212663_0 (sequence is synthesized)
cttaatcctgtattgacatggaatgatactctagtcatcttggcttgatctagtgtgcctcattgtcctgatcagaaaaatcagaaactttgggggacctgaaacatcatctctctggac

SEQ ID NO: 827305 - DNA, 77 bp, Artificial Sequence
  ENSG00000212663_1 (sequence is synthesized)
taagtctctatttcttagattctcttttgaatccagcttccagcctctgcaaagttccttttattattgctgacaaa

SEQ ID NO: 827306 - DNA, 120 bp, Artificial Sequence
  ENSG00000212663_2 (sequence is synthesized)
ttccagcctctgcaaagttccttttattattgctgacaaagataatatgagtccatacaatttataactaccttccacagttggaccttagtcctctacaattagaaccatgtttagagt

SEQ ID NO: 827307 - DNA, 120 bp, Artificial Sequence
  ENSG00000256424_0 (sequence is synthesized)
gctggaggcgtccgcagaagacccgcgccggggccgagggccgcgtgggggccgcagacttgcagggagcgcagccccaggccaaaaggatgctggaataaaacaaaccagagcttcttc

SEQ ID NO: 827308 - DNA, 120 bp, Artificial Sequence
  ENSG00000256424_1 (sequence is synthesized)
cccaaatcccagtgaggttcctgcctctgggcaggaaggagtggcctttgctcctggggaaaggaactaaagaggattctggaggactctgggctcccacagcctctgggactctcaggc

SEQ ID NO: 827309 - DNA, 120 bp, Artificial Sequence
  ENSG00000256424_2 (sequence is synthesized)
ctcctctagggggaaacatggccagagcctggggaagacaaattgaatgctgcacacgctgaccggctgtggcccctcacctcacagcctaggagctacttgctgtaaggccagtgtgca

SEQ ID NO: 827310 - DNA, 120 bp, Artificial Sequence
  ENSG00000256424_3 (sequence is synthesized)
gatgagggacattggtctccacagtgttcaaccattcagccaagatcacggccagtgagctgtggagaaggaacccacatctgcctggatcacgattctttccaccactgggtagaagcc

SEQ ID NO: 827311 - DNA, 120 bp, Artificial Sequence
  ENSG00000256424_4 (sequence is synthesized)
aggttaccggttcctccaggtgcagaaacatgggccagtggctgagtcccggctccacgaggagatgttgggagaaggcagcacacattgaggagaagcaaggagcaccactcctgatgg

SEQ ID NO: 827312 - DNA, 120 bp, Artificial Sequence
  ENSG00000256424_5 (sequence is synthesized)
tcccctccagagccccaggaaactcttgttagcaatcttagattaaattcagagtttctggatcacgacaggaagctgtgtccagcacgaaggtgtcctgtgaacaggctcaatcacaag

SEQ ID NO: 827313 - DNA, 120 bp, Artificial Sequence
  ENSG00000256424_6 (sequence is synthesized)
ctctgcagagacgggaagtgacagaggccccagaaagccagttcccgacaacgccaatactgcacgtttatcagctgcggcaagagccggccagaggcggtggcagcacctcaatgccct

SEQ ID NO: 827314 - DNA, 120 bp, Artificial Sequence
  ENSG00000256424_7 (sequence is synthesized)
tgcctcgtcttcaagattcttctgtttgatgttgcgtcctcactgttcctctgctgaggagctgtagtgtggctcacaactacgcgatgactctccagattcaaagaccacatctcaccc

SEQ ID NO: 827315 - DNA, 120 bp, Artificial Sequence
  ENSG00000256424_8 (sequence is synthesized)
gcagtgccgagtgcagaaggattgatgagcatttgctgagccgggtgctaatcccatgggcattgtttcctctgccctcagtctccagcctgcagacgcctgaatggattctggagaggt

SEQ ID NO: 827316 - DNA, 120 bp, Artificial Sequence
  ENSG00000256424_9 (sequence is synthesized)
gtgcgttggactctgaaggtcctctgagcccatccaggataaagatgctctctcccaggcgtctgctcagccgccggctatcggcaggacattgcgcaccaggtatcttcaagctgcttc

SEQ ID NO: 827317 - DNA, 120 bp, Artificial Sequence
  ENSG00000256424_10 (sequence is synthesized)
tggctggatttagggcatgatggaaacatcaaaacaactgtagttctgccacggggtcccacatctgcttatcctgggacagccacgcagtccccacccaggaagcggcagcaggtttca

SEQ ID NO: 827318 - DNA, 120 bp, Artificial Sequence
  ENSG00000256424_11 (sequence is synthesized)
gcaccctggagagggccaggcccctgtggctggtcaagctcctcagtgttaagggagcagctcaggaaggccccgcccaggacgatgaggggaccaggaatgaagtcagcagggatgaga

SEQ ID NO: 827319 - DNA, 120 bp, Artificial Sequence
  ENSG00000256424_12 (sequence is synthesized)
catgtgaggaccagtgagaagtactcatcttttacaatgaatgtcaacagactcttacaaatgaattcaccccagactacactgtcagctcctggggacaggtttaaatcgccttctgtg

SEQ ID NO: 827320 - DNA, 120 bp, Artificial Sequence
  ENSG00000256424_13 (sequence is synthesized)
tctagtcctaaatatggagaagacatcagagcgggaggtggagaggctttgacaaacctccagtttacaagcagcacctccagactggagactgctccccgtttcctcccagcacccacc

SEQ ID NO: 827321 - DNA, 120 bp, Artificial Sequence
  ENSG00000256424_14 (sequence is synthesized)
cacggaagcagctggtgcccatagcagggacggctgagggatgtgtccaggacgccctcccaggaggctcggtgtttgggctcctcagctcatccatcagcacagacatcctaggtcctc

SEQ ID NO: 827322 - DNA, 120 bp, Artificial Sequence
  ENSG00000256424_15 (sequence is synthesized)
cccactggagggactggggtggagaagggaccacttcacccaaggtctgaatgaaaaggcttccacaggtgaggtgaggacggcgggggtgaaggtgaaagcctggacatgacccagaag

SEQ ID NO: 827323 - DNA, 120 bp, Artificial Sequence
  ENSG00000256424_16 (sequence is synthesized)
ggtggacgttggccttgaccaactggcagagccccaggggatggagtgagattgatgcccccgggcctggctggcacagagccaaggaaaacacctgcgtcagagcttccttccacccac

SEQ ID NO: 827324 - DNA, 120 bp, Artificial Sequence
  ENSG00000256427_0 (sequence is synthesized)
gccggagtccgcggcggcggaggcggctgcggcgagcaaggaggctgacgacgcacaatgcaaagacggcttttcagagcagccagtggggcaggacaatgtttttcatcaaatgtcctt

SEQ ID NO: 827325 - DNA, 120 bp, Artificial Sequence
  ENSG00000256427_1 (sequence is synthesized)
agatttggaggaggccaggaaagcggaagagacctccagctgcacaacgacctgtcccccacacccaaccacaagtttatgaagggatgcagaacagcatgaatactgcaaaagatgctc

SEQ ID NO: 827326 - DNA, 120 bp, Artificial Sequence
  ENSG00000256427_2 (sequence is synthesized)
tgtgcatcagagaagtgtccttacccgaatgcaggtggacaagcagttaaacacagtggctttgagtgtgaaggcttctcctcgcaccacagaataaggaaggaacgtccagaagagaga

SEQ ID NO: 827327 - DNA, 120 bp, Artificial Sequence
  ENSG00000256427_3 (sequence is synthesized)
gatttaaattgctttcagctaagctgtagacctctagcagatgaacgacatattttcctgaaggacttgcttcggtgtggaagtgattccgctgtgagttgtgtcttttgcgttgttgca

SEQ ID NO: 827328 - DNA, 120 bp, Artificial Sequence
  ENSG00000256427_4 (sequence is synthesized)
ctcttcatcatattcatccgcaggacctccagctctaaagggtgtgaagaggatactgacccaccagaaagagaccccactgctagaacgaataagatgtgctgaaagccggagcataac

SEQ ID NO: 827329 - DNA, 120 bp, Artificial Sequence
  ENSG00000256427_5 (sequence is synthesized)
aagaaagaaaacaatcagtaagagattatatagacctaagagatgttacagaccgaagaagaacctatggtgagtggcgttttagagtgtatcttaggccgggcacggtggctcacgcct

SEQ ID NO: 827330 - DNA, 120 bp, Artificial Sequence
  ENSG00000256427_6 (sequence is synthesized)
gaagtcaggagatggagaccatcctggctgacacggaggaagacaggaagatgagagagatttgaagatggtatgtggctgaatttgaagatagagaaaggaaccgcaagcaaagaatgc

SEQ ID NO: 827331 - DNA, 120 bp, Artificial Sequence
  ENSG00000256427_7 (sequence is synthesized)
aagaatgcaagaggtctctagaagctggaaaaggcaaggaaagagtctcccctcaagctccagcaggaatgcagtcctgacaccttgagtttagcctagtgagacttctgacctccagaa

SEQ ID NO: 827332 - DNA, 120 bp, Artificial Sequence
  ENSG00000256427_8 (sequence is synthesized)
ctagaagatacaagtggtgttttaaggcactaaaacgaagaactagaagtattgttttaagcccataaatttgtgataatctgttacagtagtaataggcaatgcatacacaagcacaca

SEQ ID NO: 827333 - DNA, 120 bp, Artificial Sequence
  ENSG00000256427_9 (sequence is synthesized)
aagtaaaatttttctgtggttattttccatattttttcagttattttctgccttttgaagacattaaagacataaaatgaatatgtattagtttaggaataaaatttaaaatgtaggaat

SEQ ID NO: 827334 - DNA, 120 bp, Artificial Sequence
  ENSG00000256422_0 (sequence is synthesized)
gagatcctgctttctcttcagaatgccatctctaggatgccaatgggctgtgtctacagtactatgtaggaaagtgctgcaagaggtacttgcactgggactactaaaagaaacaacttt

SEQ ID NO: 827335 - DNA, 120 bp, Artificial Sequence
  ENSG00000256422_1 (sequence is synthesized)
acccatgaagaatgcagaaaagcaaggcaggatggtggcccaccctggaaggacatggagccaagggagcctcccccatccagggaggtggtgagtgaatgctgtggccctgggaaccca

SEQ ID NO: 827336 - DNA, 120 bp, Artificial Sequence
  ENSG00000256422_2 (sequence is synthesized)
cgcttctcccatgggtcttcgtacccttgggtcaggagatcccctcgtggacccactccaccagggccttcagtctgacacacagaactatgtggagtctcatcagagcagccattgagt

SEQ ID NO: 827337 - DNA, 88 bp, Artificial Sequence
  ENSG00000256422_3 (sequence is synthesized)
ccacagtattctatggctgatggcatgatgaaggctctaatcattggaaggacacctgctcatcatagagagatatttgaagaaggca

SEQ ID NO: 827338 - DNA, 120 bp, Artificial Sequence
  ENSG00000256422_4 (sequence is synthesized)
aggacacctgctcatcatagagagatatttgaagaaggcacagggcctctgattaactttgagaaatttgtcttgtataatacaagggttccagtgctgtggagttttgcatatcaacat

SEQ ID NO: 827339 - DNA, 120 bp, Artificial Sequence
  ENSG00000256422_5 (sequence is synthesized)
aactttatgaatttatatggtaggattatttcttatccgctggaaaatacacaatcacaatgttcattcagggcctgaactagagaatatatgtatgtatgctagtgttagggacagaag

SEQ ID NO: 827340 - DNA, 120 bp, Artificial Sequence
  ENSG00000256422_6 (sequence is synthesized)
atatggtttcttgggcattaaccctatctgttaaccctaactgttaacagaagttgatagacaaatatcttcaattaaaaggcaaaaattatgagtggatataaaagccatctctatatg

SEQ ID NO: 827341 - DNA, 120 bp, Artificial Sequence
  ENSG00000256422_7 (sequence is synthesized)
tgttagtagaagaggcacatcgaatgtaaaggcacagttatattgcatgtaaaatgataaaagagcatattatacaaacagtaagcataaaaagactgaaatgactgtattaacattaga

SEQ ID NO: 827342 - DNA, 120 bp, Artificial Sequence
  ENSG00000256422_8 (sequence is synthesized)
taaagtagacttgtaagcaaaaagtactatccaagataattattgatatagttggatttaattttactattttttgttttctatttctacccacttctttctccctctttttctcctttc

SEQ ID NO: 827343 - DNA, 120 bp, Artificial Sequence
  ENSG00000256422_9 (sequence is synthesized)
ctgccttacttaaattaattggggttcttttttggggaaaggtggaatgaaaaacattccattttaatgtatctacgatctttgaactgtatttttttgcataatatattagagtttgct

SEQ ID NO: 827344 - DNA, 120 bp, Artificial Sequence
  ENSG00000256422_10 (sequence is synthesized)
ttttaaacatcatagttatttggagttcataatgtatcacttcaagtaaaatatagaaactttacaaccagatatatctatttattagcctagcatcattttatagttgtcatacatatg

SEQ ID NO: 827345 - DNA, 120 bp, Artificial Sequence
  ENSG00000256422_11 (sequence is synthesized)
gtgtatgtatatataatatgtatatatgtatatacacacacacacacacacacatatggagagagagagagagattgtcccaaaacacagtcaacatcttttgctgctgctgtttttatc

SEQ ID NO: 827346 - DNA, 120 bp, Artificial Sequence
  ENSG00000256422_12 (sequence is synthesized)
cttagtactgttcttcttattatttatttatttttttgagtgaaaatatttcccacataggaaatacctgcacacttaggcaatgggtggggaccactttgtccattctttattgaataa

SEQ ID NO: 827347 - DNA, 120 bp, Artificial Sequence
  ENSG00000256422_13 (sequence is synthesized)
agtctctgagctgctttatgcctgaaactccacccaaccttgccaaacaacaaaatgacaatactctcattacatgagggagtcagaaattctgaactttgaaaataaaattgtggagat

SEQ ID NO: 827348 - DNA, 120 bp, Artificial Sequence
  ENSG00000256422_14 (sequence is synthesized)
tgatgagaaaatatggggaattgctcactggggatgctatgttttgtttgtctgttccatgcaagctccatttagaggcctttaagaactctaagactagggtccaaagcaaataattat

SEQ ID NO: 827349 - DNA, 120 bp, Artificial Sequence
  ENSG00000256422_15 (sequence is synthesized)
atgtttcacataagatgatcacatcacatcaattatgatgaaaacctttgattggggggctttggaggaattcctcagaagatcaatcttttaaataaaaataaagaaaaaaataaaaat

SEQ ID NO: 827350 - DNA, 120 bp, Artificial Sequence
  ENSG00000256422_16 (sequence is synthesized)
aaatatgccagtctcaggtattaatgcattgaaataatggctatttctttatttatatagaccctgttatattatttagtgttatcttggtgcttttattcaaacaaattctttggttct

SEQ ID NO: 827351 - DNA, 120 bp, Artificial Sequence
  ENSG00000256422_17 (sequence is synthesized)
ctaactattaatgattctagaagttatatgatccattctatcccccagcttcaaattatcttgttataacattcagcaactaatttccacttttgcaatcatactttttcgactcccatc

SEQ ID NO: 827352 - DNA, 120 bp, Artificial Sequence
  ENSG00000256422_18 (sequence is synthesized)
ctgcctagcagagaaatgtgggaaggagtatgaggatgctgtgttccaggggatgctaatttcctggcttggttttgccacctgctacctaaatgtaacctttctgaggctcagttgtca

SEQ ID NO: 827353 - DNA, 120 bp, Artificial Sequence
  ENSG00000256422_19 (sequence is synthesized)
tttgtataattgggtataataacacttcacagagtcataaggctaaaagatttggtactttggaaattgctttgtaaaattctgtgaaagtaaaaggattattaaggctcttcctgtcaa

SEQ ID NO: 827354 - DNA, 120 bp, Artificial Sequence
  ENSG00000256422_20 (sequence is synthesized)
agcacaagacatcctgaccttcaagggagggaggaacaccttgagaggagttgagatcctgctttctcttcagaatgccatctctaggatgccaatgggctgtgtctacagtactatgta

SEQ ID NO: 827355 - DNA, 120 bp, Artificial Sequence
  ENSG00000256422_21 (sequence is synthesized)
ggaaagtgctgcaagagttctttctgtcacctctctgaagacctggttcatatctgcagctgcaactctatccctgaactcatctttgaaactacccagagatagactgtcaagagcttc

SEQ ID NO: 827356 - DNA, 120 bp, Artificial Sequence
  ENSG00000256422_22 (sequence is synthesized)
agagctttacaacaggatcttccaagtgccctgagaggtcatgatggagccaatagaaataaatcatacaaaacaaagccagaacctggtgggagggatgcttacaaaacaacataaacg

SEQ ID NO: 827357 - DNA, 120 bp, Artificial Sequence
  ENSG00000256422_23 (sequence is synthesized)
agaagttgtctgaaaaaaaattgtatggaaggaagaagagatgagataagggaaatgaactcataatagccccagttaaaatacttacagtaaaatatcattagtactacttgatgttgg

SEQ ID NO: 827358 - DNA, 120 bp, Artificial Sequence
  ENSG00000256422_24 (sequence is synthesized)
tgaaaggctctagactcaagtcagaaggcccaatttgttgctgtgatttcttgaacaaattatgtaattgtgttgagattcagttttcttttctatcattgggtattaataacttctatg

SEQ ID NO: 827359 - DNA, 120 bp, Artificial Sequence
  ENSG00000256422_25 (sequence is synthesized)
tgatgtcagagttatgatgtgaagttaaaataactaataaatgggtaaaccctgaaaatttgatagaattttgtgaatgagagaatcttacaaatacagtacctgaaaccaaaagaatta

SEQ ID NO: 827360 - DNA, 120 bp, Artificial Sequence
  ENSG00000256422_26 (sequence is synthesized)
agtctcagcttgaggaatatcagatactagggcaggctaatgggataaaggtctcattgatctgccaccttcagtcacactgaaatggggctatattttttttatttacttacctaccag

SEQ ID NO: 827361 - DNA, 120 bp, Artificial Sequence
  ENSG00000256422_27 (sequence is synthesized)
tactgccaatagtcaaaatagtactactttccaagttatttaacttttttagtataacagaaaaaaaaatcatttctagttttcaaggcatggattcaatgagtaatatagatttatatc

SEQ ID NO: 827362 - DNA, 120 bp, Artificial Sequence
  ENSG00000256422_28 (sequence is synthesized)
acttggtgaagacatggcaatttccctgataccactgaaaaataaatttaaaaatgctatttgataccttctttaaaagctttttttgtttgtttctttgctgaaatggcaaggattgaa

SEQ ID NO: 827363 - DNA, 120 bp, Artificial Sequence
  ENSG00000256422_29 (sequence is synthesized)
gataattggatttacaaaacaacatagcaagagctcccaatttcagtattgtgacaggtccattgataaaacctgctcaggcagagaccaagttggaaggaaggataggttattatttta

SEQ ID NO: 827364 - DNA, 120 bp, Artificial Sequence
  ENSG00000256422_30 (sequence is synthesized)
gttctcctgaggtaaaataaatattcttaaaaacgtgcatccatccatcctcttttaagtagagaggtcatcagtctctttccttattaaaatgagcacaaactgaacatgcatagattg

SEQ ID NO: 827365 - DNA, 120 bp, Artificial Sequence
  ENSG00000256422_31 (sequence is synthesized)
attctctctattcagttgcagtttgaaacttagcctgctacacattttaacagaattttctacacattttaacagacacacactttctacacatttttaacagaagcattttaacagaca

SEQ ID NO: 827366 - DNA, 120 bp, Artificial Sequence
  ENSG00000256422_32 (sequence is synthesized)
tttctcaatgtggctctctgactttatgacatcagaggaagcagtcttcaacctggtaaaaaacgtaaagaaaatgcaatgtctacttataaacttaacaagaatatcaatgacaactat

SEQ ID NO: 827367 - DNA, 120 bp, Artificial Sequence
  ENSG00000256422_33 (sequence is synthesized)
tttaccaatgaatttaaagatttggagatttcacataatagccagtagctctttgacataaatataaagctatataatccacaattccattctttgcttattttatgtttttctgaagta

SEQ ID NO: 827368 - DNA, 120 bp, Artificial Sequence
  ENSG00000256422_34 (sequence is synthesized)
gttattgagcacctattgtgtgtaaagagctggaatggacataagaatacagaatggcaataggttcaaagaatgccaagtacaggaagaggaaagatgctgagttcttgtctggatttg

SEQ ID NO: 827369 - DNA, 120 bp, Artificial Sequence
  ENSG00000256422_35 (sequence is synthesized)
actttaattagttttatgaccttggttaagtcacttctcccatgtaaatcattgaacacttttttattgagggcttcccataggtagaaacaagaatgactgaggaacaaataaacccgg

SEQ ID NO: 827370 - DNA, 120 bp, Artificial Sequence
  ENSG00000256422_36 (sequence is synthesized)
cctcagcctttgtggaactgacatggtagtgggtaagataaatattaaagaattaaacacataaacaaatataagtaaagattatataaagtgtaaccaaaagtaaataatgttaaagaa

SEQ ID NO: 827371 - DNA, 120 bp, Artificial Sequence
  ENSG00000256422_37 (sequence is synthesized)
tttttaaacattgagcttctgattcaatcggccagtcatggaatacttatccgaggaagcaaaatttagactgatacttgaaggaagaaagattgctgggtgtaaataacaaacgtggaa

SEQ ID NO: 827372 - DNA, 120 bp, Artificial Sequence
  ENSG00000256422_38 (sequence is synthesized)
gcgtaacagatctgaggaagttcaggccagtgtggttgaaacgcagagaccaaacggaagaaggcaaaggatgagacttactaaccagacactgcccaaatcctgcaaggccttacagac

SEQ ID NO: 827373 - DNA, 61 bp, Artificial Sequence
  ENSG00000256422_39 (sequence is synthesized)
ctttcttggggtttgtggaacttcttagatgtgtgaggttataattttcatcaaatttaaa

SEQ ID NO: 827374 - DNA, 120 bp, Artificial Sequence
  ENSG00000256422_40 (sequence is synthesized)
ttcttagatgtgtgaggttataattttcatcaaatttaaacagttttcagccactatgtctgaaaatatttcttttctgtcctcaccattgctcttctgggactcaaactatatgtacat

SEQ ID NO: 827375 - DNA, 120 bp, Artificial Sequence
  ENSG00000256422_41 (sequence is synthesized)
tagacagcttactattttcccacaaatttctatgacatggtttatttttctcagtattttttctctttttgctttactttacagggtttctatttttttttaattttattttagggtcag

SEQ ID NO: 827376 - DNA, 120 bp, Artificial Sequence
  ENSG00000256422_42 (sequence is synthesized)
ggatacaagtgaaggtttgttacacaggtaaactcgtgtcacagggttttgttgtaaagattatttcatcacctaggaattaagccccataccaataattatcttttctgctcctctccc

SEQ ID NO: 827377 - DNA, 120 bp, Artificial Sequence
  ENSG00000256422_43 (sequence is synthesized)
tcctcctacccttcactgtcaagtaggcaccagtgtctgtggttcccctctatgtgtccacatgttctaatcatttcactcccacttataaataagaacatgcagtatttggtttccctt

SEQ ID NO: 827378 - DNA, 120 bp, Artificial Sequence
  ENSG00000256422_44 (sequence is synthesized)
gaagttactgtatttactcaccccttccattcctctccatgagagccacccacactagctgctttgagtcagccatcttggtcctctttcctatgtttttcatatacatgtaaaaattaa

SEQ ID NO: 827379 - DNA, 120 bp, Artificial Sequence
  ENSG00000256422_45 (sequence is synthesized)
ctactttgcattgtggtatctgttagtgtatttctatgcaaatgtaaaaatgttctctatgtgggtgatataacacataaaagtattccttacaaataactctatggctgccgtttcaaa

SEQ ID NO: 827380 - DNA, 120 bp, Artificial Sequence
  ENSG00000256422_46 (sequence is synthesized)
tgacaatatcgagtgggtaggggatggagttgagtaagctgtgtttactaaacaaaaagatacttattagggtatctacttccaagtctaccctttggtgcattacttatttatatctat

SEQ ID NO: 827381 - DNA, 120 bp, Artificial Sequence
  ENSG00000256422_47 (sequence is synthesized)
gccaactaaaaacatggtcatagttttaatcacacaagactatgacttctagattttaacccctgggaccttattctatcatgtcttaatgtaaaagcttaacattggtctaggcactta

SEQ ID NO: 827382 - DNA, 120 bp, Artificial Sequence
  ENSG00000256422_48 (sequence is synthesized)
atagatgtgtgataaaggaagaatgaatccttaaagcaggggaaagatacaatctattcaaagtaaacttctgtttttctgctcatttctcctttgaaagtgtaagctatatggaggcat

SEQ ID NO: 827383 - DNA, 120 bp, Artificial Sequence
  ENSG00000256422_49 (sequence is synthesized)
ctttatctcccactacgttttctgattcagatgcatatatagcaggcctcggagatattgcaagtttggtttcagaccattgcaataaagcaaatatcacaataaagcaagtcacatttt

SEQ ID NO: 827384 - DNA, 120 bp, Artificial Sequence
  ENSG00000256422_50 (sequence is synthesized)
tttggtttcctagcacatagaaaagttatctttatactatactttaaatctgttaagtgtgcaaaaaagtaaatatatatcaattaaaaataatttattgttaaaaactactgacacaga

SEQ ID NO: 827385 - DNA, 120 bp, Artificial Sequence
  ENSG00000256422_51 (sequence is synthesized)
gacatgaagtgaacacatgatgttggataaatggtgacaacagacatgcttaatgcagggtcactacaaaccttcaatttgtaaaaatatgcaatatttgcaaagcacaataaagtgtga

SEQ ID NO: 827386 - DNA, 120 bp, Artificial Sequence
  ENSG00000256422_52 (sequence is synthesized)
tgcacaataaaattaagtatgcttgtataaaggaaggggcgaattaactggaaaatgcaatctactcaacaacccttcgcactgattagggtgtttaatttgcaccttctttcccatggg

SEQ ID NO: 827387 - DNA, 120 bp, Artificial Sequence
  ENSG00000256422_53 (sequence is synthesized)
agtatggagctccatgtaaagcaacttaatgattattttcagtaaatacaggtgactatgactataaacaggctctgtctccattaataagagaatgcagtatcccgagtccaaagtcat

SEQ ID NO: 827388 - DNA, 120 bp, Artificial Sequence
  ENSG00000256422_54 (sequence is synthesized)
tgtatttaatgaatacaactgactgtaatgatttattcgtagatttatcagtgattataaattatttttataagctttgttcaaaccacacaaagcacaaaaataaatcatctcaagatt

SEQ ID NO: 827389 - DNA, 120 bp, Artificial Sequence
  ENSG00000256422_55 (sequence is synthesized)
cacttttataaattgaaaaaaataaaatttgccaaagactttacaacacttggaatgaaaataatcactaaataaagtttaaccatgtggcttttaccaaattagaaacatattttttta

SEQ ID NO: 827390 - DNA, 120 bp, Artificial Sequence
  ENSG00000256422_56 (sequence is synthesized)
agtcaggaaatattgagcgatagcattccaagcaccatattccactctcaatggaacattacaagtcaaactattgttaattatacggaatgatatgttgacgtaaaaagaaccttgggt

SEQ ID NO: 827391 - DNA, 120 bp, Artificial Sequence
  ENSG00000256422_57 (sequence is synthesized)
gttctcactgaaagaaaattaagttgccatttttttttgtagtgagtttacatcttcttccatagtattgaacaatatcacaaataggaaaataagatgccttgaatgataacgtcctct

SEQ ID NO: 827392 - DNA, 120 bp, Artificial Sequence
  ENSG00000256422_58 (sequence is synthesized)
tgtgaaaacatcaaaataacatgtagtaatggatacggttgtatttcctaagtctttgctttgaaatttgcaaatcccaactcataaatggcttgtaaataattgattcagaaatctgtt

SEQ ID NO: 827393 - DNA, 62 bp, Artificial Sequence
  ENSG00000256422_59 (sequence is synthesized)
caatgggctgtgtctacagtactatgtaggaaagtgctgcaagaggtccgcgtcacctttag

SEQ ID NO: 827394 - DNA, 85 bp, Artificial Sequence
  ENSG00000256422_60 (sequence is synthesized)
gttcttgaaatcagtgagatgaagaacccaccaattccagacacagtaacaccagttatcactgattgcagttcatcataacaga

SEQ ID NO: 827395 - DNA, 120 bp, Artificial Sequence
  ENSG00000256422_61 (sequence is synthesized)
gtaacaccagttatcactgattgcagttcatcataacagatataataataatttaaaagtttgaaatattatgaaaattaccaaaatgtaacacagacacatgaagcattggaaaaatgg

SEQ ID NO: 827396 - DNA, 120 bp, Artificial Sequence
  ENSG00000256422_62 (sequence is synthesized)
caccaatagtgttgtttgatgtagcattaccataaatcttagatttgtaaataacaaagtatttgtgaagcacagtaaagcaaagcacaataaaaatgacgtgtgcttgtattttaaaag

SEQ ID NO: 827397 - DNA, 120 bp, Artificial Sequence
  ENSG00000256422_63 (sequence is synthesized)
aacagattgaattgggaagggtagttgaggaactggaagcagagagaacaggtacaagattcacgtagtagtccaagaaaattaaagcaagtagaaaaactaacagaagttcaggataaa

SEQ ID NO: 827398 - DNA, 120 bp, Artificial Sequence
  ENSG00000256422_64 (sequence is synthesized)
agattttgaggccttaactacacatttccagaaggaatggaaaaaggtcagaaatgagaatgtggaaatatcctcagctgatttgactgtaagtagaaagtgttggcataaaaaaaatgg

SEQ ID NO: 827399 - DNA, 120 bp, Artificial Sequence
  ENSG00000256422_65 (sequence is synthesized)
acgaagccaaaaaactcatggaatgatgaataattaaataaattgaggtctccttatcaaaaacaaaaatgaagacatgtagatagaaatttatatgtctttactctgtaaagctgggag

SEQ ID NO: 827400 - DNA, 120 bp, Artificial Sequence
  ENSG00000256422_66 (sequence is synthesized)
aatacccagaaggtatttaggaagtatgtgataaaaatttaagattggagttaatgaaccagagataggcatgagacacataataggtaataatacaggttagctggtaagatctttgga

SEQ ID NO: 827401 - DNA, 120 bp, Artificial Sequence
  ENSG00000256422_67 (sequence is synthesized)
gcacagcaagcttggatttgagttagtaataataattatgcactgcacattttagcctttataatttttcactggttcttccacttaataggcatcttttaacatctattaagtgtagga

SEQ ID NO: 827402 - DNA, 120 bp, Artificial Sequence
  ENSG00000256422_68 (sequence is synthesized)
aaatactaagagctggagatacagcagtaataaataaagtttatttaagtaagtgtaaagttaataaaacacagtccctaatctcattactcttacactgagagattttcacattcaaaa

SEQ ID NO: 827403 - DNA, 120 bp, Artificial Sequence
  ENSG00000256422_69 (sequence is synthesized)
tttactgagcacctattgggtacagaggacttggatgggcaaatgaatacaatatgtctcttgctgtgttgttggaacaagtggaatgctggggacatccaaagaaaggagaccacatgg

SEQ ID NO: 827404 - DNA, 120 bp, Artificial Sequence
  ENSG00000256422_70 (sequence is synthesized)
aggaggtgatattggatcttgagggatgattaagagtcatcaaacaaacgacatttatatatatattataatatcatctcctgtaatctcgctcacaccctgtgaggaccaagtaaatat

SEQ ID NO: 827405 - DNA, 120 bp, Artificial Sequence
  ENSG00000256422_71 (sequence is synthesized)
ctccctaatttcactgttttgttgaaagtgtttgtttggtttttttaatagtttttattttgtatttagctctagacaaaagaacagtactattccttgaaaacatttattctttaggga

SEQ ID NO: 827406 - DNA, 120 bp, Artificial Sequence
  ENSG00000256422_72 (sequence is synthesized)
tatgaagtggtatgtttgcccaacaaaatacacaatttctaaaatattatgactaattcaagcaaatgtattctctaaagaaaaatttccacttcactttgtctacatagaggtagattt

SEQ ID NO: 827407 - DNA, 120 bp, Artificial Sequence
  ENSG00000256422_73 (sequence is synthesized)
aataaacaagttataacaaaagtcttctgtcagtatttttcctcagcactattataaagggtggtaaaaattcctttctttgacaaaagagactttttcctcttttcccccaagacacta

SEQ ID NO: 827408 - DNA, 120 bp, Artificial Sequence
  ENSG00000256422_74 (sequence is synthesized)
atgaatataaatgtgcaagtaaaatattttcacttagattcacagtgtctgacactaatatactctagagcatttaaatttttcctcaacttaaaactaactgccaatttttaaaatgtt

SEQ ID NO: 827409 - DNA, 120 bp, Artificial Sequence
  ENSG00000256422_75 (sequence is synthesized)
aattattattccccaaattaagtaagaataataatatattttgcatagcaagcattgtgccttctaagaaaagaggcattttattttctgtttaactatcttctttctgtcgatcagtgt

SEQ ID NO: 827410 - DNA, 120 bp, Artificial Sequence
  ENSG00000256422_76 (sequence is synthesized)
cagtagcttgtcaaaaacaagtcaaggacaacctgctttgatatctatgcaaataggattcaattatccccaatgagtttgcaaaacttgcagaagtcattaatttgaaaaacatgagga

SEQ ID NO: 827411 - DNA, 120 bp, Artificial Sequence
  ENSG00000256422_77 (sequence is synthesized)
ttaatgcaggggatttggaacctatgtcaaagacgttttaaaattactaccatataaactttgattcttaaacgcagaaaatgcctaatgcagctaattttaactactatgaactataac

SEQ ID NO: 827412 - DNA, 120 bp, Artificial Sequence
  ENSG00000256422_78 (sequence is synthesized)
ttacataataaaaacacaactggctaacattattatcctctttcttgcataatttgtctaaaaattaacatctcatgcttctcttaactgaagaacttcttctaacatttcctttatgca

SEQ ID NO: 827413 - DNA, 120 bp, Artificial Sequence
  ENSG00000256422_79 (sequence is synthesized)
agtctgccaataattaattctttcaagtttttttattttgcctgaaaaaagtatttatttcttcttcattttaatataattaatagactattttagcacagttttagattttctaaaaac

SEQ ID NO: 827414 - DNA, 120 bp, Artificial Sequence
  ENSG00000256422_80 (sequence is synthesized)
ttgcaaagaaactgcaaaaagtttctgtgaacctcacccccaatttctcctatgattagtatcttacattactatagtataattgttacaattaatggattaatattgatatatagttac

SEQ ID NO: 827415 - DNA, 120 bp, Artificial Sequence
  ENSG00000256422_81 (sequence is synthesized)
tagcaaaagtccatggtttattccttctttatttatttatttttagtttttatgtaacatccttcaactttttgtttttcttcaggacactatttttcttcagtattgtattggcaattc

SEQ ID NO: 827416 - DNA, 120 bp, Artificial Sequence
  ENSG00000256422_82 (sequence is synthesized)
tagatcttttgcctttccatataaactttgaaatacatttgtcaatatctccactatacctggctgagatattgattgggattgtgttgaatctatagacaaagttgaaagaaagtgaca

SEQ ID NO: 827417 - DNA, 120 bp, Artificial Sequence
  ENSG00000256422_83 (sequence is synthesized)
tcttagcaatactgaacattctaatctatgaagatgaaatatatcttcatgttcttttatcttttttgatttatcagggttttgtagttttctccatatgacacccacacattttcatga

SEQ ID NO: 827418 - DNA, 120 bp, Artificial Sequence
  ENSG00000256422_84 (sequence is synthesized)
tgtttacacctaagtatttatttttcttttttggtattattgtaaaagttatttaaaaggcttacttttttatttcaaattctgaatgttccttactggtatacaggaaagcatttgact

SEQ ID NO: 827419 - DNA, 120 bp, Artificial Sequence
  ENSG00000256422_85 (sequence is synthesized)
ttcgtgtatttactttgtgccctgtaaccttgttaaatttgatcattacttctgagtatttctgttgattctttgagaattttctcataatatcattttaaataaaaagacaatattatt

SEQ ID NO: 827420 - DNA, 120 bp, Artificial Sequence
  ENSG00000256422_86 (sequence is synthesized)
gtggccttatttctgggctctctattatgttccattggtttatatgtctgtttttgtaccagtgtcatgctgtttgggttactgtagctgtgtagtatagtttcaatttgggtaacgtga

SEQ ID NO: 827421 - DNA, 120 bp, Artificial Sequence
  ENSG00000256422_87 (sequence is synthesized)
tgtgtagtatagtttcaatttgggtaacgtgatgcctccagctttgttttttatttatttattttgcttattaattattaactgtgcccaacccatttcttcatggttgattcagaaaag

SEQ ID NO: 827422 - DNA, 120 bp, Artificial Sequence
  ENSG00000256422_88 (sequence is synthesized)
gagtatctagcttttcagtgtccacggtgagaggcagcccctgcctagcattaagactcacataaaatgtggggaatgttccaatatgagaaggatattcatttgttggtcagataaaca

SEQ ID NO: 827423 - DNA, 120 bp, Artificial Sequence
  ENSG00000256422_89 (sequence is synthesized)
gacaaaagacaaatactcactaaactgcatttagataaaattgggaagacagaatagatgacagtggttaatgacataggttttggcactggattgatctaagtgtgaattttggatctc

SEQ ID NO: 827424 - DNA, 120 bp, Artificial Sequence
  ENSG00000256422_90 (sequence is synthesized)
ctactttctaaatatataacctccaacatatttcctatcctttctgagcatctgctagttaaaatttccataagagtaaaactgtgtctgccttattcactatggtatttcaagcagcta

SEQ ID NO: 827425 - DNA, 120 bp, Artificial Sequence
  ENSG00000256422_91 (sequence is synthesized)
gaacaatgtctggcaaggaacaaaagctctaaaatagttattgaatgaatgacaaggccaaatcccactattacacatgatgacagcagcatgtaacatgactcctaaacacttaaatat

SEQ ID NO: 827426 - DNA, 120 bp, Artificial Sequence
  ENSG00000256422_92 (sequence is synthesized)
tttatttgtttttatgattatccaactgaagtatttccccatcaatagactaagctctatggagtcagggatgatgaggtttttaaactatttttttctgtgactgtttaattatttgag

SEQ ID NO: 827427 - DNA, 120 bp, Artificial Sequence
  ENSG00000256422_93 (sequence is synthesized)
tgactgtttaattatttgagaagatgtacacatttacattatttagtcattgttgagaattgagaaatatcaattcaatggcaatactcaaatataaaagatttttctttatgtatttat

SEQ ID NO: 827428 - DNA, 120 bp, Artificial Sequence
  ENSG00000256422_94 (sequence is synthesized)
attttaaatttatgttcataaaactatcagtaatccacctattttaaaataaatcagtggccatttttgaaattttttctaagtacaataattctacttacttaataacatcatctttct

SEQ ID NO: 827429 - DNA, 120 bp, Artificial Sequence
  ENSG00000256422_95 (sequence is synthesized)
ataacatcatctttctaactaaagagagtgcatgtaattaaaaacagtgtggagctaatcacttctgagactgtcttccctaggcctgtcaggtttgtcccacacttcctgtttaggcag

SEQ ID NO: 827430 - DNA, 120 bp, Artificial Sequence
  ENSG00000256422_96 (sequence is synthesized)
gtctcagtgtgtcaaccttttgtgtagccatccattctgacagaccattaaatatgcggccccccaactagataaatgtgtctatacagatgttgctccagtgtctcctggcacataatt

SEQ ID NO: 827431 - DNA, 120 bp, Artificial Sequence
  ENSG00000256422_97 (sequence is synthesized)
tatttcctgagagtagatgaggaactcttacaaggaggtattattattactattattagggctaacatttatcgaacccttgttaaatgtcaggctctatgctaagtgactcatgtacaa

SEQ ID NO: 827432 - DNA, 120 bp, Artificial Sequence
  ENSG00000256422_98 (sequence is synthesized)
ttactcttataatctactctaaaactagattaaatagggtctattattatccccacattacgggtaaagaatggatcttagataggtcacatagctggtaagtcatagagctgggattca

SEQ ID NO: 827433 - DNA, 120 bp, Artificial Sequence
  ENSG00000256422_99 (sequence is synthesized)
aactgaacccagaactctatgtgaaacttcttccccatgttttcagattctgactactagtttctctctcctctgttttagcaaaggatttttttttaatctttgcatttgtattttaac

SEQ ID NO: 827434 - DNA, 120 bp, Artificial Sequence
  ENSG00000256422_100 (sequence is synthesized)
ttttatttttttctcttataaagagagcccattttgcctaaacaagaaccacgattatgtaaaggtaagtactgaatgagaaattttatattgtattactaaatgtgctttcagtccaga

SEQ ID NO: 827435 - DNA, 120 bp, Artificial Sequence
  ENSG00000256422_101 (sequence is synthesized)
gtcatgaccttatgactcatgcagccagacacagcgatatgataaagatttggcttgttagggtgatataattgtgacatctctgttaccctagaaataagttgagattagaaagcacag

SEQ ID NO: 827436 - DNA, 120 bp, Artificial Sequence
  ENSG00000256422_102 (sequence is synthesized)
agaatagcaaaaaggagttgccccttgaacataaatgtttggatttttagctcttctcaaaaatgatatgaaggcaaaataattttccattgtagagaaaaatagcaggacagtgatgaa

SEQ ID NO: 827437 - DNA, 120 bp, Artificial Sequence
  ENSG00000256422_103 (sequence is synthesized)
acataatctgacctatttatttttcaatttttccaaagaaatcataaacacctctaaaacacatgtatactggtggtgttagtcaacttatatcactgtctgtgaagacgatgcagcaaa

SEQ ID NO: 827438 - DNA, 120 bp, Artificial Sequence
  ENSG00000256422_104 (sequence is synthesized)
ggaaagtgctgcaagagtgactctggaaggttgtgctgagaactctgaaggcttgctgtgactttttggagagcccattttgcctaaacaagaaccacgattatgtaaagttctttctgt

SEQ ID NO: 827439 - DNA, 120 bp, Artificial Sequence
  ENSG00000256422_105 (sequence is synthesized)
agctgggaccacaggtgcatgccaccatgttgggctaattgttgtattttttgaagagacaaggtttcaccacattgcccaggctagcctcaaagtcctgggctcaagccatccacccac

SEQ ID NO: 827440 - DNA, 120 bp, Artificial Sequence
  ENSG00000256422_106 (sequence is synthesized)
tgctggaattacaggcatgagccaccccacctggccatcattacatctaatctacacttgcggaatagtatcctaagatacctatctcttgtctttaaaaatctcgatttcatcctttac

SEQ ID NO: 827441 - DNA, 120 bp, Artificial Sequence
  ENSG00000256422_107 (sequence is synthesized)
ttgaaagtcaattattattaaatcagtgtaaggaagaaactttataaaatgaagatatggatttcatgttcaggaaagtttaaaaattgccattgcttactccctacccccgaatatgct

SEQ ID NO: 827442 - DNA, 120 bp, Artificial Sequence
  ENSG00000256422_108 (sequence is synthesized)
ctagtcaaaactgtaaaatgatttttttactccctgttaggaagaatcatctttagaaataatcatctttaggaagaatgatttttcctaaaggaaaccgaagttcatttttgatcagga

SEQ ID NO: 827443 - DNA, 120 bp, Artificial Sequence
  ENSG00000256422_109 (sequence is synthesized)
atagggtggtatctgtacatatgcaaacaaatgctatatttctttgtgatccaaaggatttacaatctaatggtcagtagagcagatttttaaagtttgcgtgaagtgtctatccaccta

SEQ ID NO: 827444 - DNA, 120 bp, Artificial Sequence
  ENSG00000256422_110 (sequence is synthesized)
gtgaaatatatttcatctccctgtacacattaaagtggacattcacaatgtgtatcaaggtgctatagagaactgctgttgcctcttgcttctttcctgtttcttttctatgatgtatta

SEQ ID NO: 827445 - DNA, 120 bp, Artificial Sequence
  ENSG00000256422_111 (sequence is synthesized)
aacaggaaagctaaatgctgcagctattgataattatgtttgactgtagtagcattccctgatgctagctggtagctaacctggtgctcagccaaatgtgtcatcatattatctgtgcat

SEQ ID NO: 827446 - DNA, 120 bp, Artificial Sequence
  ENSG00000256422_112 (sequence is synthesized)
caggatcaaggtcagcagcatattgcagataacctcttatatgggctaatgtttatcaactgactttggaaaccataaccaagctgtccttcattaagtgtgctgtccttcattaagtgt

SEQ ID NO: 827447 - DNA, 120 bp, Artificial Sequence
  ENSG00000256422_113 (sequence is synthesized)
tctgtccttaagaagtgcagcataaaatgggttgaacagaactagatctcttacataacctgcttgttttcactgaaggttggcaacaagtcaaaaaaggcatctggcaagttcacatgc

SEQ ID NO: 827448 - DNA, 120 bp, Artificial Sequence
  ENSG00000256422_114 (sequence is synthesized)
agttcagcttgattactaacagtaagatatgaggtatatgatgttatccaatgataccatcccctaaaagagatactcgtacaaacttaagtttagcataaaattccaaataatcttcct

SEQ ID NO: 827449 - DNA, 120 bp, Artificial Sequence
  ENSG00000256422_115 (sequence is synthesized)
attaaaatctttgaatatttgaataatatgattaatatgaatattcatgacaaaatggaatattgggcttataagtttcagtcatccaaccacttggtaatttgtcatatttttctgata

SEQ ID NO: 827450 - DNA, 120 bp, Artificial Sequence
  ENSG00000256422_116 (sequence is synthesized)
tcaatttgcttatctgaggataaaaatctacaatagaatacaaagtggcatgcccaatttgttgctgtacaataactggactactgtgagtacactgagtaaagctgaagaacaggagcc

SEQ ID NO: 827451 - DNA, 120 bp, Artificial Sequence
  ENSG00000256422_117 (sequence is synthesized)
cagctagggagaaacaccaggcagccgcctgaaatcaactctccttgccattgagggctgtgtacagtaatctaggcctcagctcctaacagattaggatcagctatttatttaagaaga

SEQ ID NO: 827452 - DNA, 120 bp, Artificial Sequence
  ENSG00000256422_118 (sequence is synthesized)
atctcttaggggcatgtacacttcctcataagatctcacttttccaggcaccacatttagatccttgtatcgtgtaggatatttaggaagtcattgcttttgtgggtggcaaatcataga

SEQ ID NO: 827453 - DNA, 120 bp, Artificial Sequence
  ENSG00000256422_119 (sequence is synthesized)
aaacatgctgtcataaataaaacagaaattatccaatggtacatgaatctcaaatattcatctaaataatgctacttaagaagaccatagtaaaaataatgctaatcacacttcttgata

SEQ ID NO: 827454 - DNA, 120 bp, Artificial Sequence
  ENSG00000256422_120 (sequence is synthesized)
tttaccaaactttatagtgtatgatattctcaaattctttatttcatgtttgaaacaaaggaaatgctagcttagaaaatagcctgctattttcatgaaccggaattttccaaattcttt

SEQ ID NO: 827455 - DNA, 120 bp, Artificial Sequence
  ENSG00000256422_121 (sequence is synthesized)
caatttgttactaatactaaaagtgttcttataaataggcaattaatatgtattcatttatgtattgccttttaaattcattttattttgagacaggatcacactctgttgcccaggctg

SEQ ID NO: 827456 - DNA, 120 bp, Artificial Sequence
  ENSG00000256422_122 (sequence is synthesized)
ttttattttgagacaggatcacactctgttgcccaggctgaagtgccatgggtgataccacctccatctctcaggctgagacaatcctcctgactcagcctcccaagtagctgagactac

SEQ ID NO: 827457 - DNA, 120 bp, Artificial Sequence
  ENSG00000256422_123 (sequence is synthesized)
acatacagcagtgcctgactaactttatttatttattttttgtccctacaaaaaattagggcctcgctatattgcccacgatagtcttgagctcctgggctcaagcaatcctcctgcctc

SEQ ID NO: 827458 - DNA, 120 bp, Artificial Sequence
  ENSG00000256422_124 (sequence is synthesized)
ccacacttggccaaaatatttatgactgtttgatagttaagagcttcttctacaggtattttccctcatgtatttgtgcataaggggatgtgaatgtgataataatttaaaatataaact

SEQ ID NO: 827459 - DNA, 120 bp, Artificial Sequence
  ENSG00000256422_125 (sequence is synthesized)
tgtgaatgtgataataatttaaaatataaactatagccaatatatactgaacattgaacatgtcttacatgccatgcattattctaacggctttatttattatattaattcatttaaata

SEQ ID NO: 827460 - DNA, 120 bp, Artificial Sequence
  ENSG00000256422_126 (sequence is synthesized)
atctctaggatgccaatgggctgtgtctacagtactatgtaggaaagtgctgcaagagtttcaggaaattatggataaagctgccatacaaatccatgtgcaggtttttcaatggatgta

SEQ ID NO: 827461 - DNA, 120 bp, Artificial Sequence
  ENSG00000256422_127 (sequence is synthesized)
ttaaaaatctcgatttcatcctttacattgctgccagaattgtatttttaaaaggtaaagctgattatgttcccactttaaatgttccaataaataaaccatgcatgtaggataaatttc

SEQ ID NO: 827462 - DNA, 120 bp, Artificial Sequence
  ENSG00000256422_128 (sequence is synthesized)
aagcccttggcatagcatacttagttttctgtagtctatacttggtccaaaaggcaataaatgtaccagccctctttcctgtggaaatcagccctacctccctggctacaaattggtcta

SEQ ID NO: 827463 - DNA, 120 bp, Artificial Sequence
  ENSG00000256422_129 (sequence is synthesized)
acacaaaactcatcataccttttcatgttgatgggtccaaggagttggtgtatgacccaacatggatctatcagagtcctctcctaaaagtttcaaactctagttgggaaaagagtattc

SEQ ID NO: 827464 - DNA, 120 bp, Artificial Sequence
  ENSG00000256422_130 (sequence is synthesized)
ctttcatctctgttcatacagttaagaaacttgagtccaaaactgaggtctgtttaaaaaaatctctcttctacattcctcttgtgcaatattagaaaaaagagtagagtaagatactct

SEQ ID NO: 827465 - DNA, 120 bp, Artificial Sequence
  ENSG00000256422_131 (sequence is synthesized)
taccatcctgccatttaagtccctggccacagctgtccctaagccagtttccatttaccctaacccactctggttttccatcttgtgatatgatccagtgaatttcctgttttagcttag

SEQ ID NO: 827466 - DNA, 120 bp, Artificial Sequence
  ENSG00000256422_132 (sequence is synthesized)
gtattctatgaaattcctgttcctctacttcaagaccatgcagtagtgaggtgcagtggctcttacctgtaatcccagcaatttggaaggcagagaaaacttgctgcaattaaatgccct

SEQ ID NO: 827467 - DNA, 120 bp, Artificial Sequence
  ENSG00000256422_133 (sequence is synthesized)
ttttgggagaatatctagaagaaaattgaggaaggaagaagtgagagataaagggtattcacattttaaattttgatagaaatttcttgattactttataaaacttatattcaaacagta

SEQ ID NO: 827468 - DNA, 120 bp, Artificial Sequence
  ENSG00000256422_134 (sequence is synthesized)
gcaagaggtctttctcaagtgtttcaggagagaactcatctgcacacgtgtgggtgaaatctactcgaaactgaagaatgaacctctggaaggactaaggggaacaattcttggagctca

SEQ ID NO: 827469 - DNA, 120 bp, Artificial Sequence
  ENSG00000256422_135 (sequence is synthesized)
aggccccatgctgcctcacagctttcaaaaccttcattttcttgggaaatgctaaaaagctttcccctaccatacatactagattcagacacactgccatctactgacccaccaaaggat

SEQ ID NO: 827470 - DNA, 120 bp, Artificial Sequence
  ENSG00000228201_0 (sequence is synthesized)
gcctcccaaggcagccccctgttagcccgaccggcttcgaagcccgcgccggttgcggatcctccgccgcgcccacctgtcagcgcctcggccggccggggctcccgccgcatgcaagca

SEQ ID NO: 827471 - DNA, 120 bp, Artificial Sequence
  ENSG00000228201_1 (sequence is synthesized)
gcctggccatgccacggacggccgggcctcaccctgccgctctctcgccgtccagaggcccctgctccacacctgggtaccctgggtcctgactcagggcagctgggtgagaagctaacg

SEQ ID NO: 827472 - DNA, 120 bp, Artificial Sequence
  ENSG00000228201_2 (sequence is synthesized)
gcttgaaggaacagggctacaaggggagtttgtgctgggcctggcgtcccaggctgtggactggaactggacatgagaaccccccctacaccctcccaagtcaaagacactccaaaaaga

SEQ ID NO: 827473 - DNA, 60 bp, Artificial Sequence
  ENSG00000228203_0 (sequence is synthesized)
aatggattttaaaaattattattctctagaaaaaagaccacgaactttggagtggacatc

SEQ ID NO: 827474 - DNA, 120 bp, Artificial Sequence
  ENSG00000228203_1 (sequence is synthesized)
attctctagaaaaaagaccacgaactttggagtggacatcctgagacctgcctacgaagaccattaggtggcctccagaagacactcccctgattcctacaccgagggaacacacagcag

SEQ ID NO: 827475 - DNA, 120 bp, Artificial Sequence
  ENSG00000228203_2 (sequence is synthesized)
caagctaggaaagaaggggtgacccagcccaacgctgtaaaccagggcgcgaaccggcgttgagctgtgcagctgcgccctgggctccagtcctgctctgccgcagaccccaccggagcc

SEQ ID NO: 827476 - DNA, 120 bp, Artificial Sequence
  ENSG00000228203_3 (sequence is synthesized)
agcacctgcctccccgaccctcgctggggcggctgtgagatgagcccagagccttcctgagccaaccctcgcaaggaaagtctgtctgttcaccccactatccttgtcttgaaggatgaa

SEQ ID NO: 827477 - DNA, 120 bp, Artificial Sequence
  ENSG00000228203_4 (sequence is synthesized)
gaaaagagggccccccgggaggtcccaaaaggtggaatggacatctgggatccaagcacagcaatttctttatttttcttaaggtatccagcttgttggaatctaagatctgcgaagcct

SEQ ID NO: 827478 - DNA, 120 bp, Artificial Sequence
  ENSG00000228203_5 (sequence is synthesized)
ctcactagaggatgaaaatcgttctgcataaaggcctgggctttatgaaaaatatattcacacctcccgtgtccgagctgggataccaaagaagttcctggttgagtactacttatgaat

SEQ ID NO: 827479 - DNA, 120 bp, Artificial Sequence
  ENSG00000228203_6 (sequence is synthesized)
gaaggattcaggggatgcacagaagccatgccttctctcaggagcagacagcacaagactttcctgccagaggcacagtccccagtgggagtagcatccacataagacaggatgcagaga

SEQ ID NO: 827480 - DNA, 120 bp, Artificial Sequence
  ENSG00000228203_7 (sequence is synthesized)
ttccagtcacttaacacagcactgtcacggacaccttgtgcctccttaaaattcgtatactgaagttctaagccccagtaccccagaatgtgaccttctttggaaatagggtcattgcag

SEQ ID NO: 827481 - DNA, 120 bp, Artificial Sequence
  ENSG00000228203_8 (sequence is synthesized)
atatgattagttaagaggagatcatactggagtgggctttaatccaatatgactggtgtccttatgtaaaggggaaatttggacacagacacacacaaggagaacaccatgtgaactgaa

SEQ ID NO: 827482 - DNA, 120 bp, Artificial Sequence
  ENSG00000228203_9 (sequence is synthesized)
gtcaaagatttgggtgatgcttctacaagccaagaaatgccaaagatgaccagcaaagcaccggcagctggtggaggagcctggaccagattcttcctcacagccctcaaaaggaaccaa

SEQ ID NO: 827483 - DNA, 120 bp, Artificial Sequence
  ENSG00000228203_10 (sequence is synthesized)
tcttgccaaagctttgacttagacttctagccccctgtgatggttaatgttaagtggcagcttgactgggttaagggatgcccagatagctggtaagacagtatgtctgtgtgcatctct

SEQ ID NO: 827484 - DNA, 120 bp, Artificial Sequence
  ENSG00000228203_11 (sequence is synthesized)
cagagtgtttctggacaagatcagcatttgaatccttagagtaaagaagatctgccctcacccacgtgcatcaccctatctctggagagcgcgaacaaacaggaggaagggcacatatgc

SEQ ID NO: 827485 - DNA, 120 bp, Artificial Sequence
  ENSG00000228203_12 (sequence is synthesized)
tccttctgttccagctggcacatccatcttctcctgccccctgacttcagagctcctggttctcgggcctcaggattccagcacttacatgagagcgtgcttccccctccctactccacc

SEQ ID NO: 827486 - DNA, 120 bp, Artificial Sequence
  ENSG00000228203_13 (sequence is synthesized)
cctaggttctccgccctttggcctctgactgaattccaccaccagcttttcagggtctccagcttgcagacggcagatcgtgggacttcttggcctccataattatgtaagccaattccc

SEQ ID NO: 827487 - DNA, 120 bp, Artificial Sequence
  ENSG00000228203_14 (sequence is synthesized)
ggattcaggggatgcacaggacacagaggaatctgggggatattatggttctgggaatgtggaatgtaacgtctcatcttcagcccatctgtgctactgatcatctcattccagaagcca

SEQ ID NO: 827488 - DNA, 120 bp, Artificial Sequence
  ENSG00000228203_15 (sequence is synthesized)
cctatctatctatctatctatccatctatcaatcatctatctagtctatctatctatctatctctatcctattgattctgtgtctctgaggaaccctaatacacctccagaactgtgaga

SEQ ID NO: 827489 - DNA, 120 bp, Artificial Sequence
  ENSG00000228203_16 (sequence is synthesized)
tgatacatttctgtggtttaagccactcagaaggtggtactttgtttcaccaggcctagcaaactaatacaagtgcatggaaggtgactactcatgactgcaacttagagaacaagggtt

SEQ ID NO: 827490 - DNA, 120 bp, Artificial Sequence
  ENSG00000228203_17 (sequence is synthesized)
ataataaaaataaaagtgttatacaaaggtggcaagataaatgacaataaatgaaaatattaacatgtgaattaaaaagtaaagatatttttcctagcattctcccagaaagtagagacg

SEQ ID NO: 827491 - DNA, 120 bp, Artificial Sequence
  ENSG00000228203_18 (sequence is synthesized)
cgtctctcttgtttgccatcatatccagcaatggcaagataagttctaggcacttcataaaaatttgttgaatgaaagaaatgaatcttctgtggttctttattaaccggatcttctatg

SEQ ID NO: 827492 - DNA, 120 bp, Artificial Sequence
  ENSG00000228203_19 (sequence is synthesized)
catggctcaaatgcaagctccgtagattctacttagaactgaaaaggacccaagagaaagttttgtctgatcttttcacttcacttatgggaacactgaggtttaccgaggccatgccag

SEQ ID NO: 827493 - DNA, 120 bp, Artificial Sequence
  ENSG00000228203_20 (sequence is synthesized)
atccaggatccctgcttgctcaaggcacacatggtaatattacagaaggctgattcagaggtcttttaactttttattacactgcttttctatagtaatcaattgaatatggcccttggg

SEQ ID NO: 827494 - DNA, 120 bp, Artificial Sequence
  ENSG00000228203_21 (sequence is synthesized)
gcttgacagaatttttaaaggctttctcaagtctcaaagaatgattatatttaacagcagacagacctcattgtgggcaaacatttaatgctcactaaatagccatgcattttcccagat

SEQ ID NO: 827495 - DNA, 120 bp, Artificial Sequence
  ENSG00000228203_22 (sequence is synthesized)
tttctggccccctcacagtcaggccagggcatgtgactcattttgttccatagactgtagacataagcctcacttttgagccaaggcaatgagaaagaccttcatgacactgaacttgcc

SEQ ID NO: 827496 - DNA, 120 bp, Artificial Sequence
  ENSG00000228203_23 (sequence is synthesized)
aggaagcctccaggatggcataagcgaccaaacagctgggagccaagcacagtgcagggggcttggggtcggcggccggaggctgggtggcctccagaagacactcccctgattcctaca

SEQ ID NO: 827497 - DNA, 120 bp, Artificial Sequence
  ENSG00000228203_24 (sequence is synthesized)
gccggcccgaggcccggagccgccccgcaggccccaggacaggctccggcacgaggaggggctgcggagaccgcccgtgcacgctaacatgaaaatgctattcctgctttagtggcctcc

SEQ ID NO: 827498 - DNA, 120 bp, Artificial Sequence
  ENSG00000228203_25 (sequence is synthesized)
gccacacagccttcacagggtaatgccaaagaacagaggagagttcctgctactctccgggtcttcttggcaaagcttctgatacagtctggctgtctctccacctgaatctcatcttga

SEQ ID NO: 827499 - DNA, 120 bp, Artificial Sequence
  ENSG00000228203_26 (sequence is synthesized)
attgtagctcccataattctcgtatgtcatgggagggatcaggtgagaggtaactgaatcatgggggtgggtctttcctgtgccgttctcgtgacagtgaataagttttatgagatctga

SEQ ID NO: 827500 - DNA, 120 bp, Artificial Sequence
  ENSG00000228203_27 (sequence is synthesized)
tggttttataaaggggagttcccctgcaaatgttcttgcctgctgtgactttgctcctccttgccttccgccgtgattgtgaggcctccccagttatgtggaactgtgagtccattaaac

SEQ ID NO: 827501 - DNA, 120 bp, Artificial Sequence
  ENSG00000228203_28 (sequence is synthesized)
gtactcttacccttctcccttcaaaagcatcctctctttcttttccaacctttccaacctctcgaataatctctgcagtgggagtagcatccacataagacaggatgcagagatgtcttc

SEQ ID NO: 827502 - DNA, 120 bp, Artificial Sequence
  ENSG00000228203_29 (sequence is synthesized)
gttacacaaatgttaaattatacgtcagatgtgcatatatgaacaaaacctacgagtgtgcatgaaataacaccttcttaaatatatagattcttttttctgcaatattaaatggaaacc

SEQ ID NO: 827503 - DNA, 120 bp, Artificial Sequence
  ENSG00000228203_30 (sequence is synthesized)
ccactagaacatcgtttttccttaatagcataccctccacactgtgtggtctaaattcaagctctaccacctactagccattaagcaagttattaaggtcttcgtgcttccattttctta

SEQ ID NO: 827504 - DNA, 120 bp, Artificial Sequence
  ENSG00000228203_31 (sequence is synthesized)
ttttcttacgtggaaaatgaggtggcaatagtatgtatgagttcttcggagggattaaacaagtcaaataggccaagtgccatggcttacacctgtaagcccagcactttgggaggccaa

SEQ ID NO: 827505 - DNA, 86 bp, Artificial Sequence
  ENSG00000228203_32 (sequence is synthesized)
gtttgcatttgtctctcaataaataaagaaatagtcaaattaaatataactggcaaactaaaacaactccatagtccttagctaca

SEQ ID NO: 827506 - DNA, 120 bp, Artificial Sequence
  ENSG00000228203_33 (sequence is synthesized)
gattcttaactaactcaaagctctgcataatttgtcttctgctacacatacatctttatagtaaaataaaataaagctgtcccctctgtattgagaagttattctggtaaatatttgacc

SEQ ID NO: 827507 - DNA, 120 bp, Artificial Sequence
  ENSG00000228203_34 (sequence is synthesized)
tcttcaaatatatgaacgagcacttgccttctaatgcctcagtttcagattctttttagaaatgtcattattcaagaaaaatgcacaatgggaagaatcttaacaacagcactttgttac

SEQ ID NO: 827508 - DNA, 120 bp, Artificial Sequence
  ENSG00000228203_35 (sequence is synthesized)
cgtataacactcaagctgggggactgcaaaggagcatctggggctgcaggaagagagttaaggtgcaaaaatgccctgacccaactgagacttgtaattgctcatgtggtaatacatgtg

SEQ ID NO: 827509 - DNA, 120 bp, Artificial Sequence
  ENSG00000228203_36 (sequence is synthesized)
acttcattcccctgctctgtctttgtgaatgcaaccattgttggggagatagtgagaggggacactggcattgaaagttttgtttgcagcaggcctcaaaaggcactcagatgcagattt

SEQ ID NO: 827510 - DNA, 120 bp, Artificial Sequence
  ENSG00000228203_37 (sequence is synthesized)
ccctgcaaagacttcccggcctatcatggagttccccatccctagatctctgatctctgagctggtgtaatacttagtctttgtctgtgttgatcatggcatctgccacacttaatgttt

SEQ ID NO: 827511 - DNA, 120 bp, Artificial Sequence
  ENSG00000228203_38 (sequence is synthesized)
gtggcattcactttctgatgcttagatcttacgattctagagaacagcatttttctacatattccctcttagggccttgaacataataagtgctcaataaatactgagtgaaatcctcta

SEQ ID NO: 827512 - DNA, 120 bp, Artificial Sequence
  ENSG00000228203_39 (sequence is synthesized)
ctctgagctttgcctctgagcagctgtcctagttctctccaacaagaagtttgttgggtctctcaagttcacttccacctgtcactgtcagttttcagtccagccccttactcaggtctg

SEQ ID NO: 827513 - DNA, 120 bp, Artificial Sequence
  ENSG00000228203_40 (sequence is synthesized)
gctggcccatctcccccagagggctgtcccatagagcccattgtaaaggacactcattgttgccaagagtttgtgccaatgcagtatgactcacccttcactcattgaacaagctcttcc

SEQ ID NO: 827514 - DNA, 120 bp, Artificial Sequence
  ENSG00000228203_41 (sequence is synthesized)
tgattacctagatgggcaaaatttccctgctcatgcgaagcaggctggcgactcagtgctgcagcaaatggcccagaagctgggaaagcagatagccgttctgacacttctcttctagac

SEQ ID NO: 827515 - DNA, 120 bp, Artificial Sequence
  ENSG00000228203_42 (sequence is synthesized)
aaagcagatagccgttctgacacttctcttctagacagaaaatcaagggaagctcaagacccacacttgaattttttttaaaaaattagacaaggggctgggtgtggtggctcatgcctg

SEQ ID NO: 827516 - DNA, 120 bp, Artificial Sequence
  ENSG00000228204_0 (sequence is synthesized)
gcttcctgtacagcctgcagaactccgttatacaggaacacaccgaaaatcaactgtgcgcatttggcctgtagacaagaaagtaacaccaaaacttgatgttcctggctatgcagactc

SEQ ID NO: 827517 - DNA, 120 bp, Artificial Sequence
  ENSG00000228204_1 (sequence is synthesized)
ccaaggcccagaagaactgggaggatcgacaccacccgggttgggtgaccaatcacccaatttgcctgcgactgtcccagaaaaccttcccagcatagctgggcaccctcattgaaagga

SEQ ID NO: 827518 - DNA, 120 bp, Artificial Sequence
  ENSG00000228204_2 (sequence is synthesized)
cttgatgttcctggctatgcagactccttgagtgacgcctgtgggcatattacaggttgggtgaccaatcacccaatttgcctgcgactgtcccagaaaaccttcccagcatagctgggc

SEQ ID NO: 827519 - DNA, 120 bp, Artificial Sequence
  ENSG00000228204_3 (sequence is synthesized)
accctcattgaaaggaggaggctgcactgctaaggggaggaggagcacctacagattcatgcactgccttgctgggaaagccaaggacacccctccattgcaggatgtgctcccagcaat

SEQ ID NO: 827520 - DNA, 120 bp, Artificial Sequence
  ENSG00000228204_4 (sequence is synthesized)
gctgttctggagccgttgctgaacacccaaaagaagacccaggaaactctacatctactgagaacctatggagaaacaaccaacactgcacgcactgggagcccctgaatttattgtatt

SEQ ID NO: 827521 - DNA, 120 bp, Artificial Sequence
  ENSG00000228204_5 (sequence is synthesized)
caatgttattatctcctccgcttgctggttgtggacctcgggccagctttcagcatctctgggccccaggcccttcatgactctgcacaagatggagagggtaaaagaaaaagatacaga

SEQ ID NO: 827522 - DNA, 120 bp, Artificial Sequence
  ENSG00000228204_6 (sequence is synthesized)
aaccagtcactgagatgacttttataaagcagtgagtacagagtgtggtcatggccttcacaggatcccagtcggtgcaattcaaaatgcatgaaaggctcaaatgagatagacaatcgt

SEQ ID NO: 827523 - DNA, 120 bp, Artificial Sequence
  ENSG00000228204_7 (sequence is synthesized)
ctccaaccttaatgtaaagtcacttggatagcaatggaaaattgcagattcataggctgaaaaatgtgattcaagatacagatgtcctatggacctacattgagaaacagctttagaatc

SEQ ID NO: 827524 - DNA, 120 bp, Artificial Sequence
  ENSG00000228208_0 (sequence is synthesized)
gctatcctccccttcatttgaacagaggaagttcttcaccttttagaacccaatattcactcccagctttcctacttgaaaattcgtttgttatccttcccatattttctctaaacaaac

SEQ ID NO: 827525 - DNA, 120 bp, Artificial Sequence
  ENSG00000228208_1 (sequence is synthesized)
tttctcagaatgttgttaaaattctgaaagggatgacaaaaactgttggtacaggaaggcggcagagcaaggatatgtccagtgggagaaaagttaaaccattgcatgccaataaacaaa

SEQ ID NO: 827526 - DNA, 120 bp, Artificial Sequence
  ENSG00000228208_2 (sequence is synthesized)
gaccgcaaccaattgctcttccttcccattgaaagaaacccaggctgtacctgctctttcatctcctgtgtggaaaacatctatcggctggaagccctgagtcttcattttcaaggattt

SEQ ID NO: 827527 - DNA, 120 bp, Artificial Sequence
  ENSG00000228208_3 (sequence is synthesized)
gggctatatgggaagctttctgtgagtggataagctctttagctaagatgtaaacatgttccctgctatctgataaaggttcctggagactgacactttaaaaaaaaaaaaaaaaagaaa

SEQ ID NO: 827528 - DNA, 120 bp, Artificial Sequence
  ENSG00000228208_4 (sequence is synthesized)
gtgaggaaaaaaagaaaaggagaaactgaatccaaggcttacaaagggattagaaaactgtaccccagatggaaaattttatgggctctggagaaaatgtgtaagtgaaatatcggtatc

SEQ ID NO: 827529 - DNA, 120 bp, Artificial Sequence
  ENSG00000228208_5 (sequence is synthesized)
ataaaataacaggaaatagtgtaatctacctgatggagaaaattgtcactttaaaaaaactatcctaatttccttcaaaattgttcttgtttttgagccaataaacttcagctaagctca

SEQ ID NO: 827530 - DNA, 90 bp, Artificial Sequence
  ENSG00000228208_6 (sequence is synthesized)
gggtcatatcagaaagatatgtttgatgaaattaactacagaatcaagaagtatatactcaaaaatgcaaatactacaatatataagaca

SEQ ID NO: 827531 - DNA, 120 bp, Artificial Sequence
  ENSG00000228208_7 (sequence is synthesized)
gctgctatgcaatgcagcagagaaacggaccaaaaggctcaccgttcttatctctgtgtgatgcgagactagttcttatctctttgggggtcatatcagaaagatatgtttgatgaaatt

SEQ ID NO: 827532 - DNA, 120 bp, Artificial Sequence
  ENSG00000228208_8 (sequence is synthesized)
gaggatggctgttgctaagggccaaaataacaagacctgcgtgcttttaaccgttattttaacaattaaattaacggctttttaattgttatttggaagtccatgaaccgtcatccacgg

SEQ ID NO: 827533 - DNA, 120 bp, Artificial Sequence
  ENSG00000239453_0 (sequence is synthesized)
acctgagtcattctctccccagatccttacatggcaggctccttcttgccattcaggtcttggttatgagaggacttccctgccaatcaaatctaatctaaagcagcttctccaatgcaa

SEQ ID NO: 827534 - DNA, 120 bp, Artificial Sequence
  ENSG00000239453_1 (sequence is synthesized)
tatcacagcagggatctatactgtttcattcactataatatatctccaacttctaggatatagctggcacatagaagatgatcactaaatttttattgaatgaatgacgcatatcattaa

SEQ ID NO: 827535 - DNA, 64 bp, Artificial Sequence
  ENSG00000239453_2 (sequence is synthesized)
ggagaacattattgtggtaatagataacgaatacaagaatcaaagggaaggatgagtattctgg

SEQ ID NO: 827536 - DNA, 120 bp, Artificial Sequence
  ENSG00000239454_0 (sequence is synthesized)
attctaagcaaagcttaaaccaaatggatgaatcaggctcctcttctgtttctgtggttaagaatacctacttctatgtcatggtaatgcccacactacaagatggattgccagaagaca

SEQ ID NO: 827537 - DNA, 120 bp, Artificial Sequence
  ENSG00000239454_1 (sequence is synthesized)
gaagaagccatttcagtgttttgtttctttttaaacttttctcctcggcacaagacaatctcactagagaactgcgtctataaatgtgcacattccccgacacaaccagagttgcctcat

SEQ ID NO: 827538 - DNA, 120 bp, Artificial Sequence
  ENSG00000239454_2 (sequence is synthesized)
cctcaaggtctatttttcagtttggccttggagcagggttccagaatttgttcaactcctgctaatttagcaactgtttcttgatgatttctgctttggtgacaggcacacttgatgact

SEQ ID NO: 827539 - DNA, 120 bp, Artificial Sequence
  ENSG00000239454_3 (sequence is synthesized)
gtcccatagagatacacaagcataaattctgtactggaaggctccagtctggaaagtgtgagtactgcacagaaaacatagcaatggaacaaaagcaccatggctctgggctgttgccat

SEQ ID NO: 827540 - DNA, 120 bp, Artificial Sequence
  ENSG00000239454_4 (sequence is synthesized)
ggcctgttctcatgtgtggataatttatatgacagggcagatggagaccctgttttcagaatgtgtgtaactccactcttggtttgctaagagaatgcttatctagtcccagcatgcaag

SEQ ID NO: 827541 - DNA, 120 bp, Artificial Sequence
  ENSG00000239454_5 (sequence is synthesized)
tgcagtcaaaaatatttattgaacacctgcaatgtgtgaggctctatgtgccaaagatagagcagtaaataaaacagaaaaatccccatcctcatgaattacacattgatggaagacgtg

SEQ ID NO: 827542 - DNA, 120 bp, Artificial Sequence
  ENSG00000239454_6 (sequence is synthesized)
gggacaatacgcaaaataaatgaaaatatatagatatttaaataatggctatgagaaaatataatgcagaaaaggggaatggcaagtacccctaaggaagtgtgtaatttgtgattttaa

SEQ ID NO: 827543 - DNA, 120 bp, Artificial Sequence
  ENSG00000239454_7 (sequence is synthesized)
gcaaggtggtcagggaagaccttactgattaggtaatattttgacttgctatccctatggtgctatggaagtagtaatgaacttggaattggaaaatctggattcaactcttgttatgga

SEQ ID NO: 827544 - DNA, 120 bp, Artificial Sequence
  ENSG00000239454_8 (sequence is synthesized)
ctgaattatgacctccaaccccctagaattcatattttgtagccttaacccccagtaccttgatatgtgactgtatttggaggcaggggctttaaagagataattaaggtaaattatctt

SEQ ID NO: 827545 - DNA, 120 bp, Artificial Sequence
  ENSG00000239454_9 (sequence is synthesized)
gttagggccctcagggtcggtccctaatccaatatgattggtaacatatgggaagaatgacaaaaataataagaggcttcaggaatgcgggtgcacagagaaaaggccatgtgaggacac

SEQ ID NO: 827546 - DNA, 120 bp, Artificial Sequence
  ENSG00000239454_10 (sequence is synthesized)
agcaagaaggtggccatctgcaaggcaagaagcggcctcaggagaaaccaggactgctgacatctgcatcttgaacttccagcctccacaactgggcgaaaataaatgttgtttaagcaa

SEQ ID NO: 827547 - DNA, 120 bp, Artificial Sequence
  ENSG00000229558_0 (sequence is synthesized)
attttggcccagttggtgctgagtaagatgttctcgcttctctgctcagggcatgaagatctggggcaggtgcaggacttggggccccagagagtgccacaatcgactgcccgtgggagt

SEQ ID NO: 827548 - DNA, 120 bp, Artificial Sequence
  ENSG00000229558_1 (sequence is synthesized)
gggctggtgcctgggagcaagagcgcggccgtccggcgcctgtgtgagccgacagggcagctccgccagggaaccaggggcccgtccctctggggtcatgggcggacaggcacgggagct

SEQ ID NO: 827549 - DNA, 120 bp, Artificial Sequence
  ENSG00000229558_2 (sequence is synthesized)
gagagaggggaccgggcctaggccacaggccctccaaggaagccacagagccagctagtggcacccagggactgcgggaagcttcggcaagaagaggaacgctgcttctaccctaccatt

SEQ ID NO: 827550 - DNA, 120 bp, Artificial Sequence
  ENSG00000229558_3 (sequence is synthesized)
tggggagtagcaccacctgatggaagagaacattcttcggtcttctcctcaccatggcttgagaatcgcataatctcgctgtgcccaactttcctcatccctaaacagggccagcttgcc

SEQ ID NO: 827551 - DNA, 120 bp, Artificial Sequence
  ENSG00000229558_4 (sequence is synthesized)
ttatccatgaactgtatcaccgcaacaccaaactgagctgtgttctaacagcatttagtcaactgcagacggtttttgcaaatattagatgctactacttttgctgatctaatatttttt

SEQ ID NO: 827552 - DNA, 120 bp, Artificial Sequence
  ENSG00000229558_5 (sequence is synthesized)
aacacatgaagtgacatgaaatgtgttcatgatactctctgcccactgattcatgacctcctctcatgcttcaggggtcaaaacaatcagtgctgtccagcagctgttagggacaggggc

SEQ ID NO: 827553 - DNA, 120 bp, Artificial Sequence
  ENSG00000229558_6 (sequence is synthesized)
tcccctcctccccagcttggaacctcaagccactgcccacagctagcaagcagatgtgccacgcagtgacctcttggccttcccagcaaaaatatcctattttggcatatgggcttgacc

SEQ ID NO: 827554 - DNA, 120 bp, Artificial Sequence
  ENSG00000229558_7 (sequence is synthesized)
cacagtaggaaaacttggcactactgtacatatgatctcatttaaggagtaggaagataaacatgccagctgcacttactcactgatgggaaaagttctttgagttacacagtttcaaac

SEQ ID NO: 827555 - DNA, 120 bp, Artificial Sequence
  ENSG00000229558_8 (sequence is synthesized)
aggaacagccaggagactggggacttaaatcataactattgtataaataatgggagctgttccctgagctaaacgccgccctttggcagaggtagagccttttggcagagggaggcagga

SEQ ID NO: 827556 - DNA, 120 bp, Artificial Sequence
  ENSG00000229558_9 (sequence is synthesized)
cttcccagaaactaggacagcaacacctggctggtccccgaggacgaggacgggacaagaaaggcctctcctgcaggaatgaggttaaaatacaatcaggaaccacacgaatactctatc

SEQ ID NO: 827557 - DNA, 120 bp, Artificial Sequence
  ENSG00000229558_10 (sequence is synthesized)
tcctctgatatgctgtcttgtctgtttgtttaagagtgtctttgggactagtaaagcccctcttccctgaaggattccttcgcttttcatagttttcagtgctgccgtgttcacagacac

SEQ ID NO: 827558 - DNA, 120 bp, Artificial Sequence
  ENSG00000229558_11 (sequence is synthesized)
gcctctgcagctgcacctggcagaacagcttgagtttccctagaaacgctctttgagaaaggaatagaggcagaattgcccttggtgatctcctaagaaatggggtccatgttcatctga

SEQ ID NO: 827559 - DNA, 120 bp, Artificial Sequence
  ENSG00000229558_12 (sequence is synthesized)
agatgggaatgaaaaattcatccttttggttcaaccaaattcatacatggccaaatcctctggaatatggtgaaagctgacccttgaaagccgctatcattacaaaaacaaggagccaaa

SEQ ID NO: 827560 - DNA, 120 bp, Artificial Sequence
  ENSG00000229558_13 (sequence is synthesized)
tgcagacagacttcaggcccacagaacgcctccatgggaattatcagcgaagtaatcatctcactctcctaacttcaggagaaaatatgagtcagcaaagactaaattggtttaaaaata

SEQ ID NO: 827561 - DNA, 120 bp, Artificial Sequence
  ENSG00000229558_14 (sequence is synthesized)
gaatatttgcaaaatggaaaagtcggatgaattcacgctataaatcaatagacctttaaaggtaaggcacagcaagcattttggatgacattaatgaaagacctgtgttggcatagtgtg

SEQ ID NO: 827562 - DNA, 120 bp, Artificial Sequence
  ENSG00000229558_15 (sequence is synthesized)
ctgcaggaaaggtcgggggtcaccacagccagtaccagaccttaaatataatcctgaaattaaatatgtacgtaaaatagtttctagagcacaaaaggtgaaggtaaaggagagtgctac

SEQ ID NO: 827563 - DNA, 120 bp, Artificial Sequence
  ENSG00000229558_16 (sequence is synthesized)
tgatcttttgtgtgtgtgtaataaagatttcgatgtaaaatgtacaacagaaaaaatactgtatttcaataataagaaaaatatataaattattcccccagtgctccaaatcccttctgt

SEQ ID NO: 827564 - DNA, 120 bp, Artificial Sequence
  ENSG00000229558_17 (sequence is synthesized)
gtcatacaaatctttctcatctactttgctgaaagttgctcaagaatatcttattcacctttgactctcctacttaggtttatggatacagaaagtattcaataaagagtgaataattta

SEQ ID NO: 827565 - DNA, 120 bp, Artificial Sequence
  ENSG00000229557_0 (sequence is synthesized)
gtaatcccagcactttggaaggctgagctgggaggattgcttgaggctggcagttcaagacttcttccattttaaggggccttgtgattacagctggtccatctggatattctaagatat

SEQ ID NO: 827566 - DNA, 120 bp, Artificial Sequence
  ENSG00000229557_1 (sequence is synthesized)
taccaaaatgatgcccccttccaggctgataaggagagaaatctgaaatctgaggtgcagttgatttgaatccaggaaatctaaggaaaaagttcaagctcttaatcatttcataccctt

SEQ ID NO: 827567 - DNA, 120 bp, Artificial Sequence
  ENSG00000229557_2 (sequence is synthesized)
cttgttgctaacttaaactttttttttaaaaaagttaatcttgtctatgaagcatgaatctataatactagggaaaaaactggctaacttgaagaaaaaataaattgaaatgaaaagcaa

SEQ ID NO: 827568 - DNA, 120 bp, Artificial Sequence
  ENSG00000269899_0 (sequence is synthesized)
cctgagccccttagccagtatctttcccatcagctagcattagctgccaccagtcctcccttctcctccctcacctcttcagggtgtacctggagcagctattaaaactctttaagccgt

SEQ ID NO: 827569 - DNA, 120 bp, Artificial Sequence
  ENSG00000261170_0 (sequence is synthesized)
agaaaaacaggcggcgtagcaggtgggcagcacgttgccatgatgtgccgtggcccggccgtggctggcgtgatcccaccagagtgagctggagcagatctgcaccatgggccaagtttc

SEQ ID NO: 827570 - DNA, 120 bp, Artificial Sequence
  ENSG00000261170_1 (sequence is synthesized)
tcagaaaatacatggcttcctgcgggctgcagcctaatgcccacgttcctctcggggcagaccgaaggttattcaaccagggcaaaggacagccttgcaaaccaactacgtcctccttct

SEQ ID NO: 827571 - DNA, 120 bp, Artificial Sequence
  ENSG00000261170_2 (sequence is synthesized)
ggagtttgtgtgacccctggcccctgagcccacaccctctcggagcggggttccaactccgtggaagctctgctgagatgcaggtccctccctcgacacctggggattacaattagagat

SEQ ID NO: 827572 - DNA, 120 bp, Artificial Sequence
  ENSG00000261170_3 (sequence is synthesized)
gcgatttggatggggacaccgagagaaaccatgacaggggctctccagagaagcagcccagccttgggcaacttagttctcccatctgaccatccaacccaataaggctgctgactcaca

SEQ ID NO: 827573 - DNA, 120 bp, Artificial Sequence
  ENSG00000261170_4 (sequence is synthesized)
taggaccaggacatagcattcattccttctggaggatacagcaaaaagataccatctcagaaacagagagcagcccatagcagacaccaaacctgccttgatcttggacttcccagtctt

SEQ ID NO: 827574 - DNA, 120 bp, Artificial Sequence
  ENSG00000261170_5 (sequence is synthesized)
cagaacttttccttctctgcggcagagtgagagcaacagaaaaccctccactgttagctgttagcagatgcctctcagtgttctctgctgcttggaggagtgacccatacacttgtgtcc

SEQ ID NO: 827575 - DNA, 120 bp, Artificial Sequence
  ENSG00000261170_6 (sequence is synthesized)
agtgagtgctgcaccatgttggcctcttaaggaagcgcttcgcttcagtgctgtccaggacttcccactttcctttacaagaactgcgattacatcagtggcccccgttaggggactggg

SEQ ID NO: 827576 - DNA, 120 bp, Artificial Sequence
  ENSG00000261170_7 (sequence is synthesized)
ctactgtaatgtgttttaaaaattaggtgccaagaacatgtacaagaatgttcacagcagcattactcttaagagccaaggtggaaacaatgcaaacatctttttttttttttttttctg

SEQ ID NO: 827577 - DNA, 120 bp, Artificial Sequence
  ENSG00000261170_8 (sequence is synthesized)
acaggtgtgagccactgcacctggcctgaaacaatgcaaacatcaactaatcaatggataaaaaaaaatacatccacacaatggactattactctacaatgaaaaggaatacatttctga

SEQ ID NO: 827578 - DNA, 120 bp, Artificial Sequence
  ENSG00000261170_9 (sequence is synthesized)
tttctgatacatgctacaacctgaatgaaccttgaaaacattatgtgaaagaatccagagccacaaaaggtgacacattatgtgattccatttattggaagtgtccagaatagacaaatc

SEQ ID NO: 827579 - DNA, 120 bp, Artificial Sequence
  ENSG00000261170_10 (sequence is synthesized)
gtgtccagaatagacaaatccataaagacagaaagtttcatgggaatgaaaggagttggggtgaatgggggtacattttaatttttttgagctggagtctcactctgttgtccaggctgg

SEQ ID NO: 827580 - DNA, 78 bp, Artificial Sequence
  ENSG00000261170_11 (sequence is synthesized)
ctcaagtgatcagcctgcctcggcctcccggggtacactttaaatggctgaattgaatgaagtgtgttatatctcaat

SEQ ID NO: 827581 - DNA, 120 bp, Artificial Sequence
  ENSG00000261170_12 (sequence is synthesized)
tttaaatggctgaattgaatgaagtgtgttatatctcaataaagctgtttttaaaaaaagttaagatgccaggtttctgaccccacagtggcaggcaacgaccctgttctgtgagcatcc

SEQ ID NO: 827582 - DNA, 120 bp, Artificial Sequence
  ENSG00000261170_13 (sequence is synthesized)
gggattatttttggtatggcagctgcccaggatttttgtgcagagccttcatacctgtcactgatggaggctctccgaagttcaagccaaagctgggatccgcctacaaactgttttaca

SEQ ID NO: 827583 - DNA, 120 bp, Artificial Sequence
  ENSG00000261170_14 (sequence is synthesized)
gttttccttcttctccaaggtgcagtgaaagcgaaggaacgctgctggacatggtgagacatggaggactttgtaagggataacctttggttccctgattttttgacatgaatctaacgc

SEQ ID NO: 827584 - DNA, 120 bp, Artificial Sequence
  ENSG00000261170_15 (sequence is synthesized)
tctgcaccttcctccttcttcttgacagtgacattcataaaggccagaagctcggtgtttttgtttctgttgtctgtattctgtattctgttccactagtccatctgtccatccttgtac

SEQ ID NO: 827585 - DNA, 120 bp, Artificial Sequence
  ENSG00000261170_16 (sequence is synthesized)
caatacttcactgtcttcacattacagtaactttttagtcttggttcctggtaggataagtcggaggtttgttgttcttcaagatcaccttggatattctaggtcctttacatttccata

SEQ ID NO: 827586 - DNA, 120 bp, Artificial Sequence
  ENSG00000261170_17 (sequence is synthesized)
taacattttagaaacagcttgccatttttccacccacaaaaaccatgctgggatttggttgagatgactttgacaccacacatcagtttgggaagaaccaacaactttataatactgagt

SEQ ID NO: 827587 - DNA, 120 bp, Artificial Sequence
  ENSG00000261170_18 (sequence is synthesized)
cttccaatgcatatacatagtatatccctccatttagttacattttgttagacttatttctaagtatttgatgctttttgatgctatcataaattatattgttttggcaatttcattttc

SEQ ID NO: 827588 - DNA, 120 bp, Artificial Sequence
  ENSG00000261170_19 (sequence is synthesized)
tatttgtagctgttaggtataaatacagtttatttttctgtgttcacctgatactcagtgaccttgctaaactaacttattaattctaatggtttatacatttaaaaatttactgtatat

SEQ ID NO: 827589 - DNA, 120 bp, Artificial Sequence
  ENSG00000261170_20 (sequence is synthesized)
gatgattttgctttcagaccacacagacactcatcgcccctcttgccacccatcctttaaatttgattgttttttccttctggggttcaatcaatattcattgtttacattgttttaatt

SEQ ID NO: 827590 - DNA, 120 bp, Artificial Sequence
  ENSG00000261170_21 (sequence is synthesized)
atgcaaatatcactacttgaggcataccacatactctaattacatttctgttagttttcctttaactgaaaacgtcttaatttcaccttcattcttgaatgatatatttggtggatatag

SEQ ID NO: 827591 - DNA, 120 bp, Artificial Sequence
  ENSG00000261170_22 (sequence is synthesized)
aattttgagctgacagttcttttctttcaacccctaatgatgttctactggcctctatgatttctgatgagaagtccaagtcattcaaatccttgtctgccttaaatttgttgttttctc

SEQ ID NO: 827592 - DNA, 120 bp, Artificial Sequence
  ENSG00000261172_0 (sequence is synthesized)
taaagcattcctttcagctacgatacaaaagaagcaaatatttgccactggaaaaaatattcaaagacactcttaggttaatctatagctgatgacagtcagtctagtctacatagcaag

SEQ ID NO: 827593 - DNA, 120 bp, Artificial Sequence
  ENSG00000261172_1 (sequence is synthesized)
cagcttcaagatatgattacttagctaagcgggaaatgggacgtgactgctgcctcattcccacgcctctctggacctgataatttagaggaagctcacattcgcaagataaaaattttc

SEQ ID NO: 827594 - DNA, 120 bp, Artificial Sequence
  ENSG00000261172_2 (sequence is synthesized)
gcctaccagggtgcctctcataaagatgaatttcttcctctgctgagtgctctaaagactcactccttggcactcagggccgtggacaggagctttttactcaccaatgaagaacaccaa

SEQ ID NO: 827595 - DNA, 120 bp, Artificial Sequence
  ENSG00000261172_3 (sequence is synthesized)
gaagttgaagctcctcgctgcttctggcacttcagcgggaagttggttggggcgggatcgcgcgccctctggtggcgccatggttcagcacagacgctcttgctcacagtttcgcggcgg

SEQ ID NO: 827596 - DNA, 120 bp, Artificial Sequence
  ENSG00000261172_4 (sequence is synthesized)
atgtgcgccccctcctggctgtcctgaaatacctataaaattcaatattcagtttattcagtgtcataattttggaaattcaaaccgaaataaaggccagtatatccatacccttcccat

SEQ ID NO: 827597 - DNA, 120 bp, Artificial Sequence
  ENSG00000261175_0 (sequence is synthesized)
agtttggagctgtcacaagcaaggctgccgggggcctctttgctcctttatgtttggacaccaatggttgctttgctgtaggaaagacgagattgctggtgagacagcagccactgctcc

SEQ ID NO: 827598 - DNA, 120 bp, Artificial Sequence
  ENSG00000261175_1 (sequence is synthesized)
caggcccgacaacaggggcagcaccaaagctggtcagtgtttcctccttacaggtctgaaggtgctgcagaggagggtgcttcccagagatcacccctgtgacagacagatcgattgaag

SEQ ID NO: 827599 - DNA, 120 bp, Artificial Sequence
  ENSG00000261175_2 (sequence is synthesized)
gacccctgaatggctgaattgagaagaacaagcatattaggaggccatacaatgggagcctctcaggcagacagacaaagccgtggaaactgcagacttatttgtatgttctggtaaaca

SEQ ID NO: 827600 - DNA, 120 bp, Artificial Sequence
  ENSG00000261175_3 (sequence is synthesized)
cctttgcttcattttccccgtctccgcctggactgagggtcacctcacctctcctggtgtccagagcctccttcaggacagatgttgcaaacctgagttctcacaaacagcggggtccag

SEQ ID NO: 827601 - DNA, 120 bp, Artificial Sequence
  ENSG00000261175_4 (sequence is synthesized)
cccttctcaacactggaaagcccttgagccatctttgatttgtgtgttttgatctaattgcactactgcttgcaatgcttgtttttagcggtgagtgctggtttaatttgtttctttctg

SEQ ID NO: 827602 - DNA, 120 bp, Artificial Sequence
  ENSG00000261175_5 (sequence is synthesized)
tttggctcctggagaggaggggccctgaactggcattttcagtgaagcatcccagtgccttgaatccagtaagcagccaggtgtctgttggcttcatggtttaacaacctaccatttgaa

SEQ ID NO: 827603 - DNA, 120 bp, Artificial Sequence
  ENSG00000261175_6 (sequence is synthesized)
gaatcgcagagatgaattaaaaagagccccggagaggctccccgatccagttgcacttcctgcttaagcaaagtaaagaaaaacaggaatgaaaacataacccaatgggttagttccatg

SEQ ID NO: 827604 - DNA, 120 bp, Artificial Sequence
  ENSG00000261175_7 (sequence is synthesized)
ctggccattgatgaggttgcagccaccatcagaagaaggccaaacggttagaaagacacggcggtgaggaagatgagcctcattatcgactgtcacctgcagccctgcacaggtgctcag

SEQ ID NO: 827605 - DNA, 120 bp, Artificial Sequence
  ENSG00000261175_8 (sequence is synthesized)
aatctaacacttgatggctggttgagattcccggagtcctaattaggaatgaggagtcaggctggcaggacccagggaaagcaaaaagagaaggcagagaagctccaagtctgcctgtct

SEQ ID NO: 827606 - DNA, 120 bp, Artificial Sequence
  ENSG00000261175_9 (sequence is synthesized)
tcgtgatccagaacacgtagtcctgctgcacaagtaactcacaatcttcctgtgtccagctgtcattagacccttggctgatagaaaaatgcaagttagcacactgcagcctcggtgtcg

SEQ ID NO: 827607 - DNA, 120 bp, Artificial Sequence
  ENSG00000261175_10 (sequence is synthesized)
aatattgaaattctcacctacaatgtgatgctatcaaaaggtgaggtcttcgggagaagtttacttcttactgggtggagacacttggcatttgtaaatgagaataccaatttgaaggaa

SEQ ID NO: 827608 - DNA, 120 bp, Artificial Sequence
  ENSG00000261175_11 (sequence is synthesized)
atggtccaaatgtgtgtgtctccctcaaatttgaatattgaaattctcacctacaatgtgatgctatcaaaaggtgaggtcttcgggagagattgctggtgagacagcagccactgctcc

SEQ ID NO: 827609 - DNA, 120 bp, Artificial Sequence
  ENSG00000261175_12 (sequence is synthesized)
ctccagcacaccgcggcctcggcgtcgtcagcactgcacgtcgctctctccagcacaccgcggcctcagcgtcatcagcactgcacgtcgctctctccagcacaccgcggcctcggcgtc

SEQ ID NO: 827610 - DNA, 120 bp, Artificial Sequence
  ENSG00000261175_13 (sequence is synthesized)
gtcagcactgcacgtcgctctctccagcacaccgcggcctcggtgttgtcagtactgcacgtcgctctctccagcacacagcacaagcaccatcctatcaagtccccagcaagcctttgt

SEQ ID NO: 827611 - DNA, 120 bp, Artificial Sequence
  ENSG00000261175_14 (sequence is synthesized)
gagcaagactccatgtcgaaaaataaaaaaaaaattaataaaaaactaaaatagctgtatgactcctccccctttttatttgggggagagagagtttgaggtggagagaggagagatggg

SEQ ID NO: 827612 - DNA, 78 bp, Artificial Sequence
  ENSG00000261175_15 (sequence is synthesized)
tgcctccttgctgtgtattttcctactttctctaatttgccttttttttttatttttgagatgaattcaccacgtcca

SEQ ID NO: 827613 - DNA, 61 bp, Artificial Sequence
  ENSG00000261175_16 (sequence is synthesized)
atctgcctttcttaacctacaattgtctttaccctgagccgctggccccagatagtcgctg

SEQ ID NO: 827614 - DNA, 120 bp, Artificial Sequence
  ENSG00000261175_17 (sequence is synthesized)
attgtctttaccctgagccgctggccccagatagtcgctgctcacccatgacaatatttcaccactgagatcatttatcctcaaaaaaatgagtagaatggccacggaattgtgtgcaaa

SEQ ID NO: 827615 - DNA, 120 bp, Artificial Sequence
  ENSG00000261175_18 (sequence is synthesized)
gaatgaaggagcaaaacagtcttggagtcttaggagcaaaacatctgcattactaatatcctcccaagtccaccaagcctcagctaggaacggttccccacttgtgaagtgtctgataag

SEQ ID NO: 827616 - DNA, 120 bp, Artificial Sequence
  ENSG00000261175_19 (sequence is synthesized)
tccttcctttcttccttccttccttcctctctctcttctttctttctctttctctctttcttttctttctctttacctttctttctttcctttctttctatctttcttctctcaatcttt

SEQ ID NO: 827617 - DNA, 120 bp, Artificial Sequence
  ENSG00000261175_20 (sequence is synthesized)
ctctttacctttctttctttcctttctttctatctttcttctctcaatctttctttctctctctctctttttgacagtctcactctgttgttcaggctggagtacagtggcacaatctca

SEQ ID NO: 827618 - DNA, 120 bp, Artificial Sequence
  ENSG00000261175_21 (sequence is synthesized)
cctcagcctcccaaagtgcttggattacaagcgtggaccaccacacctggctcattgattcatttattcatctgataggtatttattgaacataaagtgccacagaccgggtggcttaaa

SEQ ID NO: 827619 - DNA, 120 bp, Artificial Sequence
  ENSG00000261175_22 (sequence is synthesized)
cacagaccgggtggcttaaatgacagagatttattttctaacagttctggaagccggaagtctgagatcaaggtgccggcaggactgcttcctccaagccctctctttttggcttgtaag

SEQ ID NO: 827620 - DNA, 120 bp, Artificial Sequence
  ENSG00000261175_23 (sequence is synthesized)
agctgtcttctctctgtgtcctcacaaggtcgccctccgtgcgtgtctgtgtcctcatctcctcttattacggagacaccagtcctactggattagctcccatgctggtgacctcattct

SEQ ID NO: 827621 - DNA, 120 bp, Artificial Sequence
  ENSG00000261175_24 (sequence is synthesized)
accttaattacctccataaatgccctatctccaaacacagtcacattatgacatcctgggggttggacttcgacgtgtgagtttggggggatgcaacccagcccacaataaacagcaaat

SEQ ID NO: 827622 - DNA, 120 bp, Artificial Sequence
  ENSG00000261175_25 (sequence is synthesized)
acgattagagcttctcacagatacaaagccattgtcgtgcagctcatgccctcctcgggggaagaagccagtaagtcacagagatcagtaacgcaggtggggacgaaggtgtagaggaga

SEQ ID NO: 827623 - DNA, 120 bp, Artificial Sequence
  ENSG00000261175_26 (sequence is synthesized)
gccaggcacggaggcctgttggagtgcgggtgctttgcaattttagaagccgaggtctaggggaggccggacttgaaagacgacgtctgggccaagtgcagagaaaggtggcggatgagc

SEQ ID NO: 827624 - DNA, 120 bp, Artificial Sequence
  ENSG00000261175_27 (sequence is synthesized)
tggaaggaagcctgggagaaggcactttgggcgtagggttttgagacacagctgtgttttgcccgtggcacgggagctctggggccggcatggcccgtgtggcctaggtggaggtgggag

SEQ ID NO: 827625 - DNA, 120 bp, Artificial Sequence
  ENSG00000261175_28 (sequence is synthesized)
gggaggcgggagaaggggtgccctcgagatctcgggaggcactggccacggagagccctcgggctgttacttctactattgccttttaccagttaaaagcatcctcccatgcaaaggctt

SEQ ID NO: 827626 - DNA, 120 bp, Artificial Sequence
  ENSG00000261175_29 (sequence is synthesized)
gagaaggatacagtggactctggggactcggtggggaagggtgggaagagggtgagggataaatgactacgaattaggtgcagtggatactgctcgggtgatgggtgcgccaaaatctca

SEQ ID NO: 827627 - DNA, 120 bp, Artificial Sequence
  ENSG00000261175_30 (sequence is synthesized)
caaatcaccaccaaagaacttacgtaatcaaaccccacctgttccccaaaaaccaatggaaatgaattttaaaaacaaaaacaaaaagcatctcctcaacattgtgttcgaagagaggca

SEQ ID NO: 827628 - DNA, 120 bp, Artificial Sequence
  ENSG00000261175_31 (sequence is synthesized)
gctgccaggacctcgctgttcctcaccctcggaagccgtgcctcttctctgggcccttggtctggcatccccggccagtgcagccccttcaaccgtggggtaggtggcgggcggaggggc

SEQ ID NO: 827629 - DNA, 120 bp, Artificial Sequence
  ENSG00000261175_32 (sequence is synthesized)
cagcctggctgcctggcatccccatggttcctgtaataaataacaagcctaactgacaaatttgctgttttcttatacgactgccacgcacactacaaagtgtgaggcaaaccgcaagtc

SEQ ID NO: 827630 - DNA, 120 bp, Artificial Sequence
  ENSG00000261175_33 (sequence is synthesized)
atcggcatcacagcaaaacaaaaacacacacacaacagaagaaaccacgctggtgaggtcagcagggtaagttctgccttgtagggtttgctgggaaaaaaaaaaaaaaaaaacgtggag

SEQ ID NO: 827631 - DNA, 120 bp, Artificial Sequence
  ENSG00000261175_34 (sequence is synthesized)
aaggagacgtgggggcggggagggctgaggtcagagccaatattgaaagaaatctatttgtggctgtgggagggatggggacggcggcaggaatttaaagaggcagaagttcatttcctg

SEQ ID NO: 827632 - DNA, 120 bp, Artificial Sequence
  ENSG00000261175_35 (sequence is synthesized)
tgatttatgggactttgctgactttcacgctccggttctagggacagggagaccctccctgcgggagccgctgctagagggaaaggcagcgttggatcggatgccggccccagcctggga

SEQ ID NO: 827633 - DNA, 120 bp, Artificial Sequence
  ENSG00000261175_36 (sequence is synthesized)
gacgtgcttcctctgcagcctgtgatcaggagcgaagtgtagagaccagaatcgttcagaggcagggctggtccctgttgatttatgactcaggcaaacagtccattcatccgtcagcgg

SEQ ID NO: 827634 - DNA, 120 bp, Artificial Sequence
  ENSG00000261175_37 (sequence is synthesized)
ctccacttctatcctcagcttactggaggcagaagaatgtcccctggaagtggtctgagctgcttcctgtggtggccccattcctccgggtgggggatcctatttttagagggccaccat

SEQ ID NO: 827635 - DNA, 120 bp, Artificial Sequence
  ENSG00000261175_38 (sequence is synthesized)
tgccatgaaggtccagccggctcatcggcaccgtgcggcatggtgggacgcagtactgaaattcgagggggagctaggcattcatagctgtttcttacaaacaagaaaggcactgattct

SEQ ID NO: 827636 - DNA, 120 bp, Artificial Sequence
  ENSG00000261175_39 (sequence is synthesized)
gaggctccatttcctcctctgtaggtggaagatagaggaggctatacagggaggctcagctgtgcctgacacacaacagagattctccaggaacaggacatgaatgaatacaaaatcaaa

SEQ ID NO: 827637 - DNA, 120 bp, Artificial Sequence
  ENSG00000261175_40 (sequence is synthesized)
aaatcaaataggtgatttccctcttcctccagcagacaaacccagaatagcaaagatcacttccatgcgcgtccgtgtgaggagaccacacaacaggctttgtgtgagcaataaagctgt

SEQ ID NO: 827638 - DNA, 120 bp, Artificial Sequence
  ENSG00000261175_41 (sequence is synthesized)
ggcgcttcttctcttgcctgctgccgtgcaagacacgcctttcaccttccgccgtgatcatgaggcctccctagctacgtggaactgtcaggtttcctcacagagcagtggcaccggaga

SEQ ID NO: 827639 - DNA, 120 bp, Artificial Sequence
  ENSG00000261175_42 (sequence is synthesized)
taaggcacagctggtcacaccacctgggatgttctgggacttcagaagtggcctcatgcttagaggtcctcactacccaaggcgtggtcctcagacatcacccgggagctggttataaat

SEQ ID NO: 827640 - DNA, 120 bp, Artificial Sequence
  ENSG00000261175_43 (sequence is synthesized)
ggagagtctcaggccccgccctggaggccctggttcagaacctgcgtttcagcaagagctcgagtgattcaggcaggtcactgcactgctagattgctggtgagacagcagccactgctc

SEQ ID NO: 827641 - DNA, 120 bp, Artificial Sequence
  ENSG00000261175_44 (sequence is synthesized)
aagctggtcagtgtttcctccttacaggcaggaggaagctaaaatcccaccgttttctccacttgttggactgtctgccccatgagggaacaaaagctccatcgacgagcgtggatccag

SEQ ID NO: 827642 - DNA, 120 bp, Artificial Sequence
  ENSG00000261175_45 (sequence is synthesized)
aagcccaggcaatcaggctggagccttccttacttctgctgtctgcagtgaccactctggatttgggatccagcctccctgagactgtaaacatctgggtgagagccagccgtggctgag

SEQ ID NO: 827643 - DNA, 120 bp, Artificial Sequence
  ENSG00000261177_0 (sequence is synthesized)
ggcacagcccgggctcaggggccaacactgagctgcacacggagctggggtatggttaccctgctcagagcctgggatccctcggctgcagcgcaggctcagggacacctgccctgacag

SEQ ID NO: 827644 - DNA, 120 bp, Artificial Sequence
  ENSG00000261177_1 (sequence is synthesized)
gggtgttgcagagaatgacatccatacatggcctggcacacagtgaattagcccctggagtttcatttgtcatctggggtcagttgaaagtgcgacatagcaaccctgcatcttggcaat

SEQ ID NO: 827645 - DNA, 120 bp, Artificial Sequence
  ENSG00000261177_2 (sequence is synthesized)
ctgtcctcacattgaccagcaagcaactctgtacactgaggacgcccatctcaacacggaatgtgatgcaaaaacttatttggacacaacagaagtctcacataacagtgatgacgaaca

SEQ ID NO: 827646 - DNA, 120 bp, Artificial Sequence
  ENSG00000261177_3 (sequence is synthesized)
tcttgtccatggcctgactgggagttccctctgcaaccacaggttagcttagaagacaatattgctttgctttgtttaattgtataactcatccaagctcatagaattggaaactgtaaa

SEQ ID NO: 827647 - DNA, 120 bp, Artificial Sequence
  ENSG00000261177_4 (sequence is synthesized)
caaagaaaaatctgcatctcctgttgtaacacaccacagataagcctcatgtatcaccactttggacgacatagtcttgtcaagtctatgaaaaagatgtggggcgaccaggtgggttca

SEQ ID NO: 827648 - DNA, 120 bp, Artificial Sequence
  ENSG00000261177_5 (sequence is synthesized)
gaacgtggaggccagagaggagtgagaggtgctgtggggccccagctaggggtaacccctgctggcttgatgaatggacctatcccctttcgacaggcctcgcagacaccaggccagata

SEQ ID NO: 827649 - DNA, 120 bp, Artificial Sequence
  ENSG00000261177_6 (sequence is synthesized)
agcacatcgtccgtccaggccatttttcccccgctatctcttgctgaggcgatgctaacataccgccagccctctgtgtgatggatggccttgggaagccggctcacccccaccgattac

SEQ ID NO: 827650 - DNA, 120 bp, Artificial Sequence
  ENSG00000261177_7 (sequence is synthesized)
accaaccctcggaggggcttcccagtgcccgcctgctcattttcaagactggttcccttgggggtaaaaaatgagcaccccaggggtcctttctggggcttcacacacgttcatacacat

SEQ ID NO: 827651 - DNA, 120 bp, Artificial Sequence
  ENSG00000261177_8 (sequence is synthesized)
ctgtgcccacgtgcacacacaggtgcatttgtgccttgacccagccaacgtttaaagcttggaacttggcaagtctagttcccaggaagtcgcccaggatcacacggccagacatttgcc

SEQ ID NO: 827652 - DNA, 120 bp, Artificial Sequence
  ENSG00000261177_9 (sequence is synthesized)
tcttactaacactgtgttaagtctctatcgggatcccctccagttccaaagcggctgagacacagacaaagctatcttggatgagacctgccaaccgccaccccctcggctcatcttggt

SEQ ID NO: 827653 - DNA, 120 bp, Artificial Sequence
  ENSG00000261177_10 (sequence is synthesized)
ccgagtcaagcaccagacacctcagaccccactatttcctgggaaatgtagagcaatggtttctctcctgccaaaatcctcaaaggcagccagaaacagtagagtgattaggaagcctta

SEQ ID NO: 827654 - DNA, 120 bp, Artificial Sequence
  ENSG00000261177_11 (sequence is synthesized)
cgctggacacacttccaagctgcaagcttcctgtgaagcaaaacagaacagacttcatatggtggagtcaaccaacatgggcgcgtcccagggcccagcagcataaacatcgggctctct

SEQ ID NO: 827655 - DNA, 120 bp, Artificial Sequence
  ENSG00000261177_12 (sequence is synthesized)
gatcccgacctcccgacatacccatttgtcctggccgctcctcggacacatgaatgcctgtctcaaaccccacccttcaccgccagcagtctccggggaagtgacaaacaccggatagag

SEQ ID NO: 827656 - DNA, 120 bp, Artificial Sequence
  ENSG00000261177_13 (sequence is synthesized)
ccaatgggcccccggagtccggatgcccaccatccggggctgtttatgtttgagcccatcttggaagaaaaatgtgagaacgcctgttcagaacatggtggccaagccgggtccatccgg

SEQ ID NO: 827657 - DNA, 120 bp, Artificial Sequence
  ENSG00000261177_14 (sequence is synthesized)
tgccagggagccaaacacaatgggaaaggaggcgcagacgcggcggaaggatagggccgggcatggcccgccgagggagaccgctgggccaggttgggtccttccctgcgccctccttgt

SEQ ID NO: 827658 - DNA, 120 bp, Artificial Sequence
  ENSG00000261177_15 (sequence is synthesized)
ccctacgctgtgaaaaggcacctgggttcttcttccctccacccgggactctctgatcactcatacctccctcttggcccaccgagtcgtgtgagccacatccttcactctgcccgtaaa

SEQ ID NO: 827659 - DNA, 120 bp, Artificial Sequence
  ENSG00000261177_16 (sequence is synthesized)
accaccaagttttaggcagcggacagtcaagacagacaggcaagagtttcttgtgagagttgtcagtgaaagcactttctcgtagcagagccttatgttattcccagctgaaatgctgtt

SEQ ID NO: 827660 - DNA, 120 bp, Artificial Sequence
  ENSG00000261177_17 (sequence is synthesized)
gctctttccaaggaaggataggtttcttctggaggagaggcagaggtgtgctctccagaccccaccgccatgctgggcgcgaaaacagccctccttcaggaagacaccagcctttgagca

SEQ ID NO: 827661 - DNA, 120 bp, Artificial Sequence
  ENSG00000261177_18 (sequence is synthesized)
acctggagtcctgaggcctgtggcttcctgggaacctataaccgcatcagacgttgaggcagagttgctgttaccagtttcacatcttagtaagagccaccgtttttgacatgtcaacaa

SEQ ID NO: 827662 - DNA, 120 bp, Artificial Sequence
  ENSG00000261177_19 (sequence is synthesized)
ccctcccaaaaaagcacaaatcaatcagtgtttattaaaaggccaccttgtgcaaagggctgttggttaaaacacatcaatgcctgagatactcagggaaaggctggttgcctttgggaa

SEQ ID NO: 827663 - DNA, 120 bp, Artificial Sequence
  ENSG00000261177_20 (sequence is synthesized)
gcaggaaccctcatcttggattgtcagaagacttgctttggggagaccctcagttcctgtttctagtaagtttctgtcttttgattcatgacgtgactgcaggcaagtgctcggggtttt

SEQ ID NO: 827664 - DNA, 120 bp, Artificial Sequence
  ENSG00000261177_21 (sequence is synthesized)
tcaactgcaaaatggagataacaatggtacccacctctctcgaggggtggctgtgaaaattaaatgagatgatgcacgtaaaattatgataaccgtgctcttaacctcaaaaatctgcat

SEQ ID NO: 827665 - DNA, 120 bp, Artificial Sequence
  ENSG00000261177_22 (sequence is synthesized)
tagaaattatatggtttgaaccgcgtctaaccaagactccaataaacaaaagtccatttctctcgctcatggaagcccaagctctgatctgcaaagtccacaggggctccagctccctcc

SEQ ID NO: 827666 - DNA, 120 bp, Artificial Sequence
  ENSG00000261177_23 (sequence is synthesized)
gccttgctgtgcgtgtccccctgggagtgtgtcctcatctgcaaggccctgagcagctcaccctcacccacagtgcacaccccgagggtaggaggatgaagggatgctgggcagagtcac

SEQ ID NO: 827667 - DNA, 120 bp, Artificial Sequence
  ENSG00000261177_24 (sequence is synthesized)
gtggacacacccagctctaagggaggatgggaaatggagtctttattttgggcagtcatttcctttgcttaaaattgggaggattacaacatacaggaaaggaaaatggataagggtgtt

SEQ ID NO: 827668 - DNA, 120 bp, Artificial Sequence
  ENSG00000261177_25 (sequence is synthesized)
aataggccgtctcagccaccccctaggaggtaaggattgttatcacatgttatacatggcaacaccgaggctcagaaaggtgaaagaaattgctccaaagtacacagcttcttaaaaacc

SEQ ID NO: 827669 - DNA, 120 bp, Artificial Sequence
  ENSG00000261177_26 (sequence is synthesized)
ctcagtcttgcccactgggctgcactacctcctaagcagtggtgaggaggtggtgctttctctgcgctgacacgtggaattacacagaagaacagggtggtcactgggagcctgggtggg

SEQ ID NO: 827670 - DNA, 120 bp, Artificial Sequence
  ENSG00000261177_27 (sequence is synthesized)
tggcgggcagcataggtgagctgacacccatttgtcctgggggcctcccagggaagagagacccccattcccaaggcaggggcaggttctcaggaatgcggcttctccaagcaggaggca

SEQ ID NO: 827671 - DNA, 120 bp, Artificial Sequence
  ENSG00000261177_28 (sequence is synthesized)
gtccggaggccttttccacactgctcatttcttccaccgtcctgaaggcttaggagagcagaagggagtctctcccaagcgccggctggtgggcgcacctccccggtgctccctgcaggg

SEQ ID NO: 827672 - DNA, 120 bp, Artificial Sequence
  ENSG00000261177_29 (sequence is synthesized)
cagtgcccagtggggtggggcctgggggggctaacagctccagagccacgctctacatgcgatgggggctgggaggaaagaaaaccaggctggcaaaggggtcaaggcggaggtgggtgc

SEQ ID NO: 827673 - DNA, 120 bp, Artificial Sequence
  ENSG00000261177_30 (sequence is synthesized)
ccactactggcagcagcccaaagaggtgggtactgctactattcccaatgcccaataaggatatcaaggcctagagacacgaattaactaactcaagtgattcagggagcccagaagggg

SEQ ID NO: 827674 - DNA, 120 bp, Artificial Sequence
  ENSG00000261177_31 (sequence is synthesized)
ctttgaactcaagtggttgggcactatgacattagcctggtcccatgaataatcaccgtctttgcagcctagggaaagttcaaaggcaatgccgctcaaggccacctcccaacaaacgcc

SEQ ID NO: 827675 - DNA, 120 bp, Artificial Sequence
  ENSG00000261177_32 (sequence is synthesized)
tccaccaaacatcgtttatatagacattccggagacacccctcagacaggtctgggggtccaagagatttccattcgaaaagaatatctcaggctgggctcagtggcttacgcctgcaag

SEQ ID NO: 827676 - DNA, 120 bp, Artificial Sequence
  ENSG00000261177_33 (sequence is synthesized)
cctgcaagcccagcactctgggaggtcaggcaggcagatcacttgggccctcctaggagttcgagatcagcctgtgcaacacggagaccccgtccctacaaaaaatacaaaaattagctg

SEQ ID NO: 827677 - DNA, 120 bp, Artificial Sequence
  ENSG00000261177_34 (sequence is synthesized)
tgagaatatgtttcagagaaaaaaataggaatatttctgccccaagggtattgggctcacactgcctgtgtgcagattgtgattctgccttcctagctgtgtctcctttaaggatcttct

SEQ ID NO: 827678 - DNA, 120 bp, Artificial Sequence
  ENSG00000261177_35 (sequence is synthesized)
cctctctggcctcagtttcctcatccgtagcatggggaggagagtgctccctgcagggctgttgggagaaggccatgagggctgttggaagaaggccacctctcaaatagtgacaggcgt

SEQ ID NO: 827679 - DNA, 120 bp, Artificial Sequence
  ENSG00000261177_36 (sequence is synthesized)
tggcattgctgtcctttgtcgtattatttatgagatattctttatatttcaaattagatcataatttttaaaaattaagtgcaggacaaaagaaacagaggggaacccacagatgaaaag

SEQ ID NO: 827680 - DNA, 120 bp, Artificial Sequence
  ENSG00000261177_37 (sequence is synthesized)
gatcttaaaccagattgtagccaactacaaaagaaacctcagtcatcatcatgggccacacagcccctttgtgtacctattgattatacaactacataaatatgtcactaacaaaaataa

SEQ ID NO: 827681 - DNA, 120 bp, Artificial Sequence
  ENSG00000261177_38 (sequence is synthesized)
atgcatgactttttttttaattacttaaactttaaaccatggttcttgcccccagagaagctggtctggacacaaataaacccaatctaagggaggcatgctcagggcactgaggtcagc

SEQ ID NO: 827682 - DNA, 120 bp, Artificial Sequence
  ENSG00000261177_39 (sequence is synthesized)
cccagctgccatgcatgcaggtgacatgtgaggtgccattctggtgccaagatttcctcaaaacaaaatggtgcaggtcgcaggaggctcatctcactggggaggaagccgaagctcaag

SEQ ID NO: 827683 - DNA, 120 bp, Artificial Sequence
  ENSG00000261177_40 (sequence is synthesized)
gaagccactagtcccagttacgccactgggctggtcagtgcagagttgggactgcactccaattgtgtctggctccagagtcccaagacagcatggctgggcttatgcccggccccccac

SEQ ID NO: 827684 - DNA, 120 bp, Artificial Sequence
  ENSG00000261177_41 (sequence is synthesized)
aagcagaccctgagacaaggatttgagcatgagagttgatttgggggatgaccagagcagcagtgaagtggagaggcaaggtcggggaggagggccacagcacagggacctcacagagca

SEQ ID NO: 827685 - DNA, 120 bp, Artificial Sequence
  ENSG00000261177_42 (sequence is synthesized)
ggggcttcatggcaagtgggctcagtccccccagagagctctgggagtggtggagagctcgcccccaaggcatcctcccaatgcgagagagagctggggtgctgacccaccagcccccat

SEQ ID NO: 827686 - DNA, 120 bp, Artificial Sequence
  ENSG00000261177_43 (sequence is synthesized)
ctgtcaccaatcctgagagactccaaggcctttgttccctgccctttctggcccgccctgtaggtggactgagcattttcccatggtcagagaaagtctctggcatggattctcacatac

SEQ ID NO: 827687 - DNA, 120 bp, Artificial Sequence
  ENSG00000261177_44 (sequence is synthesized)
gttggggtgggaaaccatcagcttgttcaggagccttgaatgctgagaaagtatgggcggggctgcaaatgcctgacccccacatgtgcctgcacagaaaccctccacccctgcaatatg

SEQ ID NO: 827688 - DNA, 120 bp, Artificial Sequence
  ENSG00000261177_45 (sequence is synthesized)
atccagggacccacactcactgctctgtgtggatggcttacattccatttccgttcctttctcttatctctacttatataaatatcctttataacaagaaaagagcaataaaaataattg

SEQ ID NO: 827689 - DNA, 120 bp, Artificial Sequence
  ENSG00000261177_46 (sequence is synthesized)
tgaatttttaaaaagacacaagaactattccccaaactgtttccccagaagagtcagcattgcatggagcaggcggggagtgggaggtgactggacagcccctcagcgtctggacagagc

SEQ ID NO: 827690 - DNA, 120 bp, Artificial Sequence
  ENSG00000261177_47 (sequence is synthesized)
ttccttctcacagggtccctgcctcctcctcggacacctgtggtctgtcaggtgacacatcattcctgtccatcagcagccccaggccatcgctgccagctctgataacccagtcatgac

SEQ ID NO: 827691 - DNA, 120 bp, Artificial Sequence
  ENSG00000261177_48 (sequence is synthesized)
aaggccccctttggatagaaattcctcacttcctggtggtcaggcttgcactgacccccatggtcagtgtgggagctggccgtttttattttggtgcatacaaattaatatcagcccact

SEQ ID NO: 827692 - DNA, 120 bp, Artificial Sequence
  ENSG00000261177_49 (sequence is synthesized)
gcctgtggagagaacgcacccgtggtgcacgagcatctgcatatccctcactgtgtgggcttagggtctccacggagacacctgcttccctctcctcccatcctcccattgcaccatggg

SEQ ID NO: 827693 - DNA, 120 bp, Artificial Sequence
  ENSG00000261177_50 (sequence is synthesized)
acatcaaggggcagcagctcttgacccctgctgatgcccagccctccaaacatcagctgtccatccacgcctcctgctgcagattgcatgccacactcaccatcccagggcaaagtgcag

SEQ ID NO: 827694 - DNA, 120 bp, Artificial Sequence
  ENSG00000261177_51 (sequence is synthesized)
tgaaacagcccatgccccacttctctctctttgatattttttccctgccatcctttaaaagcttgaccctctcactgtctccaccttcatcccatcaaaacctgctccaaaaaagaatat

SEQ ID NO: 827695 - DNA, 120 bp, Artificial Sequence
  ENSG00000261177_52 (sequence is synthesized)
gtcaacagtcatcctcaccacgtgtgaatcagatgggtcacaggatgatggtttgggggcaaaagggtctttacaaactgccaggagatgtgcagcagcttttatgaatgctgagcctct

SEQ ID NO: 827696 - DNA, 120 bp, Artificial Sequence
  ENSG00000261177_53 (sequence is synthesized)
gcctgccctgggtcccagcaattgcaactctgggtacacatgcaacaaaaatgcttacggacattcacaagaacccatatgcaaaaatgctcatcccaggccgggcgcggtggctcatgc

SEQ ID NO: 827697 - DNA, 120 bp, Artificial Sequence
  ENSG00000261177_54 (sequence is synthesized)
aaaaaaaaaaaaaaaaaaaaaaagagtgctcatcccagaacaattgataatcatgaagaactggaagccaccgaaagctcatcactgggaatgcagaatggatggtgacatgggctgcgt

SEQ ID NO: 827698 - DNA, 120 bp, Artificial Sequence
  ENSG00000261177_55 (sequence is synthesized)
ctgggaatgcagaatggatggtgacatgggctgcgtccacagcacagagtgctctgccacagaaaaaacgaagcctcaggccagcccaaactagctccatggagaggcctgggatgctgt

SEQ ID NO: 827699 - DNA, 120 bp, Artificial Sequence
  ENSG00000261177_56 (sequence is synthesized)
ccgttcatttgccttcaacagagaaccaaggtcacctcctgagcacagtaaatttagagccacttctcagaattctgcatctcagggggcagaggcttggcctgaaaccctgcagaagcc

SEQ ID NO: 827700 - DNA, 120 bp, Artificial Sequence
  ENSG00000261177_57 (sequence is synthesized)
agccgtgctgtgtgaccacgggcaagaggcttaaaccctctgtgcctttgcttcctctctgaaaaacggagataataatggcacctgtcatcagtataaataaaataacatatactcata

SEQ ID NO: 827701 - DNA, 120 bp, Artificial Sequence
  ENSG00000250968_0 (sequence is synthesized)
agaaaaaggggagaaggaatgcaacaccccggaaacatgccaacatataaaaccagcagctatgagtaccatcactgtgctaagaggaatgtgggttcgaatttcagcactagcacttct

SEQ ID NO: 827702 - DNA, 120 bp, Artificial Sequence
  ENSG00000250968_1 (sequence is synthesized)
tcactggatgatattaggcaagaggtttcatctctttaagcctatgttgtagaaaaataccaagctaagatactgaattgtggtaccaagaaggacagagatgaaatcctggataaatgg

SEQ ID NO: 827703 - DNA, 120 bp, Artificial Sequence
  ENSG00000250968_2 (sequence is synthesized)
cagatctgggtttgaatcctgacttcaatactaccggtgatgtgatttatatgcctaggacttgtgcttctaaggctcaattttatgcctacaaaatctttattaaaatgcacaccttga

SEQ ID NO: 827704 - DNA, 120 bp, Artificial Sequence
  ENSG00000250968_3 (sequence is synthesized)
agatcactataattaaagaacatatataatgtatatgttatataataaataatttgtctaatctttgcccctgattcctggtagatgaccactaaactaagtctttggaatttctcaagt

SEQ ID NO: 827705 - DNA, 120 bp, Artificial Sequence
  ENSG00000250968_4 (sequence is synthesized)
gatagtagtgtctttgttattcatggtgggaccgtcaagcatgaatggttatgataatagaggactcaggatgagagctgatcaccccagaaagaccaactttgtaatgagaggattgag

SEQ ID NO: 827706 - DNA, 84 bp, Artificial Sequence
  ENSG00000250969_0 (sequence is synthesized)
aaaagcgattttcttatttgagttcaaaatgggtcataaagcagtggagacaacttgcagcatcaacgaagcgtttggcccagg

SEQ ID NO: 827707 - DNA, 120 bp, Artificial Sequence
  ENSG00000250969_1 (sequence is synthesized)
agttcaaaatgggtcataaagcagtggagacaacttgcagcatcaacgaagcgtttggcccaggagctgctgacgaaggtacggtgcagcggggggttcaagaagttttgcaaaggagat

SEQ ID NO: 827708 - DNA, 120 bp, Artificial Sequence
  ENSG00000250969_2 (sequence is synthesized)
agtgaccaactgagagcactcattgaagctgatcctcttacaactccataagaagttgcagaataactcaacattgagccttctgtggtcatttagcatttgaaacaaattgaaacggtg

SEQ ID NO: 827709 - DNA, 120 bp, Artificial Sequence
  ENSG00000250969_3 (sequence is synthesized)
aaaaagctcaataagtgggtgtctcataagctgaccgaaaatgaaaaaatgtcatcacttcgaagtgtcatcctcttattctatgcaacaacgaagcatttctcaattggattgtgacat

SEQ ID NO: 827710 - DNA, 90 bp, Artificial Sequence
  ENSG00000250969_4 (sequence is synthesized)
ctatgcaacaacgaagcatttctcaattggattgtgacatgcgatgaaaagtggattgtatatgacaaccattgacaacgagctctgtga

SEQ ID NO: 827711 - DNA, 120 bp, Artificial Sequence
  ENSG00000250961_0 (sequence is synthesized)
ttccggtgacagctttgtgtctgactttgtgacagcttaggtatcatgccggatttcctgcacattttcgtgaagaccatctagaagcccatgcctgcttataactggcgagatgggatt

SEQ ID NO: 827712 - DNA, 120 bp, Artificial Sequence
  ENSG00000250961_1 (sequence is synthesized)
atggcttgtcaagcagcagaacacacccagtgtctcctctcctacagagcgtctgctgctatggacatgtgctgccctgggaaaagtccactgaaggtggatgatgcagatgaaaaggct

SEQ ID NO: 827713 - DNA, 120 bp, Artificial Sequence
  ENSG00000250961_2 (sequence is synthesized)
acttcacttttggaagctgcctaattcacttccaggagcaaactttttgatcggtaggatatgactcagtaatgctgattgaattggcttctcactgtatttgtcaaggctggaacagac

SEQ ID NO: 827714 - DNA, 120 bp, Artificial Sequence
  ENSG00000250961_3 (sequence is synthesized)
gatggcactgcagaatcttatgtgcacagaagaaatctacagacattcaatgaggggaggatttcgttccatcagatgggcttcctgacataattgcaaagacacatgaagactcaacga

SEQ ID NO: 827715 - DNA, 120 bp, Artificial Sequence
  ENSG00000250961_4 (sequence is synthesized)
tttatctcccatcaacctcttcttagttaatatcagcccatgtgctccaagaaaaccagaggaaatatcaagaaagaagaaaacatgagaccctgaaaataaaaacctcaacccagaagg

SEQ ID NO: 827716 - DNA, 120 bp, Artificial Sequence
  ENSG00000250961_5 (sequence is synthesized)
agaccatgaaataattccagtatgtttgcttaattgttgggtattcctgtgacaaagaaggcactactcagccagccagaatgcactgaccaccactgcagggtttcagtcacatgagac

SEQ ID NO: 827717 - DNA, 120 bp, Artificial Sequence
  ENSG00000250961_6 (sequence is synthesized)
atctgggtgatagagggaagtgtggggaatggctatcattgatgagcctgtatgttctaagtgatctggggactaaggcttatttttctccaggcttgtcttatgaagaagttttagtct

SEQ ID NO: 827718 - DNA, 120 bp, Artificial Sequence
  ENSG00000250961_7 (sequence is synthesized)
atttggaatagataaggcttatacacataaagtaactgatactcaattatatgtaattatgttagttggggataaggctaagctgtgttatgtagtgactcaaaaatgcgatgactcaaa

SEQ ID NO: 827719 - DNA, 120 bp, Artificial Sequence
  ENSG00000250961_8 (sequence is synthesized)
caagattggagcttgtttctctccgggaatgaatgatcccacactcgggggcagctaggctgctgggatccaggttccttcacctgttgctctgttatggttgaagctggcttatcccaa

SEQ ID NO: 827720 - DNA, 120 bp, Artificial Sequence
  ENSG00000250961_9 (sequence is synthesized)
acatttcagcccacacagctaggcagaagaggggtgaaagtggagcatgagcaatgccttttcttttattttttttaaagtcagtattattgcattataatttacagaaaataaaataca

SEQ ID NO: 827721 - DNA, 120 bp, Artificial Sequence
  ENSG00000250961_10 (sequence is synthesized)
cctattttaagtgtatactttaatgggctttggcagattgcttacacgcattgaaccaccaccctaatcaagataatggcatttccatcatccctaaacatttcctcatgccctttgcag

SEQ ID NO: 827722 - DNA, 120 bp, Artificial Sequence
  ENSG00000250961_11 (sequence is synthesized)
taaatgccatctactcttggtctaaggtggctactgatttgatatctatcactacagattatttttgcctgttctagaatatcacataaatggaattatatggcaggtgctttcaggctg

SEQ ID NO: 827723 - DNA, 120 bp, Artificial Sequence
  ENSG00000250961_12 (sequence is synthesized)
ggtgatataagtcaggtgtctaagttgtaaatttaaacagacactcacactaagttttatgccagtgctgactctacaatgcaccctgcgccatgctgcattgtatcttgtttcttttgc

SEQ ID NO: 827724 - DNA, 120 bp, Artificial Sequence
  ENSG00000250961_13 (sequence is synthesized)
cctgtgtattgtttttgagattcatttattttgttatgtgtatcagtggttcatcattttttgttgctgtgtagtagtctatgtcacaaattcactacaatttgtttatacgtttgtcta

SEQ ID NO: 827725 - DNA, 120 bp, Artificial Sequence
  ENSG00000250961_14 (sequence is synthesized)
ctgatggacgttgtttccggttttgggcttttatgaacatagctgtcacaaacagatgtgtacaagtattttagtgaacatatgttttcatttctcttgggtaaatactcaggaatggaa

SEQ ID NO: 827726 - DNA, 120 bp, Artificial Sequence
  ENSG00000250961_15 (sequence is synthesized)
ttgctggatcatatggtaagcgtgtcttggtaacttcaggagactgctgaacaatttttgaaagtgaatttaatactcgatagtctcattagcaatgtatgaaaattctagttgctttac

SEQ ID NO: 827727 - DNA, 120 bp, Artificial Sequence
  ENSG00000250961_16 (sequence is synthesized)
agcctcaccaacactagttatcatcaacgtgtttaactagctattctagtaactatgttgtgatatccattgtagttttttccttttttgtccccgtaccctaagctcctatccattgta

SEQ ID NO: 827728 - DNA, 120 bp, Artificial Sequence
  ENSG00000250961_17 (sequence is synthesized)
gttttaatttgcattgccctgatgactagtaatgttaagcatcattatatgtgattataagctattgtagtgtttcgtaaaatatttgttaaaattttttgactattagaaaaagtaggt

SEQ ID NO: 827729 - DNA, 120 bp, Artificial Sequence
  ENSG00000250961_18 (sequence is synthesized)
ttactctcccagacttgttctcagcctttctggggacaaatgaaggaagcaactggggagaagaaactaaccagaggtttggagatgtttctcaggttattttgagaacagccgatccga

SEQ ID NO: 827730 - DNA, 120 bp, Artificial Sequence
  ENSG00000255306_0 (sequence is synthesized)
ggaggcgggacatccggggcgtggtttagaaagagtgctttcgccgtgggtgcagagggtgggcccgccgggttgggtggggggcgtgtgatgacggtaatggcgacgagatgctcaact

SEQ ID NO: 827731 - DNA, 120 bp, Artificial Sequence
  ENSG00000255306_1 (sequence is synthesized)
cacgcggcctcttttaatcctcacagcagctctgcgtggagaaactacagtaacgtgttaccacgttaaggcgggaagctgaggtgattcctgcgtggatgcctgcggggattcctgcgt

SEQ ID NO: 827732 - DNA, 120 bp, Artificial Sequence
  ENSG00000255306_2 (sequence is synthesized)
ggattggggaagtcctgcagcattacagaattgttacccaacgccagggccttggtccagagtcctgttgctagatgcacagaaagcaaatcactgagatctgggtcagggcttgtctga

SEQ ID NO: 827733 - DNA, 120 bp, Artificial Sequence
  ENSG00000255306_3 (sequence is synthesized)
ccccagtggattcagacgtcacttcatggcatgagaccagcattacccacaatggcagtggcagcagatggaggagatggagcagaaggcagcagagggcgtcccagagttttctaaagg

SEQ ID NO: 827734 - DNA, 120 bp, Artificial Sequence
  ENSG00000255306_4 (sequence is synthesized)
tgaaagtatccagatgaagcagggctccttgaaggaatggctgcttctggagttggagcaggggagatacaagatgagcctggagctgcttgtagcaccagaggggaaggaggtggtcac

SEQ ID NO: 827735 - DNA, 120 bp, Artificial Sequence
  ENSG00000255306_5 (sequence is synthesized)
aacccaagaggctgggacatcttacatgggcttctgagcccgagcctcagacaaaccacacgaccttggattacagcccctggagtcaaataaatatacctgagtccgtagtgacctaaa

SEQ ID NO: 827736 - DNA, 120 bp, Artificial Sequence
  ENSG00000255301_0 (sequence is synthesized)
taaaataatagaattttttaataaattttttttcccaaacaacttcttttgatcttcaccacgcaggggccacagtggagaggaaagttctctccaggtgccctaaaaagtgtccagggt

SEQ ID NO: 827737 - DNA, 120 bp, Artificial Sequence
  ENSG00000255301_1 (sequence is synthesized)
agacttaggagaaaagtattcctccagtgtcaggaggttgaggggactagggtaagcaggggtcagggtcagcctggccctgactgaggcatcccccaaagggtcctgggtggggctccc

SEQ ID NO: 827738 - DNA, 120 bp, Artificial Sequence
  ENSG00000255301_2 (sequence is synthesized)
gcgggtcagcggctgcctggggggccccaccccagccttgggatggggaagagttaatggccagaactggggagggcagggctgagccaccacacacgccctcttggggctgccacaagt

SEQ ID NO: 827739 - DNA, 120 bp, Artificial Sequence
  ENSG00000255301_3 (sequence is synthesized)
caggacagcccagggggcaggcaaggagaggcggcctgctccccggggaggagaggagctgggaggggaaagggaggcagcaaggccagggaaggtggttggaggagctgttgccgcggg

SEQ ID NO: 827740 - DNA, 120 bp, Artificial Sequence
  ENSG00000255301_4 (sequence is synthesized)
caaggccagggaaggtggttggaggagctgttgccgcgggcgcggctgcccggccgcgtgggtgccgcgggcggacacgcctggaagtcggcctcgcggagcgcgcgcaggtctcggccc

SEQ ID NO: 827741 - DNA, 120 bp, Artificial Sequence
  ENSG00000255300_0 (sequence is synthesized)
aacaagctctttatggtacatagaaataatcctgtcatacagtgaccattcagagagggataaaaaccttatatatgaaactttcactaataacctgaaacatcaccacagagacagttg

SEQ ID NO: 827742 - DNA, 120 bp, Artificial Sequence
  ENSG00000255300_1 (sequence is synthesized)
ggttatcctgtttgtttggacatccacttattcacttgaaatgcaggaaatctatttgaaaaaaacaaaacaaaacatgatcagttacttgatacaatcatgagatgtgatcgagaaaaa

SEQ ID NO: 827743 - DNA, 120 bp, Artificial Sequence
  ENSG00000255300_2 (sequence is synthesized)
cttctctttattgctgccatgtgaaaaaggacatgattgtaagtttcctgaggtctccacatccatgcagaactatttacaggccagttgttgacattgtagtatcctctctttgaacac

SEQ ID NO: 827744 - DNA, 120 bp, Artificial Sequence
  ENSG00000255300_3 (sequence is synthesized)
tggaattgagcaacttcaaagagtcattggaccaaggtcttcatgcttcaaataaacctgcatcaaagaaacctggctagaagacaaagatcatgctttattcccccacaaaaggattat

SEQ ID NO: 827745 - DNA, 120 bp, Artificial Sequence
  ENSG00000255300_4 (sequence is synthesized)
gtttagatttaatgttgatgcctcagttaagtgctcactttgaaaatcaatacaacattgtgtgcttggttggctcaatacctctcagtcaatattaataaaaaaacagcaacaaaacaa

SEQ ID NO: 827746 - DNA, 120 bp, Artificial Sequence
  ENSG00000255300_5 (sequence is synthesized)
ggtatgagagtcatttgtggcataacttcaacagacatgacagggctgactttgagttgaattataaaatttccaaatgaggatgtccaggaaccagatagacacgtgagttagaagctc

SEQ ID NO: 827747 - DNA, 120 bp, Artificial Sequence
  ENSG00000255300_6 (sequence is synthesized)
agaaagcaggtcaccatcacctcttatctgatcattgcaacacttgcttacttgtcctcctatcaccagatctggctcctgacaattcaccttgcgtaatgagagggataaaaaccttat

SEQ ID NO: 827748 - DNA, 120 bp, Artificial Sequence
  ENSG00000255300_7 (sequence is synthesized)
cagtgtcatcatcattaatgaaaatagtacgagaatatacaaagatgcataagtgagtaatggtgtaacattctaacatttctaagatgtgaatttggatcttgccatgcaagatcgaaa

SEQ ID NO: 827749 - DNA, 120 bp, Artificial Sequence
  ENSG00000255300_8 (sequence is synthesized)
ctgaaaaatgaaattttggataaatttgaaggggcgttagactgtggcaaaggaaatgcatgacaaatcttgggaatagaataagggaagaaacttggcatgctcttgtaacctgctctg

SEQ ID NO: 827750 - DNA, 120 bp, Artificial Sequence
  ENSG00000255300_9 (sequence is synthesized)
taaaatctgagtgaaatttcctggaagagctttgtagaatcaatatgtggtactcattcttcttctacgagatgagaaatgttctatatcgaagctactctgtcagccaaaatagtgata

SEQ ID NO: 827751 - DNA, 120 bp, Artificial Sequence
  ENSG00000255300_10 (sequence is synthesized)
gacatgttctgaatgagggagaaaaataagggcgaatatcaatgattgaaaagtttgctcgggctgccataacaaaatgccatggactgtgtggcttaaacaacagagattaattttctc

SEQ ID NO: 827752 - DNA, 120 bp, Artificial Sequence
  ENSG00000255300_11 (sequence is synthesized)
acatctctggaggctacaagctcaaggtgttggcaggtctggtttctcccgaagcctctctccctggtttgcagatttacaggccagttgttgacattgtagtatcctctctttgaacac

SEQ ID NO: 827753 - DNA, 120 bp, Artificial Sequence
  ENSG00000255308_0 (sequence is synthesized)
gagatgactatgttgtcaaagacaaatcgtgggtcaagattgaaatgggggacagtctggaatttacgaggatgagatagaatggacagccctgtgacatcaacttggaagaggttggac

SEQ ID NO: 827754 - DNA, 120 bp, Artificial Sequence
  ENSG00000255308_1 (sequence is synthesized)
tccagatttggatactcagatcccggaacaggctgattggaaagagaagaatggacaaaagaagtcaaccacacacaggtacatagtcttaccagacttggaagattgggctggatgaat

SEQ ID NO: 827755 - DNA, 120 bp, Artificial Sequence
  ENSG00000255308_2 (sequence is synthesized)
tatcttgaaattggcgagggaagctttggagaaatggcttgagaaagacatgttgaagaggaaaaatacgttaaggcttgccaatcagctgactgcagcagcagcagcagcagcagcagc

SEQ ID NO: 827756 - DNA, 120 bp, Artificial Sequence
  ENSG00000255308_3 (sequence is synthesized)
cagatctgatctgcgttggcaatatacttgtaattcggacatgcatctccaggacaccagccttagcaggaaggggagccaatcaaggggaaacaattatgcaaatttaaaatgtaaact

SEQ ID NO: 827757 - DNA, 120 bp, Artificial Sequence
  ENSG00000281664_0 (sequence is synthesized)
tttgggatggaggaagtgagggagaagtgcttcagaggtggcagcaatgtgcttctgagcgtggctgcgtggctccctatttcaatctgcctgtgaagatttcctgaggcatatgaccct

SEQ ID NO: 827758 - DNA, 120 bp, Artificial Sequence
  ENSG00000281664_1 (sequence is synthesized)
tcctgccatgacccttggtttccagaggcatctgctggtcagcccctaggcaacacttaaataggaaaacttttgcctatctgttactaagacatgctgatttccagatatcttagtacc

SEQ ID NO: 827759 - DNA, 120 bp, Artificial Sequence
  ENSG00000281664_2 (sequence is synthesized)
ctttttattatctctctgcctggggtttaataacagttaaaagagacaattcatgcaatgtgcaacaaagtttactttgtgtacatatatttgctctgcacatacctggcatatagtaac

SEQ ID NO: 827760 - DNA, 120 bp, Artificial Sequence
  ENSG00000281664_3 (sequence is synthesized)
tgctcaataaatatcagtggctattataatctagagcttgttggggagttgtctgagtgagaaaagaacaaaagatactcgttttacaaacaatttttgcttcatctctggatggcatat

SEQ ID NO: 827761 - DNA, 120 bp, Artificial Sequence
  ENSG00000281664_4 (sequence is synthesized)
tcatttctgaagcatcttcacactcagttgctaagaataggatatattctttccattgtacagatggagtaaccgagagactggaaagtgacatcaccaacaggcggtgacctagggagt

SEQ ID NO: 827762 - DNA, 120 bp, Artificial Sequence
  ENSG00000281664_5 (sequence is synthesized)
cagggccagaaccaggtctggaatacagacttcctgactcctgacccaggttcccttctgccctgtggccttcacaggacgcctggagagaccagggaagtatctgtttcagggctctct

SEQ ID NO: 827763 - DNA, 120 bp, Artificial Sequence
  ENSG00000281664_6 (sequence is synthesized)
gagttgcccttggaagtttatcatctatcaactgactgttgaccaaaaacacactgattcctgaggagaccttacaggatgtcctgttgagacttttcctcctcttttcattagtgcttt

SEQ ID NO: 827764 - DNA, 120 bp, Artificial Sequence
  ENSG00000281664_7 (sequence is synthesized)
gactcaaacactctcaaagaggagagagtgataccaggcagaagaaggtacaggaagcagcaaggggtttgtgtctggacgtgtctacctgatctattgtctgatggagctgactagcca

SEQ ID NO: 827765 - DNA, 120 bp, Artificial Sequence
  ENSG00000281664_8 (sequence is synthesized)
gctctgttaagctgctggcttttcttccctaaaatgcctgaatgcacctataattacttaccctattatttggtatcttatagatgcggctctatatatgcagtgtacaaatctctaaga

SEQ ID NO: 827766 - DNA, 120 bp, Artificial Sequence
  ENSG00000281664_9 (sequence is synthesized)
gaaacaacacatttggcattgggcctaggatatagatgagctatgggaggaaaagattggagaatatatgtagtgagatcagaaaagctgatttgagaaaggtaaggcagcttgcaaatt

SEQ ID NO: 827767 - DNA, 120 bp, Artificial Sequence
  ENSG00000281664_10 (sequence is synthesized)
gcaaagcattgagggaagtcagtgcaattcacctgagaagacatttatactagtatttgcaaagaactgtattgggatgaatagaaaatgaaaaagacatgaccctagatttaaatttgt

SEQ ID NO: 827768 - DNA, 120 bp, Artificial Sequence
  ENSG00000281664_11 (sequence is synthesized)
aagggtaacattccttccttctacacatgctcatgctcagtaagtacctattatgtgcaaggcactttgctggatcctggaggtatactggtgaacaagaaagatgtgagtccaccctct

SEQ ID NO: 827769 - DNA, 120 bp, Artificial Sequence
  ENSG00000281664_12 (sequence is synthesized)
cagaacttacaatttactgggagagagcaacaaggaaaataagatcacagtttgggataaatcctaagaaggtaataaagaaattggtgtgctagaaagtctaagggttggtggggtggg

SEQ ID NO: 827770 - DNA, 120 bp, Artificial Sequence
  ENSG00000281664_13 (sequence is synthesized)
tggggggtgacatggtgctgtttcagattggtgaagtcgaagtcctctcttaagagatgccctcaagccagatatatgaagagctaggcaagagcattataagcaaagggaatttcaaat

SEQ ID NO: 827771 - DNA, 120 bp, Artificial Sequence
  ENSG00000281664_14 (sequence is synthesized)
gcaaagatctagaagagaaatcttggcacgttctagaaactatatgaaggactacatagctggaatgtagtggggagaaagatgacaaagccaaaatgggaatctagatgagaagtgatg

SEQ ID NO: 827772 - DNA, 120 bp, Artificial Sequence
  ENSG00000225321_0 (sequence is synthesized)
gccttcaagagatacataggccagaggaaagttcagaggatgctcaggttcatatttagtcacatcttataatgaaacaaaccgtctctagaacgtatgcatttgagcactccagtactc

SEQ ID NO: 827773 - DNA, 120 bp, Artificial Sequence
  ENSG00000225321_1 (sequence is synthesized)
gagtatccaaggaaggtgaaccagcccaggagtcctgtaaacagccatccttccaagtcagcacataaagttggaggtgcagcttcagaagaaggctagatctgcctttacccagaacag

SEQ ID NO: 827774 - DNA, 120 bp, Artificial Sequence
  ENSG00000225321_2 (sequence is synthesized)
tgagtgacgtttgataaaaatgaagaaataatgacaagagaaaatattgtctcaattgtatcagattaaccgaaaccattaacgtcagagcttgatggaacaatcacccatcattttaaa

SEQ ID NO: 827775 - DNA, 120 bp, Artificial Sequence
  ENSG00000225321_3 (sequence is synthesized)
ggaccctccgagggattttacaagccattctgaggaacattttgggtcttgtgctcaaggaaatggcttcttcaaggattccacaagataagttataccctcagttctttgctttacatg

SEQ ID NO: 827776 - DNA, 120 bp, Artificial Sequence
  ENSG00000225321_4 (sequence is synthesized)
gacaagagctttgacctccaaaactggtgatgacgcaaccttgcaggggcttccttgacgctcctgggaacaggaacacgtggctccttgagagcagaactttcctgctttgctcccttc

SEQ ID NO: 827777 - DNA, 120 bp, Artificial Sequence
  ENSG00000225321_5 (sequence is synthesized)
tggattcgcaacactaacatcatacttgacaactggtaggcactcaggaagtgtttccataagacctggaagacaagacataatgtggggacacaaaggcagatgaagacttattgctca

SEQ ID NO: 827778 - DNA, 120 bp, Artificial Sequence
  ENSG00000225321_6 (sequence is synthesized)
tgtttttattttaagcagctcttcatatgtataatttccttttgccccattgagaagagtacattataatttccagagaattcaaactttcttttcagtttttaaatctgtgacttggat

SEQ ID NO: 827779 - DNA, 120 bp, Artificial Sequence
  ENSG00000225321_7 (sequence is synthesized)
acatctcagggaaattctgcccaagaaccagtggagaccaaactgggatgagaagacacattgacagtgatttacccaagatggggtttatttagtagcaccaactgccagtccttccca

SEQ ID NO: 827780 - DNA, 120 bp, Artificial Sequence
  ENSG00000225321_8 (sequence is synthesized)
tacagatgcctatggggcagacagataggaagacagcaagccactcacaaatatgaatagaaagggagaaatgctcgttcattccttgtttcttttattcatttcaccaatatttactga

SEQ ID NO: 827781 - DNA, 120 bp, Artificial Sequence
  ENSG00000225321_9 (sequence is synthesized)
gcacttactatggtccagaccatgttgggcattgaggatatgaagcgaacaagacagtcgttgtctttcccttataggacttacaccagtatctctgctctagggatttggatagagagt

SEQ ID NO: 827782 - DNA, 120 bp, Artificial Sequence
  ENSG00000225321_10 (sequence is synthesized)
gtcaaatatgaaaacatgccagggggctcatttagtcagcagtttttacccagattaatggctgatcagaaaagaaaggccaaagcacaattcagctagcatatacataagccacaaatg

SEQ ID NO: 827783 - DNA, 120 bp, Artificial Sequence
  ENSG00000225321_11 (sequence is synthesized)
taacaattcaaagccatctaatggacatgaacaccaaaatgtgaggatttgagcatactaaataaattgttaattctactgtagaaactccttctatctggaattcaaggagaactttta

SEQ ID NO: 827784 - DNA, 120 bp, Artificial Sequence
  ENSG00000225321_12 (sequence is synthesized)
aacttttacttaaatattagtagaaatacttttatgattattgcttaatgtattagcataccagctgacctcaggcaatttggtcatgcaaaactcttttttgttttgttttgtttttgt

SEQ ID NO: 827785 - DNA, 120 bp, Artificial Sequence
  ENSG00000225321_13 (sequence is synthesized)
tggtagaaaatggcagcttttaaagaggttagaggtggctgagcattcacttctccccctacaatctggctagtagactctaaggaaagctaatttcaaagaaaattctgacacatccag

SEQ ID NO: 827786 - DNA, 120 bp, Artificial Sequence
  ENSG00000225321_14 (sequence is synthesized)
ctcttttcggttgaggagttattatcaagcaagcacagaagcagctcatacaacttgttctgtgagctcactgaagtctcaggcttctgtcctgttaggtgttcagaccttgcttggaag

SEQ ID NO: 827787 - DNA, 120 bp, Artificial Sequence
  ENSG00000225321_15 (sequence is synthesized)
gtcacttgagatagacacccgcaattccacagaggggcttctgctaaccgtgtggacagcttcaggcaggcagagccctggggattcctagctggacacagaaccataaaaagatcaaga

SEQ ID NO: 827788 - DNA, 120 bp, Artificial Sequence
  ENSG00000225321_16 (sequence is synthesized)
ttcaggcaaaatcaccaaatatcattgatcctttggttgtttacaccctgttataatacaggggagtatttccataatattttagccaatccacatactttgattaccttcaatttcacc

SEQ ID NO: 827789 - DNA, 120 bp, Artificial Sequence
  ENSG00000225321_17 (sequence is synthesized)
aaaagaggacacttttaagcatgcatcagcttattaacaagccacaagtttaacccaaatctgcatgctaatcagacaagccaaagtaagatacagataacagaagctctgcaatacttg

SEQ ID NO: 827790 - DNA, 120 bp, Artificial Sequence
  ENSG00000225321_18 (sequence is synthesized)
ttccagcagaggggtttcctctctcacctgaggcaagtgtgcctgcctggttgaattctgtgagggcctgagttttagctcaacccaagtaacaggcatgtaatcccacagtgtctgtgc

SEQ ID NO: 827791 - DNA, 120 bp, Artificial Sequence
  ENSG00000225321_19 (sequence is synthesized)
gtctgtgctgcagtatttaaagtaaattgcaagtgataaaatagtcaaggaagcactattattacttgctattacttattaataataaaattagtattaattactattatggattactat

SEQ ID NO: 827792 - DNA, 120 bp, Artificial Sequence
  ENSG00000225321_20 (sequence is synthesized)
tagttacttatttatgcaagtactgataatttggggaaaactgtattgttttaagtgaaagtgagaagatagggcatagtagtaaccaaacgaaaggaaataaccattaagaaacccttc

SEQ ID NO: 827793 - DNA, 80 bp, Artificial Sequence
  ENSG00000225321_21 (sequence is synthesized)
agtaaccaaacgaaaggaaataaccattaagaaacccttcacacagagatagatagatagattggtagatagattgattt

SEQ ID NO: 827794 - DNA, 77 bp, Artificial Sequence
  ENSG00000225321_22 (sequence is synthesized)
gcaggtttgttacatatgtatacatgctccatgttggtgtggtgcacccattaactgtcccccaaccccatgacagg

SEQ ID NO: 827795 - DNA, 60 bp, Artificial Sequence
  ENSG00000225321_23 (sequence is synthesized)
taagtttttactattgtgaatagtgctgcaagaaacatatgtgtgcatgtgtctttatag

SEQ ID NO: 827796 - DNA, 120 bp, Artificial Sequence
  ENSG00000225321_24 (sequence is synthesized)
attaccttgggcagtaaggccatttttgatttactgatagatgatagatagatcctactaaataaatatgggttctaggcagggtggtttgcagtggctgtacctaaaatatgacagcat

SEQ ID NO: 827797 - DNA, 120 bp, Artificial Sequence
  ENSG00000225321_25 (sequence is synthesized)
tggtttgcagtggctgtacctaaaatatgacagcattaaatattaatagaggtatcatcttcataagtctacctggaacgatggaaaatctgaacctaaagccacttcctgttagtcaat

SEQ ID NO: 827798 - DNA, 120 bp, Artificial Sequence
  ENSG00000225321_26 (sequence is synthesized)
ctttgtcctatagcaaaatctgaaaaagcataaccagacaaataagttgtgtagtgagttcttgttgtgtgttcaatgcttcacctccacctcctcatcggtctgctccacagcttcgca

SEQ ID NO: 827799 - DNA, 120 bp, Artificial Sequence
  ENSG00000225321_27 (sequence is synthesized)
tggctggcaagcacctcggtgcccacggaggagctgggcaggtactgagctctctgcaaggccatccagttggtgaaccactgagctggattacaacctggtccatgcgaccctaagccc

SEQ ID NO: 827800 - DNA, 120 bp, Artificial Sequence
  ENSG00000225321_28 (sequence is synthesized)
aggcagatgaagacttattgctcattcttcttttttccacttcctgaaatagacagtccttccctcctgatccaaacccgattcattgtgtcatatctaactaaaatggcacctttccta

SEQ ID NO: 827801 - DNA, 120 bp, Artificial Sequence
  ENSG00000225321_29 (sequence is synthesized)
ttcgcaacactaacatcatacttgacaactggtaggcactcatctgatgtgcctttcagcccctcctggctgagttaatggggacatctgttacctcaggaccttggagagaatggcact

SEQ ID NO: 827802 - DNA, 120 bp, Artificial Sequence
  ENSG00000225321_30 (sequence is synthesized)
acagagaagatcacagggaagagaagaggacctcataaatcacgcctgtgtttgtgtttctcatttggcatggttctggactactgcaggcagaatggagtgcattttctgttggggatg

SEQ ID NO: 827803 - DNA, 120 bp, Artificial Sequence
  ENSG00000225321_31 (sequence is synthesized)
tcagatatgagatgaatactaggaacagaggagagaaagaaacatcctatcttcttgcagacaaatcagagcagatggggatctaggcagctgctaccttttctttgtttttcaaattac

SEQ ID NO: 827804 - DNA, 120 bp, Artificial Sequence
  ENSG00000225321_32 (sequence is synthesized)
ttaatcaaatttattttaaatctctttaaattcattccatttaaagcttccaaagcaggttgaaaaagggaaatttgtgcaggaaagggccttgagttgagttagaaatgggaaattgtg

SEQ ID NO: 827805 - DNA, 120 bp, Artificial Sequence
  ENSG00000225321_33 (sequence is synthesized)
agcaaacctttggaaaaatccatgctctgcaaacaggtctcctatacacagctctgacactggccatcttccatctggcaaataacatgttctgaaagtttctgggcaccacttccatgg

SEQ ID NO: 827806 - DNA, 120 bp, Artificial Sequence
  ENSG00000225321_34 (sequence is synthesized)
atggctctaagggaggggaagcagcagcagtaacagaggacaccagcaaatgggaagagggaatatgaggtgcccttgaccttggagctcacaaagcatgttgagaatgtaagaagcaga

SEQ ID NO: 827807 - DNA, 120 bp, Artificial Sequence
  ENSG00000225321_35 (sequence is synthesized)
gaaggaatcagaagatgtgaatcacgtgggaaagggagatgtggaaatgaggctagaagtggagtaggcttctgaaaaatgtcagctgtggtgttggtgaaatgtgggccctaggagcag

SEQ ID NO: 827808 - DNA, 120 bp, Artificial Sequence
  ENSG00000225321_36 (sequence is synthesized)
cagagcttccagctgaaatgtatcctgggctaccagctgtcaatcataggtccacattactacagtggccccagtgaagtgaaagaagagggaaaggcaccatgtgccacgattggccac

SEQ ID NO: 827809 - DNA, 120 bp, Artificial Sequence
  ENSG00000225321_37 (sequence is synthesized)
gattacttgtctctattgagacaagaacaaccacaacacaggactgggtgagaattcaccaagatgatccaagcaaaacacaaaagtcaatacctaactcacaagctcctccagcaattt

SEQ ID NO: 827810 - DNA, 120 bp, Artificial Sequence
  ENSG00000225321_38 (sequence is synthesized)
ccaagcacagtgtcagtgtccgagcactcattcatttattcactcaacaaacagttactcatggcccattgtgtgccaggcaccatttgaattagcagggcagtgtattggactgaatgt

SEQ ID NO: 827811 - DNA, 120 bp, Artificial Sequence
  ENSG00000225321_39 (sequence is synthesized)
ttgtgtccttccaaatttcatatgttgaaatcctaactctcaatgtgctagtattcaaaggtgaggcctttgggaggtgattatgtcatgtgatggttaatacaaagtgtcaatttgatt

SEQ ID NO: 827812 - DNA, 120 bp, Artificial Sequence
  ENSG00000225321_40 (sequence is synthesized)
ggattgaaggatgcaaatattgtttctgggtgtgtctgtaaaggtgttgctagaggagattaacatttgagtcagcagactgggagacacacacctaccctcaatctgggtgggcgccgt

SEQ ID NO: 827813 - DNA, 120 bp, Artificial Sequence
  ENSG00000276631_0 (sequence is synthesized)
tgcccgaggacccccatgtcctctatgtgtgggattctgcagtttgcactcacaacccagagccttttacccaactaccctgtttgtaggaatgtgtccaaaataagcatcagacaagta

SEQ ID NO: 827814 - DNA, 120 bp, Artificial Sequence
  ENSG00000276631_1 (sequence is synthesized)
catgaagatgaatgtgcaaagacgttcataacaggattgtttataatcatgaaaaatgatctgcagatttcctgtctgctgtgcaggatgagttagacggggatgcatccataaaatcac

SEQ ID NO: 827815 - DNA, 120 bp, Artificial Sequence
  ENSG00000276631_2 (sequence is synthesized)
ttaaatggatgcatgtatgcatgtcagtaactgtctgtgtttgcaaacaaaacgtctagcaagacgtgcatcaaatattaacaatcattatctttggattctggatttattgacttctat

SEQ ID NO: 827816 - DNA, 120 bp, Artificial Sequence
  ENSG00000276631_3 (sequence is synthesized)
ttttgactttgccctttgtttttctatgttatctgacacttttacactgagtttatattatttttacaattaaaatatcaatccatcaatctacctccatttgggaagtagtaaaaagta

SEQ ID NO: 827817 - DNA, 120 bp, Artificial Sequence
  ENSG00000225325_0 (sequence is synthesized)
gaccactgaaaagttgtttaatctctctgtgcctgggtttctgcatttgtaaaacagaggtgataataataaattttaggcagagtttcaagaaagtagttgatacctctgtctctgaag

SEQ ID NO: 827818 - DNA, 120 bp, Artificial Sequence
  ENSG00000225325_1 (sequence is synthesized)
acagttgctgagcaaaaagaagggaaaaaacaagacttggggtggagggatcagagagatgggatcttgctctgtcacctacactggagtgcagcagtacaatcatagcttactgtagcc

SEQ ID NO: 827819 - DNA, 120 bp, Artificial Sequence
  ENSG00000225325_2 (sequence is synthesized)
actcttgggctcaagtgatcctcctgcctgagcacccccagtctctgcgattacaggcatcaactttcatcctttcaaatttctccgaatttttcagcaacataggctcagggaggagcc

SEQ ID NO: 827820 - DNA, 120 bp, Artificial Sequence
  ENSG00000225325_3 (sequence is synthesized)
tgtaccccttcctgaagagaagaacccaggccgtgacccctctcaccaaaggaaatgatgctttctaatggaaagaatagcattcttagcatcaacctctgtccactgagaagtttctta

SEQ ID NO: 827821 - DNA, 120 bp, Artificial Sequence
  ENSG00000225325_4 (sequence is synthesized)
taccaacatgaaaattggtaccaggccaagccacccatcccaaagacagtcagtgatggcatctgaagcagaccccactctgctggaactctgagaactaatgattgacacgcgctgaag

SEQ ID NO: 827822 - DNA, 120 bp, Artificial Sequence
  ENSG00000225325_5 (sequence is synthesized)
tgctgcttaccaggaaagactgattgactccattaagtcagccccaaaccctttaatatgccacccaaaacttgtctgattgagaacatgacaaaagaacactgaagagataaataagaa

SEQ ID NO: 827823 - DNA, 120 bp, Artificial Sequence
  ENSG00000225328_0 (sequence is synthesized)
atagaaggagggatattcattaggttgtgattgcaagtcttcagggaagacacgccagtgactcagaggaggagagataaaatgttctacaggaatcaaagcttgtcattcactcaggcc

SEQ ID NO: 827824 - DNA, 120 bp, Artificial Sequence
  ENSG00000225328_1 (sequence is synthesized)
ctcacttggtggcagtatgttagagaagactgcttgttccagagcctggttctcagctttgcaatctacagatggttcattctagccacgtgtgcaaggatgtgatatactagagtgcac

SEQ ID NO: 827825 - DNA, 120 bp, Artificial Sequence
  ENSG00000225328_2 (sequence is synthesized)
attgattacttgaacttccttgaaatatcattttcaagacaagactactaaggactaatcttcatcatcatcatcatcattaacataatcacagctgacatttactgaacattagcaatg

SEQ ID NO: 827826 - DNA, 120 bp, Artificial Sequence
  ENSG00000225328_3 (sequence is synthesized)
tggtaagcactgcagtaggagttttcacgtgtctactcatgtaatcctcaatgcaaccttaaagaagactacaatgccagcatctgggataactactagaatgttctctgccatccacta

SEQ ID NO: 827827 - DNA, 120 bp, Artificial Sequence
  ENSG00000225328_4 (sequence is synthesized)
tctggaaaagcccaacattcggctgtgggagaaagaagagaattatccaaaatagagtgagcaggaaaggctccaaggatgtgaagaaaacgaggccagagtgctctggaggccaacagg

SEQ ID NO: 827828 - DNA, 120 bp, Artificial Sequence
  ENSG00000225328_5 (sequence is synthesized)
aaggtagtctccagaattgtgcaagtgacgtactttcaggtttgctgccattcacaacagacaacctaccagctttcatggtctaaagagggcttaaatttaatttgcaaatatcttcag

SEQ ID NO: 827829 - DNA, 120 bp, Artificial Sequence
  ENSG00000225328_6 (sequence is synthesized)
agaagaaatacagtctctacagtctatactgagttataagtgactgataccagctcttcattagaaggttgttctttcttctatttgccatgaactacaggggtcaaaagaagggttagc

SEQ ID NO: 827830 - DNA, 120 bp, Artificial Sequence
  ENSG00000225328_7 (sequence is synthesized)
actatcctagctccctgttaattcttgcaaatcagcactcttttataaccctttgtaacatcccatttcaatgcataatagaaggtatgcagtcttccacctcctcattggtgggtgcca

SEQ ID NO: 827831 - DNA, 120 bp, Artificial Sequence
  ENSG00000225328_8 (sequence is synthesized)
tttacacactcctggccaatcccctcattcatgaatgatattcataccttccttaaagtcatcatgcttaatgtcttctatagcattgaataaactctgtactatttccttcacagtgac

SEQ ID NO: 827832 - DNA, 120 bp, Artificial Sequence
  ENSG00000225328_9 (sequence is synthesized)
gattagggcagaataaggggaaccaggaagtgctggattgtaagtagaatgatcagggaagacatgactgaaatgatgctttctgggtaaagattgaaggatatgaggagagggtcatgt

SEQ ID NO: 827833 - DNA, 120 bp, Artificial Sequence
  ENSG00000225328_10 (sequence is synthesized)
agctgtttgatcgaagagcattcttggcagaggaaatgccaggccaaagtctctatggcaggactacactaggagagataaaatgttctacaggaatcaaagcttgtcattcactcaggc

SEQ ID NO: 827834 - DNA, 120 bp, Artificial Sequence
  ENSG00000225329_0 (sequence is synthesized)
gctgaggtttgaggccccgttttgctgctcactagctacatgatcttgggcaagttatttaagctctctgagcttcagtttcttcctctgcagaatggggatgaaagtggactactacct

SEQ ID NO: 827835 - DNA, 120 bp, Artificial Sequence
  ENSG00000225329_1 (sequence is synthesized)
catggcatgttttgaggatgaaatgagctaataaacacagtcttcagccctacattaggatggcctaaggaaaacaagaagactgaatgatattccctgctgacttatataagttattag

SEQ ID NO: 827836 - DNA, 120 bp, Artificial Sequence
  ENSG00000225329_2 (sequence is synthesized)
tcttctagaaggatcacaaggaaccagcatcaaagaaatggaatccagctaattcccccaagaaactgaagttttcgggacatgacttgtgaaaggcaaacataagctgacatcttttca

SEQ ID NO: 827837 - DNA, 120 bp, Artificial Sequence
  ENSG00000225329_3 (sequence is synthesized)
agggcatcactcagcctctttgagcctcggattcctcatttgtaaagtgggcataataatacctcacagggtagttatgagggcaaatgagataatggacacgaaggcacctgtacactc

SEQ ID NO: 827838 - DNA, 120 bp, Artificial Sequence
  ENSG00000225329_4 (sequence is synthesized)
actccacggtgctatcagaatattgactattagtgctttcatcacgcggctccatccaaacccctgctttccctcactccaacaggcttttactctgtcacccatgctggagtgcagtgg

SEQ ID NO: 827839 - DNA, 77 bp, Artificial Sequence
  ENSG00000225329_5 (sequence is synthesized)
cctggcggttccccgctccagggaggtcaccctcttgatgctgaatttagcacggacacctgatgggcacagtgcac

SEQ ID NO: 827840 - DNA, 120 bp, Artificial Sequence
  ENSG00000225329_6 (sequence is synthesized)
atgctgaatttagcacggacacctgatgggcacagtgcactgcagcccagagctcctgagctcaagccatcctcctgcctcagcctccaagtagccaggaccacaggcacgcaccctgag

SEQ ID NO: 827841 - DNA, 120 bp, Artificial Sequence
  ENSG00000225329_7 (sequence is synthesized)
ggggcctcaggagaaatcgaacctgtcacaccttgatcttggacttccagccttcagaactgtgagaaagtaaatttctgtgttcaagctaccaggtctgtgggattttttatggcagcc

SEQ ID NO: 827842 - DNA, 120 bp, Artificial Sequence
  ENSG00000225329_8 (sequence is synthesized)
ctagcagactaagacaggcatcaatggttccaatgttttcattttttttccggtaagcagaccgaagcccagagagatgaagcaatttgcccaaagtcacataccaagttaactgaagag

SEQ ID NO: 827843 - DNA, 120 bp, Artificial Sequence
  ENSG00000225329_9 (sequence is synthesized)
ttggggttagaatccagctcttgtgacttctctcttttcagtttcccttcccactccccccactgaaaagcttttgagtgactcttttagaaatcccggttctgtatatgaagcagaatt

SEQ ID NO: 827844 - DNA, 120 bp, Artificial Sequence
  ENSG00000225329_10 (sequence is synthesized)
tcccaggcttttctctctcccctgccccttttccctgttgcacctctgcagtgtcctgagggttgatggaatctagtttgaaagctattgctctacctcactgcctcctgaatgcaatgt

SEQ ID NO: 827845 - DNA, 120 bp, Artificial Sequence
  ENSG00000225329_11 (sequence is synthesized)
cacaaattttcccaacttgccatttctctcacactgacataaagcattagaaacctgttgtgaagtaggaaagctaactgggtcagtagctgataagataatctggcctaggggatagat

SEQ ID NO: 827846 - DNA, 120 bp, Artificial Sequence
  ENSG00000225329_12 (sequence is synthesized)
gattaggatttcagagaaggaaaggtcacccaattgatttgactctgtcctggggcgatgatatggtgaagatttctacagatgcagcagaaacatccggaaaccaggtgtgtcccagct

SEQ ID NO: 827847 - DNA, 120 bp, Artificial Sequence
  ENSG00000225329_13 (sequence is synthesized)
ctggtctgggaaccatttcataaattggcaaatatccaggatatacacatggctaattctgaggtgtactgaagtttcaataaagctactttggtaatgactaggagaagaaaatcctat

SEQ ID NO: 827848 - DNA, 120 bp, Artificial Sequence
  ENSG00000225329_14 (sequence is synthesized)
ggctggacttcattaatgttgtatggccaaggacagtgtttctctaattatggcctgtgaacctccctggatctcgatcacctgcatatttgggaatatgcaggttccagggtcccacct

SEQ ID NO: 827849 - DNA, 120 bp, Artificial Sequence
  ENSG00000225329_15 (sequence is synthesized)
gaaactacagaatcagtattgagatcccaggtgattctcatgtacactcaagtgtaagattattagcacctggactttggaagcagccagataaaagtttggatcctgggttggctactt

SEQ ID NO: 827850 - DNA, 120 bp, Artificial Sequence
  ENSG00000225329_16 (sequence is synthesized)
cctagatgtggccaagtcattttacttgccatgcttttgcttttcttgtctgtaaagtggacatgatacctattttacagggtggttttgaggaataaggtcagcattaaacatttatcc

SEQ ID NO: 827851 - DNA, 120 bp, Artificial Sequence
  ENSG00000225329_17 (sequence is synthesized)
tctttagggagacagagagaggagatgaaatagagtagaattgagaaaagcagtttcttagacctccctgtgaagtttttcttatttcaacaaataataaaataaaaaattcatacactt

SEQ ID NO: 827852 - DNA, 120 bp, Artificial Sequence
  ENSG00000276638_0 (sequence is synthesized)
ttaaaagaaccctgactaatacagggcccctctggcatcttctgcccacctgtgccaatgactctggcttcctgaatgcctggcctctgaactcccttggcttgggccaacagtaacccc

SEQ ID NO: 827853 - DNA, 120 bp, Artificial Sequence
  ENSG00000276638_1 (sequence is synthesized)
ctgccctgtcctgccagggtaagggtcacgtggcccactctgatgcccaggcctggcccttagtgggaggaggggggcacgcacctgttaagctctcaaagcttctgcttttctgtgaaa

SEQ ID NO: 827854 - DNA, 120 bp, Artificial Sequence
  ENSG00000276638_2 (sequence is synthesized)
tctatgagcaagggcaacgtacagaaaacacatatggggcaggaatctgtcaggcaggtggcaaagcattgcagactacaaatgcattatgctgtatttaaactttctccctatgactag

SEQ ID NO: 827855 - DNA, 120 bp, Artificial Sequence
  ENSG00000276638_3 (sequence is synthesized)
attcttcagtttctcattttcagctgttacaaacagtattgcagtgaacaatccctttccaatatcttcatgatgttacacaagtgtttttgtaaaataaaagactagatgtaaaattga

SEQ ID NO: 827856 - DNA, 120 bp, Artificial Sequence
  ENSG00000175147_0 (sequence is synthesized)
gggcccgaggcgagggatcgcagctgagcgaggcgggcacccactccccagcgtatgccgctggagcgcgctgagcgtgtgccgggggctgggcctaagttctccccaacccttgccagc

SEQ ID NO: 827857 - DNA, 120 bp, Artificial Sequence
  ENSG00000175147_1 (sequence is synthesized)
cgagttggataagagggggtcgggagaaaatagagccctgatcccccctcctccctagggcccagagaatcggtgtgcatgcgtgtgtgcgcgcacgcgcgtgtgtgtgacgggtggtgg

SEQ ID NO: 827858 - DNA, 120 bp, Artificial Sequence
  ENSG00000175147_2 (sequence is synthesized)
tcggggaatgtctcaagctagaagtcccaggttttaggggtttaagtggagctgggagacccgctttcctcccacaccaggcgcagacgccgaggcacagctccgccagccgccccgcct

SEQ ID NO: 827859 - DNA, 120 bp, Artificial Sequence
  ENSG00000175147_3 (sequence is synthesized)
ttacctggcgggatactcacctctcctccttcctggggaggccaccgcctccctctcccccttctgccctgggctggttcccagcgaggtgagtgaccggcacaagtagggaaggaggaa

SEQ ID NO: 827860 - DNA, 120 bp, Artificial Sequence
  ENSG00000175147_4 (sequence is synthesized)
gcgagtttttaaaaactgagtcagctcacgccctcggccagggtccccacccgatgcgtggtccccagggcgccctcgggatcgcacgcccgagtcccggcccaggtggggcccattccg

SEQ ID NO: 827861 - DNA, 120 bp, Artificial Sequence
  ENSG00000175147_5 (sequence is synthesized)
ggttcttgcgcgcgggcaatggatgggggcgcgctgcaccgggagcctgccctgctgagggctcatccccagctttgccgagaactttcccggcgaggcaccggctggcgttttcccagc

SEQ ID NO: 827862 - DNA, 120 bp, Artificial Sequence
  ENSG00000175147_6 (sequence is synthesized)
ctgcgagtggcaggcgggcagccagtctctgctcggatccacggaggcccggagccgccacggagttctggctccggggagtgcaaacccgaagtcggcgcggaagcctctcacccgcgg

SEQ ID NO: 827863 - DNA, 120 bp, Artificial Sequence
  ENSG00000175147_7 (sequence is synthesized)
ctctgcctccgccccttggagatctgccctcggaactgcgttgctctggcgcccgaactagggtgggctggtttcagccagaccgccaaaaaacgtggatgctaaacacagagggaagag

SEQ ID NO: 827864 - DNA, 120 bp, Artificial Sequence
  ENSG00000175147_8 (sequence is synthesized)
ccagctcccattccctctctgagccttagatttttttgaattccgagagaggtcaggccggggtccccttcttgggtgagcgtccagccctttgaagttcaaacactgagaagccgatag

SEQ ID NO: 827865 - DNA, 120 bp, Artificial Sequence
  ENSG00000175147_9 (sequence is synthesized)
gcagctggctggcgtcacaggatcgagccgaggactgaaggcgcctcctaccgggaatccaccgcctccagacgaaaataggctgcaatcaagttcacttccaaaggcggaattcatggg

SEQ ID NO: 827866 - DNA, 120 bp, Artificial Sequence
  ENSG00000175147_10 (sequence is synthesized)
tacatatggtgtccacgtgtgtacacctgcagagttgtaacatgcgggcatttctcccctcagcccgccattctggcttcttaacttgcaccctaacagctcgacagaaccttggcgtcc

SEQ ID NO: 827867 - DNA, 120 bp, Artificial Sequence
  ENSG00000175147_11 (sequence is synthesized)
acaaaaaggacttgaggtgggacatggaagaacagggacccctcctggtttgtccacccagcccacacctccattcctcacccaacctaccacttcagagccgggaaaagacctcagaga

SEQ ID NO: 827868 - DNA, 120 bp, Artificial Sequence
  ENSG00000175147_12 (sequence is synthesized)
acatccgctccgactctaccgaggctcagacaggacaacaagagtgtgctggacactgggaaatgtggtccaggagcagtcacagtccctatagacctcccacaaattaccgtaatgcaa

SEQ ID NO: 827869 - DNA, 120 bp, Artificial Sequence
  ENSG00000175147_13 (sequence is synthesized)
gaatgtggaatgtctcagaggagacccagattatagcctctggaattcagcggagatctctcgtggtccagagagatgttgcagagatggggtgggactgcgtaagactcctcaagggcg

SEQ ID NO: 827870 - DNA, 120 bp, Artificial Sequence
  ENSG00000175147_14 (sequence is synthesized)
attagtcaaacactgagatgaactgatccatctgcgctctgctgaggagcccttctgggatgtaagtcctcatccgagaggcagctggaggggatggggcccggcagaatagggttaatg

SEQ ID NO: 827871 - DNA, 120 bp, Artificial Sequence
  ENSG00000175147_15 (sequence is synthesized)
cagccaaagttcaaattctggctctattagcagtgaacacttgggagagctccttcactcaccgactctcatcaggaaaatagtgatagcatgaacccctccagatggttttaggattaa

SEQ ID NO: 827872 - DNA, 120 bp, Artificial Sequence
  ENSG00000175147_16 (sequence is synthesized)
aagagatacttgtgcaaagcctcagcatacggtaagtggttggaacaaacatatgcatagaatcttagctgccaattattaggaggactcagccctctcctcctggggggtgcactgtga

SEQ ID NO: 827873 - DNA, 120 bp, Artificial Sequence
  ENSG00000175147_17 (sequence is synthesized)
ggcttagaaagactaagggagacccagcccctcacctccatcccacacgaggctctacccttccttgggggccgggtcttcctttcttgactcccctcaatgccagggctgcctggggtg

SEQ ID NO: 827874 - DNA, 120 bp, Artificial Sequence
  ENSG00000175147_18 (sequence is synthesized)
ccggagatcaaccacagaaagaagccctgcttggttcaagtgaattgaggggagctgggcatttcccaccggtttgatgaagctcctctccagcttcattccctgccactgggaatcagc

SEQ ID NO: 827875 - DNA, 120 bp, Artificial Sequence
  ENSG00000175147_19 (sequence is synthesized)
ggcacaacttgcaaccaacatggctgaaaacaggcatcttgggcagattctacctgacaccttagttggcagccaatcagttgtgccctggctaccctagtgccacctcatgggtccctt

SEQ ID NO: 827876 - DNA, 120 bp, Artificial Sequence
  ENSG00000175147_20 (sequence is synthesized)
gcattgggctgtagcctgataaatctgatttagccatgagccagagcaaagggaaagagcgaaccatttgcagaaggcggggcctcatgtccaggtgtagcacttaggaagcactaattg

SEQ ID NO: 827877 - DNA, 120 bp, Artificial Sequence
  ENSG00000175147_21 (sequence is synthesized)
catctgggatgacacagatgtacgggagccaggtcgagggtcctgggagggggcagaggcccagcagaggatctgcctggtgccccttctttaccctcaggagatggtaccctcaccccc

SEQ ID NO: 827878 - DNA, 120 bp, Artificial Sequence
  ENSG00000175147_22 (sequence is synthesized)
agcactccagcctcagggggtcctttgtagccgtggggctctgcccctcctgccacaggacctttgcacactgttcatcctgtctagaatcctctccacctgctgaactcccctccaccc

SEQ ID NO: 827879 - DNA, 120 bp, Artificial Sequence
  ENSG00000175147_23 (sequence is synthesized)
aggcctcaccttctcttttctacattaaatcccccatgtgaaaagatatgaaaagccctctgactaccagctacctctgctgtcaagacttactacagttggctgggtgtggtggctcac

SEQ ID NO: 827880 - DNA, 90 bp, Artificial Sequence
  ENSG00000175147_24 (sequence is synthesized)
gattgcaacatagtgaaagctctacaaaaaaaaaattaatcaggtgtggtgacatgaccgtagtcccagccactcgggaggctgaggtgg

SEQ ID NO: 827881 - DNA, 90 bp, Artificial Sequence
  ENSG00000175147_25 (sequence is synthesized)
tagtgaaagctctacaaaaaaaaaattaatcaggtgtggtgacatgaccgtagtcccagccgagcccagcagattgaggctgcagtgagc

SEQ ID NO: 827882 - DNA, 120 bp, Artificial Sequence
  ENSG00000175147_26 (sequence is synthesized)
gcctgggtgacagacagtcagccccaccaggtctttcagctccaaccttggttagaaggggaggaaggctggcacacccagctgctgccaggcaccgccgctaatgtgctgtattagtgg

SEQ ID NO: 827883 - DNA, 120 bp, Artificial Sequence
  ENSG00000175147_27 (sequence is synthesized)
gtggccgggcctgaatcacttgcccaatttggacgtgggcaagtttccaaaatgtcctggttgtttcctattgtctatttttaaaaaatgatggcctgtaatcccagcactttgggaggc

SEQ ID NO: 827884 - DNA, 62 bp, Artificial Sequence
  ENSG00000175147_28 (sequence is synthesized)
tcgcgtgtttgtagtcacagctacttggaaggctgagactggagaattgcttgaacctggga

SEQ ID NO: 827885 - DNA, 120 bp, Artificial Sequence
  ENSG00000175147_29 (sequence is synthesized)
aataaataaaaataaataaaatttaaaaatttaaaaaaggtggtgatgatgcaggtgtggtgcaagattagctattataagtactcaccgaaccagacctttctaagtccctaaattatt

SEQ ID NO: 827886 - DNA, 120 bp, Artificial Sequence
  ENSG00000175147_30 (sequence is synthesized)
accttgttttaagtcaggagctcacggggctgatggggctgtctttaccctttaagcctataatttacagagcaatattcttccaggcagagggggtggatccagcttccaaccgtgcag

SEQ ID NO: 827887 - DNA, 120 bp, Artificial Sequence
  ENSG00000175147_31 (sequence is synthesized)
ggtgtgaccagccagctttagggccaaggctgtaatggcccagtgggttcgagcccagactccacagagagccagtctgctgaggctgaggtcctagctgccactcactaaggtgggaca

SEQ ID NO: 827888 - DNA, 120 bp, Artificial Sequence
  ENSG00000175147_32 (sequence is synthesized)
ctgggaaatctatggaacactccgtgcctcagtttcccatctgaccaatggggaaaacaatgcttacccgagattgttgtggagactaaatgagcaaaaacacatacagctgtgattctc

SEQ ID NO: 827889 - DNA, 120 bp, Artificial Sequence
  ENSG00000175147_33 (sequence is synthesized)
aatcagggatgattttgttcccccagggacatttggcaatgtctggagaaattttgagttgttctgactaggtagacagatgttgttactggcatctagtgagtagaggccagggatact

SEQ ID NO: 827890 - DNA, 68 bp, Artificial Sequence
  ENSG00000175147_34 (sequence is synthesized)
tgttgttactggcatctagtgagtagaggccagggatactgctaaacatcctataagaatgatctggg

SEQ ID NO: 827891 - DNA, 120 bp, Artificial Sequence
  ENSG00000175147_35 (sequence is synthesized)
caacaaagagagatcctgtctctacaaaaattaaaacaaaacaaaacaaaaactggcccagaatgtcagtagtgctcactgagaaatgctggcgtaaaagacagtgtgatggtccaatca

SEQ ID NO: 827892 - DNA, 120 bp, Artificial Sequence
  ENSG00000175147_36 (sequence is synthesized)
gtattggtgcttatcagtcctcagctcaaggttggatgtccctgaattctcagttctctttctggcacttatgtgagctgctgggtgcttggtcttaagttttttctcctgtctgaatat

SEQ ID NO: 827893 - DNA, 120 bp, Artificial Sequence
  ENSG00000175147_37 (sequence is synthesized)
cagggggctcctctcccctggagtctgcctgcccagccccacctgcaggggagaggaagcctgtgttgggaaagaggaggcccctgccgggccactttagaggatccactggcttcgcac

SEQ ID NO: 827894 - DNA, 120 bp, Artificial Sequence
  ENSG00000175147_38 (sequence is synthesized)
gtcctaagagccgcagggtgctcttgggctgctgttctctcacctcttaagagcggaaaatccgtgcatgcattgtgtcctcaggccataagcctgggtgggctgcctccacccttggtg

SEQ ID NO: 827895 - DNA, 120 bp, Artificial Sequence
  ENSG00000175147_39 (sequence is synthesized)
agtttgcaatcctatccaagccaatgggattccaccctgagactttgctagaaccgcctggcaagagggtctctcttgtgcaggggttgctggctgagacagtgtttgtcttgtgaccat

SEQ ID NO: 827896 - DNA, 120 bp, Artificial Sequence
  ENSG00000175147_40 (sequence is synthesized)
tttgccaacaaatggggacaatctgtctgagaattaactggtataaacgatagcaaacccaagaggtgaagaaggctgagtgtcttgaaagcaacatcggacaccctggcgccagctgtg

SEQ ID NO: 827897 - DNA, 120 bp, Artificial Sequence
  ENSG00000175147_41 (sequence is synthesized)
tccaaagccagctgttgaccttgagtgttctttacgtatgccgcttcattcccatttactgtatttgcaaaccattctttgagtggggtttcagtcactggtcactggctgtattaggcc

SEQ ID NO: 827898 - DNA, 87 bp, Artificial Sequence
  ENSG00000175147_42 (sequence is synthesized)
ggggtttcagtcactggtcactggctgccctgacactgggtaacttataagaaaagaagtctaattggctcatggttctgcaggcta

SEQ ID NO: 827899 - DNA, 120 bp, Artificial Sequence
  ENSG00000175147_43 (sequence is synthesized)
gtttggtaggtggggctccatcagggctgtttggatacctgggtggagcccacagaccagcccccaccttgtgtggttagggctttgctaggaaggcccatctgtgcgccatgaccttgg

SEQ ID NO: 827900 - DNA, 120 bp, Artificial Sequence
  ENSG00000175147_44 (sequence is synthesized)
aactcgatgtgagatccctggaccggcagcagcacctggaagcttgttggaaatgctgatctcaggtgggactccagaattcccgcatctgcacctgcactcccaaaatacctccccacc

SEQ ID NO: 827901 - DNA, 120 bp, Artificial Sequence
  ENSG00000175147_45 (sequence is synthesized)
aggtgatccgaggccatggggcggtctgaagggcactgtgctggggcgtcccaccactagaaatccagtccggtaatctgaagatgtaagtgcccccaggaggagtgacggagtgacaca

SEQ ID NO: 827902 - DNA, 120 bp, Artificial Sequence
  ENSG00000175147_46 (sequence is synthesized)
aatgacacaaggggaggggacttgtcaggtgtccactcctgactgcaagttcccagggcagaaggcaatgcccccacagggacttttccagacactccgagtgcacctgaattgcatttt

SEQ ID NO: 827903 - DNA, 120 bp, Artificial Sequence
  ENSG00000175147_47 (sequence is synthesized)
gagtgatgctgcctgctaagcaggaagagccctccggagcctcgaaaagcagagtggaagtggtggtgcccaggacgcatgggctctgatgggaagagggaggtgggcctgagcatgggc

SEQ ID NO: 827904 - DNA, 120 bp, Artificial Sequence
  ENSG00000175147_48 (sequence is synthesized)
cttcttctccccaggtcagaggggcctggatgcccctggagggaacactgaggtcacctctggccaaatcttcctgttctgccagtacccagccctgttcagtgacgtcaagcttttggg

SEQ ID NO: 827905 - DNA, 120 bp, Artificial Sequence
  ENSG00000175147_49 (sequence is synthesized)
tccctgtcctggggccctccacgctggccgggctgtgtagagacgcccttctctccactttattgggtccagattgttgtgtggcttctcccctcctctgcagcctggggtctgaaaaca

SEQ ID NO: 827906 - DNA, 120 bp, Artificial Sequence
  ENSG00000175147_50 (sequence is synthesized)
gcgatgccaacagacagacagatttccaaaagaaaggtccggctcagccaaggacaaaggggcctcgcagaggctcctgggggtcagaaagctgagagtctaccaggcaggtgccttctc

SEQ ID NO: 827907 - DNA, 120 bp, Artificial Sequence
  ENSG00000175147_51 (sequence is synthesized)
cacccacaggcacaagctacaacagctttccaagaagtgcatccacatcgtccccaggtccagatgcccacattgccctgcagggaccaagaccacactcgggctgcttggacaggatgt

SEQ ID NO: 827908 - DNA, 120 bp, Artificial Sequence
  ENSG00000175147_52 (sequence is synthesized)
agctggtcactgttctggagctggcccctctgtagcctgtgacaatcagcttgagtctctctgccaagtctccgccttctgttcttcttgccgaccttgaagcagagttgacgtttcagg

SEQ ID NO: 827909 - DNA, 120 bp, Artificial Sequence
  ENSG00000175147_53 (sequence is synthesized)
tttttccagcagacaaagctcactcaatctgatactgtggaggttgttaatttaacaaccaacccatcctcatgttgagaaaccagctccaaatgctcacctggctgtcagggatgggga

SEQ ID NO: 827910 - DNA, 120 bp, Artificial Sequence
  ENSG00000175147_54 (sequence is synthesized)
gcctcatgggtgaaagagggttgtgatggcataatttaaaccaaaagaggcattcgcggttgcccgtgttgcctcaggcctgctggcctcctgctgtgaacattttgggcaatactgtct

SEQ ID NO: 827911 - DNA, 120 bp, Artificial Sequence
  ENSG00000175147_55 (sequence is synthesized)
ctgccagtgacccccaattgtccacttgtctccagcaagatcgaaccatgtaagtgccatttctgacaagttgggtgaacgttggtttcaaatcatcagctctgcattcaagtgccctgc

SEQ ID NO: 827912 - DNA, 120 bp, Artificial Sequence
  ENSG00000175147_56 (sequence is synthesized)
tacaattctggctcactctgtgggaataactgcctgcctgggcacgttgctgttgctgcctcccaaacggcagtttctggggtcccaggtcatccaggctggatgtggcttgggagagac

SEQ ID NO: 827913 - DNA, 120 bp, Artificial Sequence
  ENSG00000175147_57 (sequence is synthesized)
ctgtggcaccaggttggagggaggtctcacctctcctttctgagctgtggactgcagcttcaggaccctatggatgaggccgaatgtcatgaagataatggaatttggagtctcaacaaa

SEQ ID NO: 827914 - DNA, 120 bp, Artificial Sequence
  ENSG00000175147_58 (sequence is synthesized)
gccaagccacatgccagagattcaccacctggggcccaggatcagaagtgtgcccttaggaggccaaacatccacctgtctaccaactagacatttggtctcagacagcaagaaaggctg

SEQ ID NO: 827915 - DNA, 120 bp, Artificial Sequence
  ENSG00000175147_59 (sequence is synthesized)
cgtttatgtcattagggggaacaccacggtcttcggcatgagagaggtgtaattctcaagttcatcagagctcggcttcccccatgagaggaaacaatttgccaggttgaagaacacacg

SEQ ID NO: 827916 - DNA, 120 bp, Artificial Sequence
  ENSG00000175147_60 (sequence is synthesized)
ctttgagggttctcagaggctgacacctgttgtgaatcttggaaactcaagccccagtgcaaacggccttgaaggaggtcgagcatcatggttccaacaagtgactcgctttgataaccc

SEQ ID NO: 827917 - DNA, 120 bp, Artificial Sequence
  ENSG00000175147_61 (sequence is synthesized)
gatgtgtaagcagaatcgcaatgcatccgtccttccctaatcatcacgtggctgtcatctggtcaatgaactgaggcccgaaggcttgagtcaaactggttttcaaggctgtgctcatgg

SEQ ID NO: 827918 - DNA, 120 bp, Artificial Sequence
  ENSG00000175147_62 (sequence is synthesized)
gatttatatgtttcttgagccctgttggaggctcttggcaggtctgaacattaaacatttcttttcttccttttgcacactgcttcaacctaaagagttggagcgaactagctctatatc

SEQ ID NO: 827919 - DNA, 120 bp, Artificial Sequence
  ENSG00000175147_63 (sequence is synthesized)
atttctgtgttgtaaatgggaaattagctaccccataacttcccattgtctcctgagaggttacaaattgtgttacagatattagcaagtgttaatcctcacgatgtccctgggagggaa

SEQ ID NO: 827920 - DNA, 120 bp, Artificial Sequence
  ENSG00000175147_64 (sequence is synthesized)
ccagaagtatcgtagatgaagacatcgaggcacagagaggtgaggccactgggaagaagccacacagcataacagtggcaggtcaagaaaagggctggggttctccccaccaataccaaa

SEQ ID NO: 827921 - DNA, 120 bp, Artificial Sequence
  ENSG00000175147_65 (sequence is synthesized)
tgattttgctctgtggagtttgtgtctcggttaggacattggtgagctatgtcacctatgtttcaggtgacagggacatcacaacaaaggtttgttgggttaacaatgtcaagcatttcc

SEQ ID NO: 827922 - DNA, 120 bp, Artificial Sequence
  ENSG00000175147_66 (sequence is synthesized)
ctgccccagaccccaaactcattgccacactccataccactgtcacggagtgcagatagtggggtttggaatctcagtaaagccaaaccacaggccagagattcaccatatggggccgtc

SEQ ID NO: 827923 - DNA, 120 bp, Artificial Sequence
  ENSG00000175147_67 (sequence is synthesized)
agccccactcctgcacggatcattcaccggctccccactcagcgtagccactcctgggtggatcggcaaacagctcttcaatacgtccacccccatgtgtcacagagcttttcaggtgga

SEQ ID NO: 827924 - DNA, 120 bp, Artificial Sequence
  ENSG00000175147_68 (sequence is synthesized)
aggattttgcattctcccaagagagattcagtgagccaagtcaggacccaagttctcagtcaagggtaagatgctgtagccgagagttccccaacccccgccctgtccgacgtctcggca

SEQ ID NO: 827925 - DNA, 120 bp, Artificial Sequence
  ENSG00000175147_69 (sequence is synthesized)
agaggcagcacttcctgcacccggctctgccaatgcactgggcgctggggtgtggggttggggtcccccctgctcccgccggaagggtgttttagggaactgtgggcctcctcccacctt

SEQ ID NO: 827926 - DNA, 120 bp, Artificial Sequence
  ENSG00000175147_70 (sequence is synthesized)
ggcagctccgtttaaggctccagggactgcttggctgctccacagtgacggtcactctgaggtggagcctgtgtatcctggatggaggcagggccggacactgtgacaggtcctctgggc

SEQ ID NO: 827927 - DNA, 120 bp, Artificial Sequence
  ENSG00000175147_71 (sequence is synthesized)
ccatctccagctgaacaggaaagtccatggcccacccaagacaggtgggctggtgtcttctctctcctgggcgctgtggagctgaaaccgcagagtccatcgggattttgcccaggagca

SEQ ID NO: 827928 - DNA, 120 bp, Artificial Sequence
  ENSG00000175147_72 (sequence is synthesized)
agggacatcctcagcctgcggccgctatgtacagtgagaacgacacctggggccatctggcttctcttccttcctgggtctctcacgttgggtctggtggagccaccagttccttacacg

SEQ ID NO: 827929 - DNA, 120 bp, Artificial Sequence
  ENSG00000175147_73 (sequence is synthesized)
ttggtgacctccaggctgttgtagccttccagacggcactgttccagcctgctctgggggtcatcgtctccgcaatcttcgttttgaagagagccatagtcatcatggaaatcgggatct

SEQ ID NO: 827930 - DNA, 120 bp, Artificial Sequence
  ENSG00000175147_74 (sequence is synthesized)
ttgctgctgaagccccttcctatcttccccaggggcagctgagaagagaagaatatgatcaaaggacaggaagaagagaaacaagaattaagaatgaaggtctgggaaatgtctccaatt

SEQ ID NO: 827931 - DNA, 120 bp, Artificial Sequence
  ENSG00000175147_75 (sequence is synthesized)
ctaattgctctgtgattgagtaacttacttaacctctgtgtgctcctcctattagtaataatactccctgctcagggaggttgaggggagtttgtgaatgaccattaggggagagctttg

SEQ ID NO: 827932 - DNA, 120 bp, Artificial Sequence
  ENSG00000175147_76 (sequence is synthesized)
tgtccccctgcccccggaaggattcagttggttaccaagggtgaggacaaatatcgttagtctgattattcctgattcacaaaagcctccttcttccctccttggtgggtggagagttga

SEQ ID NO: 827933 - DNA, 120 bp, Artificial Sequence
  ENSG00000175147_77 (sequence is synthesized)
ggaagtgtgtcctggagactacctgtgagaatgtctgagcaggcccatgaggtctgactgcactcccaagtcaaggaggaatattctagacggcctggtgtggcagaaagaatgcgagtt

SEQ ID NO: 827934 - DNA, 120 bp, Artificial Sequence
  ENSG00000175147_78 (sequence is synthesized)
ttggagactcacagacccaggttcagatccctgctctgccacttcccagctgtgtgaccttggacaagtcacttcccctctctgagcccatttttctcagctacaaaatgggaatagtag

SEQ ID NO: 827935 - DNA, 120 bp, Artificial Sequence
  ENSG00000175147_79 (sequence is synthesized)
tcagctacaaaatgggaatagtagtttctaactcccaggtttgttgtaaaaagtaaagtcccaccagtctggccaacatggtgaaaccccgcctctcctaaaaatacaaaaattagccgg

SEQ ID NO: 827936 - DNA, 90 bp, Artificial Sequence
  ENSG00000175147_80 (sequence is synthesized)
tacaaaaattagccgggcgtggtggcgagctcctgtagtccctgctactcaggaggccgaggcatgagaatcacttgaacccaggaatca

SEQ ID NO: 827937 - DNA, 120 bp, Artificial Sequence
  ENSG00000175147_81 (sequence is synthesized)
agtcaagtcccatctgcaaagcacatagcaagtgcttgcaccgagtaagtccttgatgtacttgatgaatagtgactattattatcacacatagtaggccttcaaaaatacttctctctt

SEQ ID NO: 827938 - DNA, 120 bp, Artificial Sequence
  ENSG00000175147_82 (sequence is synthesized)
actgcacacatctctgtgttaaagtagtcacattagtgctttgtaactatttatttgactgcctttctttccagaccagtgtttccagatcttctttttttattattattattgctccct

SEQ ID NO: 827939 - DNA, 120 bp, Artificial Sequence
  ENSG00000175147_83 (sequence is synthesized)
aaggagactttttagacagttttttcctaattgcacccctgctgtgaaattgtaatgccacagacatactacgcctctgcttccgtaccatatgtacatttgtgcttttacatagaaaga

SEQ ID NO: 827940 - DNA, 120 bp, Artificial Sequence
  ENSG00000175147_84 (sequence is synthesized)
ataagaatttttgccaccgcccccaccccccaccagcgccaaaacaaattttcactcctttggggggcaatatcagccccaattactagaatgcacgttctagaatggagcttcttaagg

SEQ ID NO: 827941 - DNA, 120 bp, Artificial Sequence
  ENSG00000175147_85 (sequence is synthesized)
gtaaagtggcaatgtattcatgtttatgaatgaatggggatcatgccttcttcaaatggaagacattttggattacccagttctgccgtctctgtctgtgcatttccattgaggaatctg

SEQ ID NO: 827942 - DNA, 120 bp, Artificial Sequence
  ENSG00000175147_86 (sequence is synthesized)
tgtcagttggagtctgtgcaatcagacctgaactgcacatgttttcatactgtttggttggagtcaccagagggttcatctttgctattggtcaggtcactgaagtcgcaaattgaaatc

SEQ ID NO: 827943 - DNA, 120 bp, Artificial Sequence
  ENSG00000175147_87 (sequence is synthesized)
agtgattggggctcagagtttggggctgcgccggaaccctctgggcagcctagctgaatgcaggatccccctcgccccagagaactccttttccaggagaccaaggtgggtcccagaatc

SEQ ID NO: 827944 - DNA, 120 bp, Artificial Sequence
  ENSG00000175147_88 (sequence is synthesized)
tgcaagttcagtaatagccccaggtgattctcatgcaggcaggtgagacctgcactttgagatccaggtgctactcgaagccctgcgggggctttgtgcactgtacccaaagcatcgtga

SEQ ID NO: 827945 - DNA, 120 bp, Artificial Sequence
  ENSG00000175147_89 (sequence is synthesized)
aggttccttgaaggtacatccagggcatctgtcctggatgcccccgtgacccggcctggcactccaccttcacaggccagcacaggagccacagagctcccgggaggagaaaaaaagacc

SEQ ID NO: 827946 - DNA, 120 bp, Artificial Sequence
  ENSG00000175147_90 (sequence is synthesized)
tttcccgggtctgcaggactcacaggtaaatccattgagagacttacccggccagccttgtacttgagaccgctgctgttctcctcctttcctgcccgcgtgacgctggaggccctgcca

SEQ ID NO: 827947 - DNA, 120 bp, Artificial Sequence
  ENSG00000175147_91 (sequence is synthesized)
gccagggggcgttccaaaacgctcagcctcccggatgcctgtggagctgaagagaggaccattttgagtcagcaggggaggctcagtcagctccccagacacacacacacacacacacac

SEQ ID NO: 827948 - DNA, 120 bp, Artificial Sequence
  ENSG00000175147_92 (sequence is synthesized)
acacacacacacacacacattggtgacaatgaccacagctgctgagaccgactgattacctcccacgtgccatccttgtgctcagcactttataagcgtgattctcacaacatgcctggg

SEQ ID NO: 827949 - DNA, 120 bp, Artificial Sequence
  ENSG00000175147_93 (sequence is synthesized)
gcttgggactgccagcccagcattacagggaaaggaggccagagacagcaagcaatttgcccaagacgacacagctgttagcggcagaatcaagatctgaactcaggcttctgacactcc

SEQ ID NO: 827950 - DNA, 120 bp, Artificial Sequence
  ENSG00000175147_94 (sequence is synthesized)
aaagtcttgatcttaactcttcagtgtactgtgaaccttactgcaacagactccagatgagaatctcagcatggtagctaattagttgtgcttggagaagcatgaggagtctcccctgct

SEQ ID NO: 827951 - DNA, 120 bp, Artificial Sequence
  ENSG00000175147_95 (sequence is synthesized)
ctgaatttgcaatctgtgtcccccacctggctttctgcctgaagctgcccccatgactcccttctttgtgcaaaagcatggaagcttctgttaggatttggccaactacagcctgcctgc

SEQ ID NO: 827952 - DNA, 120 bp, Artificial Sequence
  ENSG00000178977_0 (sequence is synthesized)
atgggttgggcattaggaacggcctggccccacaaatcacacaactggggtgtagaacaaaatggttccacagatgacaccaggctggtccagggccgatgcaggccagaaccccgctgg

SEQ ID NO: 827953 - DNA, 120 bp, Artificial Sequence
  ENSG00000178977_1 (sequence is synthesized)
gaggactccccagaacaggcactgagctgaggaaaggcaggacacgtggtctgctaccgaccccaccagatcttgctgggactctgggcagctccggagtaagagcagcatgctctgcaa

SEQ ID NO: 827954 - DNA, 120 bp, Artificial Sequence
  ENSG00000178977_2 (sequence is synthesized)
cgaagagctaggtccaaggaccgcaggcggaggcaggaagtgtcaagatcccaggttacggaatggcaccaagtcggtaaccaaaggaagcaacaacccgggtgttcaaggcagtcgtgc

SEQ ID NO: 827955 - DNA, 120 bp, Artificial Sequence
  ENSG00000178977_3 (sequence is synthesized)
aaggcggcgcgggggcgaggccgaggccactccctcccacttccttgacgctatttcctgggaggagccggagctcgcggcccggagccaagagattcccagcccagtgctccaaaatac

SEQ ID NO: 827956 - DNA, 120 bp, Artificial Sequence
  ENSG00000178977_4 (sequence is synthesized)
tcggcctgggggaggctggtccgtgagcgtgcgcccggaccgttccgccatgcatagtggacccagcactacagcaagcctggcacgacctctaaggcggttcgcggcaacgtccgcacg

SEQ ID NO: 827957 - DNA, 85 bp, Artificial Sequence
  ENSG00000178977_5 (sequence is synthesized)
cctttaccttttactgagacaagagtgtcttcaaggaataggttacctgaccagcgctgcaggaggcttgactgtaagtcatcaa

SEQ ID NO: 827958 - DNA, 120 bp, Artificial Sequence
  ENSG00000178977_6 (sequence is synthesized)
cctgaccagcgctgcaggaggcttgactgtaagtcatcaatgtacagtaagctcttttgtggcaccgcggtagcagaaagcatctcaatccccagacccgcctggcatgtcaggaagaga

SEQ ID NO: 827959 - DNA, 120 bp, Artificial Sequence
  ENSG00000178977_7 (sequence is synthesized)
cgaggcacgcccagacttgggcaggtccctccctttctgcttcctgacttccttcctggtgtctcaactcggccaccacagcctggtttcgctttgattgacacgcgtcaatctatagtt

SEQ ID NO: 827960 - DNA, 120 bp, Artificial Sequence
  ENSG00000178977_8 (sequence is synthesized)
tggttctctgcagtcctgaaggcactctgtctctttcggtcactccatctgacgattggtgcctgaaatacacctacggtttctggtcagcgtttatcagtggttggaagaacagaaccc

SEQ ID NO: 827961 - DNA, 120 bp, Artificial Sequence
  ENSG00000178977_9 (sequence is synthesized)
ctaggaaccctgctgtcagcacgcagagtgtaaagtctcagatcaaggattcggagaaaggtctctacaggtccctcctcgttagtatagtggttggttgggatgagtcgggttggaccc

SEQ ID NO: 827962 - DNA, 120 bp, Artificial Sequence
  ENSG00000178977_10 (sequence is synthesized)
gtgcggatccaggaaaacagcgatcgaggtaaaagtaatggctgccgtcgtctgcccagcgcgcaattgtgagtgaccttcaccgctagcgcgcgccacccaccccacatgaacctgtag

SEQ ID NO: 827963 - DNA, 120 bp, Artificial Sequence
  ENSG00000178977_11 (sequence is synthesized)
ggttatgcccagtctacagacgaggaaaccaagatccagggaagctgagtcaccggcagagctgggattacgtctaagatttgtccagggggcgagaactgcagcgacaccatgatttat

SEQ ID NO: 827964 - DNA, 120 bp, Artificial Sequence
  ENSG00000178977_12 (sequence is synthesized)
catctccagaaaacaaaaaaaaaggcctagacacataaaaatggcttctctgtagagtgagctcaacgagctcaatgtgattccagttaaggaattgggccttaagccaaatgcgcctaa

SEQ ID NO: 827965 - DNA, 120 bp, Artificial Sequence
  ENSG00000178977_13 (sequence is synthesized)
acgcaacttgcctctctattatttatccagaggatgaatttaattcctacgtacatgcgcccacatctcgtcagctggtgcctcagagaaatgcgctgacaaatcttaaaggtggggctt

SEQ ID NO: 827966 - DNA, 120 bp, Artificial Sequence
  ENSG00000178977_14 (sequence is synthesized)
catgacaaaagtccgcccgttattgctgctcaacagacccatcaagtcacgctgttggacaggcctcgtggcgcaacggtagcgcgtctgactccagatcagaaggttgcgtgttcaaat

SEQ ID NO: 827967 - DNA, 120 bp, Artificial Sequence
  ENSG00000178977_15 (sequence is synthesized)
cacgtcggggtcaaacaaaacattgttttccctaatcaaatagacctacggtgacatttttcaggataggaaaaaaaaaaagcctcctcagtagaaggataggaggggaatgagacaaat

SEQ ID NO: 827968 - DNA, 120 bp, Artificial Sequence
  ENSG00000178977_16 (sequence is synthesized)
atgaacgttattcagaagttgggtgcagactttcaacattatgtgatatatccctgtggcaaaactgcgcatgtatccctaaggtctataaaagtaaaaataaatttaaaaataaaaaaa

SEQ ID NO: 827969 - DNA, 120 bp, Artificial Sequence
  ENSG00000241048_0 (sequence is synthesized)
aacagggggccatggtggtgcttgggtcaactgtcattcgtgtccactcagatcctatgtctaatagtccttgaaagatctaggggttctcctttctccggtgtagaattactcagcatc

SEQ ID NO: 827970 - DNA, 120 bp, Artificial Sequence
  ENSG00000241048_1 (sequence is synthesized)
cttcctcaaagggacctgacctccccttcaatcaatgagtcctggatcttagagctgactcacatgcagaaactggggatgctgcttcgctgcctgaaccttactgagacttgaccataa

SEQ ID NO: 827971 - DNA, 120 bp, Artificial Sequence
  ENSG00000241048_2 (sequence is synthesized)
tacagcaaaggggagaggcaggagcagatcttcaggacagcaaacattgtctgggaaggtggagaattctgcagaatttcagaagcactggcttagtgtgttggaaatcgttgaggccct

SEQ ID NO: 827972 - DNA, 120 bp, Artificial Sequence
  ENSG00000241048_3 (sequence is synthesized)
gccagaccgtccgcatgccatccagaccgtccgcatgccatccaaacctccgcatcaatgaaagggaactcagcaagcaggagctaagcagcaagcagccactgctcagtttgaggtccc

SEQ ID NO: 827973 - DNA, 120 bp, Artificial Sequence
  ENSG00000241048_4 (sequence is synthesized)
aggacaggaagaattcctgcagcagacactaattgcttaggtaatagccattcttcctttctaacagaatcccagttaccatgtgggtgacgatgtgctgtgctaaaagcacctgtcttc

SEQ ID NO: 827974 - DNA, 120 bp, Artificial Sequence
  ENSG00000244036_0 (sequence is synthesized)
acactctgtttaacaagctgttaatttctttgatttggaggaggccaaggtagcaattactcaggcaccaaaatctggaaatccccacaccagcaggttccttgcactccgcttcctcgt

SEQ ID NO: 827975 - DNA, 120 bp, Artificial Sequence
  ENSG00000244036_1 (sequence is synthesized)
tggctggagagaatttgtttccaaggattgtagaccacagcaaggcttcctcaggcttgcataccagggtatgcagtgtctacggccactatttcaaagattagagttgacgcagcaagg

SEQ ID NO: 827976 - DNA, 120 bp, Artificial Sequence
  ENSG00000244036_2 (sequence is synthesized)
tggtaagagaggcaagagggaggcacctgcaagcttcaagagcagctggaggaagagtaaattagagtcccagccacccccacatctatcttctacacctgctccttcattttcctttct

SEQ ID NO: 827977 - DNA, 120 bp, Artificial Sequence
  ENSG00000244036_3 (sequence is synthesized)
ctggagggctgagagagatttactggtcaaaaggaagagctcctcacttcgggttcaggaatcttactgaaggaaatgaaatggtcacagaaagaagagtcactcgggtaatttgggatg

SEQ ID NO: 827978 - DNA, 120 bp, Artificial Sequence
  ENSG00000244036_4 (sequence is synthesized)
ttatgaaggaggctctgcgtctctgaactgttgtcaggccccaccaggctcttcactgtttggagccagatctacggagccaaactgccttgacctgctttctgaggaggggacaggcag

SEQ ID NO: 827979 - DNA, 120 bp, Artificial Sequence
  ENSG00000244036_5 (sequence is synthesized)
caagtgccggacctagccagattcagcccgcagaaggtgttccagactccaagcagcctgctggcctagctccaggcccaggtggctgcagactccacaatgggtgactcagatgagatc

SEQ ID NO: 827980 - DNA, 120 bp, Artificial Sequence
  ENSG00000244036_6 (sequence is synthesized)
caagcaagtgtaggagaagactgatcttgtcttctgtcaagcactacaagggagccaagtaaaaaacttcgtttcaaccaccataaaaagaaaaattacacattataacatacctagatg

SEQ ID NO: 827981 - DNA, 120 bp, Artificial Sequence
  ENSG00000244036_7 (sequence is synthesized)
gtacaagccgaaaatcaggaaggaaattacaaacatgaagatacttctcttcacagagaacaaaatacttccagggacagggctatagtatcacacagaagctttctgaattgccctgaa

SEQ ID NO: 827982 - DNA, 120 bp, Artificial Sequence
  ENSG00000244036_8 (sequence is synthesized)
tctgctgactgagaaagatggagtctccctggaactgccaaaactcttgttagtactaaattgttcaatttaccagctgcagattttccctgaaacctgcaaacttcaaacccaaatagt

SEQ ID NO: 827983 - DNA, 120 bp, Artificial Sequence
  ENSG00000244036_9 (sequence is synthesized)
agattttccctgaaacctgcaaacttcaaacccaaatagtgaagacaaattactgcttatgtcttagcctgacactaaatttacttaaacattaaagaggccaggcgtggtggctcacgc

SEQ ID NO: 827984 - DNA, 120 bp, Artificial Sequence
  ENSG00000247324_0 (sequence is synthesized)
gtgaggacttgttgaaagaaataggaaggaatcagatcacataaatgctggccccaaatgtttgcatcataaacccattgcctaattttacagttgagaaaataaagctctctaaataac

SEQ ID NO: 827985 - DNA, 120 bp, Artificial Sequence
  ENSG00000247324_1 (sequence is synthesized)
aaggtcgctgcgcctcggtggtggtcacgcccggccagctgtggccgcatccctgtcggctagctcgggtctggcccacggtgactgttacccctggggaatggggcagctctgatccat

SEQ ID NO: 827986 - DNA, 120 bp, Artificial Sequence
  ENSG00000247324_2 (sequence is synthesized)
ccaacgctgctgcactggagactggtatttggctcccacttgcctctgtggcttcttatcactcccattcattccctgactctacctcagccctacatgctaaaaatgctgttctctaaa

SEQ ID NO: 827987 - DNA, 120 bp, Artificial Sequence
  ENSG00000247324_3 (sequence is synthesized)
tctagaatgcccttcccttcccattcctaccctccatcttgactgttactggaagtgtgagctcaaatcccattttgcatgggaagcaagccttccctcatcacccagaataaggcagga

SEQ ID NO: 827988 - DNA, 120 bp, Artificial Sequence
  ENSG00000247324_4 (sequence is synthesized)
cactcatttatgtgccatcacagcactgtgtacttacttaatggtgatagtttatttatatgtctgtcttctctggtggctgcagggaacagacactgtatctatcttgttcaacatcat

SEQ ID NO: 827989 - DNA, 120 bp, Artificial Sequence
  ENSG00000247324_5 (sequence is synthesized)
catcctcagctagagaataactggcagaaagaaggagagcaataaacatttgttgttgacaatggtccaaaggctccagccctaactcttaggcagaagcctactttgtgtgtccccaag

SEQ ID NO: 827990 - DNA, 120 bp, Artificial Sequence
  ENSG00000247324_6 (sequence is synthesized)
ggtaggatatgtcttatgccttggaccttgacagtgaccatggccaggtgcccttctctgccttgccctgaccctgatcttcactgttttccaaaatgagttcattaagaaaatgattgg

SEQ ID NO: 827991 - DNA, 120 bp, Artificial Sequence
  ENSG00000247324_7 (sequence is synthesized)
agataataatgcacaaaccaagtttcaaaagctctatggtaggtctggagagatggagatcagttcttgtctgtcagcccctgttcttccattcttataaggttacagaatctctagcaa

SEQ ID NO: 827992 - DNA, 120 bp, Artificial Sequence
  ENSG00000247324_8 (sequence is synthesized)
gggacatgacagctcagggaaaaagcacacatttcccagcattctttaaggcaaagtgtgtccatgtgaccaacttctggcaaacaggctgtaagaaaatgtgatgctgtgtccttaaag

SEQ ID NO: 827993 - DNA, 120 bp, Artificial Sequence
  ENSG00000247324_9 (sequence is synthesized)
acaagggacatgccctccctgcccccaaaccttcatcgaccaggtggaatgttgacaagggagagcatcagagcatcttggaccatgtgaataagggtgtggctgctggggatgacagag

SEQ ID NO: 827994 - DNA, 120 bp, Artificial Sequence
  ENSG00000247324_10 (sequence is synthesized)
cagccccagatggcttactttctgatgatacatgagagagaaataaactttcatcaaatttaaaccacatttatttgggttcttcaaattaatttccaagcccatagcctaactaatacc

SEQ ID NO: 827995 - DNA, 120 bp, Artificial Sequence
  ENSG00000247324_11 (sequence is synthesized)
cctagaaatgaggaaggatggaaaaatcacacaacacaagagttaaaaaattaagctggctcttcgactacagcattctagaagttcatttccatgctgggcctgcagccatgtagtgtc

SEQ ID NO: 827996 - DNA, 120 bp, Artificial Sequence
  ENSG00000247324_12 (sequence is synthesized)
agtttcctcctgctcagctctaaggcttcttctcctgcaccctttgtccctgcagccccaagacctctctaaagcccttcctctctgaccaccagggaaagctgacaatcttctcatgtt

SEQ ID NO: 827997 - DNA, 73 bp, Artificial Sequence
  ENSG00000247324_13 (sequence is synthesized)
ctctctgaccaccagggaaagctgacaatcttctcatgttaaaaaaaatcttttttgttggccaggcggggag

SEQ ID NO: 827998 - DNA, 66 bp, Artificial Sequence
  ENSG00000247324_14 (sequence is synthesized)
ccaggcgcctgaacccaggaggcggaagttgtggtgggctgagatagcgccattgcactccagcct

SEQ ID NO: 827999 - DNA, 120 bp, Artificial Sequence
  ENSG00000247324_15 (sequence is synthesized)
gacaagagcgaaactccgtctcaaaaaagaaaaaatatttcttgttgtttccagttttaataggacagagtaaagatggctttgcctgcttcttctcatgaaaactgtggcaaaacaact

SEQ ID NO: 828000 - DNA, 120 bp, Artificial Sequence
  ENSG00000247324_16 (sequence is synthesized)
tttgcctgcttcttctcatgaaaactgtggcaaaacaactgtctggttgatgttcattccaggagttcaaggctgttttcaggctacaaaatttttacctacttattgatgttgtgagtt

SEQ ID NO: 828001 - DNA, 120 bp, Artificial Sequence
  ENSG00000247324_17 (sequence is synthesized)
ctgtgaataaatcatttaatctatgtggagaaatgtactagggtagggcaaggtcttattctcaaagcaaccaaacatatataggaataagtttactaataaatgtataagacatatatc

SEQ ID NO: 828002 - DNA, 120 bp, Artificial Sequence
  ENSG00000247324_18 (sequence is synthesized)
aagaaaattttaaacatttggggactaaaccaatgaaaaccccttgtgtaaatggaaaggcacaggtaatccttcagtaggaagggtagttttctttatttaatccataagtccaacgtc

SEQ ID NO: 828003 - DNA, 120 bp, Artificial Sequence
  ENSG00000247324_19 (sequence is synthesized)
cgtcataccaaataaaacccctataggatttgttttaaaacttgtgaaaatgattctaaaatttacgcagaaaaaatgttagaagtgactggacagtgcctcatgcctataatcccagca

SEQ ID NO: 828004 - DNA, 120 bp, Artificial Sequence
  ENSG00000204754_0 (sequence is synthesized)
tctgtccttgacctttccagtgttgacagtgatgcctttgaaatcctcctctccttggcttccatagcaatacgcactcctagagtttgtcaccctcttttgcccctccacttcattctt

SEQ ID NO: 828005 - DNA, 120 bp, Artificial Sequence
  ENSG00000204754_1 (sequence is synthesized)
cttcacaagggccagccttcacgtgttgaggttctttgggatgctgcctggctgttcttcattgtggacttgatgttttcctctatcctgttgtgcacattcttacggcttcaatacttt

SEQ ID NO: 828006 - DNA, 120 bp, Artificial Sequence
  ENSG00000204754_2 (sequence is synthesized)
gtctaagctgttgatttcaaagttggcatttcatcccagctctctcctgagtttcagactgccttttcaaaagcctactgggcatctctatccagtggtcacccaggcacatcaactcat

SEQ ID NO: 828007 - DNA, 120 bp, Artificial Sequence
  ENSG00000204754_3 (sequence is synthesized)
tccaaactggtgactctccaggtatttctatctcacccaccccaagatgctcaagcagaacacctggcatctccttgggtcatcttttccccatctttatacttattctccatctaatcc

SEQ ID NO: 828008 - DNA, 120 bp, Artificial Sequence
  ENSG00000204754_4 (sequence is synthesized)
catctacccattacatgttttttaaatccatccacctcttttcaaccccactgctcattccctacatcattaacatctttctcgtagactccttgacctccctccaaattcttgctgtgg

SEQ ID NO: 828009 - DNA, 120 bp, Artificial Sequence
  ENSG00000204754_5 (sequence is synthesized)
tctgaagaatttttctaaagtgtaaatctggccaagtcagtcccctgtgtaaggctctttcatggtttctcgttgcttttaggataagttcaagtccttatcaaggatcttaagacctac

SEQ ID NO: 828010 - DNA, 120 bp, Artificial Sequence
  ENSG00000204754_6 (sequence is synthesized)
cttgcctggccccaggttaccctccccaacctaactcataccactcccaaacacatattccaagttctgaccatacagcactgttttcaaatccttgaacaagccaagggtgacttgcct

SEQ ID NO: 828011 - DNA, 120 bp, Artificial Sequence
  ENSG00000204754_7 (sequence is synthesized)
ctggggctttttcctgccattcttcttcctggaacactttctcagaatcctgtttctccactaattcctatttgtctttctgatgctactccacaggtcccctcctccaggaagccctcc

SEQ ID NO: 828012 - DNA, 120 bp, Artificial Sequence
  ENSG00000204754_8 (sequence is synthesized)
ctcccaggctagatgagagcccctcctctgtatcctatatttcttgggcacacaataattctgtacatttgaagctcattctactctttctacttcctctgtcccagcacttagtacagg

SEQ ID NO: 828013 - DNA, 120 bp, Artificial Sequence
  ENSG00000204754_9 (sequence is synthesized)
tgattgtagcagcctctttatgggtcagagccgcctacaggaccagaagcttcatgaagccagcaccccaacttccaacaccagcgtccgcaatgcccaacagagatcccaggtgaggaa

SEQ ID NO: 828014 - DNA, 120 bp, Artificial Sequence
  ENSG00000204754_10 (sequence is synthesized)
gctgaactgactttggtgacatatattccccaagatctgacagctgatgagtgacagagcacgtattcaaacccagagatgtgaattcgctatgctgcctaggctggtcttgaactcctg

SEQ ID NO: 828015 - DNA, 120 bp, Artificial Sequence
  ENSG00000204754_11 (sequence is synthesized)
acttcaagtaatcctcccaccttcgcttgccaaagtgctgggattataggcgtgaactactgctcccagctgagagctcacttttgtttgctagtggtgttcttagtatcttttcatatt

SEQ ID NO: 828016 - DNA, 120 bp, Artificial Sequence
  ENSG00000204754_12 (sequence is synthesized)
tgaggttttggtggtagtgctgaagtattgtactcaccatccaaggtttacaggacttttgttttactatggaacagatggaattgtttagttctgcatctttgcaaatatacaaaatgt

SEQ ID NO: 828017 - DNA, 120 bp, Artificial Sequence
  ENSG00000204754_13 (sequence is synthesized)
gcctaccaggactctgctttatatccattgaaagcaagaagtaatacagtaaaactttgcctggctagaggctttgaaagaatggactattctgatttaattgtattaacttggaagtat

SEQ ID NO: 828018 - DNA, 120 bp, Artificial Sequence
  ENSG00000204754_14 (sequence is synthesized)
gaaggtgaaaaaaattaaaaacttaaatttcctgttgaatgcaatttgaaaatatagccattgattccacttttattctccagtaagtctggacattctgatatacctggtgttttatta

SEQ ID NO: 828019 - DNA, 120 bp, Artificial Sequence
  ENSG00000204754_15 (sequence is synthesized)
tagaactcctagtgtgcctgaagatcattttctacaactttaagtgtaagaggatgtaaatggtattgtatgagatcaggctggatgagaactgatacttgtaaatacactttttagact

SEQ ID NO: 828020 - DNA, 120 bp, Artificial Sequence
  ENSG00000204758_0 (sequence is synthesized)
ccgtaggagcgaagtcgaatggcgcccccagcggcttggggtgggatctcagtgcctcattcctggcggccccgggagggcgatgccaagtttcgctcttgttccctgggctgcagtgca

SEQ ID NO: 828021 - DNA, 120 bp, Artificial Sequence
  ENSG00000204758_1 (sequence is synthesized)
gcctactaatactaggttttattccgggcccttcacagttaatgttggaggcctctggaggatggccacacctgggctatttgcagaagcctggacagcacagcaggcagagttaaagca

SEQ ID NO: 828022 - DNA, 120 bp, Artificial Sequence
  ENSG00000204758_2 (sequence is synthesized)
gttaaggcagtatcagctgaagggccacccagctgtgcgtgtgcccaggctccaagaataaggaggttggggggcagtcctaagaaaggaagtcattacctatcggcaacccaggagcag

SEQ ID NO: 828023 - DNA, 120 bp, Artificial Sequence
  ENSG00000204758_3 (sequence is synthesized)
acgctggcataacggcgcacacacagtaaaggtcagaggttcttcttagaatagtccttaggtgttagtcaaacccatgccctgccccaaggagttcattcattcattcactcattcatt

SEQ ID NO: 828024 - DNA, 120 bp, Artificial Sequence
  ENSG00000204758_4 (sequence is synthesized)
cactcactcactcactggttctgtttattcactcatttctctatcacatatccatttattgtcattcacccacttatttactcatacattcattcatttgctcatcaatttatttggtac

SEQ ID NO: 828025 - DNA, 120 bp, Artificial Sequence
  ENSG00000204758_5 (sequence is synthesized)
ctacatggagccaggtacaggtcttgattaaagagatctggggaggagtgctcccaagaagttcagagcctcactggtgaaggaaagccatgtaaagacagatcttgagaacccaagatc

SEQ ID NO: 828026 - DNA, 120 bp, Artificial Sequence
  ENSG00000204758_6 (sequence is synthesized)
gcagggaaggctttttgctttgttttgttttgtttttaacatgctgtgtggttcagtaaaattaaaacaggcacaatgatatcctggatgacaagagctggaggctgtcattctaacaat

SEQ ID NO: 828027 - DNA, 120 bp, Artificial Sequence
  ENSG00000204758_7 (sequence is synthesized)
gtagtgagactggctgtcttgtctcatgcccacccctggaaacatgcgcaggaactcaaagcacctagcacagaggaagtgtctggttgttttaaaggaaaaacaaaaccaaaaaaagca

SEQ ID NO: 828028 - DNA, 120 bp, Artificial Sequence
  ENSG00000204758_8 (sequence is synthesized)
cctcctgctctgaccacccctatttccagttttcccttttggcacagcaaagatgaccttgggactgaggtggaaccatgtaattcttcgtaatcccagagtcaggcagacctgggtatg

SEQ ID NO: 828029 - DNA, 120 bp, Artificial Sequence
  ENSG00000204758_9 (sequence is synthesized)
aattccatctttactaactgtgtgactcactgtgtggccatgccaagttacgaggtctctctgtttcctccttcctaaaaaggagataacatccatctcgaaggaagatctggcctgaag

SEQ ID NO: 828030 - DNA, 120 bp, Artificial Sequence
  ENSG00000204758_10 (sequence is synthesized)
agcagtcactcttgcctggcatgcagagaatgccaaatcatattaatgactggccagaatgaagtgcgtgacctcatcactccataactgacaggaaacaactgctagggcaagaaaaaa

SEQ ID NO: 828031 - DNA, 120 bp, Artificial Sequence
  ENSG00000204758_11 (sequence is synthesized)
gggtctccagtgagtattcttgtccacacacatccccactcacgttcctggaccactgcatctaactgccgcagcagctaatgaaccttctggaataaaggaccagtttcttaagaaggg

SEQ ID NO: 828032 - DNA, 120 bp, Artificial Sequence
  ENSG00000204758_12 (sequence is synthesized)
tcttaagaagggattgagacctccagtggcctcccacattgtttccggcaagaatttaaaaattatttgtaacatatagtaataaaaactaaccacaggctgggcgcagtggctcacgcc

SEQ ID NO: 828033 - DNA, 77 bp, Artificial Sequence
  ENSG00000204758_13 (sequence is synthesized)
acaggagaactgcttgaatctgggaggtagatgttgcagtgagccgatatcgcgccattgcactccagcctgggcaa

SEQ ID NO: 828034 - DNA, 120 bp, Artificial Sequence
  ENSG00000204758_14 (sequence is synthesized)
cgccgggtcgctcccgagctccgcgtttcgttcgccgacccctggaagactgcctggaggcccgggcgccacccaaccactggctaggccgacactttgcgcggaccctgggtgtaaaag

SEQ ID NO: 828035 - DNA, 120 bp, Artificial Sequence
  ENSG00000204758_15 (sequence is synthesized)
gtccccgggtctctggtcccgacggagctgtgagggagatcaaccacgccccctccgtgggcaccgtggcggcagggaaggaaaagggctctgggtctcgactctcttcgggttaagaac

SEQ ID NO: 828036 - DNA, 120 bp, Artificial Sequence
  ENSG00000204758_16 (sequence is synthesized)
cgacggggtttattctatgcaaggtgttattaactccaactctccctttcgttcattcattccatatatgttgaacgacaacttagtgccaaatgccggcatgctgaaactcagagaggg

SEQ ID NO: 828037 - DNA, 120 bp, Artificial Sequence
  ENSG00000204758_17 (sequence is synthesized)
acttagtgccaaatgccggcatgctgaaactcagagagggaagatgtcttgcaagtacagcagccacacccagagtttcgctcttgttccctgggctgcagtgcagtggcaccatctcgg

SEQ ID NO: 828038 - DNA, 120 bp, Artificial Sequence
  ENSG00000204758_18 (sequence is synthesized)
acacttcagcttctctcctcacgaagcacgtctccagagacgcctcttccgcaacttcccagggaagccatttctgcctggacccaccacagctcccaacctgtcacgcacccctggagg

SEQ ID NO: 828039 - DNA, 120 bp, Artificial Sequence
  ENSG00000204758_19 (sequence is synthesized)
gttttgctctgtaatcctgatttagaaatcctcttatatgaaaccactgtaatccacatctggttagacaattggaaaagttcattgaaaggagaaataataaaaatggcatccatccct

SEQ ID NO: 828040 - DNA, 120 bp, Artificial Sequence
  ENSG00000255871_0 (sequence is synthesized)
atattgttaaaatggccacagtgctcaaagtaatttatagattcaatgcaatccctattaaaattcaaattacattctttatagaaatagaaaagacaatcctaaaattcacatggactc

SEQ ID NO: 828041 - DNA, 120 bp, Artificial Sequence
  ENSG00000255871_1 (sequence is synthesized)
acaaaaggcccgaagtagccaaagcaatcttgaacaagaagacaaaagctggaggcatcacacttcctaattttaaaaatatattacaaagctacagtaatcaaaacagtatgctactag

SEQ ID NO: 828042 - DNA, 120 bp, Artificial Sequence
  ENSG00000255871_2 (sequence is synthesized)
cataaaaacagatatatagaccaatgggatggattagagagctcagaagtaaacccatgtatatatggtcaaccaactgggaaggtgccaaaagcacataataggaaaaagatagtttct

SEQ ID NO: 828043 - DNA, 120 bp, Artificial Sequence
  ENSG00000255871_3 (sequence is synthesized)
tcaataaatggtgttgggaaaaactgaatatgcaaatgcagaaaaatgaaaaaataaaattacaccttcatctcacactatatgcaaaaatcaactcaaaatggaacacagacttgtatt

SEQ ID NO: 828044 - DNA, 120 bp, Artificial Sequence
  ENSG00000255871_4 (sequence is synthesized)
taaaacctgcaaatataaagctactaaaagaaaacatgcatatgagcttcttgacattggtctgggcaataattttttgaatatgacatcaaaagcacaagtaaaaaaaagcaaaaataa

SEQ ID NO: 828045 - DNA, 120 bp, Artificial Sequence
  ENSG00000255871_5 (sequence is synthesized)
agtggaattatatcaaactaaaaagcttctgcactagcaaaagaaacaatcatcagagtgaaacgcaacctatgaattgagataaagtatctacaaatcatatatctgataagaattaat

SEQ ID NO: 828046 - DNA, 120 bp, Artificial Sequence
  ENSG00000255871_6 (sequence is synthesized)
atccaaaatgcataaggatgtcatacaactcaatacgaaaatgacaaataatctgattttttaatggtcaaaggatctgaatagacatatttccaaaaagacatacaaatgcaaaaaaaa

SEQ ID NO: 828047 - DNA, 120 bp, Artificial Sequence
  ENSG00000255871_7 (sequence is synthesized)
tcatcagggaaatgcaaatcaaaatcacagtgaaatattacctcgcacctgtcgagatggctgttatcaaaaagacaaaagataacaaatgttggcaagaatgtggagaaaagggaaccc

SEQ ID NO: 828048 - DNA, 120 bp, Artificial Sequence
  ENSG00000255871_8 (sequence is synthesized)
atgttggcaagaatgtggagaaaagggaacccctgtaaactgtttgtgggaatgatagttggtacagtgactgtggaaaacagtgtggaagttcttcaaaaaattgaagatggaactacc

SEQ ID NO: 828049 - DNA, 120 bp, Artificial Sequence
  ENSG00000255871_9 (sequence is synthesized)
aactctgagaatacatttatctctccaaaggaaatgaaatcagattgtcaaagagatacctatatttctatgttcattgcagcgttatacacaatagccaatatatggacaaaatgtaaa

SEQ ID NO: 828050 - DNA, 120 bp, Artificial Sequence
  ENSG00000255871_10 (sequence is synthesized)
tgttgacaaatgaatggacaaagaaaacatgatgtgtgtgtgtatgtgtgtgtgttgtatgtgtgtgggtgcatgtgtatacaggcagagataggatattttttaaccttaaaaaaaatc

SEQ ID NO: 828051 - DNA, 120 bp, Artificial Sequence
  ENSG00000255871_11 (sequence is synthesized)
ctgtcatttgtacgaaaatggatgaacctagagcagattatgctcagtgaaataagccagatatagaaaggcaaatactgcattgttacatttatacattaaacctaaaatggtcgctgt

SEQ ID NO: 828052 - DNA, 120 bp, Artificial Sequence
  ENSG00000255871_12 (sequence is synthesized)
catagaagtagggagtagaatggtggttgccagaggctggcaaaaggggaaaattggtagatgttggttaaagggtacaaagtttcagaattgcagacaaataagttctgtagagctaat

SEQ ID NO: 828053 - DNA, 120 bp, Artificial Sequence
  ENSG00000255871_13 (sequence is synthesized)
gtatagcatgctgacaacagataacaattctgtattgcatgcttgaaatctgccaagtgggtagatctggtgttctcattacacatgaaataaatagtaaaagaagaggaagaggaagaa

SEQ ID NO: 828054 - DNA, 120 bp, Artificial Sequence
  ENSG00000255871_14 (sequence is synthesized)
agaagaagaagaagaggaagaagaaggaagaggagaggaggaggaaggggggaggagggaggaggaggagaaggaaggagaaggaaacagaaaggaggaaatgacttggggcaggtgatg

SEQ ID NO: 828055 - DNA, 120 bp, Artificial Sequence
  ENSG00000255871_15 (sequence is synthesized)
atgacttggggcaggtgatggatgtgttaattagcatgattgtggtgattagctcacaatgtgtatgtatattaaaacatcaagttgaataccttaaatatatacaacatttatttgtca

SEQ ID NO: 828056 - DNA, 120 bp, Artificial Sequence
  ENSG00000255871_16 (sequence is synthesized)
gttatacctcagtaaagtcaaaaagtcaataggctacaaaaattccagagtcattatttttaaaattaaatttacaatgttttatcaatcaatacatgaatacatcttaattttatgtca

SEQ ID NO: 828057 - DNA, 120 bp, Artificial Sequence
  ENSG00000255871_17 (sequence is synthesized)
ctgtaactagtactattctaggcagtaataaaaatagtattctagtactattctaggagtaacaaaaatataatagaaaacaaagaagatgaatgtaacacttgggaaatgagcagactt

SEQ ID NO: 828058 - DNA, 120 bp, Artificial Sequence
  ENSG00000255874_0 (sequence is synthesized)
atgcactgtgcaccctcctggttaacagccccacggcccgagagctgtgctttacatgaatgtcttctgttaaagcagctcgtgtggcttctgcaccctggtggagccaacacacgtgcc

SEQ ID NO: 828059 - DNA, 120 bp, Artificial Sequence
  ENSG00000255874_1 (sequence is synthesized)
tgtcacggaggtgaggagtgagtgagttctcaccagcatttgacgctgaccttccggagacatggcgtccctgagagcctgcagcctgccagagcagagagccacccgctggccgttctg

SEQ ID NO: 828060 - DNA, 120 bp, Artificial Sequence
  ENSG00000255874_2 (sequence is synthesized)
ttggaatttcggagttcctgtctttcaggcaacatctgccaagcgcggtttgtgtaaggaaacccattctgtcgtgtctgccggggcccagggcggctgctgtgcgggaaccagcttttg

SEQ ID NO: 828061 - DNA, 120 bp, Artificial Sequence
  ENSG00000255874_3 (sequence is synthesized)
tggcccatggagcaacgactcagtctggggctcggctactctccggcccggggtactggcatttccctggggcccatggggcgagtgcccctatttttcccatgaggcctcagccaagag

SEQ ID NO: 828062 - DNA, 120 bp, Artificial Sequence
  ENSG00000255874_4 (sequence is synthesized)
gaggttcgggaagaaaggaaaacacaggtgaggagagagaagggcgggcagagaggtaccacgccattagtgctgatggggagaggcggctccagcccggcactgctgtccttacgaggc

SEQ ID NO: 828063 - DNA, 120 bp, Artificial Sequence
  ENSG00000255874_5 (sequence is synthesized)
atgtttcctttttattcggaggaagagaagcagaggaacacgtcatggagacggaccgagttgaaggagccagggatggtgacaagcggaaggaagtgtgttttgtccccatccagggaa

SEQ ID NO: 828064 - DNA, 120 bp, Artificial Sequence
  ENSG00000255874_6 (sequence is synthesized)
gcttttgtttcatgagacttacttgcgcacgtctggtagctgccctggacattcatggactttcgttttcactcagattttgtggttcacgtgacacaaagcatgaggacatcactgggc

SEQ ID NO: 828065 - DNA, 120 bp, Artificial Sequence
  ENSG00000255874_7 (sequence is synthesized)
gagagggccaggtcaccccactgccgaggggcacgccccagctgtgcaccgctagagtgggcttgtccagtcctcggacacggggacagggtgtgcccatctcatgtaagacatgaataa

SEQ ID NO: 828066 - DNA, 120 bp, Artificial Sequence
  ENSG00000255874_8 (sequence is synthesized)
tagtagaaatttctgttgcatgagaactctctgcattatcctcaccattttcctgtaagcgtaaaacgtctaaaacttttttatgagcacactaattcctcacttaaggtcgtcattagg

SEQ ID NO: 828067 - DNA, 120 bp, Artificial Sequence
  ENSG00000255874_9 (sequence is synthesized)
ttcttggaaatggcaactttaaacaaaaggacagacagcaggtcctcaaataacattctttccttcaacatcatttcatcctaaggagaaaaaaatggattttgttacatatcctggttc

SEQ ID NO: 828068 - DNA, 120 bp, Artificial Sequence
  ENSG00000255874_10 (sequence is synthesized)
atttccaagaaccaggtgggcatagaattgaccaaaggtggaggagaacagatgtgcggctccgtcctggctgtgtggctccgtcctgtggactaatgcgtgtggacagtcaggaacact

SEQ ID NO: 828069 - DNA, 120 bp, Artificial Sequence
  ENSG00000255874_11 (sequence is synthesized)
ttcaggacaatgtgggtggcctgccaatgggacctattccagaggtctgagaagaaaccgttgtttaacctagaatcctgctaggaatcaaactagctttgacaggaaaaggaaaaagaa

SEQ ID NO: 828070 - DNA, 120 bp, Artificial Sequence
  ENSG00000255874_12 (sequence is synthesized)
tgaggactctgaacagggacagactcagaacaattcttatccactcatagtttaggaaataatcttacagcatgtgctccaccagggtcaccaactgtcccaatttgcttgggactgaag

SEQ ID NO: 828071 - DNA, 120 bp, Artificial Sequence
  ENSG00000255874_13 (sequence is synthesized)
gtttgtttgtttttgtttctttgttttgagacagagcgtctctctctgttacccaggctagagtgcaatggcgtgattttagctcactacaacctccactttccaggttcaagcaattct

SEQ ID NO: 828072 - DNA, 85 bp, Artificial Sequence
  ENSG00000255874_14 (sequence is synthesized)
cctccactttgagtggcagggattacaggaacccaccaccatgctggctaatttttcaatatttagtagagatggggtttcacca

SEQ ID NO: 828073 - DNA, 86 bp, Artificial Sequence
  ENSG00000255874_15 (sequence is synthesized)
gaggggtttttatggacatgggacttttaatgctaacactaggacagtctctgtcagactgagatgatggtcactctttggccaaa

SEQ ID NO: 828074 - DNA, 120 bp, Artificial Sequence
  ENSG00000255874_16 (sequence is synthesized)
gtctctgtcagactgagatgatggtcactctttggccaaacacctccaccactgccccgcaacatccataatagcaacagtttgagtaaagacacaagtaccatttgcggtccaaatact

SEQ ID NO: 828075 - DNA, 120 bp, Artificial Sequence
  ENSG00000255874_17 (sequence is synthesized)
tgagtgtgtaaacggtgcattgggtgtgcacagcggtacccagaatctccaactagctcctcatgagctgggtggggcatgcagggaaggaggcaaagcttcccacctgtctggggaggc

SEQ ID NO: 828076 - DNA, 120 bp, Artificial Sequence
  ENSG00000255874_18 (sequence is synthesized)
tgtgggctccacctctgcagactttggtaggagaccagtgttcatgcagttgtagtaatgcacgtgtagcttagggtttttttgggactaaactatggacaaagcacagaactcagttgt

SEQ ID NO: 828077 - DNA, 120 bp, Artificial Sequence
  ENSG00000255874_19 (sequence is synthesized)
ctctgtagaaaagggtggcctgtcacccggtaccaggtgaggggagtgtggcagtggcaagagcacctggtggtggccgagaggaggcacggaggagagtcagggtaccgtgccctcatg

SEQ ID NO: 828078 - DNA, 120 bp, Artificial Sequence
  ENSG00000255874_20 (sequence is synthesized)
gagtgagtgcggaagacaaaacaacagacacagttgtaatgacattactttatttggggttaaattagggtgcacatcacagaaaatcctcaaaccacagggaatgaaatggaagttgtt

SEQ ID NO: 828079 - DNA, 120 bp, Artificial Sequence
  ENSG00000255874_21 (sequence is synthesized)
tctctctggtaaaacaagtctgaaagctgcagtgtcatcagatccacggccctgcatctctgccacaccccaccatgcacctccagtcctcccggcctgtggcttccagggctccaggaa

SEQ ID NO: 828080 - DNA, 120 bp, Artificial Sequence
  ENSG00000255874_22 (sequence is synthesized)
ctagggagggacagacactgggatcttctgccatgaagcagagagggatgctggggaaacacatgggcactcgctgccacaagtgcctcctggaaaagcaaaacccaatgccatggctgc

SEQ ID NO: 828081 - DNA, 120 bp, Artificial Sequence
  ENSG00000255874_23 (sequence is synthesized)
ctccctccggcagcaccagcacgagtgagccagatcctcacctttgatcatcaaggctgagaggtaatatctgaggtcgacagatcaagaagtagagacaaaagcaaaccaggctggtgg

SEQ ID NO: 828082 - DNA, 120 bp, Artificial Sequence
  ENSG00000255874_24 (sequence is synthesized)
taaagaggaggaatgaccgtaagatgcctctgaaaagtgggaatatggggaatctcctcttggtttctggttgcacatgtgaatttattgaaaactgaatatattaagatgtgagcttag

SEQ ID NO: 828083 - DNA, 120 bp, Artificial Sequence
  ENSG00000255874_25 (sequence is synthesized)
gagttggcagcctgtggcatggggaggtgtgggaagtggacagtctcaggtcagggtgggctggaaagtggtgccacctcgagaacagtaggttaacatctacccccagtgacgacattc

SEQ ID NO: 828084 - DNA, 120 bp, Artificial Sequence
  ENSG00000255874_26 (sequence is synthesized)
aggggacattttcacaaaatattcacgagagcacacaaaatatacaaaggatgacgagggttgaacattgttgtgacaaaacatgggaagcaacttaagtgccatctgtgggaaacggtc

SEQ ID NO: 828085 - DNA, 120 bp, Artificial Sequence
  ENSG00000255874_27 (sequence is synthesized)
tagtggtggagctgtggggctgtgggatactgtgggcgggtgagaaacggagaggcgtctccaagcatcagtgggataaaattgctctatctgtattttcaaaggagaaaaagaacaagc

SEQ ID NO: 828086 - DNA, 120 bp, Artificial Sequence
  ENSG00000255874_28 (sequence is synthesized)
cccaagctgtgcatttacacggggacatgagtacatccatctgtaatgcgtctgtcaccccacaacaggaggggttagctgtgcgtggggagagggtgaagaagggcttttgcctggtgc

SEQ ID NO: 828087 - DNA, 120 bp, Artificial Sequence
  ENSG00000255874_29 (sequence is synthesized)
tagactgcctgggttcaaatcctgctcctacttagtgctgtgcaatttgggcaaaatacctaaacctctctgtgccttcatttccacctctctaaagcggggtctgtgacaatgcccact

SEQ ID NO: 828088 - DNA, 120 bp, Artificial Sequence
  ENSG00000255874_30 (sequence is synthesized)
cactcctcattcataaggtggtggtgaggattaaatgagctgatgccctcacaaggtgtttgtccatcagtgatagggtttggctgtggcccctgtgtccccacccaaatctcatcttga

SEQ ID NO: 828089 - DNA, 120 bp, Artificial Sequence
  ENSG00000255874_31 (sequence is synthesized)
taatcctcataatccccacgtgtcgagggagggatcccgtgggaggtgatcagatcatgggggtggttcccccatgctgtcctcatgataatgagtgagttctcacgagatctgatggtt

SEQ ID NO: 828090 - DNA, 84 bp, Artificial Sequence
  ENSG00000255874_32 (sequence is synthesized)
cagtttccctgctcttacacgctctcttttgcctgccgccatataagacatggcttttccctttccaccatgattgtaagtttc

SEQ ID NO: 828091 - DNA, 120 bp, Artificial Sequence
  ENSG00000255874_33 (sequence is synthesized)
tgaatcaatttaacctctttcctttataaattgctcagtctgaggtagttctttatagcagtatgagaatgaactaacacagtaaattggtactgcggagagtagagtattgctataaag

SEQ ID NO: 828092 - DNA, 89 bp, Artificial Sequence
  ENSG00000255874_34 (sequence is synthesized)
agtaaattggtactgcggagagtagagtattgctataaagatacccaaaatgtggaagcaactatggaactgggtaacagaaaaagaca

SEQ ID NO: 828093 - DNA, 64 bp, Artificial Sequence
  ENSG00000255874_35 (sequence is synthesized)
ggaagatgtggggaagattggaacaaagtccaggctgcggtggtctcagatggagatgaggaac

SEQ ID NO: 828094 - DNA, 120 bp, Artificial Sequence
  ENSG00000255874_36 (sequence is synthesized)
agcagagactggtggcattttgcccctgccctgagatctgtggaactttgaacgtgagagagataacctgaaattggaacacatgtttacgaagaagcagagcattaacatttggaaaat

SEQ ID NO: 828095 - DNA, 76 bp, Artificial Sequence
  ENSG00000255874_37 (sequence is synthesized)
ctggggagaaattcaagctggctgcagaagtttgcataagtaacgaggagccaaaggttacttcgcagcagcccct

SEQ ID NO: 828096 - DNA, 120 bp, Artificial Sequence
  ENSG00000255874_38 (sequence is synthesized)
aatgtctccagggcatgtcagaggcttcgcagcagcccctcttagcacaggtctaggagggaaaaatggcttcatgggccaagtctagggccccactgctctgtgcagcctctggactgg

SEQ ID NO: 828097 - DNA, 120 bp, Artificial Sequence
  ENSG00000255874_39 (sequence is synthesized)
atgccttctgtcctagctgctgccactcaaactccagtcgtggctaaaaggggccacatacagctcaggctgctgcttcagcgggtgcaagccggaagcctgcacagaattcaagaattg

SEQ ID NO: 828098 - DNA, 120 bp, Artificial Sequence
  ENSG00000255874_40 (sequence is synthesized)
aggtttgggaacttctgcctagatgtcagaggaagtatggaaacagctggctgtctaggcaaaagtttgctgcaagggtggaaccctcatggagaacgttagggcagtgaggaagggaaa

SEQ ID NO: 828099 - DNA, 83 bp, Artificial Sequence
  ENSG00000255874_41 (sequence is synthesized)
gaaccctcatggagaacgttagggcagtgaggaagggaaatatggggctgtagcccccataacagagtacccactgggtcact

SEQ ID NO: 828100 - DNA, 86 bp, Artificial Sequence
  ENSG00000255874_42 (sequence is synthesized)
gtagtcccactgacagcttgcactgtggcgaaagcagccaggaggggggctgtaccttacaaagccacaggagcagagctgcccaa

SEQ ID NO: 828101 - DNA, 74 bp, Artificial Sequence
  ENSG00000255874_43 (sequence is synthesized)
ttcatgagctttaagatttaatgattgcctcactggattttggacttacatggggcctatagcccctttgtttt

SEQ ID NO: 828102 - DNA, 66 bp, Artificial Sequence
  ENSG00000255874_44 (sequence is synthesized)
ttttggccaatttctcccatttgaaatggaatcatttacctaatgcctgtacgcccattgtatctt

SEQ ID NO: 828103 - DNA, 120 bp, Artificial Sequence
  ENSG00000255874_45 (sequence is synthesized)
gagactttggacttggacttttgagttaagactttgggggacagttggaagggcattattgtgttttgaaatgggaggacatgagattggggaggggccaggggcagaatgataatggtt

SEQ ID NO: 828104 - DNA, 120 bp, Artificial Sequence
  ENSG00000255874_46 (sequence is synthesized)
tgaattgtaatccccataatccccatatatcgagggagggacatgttgggaggtgactggatcttaggggtggtttcccccagttgttctcatagtaatgagttctcacaagatctgatg

SEQ ID NO: 828105 - DNA, 120 bp, Artificial Sequence
  ENSG00000255874_47 (sequence is synthesized)
tataaggcagttttccctgctcttgctcgctctgtcttgcctgccgccctgtaagacgtgcctcttccccttctgccataatggtaagttccttgaggcctccccagccatgcagagcca

SEQ ID NO: 828106 - DNA, 79 bp, Artificial Sequence
  ENSG00000255874_48 (sequence is synthesized)
atctttacagcagtgagagaacagactaagacaatcagcttctatgttgttggcagttttaccatgagcatggattcct

SEQ ID NO: 828107 - DNA, 120 bp, Artificial Sequence
  ENSG00000255874_49 (sequence is synthesized)
ttctatgttgttggcagttttaccatgagcatggattcctatattccttctgaaattttctttaaaagtgtaagcttatatagaaagtatattcgacactcacaacccttcccagccata

SEQ ID NO: 828108 - DNA, 120 bp, Artificial Sequence
  ENSG00000255874_50 (sequence is synthesized)
aaagacagtggggtgtgagtgtgtgggatgggatgcagcaatggcagcccagtaacaacagcagtgcgtgccgggaacagctcagcagcagggcaggtcagggctaacccagttaactca

SEQ ID NO: 828109 - DNA, 120 bp, Artificial Sequence
  ENSG00000255874_51 (sequence is synthesized)
atgcaggctccctacaccaagtgatttggtttgcaaataaatattatttgtttctgttttaatgtgtaaacagagcacctgaattacacagtaatgtaactctgaaaattgctaaatttc

SEQ ID NO: 828110 - DNA, 120 bp, Artificial Sequence
  ENSG00000279217_0 (sequence is synthesized)
cagctttcttgttaaatgaggtaactatttttattgtttagacagcttagcaatttgacagtctgttatttgtagctgaaggcatctttgttttattatcattattttttgagacagagt

SEQ ID NO: 828111 - DNA, 120 bp, Artificial Sequence
  ENSG00000279217_1 (sequence is synthesized)
cccaggttggagtgcagtggcatgatggctcactacaagctccatctcctgggtttcaaacaattctggtgcctcagcctccaacgtagcgggaattacaggcatgcgccaccacacccg

SEQ ID NO: 828112 - DNA, 120 bp, Artificial Sequence
  ENSG00000279217_2 (sequence is synthesized)
aattacagatgtgagtcactatgccggccgtttaaagtttttttctttttagagacagggtcttgctctgtggcccaggcatgaacatagctcaattcagtctcaaactcctgggctcaa

SEQ ID NO: 828113 - DNA, 120 bp, Artificial Sequence
  ENSG00000279217_3 (sequence is synthesized)
tcctcctgcctcagtctcccaagtagctaggactacctatgcacaccacccagctgactaatttttatttttttatttttgtacagatgggggtcttgctctgttgctcaggctggtctg

SEQ ID NO: 828114 - DNA, 120 bp, Artificial Sequence
  ENSG00000279217_4 (sequence is synthesized)
tctgaaactcctggcctgaagcaatcctgcctttacctcccaaagtgtggggattacaggcgtggagccaccatgcccagtcatgaaagcatttttgcctgataccctgccacactggag

SEQ ID NO: 828115 - DNA, 120 bp, Artificial Sequence
  ENSG00000279217_5 (sequence is synthesized)
ctggaaaaaacacctcctcccaaagaagtttaaaactttattggccatgaaaagagctgaggccctatagaagagtggaaaagtatgagtttgtgttccagtcttaccctccacaactta

SEQ ID NO: 828116 - DNA, 120 bp, Artificial Sequence
  ENSG00000279217_6 (sequence is synthesized)
atagccacctgcctttgaacaagagcttaacttctctgagcctccgtttactcatctgaccactgcctggcacattggcctacatgtataatagggataataatttttttttttttttga

SEQ ID NO: 828117 - DNA, 75 bp, Artificial Sequence
  ENSG00000279217_7 (sequence is synthesized)
tagctgggattacaggcatgttccaccatgctcgtttgatttttgtatttttagtagagacacggatccacccgc

SEQ ID NO: 828118 - DNA, 120 bp, Artificial Sequence
  ENSG00000279217_8 (sequence is synthesized)
tacaggcatgagccaccacatctggcctataaatttgtttttagaaggagggtttgggggaaattttttaaaataaaagcttctagcaagcctcctacaccatcccaatcaatctctgtg

SEQ ID NO: 828119 - DNA, 79 bp, Artificial Sequence
  ENSG00000279217_9 (sequence is synthesized)
taaaataaaagcttctagcaagcctcctacaccatcccaatcaatctctgtgctttttttaaaaaaaaaaaaaaaaaaa

SEQ ID NO: 828120 - DNA, 120 bp, Artificial Sequence
  ENSG00000279217_10 (sequence is synthesized)
tcacctgagcctggggaggtcaaggctccagtgagctgtgatcgcgtcaccgtgctccagcctggatgacagagtgagattctgtttaagaaaaaaaaaaaaaaaagtgggggggtgggg

SEQ ID NO: 828121 - DNA, 73 bp, Artificial Sequence
  ENSG00000279217_11 (sequence is synthesized)
tctgtttaagaaaaaaaaaaaaaaaagtgggggggtggggaagaaaaataaagaaaacaagaggccatgggca

SEQ ID NO: 828122 - DNA, 72 bp, Artificial Sequence
  ENSG00000279217_12 (sequence is synthesized)
gtgaggaagccctgctgtctgtctgtacccaagcccttccaccaagagagctagtctaggtgtgagatctca

SEQ ID NO: 828123 - DNA, 120 bp, Artificial Sequence
  ENSG00000279217_13 (sequence is synthesized)
gcccttccaccaagagagctagtctaggtgtgagatctcacactgtctttgtagccatctaaaaacaataataataacaaactggacagtatacaataataaatagataaaaaagggcag

SEQ ID NO: 828124 - DNA, 120 bp, Artificial Sequence
  ENSG00000279217_14 (sequence is synthesized)
aaaaaagggcagaggagttgaatatccaaagaagataaacaggccaggcacaatggctcttgcctgtaattctagtactttgggagtccgaggcaggtggatcacttgaggtcaggtgtt

SEQ ID NO: 828125 - DNA, 78 bp, Artificial Sequence
  ENSG00000279217_15 (sequence is synthesized)
gaaacaaacaaaggaacaaaaaacaacagaaaaacaaaaacaaagaagacaaacaaatggccaataagcatatgaaaa

SEQ ID NO: 828126 - DNA, 120 bp, Artificial Sequence
  ENSG00000279217_16 (sequence is synthesized)
aaggaacaaaaaacaacagaaaaacaaaaacaaagaagacaaacaaatggccaataagcatatgaaaagatgctcaatatacttagtcattaaggaaatgcaaatcaaaaccacaatgag

SEQ ID NO: 828127 - DNA, 120 bp, Artificial Sequence
  ENSG00000279217_17 (sequence is synthesized)
ataatccaaaaaccagaaaataaccagtactggtgagatgtggagaagttgaaacccttgcatattactgaatggaatgataaatgggagttactatggaaaacagtaactgctttgggc

SEQ ID NO: 828128 - DNA, 120 bp, Artificial Sequence
  ENSG00000279217_18 (sequence is synthesized)
atcctagcactttgggaggccgaggtagaaggatcacttgaggccagcctgggcaacatgatgaaaccctacctctacaaaaaaaaaagtgtgtgtatatatataaaagtatataatata

SEQ ID NO: 828129 - DNA, 70 bp, Artificial Sequence
  ENSG00000279217_19 (sequence is synthesized)
tatatatatatatgtgtgtatatatatattagctgggtgtagacttgagcccaggaggttgagtctgcag

SEQ ID NO: 828130 - DNA, 120 bp, Artificial Sequence
  ENSG00000279217_20 (sequence is synthesized)
acttgagcccaggaggttgagtctgcagtgagccatgatcatgtcactgcattctagcctgggcaacagagagagatcctgtctcaaaaaataaattaattaaattaaacaataaaggaa

SEQ ID NO: 828131 - DNA, 72 bp, Artificial Sequence
  ENSG00000279217_21 (sequence is synthesized)
gtctcaaaaaataaattaattaaattaaacaataaaggaatggacgcgggtggatcacctgaggtcaggcgt

SEQ ID NO: 828132 - DNA, 120 bp, Artificial Sequence
  ENSG00000279217_22 (sequence is synthesized)
gtgccattgcactctagcctggacaacaagagtgaaaccccgtctcaaaaaaaaaaaaaaaggaatgatgtactgatacaggctacaatgtagatgaattctgaaaacatgttcagtgaa

SEQ ID NO: 828133 - DNA, 120 bp, Artificial Sequence
  ENSG00000279217_23 (sequence is synthesized)
agaactcagacacaaaatgtcacttattaaatgattccctttatatgtaatatccagaataggtaaatctatatagagagaatgcagatcagtggttgttagggactaaggagagggggg

SEQ ID NO: 828134 - DNA, 120 bp, Artificial Sequence
  ENSG00000279217_24 (sequence is synthesized)
aacgggggagtgaccgctcaatggatatggggtctattttgggggtgatgaaaacgttttgaaaccagatagatattatgcttgcataaataacattgtgaatgaaaaaataccactgaa

SEQ ID NO: 828135 - DNA, 120 bp, Artificial Sequence
  ENSG00000279217_25 (sequence is synthesized)
tagcgcattttttaaaaaattttgagacaaggtctctggcatgaggtggagaatgctacgagttttttgatatcattttatgttagagcacaaattgcactctgccatccagctgggagt

SEQ ID NO: 828136 - DNA, 78 bp, Artificial Sequence
  ENSG00000279217_26 (sequence is synthesized)
cacaaattgcactctgccatccagctcccccggttcaagtgatcctcctgcttcagcctcctcagtagctgggactac

SEQ ID NO: 828137 - DNA, 120 bp, Artificial Sequence
  ENSG00000279217_27 (sequence is synthesized)
ccccgtctgaacagtacattttgaaatggctaattttatgtttgtgaaatttgtctcaataaaaatagaaacatacatcatgagaggtcattcatgtacatccagtcatattgctttttt

SEQ ID NO: 828138 - DNA, 120 bp, Artificial Sequence
  ENSG00000279217_28 (sequence is synthesized)
tatctgatttagtgttgtcttcatgtcagtcaccctctccctaggaacttggtacaagatcctgggcctggggctagggtagaaggcaatttgacagcattccccagggctgcctgcagt

SEQ ID NO: 828139 - DNA, 120 bp, Artificial Sequence
  ENSG00000279217_29 (sequence is synthesized)
tccccccgcccctccgatcccccagcaagtgaggaaaactgcccctccaggaaagctcttccacctggtacctgccgaggagaattacagcattcattaatcagggctctttgtggcaag

SEQ ID NO: 828140 - DNA, 120 bp, Artificial Sequence
  ENSG00000279217_30 (sequence is synthesized)
tcagggctctttgtggcaaggaacagaagtacctacgggctgattaagcagaaaaggatgttagctcacagaattttgtttcttttttgaaacagggtctcactctgtcttccaggctgg

SEQ ID NO: 828141 - DNA, 120 bp, Artificial Sequence
  ENSG00000279217_31 (sequence is synthesized)
agcaattctcccacctcagcctcccgagaagctgggactagaggcgtgcaccatcatacctggctagtttttttttattttcagtagagatgggatcttgctgtgttgcccaggctggtc

SEQ ID NO: 828142 - DNA, 120 bp, Artificial Sequence
  ENSG00000279217_32 (sequence is synthesized)
aagtgatcctcctgccttggcctcccaacgtgctgagattacaagggtgagccattgtgcccagctcacagaatttttgaggggctggaggacctggttgtaggcaaagcttccaggatc

SEQ ID NO: 828143 - DNA, 120 bp, Artificial Sequence
  ENSG00000279217_33 (sequence is synthesized)
taggcaaagcttccaggatcaattccccccagatagccacagaaacagctgttaagcaagatcccaccactgctgcgggataagcaaaatgctaccactgccgctgctcctgtgagacat

SEQ ID NO: 828144 - DNA, 120 bp, Artificial Sequence
  ENSG00000279217_34 (sequence is synthesized)
ttctgcacccaggatttcactctaaagctgagcatcctgccgccactctcaccacacagagcctccttcttgagttcacacttccttttcctcgttttggtgggacttgcctgcttggtg

SEQ ID NO: 828145 - DNA, 120 bp, Artificial Sequence
  ENSG00000279217_35 (sequence is synthesized)
ggactggatcacatgtcagtgcccgagcttcaaggaagcctgggaagccaacatttctggatttcaccatggggagatggggcccacagggccggacatttctcaaatataggaaggggt

SEQ ID NO: 828146 - DNA, 86 bp, Artificial Sequence
  ENSG00000279217_36 (sequence is synthesized)
ccaaatctcatcttgaattctcacgtattatgatcaagtctttcccgtgctgttctcgtgatctgatcgtgaataagtctcatgag

SEQ ID NO: 828147 - DNA, 88 bp, Artificial Sequence
  ENSG00000279217_37 (sequence is synthesized)
ctggtgggaggtaattgaatcatggggtcaagtctttcccgtgctgttctcgtgatctgatcgtgaataagtctcatgagatctgaca

SEQ ID NO: 828148 - DNA, 120 bp, Artificial Sequence
  ENSG00000279217_38 (sequence is synthesized)
tctgccatgattgtgaggcctccccagccctgtggaactgtaagtccatcaaacctctttgttttttttggtaaattgcccagtctcggttatgtcttatttatttatttatttatttgt

SEQ ID NO: 828149 - DNA, 85 bp, Artificial Sequence
  ENSG00000279217_39 (sequence is synthesized)
tttttggtaaattgcccagtctcggttatgtcttatttatttatttatttatttgtttctttgtttgtttgtttatttttgagac

SEQ ID NO: 828150 - DNA, 75 bp, Artificial Sequence
  ENSG00000279217_40 (sequence is synthesized)
ccagggtgtacagaaaatacatgatagagagacagcatttattattcctcacttgttggaaggaccctacgcaac

SEQ ID NO: 828151 - DNA, 120 bp, Artificial Sequence
  ENSG00000279217_41 (sequence is synthesized)
catttattattcctcacttgttggaaggaccctacgcaaccctagctcatttgacaatgtccctctcattatataccttgggccttttgcatatagagacagccctggtttttgactgtc

SEQ ID NO: 828152 - DNA, 120 bp, Artificial Sequence
  ENSG00000279217_42 (sequence is synthesized)
cagaacctttatatctgcccctccccaaaacagagaggcctcatacatctgtcagtaataaagccaaccctctcgtatttactgggtagataagtaactgagactgaaacgccactgtat

SEQ ID NO: 828153 - DNA, 120 bp, Artificial Sequence
  ENSG00000279217_43 (sequence is synthesized)
tccatttccctgaccacagtgattgattcagagggaagcctatgacaaaaacagcgccagtcagaatgttccctggcattgatacaatgactcgggggaaagagcaactctcttttgccc

SEQ ID NO: 828154 - DNA, 120 bp, Artificial Sequence
  ENSG00000279217_44 (sequence is synthesized)
tggggttgttaaactggaaggaagaaactatttgcagtgggagaaaattaggtcagcctagagtgaagcagagatgagagatggtgagaaagccaggaaaatatggtttcatcttttgga

SEQ ID NO: 828155 - DNA, 120 bp, Artificial Sequence
  ENSG00000279217_45 (sequence is synthesized)
tctagctaagcctgaagtcattacatctctcgtttttaatcacacgagccaataaattcctttgaaagcttcagtgagttggagttggatttctctcacaaccgagtaatcgtgatcaac

SEQ ID NO: 828156 - DNA, 120 bp, Artificial Sequence
  ENSG00000279217_46 (sequence is synthesized)
tgatcaaccaccctctccctaatgggaaatttactatgggccacttttctatccattgtctcatttgacagtagatttgaaagttaggagggagaggctaggcgcggtggctcatgcctg

SEQ ID NO: 828157 - DNA, 72 bp, Artificial Sequence
  ENSG00000279217_47 (sequence is synthesized)
ccagcttgggcgataggagggagcattaacaataaaagaactatgactggacacagtggctcatgcctgtaa

SEQ ID NO: 828158 - DNA, 80 bp, Artificial Sequence
  ENSG00000279217_48 (sequence is synthesized)
tgagcattattatccttacagataataatttgagctaagagagattaattgactagcccaagggcatacagctagttgtg

SEQ ID NO: 828159 - DNA, 120 bp, Artificial Sequence
  ENSG00000279217_49 (sequence is synthesized)
gagattaattgactagcccaagggcatacagctagttgtggtctggcttgaatttgaacacagttctgcctaccttcaaatttagcactcgtcctaaaattctatagtcaattcttattt

SEQ ID NO: 828160 - DNA, 120 bp, Artificial Sequence
  ENSG00000279217_50 (sequence is synthesized)
tcagaagtaatttttctcctcataattttccctaattctttggtcctccaaggcctttcaagccagttcccagctcctgataatagtgaatacctgaaacagctagcttattattctccc

SEQ ID NO: 828161 - DNA, 120 bp, Artificial Sequence
  ENSG00000279217_51 (sequence is synthesized)
gtgggtgttttaattttcaaaatgtggaaagaccaaggcatgaagctttgaaggagaaatttcatccactggctgtggacatgaggaacttggagttcctgggatctcaaccccagtacc

SEQ ID NO: 828162 - DNA, 120 bp, Artificial Sequence
  ENSG00000279217_52 (sequence is synthesized)
tacacttatgggaaaccatcaccctctcgggaaggcttcccttgtctagaaactttttttgaggaaatccaagaatgtcttaatagtagaggatgcagtatgaacacgcctttggaactc

SEQ ID NO: 828163 - DNA, 120 bp, Artificial Sequence
  ENSG00000279217_53 (sequence is synthesized)
tatctgactcacaggatcccacaattttagtacagcctcttccaagctgaacctctcaccaaaccaggttaggaattgcgggttagttatttggaaggaaaggtggtagagaaggaccag

SEQ ID NO: 828164 - DNA, 120 bp, Artificial Sequence
  ENSG00000279217_54 (sequence is synthesized)
gggaattaatattcattgaacatatgacagcgatggcaaatagagtttctctgcatcatgcattgataagcacacagagttagcatccatgctcaattggtaatgtctgcccttggtgca

SEQ ID NO: 828165 - DNA, 120 bp, Artificial Sequence
  ENSG00000279217_55 (sequence is synthesized)
ggacagcatccaagctcacctggtaatgtctgccctgggtgcaggagggggcctggcaggatggttgccagctctccatcttctctggctatgagccaggcactttacaccattaacccc

SEQ ID NO: 828166 - DNA, 120 bp, Artificial Sequence
  ENSG00000279217_56 (sequence is synthesized)
aagttctcacaataacctctgaggtgggagtttcttttcttattttctggaggaggaaactgaggtttaaagaggatgttacttgccccttgtaaaaggtactaggtggacaagtcttta

SEQ ID NO: 828167 - DNA, 120 bp, Artificial Sequence
  ENSG00000279217_57 (sequence is synthesized)
atttaaaaataaataaataagcaacatatcactgccacaaaagcagcaatattgctacaatttactgagggctttctacatgcaagacactatttttttgttgttttgttttttttttga

SEQ ID NO: 828168 - DNA, 64 bp, Artificial Sequence
  ENSG00000279217_58 (sequence is synthesized)
gaggtaaacacatgtgtcatggtggtttgctgcacctgtcaacccgtcacctaggcattaagcc

SEQ ID NO: 828169 - DNA, 120 bp, Artificial Sequence
  ENSG00000279217_59 (sequence is synthesized)
gtttgctgcacctgtcaacccgtcacctaggcattaagccccacacacatttgctatttttcctgatgctctcccttccctcaccccaccgacaggccctggtgtgtattgttccctgcc

SEQ ID NO: 828170 - DNA, 65 bp, Artificial Sequence
  ENSG00000279217_60 (sequence is synthesized)
tcaccccaccgacaggccctggtgtgtattgttccctgccctgtgtccatgtgtttttattgctc

SEQ ID NO: 828171 - DNA, 62 bp, Artificial Sequence
  ENSG00000279217_61 (sequence is synthesized)
cctttttatggcttcatagtattccatgttgtatacgtagcacattttctttacccagtcta

SEQ ID NO: 828172 - DNA, 88 bp, Artificial Sequence
  ENSG00000279217_62 (sequence is synthesized)
gctgcaataaacatatgtgtgcatatatctttataacagaatgatttatatccctttaggtggaatttctggttctagatccttgagg

SEQ ID NO: 828173 - DNA, 120 bp, Artificial Sequence
  ENSG00000279217_63 (sequence is synthesized)
caggcatgagccaccgtgcctggccccactttttttcatgtttcttggccgcataaataagaccctgtattaagcctgttgtatgtattatctccattcatttcccagaagcttggtgaa

SEQ ID NO: 828174 - DNA, 120 bp, Artificial Sequence
  ENSG00000279217_64 (sequence is synthesized)
tccattcatttcccagaagcttggtgaagtaatttaccattttacagaccacgcggaaacagaagagccaagtgtcgtgttcaatgtcactggtgcatcagaagcagagctggggtgaaa

SEQ ID NO: 828175 - DNA, 120 bp, Artificial Sequence
  ENSG00000279217_65 (sequence is synthesized)
gccagatgcagccagctctagggcctggacttctgttccttcccactggtttgttttcatcctgagtcattgcttggtaggggaggattctgagaaagcaatgaggtaaactatggcaat

SEQ ID NO: 828176 - DNA, 120 bp, Artificial Sequence
  ENSG00000279217_66 (sequence is synthesized)
actgacttacgcacttcacataaatccctttgtgaggaacatgtcatggggctccacacattgggctatgaagagcggggttggcctgtccctttgtggcagcggcccctcttaggcctc

SEQ ID NO: 828177 - DNA, 120 bp, Artificial Sequence
  ENSG00000279217_67 (sequence is synthesized)
tggcagcggcccctcttaggcctcttcagcactctgtccctgggggccagcccatccagccctggcctttccttctcctctgggtgagtcagaactctttttattttattttattttttt

SEQ ID NO: 828178 - DNA, 120 bp, Artificial Sequence
  ENSG00000279217_68 (sequence is synthesized)
aggtgtgagccactgcacccagcctgagtcagaactttgtacatgagaaggaagtcttgggagaaatccacagttgttttgtatccagaacgtgaggcagcttggtgctgtgatgagagt

SEQ ID NO: 828179 - DNA, 120 bp, Artificial Sequence
  ENSG00000279217_69 (sequence is synthesized)
gttccttgccactgctcctggttgagccaccttgagccaatgtaggtttcttcatctgaaaagtgagagggatggcctaagtgacttctaagtgactgagctgctctaaatgtgtgtgag

SEQ ID NO: 828180 - DNA, 120 bp, Artificial Sequence
  ENSG00000279217_70 (sequence is synthesized)
atgcccgtgtctgtggtcagtctctgtagtctttctcagaccttgcttcattctcatcctctttctctcagctaatcagttgttccagtatcttactataaaaattttcttttttttttg

SEQ ID NO: 828181 - DNA, 78 bp, Artificial Sequence
  ENSG00000279217_71 (sequence is synthesized)
tttgagagagtcttggtaacaacatccgcctcccaggtccaagcgatttgcctgtctcagcctcccgagtagctggga

SEQ ID NO: 828182 - DNA, 75 bp, Artificial Sequence
  ENSG00000279217_72 (sequence is synthesized)
tacaggtgtgagccaccatgcccatcctaaaaattttcttttcttttcttttttttgagatggagtttcgcttag

SEQ ID NO: 828183 - DNA, 120 bp, Artificial Sequence
  ENSG00000279217_73 (sequence is synthesized)
aaacaagcagcaaagttgaatgaatgtcccaggaagcacgcacatgcccccccgtccagctagattccatctggctttctctcagcttgttgccctggtagtcactaaggcagaaaggcc

SEQ ID NO: 828184 - DNA, 120 bp, Artificial Sequence
  ENSG00000279217_74 (sequence is synthesized)
ccaaacatatttccccttgaggacagtcagggtggaattcagtcagaacgcaccttctccctcccacagctcacatccctcatgcatgccccatgccctaatgcctttctttctttcttt

SEQ ID NO: 828185 - DNA, 120 bp, Artificial Sequence
  ENSG00000279217_75 (sequence is synthesized)
aagtgctgtgattacaggcgtgagccgctgcacctggccgccctgatgtctttctctctgtctgtagccatctctccagccatacgcatgcccatcccctgctgcgatgaccctgggcca

SEQ ID NO: 828186 - DNA, 120 bp, Artificial Sequence
  ENSG00000279217_76 (sequence is synthesized)
gaccctgggccagacctgcgatgccctgatcacaagatatcaggggaaggtggcttgttggagttgggtggtccagggcactcaagtatctcaagaggccactctgtagcaggcaccatt

SEQ ID NO: 828187 - DNA, 120 bp, Artificial Sequence
  ENSG00000279217_77 (sequence is synthesized)
atttgtgtaacattttttctctcggagacacgcaagtcatacctggttgttgtagaaactttgaaaattgtagaaaaacctaatgaacaattggaaatcatccatgagcactgccaagac

SEQ ID NO: 828188 - DNA, 120 bp, Artificial Sequence
  ENSG00000279217_78 (sequence is synthesized)
agcagtagctaggatttattgagtacttactatacattggatattgtgcttgttacatgatttccccagcaaccacactcagtaggtagataattatcattataatctccaatttgggcc

SEQ ID NO: 828189 - DNA, 120 bp, Artificial Sequence
  ENSG00000279217_79 (sequence is synthesized)
catctcaaaaaataaataaataaataaaataatctccaatttgcagttgaggaaatgaaggcctggagaagttaggtgatttctcacgtccacacagctgggaaggggtggagccaggct

SEQ ID NO: 828190 - DNA, 120 bp, Artificial Sequence
  ENSG00000279217_80 (sequence is synthesized)
tccacacagctgggaaggggtggagccaggcttcacacccacctggttctagcggatgcctttagtcaccattcaccacttccctgatgcctgtcacacatgttttagatattttctgtg

SEQ ID NO: 828191 - DNA, 78 bp, Artificial Sequence
  ENSG00000279217_81 (sequence is synthesized)
tccctgatgcctgtcacacatgttttagatattttctgtgcagtaacttttttttttagctggagtttcgctcttgtt

SEQ ID NO: 828192 - DNA, 86 bp, Artificial Sequence
  ENSG00000279217_82 (sequence is synthesized)
gcaattatgttattttataacaacctacttctttcacttacccatttctgggaccaggtggggtggttcatgcctacaatcccagc

SEQ ID NO: 828193 - DNA, 90 bp, Artificial Sequence
  ENSG00000279217_83 (sequence is synthesized)
ggagcccaggagttcaagaccagtccgggcaacatggcgagaccttaatcaatcaatcaatcaatagcagggcatggtggtgtgtacctg

SEQ ID NO: 828194 - DNA, 120 bp, Artificial Sequence
  ENSG00000279217_84 (sequence is synthesized)
accagtccgggcaacatggcgagaccttaatcaatcaatcaatcaatagcagggcatggtggtgtgtacctgtagtctacctatagtctacccaggaggctgaggtgggaggatggcttg

SEQ ID NO: 828195 - DNA, 120 bp, Artificial Sequence
  ENSG00000279217_85 (sequence is synthesized)
ttctatttgcatgttaatctccccaaataaccctatgaaatagttattattatttacatttacaggtgagaaaactgaaggctacagaattaaaagacacgaaaacaaagctcaaagagt

SEQ ID NO: 828196 - DNA, 120 bp, Artificial Sequence
  ENSG00000279217_86 (sequence is synthesized)
gaaatgacttgcccaagggcatgggaagcagtgagggtgggttcaaaggtcagaaaaagctgacgccccaccccctccacccctgcctttcattctcgaggtggaggccatcgtgtgcat

SEQ ID NO: 828197 - DNA, 120 bp, Artificial Sequence
  ENSG00000279217_87 (sequence is synthesized)
agggtagaggaaggcaataacaaataattttcttcagccttccctaaattagatcccgtgtagctggcaactgaggcctggcctgcttgctttctcctcctctctggaagccagggctac

SEQ ID NO: 828198 - DNA, 120 bp, Artificial Sequence
  ENSG00000279217_88 (sequence is synthesized)
tttgtatagggtctgcatgaagctgtccccttccagcagggacacctgcctgtcttgagatggggagtggtcacttcccagcagagaccctgtgctcagcccgtggaggataagagggtg

SEQ ID NO: 828199 - DNA, 120 bp, Artificial Sequence
  ENSG00000279217_89 (sequence is synthesized)
cagggaaggaattccagagctctccaggcctggggaagcgcacggctggacacccctgcttgcccatgaccttgtacaaatccttcctttctctgagtttcaattttctttcttttcttt

SEQ ID NO: 828200 - DNA, 120 bp, Artificial Sequence
  ENSG00000226674_0 (sequence is synthesized)
cctggcctccatcttgaaaacggaaaataaaaacagcagacctatgaaggtcgaaggggaagaaaagctgtatcgattgttgagatctggcgacttgtttaaatttcatcagcctcactt

SEQ ID NO: 828201 - DNA, 120 bp, Artificial Sequence
  ENSG00000226674_1 (sequence is synthesized)
ctatgaactctcaggcctcacgtgtaccagctctctgctctcctttgccttgggacgttccatccctggaagtttccctgcccacatctttgtagagagtccattctccaagcttcagtg

SEQ ID NO: 828202 - DNA, 120 bp, Artificial Sequence
  ENSG00000226674_2 (sequence is synthesized)
tgtcatctgtgaggaccgtgacccacctggtacatcgcctcagggcattcatttcaggctccttctaaatggccaagggtcttcctctgccacccaggctggagtgtgcagcagcatgac

SEQ ID NO: 828203 - DNA, 120 bp, Artificial Sequence
  ENSG00000226674_3 (sequence is synthesized)
cgtggcttactgcagcttcaacctctcaggattaggtaaacctcaggttctcctcctgccttttgctaagtatatgtcttgatgacaagccttctgctgatgagctgtgtttctggaccg

SEQ ID NO: 828204 - DNA, 120 bp, Artificial Sequence
  ENSG00000226674_4 (sequence is synthesized)
aattaacgtgtccctcacttggggtttctcaaggctgcactgatgaggaaactgaaacagaaaatccagagtaaattccaccaggccacacagcaaggtctgatagagccaggagagact

SEQ ID NO: 828205 - DNA, 120 bp, Artificial Sequence
  ENSG00000226674_5 (sequence is synthesized)
ttatgaaatccagactctcacactaatgctctatcagctagacctccatgtgagtctccccaatgtaggtaggaagtgctttccctaaaatgctcataaagcaaatcagagcaatgctgc

SEQ ID NO: 828206 - DNA, 120 bp, Artificial Sequence
  ENSG00000226674_6 (sequence is synthesized)
attccatgtgatttctaatttgaaatgcaaacaattgccaatttgtttgacttgtatttataattatttccttgtgaattactcatcactaaatgctttataaatattttctcttttttt

SEQ ID NO: 828207 - DNA, 120 bp, Artificial Sequence
  ENSG00000226674_7 (sequence is synthesized)
cctcaatgtctatggaatgatcacagcatagaaaatgttggctttcaaggatttattaatatctccttttgaaataacatgtatttgtaagacagaataaaatcactttaaagaaacaaa

SEQ ID NO: 828208 - DNA, 120 bp, Artificial Sequence
  ENSG00000226674_8 (sequence is synthesized)
cttccgagatctacctcctgcaactcagcttctcctgtgctctccttctggactcactctgcctcagcaacactggtccctgttgccccaccaatatgccaggtaaacctcaggttctcc

SEQ ID NO: 828209 - DNA, 120 bp, Artificial Sequence
  ENSG00000226674_9 (sequence is synthesized)
gttctattaggactttactgaagactctaaggaggacctgtatctgttgggatcctcagggcaagccacagaaacaagctttggatactagaagcagaaaatggagatattgaagactat

SEQ ID NO: 828210 - DNA, 120 bp, Artificial Sequence
  ENSG00000226674_10 (sequence is synthesized)
tgtggagtttactgtgagccagagaaccaggctggggggctgtatcacttagaatgagatccaaactcacaccatagttccatccttgaggttgccatgttgctgccacccctcctgcca

SEQ ID NO: 828211 - DNA, 120 bp, Artificial Sequence
  ENSG00000226674_11 (sequence is synthesized)
ccccaccactgaagctttggatgctggattctgggcacagcagggagaagtgttgcttattaccattttagtatgttttctttcaagaccttttcaaaatatacatacgtatttttattt

SEQ ID NO: 828212 - DNA, 120 bp, Artificial Sequence
  ENSG00000226674_12 (sequence is synthesized)
ctattcaaaatgggatacatttttgaaggttagcaatatattgtgaacattttctttccatgctcagaaacatttttctataatgtaatttatagtgatataaactatctcatagaccta

SEQ ID NO: 828213 - DNA, 120 bp, Artificial Sequence
  ENSG00000226674_13 (sequence is synthesized)
tgattaccaactcctaccactgttaaccctcatccaggaacaagcttatgtctttaacattctgagtgggcttcagcatccttgcatatgttcaattcttaaaaacctgttgaaataaaa

SEQ ID NO: 828214 - DNA, 120 bp, Artificial Sequence
  ENSG00000226674_14 (sequence is synthesized)
gtacttcatttctggtatgtttggagagacatctgttttttgcatttggtctttcactctttgtttttctccgggaggattatactttgtttgttcctctcaaactttacccaactgaga

SEQ ID NO: 828215 - DNA, 120 bp, Artificial Sequence
  ENSG00000226674_15 (sequence is synthesized)
gtgctatagagtgctgtgatttaaatatcaacagatttctagggacatatgcactctcagaaatatgtgcgttctcagacctgagtaccctggtgtgggcttcgtggtattttaggaagc

SEQ ID NO: 828216 - DNA, 120 bp, Artificial Sequence
  ENSG00000226674_16 (sequence is synthesized)
tgctgtgatctctaagattatgaaggtatctggaactcaggggaaaaaacatctattttatcacatcattgaaagtagtttcttaccatttattaaacattggcttaaaataatgatttt

SEQ ID NO: 828217 - DNA, 120 bp, Artificial Sequence
  ENSG00000226674_17 (sequence is synthesized)
gccatttttttcctgtcacattgcaaatgcttatctattgctttgactaagtttgcatgcctgcatttcacccttgaaaaagtaaagtgttcagttttttctttttgtagatagtattta

SEQ ID NO: 828218 - DNA, 120 bp, Artificial Sequence
  ENSG00000226674_18 (sequence is synthesized)
gatcacctttatcaatcttaaaataagaaacctaataaaaataactccaaattgcaaggcatctctttaatacatagatactttgtatcttcattttagttgaaaagttaaaattatctg

SEQ ID NO: 828219 - DNA, 120 bp, Artificial Sequence
  ENSG00000226674_19 (sequence is synthesized)
tagagaaagcataagactagatgataccttttaatctattgtgagagatatgtaacatgtcagcagatgacaaaagtaggaactgttttataaacctccaatcatcaaataagtgacatg

SEQ ID NO: 828220 - DNA, 120 bp, Artificial Sequence
  ENSG00000226674_20 (sequence is synthesized)
tttgagtcaatcaatttaagaggttcccagtccactgatgaaaccatttgaagaaaatgtgctgtttgatgttacagaagccaaaagctgtataaatgtgtcatctgtttttcattttaa

SEQ ID NO: 828221 - DNA, 120 bp, Artificial Sequence
  ENSG00000226674_21 (sequence is synthesized)
ttcactgtttcagaagtatttactgtgtattaaaaaatctttttaccctttcaaatcttttggacaacctggaaaaattgagaacagtttaagatctatccataaaagcacattctcagc

SEQ ID NO: 828222 - DNA, 120 bp, Artificial Sequence
  ENSG00000226674_22 (sequence is synthesized)
gtgtttctggaccgatcatggtagaagtcaattaacgtgtccctcacttggggtttctcaagggctggagtgcaatcacacaatcatggctcattgcagcctcaaactcttgggctcaag

SEQ ID NO: 828223 - DNA, 120 bp, Artificial Sequence
  ENSG00000226674_23 (sequence is synthesized)
ctgggactataagcatgcaccaccacgcctggctaagttgttttattatttttgtacagacaaggtcttattatgttgcccagactagtctccaactcctggcctcaagtgatctccctg

SEQ ID NO: 828224 - DNA, 120 bp, Artificial Sequence
  ENSG00000226674_24 (sequence is synthesized)
caccgcaaggactggagaagggcacccttggaaatgcaatgctacatctcaatgggattttccagtacaaagattcttttcaaataacataattgtggatacacaccactcctacagtgc

SEQ ID NO: 828225 - DNA, 120 bp, Artificial Sequence
  ENSG00000226674_25 (sequence is synthesized)
ttttaatttaattttactcaccttactttggctcgagaccctcagtcacctctgttcaggaggcagagcagttctttaccatcaattgtgataggcacggggaaccaggctgagagaatg

SEQ ID NO: 828226 - DNA, 120 bp, Artificial Sequence
  ENSG00000226674_26 (sequence is synthesized)
aagtgcctcctacagctactttgaaaaacacaaagcaaattcgagcgattttcttatttgagttcaaaatgggctgtaaagcagtggagacaactcgcaacatcaacaatccatttggcc

SEQ ID NO: 828227 - DNA, 120 bp, Artificial Sequence
  ENSG00000226674_27 (sequence is synthesized)
gaaattgacaacaaccaattaagagcggtcatcaaagctgatcctcttacaatgacacaagaagttgccaaagaactcaatgttgaccattctttggtcattcagcatttgaagcaaatt

SEQ ID NO: 828228 - DNA, 120 bp, Artificial Sequence
  ENSG00000226674_28 (sequence is synthesized)
gggaaggtgaaaaagcttgatgagtgggtgcctcatgagctgagcgaaaatttttttaaaaatcattgttttgaagcgttgtcttctcttattctacgcaacaacagtgaaccatttctc

SEQ ID NO: 828229 - DNA, 120 bp, Artificial Sequence
  ENSG00000226674_29 (sequence is synthesized)
tatcagattgtgatgtgcaaggaaaagtggattttatatgacaattggtgatgcccagctcagtggttggacagagaagaaactccaaagcacttcccaaaaccaaacttgcaccaaaaa

SEQ ID NO: 828230 - DNA, 120 bp, Artificial Sequence
  ENSG00000226674_30 (sequence is synthesized)
aaggtcatggtcaccatttggtggtctgctgccggtgtaatcgactacagctttctgaaccccagcaaatcattacgtctgaaaagtatgctcagcaaattgatgagatgtactgaaaac

SEQ ID NO: 828231 - DNA, 120 bp, Artificial Sequence
  ENSG00000226674_31 (sequence is synthesized)
ggggtttctcaagggaactgaaaatgaaagaaccaaaatagatatcaacagataattaaaggaacgtttggaagttttttacctcatgcaaacctcaaactctgaaccactactgcctaa

SEQ ID NO: 828232 - DNA, 120 bp, Artificial Sequence
  ENSG00000226674_32 (sequence is synthesized)
aggaaataaatactgtgttatgactttgaaaaagtgaagtggccatgttaggaggcccagatggtaaggagctgagggaggcctccaggaaatggccagcaagaagccggctccctcagc

SEQ ID NO: 828233 - DNA, 120 bp, Artificial Sequence
  ENSG00000226674_33 (sequence is synthesized)
cttgtagctacaagaaaatgaattctgccagcaatctgagtgaacttggaagctgattcttcctctgtcaagcctccagatgagaatctcagtcacagccaacaccttgactgcagtcct

SEQ ID NO: 828234 - DNA, 120 bp, Artificial Sequence
  ENSG00000226674_34 (sequence is synthesized)
ggtcacagaatatcttgaatgcagagctcacacaggttgtgataggctttacttctatcactaactggaaacaaagaaaatctacactgaaggaaaccttttcaagtcgaacttctgtca

SEQ ID NO: 828235 - DNA, 120 bp, Artificial Sequence
  ENSG00000226674_35 (sequence is synthesized)
agcaattggaggagcatgtggttttgtggtcatgtggattcgctatatggaatatgattgaaggatgattataattacagaaattatagagatatgacagagcaagatatggtccctgac

SEQ ID NO: 828236 - DNA, 120 bp, Artificial Sequence
  ENSG00000226674_36 (sequence is synthesized)
tcatggatcttacattagtattggaaagaagcctattaaactctccatcctatcagcttcaatttcagctattagctttactttctactgtctttttcaagtcaagatcaaatggagagc

SEQ ID NO: 828237 - DNA, 120 bp, Artificial Sequence
  ENSG00000226674_37 (sequence is synthesized)
aaagggagtgcacctttcctctgcagttccatcactgttcaacataatcatctctacctacatttcagaacaattctgaatattaataagacaatgtctatgagatgagctcatctggga

SEQ ID NO: 828238 - DNA, 120 bp, Artificial Sequence
  ENSG00000226674_38 (sequence is synthesized)
gctcatctgggaaagcataatataagtgtaagccattataatttattgcttctcaaatgttatataagatattcaactggatatgttattaataaaaaattataataaagagaaatttag

SEQ ID NO: 828239 - DNA, 120 bp, Artificial Sequence
  ENSG00000226674_39 (sequence is synthesized)
ggcattggtcaacagaaagggcccaactctttacaacaactctcgaccacatgtcgcacaaccaacacttcaaaagttgaatgaattgggctatgaagttttgacttatctgtcattcac

SEQ ID NO: 828240 - DNA, 120 bp, Artificial Sequence
  ENSG00000226674_40 (sequence is synthesized)
cttatctgtcattcacctgacctcctgccaactgactaccacatcttcaatcatctcgacagatttttgcagggaaaaagcttctacgatcatcaggatgcagaaaatgctttccaagag

SEQ ID NO: 828241 - DNA, 120 bp, Artificial Sequence
  ENSG00000226674_41 (sequence is synthesized)
gatgcagaaaatgctttccaagagttcatcaaatcccaaagcatggatttttatgttacaggaataaacaaacttatttctcattggtaaaaatatgttgattgtaatggttcctatttt

SEQ ID NO: 828242 - DNA, 120 bp, Artificial Sequence
  ENSG00000226674_42 (sequence is synthesized)
ggattacaggcgtgagcccctgtgcccgccccccccacttctggtatacctttgaataacactttacattttgtggggtgcttttctgttccagttgccagcattaagaaaatgtggtct

SEQ ID NO: 828243 - DNA, 120 bp, Artificial Sequence
  ENSG00000226674_43 (sequence is synthesized)
gcattaagaaaatgtggtcttgtgaatatgattgtgagttggaacttagtagacagattttggctcttccctgattctatctctatgacttgagtaacaatgaccagtggccacaatcaa

SEQ ID NO: 828244 - DNA, 120 bp, Artificial Sequence
  ENSG00000226674_44 (sequence is synthesized)
ggtttcaactctgtaaaacaggtgtgatgttgctaattttgtttgtgtgtgtggtaaaaatcagtattatctcaggctatttgccttaagctttttataagaagaaagccataagtagca

SEQ ID NO: 828245 - DNA, 120 bp, Artificial Sequence
  ENSG00000226674_45 (sequence is synthesized)
tgcaagaagctactggtgatgatcatctaggatgtttgtttctcactctcatgttccctgactaacaaagaaataatgaaattgtccttgagccagaggaatggctggatggtggccaag

SEQ ID NO: 828246 - DNA, 120 bp, Artificial Sequence
  ENSG00000226674_46 (sequence is synthesized)
gatttgggttgaatccccagtcatgtttgacatttgtgttaatcagttgggtttcttgtcacctagagtaatgttgacttggatatgtattgttcagcacaatgaaacaagtaaacattt

SEQ ID NO: 828247 - DNA, 120 bp, Artificial Sequence
  ENSG00000226674_47 (sequence is synthesized)
ttaaaatgttgaacatttagcaaactgacagttataggtcttcatatccaaaggcaatgaagcattgttatatgattaaaaataaacataatttgcattgacaataaataaatatatact

SEQ ID NO: 828248 - DNA, 120 bp, Artificial Sequence
  ENSG00000226674_48 (sequence is synthesized)
catgttgcagtaactggcaaggaagaggtgtgcctctcagctgttcacaatgcagaatcttgaaaaggtcaacatagtagcagtatgacaggccatgtgcacacaatcccctatctcatt

SEQ ID NO: 828249 - DNA, 120 bp, Artificial Sequence
  ENSG00000226674_49 (sequence is synthesized)
gctggtgttgctaaagagcatctggggtaaggaaacatgcatccggtccatccgtcaagagtccatgagaaagccaacaatgtttgcacctgcaggatgaattacatctttggaactgaa

SEQ ID NO: 828250 - DNA, 120 bp, Artificial Sequence
  ENSG00000226674_50 (sequence is synthesized)
tgaactctcagggtcctcgtaagaacttccattttatgttcttgtcttctcatcagtttgagttgtgtctttaacattggagagaaaaacaacttgcaagattttctttcagtatgaacc

SEQ ID NO: 828251 - DNA, 120 bp, Artificial Sequence
  ENSG00000226674_51 (sequence is synthesized)
tatctgcctacaggcattcctttgcactctgggtgtagccctcagtgctgggcttacaaagaagacgacacaaaagcaaccatgaaaagatcttggaagcagagggatctgcagaagtgc

SEQ ID NO: 828252 - DNA, 120 bp, Artificial Sequence
  ENSG00000226674_52 (sequence is synthesized)
ttgcaacactttcagccttaaccagcatcagagacaaaaatcctttctggaatgaggcacccttggaaatgcaatgctacatctcaatgggattttccagtacaaagattcttttcaaat

SEQ ID NO: 828253 - DNA, 120 bp, Artificial Sequence
  ENSG00000226674_53 (sequence is synthesized)
gttgaccctaaagaagcatcagcttggctttgcaccaaagaagtttttagtcaagttggagagagatcactactcaaagaacgcaagagactaatggaagacagaatatattggcagcag

SEQ ID NO: 828254 - DNA, 120 bp, Artificial Sequence
  ENSG00000226674_54 (sequence is synthesized)
atttgatgttcctgtgaaggttctatgacctattttgatatgtagacagtggtaaaatgctcaaagctctttgctacgatatgtaataacaaagggaacagtaaaaaatattctgtttaa

SEQ ID NO: 828255 - DNA, 120 bp, Artificial Sequence
  ENSG00000226674_55 (sequence is synthesized)
ataagccagatcacttttacatgtgatggccaagccatgcaggggaggaggtgctgagcctggttctgttagtaactgagtggtagctgaagaagacaaatctaaccaggcatggcaagt

SEQ ID NO: 828256 - DNA, 120 bp, Artificial Sequence
  ENSG00000226674_56 (sequence is synthesized)
ccgtggatgccatgagagcctgtgcatttagaactagggcacactaacagagatcaaactaagtttttccactaacatcagacctttgcaatttaatgattataaaactttcctaacatt

SEQ ID NO: 828257 - DNA, 120 bp, Artificial Sequence
  ENSG00000226674_57 (sequence is synthesized)
tgcaagtttctaaacatttattttcttttattctgtgcaattcctattaccattgaaattatttaggtcacatatttttgtgttatttaagtaacactcaaagacaaaaccaagaaattc

SEQ ID NO: 828258 - DNA, 120 bp, Artificial Sequence
  ENSG00000226674_58 (sequence is synthesized)
tttttctacttttaaccatcctgattggatagtttatatttatatcaagttctaatctcctaaaatttttagtgtgtttaataatgaatctttgaagaatatgatacacttgtgtaatag

SEQ ID NO: 828259 - DNA, 120 bp, Artificial Sequence
  ENSG00000226674_59 (sequence is synthesized)
tgaatctttgaagaatatgatacacttgtgtaatagctttttcatataataaaattttccaaagtaaataacctgacaaattaaaaaaaactcatacattaaatgtaaagtactattttg

SEQ ID NO: 828260 - DNA, 120 bp, Artificial Sequence
  ENSG00000226674_60 (sequence is synthesized)
attagaactctaacaaatgtttcaggaccatactaagaggctgtaaccattgactgtggtggacgtatcagattgaagccctggggcatggccacatcattatgacaatagtttaagttg

SEQ ID NO: 828261 - DNA, 120 bp, Artificial Sequence
  ENSG00000226674_61 (sequence is synthesized)
aaagcaatgatgcagaagcctaccattaccattatgagccacaagagtacactcatggccttgaatcttcatccactcagagctccatgtgtattcttccaagccattgctctatacccg

SEQ ID NO: 828262 - DNA, 120 bp, Artificial Sequence
  ENSG00000226674_62 (sequence is synthesized)
gaaccgccttttcttgaacacaccacaggatacctcacccatctgttctgtgaagcattccaatgacaataaccacctaccattttgtgctattatacagttatctccttccccttcatc

SEQ ID NO: 828263 - DNA, 120 bp, Artificial Sequence
  ENSG00000226674_63 (sequence is synthesized)
ctgttggtattgtgtatattacttaagatgagcactctagttctttatttgcttgtaaattataagtggtggtgtggtttataaactcatgaaaattatatttcacttgggatgaaactg

SEQ ID NO: 828264 - DNA, 120 bp, Artificial Sequence
  ENSG00000226674_64 (sequence is synthesized)
gtagaaccatttataataacatcatgttgttatgtggtatatatattatatataggtatatatatacaccaatatgaagagtgaattacattgtaggtagggtaatagattagctcaatt

SEQ ID NO: 828265 - DNA, 120 bp, Artificial Sequence
  ENSG00000226674_65 (sequence is synthesized)
gtttagtataacgtcaagctatttgtggttcaggtgtgagccccataggactagttaccttactatttgctatagttgaaaactatagctctacaataagcggctgttttaagatgaaga

SEQ ID NO: 828266 - DNA, 120 bp, Artificial Sequence
  ENSG00000226674_66 (sequence is synthesized)
tggtgttacacgtagtatggcagagacagagtgatatactctaaggaacattgttcagctaatcagacctgggttcaaattccatcaccactgtttacttgctgtgtgcttccaaacaaa

SEQ ID NO: 828267 - DNA, 120 bp, Artificial Sequence
  ENSG00000226674_67 (sequence is synthesized)
cattcacatcatccatcttctgccagcctaacaagcatagcaagaagatatagccccacaaccactttatgcacaaagttagaagcataaaatctcatggaaggagaccgattatctaca

SEQ ID NO: 828268 - DNA, 70 bp, Artificial Sequence
  ENSG00000226674_68 (sequence is synthesized)
cactcagctttctgaaatggtgtcccaccgcaaggactggagaagggctggagtccaatggtgcgatgtc

SEQ ID NO: 828269 - DNA, 120 bp, Artificial Sequence
  ENSG00000226674_69 (sequence is synthesized)
cctcctgaggagatgggactacaggcacccttggaaatgcaatgctacatctcaatgggattttccagtacaaagattcttttcaaataacataattgtggatacacaccactcctacag

SEQ ID NO: 828270 - DNA, 120 bp, Artificial Sequence
  ENSG00000226674_70 (sequence is synthesized)
ttttggctctagcaaaacaagttggaacattcacatcatccaatcttgctttcttttgtatgtttgcaaagaatatatagtacacttccttgatctgtggttcctaaagtgtgattccca

SEQ ID NO: 828271 - DNA, 120 bp, Artificial Sequence
  ENSG00000226674_71 (sequence is synthesized)
caagcatatccacagatgggatgaagagaatgattcagctgcttctcaaaatccctacctcattggcaaggacttttcaactgtggctgcgcctaagacaattttagcaaaaaccatgtg

SEQ ID NO: 828272 - DNA, 120 bp, Artificial Sequence
  ENSG00000226674_72 (sequence is synthesized)
ggaaaaatgtaggaaattgttagtgcccaatatacagacgatagcaatacaaggtgcaatctaaaaaggaagataattaacagccatatgggtaacttcagttcatatttttgcaaagaa

SEQ ID NO: 828273 - DNA, 120 bp, Artificial Sequence
  ENSG00000226674_73 (sequence is synthesized)
ctttgggaatattgactcatggaaatggagcctgtgtaagacacaaatgatacttttgaacatctgccagcaagtatgtcaactacctgtccaagaaaataaagaactattgttgctcca

SEQ ID NO: 828274 - DNA, 120 bp, Artificial Sequence
  ENSG00000226674_74 (sequence is synthesized)
gaaaacggaaaataaaaacagcagacctatgaaggtcgaaggggaagaaaagctgtatcgattgttgagatctggcgacttgtttaaatttcatcagcctcacttctatgaactctcagt

SEQ ID NO: 828275 - DNA, 120 bp, Artificial Sequence
  ENSG00000226674_75 (sequence is synthesized)
tgacgagtgggaagttggaaccatgatgaaatactgccctctagactgatctcaggaggacaattctggggtgaattctatacggtttctcagagggtccccggtagcactgagccccca

SEQ ID NO: 828276 - DNA, 120 bp, Artificial Sequence
  ENSG00000226674_76 (sequence is synthesized)
tttccacagtcatattcagttcaataatatttttcctcctttcctgttttgctttctccagcgcccattgctagttgcttcctggaggaatttcccaaaataaaagtgcctatccacaaa

SEQ ID NO: 828277 - DNA, 120 bp, Artificial Sequence
  ENSG00000226674_77 (sequence is synthesized)
gacaaagagagaacccaggaaaggggcagtgtttttcccctcacaggtgatggagtttttataaagaatgcagcggataatggcaggcttgtcctctgaacagatggtgatggtcttgtt

SEQ ID NO: 828278 - DNA, 120 bp, Artificial Sequence
  ENSG00000226674_78 (sequence is synthesized)
aagagcaagagatggggcaactgagcagagactggagcccggtcaagagaggctttggggaaaatgcctgctcagctgtctgcaatcacctgggtttaaagcaggcaggaaggaagattg

SEQ ID NO: 828279 - DNA, 120 bp, Artificial Sequence
  ENSG00000226674_79 (sequence is synthesized)
gtttggcaggagaactggccctttgatgccttcgataccacagagaaaaattcccatttcttcccattagaagtctgtttactttcctaattaagataaacatgtttctgaaggagttag

SEQ ID NO: 828280 - DNA, 120 bp, Artificial Sequence
  ENSG00000226674_80 (sequence is synthesized)
ctcttatagcatgacatttataaaatcaactatatatacacacaagaatgtttgccaggaatttgggctgatggtgattgtatgaagcattttatagaaatatttttaaatagttgcctt

SEQ ID NO: 828281 - DNA, 120 bp, Artificial Sequence
  ENSG00000226674_81 (sequence is synthesized)
atttaaaaatgagcgactttcattccctccagtcaattaaatatctaatttcaactctcggagataataactgaagtagtttttttaataaatgaatgaacagttagaaaactgttaaac

SEQ ID NO: 828282 - DNA, 120 bp, Artificial Sequence
  ENSG00000226674_82 (sequence is synthesized)
acatagccctgaagcatgaaaaatatattcgttgaacagctttattcttttattgttaatttacttcagagaatatccactcgtgtaattttcaataaagtactcttattttgaagtctc

SEQ ID NO: 828283 - DNA, 120 bp, Artificial Sequence
  ENSG00000226674_83 (sequence is synthesized)
gtgatattaatcatattacatatgaacttttaaaatcaagtaagaaggctgtcatttgactaagtagctgctgatttttaaacagaatctgtaaatatatatctatatgctgaaagcttt

SEQ ID NO: 828284 - DNA, 120 bp, Artificial Sequence
  ENSG00000226674_84 (sequence is synthesized)
tagttcaatcaaaaattaaaggtttttttaatacagtataaatctgaaaggtatttctaggttcagacaaaaatatctggaaggatgttgcctttaaaaataaagccttttttgtaggac

SEQ ID NO: 828285 - DNA, 120 bp, Artificial Sequence
  ENSG00000226674_85 (sequence is synthesized)
cagaggggaagtgaatgaccaactgggtaggctgatgaatattttcctggtaaatgcataactttccccacaactgtgatgctttatcctttgacattaagaatgctgtttgcagaagta

SEQ ID NO: 828286 - DNA, 120 bp, Artificial Sequence
  ENSG00000226674_86 (sequence is synthesized)
acattcctttgaacactcagctttctgaaatggtgtcccaccgcaaggactggagaaggcgcccattgctagttgcttcctggaggaatttcccaaaataaaagtgcctatccacaaatc

SEQ ID NO: 828287 - DNA, 120 bp, Artificial Sequence
  ENSG00000226674_87 (sequence is synthesized)
cctcagggcattcatttcaggctccttctaaatggccaaggatcttggaagcagagggatctgcagaagtgcttgcaacactttcagccttaaccagcatcagagacaaaaatcctttct

SEQ ID NO: 828288 - DNA, 120 bp, Artificial Sequence
  ENSG00000226674_88 (sequence is synthesized)
agacaagagaattccattttgatacacatgtcatcagagtgtcataagccagtggtgtattattgctttggagctttgttggcagttcaagttttgttcaggtgtcgaccacaacaacaa

SEQ ID NO: 828289 - DNA, 120 bp, Artificial Sequence
  ENSG00000226674_89 (sequence is synthesized)
cactcagctttctgaaatggtgtcccaccgcaaggactggagaagggccatgagagaagcagtaccttataatggttccttgttcaaagcactcaatattcctaggatgtggtctcccag

SEQ ID NO: 828290 - DNA, 120 bp, Artificial Sequence
  ENSG00000226674_90 (sequence is synthesized)
acattctacagagtgagcaggtgaaggaaagaaagaaaaggtaaaggatattcacgtgaaattaagagacagagtatttcattgggatgaaaagagagccattaaaaggaataataaatt

SEQ ID NO: 828291 - DNA, 120 bp, Artificial Sequence
  ENSG00000226674_91 (sequence is synthesized)
tcaggacagctcacagtatggcagctgacattctacagagtgagcaggtgaaggaaagaaagaaaagttttcaagattgttttggctctagcaaaacaagttggaacattcacatcatcc

SEQ ID NO: 828292 - DNA, 120 bp, Artificial Sequence
  ENSG00000226674_92 (sequence is synthesized)
ttctggaccactgaagcacaaccacactttggagccagaagaggagctgaaatgtcaattggagaggactttcctgctctaaaaggtgaggaagacagcacaagtaacttgccaaagata

SEQ ID NO: 828293 - DNA, 120 bp, Artificial Sequence
  ENSG00000226674_93 (sequence is synthesized)
agtggctaataagtggcagagcgagggtttaaagcaggcatgaaggtgctgcagcccatgcacttagccccaacatcatgctgctctctgactcaccagctaaccaagtaaataaacgac

SEQ ID NO: 828294 - DNA, 120 bp, Artificial Sequence
  ENSG00000226674_94 (sequence is synthesized)
agtgatgaggtaaataaacaggatgaggtaaataaagaggcttacacagtgctctaaaaggatgctttgaaggaagggaagatcccaacgaaccagccatgagaagaaccctttacagag

SEQ ID NO: 828295 - DNA, 120 bp, Artificial Sequence
  ENSG00000226674_95 (sequence is synthesized)
ggaataacaagtggcaaagcttcccaagtgagggtggggaagaacctgatgggttttggaactcaaagtttcttcctctaacgttcaccaatttaatctttccctacatagagtaaattg

SEQ ID NO: 828296 - DNA, 120 bp, Artificial Sequence
  ENSG00000226674_96 (sequence is synthesized)
agttcccctgctattaacatttgttttgtggataagttagtctttttctttttaagagtattatttaaaccattgatcactaatttcataagcaaacctttgccttttaataaagccttt

SEQ ID NO: 828297 - DNA, 120 bp, Artificial Sequence
  ENSG00000226674_97 (sequence is synthesized)
agcagcatcaggatcatctggaaacttgatagaaatgtaaattctacagtccctccttggagctacagattcagaaattctgaagtttaagtccagcagttggttataataagctctcta

SEQ ID NO: 828298 - DNA, 120 bp, Artificial Sequence
  ENSG00000226674_98 (sequence is synthesized)
gtaagtatactgaagatgtgccaaaacattagggcaaaaattcagttcccatggcatacaagcaggaacccaaccatttgcagcaataaataaaatttttgtagactacgagattataaa

SEQ ID NO: 828299 - DNA, 120 bp, Artificial Sequence
  ENSG00000226674_99 (sequence is synthesized)
gttgtccatgagaaaatattactagactgagagattcttcttatttaattctccctccaacgccatccttcccttgcaatgaacgcccaatcaccgttactttttttctcactatttaaa

SEQ ID NO: 828300 - DNA, 120 bp, Artificial Sequence
  ENSG00000226674_100 (sequence is synthesized)
aacctctctcttgcccacagagttgcttttttaaaagatccctctcttttcctagatgctcttctttcctcttttctctgccctcaccctggccacaccctcctgcctgggtccatccgg

SEQ ID NO: 828301 - DNA, 120 bp, Artificial Sequence
  ENSG00000226674_101 (sequence is synthesized)
tcctacctcttgacaatgctaatttcctcttctcagtttggctactaaattttacactatgccataaacaggctacttgtgatgcctctggttattcgtaatgcatagccaaaaatacac

SEQ ID NO: 828302 - DNA, 120 bp, Artificial Sequence
  ENSG00000226674_102 (sequence is synthesized)
taagtgccaccactccttaattcactgatttctagccagaagcagggagagaggaaaaatatcagtgctttactttaaagccattgtcttccattggttttcattaaagggacaggagaa

SEQ ID NO: 828303 - DNA, 120 bp, Artificial Sequence
  ENSG00000226674_103 (sequence is synthesized)
ttatatgtaaaatgtaataatcttcaggttttcctgagcgttttaacaagccacgttcaggcagtagggttggaaagtgatgagggaaaacgacaagggtgttgaaagtccctaaacggg

SEQ ID NO: 828304 - DNA, 120 bp, Artificial Sequence
  ENSG00000226674_104 (sequence is synthesized)
atcctgtaatttctagaaaagaaatggttctgcaaacaggagacatgattacataggcttaattaacagttcaaagtattggggaggacttatcatggtagcacgcatgtttctcgttct

SEQ ID NO: 828305 - DNA, 120 bp, Artificial Sequence
  ENSG00000226674_105 (sequence is synthesized)
ttaatgagtaaatgacccatttgagtgcatgagcacatatcagaagcacatggcgatgaagaagtgtggtggtggtagatctgatcaaaggttttcaaaactgactccaagtatttgatg

SEQ ID NO: 828306 - DNA, 120 bp, Artificial Sequence
  ENSG00000226674_106 (sequence is synthesized)
aagaagattaacatggagacaatttaccaaacaaatacagcataaagagccaagagaccttctaagggacttcaaggctccagcttgcccacataaagaatatcattaaacagaaagaaa

SEQ ID NO: 828307 - DNA, 120 bp, Artificial Sequence
  ENSG00000226674_107 (sequence is synthesized)
agcctaagtgagattgcaccttcaactggcatcactccaccttacaggatcctgaaagctttcaaatccacctcaagcccaggcagtgtcaaagaaggagaggaattgaagaagcaaaaa

SEQ ID NO: 828308 - DNA, 120 bp, Artificial Sequence
  ENSG00000226674_108 (sequence is synthesized)
aattatgcagttgaaaacaagatcatcacacctgtacaagaaaaggcatgcaagcccaaaacatctgcttggatccacctgccaggcacctgttttgctgtttcaatgccatttgattgc

SEQ ID NO: 828309 - DNA, 120 bp, Artificial Sequence
  ENSG00000226674_109 (sequence is synthesized)
tggagatgtagaggctcttgtgaggtaatgagtgattttacattatgcatgattgaaaacaggtgttctaatgctgcacaattctatgcatgaataattcagtttgtttagagcaagatc

SEQ ID NO: 828310 - DNA, 120 bp, Artificial Sequence
  ENSG00000226674_110 (sequence is synthesized)
tttaaaagaagtactgcatgggctttattatttctataaacacgaaggttattttttttaaagtatgacgattgttcctttgcagccagcttgtttatggcaatttttgtgtaattttat

SEQ ID NO: 828311 - DNA, 120 bp, Artificial Sequence
  ENSG00000226674_111 (sequence is synthesized)
ggatgaggaataatatcctgaaaggtaaaattgatcacacttaaaatatgtaagaagtaaaattgaaaggtctgttagcaagaggaaaacagtattaaaattcaatgttctaagtaaaaa

SEQ ID NO: 828312 - DNA, 120 bp, Artificial Sequence
  ENSG00000226674_112 (sequence is synthesized)
aatgctttaatgaacatccttgcatttatattttatacaattttagaagtggaattactggttcaaaatacatggtgatttttaattcttctgttgaatattgacaaattgcaatcctga

SEQ ID NO: 828313 - DNA, 120 bp, Artificial Sequence
  ENSG00000226674_113 (sequence is synthesized)
gagttatcttgaaggatagagtacatgcccagggttcttttttaagaaataatttgtaatgtgaaacagaataggctaaatgttttttattctcttagtcctactctgtcattctgcaga

SEQ ID NO: 828314 - DNA, 120 bp, Artificial Sequence
  ENSG00000226674_114 (sequence is synthesized)
gtttcacttatttggattcaaattctaattccagcctacctctctttttatataattgttaggaggattaaattagatgcataaaattgctgcttactacatacattgcacaaactaaaa

SEQ ID NO: 828315 - DNA, 81 bp, Artificial Sequence
  ENSG00000226674_115 (sequence is synthesized)
ataaaattgctgcttactacatacattgcacaaactaaaaacttttcaaaggttaactgtttttctggtttatttttaaga

SEQ ID NO: 828316 - DNA, 120 bp, Artificial Sequence
  ENSG00000226674_116 (sequence is synthesized)
gtagctaggactacaggcacgtgccaccatacccagctatttttttaaaaatacatttttgttgaggctgggtcccctttgttgtccaggctggtcttaagctcctggcctcaagcaatc

SEQ ID NO: 828317 - DNA, 120 bp, Artificial Sequence
  ENSG00000226674_117 (sequence is synthesized)
ggtcttaagctcctggcctcaagcaatccttccacttctacctcccaaagtgttgagattagaggtgtgagccactccacctgacccaaaggttaactattattattgttattattagtc

SEQ ID NO: 828318 - DNA, 120 bp, Artificial Sequence
  ENSG00000226674_118 (sequence is synthesized)
tgtttttttccattcatttcctcattagtcaacttttattgtttcaatgttattttattgtttttcaaagactccttatagtcacaatatgtacataataaattttaccctttaaggaca

SEQ ID NO: 828319 - DNA, 120 bp, Artificial Sequence
  ENSG00000226674_119 (sequence is synthesized)
ttcattcccagtgaaaatgctttggcaattttgagtacaatttaaatattttcttcattattttgcatttcagttttagacatgctttatctttattctgttataaaactttaattaaga

SEQ ID NO: 828320 - DNA, 120 bp, Artificial Sequence
  ENSG00000226674_120 (sequence is synthesized)
cttccaactcttatatactacctcagatatcttctagcttttataccagagagatgataatctgtaaataaatatttaaatgtactagaaattcagctattaaaggactattatgaagac

SEQ ID NO: 828321 - DNA, 120 bp, Artificial Sequence
  ENSG00000226674_121 (sequence is synthesized)
aaatggaattgccagcatgctaaagatacaccattcagttctcatcccactttgcatagcttggaatctatgatcctgcaaatatcttttaactgcattttggatcagagggaaacagac

SEQ ID NO: 828322 - DNA, 120 bp, Artificial Sequence
  ENSG00000226674_122 (sequence is synthesized)
aggcctcaagaatttagtttttaattccacattatttgcctcagtgccatgaatatccctaggtttcctgaggcaaaaatacagaaaaaaaatccacagaaagagtgacacacagagaga

SEQ ID NO: 828323 - DNA, 120 bp, Artificial Sequence
  ENSG00000226674_123 (sequence is synthesized)
atataattaggtagccccaattggtgagggtcaattattcatgtgtatacaaatttttatctcaccctctgaatacctatttatgggatcaaagttctatttcatattctcaaaatacat

SEQ ID NO: 828324 - DNA, 120 bp, Artificial Sequence
  ENSG00000226674_124 (sequence is synthesized)
ctcagctttctgaaatggtgtcccaccgcaaggactggagaaggtattttgcagaaggtagaacttgtgaacaatgtggctgtttagctgaagctattttcaagcaaagtgttgaaggta

SEQ ID NO: 828325 - DNA, 120 bp, Artificial Sequence
  ENSG00000226674_125 (sequence is synthesized)
gaccgtggcttactgcagcttcaacctctcaggattagatataggatattgccatgttgttcggctgctctcaagctcctgggtgcaagcaatccatttaccttggcctcccaaagtgct

SEQ ID NO: 828326 - DNA, 120 bp, Artificial Sequence
  ENSG00000226674_126 (sequence is synthesized)
ggctttgcctcctatgggcgccttgtgagcagcagatccgacttcctcctcaaaccaagttatcctgaaaacacccaagcagaggaagcattttttcaccatgacatgggaaagggccac

SEQ ID NO: 828327 - DNA, 70 bp, Artificial Sequence
  ENSG00000226674_127 (sequence is synthesized)
agaggaagcattttttcaccatgacatgggaaagggccacagggatccaaatggaaacggacatttcatc

SEQ ID NO: 828328 - DNA, 120 bp, Artificial Sequence
  ENSG00000226674_128 (sequence is synthesized)
caagtgatttctcataaactggaaaacattattcccactgatattcttaaaaacatttaggattaaaaaatgtattttaaattcttcttgacagaaatcatttattgcaattacattgcc

SEQ ID NO: 828329 - DNA, 120 bp, Artificial Sequence
  ENSG00000226674_129 (sequence is synthesized)
aattcatatatatattacatatatgtcaccttgacttatagtaacctgaaggggaaatttgtaggtttagcaaatcccttcgagtaacacccacagaactgaaatcttattccatttctt

SEQ ID NO: 828330 - DNA, 120 bp, Artificial Sequence
  ENSG00000226674_130 (sequence is synthesized)
ggtggtcttctaccaatccagtcctcctgaggaccataaaaactattggttcctctcctaaactgctgtaaaatatatcctgtgagacccaggggaaaatctttctgaggttgagcattc

SEQ ID NO: 828331 - DNA, 120 bp, Artificial Sequence
  ENSG00000226674_131 (sequence is synthesized)
tcataattaaggatataaaaaatagagttcagaatgtgagtgaaatgtaactgaaaaggaaagccttgattttacatataaaatatctttaccagatgggtgaagtaaggtaacttaaga

SEQ ID NO: 828332 - DNA, 120 bp, Artificial Sequence
  ENSG00000226674_132 (sequence is synthesized)
caatacttaaaattcaataacaatgatgaaactatgaaatacaaaacttctggcacccataagctagttcctagaaagaaggttatcatatattgttaatgtgttcacacacttaacaaa

SEQ ID NO: 828333 - DNA, 120 bp, Artificial Sequence
  ENSG00000226674_133 (sequence is synthesized)
tattaatgtgttcattacatttaaggcatgagaacttacacatcattcaatggtgatattaataataattcagtaatcattaatgatgtacatgctgttaataaccacagggcaagttta

SEQ ID NO: 828334 - DNA, 120 bp, Artificial Sequence
  ENSG00000226674_134 (sequence is synthesized)
tttttctgttttctctgagttcacttgactttccctaatttctgaagaattcattcttttctttgtgtgctaagaaagaaaggcattaatatttatttaattttagtcattcatttaaat

SEQ ID NO: 828335 - DNA, 120 bp, Artificial Sequence
  ENSG00000226674_135 (sequence is synthesized)
atagtctatcttgttctaaaatgtatttatggccaacatgtttctatttgttgtcaagaattctttaataatttgtgtatttttctagcagtattgtcttccatttttccctccactcat

SEQ ID NO: 828336 - DNA, 120 bp, Artificial Sequence
  ENSG00000226674_136 (sequence is synthesized)
tgggaaaaattgctgatttctttctttcccttcctcaaagtcatcaaatatagaacacaatcccttgtgtgctcaataaaatatccctatggaattcaaagtctttgataacatttaaat

SEQ ID NO: 828337 - DNA, 120 bp, Artificial Sequence
  ENSG00000226674_137 (sequence is synthesized)
ttggtcttgggttgcagtgacatagacttagttatcacattggcactcgcttaattaaacctttctgcatgattgaaaaccctggttccaatgtcttgagttctgagatctgtttcagca

SEQ ID NO: 828338 - DNA, 120 bp, Artificial Sequence
  ENSG00000226674_138 (sequence is synthesized)
gaaaaagcccatttttttgttatgcattcaaggcttgtgttctttaactgtattctggagagaagggaaggcattcacagtttttgagtatctaccatatgaattattttttttcttagt

SEQ ID NO: 828339 - DNA, 120 bp, Artificial Sequence
  ENSG00000226674_139 (sequence is synthesized)
aatcctcacagtcaccttttgttttattaccttgtccattttaagaatgtgtaaaaaagtgtaatgctaattagtaaagctgagattcaaatccagcttcaccttcattttttcaaacag

SEQ ID NO: 828340 - DNA, 120 bp, Artificial Sequence
  ENSG00000226674_140 (sequence is synthesized)
caaacatgtatcatatgccttattgtataagaaaagttgtcctaagttgtcctaagttatagaagtgctatagtggtagaattgattgcaaagttgcttcatattctgcaatactgttgc

SEQ ID NO: 828341 - DNA, 120 bp, Artificial Sequence
  ENSG00000226674_141 (sequence is synthesized)
tgaaactattttaggtatgtccttggtatttctcaaatattagaattctaatgtagtaaaatcaaatttaatttgcaactgaatcatgcacaaactaaacagcagcaaacaaaaatacac

SEQ ID NO: 828342 - DNA, 120 bp, Artificial Sequence
  ENSG00000226674_142 (sequence is synthesized)
tgatcgtgtctacactggcatggtcattaacagtgacaaggtcttcatgtagtctggtttagtctgagaatctgcagcctggaatattcatctggactcaaagcaaatactcagctggta

SEQ ID NO: 828343 - DNA, 120 bp, Artificial Sequence
  ENSG00000226674_143 (sequence is synthesized)
tgttccagtacacccatagccagaggtagattttcatgaaactgatcatatgaaacttatttatacttaggatcctggtagaggccctagtaataatcttttttcctgtttttttctttt

SEQ ID NO: 828344 - DNA, 120 bp, Artificial Sequence
  ENSG00000226674_144 (sequence is synthesized)
ctttatttgtgaaagtaagacaatttgtatttattttcttcatggacatattccaaattgtataaatgttagtctgaacaaatcatttatccatgtctagttgtattaattttaaaaata

SEQ ID NO: 828345 - DNA, 120 bp, Artificial Sequence
  ENSG00000226674_145 (sequence is synthesized)
ttgacctacttatataactggttaattagtcctcaggcattatccctacactctagctccaagggcttctccttagaaatcatctggatatctttatgatccagcaacggaaagatcata

SEQ ID NO: 828346 - DNA, 120 bp, Artificial Sequence
  ENSG00000226674_146 (sequence is synthesized)
tcagcacagcagggagactgcaggactgtgccccaggtccaagggtggcatctgtttggattggttgttacatgtgctgttatcagtggttaaatattttgaatatcaccccaagtaaac

SEQ ID NO: 828347 - DNA, 120 bp, Artificial Sequence
  ENSG00000226674_147 (sequence is synthesized)
ctgaaaatctaactaaatttcaaaactctcatagctattgaaggacactcttaaagcaactccaactattttgtcaggatatattattcatatgtagaatagctgtatatgtgtgcatat

SEQ ID NO: 828348 - DNA, 120 bp, Artificial Sequence
  ENSG00000226674_148 (sequence is synthesized)
tgtgtgcatgtgtgtgtgtgtgtgtgtgtatgagtagaatagtcctaaaggaatgttcaacattaaacataaaatgccaaggaatcttctgaggtattggtattttctgtttcttatctg

SEQ ID NO: 828349 - DNA, 120 bp, Artificial Sequence
  ENSG00000226674_149 (sequence is synthesized)
ttctgtttcttatctgtgtgctgattatagaggtatgttaagtttgtgaaaattcagagagctatacaattatgtgcaattttggcattacattatcattaaatacaaagtttaaaaaaa

SEQ ID NO: 828350 - DNA, 120 bp, Artificial Sequence
  ENSG00000226674_150 (sequence is synthesized)
gaggctttaggcagccccaagaaaatatcaatttctatgatttttataaacttacactttggaaaggttggcaaattgatagacaatgaataaacgcatttagaattcaaagttgacatt

SEQ ID NO: 828351 - DNA, 120 bp, Artificial Sequence
  ENSG00000226674_151 (sequence is synthesized)
gacaagtgagtttggaaatgacactgagggatggggaaacaggactgctgatgaagctgaccatcctcaagccagctgccatattgggagccatccttcagaaaggcctacttggccagc

SEQ ID NO: 828352 - DNA, 120 bp, Artificial Sequence
  ENSG00000226674_152 (sequence is synthesized)
aactgagggaagcttcaagccagtggccaatgagaaactaaggccctcatgccaacagcttgaggataattgaatcctgccagccaccatatgagagacttagaagtggatccttcccgg

SEQ ID NO: 828353 - DNA, 120 bp, Artificial Sequence
  ENSG00000226674_153 (sequence is synthesized)
tagcgccttcagaagacactgcaaccttgtgggaaatctcaggcagagacatccatctaagctgcacctggatatgcatgtgacagaagataatatgacaaatgttgttaaagccactaa

SEQ ID NO: 828354 - DNA, 120 bp, Artificial Sequence
  ENSG00000226674_154 (sequence is synthesized)
aattttagagttatttgttgtgcaataatagataacttatacagctgtggtgccaggagttgggtttgaaacccctgaaactttctatattttctacattaagaagtaatatctcttaca

SEQ ID NO: 828355 - DNA, 120 bp, Artificial Sequence
  ENSG00000226674_155 (sequence is synthesized)
cagctttctgaaatggtgtcccaccgcaaggactggagaaggggaaaagagaaggttttgtcccttcagtttccataaatgagaagcaactgtcacccaccaaaactccataccaatgga

SEQ ID NO: 828356 - DNA, 120 bp, Artificial Sequence
  ENSG00000226674_156 (sequence is synthesized)
taaaaagcactgtcatagagtaagcactgccaaatccacagatattcattgaatggctaccagacataagatactatgtacactgattagaaaagtaaatacataaagcagatctcatga

SEQ ID NO: 828357 - DNA, 120 bp, Artificial Sequence
  ENSG00000226674_157 (sequence is synthesized)
caaaagagttctttagaaattctctgatgagtcaaaattccaaggttctttcccatgttggcttgtgtggttccctaatattgctttgggttaggtcagactgataagggatctctcact

SEQ ID NO: 828358 - DNA, 120 bp, Artificial Sequence
  ENSG00000226674_158 (sequence is synthesized)
aaaatgttcctacaatcctctcagttgtcaaccggttttttgaattcaggatttctccaaaatcttatcccatcaggtcatttttcatttctcactgatccctgagctgagctgcacgtt

SEQ ID NO: 828359 - DNA, 120 bp, Artificial Sequence
  ENSG00000226674_159 (sequence is synthesized)
gtaatcctcttactttggcctcccaagtagcagggactacacatgtgtattaccatgcatggctaattttttgccttttttgtagatataggatattgccatgttgttcggctgctctca

SEQ ID NO: 828360 - DNA, 85 bp, Artificial Sequence
  ENSG00000226674_160 (sequence is synthesized)
ttgaaagtatatttgttaatttaactgtattagttaattttcaaatggtctccatttttctcttgatctactagaggcatcaata

SEQ ID NO: 828361 - DNA, 120 bp, Artificial Sequence
  ENSG00000226674_161 (sequence is synthesized)
tggtctccatttttctcttgatctactagaggcatcaataacagaacagtgttagtcctctataaaaaactgtttctgtacatttttaacattatgtatttgattccattttcttagcct

SEQ ID NO: 828362 - DNA, 120 bp, Artificial Sequence
  ENSG00000226674_162 (sequence is synthesized)
ataaagatttgtggtgaccttttcactactttatttgaaagtatactttttctgtataaatggctttttgtaattggattgcttttcctgcaatatgcttttggtttaaattaatatttt

SEQ ID NO: 828363 - DNA, 120 bp, Artificial Sequence
  ENSG00000226674_163 (sequence is synthesized)
ctcatacacccttttttctgatctccctttcccattctacacttgtgtgctgaatctgtttagcattatagttagtacacttacacgtccactaaaaagtggaaattaatttaattacca

SEQ ID NO: 828364 - DNA, 120 bp, Artificial Sequence
  ENSG00000226674_164 (sequence is synthesized)
ccaaagccaagttacctttccactcatggttctaaagattactcaactgtgtaaatcatctgtgccacatggaataactcaaagtaagttctttcaccccctactcattctaagtacacc

SEQ ID NO: 828365 - DNA, 120 bp, Artificial Sequence
  ENSG00000226674_165 (sequence is synthesized)
aaataaaactctgcctcttttggagagttcatacactgttcagagaaggctgtgaggtatttatgatatctaatccagaaggaactcaagtgatgtttgttttagaaatagaaagcaaag

SEQ ID NO: 828366 - DNA, 120 bp, Artificial Sequence
  ENSG00000226674_166 (sequence is synthesized)
aatgattatgctgcaaatattatcatgaagacatttataaatatattacaaatgcatgtttcccgccaaataattgacaaaacactattacttgccttaaaaataatgcacaattaatga

SEQ ID NO: 828367 - DNA, 120 bp, Artificial Sequence
  ENSG00000226674_167 (sequence is synthesized)
ctatttctagttgaatttgggcttgttggaaaactgtctcgagtatttgggcagtgagttttcaccacgcttcctaagtgaaagcagtttgctgaataatgtcaatatagcaatgttagt

SEQ ID NO: 828368 - DNA, 120 bp, Artificial Sequence
  ENSG00000226674_168 (sequence is synthesized)
ggtattgctggcagaggaaaaatgctttttactctcattctggacttgagcaggagataaagataaattcaaaagttttattggtacttcggaagtgctatacttgtcctgatttgagca

SEQ ID NO: 828369 - DNA, 120 bp, Artificial Sequence
  ENSG00000226674_169 (sequence is synthesized)
gcatggatgattgatggcaaagaggctaggttccagtcccagctggtggtgaaaccttgggcaaatgattgatcttccctaagcctcagttttctcatctgtaagatggagtaagtcttc

SEQ ID NO: 828370 - DNA, 120 bp, Artificial Sequence
  ENSG00000226674_170 (sequence is synthesized)
tgatggaatcactgtataaacttactgcaaaaagaagatacttttctccttccatctttaacctcttaaaaaaattcctctggtgcaatgattataacataaaatgaaacactaatgaaa

SEQ ID NO: 828371 - DNA, 120 bp, Artificial Sequence
  ENSG00000226674_171 (sequence is synthesized)
tgactgcagtccttagcagaggactctgccaagctgtgccaggactcctgacctgcagaaattgtgaggagacccacaaagtacttaagataattgtttcaatgaaggtgctaccagctt

SEQ ID NO: 828372 - DNA, 120 bp, Artificial Sequence
  ENSG00000226674_172 (sequence is synthesized)
ggactaaaaaggacagagtacatgtgaaaggaggctgtcaaactcccaaaattctactggcaggaaatactgataaaactactcagctgctaccttttatgaaaaaggaagggtgactca

SEQ ID NO: 828373 - DNA, 120 bp, Artificial Sequence
  ENSG00000226674_173 (sequence is synthesized)
gaaagcagaaccaagaactaagaaggcggagcctagagccgcatggaattatccttatgtcttgaaacctcttccagaaatcaaacctttgcctggctggatatcacggctgccatggag

SEQ ID NO: 828374 - DNA, 120 bp, Artificial Sequence
  ENSG00000226674_174 (sequence is synthesized)
cagtgacttccttttatctttcatttcccccctttttgaactggactgtctatagatgttatttttggtctgtcccacgaatttatattgagtttgttgaaggcagataacttgtgtctt

SEQ ID NO: 828375 - DNA, 120 bp, Artificial Sequence
  ENSG00000226674_175 (sequence is synthesized)
tagtttcacaggatcacagatggagaggaatcgtgcctcaggagctagctatacttaacagattatcgccagaaacctcatttttacctagacctgatttaaatgatgagattttgaatg

SEQ ID NO: 828376 - DNA, 120 bp, Artificial Sequence
  ENSG00000226674_176 (sequence is synthesized)
ttgagctggttctataatgggatgagactcaggaaatttgggagggggtgaatttattttgcatgtgagagagacattaatcgttggtggctggagagtagactgcagtagacagaagct

SEQ ID NO: 828377 - DNA, 120 bp, Artificial Sequence
  ENSG00000226674_177 (sequence is synthesized)
aaaatggccctgaaggtcttcactttcatgcccctgtataatcccttcccttagagtgtgggtagggcctgtaatttgcttctaattaatagaatatatacaaggttatagaacatcact

SEQ ID NO: 828378 - DNA, 120 bp, Artificial Sequence
  ENSG00000226674_178 (sequence is synthesized)
cccaagataatgttacattatataggaactgtcttgctggaaatctctctatgatgctgattttgcataaacacgctgccgtgagtcttagagtcacatgaaaatgaattctttcaacat

SEQ ID NO: 828379 - DNA, 120 bp, Artificial Sequence
  ENSG00000226674_179 (sequence is synthesized)
aatacctgtttgtttgttaatctctttttgtgtcctctcacctatacatggacatgttgtcttcaaggtcaagagtttgtaagcttctgaaattagaggttatggcagtcatctctactg

SEQ ID NO: 828380 - DNA, 120 bp, Artificial Sequence
  ENSG00000226674_180 (sequence is synthesized)
tctcctgacacttcctggggtaggactggtactcagatgcatgagtaaatgaaagtcagggttaacttcttcaaaaacccaaatcttttttctctactaagcaagttagtttattcttta

SEQ ID NO: 828381 - DNA, 120 bp, Artificial Sequence
  ENSG00000226674_181 (sequence is synthesized)
cactggctcttttcaagcttataagatgggtgccctagatccagatatacaataaagataaaatgatgtagagcagaaaatgagaaactatttctatttactgtttctttttatcagtaa

SEQ ID NO: 828382 - DNA, 120 bp, Artificial Sequence
  ENSG00000226674_182 (sequence is synthesized)
ggaaacatttcccagagacccctaagataatcctttcatatatctcattggccagtcctgggtcacatgcccaccatataattattccctggcaagcagattggtaaaacaatcgcaacc

SEQ ID NO: 828383 - DNA, 120 bp, Artificial Sequence
  ENSG00000226674_183 (sequence is synthesized)
tgctaagaccagcgatgatttttctgagttgctggggaagaagtggacacacgttaacaaaatttagatctaacaacatgaggaaaaaggggaatttgctgttgcttggacaaacaatag

SEQ ID NO: 828384 - DNA, 120 bp, Artificial Sequence
  ENSG00000226674_184 (sequence is synthesized)
tatcttcttcaagaacatagcacaattttacaaataattgtattataaaatcactgaaaaatccataaatatttattgagcaactcctatgggtagtattctgggagctagaggtgcaat

SEQ ID NO: 828385 - DNA, 120 bp, Artificial Sequence
  ENSG00000226674_185 (sequence is synthesized)
agtgaaaagtagagtttctttttcctacttcaaatgagtaatgtcacatgctgatagtataaaagataaaattcataatggtaaagagtgacttggtgagggtgtggcagggctgtttta

SEQ ID NO: 828386 - DNA, 120 bp, Artificial Sequence
  ENSG00000226674_186 (sequence is synthesized)
tgtaccctggctatgtgtacatccatggaagaattgcaggtaacacaactgacctgaattcacacttaactaaataaagagataccccattgtgcccctgtggccaatcccttgttacac

SEQ ID NO: 828387 - DNA, 76 bp, Artificial Sequence
  ENSG00000226674_187 (sequence is synthesized)
ttctgctgatgagctgtgtttctggaccgatcatggtagaagtcaattaacgtgtccctcacttggggtttctcaa

SEQ ID NO: 828388 - DNA, 120 bp, Artificial Sequence
  ENSG00000226674_188 (sequence is synthesized)
gcacccttggaaatgcaatgctacatctcaatgggattttccagtacaaagattcttttcaaataacataattgtggatacacaccactcctacagtgttagtcatgctgctgaaacccc

SEQ ID NO: 828389 - DNA, 120 bp, Artificial Sequence
  ENSG00000226674_189 (sequence is synthesized)
atgaaatcctcgttgagctcattgaaagcctgggtataattagtttgtaaacatttctggaattcaaaacttttttttttttttaaggaaaagaatgatctgaatatatagcaaatgaaa

SEQ ID NO: 828390 - DNA, 120 bp, Artificial Sequence
  ENSG00000226674_190 (sequence is synthesized)
caaattgcctgtttgtttgttttggagtaaaacaacctgataaatgaaagaagaaagaaaagcatatatgaatgcagaatttgcgaatatttttgtttcatagctgaaactggtatattt

SEQ ID NO: 828391 - DNA, 120 bp, Artificial Sequence
  ENSG00000226674_191 (sequence is synthesized)
tattgctctcaaatatgaagccaatagatgataagtgatcatataaagagataacaattctttacttaatattggttgaactcttacttccttgacttcctgagactgtgtaaacaaaat

SEQ ID NO: 828392 - DNA, 120 bp, Artificial Sequence
  ENSG00000226674_192 (sequence is synthesized)
gaacaggtaagcaaattaaaaacaacaatgaaaaatcttgccatctaaggttcaaccaaaatagagttcaggtataaagaatagcataacagagggaggaaaaaaatgagcataaataaa

SEQ ID NO: 828393 - DNA, 120 bp, Artificial Sequence
  ENSG00000226674_193 (sequence is synthesized)
aattaacgtgtccctcacttggggtttctcaaggattaactgaaacatgcatgggtcaatctaaggaaagaaagagcacagtctgggtgtggtagcacacgcctgtaatcccagcacttt

SEQ ID NO: 828394 - DNA, 120 bp, Artificial Sequence
  ENSG00000226674_194 (sequence is synthesized)
gaggctgcttttttggagaattcaagttaaggaagatttctattggatcagtatatgtttgtatggattttaatccctattgctggtgcacttcacttgggcttggaagcttttttccca

SEQ ID NO: 828395 - DNA, 120 bp, Artificial Sequence
  ENSG00000226674_195 (sequence is synthesized)
cttgctgttcctgcaactcattaatcacaatgctatatatgctattaattatgcttaaatgtagtttgcttgtttaatttgtgaacctccaataactcaagactttcaaattatttgtct

SEQ ID NO: 828396 - DNA, 120 bp, Artificial Sequence
  ENSG00000226674_196 (sequence is synthesized)
tccatgttgacattttgattactaaaacattcctaaagctagaagaaggactaataatgtaggattaaaactatgaatcaccttttgattaaacactcagcaatctttgttgctaaatct

SEQ ID NO: 828397 - DNA, 120 bp, Artificial Sequence
  ENSG00000226674_197 (sequence is synthesized)
tcactcagagactaactctaagtctcatttgaacttatagatgttaattccatattgatcaccatagcctggtagatgcaatgcatattcactcagctcatagttttaatttaaagtgga

SEQ ID NO: 828398 - DNA, 120 bp, Artificial Sequence
  ENSG00000226674_198 (sequence is synthesized)
gatttcatgaagagttcttaactccccccagctaatgctaaaaatgtgtcctggttcttacacggcactgctagtaacgtggcaacctgagactgttcccaggctcaattcacaggagcc

SEQ ID NO: 828399 - DNA, 120 bp, Artificial Sequence
  ENSG00000226674_199 (sequence is synthesized)
ccaccgcaaggactggagaaggttactccaagtgtgcctgcctctcctgcttcccctccaacctcctccacctctgccacctctgagacagcaagaccaacccttcctctgcctcctcct

SEQ ID NO: 828400 - DNA, 120 bp, Artificial Sequence
  ENSG00000226674_200 (sequence is synthesized)
caccgcaaggactggagaagggtttgtatggattttaatccctattgctggtgcacttcacttgggcttggaagcttttttcccattttcgtagtaatgatccataaatactttgaatag

SEQ ID NO: 828401 - DNA, 84 bp, Artificial Sequence
  ENSG00000226674_201 (sequence is synthesized)
gactgctgtgctagcaattagacaacaccaacatttttgtaatggcctgcaaggccttccgagatctacctcctgcaactcagc

SEQ ID NO: 828402 - DNA, 120 bp, Artificial Sequence
  ENSG00000226674_202 (sequence is synthesized)
cactcagctttctgaaatggtgtcccaccgcaaggactggagaagggcttctgtgcagctgcagaataaaaggccgggcatgtgccccactggaagtgtctggaatccatggcttcaata

SEQ ID NO: 828403 - DNA, 120 bp, Artificial Sequence
  ENSG00000226674_203 (sequence is synthesized)
ggaaacttgatagaaatgcacccttggaaatgcaatgctacatctcaatgggattttccagtacaaagattcttttcaaataacataattgtggatacacaccactcctacagtggcaaa

SEQ ID NO: 828404 - DNA, 120 bp, Artificial Sequence
  ENSG00000226674_204 (sequence is synthesized)
taacaaagaaaaatgattcaatattttcaccaatatagattccctccaggtctgtttccgtttatcccattgtatgtttcaaagtaattcaccttgtcatcataagagggaaacattccg

SEQ ID NO: 828405 - DNA, 120 bp, Artificial Sequence
  ENSG00000226674_205 (sequence is synthesized)
tacgaaaaaaatagaatatttaaagtcacttttttgcaaccttcaataagataattacctatgtaatatctacatcaaaacttacatgaatatattgataaggaattttgtaatggttgt

SEQ ID NO: 828406 - DNA, 120 bp, Artificial Sequence
  ENSG00000226674_206 (sequence is synthesized)
gtcaggctgacaacacctgggtccattgataatttcagtaaacatcaatttcaaaaagccagttcaaatggataatcagatattacgtagatcctgatgtaatacaacaaggaacacata

SEQ ID NO: 828407 - DNA, 120 bp, Artificial Sequence
  ENSG00000226674_207 (sequence is synthesized)
gcagcagccatgaagtgtctttcctccacaaacacctcccaaatatactactctgaatgaactcaaaactctaactctgtctactagtttacaagaaacctagaggatggagacaggtca

SEQ ID NO: 828408 - DNA, 120 bp, Artificial Sequence
  ENSG00000226674_208 (sequence is synthesized)
atgacaatatagtgaagaataagtgaaattcaacttgaaaaaggacctaactcattcaacaaaaaagggtcaattgttaaaggttaaataaaatttaagaaatgtataaatcaaatcaaa

SEQ ID NO: 828409 - DNA, 120 bp, Artificial Sequence
  ENSG00000226674_209 (sequence is synthesized)
gatgctttatcctttgacattaagaatgctgtttgcagaagtaacattcctttgaacactcagctttctgaaatggtgtcccaccgcaaggactggagaaggacacaaagcaaattcgag

SEQ ID NO: 828410 - DNA, 120 bp, Artificial Sequence
  ENSG00000226674_210 (sequence is synthesized)
caccgcaaggactggagaaggggaaaagagaaggttttgtcccttcagtttccataaatgagaagcaactgtcacccaccaaaactccataccaatggagcattccccaaaagaaggagt

SEQ ID NO: 828411 - DNA, 120 bp, Artificial Sequence
  ENSG00000226674_211 (sequence is synthesized)
gatgctttatcctttgacattaagaatgctgtttgcagaagtaacattcctttgaacactcagctttctgaaatggtgtcccaccgcaaggactggagaaggatcttgctttcttttgta

SEQ ID NO: 828412 - DNA, 120 bp, Artificial Sequence
  ENSG00000226674_212 (sequence is synthesized)
ggaaaatatgtacagaaagtgaaaaggaaagagaatatttggatatctgtggtgtgtacagaaagtataatgaggcaagaataccatacgaagaaatggaagattctcaaggagagggca

SEQ ID NO: 828413 - DNA, 120 bp, Artificial Sequence
  ENSG00000226674_213 (sequence is synthesized)
ggagacaacaccaacatttttgtaatggcctgcaaggccttccgagatctacctcctgcaactcagcttctcctgtgctctccttctggactcactctgcctcagcaacactggtccctg

SEQ ID NO: 828414 - DNA, 62 bp, Artificial Sequence
  ENSG00000204282_0 (sequence is synthesized)
aacacctgccgagcccaggtgttttgaatccagcacgggcaatggcaagaccctgtcccaac

SEQ ID NO: 828415 - DNA, 120 bp, Artificial Sequence
  ENSG00000204282_1 (sequence is synthesized)
tttgaatccagcacgggcaatggcaagaccctgtcccaacaaacaaaaaaacactggtgcctgaggcccaccccgagagattctgattgagttgatttggatttgaattatctttaaaat

SEQ ID NO: 828416 - DNA, 84 bp, Artificial Sequence
  ENSG00000204282_2 (sequence is synthesized)
ttctgattgagttgatttggatttgaattatctttaaaattttggatgtgaattttttttttttttcttggaacgggacgatct

SEQ ID NO: 828417 - DNA, 87 bp, Artificial Sequence
  ENSG00000204282_3 (sequence is synthesized)
atgtgaattatcttaaaaattttcaggtaattctaatgggccaaggttgagaacccctgctctgggcccatccgagcaccaggctgt

SEQ ID NO: 828418 - DNA, 120 bp, Artificial Sequence
  ENSG00000204282_4 (sequence is synthesized)
tgagaacccctgctctgggcccatccgagcaccaggctgtcacaaacgcatgcatgcactcacgcccgtgggcttggggggcttcggaaatgtgcttctgcttttttgagatggggtctt

SEQ ID NO: 828419 - DNA, 81 bp, Artificial Sequence
  ENSG00000204282_5 (sequence is synthesized)
gcctcagcctcctgagtgtctgcttctggttttcatgatgacctggggcccaggcatactacacttgtgctgttcaggggc

SEQ ID NO: 828420 - DNA, 120 bp, Artificial Sequence
  ENSG00000204282_6 (sequence is synthesized)
cctggggcccaggcatactacacttgtgctgttcaggggccagtcctgcaccaggagcccatcagccacagctccgccgagaagcactgatatgcagagctaagcagctttgtttccacg

SEQ ID NO: 828421 - DNA, 120 bp, Artificial Sequence
  ENSG00000204282_7 (sequence is synthesized)
tggatcctgcgtaggttttcttggtccatccgtagacaccgcactcctgcagaggatcttctcgggatgccccactgtctctgttttccctcttcactgaacactcagtcggggctcgcc

SEQ ID NO: 828422 - DNA, 120 bp, Artificial Sequence
  ENSG00000204282_8 (sequence is synthesized)
atgatgcctctgtgtctgctggcttctcccccattggaacagccttcttggcacgccacactgctagctgctgggcactgtgctttctgcctttaccgttctgccgtgatgttgccaaaa

SEQ ID NO: 828423 - DNA, 120 bp, Artificial Sequence
  ENSG00000204282_9 (sequence is synthesized)
gcctttaccgttctgccgtgatgttgccaaaatagcagcaacaacaacaacaacaaaggctgggcacctggctcatgcctgtattcccagcagttcgagatcagcctgggcaacatggtg

SEQ ID NO: 828424 - DNA, 81 bp, Artificial Sequence
  ENSG00000204282_10 (sequence is synthesized)
tgagctgggtggggtggcgccggaagatcgctggagcttaaccttgaggtcaaggttgcagtgagccgagattacatcact

SEQ ID NO: 828425 - DNA, 120 bp, Artificial Sequence
  ENSG00000204282_11 (sequence is synthesized)
gggcaggtctgaaactgccatttaaaaaaaaatttaataaacttaaaaaaatatatatccacagatgcaggtgaagaacctgttgtcttcctcaagcctctttttcacccatgggtggaa

SEQ ID NO: 828426 - DNA, 120 bp, Artificial Sequence
  ENSG00000204282_12 (sequence is synthesized)
atggtgccctggacacccaggcccacgaggtctttgcgtggggtccctacacagggctttagcttacactgtgctgccctcctgtcccccgagttcccagtctgtcaaaatccaacctgg

SEQ ID NO: 828427 - DNA, 120 bp, Artificial Sequence
  ENSG00000204282_13 (sequence is synthesized)
tctcccaggcccagggcaaatgccacctcctccatgaagcctgccacatcctttgcacacccttgggcgctgaccttgttctcccagcgcacaggcacgggtacagtttgcccctgtagt

SEQ ID NO: 828428 - DNA, 120 bp, Artificial Sequence
  ENSG00000204282_14 (sequence is synthesized)
agtaactcaggcacaaaacgaactcttgctgaggctcggccgcgcagagctgagggttgccgcttccaggttcaagtgcattttgagtttcattcccagcttccttctttttctggtctt

SEQ ID NO: 828429 - DNA, 120 bp, Artificial Sequence
  ENSG00000204282_15 (sequence is synthesized)
taatttcttctccggattaggtcccactcaatgctttccttctcaatttccaaaagagtatggtcagagccagcagcacaccaccttccccatgggtgggggggggccagcctgtggcgg

SEQ ID NO: 828430 - DNA, 120 bp, Artificial Sequence
  ENSG00000204282_16 (sequence is synthesized)
gggtgcgggtcccatcttttcgaaggaattgacccacagtgggcgggtccacctttgaccttgccccagggagcgcagacagaaaaaagatccttgcttagtttgaggggccgctggggt

SEQ ID NO: 828431 - DNA, 120 bp, Artificial Sequence
  ENSG00000204282_17 (sequence is synthesized)
gctcggtttgtcttcagaggcctgtctgtaacaccaatgccaacccggtggcactgactggtcaccctgaaggccacggccagtgtcctaggaagggactcaatttctagctgtgccacc

SEQ ID NO: 828432 - DNA, 120 bp, Artificial Sequence
  ENSG00000204282_18 (sequence is synthesized)
tgagattctggggttaggctggttgtgcttctgaagttccactgtgctcaaagtgcttggtgaaagttagcgaaggtgattttacaaaaatagatgcataaaatgtctaggaaacacaaa

SEQ ID NO: 828433 - DNA, 120 bp, Artificial Sequence
  ENSG00000204282_19 (sequence is synthesized)
aaatcctcattactcttctctccaaatattttttaagccccaactggaccctaggcaaaagtgagtggcactcctctgccaggactccaggcaagccccggcatcttcttgctgccgtcc

SEQ ID NO: 828434 - DNA, 120 bp, Artificial Sequence
  ENSG00000204282_20 (sequence is synthesized)
cagacaacagaagttaccagatgaacagacttggatgggccacgggggtggagagctggaaagcttggctgtgcctctcgatgatgattaagatttcaatatttacagcaaaaccacaaa

SEQ ID NO: 828435 - DNA, 120 bp, Artificial Sequence
  ENSG00000204282_21 (sequence is synthesized)
gcaaatgatagaataaagcaaaacaatggaaaatctgagttcactcgtgagagaggtacgtatgtgagctctgaggaaattacagagggaacgcatgcagcgggacagctctcccaatcg

SEQ ID NO: 828436 - DNA, 120 bp, Artificial Sequence
  ENSG00000204282_22 (sequence is synthesized)
cagcgtgcaaagtagacatccatagtgtcttttgaaaaatgaaaaacacattactttgaacagccaagaaaaaaattgcaatttattaagattcaataaagcgttgtactttcgaaagca

SEQ ID NO: 828437 - DNA, 120 bp, Artificial Sequence
  ENSG00000204282_23 (sequence is synthesized)
aggtggggaaatggtcaaagagcgatgggcccagaaaagggtcagacccagatggagatgccactggctgctagcagacccccacgctgggtctagcccacccaatcccatggggatgct

SEQ ID NO: 828438 - DNA, 120 bp, Artificial Sequence
  ENSG00000204282_24 (sequence is synthesized)
cctgtgctctgcagacatctgggtgctgccacaggggcccgacagagttggcatctgggtggatctgagccaagtggtgcttctgggcctcagcaagtagctggtgctgattctgggcag

SEQ ID NO: 828439 - DNA, 120 bp, Artificial Sequence
  ENSG00000204282_25 (sequence is synthesized)
ccaactgtggcagcatcttcaggtgcgagtgctgctgggtgaagctgcgtgggcagtccagaaagtgacgtgacagtccacagggaccgacgtagggtttccagcccctatctgtgcaga

SEQ ID NO: 828440 - DNA, 120 bp, Artificial Sequence
  ENSG00000204282_26 (sequence is synthesized)
tgctgtcctccaaaccatcacggtccctctctggctggggacgtgcgcctgccactgctggcttgccagcatgatcattggttgtgacctgttgagcccatcttgccagcctcacaaagg

SEQ ID NO: 828441 - DNA, 120 bp, Artificial Sequence
  ENSG00000204282_27 (sequence is synthesized)
acagtactagctgcttatgacaggaaagtggaagaacttggcctggatatttctggagaattaccgtgtgtgctagtcagtctttcgtgtcaaccaggccaggctgtggggcccagtgat

SEQ ID NO: 828442 - DNA, 120 bp, Artificial Sequence
  ENSG00000204282_28 (sequence is synthesized)
ctcatcgagaggggccgaggtgttgctgtgatcgtgtgctgctggaatgtggtgaacacctacagtcgatttcacctaaagatcatccttgagaatgtgggtgggcctcatcctatcagc

SEQ ID NO: 828443 - DNA, 120 bp, Artificial Sequence
  ENSG00000204282_29 (sequence is synthesized)
tgaaagctttaagagcaaaacccgaggtgtcccagagagggaattctgccttgagacggcggcttcccactcccactggatgtccagcccgcggccccacggctgggtgagcccgtcctc

SEQ ID NO: 828444 - DNA, 120 bp, Artificial Sequence
  ENSG00000204282_30 (sequence is synthesized)
tcctcgtttctgtctccggacccaccgtgtggccccagaccctccagtgaggacctcccgtatttcttcagagcagcccttgcgtgctggaggcctgggcttcagtgtgtccctgggtgc

SEQ ID NO: 828445 - DNA, 120 bp, Artificial Sequence
  ENSG00000204282_31 (sequence is synthesized)
cctggggcatgttctgtgacctcccagctcctcgcctcatggggccgctgtatcaagtgacacagtttgtgtgctgcgtaccatgcctggcacccatttgaggtgttgcaaggaggccat

SEQ ID NO: 828446 - DNA, 120 bp, Artificial Sequence
  ENSG00000204282_32 (sequence is synthesized)
gtttgctcgatgagagcagcctaagatctacaaactgttgttcgagtggatgggaacttgatgctattttcaggctgaatgacaagactccgcgatgcttctcggcctgggctgcacaac

SEQ ID NO: 828447 - DNA, 120 bp, Artificial Sequence
  ENSG00000204282_33 (sequence is synthesized)
ggaatctaccagggaggttttaaaaacactggtacttgctggaggtggtggcgcctgtctgtaattgcagctgctccagaggctgaggcggaggattgcttgagcccaagagtttcggtt

SEQ ID NO: 828448 - DNA, 120 bp, Artificial Sequence
  ENSG00000204282_34 (sequence is synthesized)
cggaggattgcttgagcccaagagtttcggtttatttgctttttcagagtcttgctcttgcccaggctggagtgcagttccatgatctcggctcactgcctcagcctcccaagtagctgg

SEQ ID NO: 828449 - DNA, 120 bp, Artificial Sequence
  ENSG00000204283_0 (sequence is synthesized)
ggggtgccggatgggctgctctcccagcagccatttggaagatgcttccagtcaagtctcaatctcagtcggtcactggtccatgtatatttcatggacatctaccctgtgctgggcact

SEQ ID NO: 828450 - DNA, 120 bp, Artificial Sequence
  ENSG00000204283_1 (sequence is synthesized)
gggcagacaacagtctactggacccagtctcactctcaaggggactgtagtccaagagagaggcaggtagattatcagatgaagaaactgaggctcaaagagccacagcgggacggagga

SEQ ID NO: 828451 - DNA, 120 bp, Artificial Sequence
  ENSG00000204283_2 (sequence is synthesized)
ggtggacccggctctgatgcagcttggtgacgcaaggtgagctgaaggagagccgcttgggtgaggattatgaaggcacgggtgccatggaaaccactctgaaggccccctaaagctgca

SEQ ID NO: 828452 - DNA, 120 bp, Artificial Sequence
  ENSG00000204283_3 (sequence is synthesized)
tatttattttactctgttttgcatcttatgcctgctctcggcttctcttggcttcctcacagtcctggtgcaggatgctgcctgcaggtcagtaggataaaggtgctaatgttttctgtt

SEQ ID NO: 828453 - DNA, 120 bp, Artificial Sequence
  ENSG00000204283_4 (sequence is synthesized)
tctcttttttgaacttctgactttttaggctcattttctggtgctctctcctccatgccataaggcagcacagatttcaagccatagatgttggaggcagaaaatgggattatgttagac

SEQ ID NO: 828454 - DNA, 120 bp, Artificial Sequence
  ENSG00000204283_5 (sequence is synthesized)
agagagggaagccagctcttctagcaggtgctgtagaaatggcttctgattttggtcacagaagcagtccctaactttccctgcaaatccaagaagccctcaaaggggccaaaggcaggc

SEQ ID NO: 828455 - DNA, 120 bp, Artificial Sequence
  ENSG00000204283_6 (sequence is synthesized)
cgatggcagactcccctgtgccgagactcccagaccaaatccggaggtcctggagtagagtgggtgggtccgccagggcatggccaggctgcctgtctctggagactcccccaaggaagt

SEQ ID NO: 828456 - DNA, 120 bp, Artificial Sequence
  ENSG00000204283_7 (sequence is synthesized)
ttcttgaccttgaggatgataacgcagggcaggctcttgagggctgtgcagggactccctggagagccctgggaaaagcaggtccccgcctgcctgggcctctgcctctgctgcaggggc

SEQ ID NO: 828457 - DNA, 120 bp, Artificial Sequence
  ENSG00000204283_8 (sequence is synthesized)
cagcacaggtgtcaggtccccacacatttcatgtccaggccattttcccactctagggccaaggctgggcacttcccagtcagtggcacagctggtactgtggggtctctcgctctgcaa

SEQ ID NO: 828458 - DNA, 120 bp, Artificial Sequence
  ENSG00000204283_9 (sequence is synthesized)
aggttggtttcaatcccaagtgtcactgctggaaacactggccaccccgggacatgtggtcttgccagtccttctgcagggctctgtttcttaggtcccaatcatctgcagggagcacta

SEQ ID NO: 828459 - DNA, 120 bp, Artificial Sequence
  ENSG00000204283_10 (sequence is synthesized)
gtccgagatcttccaagatgctgggcaggaacaagcctgctatgctcattcccaaaggactccacatctagataaatgaaggcctggaaggctctttggctctacactagcaaaacagct

SEQ ID NO: 828460 - DNA, 120 bp, Artificial Sequence
  ENSG00000204283_11 (sequence is synthesized)
tacgtcaccctgcctaaagagacagtcaggaaatccccttgttcctgggcgaggagaagctggcccacacggagtgacggcattgagcagatactacccttggctcgctcatggatgggg

SEQ ID NO: 828461 - DNA, 120 bp, Artificial Sequence
  ENSG00000204283_12 (sequence is synthesized)
cggggcctgctgaccttgacagcaatcaggggagggggtttggagggaaggggttagctggtgaaggtgagggaaaggactggagttaggacagggtgcagcgaccacatcctgtgacga

SEQ ID NO: 828462 - DNA, 120 bp, Artificial Sequence
  ENSG00000204283_13 (sequence is synthesized)
ggaggcatctgtgacctgtgtgatctgccaggcaggcagcacaagtcattgtactgctactatgcccgctactgagacaggaacaaagagaggctgtttctgcctcttggtgctctccat

SEQ ID NO: 828463 - DNA, 120 bp, Artificial Sequence
  ENSG00000204283_14 (sequence is synthesized)
tggacatgtctgctgggcagtgctggcttttaccataggtatttttctgctcttccttccctcctcctctccctctctcttttccagggcactcacacacacacacttgcacacatgtgc

SEQ ID NO: 828464 - DNA, 120 bp, Artificial Sequence
  ENSG00000204283_15 (sequence is synthesized)
acagttgcacacacatgcattgaacacatgtgcacatatatgcgtttgcatccacttgcacacccacacacctgtgcactagcacccatttgcacgcatgtccacacacttgcacacatg

SEQ ID NO: 828465 - DNA, 120 bp, Artificial Sequence
  ENSG00000204283_16 (sequence is synthesized)
tgcatttgcagaaatgcacccttgcacttgtgtgacacacctgcacacttgcatacacccatttgcatacaggcacagacacactcgcatacatttgcacacacagccacaaacttgcac

SEQ ID NO: 828466 - DNA, 120 bp, Artificial Sequence
  ENSG00000204283_17 (sequence is synthesized)
aagcagcacttgtacactgacacatatccgtttgtgcctatacagtgcacacttacacatttgcacacagctgtgcttgctcacacatttgcacacacccacctacacacttgcacacat

SEQ ID NO: 828467 - DNA, 120 bp, Artificial Sequence
  ENSG00000204283_18 (sequence is synthesized)
actacacacttgagcgtgcagcacacatacctatgtgcatacatgcacatttgcacatgcacacagcagtggcacacacttctctatcactctccctagtcactgttctcccctgtgatt

SEQ ID NO: 828468 - DNA, 120 bp, Artificial Sequence
  ENSG00000204283_19 (sequence is synthesized)
cccacccctctgaccgcccctgctcacttgctgccccctccactggaaggggcctggcctggtgccctgtctctgtctgtctccaccgtgcagggaggtttcacaaggactggctgatgt

SEQ ID NO: 828469 - DNA, 120 bp, Artificial Sequence
  ENSG00000204283_20 (sequence is synthesized)
ctcgcctcgagctggcctggccgcagctgctgctgagcggaagtctctgaggggcgaggctgagaggaaaccacactctcactggggttcccgcagctctggcctctggggaggggtgtg

SEQ ID NO: 828470 - DNA, 120 bp, Artificial Sequence
  ENSG00000204283_21 (sequence is synthesized)
gagatgtgtgggcgtgagatggctttgagggagggacagcatgaagcttttcgctgggtctgtcttttcagtctccaggacaaaactaggccactgtgctccaggagaagggaaaaccca

SEQ ID NO: 828471 - DNA, 120 bp, Artificial Sequence
  ENSG00000204283_22 (sequence is synthesized)
cgtccccccaggctgggcccaccggcaaatcgggctcccaggcccttctcagcccatgcttctgtctctgccttgtcaggcttattctttggggctttgaagcagcctttggtgggcaaa

SEQ ID NO: 828472 - DNA, 120 bp, Artificial Sequence
  ENSG00000204283_23 (sequence is synthesized)
ccctgaggtatcagcccagccccctgtctgcagcttttgctacccagcccagctccagctctgtctttgtcactgggggtggtgggggaggctggagctcagggacggggcactcctggc

SEQ ID NO: 828473 - DNA, 120 bp, Artificial Sequence
  ENSG00000204283_24 (sequence is synthesized)
agattctccctgccccaggtggaaggggaggggggaagtacccatcctccatcctcctatcctgccagcggggtgggcgctactatgctggggagggtctggctgaataatgatgctgag

SEQ ID NO: 828474 - DNA, 120 bp, Artificial Sequence
  ENSG00000204283_25 (sequence is synthesized)
ctcgggacaccagccttctccgtgcacctactgtgtgccaagtaccatcccaagagcattatgggtggtaacttatacaatgactcagagaggcaccgctataatcacccccagtttctg

SEQ ID NO: 828475 - DNA, 120 bp, Artificial Sequence
  ENSG00000204283_26 (sequence is synthesized)
tctggttccagtcctggccacacagctaataagcagcaaatggatttgatctgattttatctgaacccaggcaggctggcccagagcccactgtctaatcattgggccgtccagcctgtc

SEQ ID NO: 828476 - DNA, 120 bp, Artificial Sequence
  ENSG00000204283_27 (sequence is synthesized)
aagactccaggctcgctggcgtcgtacccctctgtcatttcccagggaaacaagctctagcagcacctgccctgtgggtactttggccctgcctccctgcctccctgcctccctgcctcc

SEQ ID NO: 828477 - DNA, 120 bp, Artificial Sequence
  ENSG00000204283_28 (sequence is synthesized)
ctgcctctcatgataggagccaaagaatggtctcctttgcaggaaaggagctcgacgggggtcttctcttgcaggctctgtcttgcatgtgggtcctgagctttctcattgagtaagggg

SEQ ID NO: 828478 - DNA, 120 bp, Artificial Sequence
  ENSG00000204283_29 (sequence is synthesized)
agggggcagctggttcagtccagcgcagagtggatggaggccagttgaggctttcttgaaaccctaagcccagctgggatcctcggggaaggatccttcgctgggatctgactggctctt

SEQ ID NO: 828479 - DNA, 120 bp, Artificial Sequence
  ENSG00000204283_30 (sequence is synthesized)
ccagaggtcagtggggcatgtggctggagcccaagtaggagggaggaagaaatggtggtctgagtcctggggtgaccaggccctgaacctgccctgctgggaccccattccctgactcta

SEQ ID NO: 828480 - DNA, 120 bp, Artificial Sequence
  ENSG00000204283_31 (sequence is synthesized)
ggccccctttccccaccacacaggacaccaggctcttgccttaagacaggaaaggaaatgccttatggtgaacaattctccaggtccctattgtggctccaacagatgccagagggacat

SEQ ID NO: 828481 - DNA, 120 bp, Artificial Sequence
  ENSG00000204283_32 (sequence is synthesized)
ggcaggtgaccctggtctcctacgaccctgactttacttgctgtcatgaggccaatctcttaccttgacccacctcctgcctctgctttcagaagggcagaagagcgggcctcctctagc

SEQ ID NO: 828482 - DNA, 120 bp, Artificial Sequence
  ENSG00000204283_33 (sequence is synthesized)
ttcccagccgcctcccgcctcctgccgcccggcagcgctgggccccccagcagcgaggttcaggaggggaagaacctctcgcaggtgaacaaattgctgcacatcagacacattcttttc

SEQ ID NO: 828483 - DNA, 120 bp, Artificial Sequence
  ENSG00000204283_34 (sequence is synthesized)
aagcctcattttctctccttttcatgctaactttcccactattaaagagcatttttaaaaagaagatgaaaaaaggcagagagaaaagaaggatgaaagtgtgagcgggtatccggaagt

SEQ ID NO: 828484 - DNA, 120 bp, Artificial Sequence
  ENSG00000204283_35 (sequence is synthesized)
ccttttcaattgcctgctgctgtgcagggtctgaactaagagcaagaaattggaggatgctggaggggcgaggtttcgtttcagtcctgcctattgggccaagtctggggcggggaagga

SEQ ID NO: 828485 - DNA, 120 bp, Artificial Sequence
  ENSG00000204283_36 (sequence is synthesized)
gaggtgatggaggtgggcctggctgggccctgcggccctggaggctgcccctctgcctgccacccagcccctggcctgtgcctggcacaggaagcccgtcaataatttcttgttgaatga

SEQ ID NO: 828486 - DNA, 120 bp, Artificial Sequence
  ENSG00000204283_37 (sequence is synthesized)
atgaaagaaaagaaatcagtggatggagaagggctggattcttttgtggggaccttccacgccaccttctctgtggggctctagggctgagaaagaaaggacagatttggcaaaggtcag

SEQ ID NO: 828487 - DNA, 120 bp, Artificial Sequence
  ENSG00000204283_38 (sequence is synthesized)
gcaggggctgggaaagcattaggtggaccaggcatgctacagcaaggccacgcctgcactgttgtcccactggtgacacccatgggtgcagccatggcgggtgggcgcagtttcacatgg

SEQ ID NO: 828488 - DNA, 120 bp, Artificial Sequence
  ENSG00000204283_39 (sequence is synthesized)
gattgggggtgagcctgggttgggtgggcgacccccaccccttccctacccctctccccaccagcaggtactactgggtctgcgtgaagataaaagctcaggaacatgccaggaaggtgt

SEQ ID NO: 828489 - DNA, 120 bp, Artificial Sequence
  ENSG00000204283_40 (sequence is synthesized)
gaccatgatgatacctctgagatgaacccaagaagaaacagcagagtattacaaaggggaacaggactcagggtggacttcaagtatcattaaacataatcaaatatttaaaaagttatt

SEQ ID NO: 828490 - DNA, 120 bp, Artificial Sequence
  ENSG00000204283_41 (sequence is synthesized)
tatttaaaaagttattattgactgggtgcagtggctcacggctttaatcccagcacttagagaggccaaggtaggaagattgctttagcctaggagtttgagaccagcatgggcaacata

SEQ ID NO: 828491 - DNA, 120 bp, Artificial Sequence
  ENSG00000279375_0 (sequence is synthesized)
gtggccgttgtccgcgttgatggagaccagggaggcgaggggcagaaacatcgggataagaacaccaaaacagacaaagaaaatatgtttcacaccttcctcaacaaacttcaaaatctc

SEQ ID NO: 828492 - DNA, 120 bp, Artificial Sequence
  ENSG00000279375_1 (sequence is synthesized)
gtataatgcatttaagctgtccctcctctattctctcataaaaacttgtgtatacaactatgattgccctgcaaatattattgcttcttaattcatgcaaatctatttcttcttcaatgt

SEQ ID NO: 828493 - DNA, 120 bp, Artificial Sequence
  ENSG00000279375_2 (sequence is synthesized)
gtgggctacttaaggataggaactatgtcctaatcatctgtgagtgacaaatcagacaagcaataaatactgcctgtattaggacatgcataaataaactcagatgggtagaacctgaaa

SEQ ID NO: 828494 - DNA, 120 bp, Artificial Sequence
  ENSG00000233978_0 (sequence is synthesized)
acctctttctctgctttcatttcgtcggactggctgcgcccctacctttctctctgaatccatcacacccctccctgactcctgccaggccatggcagaattgctgttcccaggaaggca

SEQ ID NO: 828495 - DNA, 120 bp, Artificial Sequence
  ENSG00000233978_1 (sequence is synthesized)
ggcctggcctgggctgaaaagcagatctgggttctaatctcccttctgcatggacctgcgggtgacacaagcttggtgccttctcctctctgaacttcaagtccttacttggacaagatg

SEQ ID NO: 828496 - DNA, 120 bp, Artificial Sequence
  ENSG00000233978_2 (sequence is synthesized)
gcgaaaggaaagcctgaaagagctgcactctaagcaccacagcaggacttgcccctgaatggagatggggctggggcaggaaggtggcagggaggggctgggccctgtgactgtcacctc

SEQ ID NO: 828497 - DNA, 120 bp, Artificial Sequence
  ENSG00000233978_3 (sequence is synthesized)
caggttggaggagtggggagggaaaggcagggcagggtgcgttatcacacacacactcacccacatacactcaagcacacaccacagagtccaaggaaaacctgtttctgtcctagcact

SEQ ID NO: 828498 - DNA, 120 bp, Artificial Sequence
  ENSG00000233977_0 (sequence is synthesized)
catccttggagtgaggctttccaccctgtccttgaacggaaggggaccaggggactccccttataggctagactttctatgtgtatcccattgtcctcaagggcagtagggagtgactaa

SEQ ID NO: 828499 - DNA, 120 bp, Artificial Sequence
  ENSG00000233977_1 (sequence is synthesized)
aggtgtcttggaagcaggggctgcatccctgttcttcaagaccctctgtgccctccacttgttctgcagggtacacatggggagtgtggggggaaaggagagtcagggcagccaagtttc

SEQ ID NO: 828500 - DNA, 120 bp, Artificial Sequence
  ENSG00000233977_2 (sequence is synthesized)
tgggaatatgggtatctgtgagtaaggatcttggactgtggggagcctgggaatggggggatgcctgggagggaggctctgggaatggggtatcctgggaggatgcatgggatctggagt

SEQ ID NO: 828501 - DNA, 120 bp, Artificial Sequence
  ENSG00000233977_3 (sequence is synthesized)
agggaggtgccaacagatgagcctgtagggaggaagagggtctcatatgcctgtgggagtctgtgttgggtgggcttatggggctgtgaccctgactcttgttctccctctggattaggg

SEQ ID NO: 828502 - DNA, 120 bp, Artificial Sequence
  ENSG00000233977_4 (sequence is synthesized)
tcttggttttcctggagaccctggccccccaggagaaggtggctcatgaccaggacagtgttaacggtgactatggcaaggatggtgagccagtacagcccgtgagtgaccaatgtccct

SEQ ID NO: 828503 - DNA, 120 bp, Artificial Sequence
  ENSG00000233977_5 (sequence is synthesized)
gccacccccactgagctccagccttcagccccttacccctcttttctgtgccctactcctgaggggtcccttagctggaggccaacactcacccaccccaattcctctcattctgtggat

SEQ ID NO: 828504 - DNA, 120 bp, Artificial Sequence
  ENSG00000233977_6 (sequence is synthesized)
cctctggtcccactggggagaatggactacctggaccacatggaaagcaggtaagtgaggtagaagaccctgggaccttgggaggtagtcgctgggaaatgtgggtagaggctgggtggt

SEQ ID NO: 828505 - DNA, 120 bp, Artificial Sequence
  ENSG00000233975_0 (sequence is synthesized)
tctttccctctttctgggtctccatggaacagacagctgagacaagcctgctagcctcattgcctttgcacaagctcttccctctgcctggaacacttgttgcttcaggagtcggctcga

SEQ ID NO: 828506 - DNA, 120 bp, Artificial Sequence
  ENSG00000233975_1 (sequence is synthesized)
tgaatcatgactgcaatgaaaacgatggcatgagcatttgttaccatcaggcttccgccctagattatgagctccctgaggacaagcagagggttcatctctctttatagctagaaccca

SEQ ID NO: 828507 - DNA, 120 bp, Artificial Sequence
  ENSG00000233975_2 (sequence is synthesized)
gcacagcgcctggcactcaggaggcacccaattactttggctgactggatagacatacatacagacggacggataaatggctggaagaggagtgattgaaaaaatacattttaaaatgcc

SEQ ID NO: 828508 - DNA, 120 bp, Artificial Sequence
  ENSG00000233973_0 (sequence is synthesized)
actaacagcctgagagaaaaggacactgcatatcacagagagatgcatagatgttacactcagaaagagagtgaacaactagaagatgtggaagaaccagtttggctctggagtcaagaa

SEQ ID NO: 828509 - DNA, 120 bp, Artificial Sequence
  ENSG00000233973_1 (sequence is synthesized)
ttctcaaaacagctttctgaacctgaatcgcacgcagtaaagctggtgttctcctgaagccaacatttatggtatcaccttgctgatccaggcaaaatggcaaaagtgtagtgaacataa

SEQ ID NO: 828510 - DNA, 120 bp, Artificial Sequence
  ENSG00000233973_2 (sequence is synthesized)
agccaggggctgagattgtggatgtcctctgtaccaagtttcttattatgaaaattccaagggccaattttgaaacaaaccaggcagagacccagatgcagaatcctgcaggctgaggga

SEQ ID NO: 828511 - DNA, 120 bp, Artificial Sequence
  ENSG00000233973_3 (sequence is synthesized)
caataaaccaaactccctgtcacctcagactctgcacctgttaaagccctgtaaagagccgacatgtaaggacttatactgactggatacagagaatatggagcaaatcaaacgtattta

SEQ ID NO: 828512 - DNA, 120 bp, Artificial Sequence
  ENSG00000233973_4 (sequence is synthesized)
aatagtaaattatcatattgttataaataaaaatttacattgcatttccttttagaatgttacttggatatatattcttcaacatttacaaatgctgatgcttcatgtacttaaaaacgg

SEQ ID NO: 828513 - DNA, 120 bp, Artificial Sequence
  ENSG00000233973_5 (sequence is synthesized)
aataatttttttatttgaatttcaatctcttgagtttgagcgtgaagactttaatattaattagtcagagattaagctgaatatgtcttaagtctcaatgttctatctttctaaccatgt

SEQ ID NO: 828514 - DNA, 120 bp, Artificial Sequence
  ENSG00000233973_6 (sequence is synthesized)
caggcatggtcttgtgatcattacacagaaaatctctttaggcagaaaagccaagtggaattcaataagagaaactatggcaacaaacacaataaaaatttttattctctttgcttagga

SEQ ID NO: 828515 - DNA, 120 bp, Artificial Sequence
  ENSG00000233973_7 (sequence is synthesized)
aagagttagcccaccactgctgcgctgaaaccaggatgacgcaaactgggcctcaggccaggcttagaatataaactgacaccttgaagaagtgaccatcttgtaatcaacactttattc

SEQ ID NO: 828516 - DNA, 120 bp, Artificial Sequence
  ENSG00000233973_8 (sequence is synthesized)
taaggataacagagataaatgatataaggatctctgtttcttaatggcattgttgagccctaaactttctactgctagatattttatcgcatgaaataaataagccttagttgcttaaaa

SEQ ID NO: 828517 - DNA, 120 bp, Artificial Sequence
  ENSG00000233973_9 (sequence is synthesized)
gcgctgaaaccaggatgacgcaaactgggcctcaggccaggtgtattccttggagtataactgaaggtttacttggtaattctatgtttaactttttttggaacttctggactatcttcc

SEQ ID NO: 828518 - DNA, 120 bp, Artificial Sequence
  ENSG00000233973_10 (sequence is synthesized)
aaagcaacagtaccattgtacattttcaccagccacgtatgacagtcacactctctccacattcttgccaaaacttgttatcatttttcaaataaaagacagcctagtgtgtatctgaaa

SEQ ID NO: 828519 - DNA, 120 bp, Artificial Sequence
  ENSG00000233973_11 (sequence is synthesized)
agaaaatttattagagtatttgaaggtcttgtgggactggagagacaacgttggacacttaagtggaaaatctgacacataacagaactgagactatcattgtattttttaaaaatagtg

SEQ ID NO: 828520 - DNA, 120 bp, Artificial Sequence
  ENSG00000233973_12 (sequence is synthesized)
gtttttgacaaactgcaaaggttgcacagtggagaaaaaagttttttcaacaaatggttctgaatcgatgaaatatctatatatgtttttaaagtgagcttgaatccataacattgtacc

SEQ ID NO: 828521 - DNA, 120 bp, Artificial Sequence
  ENSG00000233973_13 (sequence is synthesized)
taccacataaaacattaaagcaagatgtgtcataaacataaaagtaactcataattatacattttctaagagaaaatatggtaaaaatgtatttttgttaggtaaagaaatagatagtat

SEQ ID NO: 828522 - DNA, 120 bp, Artificial Sequence
  ENSG00000233973_14 (sequence is synthesized)
aaagcatgagcgtacaagtgaataagttagactttatcaaagtaaaaacttctgctctttcaaagacatgcatgaggagaataataagaaaagccacaccttagaaaaaaaatttcaaaa

SEQ ID NO: 828523 - DNA, 120 bp, Artificial Sequence
  ENSG00000233973_15 (sequence is synthesized)
attacaaactgatattcaaaatttaaaaacagctttataaactcaataaaaagaaaacaaattattttaaaattgagtaaaatatttgaataaactctttaccataaagacaggtggatg

SEQ ID NO: 828524 - DNA, 120 bp, Artificial Sequence
  ENSG00000233973_16 (sequence is synthesized)
ggtggatggcaaataagccattaatagatgctgagtcattacagaaatacacattaaacacaaagtgagatagtactgcacacatattagagaagctaaaagttaaaagactgttgatat

SEQ ID NO: 828525 - DNA, 120 bp, Artificial Sequence
  ENSG00000233973_17 (sequence is synthesized)
taggttgtaataaggtgaagaaaattggaactcatacacttcatgtgggaatgtgaagtggtaaaagcacttttgaaaagcaatgttttgtgtttgacacaaaaagtgataataatttta

SEQ ID NO: 828526 - DNA, 120 bp, Artificial Sequence
  ENSG00000233973_18 (sequence is synthesized)
aaaacagactatattaagattataatttcttttcacctaaagatacaccagttagacaatgaaatggaaaaccacaaaatagtagaagatatttgcaataaatatacctgataaagatat

SEQ ID NO: 828527 - DNA, 120 bp, Artificial Sequence
  ENSG00000233973_19 (sequence is synthesized)
tatattgaaaaaatatagaggtcctacaaatcaataagaaaaagccaaatacaaaaatgtgcaagtgacttacacagaaatgttataccagacatcaaaaaggaaaaaaaaattcactac

SEQ ID NO: 828528 - DNA, 120 bp, Artificial Sequence
  ENSG00000233973_20 (sequence is synthesized)
ttcgtcattatacaaattcataacataatgccaacatatactcccagaatggcaaaaatgaaaaagaaggcagttactataatttttcagtgggaatgtagaacaactagagctaacata

SEQ ID NO: 828529 - DNA, 120 bp, Artificial Sequence
  ENSG00000233973_21 (sequence is synthesized)
atgtgttgactgaaaagcaaagtgttttacaacctttgggaaaattcatttttttaaaattttaaagccaaacataactcttaggcatatatccatatgtatatatgtttggctgggcgt

SEQ ID NO: 828530 - DNA, 120 bp, Artificial Sequence
  ENSG00000233973_22 (sequence is synthesized)
agttccagctactcaggaggctgaggcccgagaatggtgtggacacgggaggcaaagcttgcagtgaaccaaattcatcaaaaaggagatcatactgggtaaccttaatcagatgagctc

SEQ ID NO: 828531 - DNA, 120 bp, Artificial Sequence
  ENSG00000233973_23 (sequence is synthesized)
ttaatcagatgagctctttaaaagagaatccagacattccctgtagagaaagatttgaaagtagagtttctcccactgccctagaagaaaccagtaacaatactgtgaactccctatgaa

SEQ ID NO: 828532 - DNA, 120 bp, Artificial Sequence
  ENSG00000233973_24 (sequence is synthesized)
gggggccatggtacaagcaactgaaggaggcctctagaaagtacgagtgatctccagtggacagccaatcaataaacaataactttagtcctacaaccacgtgaaagaggactctgagct

SEQ ID NO: 828533 - DNA, 120 bp, Artificial Sequence
  ENSG00000233973_25 (sequence is synthesized)
gcaaatggaatgcagccatgactaaagcattgcttgtaacctggtgagattctgagtagtggatcaaactaactatacccaaactcccaacacatagtgattatgagataatgaatttgt

SEQ ID NO: 828534 - DNA, 120 bp, Artificial Sequence
  ENSG00000233973_26 (sequence is synthesized)
cttatttaacatcaattagtttattgtaatttgttacacagaaataaaaaatgaatacagaaagttaggataatgcttccatttggtgagtgggaggggattactgggaaagaaatctag

SEQ ID NO: 828535 - DNA, 120 bp, Artificial Sequence
  ENSG00000233973_27 (sequence is synthesized)
tggagcttctgaaatgctagtaatgttctatttcttgagtttggtattatataaataaatattgactttgtagaaatccatcaactagatacttttaatatatacagtcttaggtatgct

SEQ ID NO: 828536 - DNA, 120 bp, Artificial Sequence
  ENSG00000233973_28 (sequence is synthesized)
ggtatgctctatattaatctctaaaaaagagatatataaagaaaaaatgaaaacagaatgaaccatcaatatatattgcattgttttatctgcagaataattttaatacacatatgaata

SEQ ID NO: 828537 - DNA, 120 bp, Artificial Sequence
  ENSG00000233973_29 (sequence is synthesized)
cattcaataatttcataaatgtagttttaatagttcttaaaatggctatatttctcaattagtcttttcctaaaggttttcagtcctgctataatttttctcttttttcagtcctgtttc

SEQ ID NO: 828538 - DNA, 120 bp, Artificial Sequence
  ENSG00000233973_30 (sequence is synthesized)
aatttgtattccattttttcttccaaatatggcaaaaaataagacaaataagtaataaaactacagctaattttttaataaaatatcaccactcctgtgattaaaatacactgtatattt

SEQ ID NO: 828539 - DNA, 120 bp, Artificial Sequence
  ENSG00000233973_31 (sequence is synthesized)
atatattttaagtaccaattaacactattgcctttccatttcaactttgccaacaatattgatgattttagaaatggctcaaggaaactttatgtgaaaaagagttgctctatgtggttg

SEQ ID NO: 828540 - DNA, 120 bp, Artificial Sequence
  ENSG00000233973_32 (sequence is synthesized)
actctgaataaatttttcccactcccttttgaaagcttcactaacaagatataaattctccattttcgatatcttactggctagtcttgtgtttttgttactgaatgtactatattttat

SEQ ID NO: 828541 - DNA, 120 bp, Artificial Sequence
  ENSG00000233973_33 (sequence is synthesized)
acgtgatataacagattcagtactagtgtttaattttctaatattgagtgtttttcctttctgctttcatgtgttttaaataaatgtgatgtattctgggagtcaatatttttatactat

SEQ ID NO: 828542 - DNA, 120 bp, Artificial Sequence
  ENSG00000233973_34 (sequence is synthesized)
cttacaatctatgatgattacaaatctgaaatttgaatagacacttttagctcttggccattttaagacattaaagctcattagcaatcatttgtctacatgaactactttgtctatagc

SEQ ID NO: 828543 - DNA, 120 bp, Artificial Sequence
  ENSG00000233973_35 (sequence is synthesized)
aaaactgagatcaaataaatggtaggaaacctgcctaaaaatttcctgctcttcacactaatttgaatatatcatcaatttttactaacagatttgatatgatggtaaagaaagatatta

SEQ ID NO: 828544 - DNA, 120 bp, Artificial Sequence
  ENSG00000233973_36 (sequence is synthesized)
aaagaaaggctaagttgaaatatgtacattagcagatgtttgtttattcagttgccagtaatttctaaaattaaataactttatttttaaataattccaagtgatgcatattatttcttt

SEQ ID NO: 828545 - DNA, 120 bp, Artificial Sequence
  ENSG00000233973_37 (sequence is synthesized)
taaataattagaaataattgtttttgattgacaaattatgattatatacatctataggatacaatgtgatgttttgctatatgtatacaatgtggaatgaataaatcaagctaacacata

SEQ ID NO: 828546 - DNA, 120 bp, Artificial Sequence
  ENSG00000233973_38 (sequence is synthesized)
gtagaattttgattggatttaaatataaaagaaggtataaaaaagcagaaaatatatttccatataactcatgagtcaagttatcaaaatggacatttgaacatacttagaattgaatga

SEQ ID NO: 828547 - DNA, 120 bp, Artificial Sequence
  ENSG00000233973_39 (sequence is synthesized)
aaaactatcaaataacaacttcatgggatataataaaatttataatgtcaactattataaaaatttttgaaaattcaagatagacatccaatttaagaaataaaggaagcatacagtcaa

SEQ ID NO: 828548 - DNA, 120 bp, Artificial Sequence
  ENSG00000233973_40 (sequence is synthesized)
tcaagtaaattatgaataataaaacaaattattaagattaaaaggagattctcaaaatgaaatttgattcagtaaaaagaccattgtcttcagtaaaaagacctatgttttcaagttgaa

SEQ ID NO: 828549 - DNA, 120 bp, Artificial Sequence
  ENSG00000233973_41 (sequence is synthesized)
ttgaaagccaaaacatattttaactatattttaaacaagttgaattgaaagccaaaacatattttaacatattttaaccataaccaaaacatattttgaccatatcccttattattgagg

SEQ ID NO: 828550 - DNA, 120 bp, Artificial Sequence
  ENSG00000233973_42 (sequence is synthesized)
gtcctctgtaccaagtttcttattatggtaagggtagaagttcaccaggtcagtaatgtgattttgtccaaagagccatttctggagatctagcctaaacattgctcctccaactcttcc

SEQ ID NO: 828551 - DNA, 120 bp, Artificial Sequence
  ENSG00000233973_43 (sequence is synthesized)
cataatttgttaacaattgaataattgttctgtttaaaatagtttggatgttttatgttttctgcaactttactgttatcataacaaagacataaataaagatctaaataaagtcagaaa

SEQ ID NO: 828552 - DNA, 120 bp, Artificial Sequence
  ENSG00000205488_0 (sequence is synthesized)
ccccgtcagcaccgcttactgcaggccaagatgcctcccaccctccagaatccgaccgcggagggagcttccagtccaggagcctgcgggaatcctggcgggggctgagggctgcagccc

SEQ ID NO: 828553 - DNA, 120 bp, Artificial Sequence
  ENSG00000205488_1 (sequence is synthesized)
ccctggcctgggcattgggtgcctcttagggatcttgcctgggtgccctaaggggtcacccggtgtccgtcctggagggccgcagagtcagcgcaacctgccctggtgctcggtcctaag

SEQ ID NO: 828554 - DNA, 120 bp, Artificial Sequence
  ENSG00000205488_2 (sequence is synthesized)
gggctggagagacttcttcatgaaggaatacagggacagtcacaggagacaggagcaccaagggattcggacatgtggctgacacagtcttctggagagccccggatggcatcaggggga

SEQ ID NO: 828555 - DNA, 120 bp, Artificial Sequence
  ENSG00000205488_3 (sequence is synthesized)
gagaagccaacagatgatgaatatgaattaaagttggacaactagcaagtttaaaacttggactgggacctagatcttccgattcctacagctagcctccctttccatcttctctgtggt

SEQ ID NO: 828556 - DNA, 120 bp, Artificial Sequence
  ENSG00000205488_4 (sequence is synthesized)
catcactaatgcagtttttgaccgtcttgtccagaagctgcaaaacagacaacagaagccaggactggccctgccttagatggctttcagtgcaggaaagtatcaagacagtcttgttcg

SEQ ID NO: 828557 - DNA, 120 bp, Artificial Sequence
  ENSG00000205488_5 (sequence is synthesized)
tagcgtatatctctctccaccttttctgctaagcacctcatgtatgcagctgccaatgtaacacctccatttgcgtgtttaatcaccatctcaagctaatgtaaccaagcagacttcttg

SEQ ID NO: 828558 - DNA, 120 bp, Artificial Sequence
  ENSG00000205488_6 (sequence is synthesized)
taatgtaaccaagcagacttcttggccttcatccctgcctcctctagtcttctcatctctctctctctctctctctttttgagacagaatttggctctgttgcccaggctggagtgcagt

SEQ ID NO: 828559 - DNA, 120 bp, Artificial Sequence
  ENSG00000205488_7 (sequence is synthesized)
tttagagagaaaaatgaggcagcatctccatttgcaggctgggagcatgccctgggcccaggttacagctctgtccacagggggctgcgcaagaaagagtgtgtgctttgctcctgggag

SEQ ID NO: 828560 - DNA, 120 bp, Artificial Sequence
  ENSG00000205488_8 (sequence is synthesized)
ccccgcccttcctcgaatattctggagatctcttttgtggtggggagacccagcaaaggctgcacacacagcttgctcaaggtcaccccatgaaaagttcagctggggatcaaggtccct

SEQ ID NO: 828561 - DNA, 120 bp, Artificial Sequence
  ENSG00000205488_9 (sequence is synthesized)
tttttattttggggttttttgggggctaattctgggacatggggaccttctgtcaccttctgagaagggctcttgattgtacactggtgcctgatgcctgagtgttagaattcatatccc

SEQ ID NO: 828562 - DNA, 120 bp, Artificial Sequence
  ENSG00000205488_10 (sequence is synthesized)
aaacgcactttaaaaatatttaaatatctccgctctagatcacccgaatacccaaaaatagcaggttagtaacaaatacctgaaatttcctccacaccatgaaataatacacagccttta

SEQ ID NO: 828563 - DNA, 120 bp, Artificial Sequence
  ENSG00000205488_11 (sequence is synthesized)
aaatgaggatgaggatataacaatggaaaggtttccatggaaaatttttaaaaagcagatagaaaactgtatatgtgatatgatttcatgtattaaacatttatatatgtttatttatat

SEQ ID NO: 828564 - DNA, 120 bp, Artificial Sequence
  ENSG00000205488_12 (sequence is synthesized)
acattcacagaagaaacgcctagataatcatgtaccaaactcttaatagtggatactttggataataggattataagtgcttttaattttcttataaatgtagtatctttgctcatttaa

SEQ ID NO: 828565 - DNA, 120 bp, Artificial Sequence
  ENSG00000205488_13 (sequence is synthesized)
aaatgttttatatttgccatatatcatttctattattaggggaaatgactgaagattcaaaaaccatccctgataaaaaatattccatatcttactgaactcccaatattctttctcttt

SEQ ID NO: 828566 - DNA, 120 bp, Artificial Sequence
  ENSG00000205488_14 (sequence is synthesized)
ctctgaggttaggtaatgtggagggcctggtaatattgtcagctttatatctctcagagatatgagactatggtgagcatagctattattatgtatagaaaagcagaataattaatagcc

SEQ ID NO: 828567 - DNA, 120 bp, Artificial Sequence
  ENSG00000205488_15 (sequence is synthesized)
aaaacaattcaattgttcagaacaaaaccctggagtcatatttaattcctcccttcctcttgcacttctaaaccaatcattcatctctactttgaaaatgtttctttattcatccagtgc

SEQ ID NO: 828568 - DNA, 120 bp, Artificial Sequence
  ENSG00000205488_16 (sequence is synthesized)
accaagccaccatcacctcgaggcaggaatattcaacggcctcataagtggtctccctatttgtgttatattcaatgcatgtcttttcttactcaaaatcctataaaggcttctcttcac

SEQ ID NO: 828569 - DNA, 120 bp, Artificial Sequence
  ENSG00000205488_17 (sequence is synthesized)
catccacgactgtttcctgccttcctcactatgatcccatcactgacccctcaagactatgttccagcctactttctgctccttgaccaacacccttactctgattcccacttttgtgac

SEQ ID NO: 828570 - DNA, 120 bp, Artificial Sequence
  ENSG00000205488_18 (sequence is synthesized)
ttcacatgagtcccctgtctgcctggacactctgcccccaaccttgaagtgctcacccttccctgtcactcagttgaaagtcaaattccatttcctcatgagggcttccctgaataccca

SEQ ID NO: 828571 - DNA, 120 bp, Artificial Sequence
  ENSG00000205488_19 (sequence is synthesized)
cttttaattaactctctgcctcctcccatcacttctgttttaccccctcttttagttccttcctatcttagtttcataagagccagggccgtttccgacttctttccccgtcaagcctcc

SEQ ID NO: 828572 - DNA, 120 bp, Artificial Sequence
  ENSG00000205488_20 (sequence is synthesized)
ttagataggacaggtcctctgcctcaccgactttaatcagtatttgctaagtaaacagagcacaggaggatcctgttgtcatcaaagagcagctctgcctccaatggcgaaaggattgtt

SEQ ID NO: 828573 - DNA, 120 bp, Artificial Sequence
  ENSG00000205488_21 (sequence is synthesized)
ggaacctcatccttccttcaagttctggttcaaaaaattccatgctatgcctcacatggccttgcccaggtgcctgtttgatttgcctgggttgtctgttctttcttccccactgtcctc

SEQ ID NO: 828574 - DNA, 120 bp, Artificial Sequence
  ENSG00000205488_22 (sequence is synthesized)
atttgccatgtggctcggtggtggctggagacctccatgctggcccctgggagcagctgctaaggctcggcgcctcaggacaccttggcacctgtggatatcgaccaccaggcttctctt

SEQ ID NO: 828575 - DNA, 120 bp, Artificial Sequence
  ENSG00000205488_23 (sequence is synthesized)
ctgttcatgtctctgcaagaatgagaacctgcccccataccatttgtgctgtgtaggcctcaggaggcatggactcacgcatccagcttcctgcaagccctctggtacatcgcagtgttc

SEQ ID NO: 828576 - DNA, 120 bp, Artificial Sequence
  ENSG00000205488_24 (sequence is synthesized)
acccccagctttctattacagccaccacccagggactctggtgcaggctccttagagagaggccaggaaactgccgaggtgataagtgacagcaggtctcaggggaagagaggacttctc

SEQ ID NO: 828577 - DNA, 120 bp, Artificial Sequence
  ENSG00000205488_25 (sequence is synthesized)
tccttagtaaagaacctgtcgaggtcggaaagacactccaggctcaaagccaaatttgaaagttaggctgacagcccaactagggcagattggaggagccaggtggagagaggatgtggg

SEQ ID NO: 828578 - DNA, 120 bp, Artificial Sequence
  ENSG00000205488_26 (sequence is synthesized)
ggagtcaggaaagaggtggaaggagaagcctggaagagtggctccgctcctggagtatggccagcggcacttcgtcaggacctcgaccttcacccactagtgggagggtgttcctcgcat

SEQ ID NO: 828579 - DNA, 120 bp, Artificial Sequence
  ENSG00000205488_27 (sequence is synthesized)
gacttgtaggatcacctgggaaacacacaaatggaagaatttaaaaatatctgctaggacaccccgtgtcccccacaactcatcacagagcaaacccatcacagagcaaactccttggct

SEQ ID NO: 828580 - DNA, 120 bp, Artificial Sequence
  ENSG00000205488_28 (sequence is synthesized)
acttcttgtcttgggccgtcttttcatctggcctgtttgcctgactggactttggggtctttgttcccagcatcaaaatttcctaccagcgactttccatcacagctcccttccagtctt

SEQ ID NO: 828581 - DNA, 120 bp, Artificial Sequence
  ENSG00000205488_29 (sequence is synthesized)
ctggaaattgtcagatgtgcctggatttgcagggcctgcacaagatatgctgtcgatctgggatttttggggatttttgcagttcacactccaatgtgcaacagcaaccaaacggagatg

SEQ ID NO: 828582 - DNA, 120 bp, Artificial Sequence
  ENSG00000205488_30 (sequence is synthesized)
gaggacgtgaacatgaactactggagatgctgatgaaacgtgtgtaaggaccgcaatggtatctgtgtcctgctcgtgaaattgaccagatacagcggcttccttttgcttccgaaggcc

SEQ ID NO: 828583 - DNA, 120 bp, Artificial Sequence
  ENSG00000205488_31 (sequence is synthesized)
cggattgacctgacaattgatatgctttgctctatactccaactcccattgaccatggggtgaaagcaccctttctcggtcagcctcactgcttccccgcagatggagggattttctgca

SEQ ID NO: 828584 - DNA, 120 bp, Artificial Sequence
  ENSG00000205488_32 (sequence is synthesized)
ggagcatgggccctgggccttcctttcccactgtctcttgaaagcctcctccagatgtgctgcctggctcagctctttgggtgacttttgttctgtctcatgtgacccatcaagattcac

SEQ ID NO: 828585 - DNA, 120 bp, Artificial Sequence
  ENSG00000205488_33 (sequence is synthesized)
acagggctgtgtcccgggcagggctggagtcgacattcagggaggagatcactgttctggaacagagcagtgattggtttaattgaaatctgatagatcatcatgtaaaaagctggcatg

SEQ ID NO: 828586 - DNA, 120 bp, Artificial Sequence
  ENSG00000205488_34 (sequence is synthesized)
taagcatgctcccggagcctgcagggccctgcgcggcctcttgcctggccatcacgtagaggcggtcctcttgcatggttgggggcctcacctgcaccacgggcccccaagccaaacagt

SEQ ID NO: 828587 - DNA, 120 bp, Artificial Sequence
  ENSG00000205488_35 (sequence is synthesized)
gagattgtacggagaccatcctggtcaggtcttgcagtttgcaccaggtagccccaggctatcctgccgtgcaagagctgccttctcagcacagtggagttctacggctgcctcggctgc

SEQ ID NO: 828588 - DNA, 120 bp, Artificial Sequence
  ENSG00000205488_36 (sequence is synthesized)
caagcgggattaaacccggattaaaggatcagccctaaaccaaagcagaccagtaataggtctcatgataaaagcagccaaataataatagtaaaaatctattcttggacttattacttt

SEQ ID NO: 828589 - DNA, 120 bp, Artificial Sequence
  ENSG00000205488_37 (sequence is synthesized)
cctgggaaaagggctatttcttgtgaaatatgcagcgattggaactttccccgacagcccaccgtgagctcactcactgcccctgcctgtgctggggggtggtgggtggtgagaggtgca

SEQ ID NO: 828590 - DNA, 120 bp, Artificial Sequence
  ENSG00000205488_38 (sequence is synthesized)
agtgaagggtctggacagaggcagagggaggagagggggcagggggatggggaggaagaatggggggttcgctctgggatagcttcatgatccactgaacctttcaaacttgatgcttga

SEQ ID NO: 828591 - DNA, 67 bp, Artificial Sequence
  ENSG00000205488_39 (sequence is synthesized)
agcttcatgatccactgaacctttcaaacttgatgcttgacgttttgaaaaaaatgacagaaaatat

SEQ ID NO: 828592 - DNA, 68 bp, Artificial Sequence
  ENSG00000205488_40 (sequence is synthesized)
aaattgtttgaatctaggagacagagattgcagtcagccgagatgctgcctctaaactccaggctggg

SEQ ID NO: 828593 - DNA, 120 bp, Artificial Sequence
  ENSG00000205488_41 (sequence is synthesized)
tgcagtcagccgagatgctgcctctaaactccaggctgggtgaccaagtggggctctgtctcgaaaaaaaaaaaaaaagtgtactagggggatgtcgttgaggggcttagccacatgcta

SEQ ID NO: 828594 - DNA, 120 bp, Artificial Sequence
  ENSG00000205488_42 (sequence is synthesized)
cagatctttttataccaagatgcattcaatgattagctaagttggacagtttgttactttaagcctccacaaccaaaggggcaagataattatctcccagagaacaagttgatcttcttt

SEQ ID NO: 828595 - DNA, 120 bp, Artificial Sequence
  ENSG00000205488_43 (sequence is synthesized)
gaaggataaggagttccccaagcagcaggaagagcttctgttcccaattccagcctttgaagtttaagcttcagaagaaaaccttagcatttaatacaggaaggcatgcacgtgtgtgtg

SEQ ID NO: 828596 - DNA, 120 bp, Artificial Sequence
  ENSG00000205488_44 (sequence is synthesized)
catgtgtttgtacccacacatgtggctcaagcttccctgtgacaatgggttgcctgcgggtaagcgtgggatgtgtggagaaggcaggagggtttagggcgtgggctcagtaccctgatg

SEQ ID NO: 828597 - DNA, 120 bp, Artificial Sequence
  ENSG00000205488_45 (sequence is synthesized)
agagatttaaagcaggcaaagggattcggcaaagtgcagctcccatttcatcatttcttcagaccctgccttagttatttactgctgtggttttaaactctgctcttcgaaacccttggt

SEQ ID NO: 828598 - DNA, 120 bp, Artificial Sequence
  ENSG00000205488_46 (sequence is synthesized)
ttctgcagaagtccttcgagaggttcgtgggggcaaaggaaggtgaggggcaggagcccaggccacccggcctccttcctttccccacgtctgctttcaactgtttcatatgcatcatgc

SEQ ID NO: 828599 - DNA, 120 bp, Artificial Sequence
  ENSG00000205488_47 (sequence is synthesized)
aaatcgcagctgtcatggctcaggtcctcatgtgtacaatgggcgccatggcagcgtccaggtcagagggtgaccagagtgacatgaattaagacacgagaggactccaaagagtggtca

SEQ ID NO: 828600 - DNA, 120 bp, Artificial Sequence
  ENSG00000205488_48 (sequence is synthesized)
ggcctctcacgtcataagatctccataaatggtcactattattttgtgttattaggggtacgcttttcatttgtaagatgacttccatggggccccacgcctcatgaccccgtctcaccc

SEQ ID NO: 828601 - DNA, 120 bp, Artificial Sequence
  ENSG00000205488_49 (sequence is synthesized)
cctgcaaataccatcccatggagaggcaggacttgagcctatgaatttgaggggtacacggttcagtccaaaccttttggtgtttctgtgtatccatttctgcatgtgtaaaatgaggag

SEQ ID NO: 828602 - DNA, 120 bp, Artificial Sequence
  ENSG00000205488_50 (sequence is synthesized)
aacagacagcttccgacctcatctccaaaggcgcacggaggaggtggaaaggccctcgccggagactgagcactgcagccagcgcaaggccggatttgctgcttccgcgcggggacgccc

SEQ ID NO: 828603 - DNA, 120 bp, Artificial Sequence
  ENSG00000205488_51 (sequence is synthesized)
tcggaaaggtggcaggtgcccacggcgaggaaggggcgggagtgaggggtgcgtggcccgagagaactcagtgaagaaggccattagggaggaaataagggaaacggggtgtgcgaagct

SEQ ID NO: 828604 - DNA, 120 bp, Artificial Sequence
  ENSG00000205488_52 (sequence is synthesized)
ctgagctttttctgcccggtttggctgaggacacgccacgggtgagcatctgcgcgaggggagcttggtgggtgaggaaggaagaagacacgatagagaactggaagcaagaagggagga

SEQ ID NO: 828605 - DNA, 120 bp, Artificial Sequence
  ENSG00000205488_53 (sequence is synthesized)
aaccaaaaggaacggggaggagaaagggcttctctggagctgcttgcttttcccagattctcctgccattcctggctccagggagtcctgaaggaacgatggttagggcggagaatcctg

SEQ ID NO: 828606 - DNA, 120 bp, Artificial Sequence
  ENSG00000205488_54 (sequence is synthesized)
cagaggaaaggagagaaaggactagaggtcacacacggcttcttggaggggagcggggagcaggggctccgaggctgcgggtcgcaggctccagggcaggaagctctccatgggaaccgt

SEQ ID NO: 828607 - DNA, 120 bp, Artificial Sequence
  ENSG00000205488_55 (sequence is synthesized)
agtatgaattccaccgaggtgcgtcccggcacagacccgaaggcagccacatttgtggaaataagatttgacgtgcatttcggatccgcagagaaggtggactctgttttgcagaatgga

SEQ ID NO: 828608 - DNA, 120 bp, Artificial Sequence
  ENSG00000205488_56 (sequence is synthesized)
ccagcggtggggggtggggtggggggcaggaaaagactttaaacgctggcagaactttgtattccactcattcgtgcatgcattcattcagccatcctttcgctatcattcatcaaacta

SEQ ID NO: 828609 - DNA, 120 bp, Artificial Sequence
  ENSG00000205488_57 (sequence is synthesized)
gcgcgcactgaggccactttgtgtcagcgcagcgcctggcctgaggacctcagggtggtgtcggcaaagttccgctgccaaggagttcacgggccgtgtttcctgccaggccgcagacac

SEQ ID NO: 828610 - DNA, 120 bp, Artificial Sequence
  ENSG00000205488_58 (sequence is synthesized)
tctctgcgtggagcccgaggaggttctgtgtgagatctcaccctgcgggaagaaagaggcggaggctcggggttggtccaatcacacccctgatggtgagagacgggcgggcggggcctg

SEQ ID NO: 828611 - DNA, 120 bp, Artificial Sequence
  ENSG00000205488_59 (sequence is synthesized)
acgcccactcccagctggatgcctgtctcccaccccgcgtgtcctttcccagaccccaaagcttcctgcctggtctcagttcttcggagaagagggattagaagctggaacaggtatttc

SEQ ID NO: 828612 - DNA, 120 bp, Artificial Sequence
  ENSG00000205488_60 (sequence is synthesized)
tgctaatggggcgtggcagatcggcatttgcgggggctctgtcaccccgtaagatgtcccagcaggaagcgtggcgggtctccactgagagctccacggagcagctttggctccctgaga

SEQ ID NO: 828613 - DNA, 120 bp, Artificial Sequence
  ENSG00000205488_61 (sequence is synthesized)
agtcgaggtgtgagcagtagcggccttccctttgcagagagaaggcttggggagagaagaccctggtgccatcttcataggaggtggaaaggaaactgtatgacaggagaatgaatcagg

SEQ ID NO: 828614 - DNA, 120 bp, Artificial Sequence
  ENSG00000205488_62 (sequence is synthesized)
tttggggctcaaggtgccggccactgggaaaaacagctgccccgagttgcaaaactctgggtcctatatgtataaactatgccctgaggaaggaatctcaggcgtatcttaggagaaaat

SEQ ID NO: 828615 - DNA, 120 bp, Artificial Sequence
  ENSG00000205488_63 (sequence is synthesized)
gttctagcttgggaaacaaacacaacaggaccgtgaatccaaatatttcaagtgggtttagaggactggagttctaaacgctgcttttactgtaagtgatcacgccccggaatgtgctga

SEQ ID NO: 828616 - DNA, 120 bp, Artificial Sequence
  ENSG00000205488_64 (sequence is synthesized)
agaaaggaaaatgagccagtatcggcgaggactatgggcaaggaaaacgagagtgtgcgatgtgtcaaagcaagacatctgtgtatagtaatataatcaagtaatagatagtcatagaat

SEQ ID NO: 828617 - DNA, 120 bp, Artificial Sequence
  ENSG00000205488_65 (sequence is synthesized)
caagctgatgtatttggcaggggccgcgggaggatgaggcaactcccatcagattagaaagatgttaacactgtaacaaaagtggggctcgaggaaggggaaaagcgcagctctcttttt

SEQ ID NO: 828618 - DNA, 120 bp, Artificial Sequence
  ENSG00000205488_66 (sequence is synthesized)
aagacgccagaaagtagtcagacatgctaagaacaaaacaaacacaaacgaaaaccagcaaagaaagctcttcgagaagagtaaggctactgatctttaggaatcaaatcattatttcca

SEQ ID NO: 828619 - DNA, 120 bp, Artificial Sequence
  ENSG00000205488_67 (sequence is synthesized)
cacatgtcatgaagaacacagacattaaagcacaaaggagaaacttaaatgaaagtaggagggagaagtcaaagctcaagtaaagagatttttaacctagagaggctgagttatcaagga

SEQ ID NO: 828620 - DNA, 120 bp, Artificial Sequence
  ENSG00000205488_68 (sequence is synthesized)
agaaagaaggccaagccagcttgttgcagaatgttccagaagataagataatgatagacttaaataaatagggactgatcaaggtgatagcgagttcttggtgaaattgcttccaaggat

SEQ ID NO: 828621 - DNA, 120 bp, Artificial Sequence
  ENSG00000205488_69 (sequence is synthesized)
tttatagaagtgtatttcatggaaatgtacagtaaccggatgactgtattaaaattttaaaactgctgggtgtggtggctcatgcatataattccaacactttgggaggccaaggcgggt

SEQ ID NO: 828622 - DNA, 120 bp, Artificial Sequence
  ENSG00000205488_70 (sequence is synthesized)
ttccctgcagctctcatcccctgctcatccaagcctccctccttccagatgaataggaacaggttacagctgacccagtttcactcccagcttcagaagatgaatcacgatatttgagtg

SEQ ID NO: 828623 - DNA, 120 bp, Artificial Sequence
  ENSG00000280036_0 (sequence is synthesized)
cagctggatttccagagaagtgtgttccttgtgtctctgtatcctgcttagcgacaggtggagctcttgtccagtgcaacttaagtgactgctaaaaacttggctaacaaataccagccc

SEQ ID NO: 828624 - DNA, 120 bp, Artificial Sequence
  ENSG00000280036_1 (sequence is synthesized)
cagaagtcactctagtgtgttcagagaaagaaacctgtttttcctgcatatcttactaaggacaaatactagagactgattttctccatgctcaccagcaaatcagagatagtgttcatt

SEQ ID NO: 828625 - DNA, 120 bp, Artificial Sequence
  ENSG00000280036_2 (sequence is synthesized)
ttgctgaagtgttttaaggctgttgctgaagtgtttcttcttagtcattttccttcagggcagtacaaagaagtccagtccatccacttctcccttccccacctacacaataacaagata

SEQ ID NO: 828626 - DNA, 120 bp, Artificial Sequence
  ENSG00000280036_3 (sequence is synthesized)
acaagctgacagcaggtaccacttcttgcctcctttagtcatgttagagttctgtctttataagtatatgcacatctttatttctgagcttttctaatcctaggaacagttcattctgat

SEQ ID NO: 828627 - DNA, 120 bp, Artificial Sequence
  ENSG00000280036_4 (sequence is synthesized)
tagcaaagtaaagtagatgtgggaggcaggactgtttgaaaaccattgaatcatgattttgaaataattgaagtttctcaaaattcagacataaaacaaatttttatatgcattaacatt

SEQ ID NO: 828628 - DNA, 120 bp, Artificial Sequence
  ENSG00000280036_5 (sequence is synthesized)
tgtgctaagagagtatatctaaatggagaaagaagataagcaggctacagaaatcttacgaacttagcttgcccaccctcactcaagggctgaaaaatatgtggtctttttttttttcac

SEQ ID NO: 828629 - DNA, 120 bp, Artificial Sequence
  ENSG00000280036_6 (sequence is synthesized)
cttgtgcttttaatgagaacggaaagaagtatgtctaaagctgattggtagctctgtggtgaatgtttaggagctatcaaaattgagagaccttagggaattcaattactggagaagggt

SEQ ID NO: 828630 - DNA, 120 bp, Artificial Sequence
  ENSG00000280036_7 (sequence is synthesized)
cagacttggaatttatacagtactccttgtctggtgccagggagagggcttagcagtcaattctgtcccagctgcagtcatttgattgtgttggtaaggagaccaacaaaaagaagagca

SEQ ID NO: 828631 - DNA, 120 bp, Artificial Sequence
  ENSG00000280036_8 (sequence is synthesized)
tttcaataatctaaacaggaccaaacaaagagactgaacaaaggtgtgtgccacagcttcagggagcgggtggtggaaggagacatggcctggcagcattctgaaggtgggaaatggcag

SEQ ID NO: 828632 - DNA, 120 bp, Artificial Sequence
  ENSG00000280036_9 (sequence is synthesized)
gctgcagtgcagagggagtaaacagccaggacctgtggctttgtagcaaaaacagagtggctgatgatttgttatggtgctgtcagcacatccgttcttgttccttgtatacaataattg

SEQ ID NO: 828633 - DNA, 120 bp, Artificial Sequence
  ENSG00000280036_10 (sequence is synthesized)
tgcatttggcaaattgtggcaagaacagagaatgactgttgagaacttttggattgctgtcaacggtcagactgtggttctgaagaaaagccataggttcaaacccagaaactgaggagg

SEQ ID NO: 828634 - DNA, 120 bp, Artificial Sequence
  ENSG00000280036_11 (sequence is synthesized)
aacattgtgtttttcttttagttgttagttgtctatataatatctccattctttctctctccctttttgtgtcctatggccacttccacatatactcttacccaaccccttaaacctaaa

SEQ ID NO: 828635 - DNA, 120 bp, Artificial Sequence
  ENSG00000280036_12 (sequence is synthesized)
ctcttcccctcttaatgacagcaattgttcagggcatgtttatggaccagtctgcaaacaggaaactctacttcctgaatatgataggagttaaatgatactaactggataagatgaaaa

SEQ ID NO: 828636 - DNA, 120 bp, Artificial Sequence
  ENSG00000280036_13 (sequence is synthesized)
tttgtgagttaagtgttctttaaagatctgttgctgaaatgcttttcttgtgagaagaggaaagagaaagcacaagttagtgagtgagaggagcttcactgcagagaaactcaaagtcag

SEQ ID NO: 828637 - DNA, 120 bp, Artificial Sequence
  ENSG00000280036_14 (sequence is synthesized)
tctttctgaaaagccctgctttctttattgaattaacatacaactagggttaacgacatttaccagtcaacctatttgcagtcctccaagagagctagttttgggtttaaaaaaaaaaaa

SEQ ID NO: 828638 - DNA, 120 bp, Artificial Sequence
  ENSG00000253329_0 (sequence is synthesized)
atggactggacctttctcagcctcctcgctcactgcacaggtttcatggccacatatgagctgtctcagccaccctcagtgtcagtggccccattacagatggccaggatcacctgctgt

SEQ ID NO: 828639 - DNA, 120 bp, Artificial Sequence
  ENSG00000253329_1 (sequence is synthesized)
ctgtgccggtcatctataaagacagcaagtggccctcaaggacccctgagtgattctctggctccaacttgtggaacacagccactctgaccattagtggggcccaggccagggacgagg

SEQ ID NO: 828640 - DNA, 79 bp, Artificial Sequence
  ENSG00000253325_0 (sequence is synthesized)
atggactggacctgaaggatcctcttcttgatggcagcagcaacaggtgcccactccctgcagctggtgcagtctgggt

SEQ ID NO: 828641 - DNA, 120 bp, Artificial Sequence
  ENSG00000253325_1 (sequence is synthesized)
gtatacccacggcttcacaggatggtttgtcttctccatggacacgtctgtcagcacggcgtgtcttcagatcagcagcctaaaggctgaggacacggccgagtattactgtgcgaagta

SEQ ID NO: 828642 - DNA, 120 bp, Artificial Sequence
  ENSG00000253327_0 (sequence is synthesized)
agggtggcagcacgcgtgggcgcggcgagggctgccttctccctcgccctcccgcccccaggagtccggctccccgacggcagagcggcggggaaagggtggggggagggagctggagga

SEQ ID NO: 828643 - DNA, 120 bp, Artificial Sequence
  ENSG00000253327_1 (sequence is synthesized)
cagagcggcggggaaagggtggggggagggagctggaggaaaagaaggggtcggccgagtctcttaccttgctctccgctgggagttgggcgggctgggtggcccggggaggggaaaagg

SEQ ID NO: 828644 - DNA, 120 bp, Artificial Sequence
  ENSG00000253327_2 (sequence is synthesized)
gtcgggggagggggtggggaaaggggggagcccttgcgaggtgtagcttccgagcagctcccgccgccgccacagccggcgcctcctttccgattcactcaaacaaacaagatggctgcc

SEQ ID NO: 828645 - DNA, 120 bp, Artificial Sequence
  ENSG00000253327_3 (sequence is synthesized)
gttacgccgcggctcttcctgccgcccaaatcctcggttcaaatcggcaggatgtttacggtcaaaatggtacctgtgcgcctgcgcagccagcccaagcccccccctccccccagaagg

SEQ ID NO: 828646 - DNA, 120 bp, Artificial Sequence
  ENSG00000253327_4 (sequence is synthesized)
agcggcgcaggcgcaatgactatttccttttctttggaacccgccctctgtttgtggagtccacaactgagcaagcgcaaagagatctttccagtgatgaaagaaattgaagaggacaca

SEQ ID NO: 828647 - DNA, 120 bp, Artificial Sequence
  ENSG00000253327_5 (sequence is synthesized)
ggattggaagaatcaatattgttaaaatttccatactacccagagcaatctacagattcaatgtaatccctatcaaaatatcaatgacattcttcacagaaagaggaaaaaaatcctaaa

SEQ ID NO: 828648 - DNA, 120 bp, Artificial Sequence
  ENSG00000253327_6 (sequence is synthesized)
tgacattcttcacagaaagaggaaaaaaatcctaaaatttatatggaaccacaataagaccaagaatagccaaagcaatcctgagcaaaagaataaagctggaggcatcacattacctga

SEQ ID NO: 828649 - DNA, 120 bp, Artificial Sequence
  ENSG00000253327_7 (sequence is synthesized)
tatactacaaagtgatagtaaacaaaacagcatggtgctggcataaaaacagacacatagactaacggaacagaatagaggacctataaataaatcaatacatatacagtcaactaattt

SEQ ID NO: 828650 - DNA, 120 bp, Artificial Sequence
  ENSG00000253327_8 (sequence is synthesized)
tgaaacagatcactatcttttgccatattaaaaaaatcaaaacaaaatggcttgaagactggaatctaagatttgaaactattgaaactactagaagaaaacgttagggaaatgctccag

SEQ ID NO: 828651 - DNA, 120 bp, Artificial Sequence
  ENSG00000253327_9 (sequence is synthesized)
aaccaaatatttcttagtaagaccttaaaagcataggcaagcaaagcaaaaatggacaaatgggatcatgccaagctaagaaccttctgcaaagcaaacaacaaagtgaagagacaaccc

SEQ ID NO: 828652 - DNA, 120 bp, Artificial Sequence
  ENSG00000253327_10 (sequence is synthesized)
atcaagtgggggaaaatacttgcaaactactcatctatcacagaattaatagccataatatataaggagctcaaacaatataataggaaaataatccaattaaaattgagcaaaagacct

SEQ ID NO: 828653 - DNA, 120 bp, Artificial Sequence
  ENSG00000253327_11 (sequence is synthesized)
gaatggttatttctcaaaaaagacatacaaatggccaacagggatatgaaaaaatgcttaacatcactaatcatcagagaaatgcatatcaaaactaggatgaggtataatctcatccca

SEQ ID NO: 828654 - DNA, 120 bp, Artificial Sequence
  ENSG00000253327_12 (sequence is synthesized)
gttgaaatggcttttatccaaaatacaggcaataatgaatgctgataaagatgtggagaaagagaaacactcgtacactgttggtaggaatgtatgttagtacagcactgtgaagaacag

SEQ ID NO: 828655 - DNA, 120 bp, Artificial Sequence
  ENSG00000253327_13 (sequence is synthesized)
tatagagattccttaaaaacctaaatatagagccaccatatgagccagcaatcccactcctgagtaaatacccccccccaaaaaaaaaggaaatcagtacatcagagtggtatctgccct

SEQ ID NO: 828656 - DNA, 120 bp, Artificial Sequence
  ENSG00000253327_14 (sequence is synthesized)
ctcacatttattgcagcaagattcacaattgtcaagatatggtatcaacgtaagtgtccatcagtggatagatgggtaaagaaaatgtggtacacatacacaagataatatttttcagcc

SEQ ID NO: 828657 - DNA, 120 bp, Artificial Sequence
  ENSG00000253327_15 (sequence is synthesized)
atgtggtacacatacacaagataatatttttcagccataaaaaagaaaaaaagtcctttcatttgctgcaacatggatagaactggaagacattaagtgaaataaaccaggcacagaaag

SEQ ID NO: 828658 - DNA, 120 bp, Artificial Sequence
  ENSG00000283095_0 (sequence is synthesized)
agacatccaacccagagactcagggacagagagctggcacacagggcaaggagccttccacatttttctgtcttacacctgtacttcggctcgttatcttaaactgaacagtgaaggctt

SEQ ID NO: 828659 - DNA, 120 bp, Artificial Sequence
  ENSG00000283095_1 (sequence is synthesized)
tgagagtgtgtcccctggttccgtgcgaagggccacgcccagaagaaaaggagctgctccacccaatgggaggagtccggggaaagaaaaggggacagggttcggttccccacaattcta

SEQ ID NO: 828660 - DNA, 120 bp, Artificial Sequence
  ENSG00000283095_2 (sequence is synthesized)
ctcccctccagctatctgggaaaggacctcaggaatgcatgcctctgcctctgccattgcaaggtgaggtccaagggccatgccgccaggcactctgggcttaaccttctgcatagaaga

SEQ ID NO: 828661 - DNA, 120 bp, Artificial Sequence
  ENSG00000283095_3 (sequence is synthesized)
caagaacaccaaactccaggaaggtgggattccttcctggtggctgggcttggagggaagctgggaaccagagagagggcctcggtagaaactgccgggaggctgctccaagggcaactg

SEQ ID NO: 828662 - DNA, 120 bp, Artificial Sequence
  ENSG00000283095_4 (sequence is synthesized)
ggagaaatccgaggggagcagagcctacagcagccacgcatgtggagaagaagacaggaaatccttgaaagagagagctattgggaggaagggctaaggagttcacatgacgtgctcccc

SEQ ID NO: 828663 - DNA, 120 bp, Artificial Sequence
  ENSG00000283095_5 (sequence is synthesized)
tggccaatctgcaaaggtcaaggatggggcgtcaggagcggcccctccagccacggcacaggatccactgtgtgttccccgcagcaccggcgaagcaatcagccacagcagctgcgtgga

SEQ ID NO: 828664 - DNA, 120 bp, Artificial Sequence
  ENSG00000283095_6 (sequence is synthesized)
gtccttcttgccaggcagagccagtgctgaggctcccctgcagcctccccacgccatggacggtggagtcggaagcataaaagccccaggactgcgccgtgtttaataacatccagactc

SEQ ID NO: 828665 - DNA, 120 bp, Artificial Sequence
  ENSG00000283095_7 (sequence is synthesized)
gaggtcacaagccccagcctcaaggttagaacttaccttaaactggacttcgattcttggtgattgtgaagccttaagcaaattatcgaatccctctatgccccagtttcatcatctgaa

SEQ ID NO: 828666 - DNA, 120 bp, Artificial Sequence
  ENSG00000283095_8 (sequence is synthesized)
aaagcaggatgacaatactcagctcgtagagctttgtaagcgctgaatgaggagcaggtgaagtgctcagtgccattctggacacttgggctgtgtccagggtgccgctaagagcacagt

SEQ ID NO: 828667 - DNA, 120 bp, Artificial Sequence
  ENSG00000283095_9 (sequence is synthesized)
cgacccctcttcatacctgcacctgccagcagctcacaaggtggcccctgctgaataaaagcaggggcaattagtagtggactgctcatacacggctatggtgtcagcatgtcaacgtga

SEQ ID NO: 828668 - DNA, 120 bp, Artificial Sequence
  ENSG00000283095_10 (sequence is synthesized)
atcaatgactgaacaagacaccgaggctcaaggacagcaggggacagcaagatgaccatgagcacgctcaggcttcagaagaggctcgctgctagtgtcctccgctgtgggaagaagaag

SEQ ID NO: 828669 - DNA, 120 bp, Artificial Sequence
  ENSG00000283095_11 (sequence is synthesized)
gtctggctggaccccaaggagaccaatgaactcgctaatgccaactcccgtcagcagatctggaagctgatcaaagatgggctgatcatccccaagccagtgactgtccattccagctcg

SEQ ID NO: 828670 - DNA, 120 bp, Artificial Sequence
  ENSG00000253321_0 (sequence is synthesized)
gaaatattcagtctgtttcatcattgtgaaataatagaattattttaacctcccttttgtttgcctattatgggaattaaaccaagatccccatcgatggagaatgctgaccactgtcag

SEQ ID NO: 828671 - DNA, 120 bp, Artificial Sequence
  ENSG00000253321_1 (sequence is synthesized)
gtagacctcaggcaaaaagaaactgaagactgaactcaggctgttttaaatttcttcccaaggagcctggagacagtcacacctgcaggcgaccaatcttgctagactcgtcacactgac

SEQ ID NO: 828672 - DNA, 120 bp, Artificial Sequence
  ENSG00000253321_2 (sequence is synthesized)
caccaagccttaacatacctttctgctgaccccaaggttttagacaaaggcttgttcccttagccagttgcaaatcagagaatctctaaatccacctgggacctgttagcccctgcttca

SEQ ID NO: 828673 - DNA, 120 bp, Artificial Sequence
  ENSG00000253321_3 (sequence is synthesized)
agatatcctccctttgcagaacaagtcaatgtataacctccacgtattgatttatgagtttgcctattacttctgttttcctgaaatgtacccctgtctttaaaaacgcttgtaagccac

SEQ ID NO: 828674 - DNA, 120 bp, Artificial Sequence
  ENSG00000253320_0 (sequence is synthesized)
gccagctgccatgttctgagtactctctggaagggcctgcatggcaaggaactgatgtttccagccagcagccagcaagaactgcaagccttgtgaatgagcttggaagcagatcctccc

SEQ ID NO: 828675 - DNA, 120 bp, Artificial Sequence
  ENSG00000253320_1 (sequence is synthesized)
ctcactcaagccatgatatgacaacagcctgagacccagaggatgaaggagccgaggaagacagacagaatgtgggagaggctggagctggctgagaagcaaagacaagggggacacaga

SEQ ID NO: 828676 - DNA, 120 bp, Artificial Sequence
  ENSG00000253320_2 (sequence is synthesized)
ctgagaattccccagttttctggccaatttgggtgaaacccagcaactctttgtgttccatccgtcgatactgtgaggtctctctatacactcagtaaatgctcctttttacctcactgg

SEQ ID NO: 828677 - DNA, 120 bp, Artificial Sequence
  ENSG00000253320_3 (sequence is synthesized)
actaatgctttttagagtcacatgcatgctgacttcaacaaagcaaattgtttatctgaatcaactctgccgtgtaccatgtccagtcacttgaatttctatttcatctttgactctcca

SEQ ID NO: 828678 - DNA, 120 bp, Artificial Sequence
  ENSG00000253320_4 (sequence is synthesized)
tttgctaattatgactttgggcaaatcttttgttcactctgtgtatttgtccattttcacattgctgtaaagatactgttgagactggtatctttataaactggtaatttataaacaaaa

SEQ ID NO: 828679 - DNA, 120 bp, Artificial Sequence
  ENSG00000253320_5 (sequence is synthesized)
ggaggactgagcccgggagagagaggggaggggtcggcgcgcgaccgggtcatgcaggtgcagactggccggtcgcttcccgccctccagccacccgcagctccccggcaggcgaagggc

SEQ ID NO: 828680 - DNA, 120 bp, Artificial Sequence
  ENSG00000253320_6 (sequence is synthesized)
ggctcggctggagcgcgccgtccgcccgacccccgccgcctctcgggcgcctgcgctcacgctgcggggcccagcgcattgtgagccgggtcgagctccacgctggcagcgtctgagagc

SEQ ID NO: 828681 - DNA, 120 bp, Artificial Sequence
  ENSG00000253320_7 (sequence is synthesized)
gcagagccaaaattcctgtcactcaaactcaagatttcctcatctataaaatgtagttgttccacatggccagatgcaaagtgtcatttagctataagagtctaatgaatctaggtccca

SEQ ID NO: 828682 - DNA, 120 bp, Artificial Sequence
  ENSG00000253320_8 (sequence is synthesized)
ctcaagccatgatatgacaacagcctgagacccagaggacacaaaccacagtcaaaaaaggtcttcctgagttctgaaggtcaagcaattagaattttctcaggcttgtagaagagtgga

SEQ ID NO: 828683 - DNA, 120 bp, Artificial Sequence
  ENSG00000253320_9 (sequence is synthesized)
attctggaaaccagtcttcgcctcaggggagcatctgttggaagttcttagggatgctcaggcatatggcctcagaaacatgggctattgagacagagaaaaagacaactctggaaggag

SEQ ID NO: 828684 - DNA, 120 bp, Artificial Sequence
  ENSG00000253320_10 (sequence is synthesized)
agagcctggccttacagaagacatctgaactatcaatcaacagaaatctcacgtatagttgaagaatcagaaatctgagcgtaggaagaagtgggttagccctggagaaaggaaaaggag

SEQ ID NO: 828685 - DNA, 120 bp, Artificial Sequence
  ENSG00000253320_11 (sequence is synthesized)
gatcatggttctctgcaaagagctggaagctaaaaagcaggctgtgtttacttaccaaccaggactcagtgggatctttgccagcttccaatatggccttaaaagtatatgaaatccaag

SEQ ID NO: 828686 - DNA, 120 bp, Artificial Sequence
  ENSG00000253320_12 (sequence is synthesized)
aaatatttctgcaaagcaagagatcttcactgctttattttccaccacctgaatccttgcagtgagtgtagtgtgtatctaatcaatctattaaaaaatacttcaaaagttctatatatg

SEQ ID NO: 828687 - DNA, 120 bp, Artificial Sequence
  ENSG00000253320_13 (sequence is synthesized)
aaatgtttttctaaataatattatagtatatatattctgaagcattctattcagtgacaaagaatgatgtttagacaatttacatttatataggaaaactcataacctgaatatgtcctg

SEQ ID NO: 828688 - DNA, 120 bp, Artificial Sequence
  ENSG00000253320_14 (sequence is synthesized)
tataggaaaactcataacctgaatatgtcctgtgggatcaaaccactgacccttccagggtggaagagacctaaggtagtcagcttccatcaagcggccagttggtctcattgaggaatg

SEQ ID NO: 828689 - DNA, 120 bp, Artificial Sequence
  ENSG00000253320_15 (sequence is synthesized)
gtgtcacatcaagggctcagtgttggtctctgttgcagatatatcagacatttgataatggcagcagctggatcagtcttggtaagggttggaagtatagttagtcctcactttgcatgg

SEQ ID NO: 828690 - DNA, 120 bp, Artificial Sequence
  ENSG00000253320_16 (sequence is synthesized)
tcccaatatgcacaaatcctagttaccaccatttagttaaatcacaccagaaccccaacaacatggttcaaatttcagctacaacgttattaactgtgcacaattacacaaagtacaaac

SEQ ID NO: 828691 - DNA, 120 bp, Artificial Sequence
  ENSG00000253320_17 (sequence is synthesized)
ctcactgtcagctctttagtccacaaatcactatgtaaataacagatgcatagcatgatcaataaccaatcacacctctcctttcaaagtccactaatgattggccactgcacatatgtt

SEQ ID NO: 828692 - DNA, 120 bp, Artificial Sequence
  ENSG00000253320_18 (sequence is synthesized)
cagttcctacacagcaaagcgtgtagttgtgttgctgattttcctgtgaatgaagccacatgatggtttacaataatggatactcaaaagaggaaattggccaacaaagatgaaagcgca

SEQ ID NO: 828693 - DNA, 120 bp, Artificial Sequence
  ENSG00000253320_19 (sequence is synthesized)
gaaaaaagtccaaaaagtagtaatgctagaaatgaactccaaattgaatgagttacagaaaaacagttcactgtgagaatgtggccactgcatcattcaagaggatatgcagccagagga

SEQ ID NO: 828694 - DNA, 120 bp, Artificial Sequence
  ENSG00000253320_20 (sequence is synthesized)
acttagcaaaggcaaacttaacataaatgaggaaggaagtgtggcaaaaagcatgctgtctcagaggaagcggtcctggcagaaacttcacattgaagcaactctgggaaatttttcatg

SEQ ID NO: 828695 - DNA, 120 bp, Artificial Sequence
  ENSG00000253320_21 (sequence is synthesized)
acgctgaaaacacaaaggataaaatgttgggagctgatccagtcttagaaaggagaacaattcatcacgtcagagaaaagatgctctctccatgtcgtaagttacacaagaagaagctct

SEQ ID NO: 828696 - DNA, 120 bp, Artificial Sequence
  ENSG00000253320_22 (sequence is synthesized)
gaggagtgaatccacaatacagttcaaagagagatttaaattgctaatttcccggcactggaatgtggggaaagattgtcacagatttagcatgaaagccatgtatttaacattcctatg

SEQ ID NO: 828697 - DNA, 120 bp, Artificial Sequence
  ENSG00000253320_23 (sequence is synthesized)
tctcttaaattgcattttggtttgagaaacagcaagaacaaattcagcattagggggaaactttgctgttgatctcaaagggaatgagaatttagggagcacctctgcccaccaggaagg

SEQ ID NO: 828698 - DNA, 120 bp, Artificial Sequence
  ENSG00000253320_24 (sequence is synthesized)
agctttctcttgagtctcccacatgactgtgtactatggatcacattggaagaacttctctttttcctaatgctgtctgagttttgcattttggtgccagaacagggaagtgaagggata

SEQ ID NO: 828699 - DNA, 120 bp, Artificial Sequence
  ENSG00000253320_25 (sequence is synthesized)
cataagagacacacataatagaaatgtaaaagacaagcaataccaccagacgatagatgtaatttggaacaaagatatttttatttgcctaaggctcagaaagtcgtgccaggcaatgct

SEQ ID NO: 828700 - DNA, 120 bp, Artificial Sequence
  ENSG00000253320_26 (sequence is synthesized)
ggaaggaattggttggcttcctctcccaaaccacttcctcagtgctcatcctctttcaggtggacaagatatggcattttgactgctagcaaatgtcactgtgacatttcaatggcacaa

SEQ ID NO: 828701 - DNA, 120 bp, Artificial Sequence
  ENSG00000253320_27 (sequence is synthesized)
ttggtgacaattcagccaatttttgttgggcaccctccacatgccccagggtctgggctcagccctttacgtacgtgggctcattgattcttccatgttttctagaatgtgattttaccc

SEQ ID NO: 828702 - DNA, 120 bp, Artificial Sequence
  ENSG00000253320_28 (sequence is synthesized)
tggctggcacagagtaaatgcccaaagaatggtagctattgtttttaatcatcattattaattttataaataacttccatatcaggtgatgggaaaatttcagactttgatttgggcctt

SEQ ID NO: 828703 - DNA, 120 bp, Artificial Sequence
  ENSG00000253320_29 (sequence is synthesized)
ggaaaacaggttcagtttcagtagatggaggtaaaaggaggcaaagagcgaccttacgtaaatccaaggctgaaggaaggaggctctaaggggtgtgtgggtgattaggagtaaagtatc

SEQ ID NO: 828704 - DNA, 120 bp, Artificial Sequence
  ENSG00000253320_30 (sequence is synthesized)
ttgtctgaaatgaagagtttctatacagcatgcttatttggagtcatgcctaacaagattactttgggtctaattttggaagcttggtactccagggagcttggacatgaatttaaagac

SEQ ID NO: 828705 - DNA, 68 bp, Artificial Sequence
  ENSG00000253320_31 (sequence is synthesized)
agcttggtactccagggagcttggacatgaatttaaagacaatgggaactcacatttaagtttctgaa

SEQ ID NO: 828706 - DNA, 80 bp, Artificial Sequence
  ENSG00000253320_32 (sequence is synthesized)
caacatggagaaaccccatctctacttaaaagaaaacaagggaggagaccaccccttatattgtcttatgcccaatttct

SEQ ID NO: 828707 - DNA, 120 bp, Artificial Sequence
  ENSG00000253320_33 (sequence is synthesized)
ccaaagaaagaagaagtaaaaactaaaagtcagaaatggaattcacaagcagacagcctggcgccacactctgggtctggtagttaaagatcaacccctgacctaattggttatttgcat

SEQ ID NO: 828708 - DNA, 83 bp, Artificial Sequence
  ENSG00000253320_34 (sequence is synthesized)
gggtctggtagttaaagatcaacccctgacctaattggttatttgcataagattctaattaccggtacatgcagcccccagtc

SEQ ID NO: 828709 - DNA, 83 bp, Artificial Sequence
  ENSG00000253320_35 (sequence is synthesized)
accccgtattcagggagctcggttgttggagacatgagtcttgccgaagctcctggccaaataaagcccttccttctttaact

SEQ ID NO: 828710 - DNA, 120 bp, Artificial Sequence
  ENSG00000253320_36 (sequence is synthesized)
agattatgccattgcactccagtctgggtaacaagagcaaaactccatctcgaagaaaaaaaagtttctgaatggggagctgttctggagtatgcaggaaggattggggtgggaggagaa

SEQ ID NO: 828711 - DNA, 120 bp, Artificial Sequence
  ENSG00000253320_37 (sequence is synthesized)
caagaagaggaatacgttttagcgatattgcagttatttcaggttaaaagtgatagagtcaggggctgaaccaggatatcggccatagaagcagaaaggaaggggtatgtgtgaaagaaa

SEQ ID NO: 828712 - DNA, 120 bp, Artificial Sequence
  ENSG00000253320_38 (sequence is synthesized)
ctgagacccagagttttatggatacttcaaaaatcaagaaagaataagaagatagtaaagaatgttcctctcagccaccctgcatccatccatttcccaccccaacctgcaaaaggtaac

SEQ ID NO: 828713 - DNA, 88 bp, Artificial Sequence
  ENSG00000253320_39 (sequence is synthesized)
cactggattcttgggaggccaaggtacagccatggcagaagatggctgggcacaagggaccagctgcacgctgctcctggagtcagct

SEQ ID NO: 828714 - DNA, 120 bp, Artificial Sequence
  ENSG00000253320_40 (sequence is synthesized)
aagaagagggcttttttccccactctgtgaagttgcttgcttggctggaagtccagagctatcagaggccatcccttaccccgtgaaggagctgtcttgcaatagaagaagcagcccacc

SEQ ID NO: 828715 - DNA, 120 bp, Artificial Sequence
  ENSG00000253320_41 (sequence is synthesized)
ggagcaatttgctgtatgtttattttctttggaatcatctctccttcatggaagcagggttatttatcaacctgtgatggagctcttcctggtttggttagggcatgctgcatactgctc

SEQ ID NO: 828716 - DNA, 120 bp, Artificial Sequence
  ENSG00000253320_42 (sequence is synthesized)
ctgtaataatgctttctttggccaggacacaaaccacagtcaaaaaaggtcttcctgagttctgaaggtcaagcaattagaattttctcaggcttgtagaagagtggaattctggaaacc

SEQ ID NO: 828717 - DNA, 120 bp, Artificial Sequence
  ENSG00000253320_43 (sequence is synthesized)
gtgcggcctagagtgggcctgggatgcctcagcactaatgatcatgatcagagaccccgagttctctcgtgctgctacgcttcgcaacacatagcacaaatggaatatgtgttgacacac

SEQ ID NO: 828718 - DNA, 120 bp, Artificial Sequence
  ENSG00000253320_44 (sequence is synthesized)
ccctctgaagttaagatctttgatattaagaccctgacttttttccctttcattcttccgaaccctctgtgtactttgagcagcactgtggttgattaataaatcatcaaatgtgaaagg

SEQ ID NO: 828719 - DNA, 120 bp, Artificial Sequence
  ENSG00000253320_45 (sequence is synthesized)
tgagaatactcagaagctggagctagggccagttatgtgctgctactgaagtaaaattgaaaacaggaagtggaaaacaaggtagaagtcccttcttttcttctgctttgtgatctcctt

SEQ ID NO: 828720 - DNA, 120 bp, Artificial Sequence
  ENSG00000253320_46 (sequence is synthesized)
ctaatgcctcagattggaaaacctaacaggaagccagctagctgggaggtggagagatttcgtttgcatcatcccaaccccaggattacagagaagagcatagaaagatatcttggagat

SEQ ID NO: 828721 - DNA, 120 bp, Artificial Sequence
  ENSG00000253320_47 (sequence is synthesized)
cacagataaatcgccagcacagacaacatcatgtccagttaggaggccatggcagtagcccaggagagagaagatgatggcccagacatttggtcaggacacaaaccacagtcaaaaaag

SEQ ID NO: 828722 - DNA, 120 bp, Artificial Sequence
  ENSG00000253320_48 (sequence is synthesized)
ggtggtgagctgtgtttccaggcaaaggggaggacaggacgccttgtggcagcccaagctgtgaaaaatagaatcagaaatctgagcgtaggaagaagtgggttagccctggagaaagga

SEQ ID NO: 828723 - DNA, 120 bp, Artificial Sequence
  ENSG00000253320_49 (sequence is synthesized)
agtttgacacagctgaggcggttgtaggggaatttttcaggctgatttctggggtgggaacttggagtctgtatttttacagaactcttcaggacacaaaccacagtcaaaaaaggtctt

SEQ ID NO: 828724 - DNA, 81 bp, Artificial Sequence
  ENSG00000253320_50 (sequence is synthesized)
aaggtgataacatggggaaaccccatctctacaaaaacaccaaaattagctggacgtggtggcgcatgcctgtagtctcag

SEQ ID NO: 828725 - DNA, 120 bp, Artificial Sequence
  ENSG00000253320_51 (sequence is synthesized)
acagtgtaggatccagccaacaggaccaggacagcactggctacactggcttatcgattacatcccacaatagaaaggatgctcaggcatatggcctcagaaacatgggctattgagaca

SEQ ID NO: 828726 - DNA, 88 bp, Artificial Sequence
  ENSG00000253320_52 (sequence is synthesized)
ttcctctcagccaccctgcatccatccatttcccaccccaacctgcaaaaggtaaccactggattcttgggaggccaagaatcagaaa

SEQ ID NO: 828727 - DNA, 120 bp, Artificial Sequence
  ENSG00000253320_53 (sequence is synthesized)
atttcttgccagccgatctcagcccaagccacccaagtctgcacccccctgagtacagtggagatattacattaactttgaaataaaaggagagactctaggtctcactgctcccttcca

SEQ ID NO: 828728 - DNA, 120 bp, Artificial Sequence
  ENSG00000253320_54 (sequence is synthesized)
aacaactgatgtagaacaaagttggaggggttcacactttctgatttcaagacttactacaaatctacagtagtcaaaacaatatggtactagtgtgaggacatatagaccaatggaata

SEQ ID NO: 828729 - DNA, 120 bp, Artificial Sequence
  ENSG00000253322_0 (sequence is synthesized)
aattatgaaatgttgacattttaggtcttggtagcttcggaatggagggacatctgtggagtatgttgggcacttgtatccttctccttggattttttttttttttttgagggaaagcct

SEQ ID NO: 828730 - DNA, 120 bp, Artificial Sequence
  ENSG00000253322_1 (sequence is synthesized)
atttcagactactgggtttacagttgaatggcaaaatgggatctttccaattaccagatttatttaatatattttacgtcaagtgagaaaaatatttataagggacattcaccaaaagta

SEQ ID NO: 828731 - DNA, 120 bp, Artificial Sequence
  ENSG00000253322_2 (sequence is synthesized)
gagagaatgagaggggagctggcagtgggttcctgggaatgatcaccactgcggaaggcaggcagaggatgtaaaaggagctcacaggctgcggactggtggcgggataggcacaaaaac

SEQ ID NO: 828732 - DNA, 120 bp, Artificial Sequence
  ENSG00000253322_3 (sequence is synthesized)
agaagagagggcacctggaaagaaaagaggctcccaggaaaagatgctagttgtaaagcaacttatgagtttggatatctggaccctctctggtgacagcaatataggtaggatgtggaa

SEQ ID NO: 828733 - DNA, 120 bp, Artificial Sequence
  ENSG00000257438_0 (sequence is synthesized)
gccacacagggcatggtgctggtgaagaagtcaggtttctccatgtgggacgccagcaaccacagactgcctctcaaataaagaacctggaaccttcatgctgagaatgcactctctttc

SEQ ID NO: 828734 - DNA, 120 bp, Artificial Sequence
  ENSG00000257438_1 (sequence is synthesized)
ccttcctgataaagaaggctcctgctctgggccaagaaatcccaaaacacaatagtgttctcagggcacaggattgtatggctccacaccctacagggtctcacttggttgcccaggctg

SEQ ID NO: 828735 - DNA, 120 bp, Artificial Sequence
  ENSG00000257438_2 (sequence is synthesized)
ctctccatttcttctcatgaaggaccaaggagttgaactgaagcctgagcgtctgtataagcttttccccatgctgctcttttttgcaaacaccaacacaatttgggctccatttataag

SEQ ID NO: 828736 - DNA, 120 bp, Artificial Sequence
  ENSG00000257438_3 (sequence is synthesized)
gcatctgctgcaccaaccctctttcttggtgcttactggacctgctcagggttaatttctaactcaaagaacctaacttggagtaactccgtaccaccagcaaagcgactggctttgggg

SEQ ID NO: 828737 - DNA, 120 bp, Artificial Sequence
  ENSG00000257438_4 (sequence is synthesized)
aatgacatttacaatgtatccactgttatttggtcacccagcaaactgtcatttttcagaaaccagggctgtctcacaaactggctttcaataaggtgggttgcttagcaactgccaagg

SEQ ID NO: 828738 - DNA, 120 bp, Artificial Sequence
  ENSG00000257434_0 (sequence is synthesized)
ttgtgggaccttgtgattgttgtcttgctctgccatgctggagtacaatggcaatcatggcttaactcagcctcaacttcctggacacaactgatcctcctgcctcaacctcccaagtag

SEQ ID NO: 828739 - DNA, 120 bp, Artificial Sequence
  ENSG00000257434_1 (sequence is synthesized)
cttttataagctttaagtgcctcatgaagacgcgaggatctcttccaagtgcaacctggtcacatcagggcacattcagcagcagaagtctgtttccagtatagtccttggtatggctaa

SEQ ID NO: 828740 - DNA, 120 bp, Artificial Sequence
  ENSG00000257434_2 (sequence is synthesized)
attccactgtccctttctcagcagtcaataatccatgataaattctgtacaacactgtagtcaataacagcagcaccagacagcatattaattcttttaccataaatttgtgtgtaatta

SEQ ID NO: 828741 - DNA, 120 bp, Artificial Sequence
  ENSG00000257434_3 (sequence is synthesized)
agcctgggcctgggagtgtgccaggcagtggagatacagtgataaatgcttgctgaagagcgctaagggacaatgtccagaaaaagagcaggcctaacggcatctttttagcaagtttcc

SEQ ID NO: 828742 - DNA, 120 bp, Artificial Sequence
  ENSG00000257434_4 (sequence is synthesized)
tggcagtaaagtgaaaaaggatgaatgacagcaacttagtttacttgcagcttcctgtaaatttagtcatctgaacaagaggggactgaactgtttcaaaacagaaagcaattgtttcat

SEQ ID NO: 828743 - DNA, 120 bp, Artificial Sequence
  ENSG00000257434_5 (sequence is synthesized)
agagaaaaagtgatgtatctgattattttatgtatgagaggccaagacagacataggtatggatcgcagtaacagctctcttacggggtaaagctctcttatgaggtgaagctggactgg

SEQ ID NO: 828744 - DNA, 120 bp, Artificial Sequence
  ENSG00000257434_6 (sequence is synthesized)
ataagaaaagaaaacgatgaacattcccctcccctcacaaaatgcacacacattaaccttcagcagactagttgctttcttagaaattttgtagatagaaatttatgtcatccattaact

SEQ ID NO: 828745 - DNA, 120 bp, Artificial Sequence
  ENSG00000257434_7 (sequence is synthesized)
ataaatacattgctgtacaacatctccaacatgcaggtcatgctctaggacttggggatatagagtaatacatgtttcgtggccaataataaaagtgacaattgtcttcctaacaaaaaa

SEQ ID NO: 828746 - DNA, 120 bp, Artificial Sequence
  ENSG00000257434_8 (sequence is synthesized)
taaacatgagaaataggaattaatcagcagtctcaaggctcccaaatgccttagtgatattatttatccctctatttatattacggtctttttcttccctcacatgctcaatacatgaga

SEQ ID NO: 828747 - DNA, 120 bp, Artificial Sequence
  ENSG00000257434_9 (sequence is synthesized)
cacgctattgctgttgaattcataggaatgcataaatagactttcttccactcagactgaatatgactccctaaggattttgttggagtgtagtaatgaatgctggttgctaggtagtag

SEQ ID NO: 828748 - DNA, 120 bp, Artificial Sequence
  ENSG00000257434_10 (sequence is synthesized)
aaactgacactgcagcaggcaaccaagtgcaatggtgaaattgctgcttaaaccctgcttatcaaaaagattcacagtgccgattaacttaggtagtctacagagcatcattaatttata

SEQ ID NO: 828749 - DNA, 120 bp, Artificial Sequence
  ENSG00000257434_11 (sequence is synthesized)
cacaaagcagagaggctgctccaaatagcaaaaaatggtatggagtcgggtttggagggagtaaatattaaaatcataaacatcttacagaggcatttctgtgcttcatggagacagatg

SEQ ID NO: 828750 - DNA, 120 bp, Artificial Sequence
  ENSG00000257434_12 (sequence is synthesized)
ggctagtcaaaaaagccttctgtgaacaccagtgacatttgatgtttgcacaaaaaattaataaataaaaataaaataagggggtaaaaaaaagacacaagagctttgggtgatatttgg

SEQ ID NO: 828751 - DNA, 120 bp, Artificial Sequence
  ENSG00000257434_13 (sequence is synthesized)
cactctgcctctgaaaatgatgacaaaccctgggtattttttttttttaaagagtctagaaccaagcagcaatttctggctaaacaatgcaagcctggctggcagttacctttctctcat

SEQ ID NO: 828752 - DNA, 120 bp, Artificial Sequence
  ENSG00000257434_14 (sequence is synthesized)
gttttgtgccttccccaagtcattaagtaagagatctggcctcggcttgcgtgtaaccagtaatgacaacctctttgcagttatctgtgtgcaaacaaccagagacattcagaactccaa

SEQ ID NO: 828753 - DNA, 120 bp, Artificial Sequence
  ENSG00000257434_15 (sequence is synthesized)
tacagcatttttgaagaaaagtaaatcaatcaagaaattaaactatttaaaacatatatttctttcaaataataagaaaaaaatgtcaaggagaaaagtgccctccctgccccacaattc

SEQ ID NO: 828754 - DNA, 120 bp, Artificial Sequence
  ENSG00000257434_16 (sequence is synthesized)
aacatgcagaacagtcgaccaatgctttcatatcagcaggatggttcgatgcaagtacacatatcctgagctatccacagtccccgaactctgcaacattgctttcaggtgatagagaca

SEQ ID NO: 828755 - DNA, 120 bp, Artificial Sequence
  ENSG00000257434_17 (sequence is synthesized)
agatggtccatgcaaatgagctgacacaagtcatgtcgtgtgcaatcaagataggatcccagacatcttcagaatggtttacagtcacaagaaataaagttccaatgaagtggttggcat

SEQ ID NO: 828756 - DNA, 120 bp, Artificial Sequence
  ENSG00000257434_18 (sequence is synthesized)
ttggaagcacactgttttaaatatatctccctgaaggtatgtttatatattagtgcactggtcaatatctgacactatctgtcattttattgcaaaaggatatcagggcaattaatagga

SEQ ID NO: 828757 - DNA, 120 bp, Artificial Sequence
  ENSG00000257434_19 (sequence is synthesized)
gggatcttagcactactttagacaatctttaaagcctgggtaagattcattagctacccaagtggcatttctgacttcaaattgtagtatcatgcaagatttatactgtattaatggagc

SEQ ID NO: 828758 - DNA, 120 bp, Artificial Sequence
  ENSG00000257434_20 (sequence is synthesized)
ctggagtaactctacatttaattatttccattatggggtaaacagcacttgaattaatacaatttagccgactgatgcagtttggttgtttggtttacaagatagatgggatgggagatc

SEQ ID NO: 828759 - DNA, 120 bp, Artificial Sequence
  ENSG00000257434_21 (sequence is synthesized)
gagagcgcctcagaggacaaggagagttgtagggtgatgttactggagagagcctcagagcattgcctgccaagcccgctatgttgtttaagcttcgggatttttcatatccttttatga

SEQ ID NO: 828760 - DNA, 120 bp, Artificial Sequence
  ENSG00000257434_22 (sequence is synthesized)
aaaaatgcacagacatcagttgaattcaaccagaatatagacagacaaataataccatgcagggcaatcaaaagtgctactttcaagctcaaagaagaatttgtttacaaagaatttaat

SEQ ID NO: 828761 - DNA, 120 bp, Artificial Sequence
  ENSG00000257431_0 (sequence is synthesized)
tgcttctatataagcatttaatgcaacagtgttcatctgagtattgcttttgagtgccaaaataccatgtttttcacactccaaactctcaggaaggcttccgaagacaacttgtccctt

SEQ ID NO: 828762 - DNA, 120 bp, Artificial Sequence
  ENSG00000257431_1 (sequence is synthesized)
atttataatactatatattaaagtaactgaaagtattcaaaataatgcttactttgtgcagagtccatgaactctaaccaaaatacataaatgtcaaatttgagcaatacattttgattg

SEQ ID NO: 828763 - DNA, 120 bp, Artificial Sequence
  ENSG00000257431_2 (sequence is synthesized)
attttaaaattccatttgaggcactacttttctgaatagatgcccaaggaaaatattttaaaatattgttgtattaaaaaattgtttcctatagaatctgaaaagttctttaggtagact

SEQ ID NO: 828764 - DNA, 120 bp, Artificial Sequence
  ENSG00000257431_3 (sequence is synthesized)
tttagtaaaatgtttgaacagtttaaatgctatttcagactgtcagaatgatgaatgtttttaaattattttcataatgatttatcactccagtttacagtacttgaaaaatttttttcg

SEQ ID NO: 828765 - DNA, 120 bp, Artificial Sequence
  ENSG00000257431_4 (sequence is synthesized)
cttcacctaaataactggcatttttgtgttatgttcttttcctcgttttatactctgctctgaagcactttcaaattaaaaaaagaacagtattgtattctagggccattagtgaatgtg

SEQ ID NO: 828766 - DNA, 120 bp, Artificial Sequence
  ENSG00000257431_5 (sequence is synthesized)
catgagctattatagtcaatgaaataagcattatatgattgaagattaactaagaaaatggattatggtgtaattaaaaacaccaagataggcgggatgcagtggtttatgcctgtaatc

SEQ ID NO: 828767 - DNA, 73 bp, Artificial Sequence
  ENSG00000257431_6 (sequence is synthesized)
caccaagataggcgggatgcagtggtttatgcctgtaatcccagcactttaagagaccaaggcaggcagattc

SEQ ID NO: 828768 - DNA, 120 bp, Artificial Sequence
  ENSG00000257431_7 (sequence is synthesized)
gcaggagaattgcctgaacccaggaggaggaggttccagtgagcctagatcatgccactgtactccatcctgggtgacaagagcaagactcttgtctcaaaaaaacaaaacaaaacaaaa

SEQ ID NO: 828769 - DNA, 120 bp, Artificial Sequence
  ENSG00000257431_8 (sequence is synthesized)
aaaaacaaaacaaaacaaaacaaaaacaccaagatattcctggaaaagctatgaaaatatgtttttcagttaaggggaagcacttatcaatgctgccagtcctggtaaagattgtcaact

SEQ ID NO: 828770 - DNA, 120 bp, Artificial Sequence
  ENSG00000257431_9 (sequence is synthesized)
gtaaagattgtcaactctaacataatataaagcaggcatttcttgtaataaatatgaagaggatattagccttgatcttagcataactctcttccaggtaggactccagcttctgaaagt

SEQ ID NO: 828771 - DNA, 120 bp, Artificial Sequence
  ENSG00000257431_10 (sequence is synthesized)
aattttgtaatgctcatcaactgaagatgactgtaaagcttggcaccagttcctggaggcagccatgtttctgattaaagtctgggcctagagagctgtatggaaaggtttggaatagag

SEQ ID NO: 828772 - DNA, 120 bp, Artificial Sequence
  ENSG00000257431_11 (sequence is synthesized)
gtgatttagcctaaagaaaattgctaaaccatgggttacacactggtggcctgtagtcctattttgttagacacagacaatggattttatttgtttttcatatttgaattaatttctgaa

SEQ ID NO: 828773 - DNA, 120 bp, Artificial Sequence
  ENSG00000257431_12 (sequence is synthesized)
ttcttgaatattggcagattatgctacaggaatctaaattactctcatttctgcatgtcattaaaaaagtagagatgagtagcaggccccttttccctggggcatgtgcttcccagctac

SEQ ID NO: 828774 - DNA, 120 bp, Artificial Sequence
  ENSG00000257431_13 (sequence is synthesized)
agagtttccctacctggcaactaccagttatcatcactccttaagcagctgttttcttacagtgaagaagttccgtttccatggtgctatcaaaagtaagaaaaggaactatagtttgag

SEQ ID NO: 828775 - DNA, 120 bp, Artificial Sequence
  ENSG00000257431_14 (sequence is synthesized)
aggctgtgttcttaacccattgatgctcctaatgggccctgaagatatttgaccttgtgaccatgtgtaataaggtgatacatgttcatcaaattgtggtgtcctcctcccctgactttc

SEQ ID NO: 828776 - DNA, 120 bp, Artificial Sequence
  ENSG00000257431_15 (sequence is synthesized)
aaatggaattcagatacaatttttacccttattacgattacctacaattataattatgctacttctaagtatatgacctggggcaagtttcttgacctctctatgcctcacattcctcaa

SEQ ID NO: 828777 - DNA, 120 bp, Artificial Sequence
  ENSG00000257431_16 (sequence is synthesized)
ccataaataggggataaaaatagtacctatatcatagagttgtcaaaagaattacatgagttaatgtgtggaaagcactgaagatagtgcctggtaaatacaatgtaccatgtaagtgtt

SEQ ID NO: 828778 - DNA, 120 bp, Artificial Sequence
  ENSG00000257431_17 (sequence is synthesized)
cactgttgcagtcctcatttattttctgattatactaacatttcacttattctgtgttgctcatgtcacctcctaatttgtaagtgactggtagaaagaaacttgtcccaagggtatctg

SEQ ID NO: 828779 - DNA, 120 bp, Artificial Sequence
  ENSG00000257431_18 (sequence is synthesized)
accttcacccacactcagcacttccatcagtctgcatcagttttagggcctggagatgtatttgcacatattgaaggaggtaaataactacagtgaataagataacattcagaaattcag

SEQ ID NO: 828780 - DNA, 120 bp, Artificial Sequence
  ENSG00000257431_19 (sequence is synthesized)
gactgcgaccttagagatcatctagtccaggagttggcaagctttttctgtatgggaccagactgtaaatattttggctttgtggccatattgtctctgtggcaactactcaactctgct

SEQ ID NO: 828781 - DNA, 120 bp, Artificial Sequence
  ENSG00000257431_20 (sequence is synthesized)
ggtgcaatgcaaaagaagccatgggttatatggaatgaataggtgtggctgtgttccaataacactttatttatagacactgaaatttgaattgcatataattttcacatgtcattaaat

SEQ ID NO: 828782 - DNA, 120 bp, Artificial Sequence
  ENSG00000257431_21 (sequence is synthesized)
attattcttcttttgattttttttcaaccttttaaaaatgtaaaaaccattctcagctctgggctataaaaaacaggtggaagatttcacccaggaattccacctggggatttttgttga

SEQ ID NO: 828783 - DNA, 120 bp, Artificial Sequence
  ENSG00000257431_22 (sequence is synthesized)
acagtgaagctacctgggccccactccaaacccattgaataaaaatctctgggtggtggggcaatggaatctgtgctgtgaacatgcgtgtgatccctaccagtgtggctctagggacca

SEQ ID NO: 828784 - DNA, 120 bp, Artificial Sequence
  ENSG00000257431_23 (sequence is synthesized)
cactttaagaaactacccaagtgtggagactttatggccctcctcacagatctaaaaatgatttattaaggttggttataacaagtaccacactgcaaatatgaatatgatcacttttgt

SEQ ID NO: 828785 - DNA, 120 bp, Artificial Sequence
  ENSG00000257431_24 (sequence is synthesized)
cttaaattacttaaatttactcttcacattctcttatttttattatcaaaatttcttgtagacaaaggtcattattttcttctactatgtttaaggaatgtgacagcaccttgaacttac

SEQ ID NO: 828786 - DNA, 120 bp, Artificial Sequence
  ENSG00000257431_25 (sequence is synthesized)
cctaaaatcactgtacattagagaaatcctatttcatgttttcatcaatgtgggaatatgtgcatgtttagtgacattctttgtggtggcaaaaagtaaaataaactctgaaaataactt

SEQ ID NO: 828787 - DNA, 120 bp, Artificial Sequence
  ENSG00000257433_0 (sequence is synthesized)
ttggtggtgcttgtcaaaggcttcgtagcagcggccctggcaggaggaaaggggttctgagttgcaaatcagaaacttgaagatgaaatggctactacgctgggtattgcctttatcttg

SEQ ID NO: 828788 - DNA, 120 bp, Artificial Sequence
  ENSG00000257433_1 (sequence is synthesized)
ctttgccttccaccatgattgtgcggcctccccagccatgtggaacggctggaaatgatggtatggagatgttgcaccacgtggtcccttcactagaggaagagtggtatgaatcgtgtc

SEQ ID NO: 828789 - DNA, 120 bp, Artificial Sequence
  ENSG00000257433_2 (sequence is synthesized)
cgtcactgtgacaccatgcagtcttcctggcagtacacaagttgtgagagtttgctaccatttttacatttttgtgatttaaagtgttgaataacaattaataatgtcatacatactaaa

SEQ ID NO: 828790 - DNA, 120 bp, Artificial Sequence
  ENSG00000257433_3 (sequence is synthesized)
agcctgggcttgagcgcgcgcagaagtcagcttcgtgacttccttctcaggatggaaccagcttggtggcttgagggaaaggggttctgagttgcaaatcagaaacttgaagatgaaatg

SEQ ID NO: 828791 - DNA, 120 bp, Artificial Sequence
  ENSG00000257433_4 (sequence is synthesized)
tttgcgcctcctttgccttccaccatgattgtgcggcctccccagccatgtggaacgacacaactcttcaccagtgcacaaaacctgatgagaaggatacagactggattttggtccagc

SEQ ID NO: 828792 - DNA, 120 bp, Artificial Sequence
  ENSG00000257433_5 (sequence is synthesized)
ttgctgcttaactaggttcccttgcacaacgcacaacctgtgcaatgattatgcagtgaaattgatggccattacctaacgtggcttcagtgaccatgttttcaaaactgggagtcagag

SEQ ID NO: 828793 - DNA, 120 bp, Artificial Sequence
  ENSG00000257433_6 (sequence is synthesized)
tgcatggcttgacatcaaggctttgtgtcacaaagcagaagatcattaatctgggagttgacaacattggaagcacctaaacaagttgattattcatacaagatttttttcaagtattca

SEQ ID NO: 828794 - DNA, 120 bp, Artificial Sequence
  ENSG00000257433_7 (sequence is synthesized)
ttttacccttttttagaatttagtacttaaactttcaagatattgttaaaactgatatttcagacagaaattctaggtaaatgacatctactgtattttaagttgggggcatcctagaaa

SEQ ID NO: 828795 - DNA, 120 bp, Artificial Sequence
  ENSG00000257433_8 (sequence is synthesized)
acctgagaaaagtggtggccaaattcctgaccctgcctctgtccctcagtgctttctgtccagacccttagagcccctgtgagtcctgaacgctgctctggcctgctggacacccaggcc

SEQ ID NO: 828796 - DNA, 120 bp, Artificial Sequence
  ENSG00000257433_9 (sequence is synthesized)
agtggccccttagacaggctggacatgccttcgtctcacaaggaggctcaccagtacacagatgttcatagtcttcacagcagttcccatgccagagacaccggcggtcacactggcagg

SEQ ID NO: 828797 - DNA, 120 bp, Artificial Sequence
  ENSG00000257433_10 (sequence is synthesized)
cagcgtcccggttaaatttctcattacatcgagatgcacaggattctatttttcctatgggcagtaaaggtcaccaactcagctctatggagaccctgttctccccagggtgcctcctgc

SEQ ID NO: 828798 - DNA, 120 bp, Artificial Sequence
  ENSG00000257433_11 (sequence is synthesized)
aggagggttcacagaccagggcaggagtgtacctggcagggaagggcattactctctgcaaaggagaagtacatccacagcctcccatgcacaacataagcctcctccccaccacccaac

SEQ ID NO: 828799 - DNA, 120 bp, Artificial Sequence
  ENSG00000257433_12 (sequence is synthesized)
tgatggtccaaggtgaacaagccttcctgtgttttctgaatgtgcagttcccccgcactttgcctgccaccatgtaagatgtgtctttgcgcctcctttgccttccaccatgattgtgcg

SEQ ID NO: 828800 - DNA, 120 bp, Artificial Sequence
  ENSG00000257433_13 (sequence is synthesized)
gccagcctattctaccatcctcgttctcctgcaaaaccaaggccacgtcatttcagcagaggacctgcgtgtggaaggaccctgcagctggcccatcacaggagaggcccagactcacct

SEQ ID NO: 828801 - DNA, 120 bp, Artificial Sequence
  ENSG00000257433_14 (sequence is synthesized)
cccaaggggaccctggcacatgaagatgctggttctcctgggagtgctgccctggcccacaggatagaagcgcaggatggtcacccatgtctgctcttattgaatgtgtcttagaagcgg

SEQ ID NO: 828802 - DNA, 120 bp, Artificial Sequence
  ENSG00000257433_15 (sequence is synthesized)
tttagcctgggcttgagcgcgcgcagaagtcagcttcgtgacttccttctcaggatggaaccagcttggtggcttgagggtatgggttctgagttgcaaatcagaaacttgaagatgaaa

SEQ ID NO: 828803 - DNA, 120 bp, Artificial Sequence
  ENSG00000257433_16 (sequence is synthesized)
tttctctcaagagctcccaggctatgctgatgaagtacctcttctctgcttctctccagaatagtcaaaaccctcaaaatcctcaaaagttcctggaggtgggaggttccacccccaact

SEQ ID NO: 828804 - DNA, 120 bp, Artificial Sequence
  ENSG00000257433_17 (sequence is synthesized)
ctatcctcgcctcttctactggtctagcccgcaagcccctcggagttcctgaggggcagacaggccctggtgcacacaggcgctccatgccaggcccttgggctctggagcccctgacac

SEQ ID NO: 828805 - DNA, 120 bp, Artificial Sequence
  ENSG00000257433_18 (sequence is synthesized)
tgccctggcacctcagaccccaggactggacacccacatgctccagcccagtcttcacacaggatctcctgcccccatgcacacactgagggccaggatgcaccgtgcaacccctatcct

SEQ ID NO: 828806 - DNA, 120 bp, Artificial Sequence
  ENSG00000257433_19 (sequence is synthesized)
ctttgcctgccaccatgtaagatgtgtctttgcgcctcctttgccttccaccatgattgtgcggcctccccagccatgtggaacggtgagtctattaaacctctttttctttacaaatta

SEQ ID NO: 828807 - DNA, 120 bp, Artificial Sequence
  ENSG00000257433_20 (sequence is synthesized)
tatgaaaatggactaatacatatggtgtttttgtataaattgaaaaaaagcttccatacgagtggaagcagctctgtgggtgcttgactggctaccacctttgggcaaattcagaaaaca

SEQ ID NO: 828808 - DNA, 120 bp, Artificial Sequence
  ENSG00000257433_21 (sequence is synthesized)
tttagcctgggcttgagcgcgcgcagaagtcagcttcgtgacttccttctcaggatggaaccagcttggtggcttgaggcttagctaagggagcagaagactaaccgtggtcactacaca

SEQ ID NO: 828809 - DNA, 120 bp, Artificial Sequence
  ENSG00000257433_22 (sequence is synthesized)
ccttcctcagccagctccccaaactcacaggctggagctaggccctgggccgaggttgggaaccctgaaagtgacaaaggacgagtagaggggctgcagggaagccaagagtgagggtgt

SEQ ID NO: 828810 - DNA, 120 bp, Artificial Sequence
  ENSG00000257433_23 (sequence is synthesized)
ctggagggcagggccgagcccagctgatcctagcagagccaggccgggcagggtggagcactcaccagcagcctctcgagggcggagtacagcttccggactttgtgaggcagccgctgt

SEQ ID NO: 828811 - DNA, 120 bp, Artificial Sequence
  ENSG00000257433_24 (sequence is synthesized)
gaaaaggaggcagatgagcggctgctctgggggaggcccagccccatccagcactcccaggagggcctgaggcctgacctcaggagggggccctccagaccacacttacctcccaggtgt

SEQ ID NO: 828812 - DNA, 120 bp, Artificial Sequence
  ENSG00000257433_25 (sequence is synthesized)
gggctaggcggctgatggccgagttgctgaggccaaacatgacggcaaagaaggaattgagattcttctgctccttgaggctgtgagcagaagacccagagaccctcagggtaagggaag

SEQ ID NO: 828813 - DNA, 120 bp, Artificial Sequence
  ENSG00000257433_26 (sequence is synthesized)
cagccacccctacagtgcccccagacaacagccaggccagcctctgcagagatccaagctggatggggtgggaaggcagaggctccaggggacccagggaacaaatagggtggcagattt

SEQ ID NO: 828814 - DNA, 120 bp, Artificial Sequence
  ENSG00000257433_27 (sequence is synthesized)
cgccctacccactggacagggactcactgggccgccagcttaatgaacttcctgagcagctgggcccgggggccgggcacggggcagagacacagctcggtggccacccagtactgcagc

SEQ ID NO: 828815 - DNA, 120 bp, Artificial Sequence
  ENSG00000257433_28 (sequence is synthesized)
tcattgaagcggcgcatgaagcgctccaggttggcggtggtgacatcccgcagatgctgggggcccagcacatagtggatcagctccacctgggtggggtcagcaggagaggtcagcgag

SEQ ID NO: 828816 - DNA, 120 bp, Artificial Sequence
  ENSG00000257433_29 (sequence is synthesized)
tgctgagccgagccgggcgccccgccgcctgctctcctcccccagctctgcctcccatacctggtggatactgttgaagaggctccagtcgtggtccgtcagctggcctgccaggtcctt

SEQ ID NO: 828817 - DNA, 120 bp, Artificial Sequence
  ENSG00000257433_30 (sequence is synthesized)
ggcactcaccaggtccagcccctcagcagagcccacagtgggccccagctggtcagggtgtgggatctgcgggtgggagagtgctcagggggctgcctgaggaatccagggaaaggcaca

SEQ ID NO: 828818 - DNA, 120 bp, Artificial Sequence
  ENSG00000257433_31 (sequence is synthesized)
gggtagggggagagggttggggcaaggactctatgctcgtgttaggaggagggttaggagggcaggagtggggagtagagggtctctaggggctatagcagctggaggatagggctcccc

SEQ ID NO: 828819 - DNA, 120 bp, Artificial Sequence
  ENSG00000257433_32 (sequence is synthesized)
agtgctgagacccctccttttgggctcctgtctcctggggaacccctaactagggcaggtcctcctctttctccttgggagctcccaaccagtgctaccagcccctgccctgcactatct

SEQ ID NO: 828820 - DNA, 120 bp, Artificial Sequence
  ENSG00000257433_33 (sequence is synthesized)
tgggaattcccccatcagctgaggcccactcctttgtgtgctgaggacccagcagcagccagagccaggcccctcctccctcttctccctgggaccctccccagaatccaccactgccac

SEQ ID NO: 828821 - DNA, 120 bp, Artificial Sequence
  ENSG00000257433_34 (sequence is synthesized)
actcaaaatagatctcctccctgggccctggcaccctgcctggtccctaccagctcatgcacttcctgtgggttgacaacaaagagacgctcattgagccccagagatgtggccacacca

SEQ ID NO: 828822 - DNA, 120 bp, Artificial Sequence
  ENSG00000257433_35 (sequence is synthesized)
cgggcatctggctgcaggccaatggcatctgcaaagacagcagaggcggactgggtgggggaagggagggaggccggggaccagctggatgccagggtggaggtgctgtttgggaggctg

SEQ ID NO: 828823 - DNA, 120 bp, Artificial Sequence
  ENSG00000257433_36 (sequence is synthesized)
agaggttgtttctcctagtagcggggttgaagtcctgggtggtgctcagaatacacaggtgcatgtgcccacgcagccacgcagcccagggaagcacatccaagaggatgaggaaagatt

SEQ ID NO: 828824 - DNA, 120 bp, Artificial Sequence
  ENSG00000257433_37 (sequence is synthesized)
ctcagtgagtcaggaagaacctgggcagggtctgagcctccctcagcctcactttcttccctggtaaaatggagacaataagacttgccccaactatttcataagtcaaataaaataatg

SEQ ID NO: 828825 - DNA, 120 bp, Artificial Sequence
  ENSG00000257433_38 (sequence is synthesized)
tatataaatagtagctataagtacatgctatgtataaaagccctttgaaaattgggaagtgtcttatataagccttggtgttgattttcatcagctcctcatggactgggactgtgcttg

SEQ ID NO: 828826 - DNA, 120 bp, Artificial Sequence
  ENSG00000257433_39 (sequence is synthesized)
agtccccagtccctagagcagtggcctccaaagtaaggtacatcagatcatccatgtgcctggggaaaatatgagctcttctacttacgtttactttttctacctgctttgcatttctac

SEQ ID NO: 828827 - DNA, 120 bp, Artificial Sequence
  ENSG00000257433_40 (sequence is synthesized)
tccatcaatttctattttatctatctttattatgatattaatgtagtaatatatgtgtattacttacaaacaaatattcacacagtggggtgtgggttttaattaaatgttggttattga

SEQ ID NO: 828828 - DNA, 120 bp, Artificial Sequence
  ENSG00000257433_41 (sequence is synthesized)
ggcttgagcgcgcgcagaagtcagcttcgtgacttccttctcaggatggaaccagcttggtggcttgagggtatgtaaaagcaatatctgagccttctgcctgcttccaatatgactaag

SEQ ID NO: 828829 - DNA, 120 bp, Artificial Sequence
  ENSG00000257433_42 (sequence is synthesized)
tttaatccctaatatttaccttgctaatctctgacctttgtgacattaatttgtctgacctttgtgagtataataaccatgtgagaaagttactgtttttccaccatgaacagactactg

SEQ ID NO: 828830 - DNA, 120 bp, Artificial Sequence
  ENSG00000257433_43 (sequence is synthesized)
tcaaccggtaatcctggtaattttaggggatttttttttccctttaagtactggttggcaaactagtccttccgtctaactcctcgcatcttttgcaagtaaaccccttttctaagtgaa

SEQ ID NO: 828831 - DNA, 120 bp, Artificial Sequence
  ENSG00000280620_0 (sequence is synthesized)
gtcaggacgaagtaccgtgtgcacgccacgccgcccacatgtgtgcccccgacccgcaattggaagtcacactgtgcgcctggggaacttgaattcgtccagcaaagagagaacatgaga

SEQ ID NO: 828832 - DNA, 120 bp, Artificial Sequence
  ENSG00000280620_1 (sequence is synthesized)
atggaggagagtgaaacaaaccgagagaagctttaacccgtgtacatattttagaggcaccaccccaagtttctggaagtgattcattcaccccaaaagtaaaaatctgattcattttta

SEQ ID NO: 828833 - DNA, 120 bp, Artificial Sequence
  ENSG00000256389_0 (sequence is synthesized)
ggcttggcaccaagaggtatcccccacagcccaacacaccgctgtggcagactgctgccagagtgcctcttcaggtctgaccctgacccatccctcctcactgggtggggcaggaactct

SEQ ID NO: 828834 - DNA, 120 bp, Artificial Sequence
  ENSG00000256389_1 (sequence is synthesized)
agcaactccagccaggggttcagggacagaactctgatctccataggcctgagcccttagggagaggggtggctgcagtctccatggaccagcagacttagtctttcctcctcctagttc

SEQ ID NO: 828835 - DNA, 120 bp, Artificial Sequence
  ENSG00000256389_2 (sequence is synthesized)
tgaggaatccaggcagcccagatgagggggtttcctcccagtgcagcaaaccccctccaccaagggacagccaaagtgcttcgttaaatgggtcctgctcccagtgccacttaactgggt

SEQ ID NO: 828836 - DNA, 120 bp, Artificial Sequence
  ENSG00000256389_3 (sequence is synthesized)
caggggttgtcagacaccctatacagtagcattcctactggcattaggttggtgaccctcgagatcagagatcccagagaaaggagtaggcacccatctttgctgttctccagcctcttc

SEQ ID NO: 828837 - DNA, 120 bp, Artificial Sequence
  ENSG00000256389_4 (sequence is synthesized)
tgctgttctccagcctcttcaaggtgacatctccaggcatgggagtgaaccagatgaatagggcctgaagtgaactcccagaaaaccgcaggatccctacagaagagggacctgactatt

SEQ ID NO: 828838 - DNA, 120 bp, Artificial Sequence
  ENSG00000256389_5 (sequence is synthesized)
aacaaacaaacagaaaacaacaacagcagcatcaacaaaagaagtccccacacagaccctcttccaagggttagcagcctcaaagacctaaactagatgaactcatgatgatgagaaaga

SEQ ID NO: 828839 - DNA, 120 bp, Artificial Sequence
  ENSG00000256389_6 (sequence is synthesized)
atcgatgaaaaaatgctgaaaactcaaaagggcagagtgtctcttctcctcctaatgatcacaatggctctccagcaagggcacagaactggacggaggttgagatggataaattgacag

SEQ ID NO: 828840 - DNA, 120 bp, Artificial Sequence
  ENSG00000256389_7 (sequence is synthesized)
aagcaggcttcagaaatccattggtgggacagagtcgaaactggatctttgaagacctctattgtcacctctatcattattcctgctccaatgacaatggagagcatactgtcaaagtcc

SEQ ID NO: 828841 - DNA, 120 bp, Artificial Sequence
  ENSG00000256389_8 (sequence is synthesized)
gagcctgtcggccgctgttggatacacctcctttaccaaggcggctttcttcactactgccactgaccttgcaaacagctccgacaaaggtcggaatggattcattgatcagctagaccg

SEQ ID NO: 828842 - DNA, 120 bp, Artificial Sequence
  ENSG00000256389_9 (sequence is synthesized)
agcatatgacagtctgtgccttaattgaatcccaaaagggggcagactgggtttttattacagaggccagccgatagcactcattaaaagctccacagactgtgtggtttactaattagt

SEQ ID NO: 828843 - DNA, 120 bp, Artificial Sequence
  ENSG00000256389_10 (sequence is synthesized)
ttattatacagacaccttgacgatgggcaaagttgtcattttgccctttatcgcacaggggatgttgttaaaagtttaatcagctaacactgaccaagttagcttggcaggctgtggatg

SEQ ID NO: 828844 - DNA, 120 bp, Artificial Sequence
  ENSG00000256389_11 (sequence is synthesized)
gtcattactgaggtcacccctgctgtagcaattctgacagggtcacagcatgaacttacaataaagagagtgttacataaggtaagagcgcacctgaaagggaccccagaaaagagttgt

SEQ ID NO: 828845 - DNA, 120 bp, Artificial Sequence
  ENSG00000256389_12 (sequence is synthesized)
gctctgcggggagtatgaaacagatgggctgttaggacaagtgaatccttttcaagtttaccttcgcctgcactgtttaacatatgctttcttaaaaagatgaggcatacgacagtcgtt

SEQ ID NO: 828846 - DNA, 120 bp, Artificial Sequence
  ENSG00000256389_13 (sequence is synthesized)
ttgatatgttcatcagaaataagattgggaacacgtttttcattttggccaaatatagggtcacctgataaaaatgactctcctgtgttttatttaaaccttacgtagttccagagaagc

SEQ ID NO: 828847 - DNA, 120 bp, Artificial Sequence
  ENSG00000256389_14 (sequence is synthesized)
agaggagattatgttggcctgtttaaacttgctctagatagagcaaagaaacagttacaggctattcttattattattatttctactcagaaaatgattttgagcactagccaaaccaat

SEQ ID NO: 828848 - DNA, 120 bp, Artificial Sequence
  ENSG00000256389_15 (sequence is synthesized)
aaaaaattatctagtttaccaacgttgtcccatttattccggggattcttttttcctaatgggctactttttagaatatatagtatctaagaaagattttcttcgtgtgtctaaggttat

SEQ ID NO: 828849 - DNA, 120 bp, Artificial Sequence
  ENSG00000256389_16 (sequence is synthesized)
aaggttatgcagtgagtgaagtacaggtaatttcactttatgtatttgaaaaagaatcagtagatgaatgtaatattatagttaaaattttttgagaaattcaaaatataatctatacat

SEQ ID NO: 828850 - DNA, 120 bp, Artificial Sequence
  ENSG00000256389_17 (sequence is synthesized)
aaggcatgtagagcaggaaataagcacaatacgggtaaaatgagacaatgtcagaataggacaccttggttgaaagaaaatgtatttgtggaagaaaaaagaaccttctgggagattctg

SEQ ID NO: 828851 - DNA, 86 bp, Artificial Sequence
  ENSG00000256389_18 (sequence is synthesized)
taagaggtaaggagtctgttctgctggggagttctgctatcttccacacatggtttccatcttctaatttaaagctaacctttgaa

SEQ ID NO: 828852 - DNA, 120 bp, Artificial Sequence
  ENSG00000256389_19 (sequence is synthesized)
aacaaccagatttctgaagttagagttcttagtttcaaatcttgtctgcatcaaaattgctctgtgactttgggaaagtttaaccactgatttctaccttgaagaaaaaaatgagtataa

SEQ ID NO: 828853 - DNA, 120 bp, Artificial Sequence
  ENSG00000256389_20 (sequence is synthesized)
taatatctatctcgtaaaatggtggtgaagatcacatgggataatgcaaatgaagtttgtatcttattgcctgatacataaagtatattcaataaatatttgccattatgattaccatta

SEQ ID NO: 828854 - DNA, 120 bp, Artificial Sequence
  ENSG00000256389_21 (sequence is synthesized)
atcttttgagagaaggtggacaatgaatttcatttattgttattgctgtcataacgatgagcacttcacaacagctgtcaccaccagatgcagcagcaattgcatggaatcataacttaa

SEQ ID NO: 828855 - DNA, 120 bp, Artificial Sequence
  ENSG00000256389_22 (sequence is synthesized)
actacactgaaagaaccactaagtactacaagacttattacatagaacaggagtcatctatccacttttcctcctaatttcacaatctctagagggaacagttttcaactacacacagtc

SEQ ID NO: 828856 - DNA, 120 bp, Artificial Sequence
  ENSG00000256389_23 (sequence is synthesized)
ctcacatagtgtgacagtgcctgaccataagagtgactgtgaaatgggacattgtataagctatcttaataaccaatagaaaatgatgatggttctgtgacctttaaaaatgtttgtcaa

SEQ ID NO: 828857 - DNA, 120 bp, Artificial Sequence
  ENSG00000256389_24 (sequence is synthesized)
atcatcagtgataaatatataagaaaattagaaaagaaaaatagtgaagctaatattttattacatattgtgatttaacatttatttcttcgtaaaaactcaagagtagttggacagatg

SEQ ID NO: 828858 - DNA, 120 bp, Artificial Sequence
  ENSG00000256389_25 (sequence is synthesized)
agtagttggacagatgataaggagtgagcattttctatgcctttataaattgtcataatcctttctcaaactgggtgagcttcaaatatttcaccttttgcattttcaatatcatgaact

SEQ ID NO: 828859 - DNA, 120 bp, Artificial Sequence
  ENSG00000256389_26 (sequence is synthesized)
atctcaaaaggatccatcaatgtaaagtttttattggcatcacttcctttgggagtcttcatccttttgtcataagtgcttttctcatatatgtcaataaaattctccactaaatttttc

SEQ ID NO: 828860 - DNA, 120 bp, Artificial Sequence
  ENSG00000256389_27 (sequence is synthesized)
agttacccttaaaaatcttttgagagaaggtggacaatgaatttcatcagctaaacagcactgatctccagataagcaatattgaaacaatcgcagctcatccaccaccagacactaatt

SEQ ID NO: 828861 - DNA, 120 bp, Artificial Sequence
  ENSG00000256389_28 (sequence is synthesized)
aacccctttgcttcacaagccataactacaacttttgacaagagactgagttagtaacctcttcctgctaacctttgaatgagagaaacttctgctgatgtcaaatgaccacaaggatat

SEQ ID NO: 828862 - DNA, 120 bp, Artificial Sequence
  ENSG00000256389_29 (sequence is synthesized)
aaggaaggatttcatgaacatgaccaacaactcactaagccatgtttgattgatcacaaggattcagcctctgaaactaggcaagggagcctcctgatggtcctggacactgttcacagt

SEQ ID NO: 828863 - DNA, 120 bp, Artificial Sequence
  ENSG00000256389_30 (sequence is synthesized)
ggtctccacaatcaccaagtggagatcagagtttcaagccatacctcggagtttcctgacatgtggtatttatatttttcctgaatttttcctggagaatgaattgtaatagcatgtttt

SEQ ID NO: 828864 - DNA, 120 bp, Artificial Sequence
  ENSG00000256389_31 (sequence is synthesized)
tcaccatcttgctactcgggagtttccctctctcttgtttctcagcagaatgcaagcatggctgttaataactttgtagaaaatgtctctttctcaattaaaacaacaatgattctctta

SEQ ID NO: 828865 - DNA, 120 bp, Artificial Sequence
  ENSG00000285756_0 (sequence is synthesized)
ttttcccagctacatataaggaatttgaaagtcacataaaatggttaagaaaatgtgccaagattacctcagtaattctggtctgtgttctcaggagaccctggaaataaacaatgaaaa

SEQ ID NO: 828866 - DNA, 120 bp, Artificial Sequence
  ENSG00000285756_1 (sequence is synthesized)
cccctacaactcagcttgcaaccagccctggccaccagtttccccacactgagctgaatatcggacatgcccatctcagacattccagcccattctgaaattccacatcgattcacctga

SEQ ID NO: 828867 - DNA, 120 bp, Artificial Sequence
  ENSG00000285756_2 (sequence is synthesized)
caaagtctgaagttccagggcaatttatctggaaaagcttacctggaatcacgtgtcatttcaaccaacaactgttgaagaggacgtggcattaaaaccaagggtatcaattatttataa

SEQ ID NO: 828868 - DNA, 120 bp, Artificial Sequence
  ENSG00000285756_3 (sequence is synthesized)
tggagaaacaaaaggtcaggaacggccaacgtccctactggccacagtctagccccaatctgcaagacagagccagccgccccgggggaattcccgcctggtgggactccacgtcaccag

SEQ ID NO: 828869 - DNA, 120 bp, Artificial Sequence
  ENSG00000285756_4 (sequence is synthesized)
cccccagctgctcagggtacagcccctcgtgagaaccgagccacagtcatgtttcctacatcagcctcctgctcaggggtttgtacagagaccactgccagccctctaggtggtccctgc

SEQ ID NO: 828870 - DNA, 120 bp, Artificial Sequence
  ENSG00000285756_5 (sequence is synthesized)
aaagaaagtcccagctcccaaggctccaaatggacagggcaccatgttgaccccttcgttggcctccagttcgccgactgtaacatgtttcatccagttcaggacgtttatttatttcca

SEQ ID NO: 828871 - DNA, 120 bp, Artificial Sequence
  ENSG00000285756_6 (sequence is synthesized)
acttgcatacaaaacatactgagaaactaaaaccatcgttaaaagtgaagacacgttgagacaggtatctcgacctgccaagtatacagctaaagctgagttcataaaaagggatgattt

SEQ ID NO: 828872 - DNA, 120 bp, Artificial Sequence
  ENSG00000285756_7 (sequence is synthesized)
ggccgacggtcatctgccagattctgatgatgattcagaagtcagtgtggaagaagatcagagggagaggcaggcgctctttgacttatcaagctgctccctgaggcccaaaagcttcaa

SEQ ID NO: 828873 - DNA, 120 bp, Artificial Sequence
  ENSG00000285756_8 (sequence is synthesized)
gtgtcagacttgtaaaaagtcatatatagggaagtggggactggcccagcattttaaacttaatccaggccatggccagctggaccctgagatggtgctatctgagaaagccaatgggag

SEQ ID NO: 828874 - DNA, 120 bp, Artificial Sequence
  ENSG00000285756_9 (sequence is synthesized)
caccctccgggggtgcacagaggaaaggacgctcagcctgaccttcccgaggctgtccgtgccagcggctccgcgtgagggaggggcccgctcctgcttggtgagagagtcagcacgcgg

SEQ ID NO: 828875 - DNA, 120 bp, Artificial Sequence
  ENSG00000285756_10 (sequence is synthesized)
tggcctgggtgaactgtcacccctacaactcagcttgcaaccagccctggccaccaccagtttccccacactgagctgaatattggacatgcccatcttagacattccagcccattctga

SEQ ID NO: 828876 - DNA, 120 bp, Artificial Sequence
  ENSG00000285756_11 (sequence is synthesized)
aattccacatcgattcacccgacaaagtctgaagttccagggcaatttatctggaaaagctcacctggaatcatgtgtcatttcaaccaacaactgttgaagaggacgtggcatcaaaac

SEQ ID NO: 828877 - DNA, 120 bp, Artificial Sequence
  ENSG00000285756_12 (sequence is synthesized)
caaggttatcaattatttataagggttgtgtggtggttggtccaagcatctctccttcatgccatcactcctttcaagagctgcctctattttctaatttagcacaggaatttagatgcc

SEQ ID NO: 828878 - DNA, 120 bp, Artificial Sequence
  ENSG00000285756_13 (sequence is synthesized)
cctaaataagtaggcatccagtatctgcccacaccagttttagtgagagtacatatggagacactaccaccacccctgctctcctactgcataccccaccatgccaaagcatggtggctc

SEQ ID NO: 828879 - DNA, 80 bp, Artificial Sequence
  ENSG00000285756_14 (sequence is synthesized)
aacacttgaggccagaagttaaataagttaaaaaaacaaaaaaatagggcatagtggtgcacatgtgtggtcccagttac

SEQ ID NO: 828880 - DNA, 89 bp, Artificial Sequence
  ENSG00000285756_15 (sequence is synthesized)
gaggctgcagtgagctaggattagagaccccatctctaaaaagagggagaagaaggaaggaggaggaagaagaggaagaggaggaggag

SEQ ID NO: 828881 - DNA, 120 bp, Artificial Sequence
  ENSG00000285756_16 (sequence is synthesized)
aagaaggaaggaggaggaagaagaggaagaggaggaggagaaatactgctctttctcaggcccaaggtaaaaaggtttttggtctcatgttgaccagaaagacattgatatttaattaag

SEQ ID NO: 828882 - DNA, 120 bp, Artificial Sequence
  ENSG00000285756_17 (sequence is synthesized)
caatataaaaaggctcattgttaggattaaagagtaagtaaaatcaatattgagataggaggatggaggacaccaactgagttccgatcccaatgaagaggagaaaaagctacaactatc

SEQ ID NO: 828883 - DNA, 120 bp, Artificial Sequence
  ENSG00000285756_18 (sequence is synthesized)
taggtgaaatatctacttatcctagaagaagccttttgacagcaacataaaattcatacctataggtttttaattcctatggatgccgtagcaaataacaaaaacttggatggtgtaaag

SEQ ID NO: 828884 - DNA, 120 bp, Artificial Sequence
  ENSG00000285756_19 (sequence is synthesized)
taacagatgtttactcttttccagtattggagaccaggaatctgagatcaaggtgtgggcaggggtgcgctccccctggaggttctaggagaggatccttcctgcctcttccagctcctg

SEQ ID NO: 828885 - DNA, 120 bp, Artificial Sequence
  ENSG00000285756_20 (sequence is synthesized)
cctgcctcttccagctcctggtggctccaggtgtccctgggcttgtggccacatcactacattctctgcctccatctccacgtgaccttttcctctgtgtctgtgtctcctcttctgtct

SEQ ID NO: 828886 - DNA, 120 bp, Artificial Sequence
  ENSG00000285756_21 (sequence is synthesized)
tggatttaaaggccacctgggtaatttatagtgatctaatctcaagaatctttccttaattacatgcaaatactctttatccaaattagtttgcattcacaaattctggagcttagtact

SEQ ID NO: 828887 - DNA, 120 bp, Artificial Sequence
  ENSG00000285756_22 (sequence is synthesized)
tggacatatattttggggggttgatggttggaggggcttttattcaactcagtacatcttaataaggaattaatgccccccaacttgccttacaagtcatatattaaaaacaatgttggc

SEQ ID NO: 828888 - DNA, 89 bp, Artificial Sequence
  ENSG00000285756_23 (sequence is synthesized)
caacttgccttacaagtcatatattaaaaacaatgttggcctggcacagtggctcatgcccgtaatctcaacactttgggaagccaagg

SEQ ID NO: 828889 - DNA, 120 bp, Artificial Sequence
  ENSG00000285756_24 (sequence is synthesized)
aattagccaggcatgatggtgcatgcctgtggtcctagctattcaggaaactgaggtgggaggatcacttgagcctggaagttcaagacagcagtgagctatgctcacaccactgcactc

SEQ ID NO: 828890 - DNA, 120 bp, Artificial Sequence
  ENSG00000285756_25 (sequence is synthesized)
ctgcactccatcctgggcaacagagctggactctgtctcaaaaaacataacactaaaacatcaaaattaaaaaaaaaaaaacaatgaaagtagcctccacttacaaactaattactcttt

SEQ ID NO: 828891 - DNA, 120 bp, Artificial Sequence
  ENSG00000285756_26 (sequence is synthesized)
cttgaaaatattacactttttttcttctatatctctactcctagctctcaacacctttcttaagcccacatcataacctgtcttgcataactttgtgagtgcccaacgtttcactgtaca

SEQ ID NO: 828892 - DNA, 120 bp, Artificial Sequence
  ENSG00000285756_27 (sequence is synthesized)
agattgtagagctgcatgcttcttaagaataaatccacactttaggtaccagtaaatccatgcaatgcctcagacgttataaccaaataatgcctggaaaatcgacatgaatttatgtga

SEQ ID NO: 828893 - DNA, 120 bp, Artificial Sequence
  ENSG00000285756_28 (sequence is synthesized)
aaaaagaaaaaaagcaataaatgctcttccagaaaactcaaaaatgaagataagctaaaagaaaatggaaagcaccagaataccagaatctttccactcactgatgatcagagttaatac

SEQ ID NO: 828894 - DNA, 120 bp, Artificial Sequence
  ENSG00000285756_29 (sequence is synthesized)
cccattggccaccataccctgaggactaaccctgacacagatgcccttccagatgccctcaatagtctaactgattccatcgccccagccttgggggagaagcactgctgcctatgcact

SEQ ID NO: 828895 - DNA, 120 bp, Artificial Sequence
  ENSG00000285756_30 (sequence is synthesized)
ccatttacagggttatagagtggaaagtcccacaatctttttcttctctattttcagaaaaacgttgacctcttggcgagaatgcaaagaagggaacgcttgcttatacgctgttggtga

SEQ ID NO: 828896 - DNA, 80 bp, Artificial Sequence
  ENSG00000285756_31 (sequence is synthesized)
cgagctgcaggaggccgcgggcgcgagactgggaatgcgcagggcccccgcctggctctacaagcccgggccgcggcccc

SEQ ID NO: 828897 - DNA, 120 bp, Artificial Sequence
  ENSG00000285756_32 (sequence is synthesized)
cgaggccggcggctgctgctacctggggccgttgctgcttgtgccgtgagcgacggccagccattgtccccgccgctccgtcagccgcgcccggccgcgcgcgcaccggaaggcgcattg

SEQ ID NO: 828898 - DNA, 120 bp, Artificial Sequence
  ENSG00000285756_33 (sequence is synthesized)
gcgtcttgcgggctccgggccgggtgggcaggatggcctccacaagccgcatggcgcgcatggggagcctccgttgatgccgccgcgccgccctccgaggctgcatccgcggaagcccgg

SEQ ID NO: 828899 - DNA, 120 bp, Artificial Sequence
  ENSG00000285756_34 (sequence is synthesized)
cggacctgagtgcgtccccatgaaggcgcccgggctggcccaggcggccgtggcagaggagaccccggactgggcgcccgagctctgccccagccccgagtcgcggtcgccggagccgcc

SEQ ID NO: 828900 - DNA, 61 bp, Artificial Sequence
  ENSG00000285756_35 (sequence is synthesized)
tcacgtaccaccagtaatttttttatatttttagcagaaacggggtttcaccacgttggcc

SEQ ID NO: 828901 - DNA, 120 bp, Artificial Sequence
  ENSG00000285756_36 (sequence is synthesized)
gcctgtgtatttaccttgtatgctactacattgctgatttcatttattaggttttttttttaattcttttttaaaaaagaaaaaagagacagagtctcgctctcttgctctgtcgcccag

SEQ ID NO: 828902 - DNA, 68 bp, Artificial Sequence
  ENSG00000285756_37 (sequence is synthesized)
tttgtctgactcccaaagtgctgggattataggcacaagccaccatgcctggcctcatttattagttc

SEQ ID NO: 828903 - DNA, 120 bp, Artificial Sequence
  ENSG00000285756_38 (sequence is synthesized)
ataggcacaagccaccatgcctggcctcatttattagttctaacgtgtgtgtgtgcacacacgccctttaggcatttctacttataagatcctatctgcaaatagagataattttacttc

SEQ ID NO: 828904 - DNA, 120 bp, Artificial Sequence
  ENSG00000285756_39 (sequence is synthesized)
gattacctcagtaattctggtctgtgttctcaggagaccctggaaataaacaatgtgtcttctgtggcttcagcgtcacctagtgcaggctgccattcaacaaacgcattgtcaacagtc

SEQ ID NO: 828905 - DNA, 120 bp, Artificial Sequence
  ENSG00000285756_40 (sequence is synthesized)
cacagcaagagagagaaaaagtgtgtgcgcaggccagcattgggatacagagagacccttgtgcaagatcccaggagaccagaagtctgaaatcaaggtgcggtccgagccacactccct

SEQ ID NO: 828906 - DNA, 69 bp, Artificial Sequence
  ENSG00000285756_41 (sequence is synthesized)
ccctctgaaggtatctgggcatggtggtgcgcacctgtagtccaagctacttgggagactgagacagga

SEQ ID NO: 828907 - DNA, 120 bp, Artificial Sequence
  ENSG00000285756_42 (sequence is synthesized)
gagtagctgggactacagtcacgtaccaccagttgaaaaagatcatctagcaaagccttttttcccagctacatataaggaatttgaaagtcacataaaatggttaagaaaatgtgccaa

SEQ ID NO: 828908 - DNA, 120 bp, Artificial Sequence
  ENSG00000285756_43 (sequence is synthesized)
aggactcagtcaggactactgcaatacggaagagaggagcttaacttcattgaaacaaaaggctggggagtttttaagtgccggggtgagatgctgagaaggaactggagacatcaggaa

SEQ ID NO: 828909 - DNA, 120 bp, Artificial Sequence
  ENSG00000285756_44 (sequence is synthesized)
tgaccttcccggggctgtccgtgccagcggctccgcgtgagggaggggcccgctcctgcttggtgagagagtcagcacgcggtggcctgcagtgtcttctgtggcttcagcgtcacctag

SEQ ID NO: 828910 - DNA, 120 bp, Artificial Sequence
  ENSG00000285756_45 (sequence is synthesized)
ctcattggaatttttcaaaactgggaatctgcccttctacaaaaactgagacacagatgtatcatctccttcaataattgcattttaaagggatggctctgaagtcttgagaaaggcatt

SEQ ID NO: 828911 - DNA, 120 bp, Artificial Sequence
  ENSG00000285756_46 (sequence is synthesized)
cctgggttgcaaaactaggaggaggctagaagaaaatttgggagaagatttgcctctcaaagaggtagagaaagaactcacaattgcaagtttcctaaaataaatcctccgtgaaaaaag

SEQ ID NO: 828912 - DNA, 67 bp, Artificial Sequence
  ENSG00000285756_47 (sequence is synthesized)
gaggcctaaaaatactgcatgttctcactcacatgtgggagcttaaaacctggatctcatgaagata

SEQ ID NO: 828913 - DNA, 120 bp, Artificial Sequence
  ENSG00000285756_48 (sequence is synthesized)
aggaaagcaactagaagccatttgtgtcaaggtaacgtctggagaaacaaaaggtcaggaatggccaacgtccctactggccacagtccagccccaatctgcaagacagagccagccgcc

SEQ ID NO: 828914 - DNA, 120 bp, Artificial Sequence
  ENSG00000285756_49 (sequence is synthesized)
cgggggtgcacagaggaaaggacgctcagcctgaccttcccggggctgtccgtgccagcggctccgcgtgagggaggggcccgctcctgcttggtgagagagtcagcacgcggtggcctg

SEQ ID NO: 828915 - DNA, 120 bp, Artificial Sequence
  ENSG00000285756_50 (sequence is synthesized)
gtgtcttctgtggcttcagcgttgcctagtgcaggctgccattcaacaaacgcattgtcaacagtcaaccaaaagaaacccattggccaccatgccctgaggactaaccctgacacaaat

SEQ ID NO: 828916 - DNA, 120 bp, Artificial Sequence
  ENSG00000285756_51 (sequence is synthesized)
ctcacactgttataaagaaatacttgagaccaggtattttataaagaaaagaggtttagttggctcacagttccacaggctgtacgggaagcatggtgctggcatctgctcagcttctgg

SEQ ID NO: 828917 - DNA, 120 bp, Artificial Sequence
  ENSG00000285756_52 (sequence is synthesized)
ggatgcttcagaatcagtcacggtgaaggcagagtgggagcaggcatgtcacgtggccacagcagggacaaggggccggggtaggtgctgcacactttttttttccttttcttttttgga

SEQ ID NO: 828918 - DNA, 120 bp, Artificial Sequence
  ENSG00000285756_53 (sequence is synthesized)
acaggcgtgagccaccgcgcccggcaggtgccacacacttttaaacaaccagctatcatgagagcagcaccaagcggatggtgctagagcaatgagagattcaaccatatcagtccttat

SEQ ID NO: 828919 - DNA, 120 bp, Artificial Sequence
  ENSG00000285756_54 (sequence is synthesized)
atcagtccttattcctgcctctgcctgcccatcatccttaagttgacctttacaatgtctgatgggggctcaggcgaaggctcaggcagaaccagaatcattcttgtggaggatctgaga

SEQ ID NO: 828920 - DNA, 120 bp, Artificial Sequence
  ENSG00000285756_55 (sequence is synthesized)
cccctcatgttgtctgcactgctgccgaacaggctggaagatgcatgtctgtgtgtcggcatgatttagtgagcaaatctgatgggaacgcagccgtttctttaggtttggtcagtaaaa

SEQ ID NO: 828921 - DNA, 120 bp, Artificial Sequence
  ENSG00000285756_56 (sequence is synthesized)
ccaatggcagtgcgctcttggctgacgctgccattacagagggtgatgttgagaaaggcagtccctggggatgcttctggtgtgtcaatagcctctggctgctcagcgtgtcctctccct

SEQ ID NO: 828922 - DNA, 120 bp, Artificial Sequence
  ENSG00000285756_57 (sequence is synthesized)
cctgccccttctgaaactcccgataaagcaggtgtgagtcgctgtaagtttgcattatcacatcaaaattttttttccaacatattttattgtagtaaaatatacatagcataacattta

SEQ ID NO: 828923 - DNA, 120 bp, Artificial Sequence
  ENSG00000285756_58 (sequence is synthesized)
ccatcttagccatatgtaggtgtgtggttcaggggcactaaatacattcacgatgttgtacggccatcacccccacacatctccagaactcttttcatcttgtacaactaaaactctgag

SEQ ID NO: 828924 - DNA, 120 bp, Artificial Sequence
  ENSG00000285756_59 (sequence is synthesized)
cttcaagttggggtaagcggggcgggggtggggactaaaactgtccccataaacaccaactctccattccctttttccccaaccctggcagccactattctactttctgtctctatgatt

SEQ ID NO: 828925 - DNA, 120 bp, Artificial Sequence
  ENSG00000285756_60 (sequence is synthesized)
acagaggaaaggacgctcagcctgaccttcccggggctgtccgtgccagcggctccgcgtgagggaggggcccgctcctgcttggtgagagagtcagcacgcggtggcctgggtaatgtt

SEQ ID NO: 828926 - DNA, 120 bp, Artificial Sequence
  ENSG00000285756_61 (sequence is synthesized)
tgcatctgggtgtcgttttcggccattctcacactgttataaagaaatacttgagaccaggtgaactgtcacccctacaactcagcttgcaaccagccctggccaccaccagtttcccca

SEQ ID NO: 828927 - DNA, 120 bp, Artificial Sequence
  ENSG00000285755_0 (sequence is synthesized)
agagcatgatttgcaagaggaactgctacacattttacacttatttactccaacctttcctgctaattccaggtttattggagaagacagaatgactgatgacagaagcacctgcgatct

SEQ ID NO: 828928 - DNA, 120 bp, Artificial Sequence
  ENSG00000285755_1 (sequence is synthesized)
tcttcttgtgctgtgggcttcaggggaatccaagagttcctggcaaagaggatctaatgaagactgacattgatcaataaaggcatggggttaaaagagcaacaataagaataccttaaa

SEQ ID NO: 828929 - DNA, 120 bp, Artificial Sequence
  ENSG00000285755_2 (sequence is synthesized)
gttgtactcagaagataggagctatctctgcttcctttcagaaacatcattattaccttgaatcagagcctgccagaagcattttgcacaacaattgtaagaagagactgaaacttcaga

SEQ ID NO: 828930 - DNA, 120 bp, Artificial Sequence
  ENSG00000285755_3 (sequence is synthesized)
aacacttttagcagtaaacactggtgatgatgcagtgttttcctgtgcataaaaattcatatatttatttgcagatattcaagtgcacctagggaaaagaatcccagcaacagaatttct

SEQ ID NO: 828931 - DNA, 120 bp, Artificial Sequence
  ENSG00000285755_4 (sequence is synthesized)
tgttcaaaactttggtattttaaaatcacattgtagatctgcatttccaaacaacaaccaaaactgctggatgcaaggtggctgcttacactacagacctgttacatatattccaacccc

SEQ ID NO: 828932 - DNA, 120 bp, Artificial Sequence
  ENSG00000285755_5 (sequence is synthesized)
ataatgctaggggtttacaaggataatatttgtgaactttcacattctatgtagcggtcacaatgaagtcctctaaaggcatcctttgatggaagcaatttggacgtttatgatggctca

SEQ ID NO: 828933 - DNA, 120 bp, Artificial Sequence
  ENSG00000285755_6 (sequence is synthesized)
aagcaaggttccaagcaatgagactacattagtgtagatcaccaatataaatagaacagctatcatatcatatcagttctgtccacagcacgtgagtaggagaagttctgaaataagatc

SEQ ID NO: 828934 - DNA, 120 bp, Artificial Sequence
  ENSG00000285755_7 (sequence is synthesized)
atcaggaacaaagaaaggagtatttcagaatatattcagttgattccagaggtagccaatcctgcttgattgaatgtttgcaaaattcaattctctgtttgcagatttaggtacagcagg

SEQ ID NO: 828935 - DNA, 120 bp, Artificial Sequence
  ENSG00000285755_8 (sequence is synthesized)
aaagaatatatatatacatatatattcccactggggttcactgtctgggtagagtctacatgttttccccaggtctggatgggtttttttctgggtacccaggtctccctgacattccaa

SEQ ID NO: 828936 - DNA, 120 bp, Artificial Sequence
  ENSG00000285755_9 (sequence is synthesized)
agttatgcacattcagttcatctaatggtcccagtcagagtgagtgcggggggtcagtgagtacacctggtgatactacctgtgtagggatggttgtttcctgtctggtgtcctaagctg

SEQ ID NO: 828937 - DNA, 120 bp, Artificial Sequence
  ENSG00000285755_10 (sequence is synthesized)
cagggagaagctcaggccacctgcaaccctaaactggaataagcagatctcgatggaaagttcaagacaaaatcagtttaagaatttagaaaatcttatcgcttctcggccttttggcta

SEQ ID NO: 828938 - DNA, 120 bp, Artificial Sequence
  ENSG00000285755_11 (sequence is synthesized)
agatcaaatgaagaatttagaaaatcttgggacttctttattccatctgtgcatacggtactatttataatttgggggttgggcttctggtttgtattatatttagttttatataagtca

SEQ ID NO: 828939 - DNA, 120 bp, Artificial Sequence
  ENSG00000285755_12 (sequence is synthesized)
gagactatatgcctaaatcaacatatgcccagtggttgaatggtgggctcaattttttccagtgaaaatatattgcttggaaaacaaagtaactgactcaattttatgatggctaaatcc

SEQ ID NO: 828940 - DNA, 120 bp, Artificial Sequence
  ENSG00000285755_13 (sequence is synthesized)
aaatttcttaaattgtatactttctctgtcaatcaatatcgatgttttaaaattaatatcatgcccttacaaaatgatccttatatcaactgcatttgcatgtttttgtttgtttgatga

SEQ ID NO: 828941 - DNA, 120 bp, Artificial Sequence
  ENSG00000285755_14 (sequence is synthesized)
ctcaggccacctgcaaccctaaactggaataagcaggtaaatcattaccttatgtgcttatactgatacttttattcatctttcttaaatacatgtatagctcacatttatgttgagatt

SEQ ID NO: 828942 - DNA, 120 bp, Artificial Sequence
  ENSG00000285755_15 (sequence is synthesized)
taatatcagaagtgatttggtcattatttacaagttggtgatgattttctgaccataaatatgccataggaacataactcttgttatatcaattagcctgtcataaagctggcttttgcc

SEQ ID NO: 828943 - DNA, 120 bp, Artificial Sequence
  ENSG00000285755_16 (sequence is synthesized)
cttcaagtttccactaacctatcaacattaagtgaagacttactgtataaagaatgtaggttgttagaaataaagttttaccctgaggaaaaaaaaatggtatctaccattcagctctgt

SEQ ID NO: 828944 - DNA, 120 bp, Artificial Sequence
  ENSG00000285755_17 (sequence is synthesized)
cccttggtttatcaattatttagcaatatttaaatattcattcagttctattgttcattatatacaatggtctttgtgtgtgtgtgtctgtgtgtgtgtatcatacatatttttattcta

SEQ ID NO: 828945 - DNA, 120 bp, Artificial Sequence
  ENSG00000285755_18 (sequence is synthesized)
gagattctatttgattctcttattttagctgaaccccaactgagttgctccaaatgctgcagcaataaagttctcacaagggagttctttgggattccaaagaaagaagcagtaaactgc

SEQ ID NO: 828946 - DNA, 120 bp, Artificial Sequence
  ENSG00000285755_19 (sequence is synthesized)
actgcagggtgaccagtccaaagcaagtgttagatgacctcgcaaagtactgcagcatatatttaggcagacagagagaaagggatgctcttcctcagtatgtctgcagcaatggcatca

SEQ ID NO: 828947 - DNA, 120 bp, Artificial Sequence
  ENSG00000285755_20 (sequence is synthesized)
gggtgtgaagtttatatgcaagcttaaagaacttggctcagggcacaggccggtttctttaagtgttttgatccacatcctaaacatctttatcagtgtctgggaatgttcaaggtccca

SEQ ID NO: 828948 - DNA, 120 bp, Artificial Sequence
  ENSG00000285755_21 (sequence is synthesized)
gctcaggttaagcctgacaggaaaaagaggcagctggcagggtcacacagtgcttaaggcattctgtgtttcttaggacacagaaagaaagtggggaggactagaggaccctacagtttg

SEQ ID NO: 828949 - DNA, 120 bp, Artificial Sequence
  ENSG00000285755_22 (sequence is synthesized)
tgttttcaacttaaaataattattttcaatggatcgttatttgttagccatcatttctttcctctattgtttcttcaaagatactaaagataatttttaccctttatataggtcagttat

SEQ ID NO: 828950 - DNA, 120 bp, Artificial Sequence
  ENSG00000285755_23 (sequence is synthesized)
aagactttaacaccctaatgaaagtattagcagaatattgaggcagaaaactaagatactcaggaccttaacttaacacttgacaaatggacctaatagacatctacaaaactttcgatc

SEQ ID NO: 828951 - DNA, 120 bp, Artificial Sequence
  ENSG00000285755_24 (sequence is synthesized)
cccaaacaacagaatatacattcttttcattgacacatgccacatactctaaaatcatccacacaatggagcgtaaaacaaccctccagaaattaaaacaaaaaaattataccaacaata

SEQ ID NO: 828952 - DNA, 120 bp, Artificial Sequence
  ENSG00000285755_25 (sequence is synthesized)
ctcttggaccacaaagcaataaaaataggaatcaatgctaagaaaaataacttaaaaccatacaattaaatggaaattaagcaatcttcttctgaatgacttctgggtaactaatgaaat

SEQ ID NO: 828953 - DNA, 120 bp, Artificial Sequence
  ENSG00000285755_26 (sequence is synthesized)
taaggcaggaattaagaagttctttgaaataatgaggataaaagatacaatatatcagaatctctgggacacagccaaagcagtgttaagagggactataatagcactaaatgcccacat

SEQ ID NO: 828954 - DNA, 120 bp, Artificial Sequence
  ENSG00000285755_27 (sequence is synthesized)
cagaaagttcgaagcgaacagcctaacatcacatctagaggaacctagcagaagacaagaaataacaaaaatcaaagctgaactgaaggaaattgagacatgaaaaaccatacatgagat

SEQ ID NO: 828955 - DNA, 120 bp, Artificial Sequence
  ENSG00000285755_28 (sequence is synthesized)
caattattccaggagctggttctttgaaagaattaaaaagatagatggactgctacctagactaatatagaaaaaaagagagaagatccaaataaacacaattaaaaatattgtcaattt

SEQ ID NO: 828956 - DNA, 120 bp, Artificial Sequence
  ENSG00000285755_29 (sequence is synthesized)
taataaaatccagtacatttttaatttcagacattgtgtttaagcatttataatttcacttgtgacttttttattgtttcagttttttctccttaaagtccatttgttcaacaatttatg

SEQ ID NO: 828957 - DNA, 120 bp, Artificial Sequence
  ENSG00000285755_30 (sequence is synthesized)
tctgtcttttgcttgagtatcttgtgaatatttataatagttggttaagttccttggctattaatttcaacatctgtgttatgtttggctcttcaaattattatcagtcacaaaatcaac

SEQ ID NO: 828958 - DNA, 120 bp, Artificial Sequence
  ENSG00000285755_31 (sequence is synthesized)
tccactcttgtcagaacttcaaagactactagcattttgcaatctctggtgtctcacttcagcttttccactatggttctctaacatggtcttttgctctgttagattagtatttggctg

SEQ ID NO: 828959 - DNA, 120 bp, Artificial Sequence
  ENSG00000285755_32 (sequence is synthesized)
agtgaaaaacaactaaaggcacacatctgaaactccttccctgtgaatattcctccattccaatgcctgcaactgcaaattccaatcacctcagcagtcatgaacattgatttctttttc

SEQ ID NO: 828960 - DNA, 120 bp, Artificial Sequence
  ENSG00000285755_33 (sequence is synthesized)
tccaactagtaaaaccactgatcccttcatttgagctcgacttccctgcacttagttttgaatttttcccctgtccaatagtaagacacacacacagagaagaacaacaagaacaagaag

SEQ ID NO: 828961 - DNA, 120 bp, Artificial Sequence
  ENSG00000285755_34 (sequence is synthesized)
agaattgcaatgatgtgaagtaatgtatatgttaattagcttgaattagcttgattgtggtgattatttcacaatgtacatgtatatcagatcataaacttgtatatcttaaatgaatac

SEQ ID NO: 828962 - DNA, 120 bp, Artificial Sequence
  ENSG00000285754_0 (sequence is synthesized)
tggagaacaaagcgtcctaggaagataaaatgatgtgaatgtgtccagttctccttattgttgaggacagatctatcagaccatcagaggctgatgccttgaaacatacgagttatccag

SEQ ID NO: 828963 - DNA, 120 bp, Artificial Sequence
  ENSG00000285754_1 (sequence is synthesized)
tccactatcgtcattctgattccatgctcgtgagctaccttctgataatcgaacttcccaggatgtttttctacagggagagaatgttctggtgtgctggaaagattattgttggcaaca

SEQ ID NO: 828964 - DNA, 120 bp, Artificial Sequence
  ENSG00000285754_2 (sequence is synthesized)
acatccattcattctgccaacgttggtgagcacctgcattggaccagaccccaggtggcatttaccattgaatttaggacccatttggataatccaggatgatctcatctcatctcaaga

SEQ ID NO: 828965 - DNA, 120 bp, Artificial Sequence
  ENSG00000285754_3 (sequence is synthesized)
tccttaacttcactttatctacagtgaccctaatttcaaaaattatgcctggtgcctaaactccctgagccatgtgggcttggctgtctgaacaagcctcttctgtcataagctggctga

SEQ ID NO: 828966 - DNA, 120 bp, Artificial Sequence
  ENSG00000285754_4 (sequence is synthesized)
aaccacagatgcagagcccacagatagagctgaacgtacttattgaacatttgtatttatgtgtctatcaattatcttctcgtatcattttctgtatattatattgaatgctatagtttt

SEQ ID NO: 828967 - DNA, 120 bp, Artificial Sequence
  ENSG00000285754_5 (sequence is synthesized)
gttcatacctacaaaaattacattttaaaatcgttttaccctaaaactcaactgtgagcaatttatcccataaaaatgtgttttaaagaatataaaaacatacctacaagtaattcacca

SEQ ID NO: 828968 - DNA, 120 bp, Artificial Sequence
  ENSG00000285754_6 (sequence is synthesized)
gggcataatttaaaataattcacaaaaaatgttgtagggagggggaagccctaaattttctttgaaacagaaatgattccattatcgcacattcattaagcaaaaatctaaatgactatt

SEQ ID NO: 828969 - DNA, 120 bp, Artificial Sequence
  ENSG00000285754_7 (sequence is synthesized)
aaaaacttgttccatatgtgatggtatgaaacaatatcaagattttctgaagaaaacccaaggaaattttaaaagcaattgctcaaaagaattgaaataggaaatccagatgggagaggt

SEQ ID NO: 828970 - DNA, 120 bp, Artificial Sequence
  ENSG00000285754_8 (sequence is synthesized)
atctggatggagtatttttactttatgccattctgtactttttataatgagaacatgttattttataacaaataaagaaacctttttatatcaagataaaacatattcttcaaaaaattt

SEQ ID NO: 828971 - DNA, 120 bp, Artificial Sequence
  ENSG00000285754_9 (sequence is synthesized)
ttagacctagaaattcagactggcaaaagaaggaaactaacacaatacatacaactagaaaaatgattagcaattccattgttgaatacccttttgttatttacctatgtatatcaatgg

SEQ ID NO: 828972 - DNA, 120 bp, Artificial Sequence
  ENSG00000285754_10 (sequence is synthesized)
atttttatgctgcattgttttgcaatctatgtttttcacttaacaatataattttccaatattaatagtctctacagcattctttttgatatctataaacctgccccttgtactgtaaca

SEQ ID NO: 828973 - DNA, 120 bp, Artificial Sequence
  ENSG00000285754_11 (sequence is synthesized)
tattttgctaatcgttttcttctggcattttttttcatgttttcactataataaataatgcttcaataaaatttatattgctatatctttgtatactttcctaatgcttatactaacact

SEQ ID NO: 828974 - DNA, 120 bp, Artificial Sequence
  ENSG00000285754_12 (sequence is synthesized)
ttcatatatattatttttcactaacagcatcatcaaaacttcatgtacaataccaccaattgtgctgctggtattttatgcacaaaattgaggtcaacagaatgaattttgatgctctgt

SEQ ID NO: 828975 - DNA, 120 bp, Artificial Sequence
  ENSG00000285754_13 (sequence is synthesized)
tcactacaggaacaaaaattgtgaggaaaagaatgatcagtgcaaacttgctaggactgtcacccagattctcccaaaagagacttttcaaatcaggcaagcaatgttatttttaaacaa

SEQ ID NO: 828976 - DNA, 120 bp, Artificial Sequence
  ENSG00000285754_14 (sequence is synthesized)
ttggttgtgaccaaatttataacttatcaaaattctgtttttgtgagcttcacatatgttttctagaacaggtcaaactattaaagaataccattatttaaccattttggaccagtaaaa

SEQ ID NO: 828977 - DNA, 120 bp, Artificial Sequence
  ENSG00000285754_15 (sequence is synthesized)
atgaaaatttcttatacagtctaatgttctatattttttttctaagaataaaagccacctattaaatatttatggtgatagcttgttgttccagattttattaaatgttttgggtcatgg

SEQ ID NO: 828978 - DNA, 120 bp, Artificial Sequence
  ENSG00000285754_16 (sequence is synthesized)
gtatgatttatggcttactggaacctagataagaaatatgatttccatctttaatattatatatgggaaaatgttttacagcattgatttctaggaacacgttcagcataactgtcactt

SEQ ID NO: 828979 - DNA, 120 bp, Artificial Sequence
  ENSG00000285754_17 (sequence is synthesized)
ccagaagttacaaaaagaaaattataaatattgggctattttcctaattttgtgaaactgtacaaaatttaagaattattggacaaaagatatttagaatcctttgggaaaggaatgtta

SEQ ID NO: 828980 - DNA, 120 bp, Artificial Sequence
  ENSG00000285754_18 (sequence is synthesized)
agatcagtatacatttagtgatatgaatactatattttatctatgagtttcctttttaccgcataggaacaaatagataaaatactgaaatatttatcttaattgggcattctttgtttc

SEQ ID NO: 828981 - DNA, 120 bp, Artificial Sequence
  ENSG00000285754_19 (sequence is synthesized)
tttcaccagaattctgagataagaaaacaagcttttccctttgggacccacttagtcattttgatagaaaagcatatttaactgctgtctttggaatattctttagtatatttttgattt

SEQ ID NO: 828982 - DNA, 120 bp, Artificial Sequence
  ENSG00000285754_20 (sequence is synthesized)
aaaaaaatctatcctttacttgcacattacagttatggagataaagagatagctccttaagtactaacgcgaagaggggaataaaaggaatggaggcaacgtcacttgggttcccaaagc

SEQ ID NO: 828983 - DNA, 120 bp, Artificial Sequence
  ENSG00000285754_21 (sequence is synthesized)
atcatcaccctacagagacagagttcttgactttgccattagcgacagttggggctgttaaagtcaaataaaaatatagaaacaaatcactatgcaaagtgtttcatttgggaatgcata

SEQ ID NO: 828984 - DNA, 120 bp, Artificial Sequence
  ENSG00000285754_22 (sequence is synthesized)
taaaaacagaatcactatttagggcatacatacagaatggcatggtctttggcatgtttgaagaacaaagaaaaggttggaagttctattagaaagggacatgttacacatttgaaagga

SEQ ID NO: 828985 - DNA, 120 bp, Artificial Sequence
  ENSG00000285754_23 (sequence is synthesized)
agctcagtggcactagtgaagttttggggacctgacactctttaattagtgaatgacaatggtaggtaaaactggtcttaacgtcacagcacacatctagtccgtatcagcagccactag

SEQ ID NO: 828986 - DNA, 120 bp, Artificial Sequence
  ENSG00000285754_24 (sequence is synthesized)
gtaaaactgatcttaaggttacagcaggccatttcagcagccaagctggtggatcattcttggaccaagtgctatgtgcgccagactgctctctcccctgacctttcaactctgatttcg

SEQ ID NO: 828987 - DNA, 120 bp, Artificial Sequence
  ENSG00000285754_25 (sequence is synthesized)
ttgggtatgacaagaatagcccagtttgtataatcaaatttcacatttccccattttgatcaagatctttctctcaaaatgtcactgattaactattctgaggttaggcgtaattgtccc

SEQ ID NO: 828988 - DNA, 120 bp, Artificial Sequence
  ENSG00000285754_26 (sequence is synthesized)
tcactgcagggtctgaacctgtccgagtttcctctgtcctacttttgggggttaggtatgagagtccatgtcagggacctgggccacatttagcaaaagagaggccaaaaggaaaatctt

SEQ ID NO: 828989 - DNA, 120 bp, Artificial Sequence
  ENSG00000285754_27 (sequence is synthesized)
tctcattgcagctttgcctggagttcaacattgagtttcactgtattagacccataggtattagcaatcatctcaagacactgggctaacattatcttgttgggagtgctggctttacaa

SEQ ID NO: 828990 - DNA, 120 bp, Artificial Sequence
  ENSG00000285751_0 (sequence is synthesized)
gggcagaggtgggcccttggtgcgactcctaaacaacctcttcagcacaacctggttgaatgtggagttggttcgtctggccagaaacctgtacagcttgaccaacagcctcagccgtgt

SEQ ID NO: 828991 - DNA, 120 bp, Artificial Sequence
  ENSG00000285751_1 (sequence is synthesized)
aagatgtgcctgcttccccctcgccttctggcatgactgtaagtttgctgaagcctcccagccatgcatcctgtaaagcctgtggaactgtgaaagtcagaatatggaggaaacaagaag

SEQ ID NO: 828992 - DNA, 120 bp, Artificial Sequence
  ENSG00000285751_2 (sequence is synthesized)
tgtcaactacctgaagaaaacttaacaggatataacagctgctcactgctaatcttcctattatggccaaatagaagctgaggatatcattctactttgtgtgcctcagggtttgaaaga

SEQ ID NO: 828993 - DNA, 120 bp, Artificial Sequence
  ENSG00000285751_3 (sequence is synthesized)
agaaaatgattccaagggtaaagacagtacaacacgaaacttggagctcaaatcaaatcctgatataacttgatcagaaccttctctacaactattgttcattctgcttgtgcaaaaatt

SEQ ID NO: 828994 - DNA, 120 bp, Artificial Sequence
  ENSG00000285751_4 (sequence is synthesized)
ttaattccctggtaaatggaagaatggggagggagaagaatcattacaaggaatcaatatcccagaatcttaagacaaaaacttcatctggaacctagaataaaattaaagatccctgag

SEQ ID NO: 828995 - DNA, 120 bp, Artificial Sequence
  ENSG00000285751_5 (sequence is synthesized)
gcttgaggaaatactagtgacagatatatgtgctgctttatgtgggagttattaccattctaagggagcccatgtgttcacagttcgggtccctccctcaggaggtgacttaagcagcat

SEQ ID NO: 828996 - DNA, 120 bp, Artificial Sequence
  ENSG00000285751_6 (sequence is synthesized)
gtactggaatgaaaataaatttttcttgttggacatactaaccagggagtattgcaggatctgaacaatccttccatcttaatatggaaaagtaattatttcactttttttcttttttga

SEQ ID NO: 828997 - DNA, 120 bp, Artificial Sequence
  ENSG00000285751_7 (sequence is synthesized)
attagtaatgtttacaggtcaagtcttctttccctcctctggaaagaaagctaccaacaacatttagttaatttggatttggagtctaatgggtctttgatgtctactgtagaagaataa

SEQ ID NO: 828998 - DNA, 120 bp, Artificial Sequence
  ENSG00000285751_8 (sequence is synthesized)
aaatgaactgggtttgttgagtagatcaagaaggaaaaaaaactaaagaagagagaaacagaatttcctaacttgaagaagacatgtgaagattggaagtgagggagccgagagaacaga

SEQ ID NO: 828999 - DNA, 120 bp, Artificial Sequence
  ENSG00000285751_9 (sequence is synthesized)
gactctcttgttcaataattgcagagaactagtaacaacatgctggacctaaatgaatccttttcatggggaaaatgagtatcacagtggtaatttttatgggcaactgacaacttgcca

SEQ ID NO: 829000 - DNA, 120 bp, Artificial Sequence
  ENSG00000285751_10 (sequence is synthesized)
taaccatttcctccaccatttcattttaagaaagatccccaatcctgtggtgcaactgtaagggaagcccaagaatccctgaagtgaaattttcagtcagtgtccaggattgtgcagcta

SEQ ID NO: 829001 - DNA, 120 bp, Artificial Sequence
  ENSG00000285751_11 (sequence is synthesized)
gactttgctttattaatacataaagaaatggaatatttcttcttgacttcgtgtattgatacttcttcacctactctctcactcttcacacttttttatgttctacattttctagtaggt

SEQ ID NO: 829002 - DNA, 120 bp, Artificial Sequence
  ENSG00000285751_12 (sequence is synthesized)
gcatgtatcattttgggagatcaaaaacagttctatgagcaaaatccaattgtacaaattacacgtgatacccttatctctttgttttcaatgaacacaagctattcgtgactggaattt

SEQ ID NO: 829003 - DNA, 120 bp, Artificial Sequence
  ENSG00000285751_13 (sequence is synthesized)
tagaatgacaacatgtaggtaaaattgacgttaccaacgccaatatatattttctcagtgattcatggcagtatgtagaactcactggaaataaaactatagctaattaatcctattttg

SEQ ID NO: 829004 - DNA, 120 bp, Artificial Sequence
  ENSG00000285751_14 (sequence is synthesized)
aaatatagaaagtttgaagcaatgaacacatagtatttctcatacacactgtctttcttaattgtatgctcctctatagctttgacatgggtattactttcctcgacattagtgttattg

SEQ ID NO: 829005 - DNA, 120 bp, Artificial Sequence
  ENSG00000285751_15 (sequence is synthesized)
tattattcagcttaagggattaataagcactacatttttgagaggttaacatttggcaaacaatagaaataagagatttcaaatgaaaatgaaaacagaaagaaatacacaataacatat

SEQ ID NO: 829006 - DNA, 120 bp, Artificial Sequence
  ENSG00000285751_16 (sequence is synthesized)
taacatatttactcagagaaaaaaaatgctttgatggcaaacatttcagtttttcactttatgatttacatatgatctttagaaagcaatcggccagacgcggtggctcatgcctgtaat

SEQ ID NO: 829007 - DNA, 86 bp, Artificial Sequence
  ENSG00000285750_0 (sequence is synthesized)
acaacacacaaggtttccttccttcctttctttttttttctttttctgagacacggtcttgttctattcattgtagccacaaactc

SEQ ID NO: 829008 - DNA, 120 bp, Artificial Sequence
  ENSG00000285750_1 (sequence is synthesized)
cctcccaagtagctggcactacaggtgcatgccatcataccagggttttttttttaaatttttttatttttttagatatggggtcttgctacatcgtccaggctgaatacaaggttttcc

SEQ ID NO: 829009 - DNA, 120 bp, Artificial Sequence
  ENSG00000285750_2 (sequence is synthesized)
atcgtccaggctgaatacaaggttttccgaacaagcttcagactagaatcagaaggctctgggctagtggagagggcgtacagggagagtcaggagaaagtcggtctggtggatggtcag

SEQ ID NO: 829010 - DNA, 120 bp, Artificial Sequence
  ENSG00000285750_3 (sequence is synthesized)
cagatgatgaatcagttttggctttgccaagttatttaacctttctgagccttaatttactcatctggaaaatggggaaaatacagagcaggttctggaggcaggcaagctaaaatttta

SEQ ID NO: 829011 - DNA, 120 bp, Artificial Sequence
  ENSG00000285750_4 (sequence is synthesized)
atcacttttagcaatttgaccctgagaaactactttcagcttcccttcgcctgtttccacttgtgtaaaatgagagtgattatgatctatctcagggctataagaatgaaatatgataat

SEQ ID NO: 829012 - DNA, 120 bp, Artificial Sequence
  ENSG00000285750_5 (sequence is synthesized)
acatgttaagtgtttaagactgtgtctggtgcatggtgtttaataaatgtcagcagtatgtatactaggatgggtctgaggattggagaaacggatgcaaagcacctaacatcctgcctg

SEQ ID NO: 829013 - DNA, 120 bp, Artificial Sequence
  ENSG00000285750_6 (sequence is synthesized)
acacataatgggtggctgataagcatcagctatcatgcgactttgagcaacccgataaatattttttaaacaaatgcccacaggaggaatgtgtctttttcatctttgactctctgccac

SEQ ID NO: 829014 - DNA, 120 bp, Artificial Sequence
  ENSG00000285750_7 (sequence is synthesized)
ttagaggtattagtttcttattgccgctgcaacaaaatagcacacatttagtgactgaaaacaacacaagtttattacgatatctctggaagtcagaaatccaaaacggccttcattagg

SEQ ID NO: 829015 - DNA, 120 bp, Artificial Sequence
  ENSG00000285750_8 (sequence is synthesized)
gcagaactgctttccttttaaaggctgcaggggagaccctttccctgctttttccaggttccagagacttcttgcatttcttggctcatgtccgcttcttccgtcttcacagccagcagt

SEQ ID NO: 829016 - DNA, 120 bp, Artificial Sequence
  ENSG00000285750_9 (sequence is synthesized)
gaagcatcttcaaatttctgtctatgactctgacctcacttctgccatctcatctccttctctgagtctaactctccttctctctctctctctctatttatttattttttgagatggagt

SEQ ID NO: 829017 - DNA, 120 bp, Artificial Sequence
  ENSG00000285750_10 (sequence is synthesized)
tgtgccaccacacccgggttcctccttctcttataaggaggttacgctggactcacccagctaatcaaggacaatctctccatctcaagatccttaacttaaatcgcacatctggaaagt

SEQ ID NO: 829018 - DNA, 120 bp, Artificial Sequence
  ENSG00000285750_11 (sequence is synthesized)
ccattttgccagttgactgtgggtaatgaaagctgcagaaagcaaaaccgcggatcagaggggacaatgctgctttttggaactctgttaggagaccaacataaaccgaagaaactacga

SEQ ID NO: 829019 - DNA, 120 bp, Artificial Sequence
  ENSG00000285750_12 (sequence is synthesized)
actaatacatcatgaaatacttcttctatttgggaggtggagaaaccatccccttctccaccaaaatgacacttaagaaagagaccccagggagggtagcagtggaatgagggtagaaaa

SEQ ID NO: 829020 - DNA, 120 bp, Artificial Sequence
  ENSG00000285750_13 (sequence is synthesized)
taactgatgaaggtcagtttcagccttcctgcctccaaccttctcacagactccagtgcagaagaggatgtattcagcttcctaaagtctgtgtgtaccactaacaggttaggaaatgag

SEQ ID NO: 829021 - DNA, 120 bp, Artificial Sequence
  ENSG00000285750_14 (sequence is synthesized)
ttaaatgccagattcttaaatgttgcatgtgggaggatctgaaacagagacttcagtcactttgcctctgccttaaacacccacacaacagaaatggatcacggcattggctgagcaaga

SEQ ID NO: 829022 - DNA, 120 bp, Artificial Sequence
  ENSG00000285750_15 (sequence is synthesized)
gagaagagcagagaagcaagaatactagaagttactctgttttttatacaggtcgtgccttcctgatctgaaagtctgaaatgctccaaaattcagaactatttgagctctgacatgact

SEQ ID NO: 829023 - DNA, 120 bp, Artificial Sequence
  ENSG00000285759_0 (sequence is synthesized)
ggggcccagggtcgcggatagactcggacaaggctccgtttactttcagtttgtcttagttgactaatggcgggactggttgtaatgcgtgctctgagattttctccaggatttgtcact

SEQ ID NO: 829024 - DNA, 120 bp, Artificial Sequence
  ENSG00000285759_1 (sequence is synthesized)
ttaattttgcaatatgagaaagagaagctaacaaaggaaagcctcttcaaaaaatgggatttccttggccttagcagttctggtgtgttccactgccaacactagacaggaaatgtccag

SEQ ID NO: 829025 - DNA, 120 bp, Artificial Sequence
  ENSG00000285759_2 (sequence is synthesized)
gaaattacctctaaagtcttgattctggaagaagctagagaaatggctcttggatttctaatactggcacttctttggtgactgtttcccatgaattacctcaacttgcactgaaagcca

SEQ ID NO: 829026 - DNA, 120 bp, Artificial Sequence
  ENSG00000285759_3 (sequence is synthesized)
caagaaaaccaaaaaatgcaaactacaagcctgaatatgcctacagattacctgtgtctttaatgtgtcttgagcagtttggatacatgcttgatattttgtggcaacaaaatactagtg

SEQ ID NO: 829027 - DNA, 67 bp, Artificial Sequence
  ENSG00000285759_4 (sequence is synthesized)
ggatacatgcttgatattttgtggcaacaaaatactagtgccagtaacatataattttaaaaaattc

SEQ ID NO: 829028 - DNA, 120 bp, Artificial Sequence
  ENSG00000285758_0 (sequence is synthesized)
ggctggtttttcacacaggaatcctcctcgccaccgctccctcgaaggccgccccccgctccacccccagcactgggcgcccgcgcctcccaactcagcccgccgccgagcagacggcgc

SEQ ID NO: 829029 - DNA, 120 bp, Artificial Sequence
  ENSG00000285758_1 (sequence is synthesized)
gccgcgagagggagcttgagctcttgagaaagacatgaaggcccttgccgctgtcggcatcactccttcctccctaatccggtcagttaattgctgagtgctcgcttcctgatctgcgtg

SEQ ID NO: 829030 - DNA, 120 bp, Artificial Sequence
  ENSG00000285758_2 (sequence is synthesized)
atggcctcggaaccgggctgcgtgtagacctgggtgactatcagctcagctcccaagtggagggcctcggaagacgctctgtgcggcctactaacaagcacgagtgtagcacagaggttt

SEQ ID NO: 829031 - DNA, 120 bp, Artificial Sequence
  ENSG00000285758_3 (sequence is synthesized)
gactgtgaccaagtacaagaaatctaccttttctgggctgtttactcatctgcaatatgcaacaccttgcaagtctgacaagaggcttaaggcattaagactactgtgacctgctccgtg

SEQ ID NO: 829032 - DNA, 120 bp, Artificial Sequence
  ENSG00000285758_4 (sequence is synthesized)
caacacaattagagggtcattgataatcggaacctatcaagaagaggacgctgaaagaatactgtattatgttgaatgaggaattgaagggaaggaaggcatttagcagactggaaaaaa

SEQ ID NO: 829033 - DNA, 120 bp, Artificial Sequence
  ENSG00000285758_5 (sequence is synthesized)
acagcaagaggaccctaaacctgtctgaatttgcaagggtttaatattaaaaaggtgacggtacttattttatgtgactatatattgtatgcccccacccccccaaaagcagaaataaga

SEQ ID NO: 829034 - DNA, 120 bp, Artificial Sequence
  ENSG00000285758_6 (sequence is synthesized)
caaacgggtagaagctttaggatggcagattcacagcagtttaatacgagaaagaacttctaacagaactggttggaaagggaacaggttgtttttttgtgtattaatggtggaaatcac

SEQ ID NO: 829035 - DNA, 120 bp, Artificial Sequence
  ENSG00000285758_7 (sequence is synthesized)
cagaaagcctaatagttctccgacaccagaaagcatgaaagctggaaaccagattaaaaaaagagcagtcagccaaacagtcagaaggtaggtcaggtgtacagtaacaaatttaagatc

SEQ ID NO: 829036 - DNA, 120 bp, Artificial Sequence
  ENSG00000285758_8 (sequence is synthesized)
tgattatctttcagtctacctatcatcatttaactctggtagaccatgaagtacaacactctcagtgacttaccacatccataggtgctctgacttattacagataaagatatccattat

SEQ ID NO: 829037 - DNA, 120 bp, Artificial Sequence
  ENSG00000285758_9 (sequence is synthesized)
gcataattagcttctttatctgactcaaatctgaagctaaagattattctggacatgatttcctggatagatggccagctaagttgtgtttcagataggaggatcacttaattaactagg

SEQ ID NO: 829038 - DNA, 120 bp, Artificial Sequence
  ENSG00000285758_10 (sequence is synthesized)
caacacaggtattttagtatattaatcacttccctaggtaggcaagttctaaatcacccttttctcctatatgaggacacatggagctactgttttctgttcccgtgttactctttaatc

SEQ ID NO: 829039 - DNA, 120 bp, Artificial Sequence
  ENSG00000285758_11 (sequence is synthesized)
tctgtcagtgttgtacttttgaacttccactttgtaacactgcactacactaaacactatatgtagcaagcattctatacgtttgtagaagattttagtaaatatgtactttcaaatgct

SEQ ID NO: 829040 - DNA, 120 bp, Artificial Sequence
  ENSG00000285758_12 (sequence is synthesized)
atataacacatctgcaacttgttttgcaaactgggggtctgaagtctttggacaagtctgcattccaccacctgccatatgtgctccttaacctggcttccaatctcaaagctgcattca

SEQ ID NO: 829041 - DNA, 120 bp, Artificial Sequence
  ENSG00000285758_13 (sequence is synthesized)
cttattttaaatcttgaggagcaggataggtgttgacaatgtgttacttagaatgttccaagtattccctaatctctgggtcattcctgtcaaaacaggagtgtgactacacagtgacca

SEQ ID NO: 829042 - DNA, 120 bp, Artificial Sequence
  ENSG00000285758_14 (sequence is synthesized)
ggatgcaagctgatgatatttttgcttctaatctgagaaaagaaattgcttttgtgcagactggtatctctagggtgactttgttctaaatgctaatatcttattctaaatatcatcaat

SEQ ID NO: 829043 - DNA, 120 bp, Artificial Sequence
  ENSG00000285758_15 (sequence is synthesized)
ggccggcagccgctgctctttcacagccccagaccctgcgcggcctgccggcggctggcgacctcccttcccctcccgaggcgcccgagcctctgatcccctcccggggcgcctgtggcc

SEQ ID NO: 829044 - DNA, 120 bp, Artificial Sequence
  ENSG00000285758_16 (sequence is synthesized)
ctgatcccctcccggggcgcctgtggcctcccttcccctcccggggcgcccgagcctctgatcccctcccggggcgcctgtggcctcccttcccctcctggggcgcctgtgacctcccgt

SEQ ID NO: 829045 - DNA, 120 bp, Artificial Sequence
  ENSG00000285758_17 (sequence is synthesized)
gcggctcccgcggcctccgacctcctgccggggcgcctcaagggcccctgccccacatcagagggtcttgcggtttcctggtttggttcaacatctctgaaacccagaggtgaagaagaa

SEQ ID NO: 829046 - DNA, 120 bp, Artificial Sequence
  ENSG00000285758_18 (sequence is synthesized)
accatggaggagaatccgaaacagtcttccagatcagacctctaaaataactaaattcttgttaatcattagattctcccttttatttaatgtgtaagtccaaggggattccttctgctt

SEQ ID NO: 829047 - DNA, 120 bp, Artificial Sequence
  ENSG00000285758_19 (sequence is synthesized)
ccccattcaattagacagcaacctcttcctctaaagttctctcatctgaagccatctgagcaggagcactttgaccaactcaattctgctctgatctggactacttctcccagtttaggg

SEQ ID NO: 829048 - DNA, 120 bp, Artificial Sequence
  ENSG00000256746_0 (sequence is synthesized)
gttgtcttctccctcatctgtctgtagtttgtacttcgtcctaattctggcttttgatagtgatatctctagaacaccaccaggtttctgagcacgccatatattcatttctagcatcca

SEQ ID NO: 829049 - DNA, 120 bp, Artificial Sequence
  ENSG00000256746_1 (sequence is synthesized)
gctcaaaatgcatatctatctgctgaagtccgacatcaccatcagctccacccagaggatctcacagtaaaaccacaggaaccagagagcgatatgacatctctgctgacgtgaacacaa

SEQ ID NO: 829050 - DNA, 120 bp, Artificial Sequence
  ENSG00000256746_2 (sequence is synthesized)
ctcccctcctctacctccccaggcagtgaccttgcaagctcatcagcacagactggtccagcgtatgggagaactggagcaaggaggctggcagctggcagggttggggtagaggggagg

SEQ ID NO: 829051 - DNA, 120 bp, Artificial Sequence
  ENSG00000256746_3 (sequence is synthesized)
gcagggaaaggtggaagaaggtagatacacgaggatggggaggagagcgattgcagaaagatgaaatggtgttctctctccagcaagtcaattttgaaatatcaagttaaaaaaaaaatt

SEQ ID NO: 829052 - DNA, 120 bp, Artificial Sequence
  ENSG00000256747_0 (sequence is synthesized)
tagcccctgacattgaccaggtcgggaggaaggttgttggccagcgggaaccaacgctcagtcatctcctcgtacctgagcatggacgggggctccccctggtaggggtgaggggccagg

SEQ ID NO: 829053 - DNA, 120 bp, Artificial Sequence
  ENSG00000256747_1 (sequence is synthesized)
ggtccccccaggaagtccccgagggccacgaggacaggagtcccagtcatccgggcctccctcagcctctgcttcaggctgacatcccctggagcttggggaggagaccccaggaggtgg

SEQ ID NO: 829054 - DNA, 120 bp, Artificial Sequence
  ENSG00000256747_2 (sequence is synthesized)
acacctgcgccaggcggtacatctccaggcagttattgagccgcacctgggacagcagcagctgcagcagggacgtgacctgcaggaaggaggccgcctccaccagctcggacagcaggc

SEQ ID NO: 829055 - DNA, 120 bp, Artificial Sequence
  ENSG00000256747_3 (sequence is synthesized)
tcacctcatccatctcctcgtcctcgtccaccccgccgcccttttccccgcgcgggcccaggagccagccttcgcgggccccgccggcgttgatgaagtccagcaccagccgcaggcccg

SEQ ID NO: 829056 - DNA, 80 bp, Artificial Sequence
  ENSG00000256747_4 (sequence is synthesized)
atgaagtccagcaccagccgcaggcccggcgcgctgaggcccgggaagctgcgggcccgggcgcctcggctgcggacgcg

SEQ ID NO: 829057 - DNA, 120 bp, Artificial Sequence
  ENSG00000246067_0 (sequence is synthesized)
agagtgaaggagcaaaggggactcggccgccatgttaggagtactgggacgattccgcggagccgggcagaggttttaggggaatgattaacaaaggcgtccgaagaaatcgttgttgga

SEQ ID NO: 829058 - DNA, 120 bp, Artificial Sequence
  ENSG00000246067_1 (sequence is synthesized)
aggtgaccaaggtggaaagagacgttgctttggccctgcaagtaagaagagagagggaatagcctgaaggagtaacactaaatttaaaatgacacttttttaccaaccagcgaaagcaga

SEQ ID NO: 829059 - DNA, 120 bp, Artificial Sequence
  ENSG00000246067_2 (sequence is synthesized)
tgttcaaaggggatattggccagagtctgtcacactaagatgagaaatgtcctttcttcctgaaggtgtctgatgtgtaaaaatatgatatactttgtgctgtttcctcccttccctttt

SEQ ID NO: 829060 - DNA, 120 bp, Artificial Sequence
  ENSG00000246067_3 (sequence is synthesized)
gcatattattctgaaacaacattaactagttactttgcgtcattgaaggtgggttgggggagaaggagccaattcaatgtctagtctttactggaaagaagaaactttacagcgcatttt

SEQ ID NO: 829061 - DNA, 120 bp, Artificial Sequence
  ENSG00000246067_4 (sequence is synthesized)
gagcaatttagtgcagagtctcagtgggtcaactggcggggcaccagatagtaatggatttcacagttagggcattgctgggtctcacctttgtgcagccaaaaactagaggacagcact

SEQ ID NO: 829062 - DNA, 120 bp, Artificial Sequence
  ENSG00000246067_5 (sequence is synthesized)
gttgtactcttcacagatgcagcccactattcacttgttggtgatggaggagactaaattagggtcttctttggtgccagaagcttccttttggagtagtgtattctatgggtccagtcc

SEQ ID NO: 829063 - DNA, 120 bp, Artificial Sequence
  ENSG00000246067_6 (sequence is synthesized)
ctttcatgcagccattatgacctacatctccagtccagacacatcaccatcagtaggaacaccaccttcagatgccatggagcacatcaaggccacccactggaaccatgggccctcaga

SEQ ID NO: 829064 - DNA, 120 bp, Artificial Sequence
  ENSG00000246067_7 (sequence is synthesized)
aaagccatatgctcacgacaagcagcagcacttctgggaacaggcttcagagacaacttgagttcttccttaatttctctcagtaagatttatagttttctatgtacaggttgtgtactt

SEQ ID NO: 829065 - DNA, 120 bp, Artificial Sequence
  ENSG00000246067_8 (sequence is synthesized)
tttctttgtgtgaacttattcctatttgaaacttcagatgctgtggaaattgtatgtttttaaaaaagttttctaactgtttattgttggtatgtagaaatatatctgatttgcatactg

SEQ ID NO: 829066 - DNA, 120 bp, Artificial Sequence
  ENSG00000246067_9 (sequence is synthesized)
gtcctttatccagcaaccttcttaaattcactttttaattctaataatttatctgtagattcttttggattttctatgtatgtaactatatcatttgtaaataatgccagcttatttctt

SEQ ID NO: 829067 - DNA, 120 bp, Artificial Sequence
  ENSG00000246067_10 (sequence is synthesized)
cctcttcctcactctgacattctaaaatgtctcctcttttctataagtactttaaaaataatgattaaataatttatttatctggagtttattttgagcattgagtatgcagtgtggctc

SEQ ID NO: 829068 - DNA, 120 bp, Artificial Sequence
  ENSG00000246067_11 (sequence is synthesized)
taagctaatttttttcccagatggatatcctgatttttatgtaacagttattaaataaaccatctttcctcaataatttgaaatgagacctttataatagattaaattcctatgtgtatt

SEQ ID NO: 829069 - DNA, 120 bp, Artificial Sequence
  ENSG00000246067_12 (sequence is synthesized)
tgatttcacttttgtgggtttttttttggatcactgaactcttttagttattgtaactttaaaatgttttaatatttggtagatcttcttatttatttttggaatatatatttctattct

SEQ ID NO: 829070 - DNA, 120 bp, Artificial Sequence
  ENSG00000246067_13 (sequence is synthesized)
tatttaatttttcatataaatttgggaatcagcttatctaattccaagacaaaattctatttagatttttattaggagagcttaagttatagattctatttataaagttgagctttccgg

SEQ ID NO: 829071 - DNA, 120 bp, Artificial Sequence
  ENSG00000246067_14 (sequence is synthesized)
aagaaaggcagatagaatgattaaaaatgaccaaaacatgttagaaacagtctctcaggtgtatgcagatggtaattacaaaaatactttttcaaaaaatgatcttctgtgtcatgtttc

SEQ ID NO: 829072 - DNA, 120 bp, Artificial Sequence
  ENSG00000246067_15 (sequence is synthesized)
tgggaacaagtcaagatgaatgagtttgatttttaagcagaagtagtatgtgttggtgtcatccatgaatacaacaatgaaaaaggctcaaagttgttgttattcagaaacttctctaag

SEQ ID NO: 829073 - DNA, 120 bp, Artificial Sequence
  ENSG00000246067_16 (sequence is synthesized)
taatggtggtaagtacaggaaaaggagcaatgtctaccattttctttctaaccttcgatttaactattgtaatgttgtaagcttaacagagacttacacttaggcttaatttcaagctct

SEQ ID NO: 829074 - DNA, 120 bp, Artificial Sequence
  ENSG00000246067_17 (sequence is synthesized)
tcaatcatttttcccggttggtgattcaggtgtattctcatgtcttatgtaaacttatcatgagtgttgttgatttataatatatttctttatgtaagccatagccttgtcagtttgagt

SEQ ID NO: 829075 - DNA, 120 bp, Artificial Sequence
  ENSG00000246067_18 (sequence is synthesized)
tatatggaagacaaattgtagggaaaaagagcaacagattactcagaaaccttctgtgtgagctgggcatagtagtgcatgccagtaggcttagctacttgggaggctgaggcaggagga

SEQ ID NO: 829076 - DNA, 120 bp, Artificial Sequence
  ENSG00000246067_19 (sequence is synthesized)
gtttgaggctgcagtgagctatgattgtgtcactgtactccaatctggacaacagtgagactatgtctgtttttaaaaaagaaagaaagcttgtgtttgagaagtgatacctctagaata

SEQ ID NO: 829077 - DNA, 120 bp, Artificial Sequence
  ENSG00000246067_20 (sequence is synthesized)
ccttgtatctaatggacatctgaccataaagatgaaaaaatcctgcactcattataaattttatttataaaattgatatttgaggagttggggaggccagcttctgaaaaaataacagtg

SEQ ID NO: 829078 - DNA, 120 bp, Artificial Sequence
  ENSG00000246067_21 (sequence is synthesized)
tcccatagaaacaccacaacttaggaaaatattgttaaagtggaattaggaatatctagaggaggtaaagcttttcatctctcaaaaaagaattagggccaggcacagtggctgacacct

SEQ ID NO: 829079 - DNA, 61 bp, Artificial Sequence
  ENSG00000246067_22 (sequence is synthesized)
gggaggccgagatgggcacagaaatagaaaagttagccaggtgtggtggcgtgcgcctgta

SEQ ID NO: 829080 - DNA, 86 bp, Artificial Sequence
  ENSG00000246067_23 (sequence is synthesized)
ggcagtgagcagagattgagccactgtactccagcctgggcaacagcaagaccctatctcaaaaaaataataaagagaattaggac

SEQ ID NO: 829081 - DNA, 120 bp, Artificial Sequence
  ENSG00000246067_24 (sequence is synthesized)
caagaccctatctcaaaaaaataataaagagaattaggacatggatttgtattaaaattataggtagctcatttaagagtatgaagccaattgctgttagagcaagggtttttttcagta

SEQ ID NO: 829082 - DNA, 120 bp, Artificial Sequence
  ENSG00000246067_25 (sequence is synthesized)
gaggtgtcaggataacctatacagctctaaaagtatatggctgttaccttcccatccctgttgaaatctccagggttagaaccaagtattgtgtttttaaaactataggtgagtctacaa

SEQ ID NO: 829083 - DNA, 120 bp, Artificial Sequence
  ENSG00000246067_26 (sequence is synthesized)
gagttgggtggagtagtcctctacatcctgtgtttgtatttttgcagtaagtcacacaataacaaaagctttgagaaagattttaggtttattgctaattatacccatgaatgaattctg

SEQ ID NO: 829084 - DNA, 120 bp, Artificial Sequence
  ENSG00000246067_27 (sequence is synthesized)
aaaatgtgtagataaggaatttacctggtgaacggtttacacatggcaattgtgggagggagaggggagtgagaggagatgagatcagttttagctttaagaggaccaaccgggccaagc

SEQ ID NO: 829085 - DNA, 120 bp, Artificial Sequence
  ENSG00000246067_28 (sequence is synthesized)
cagttgagagagttggtgtcttttgttgaggtgcgaggacccgaggcggcgaccctcgcctttattcggagaagcccacttccacccacagagttggggtagtcctccgaaatgcatttt

SEQ ID NO: 829086 - DNA, 120 bp, Artificial Sequence
  ENSG00000246067_29 (sequence is synthesized)
ggccaggtgcggtcgctcacgcctttaatcccagcactttgggggcagacgcggggagatagcgtgattctaggagttcaaccccagcctgggcaacatgcggagaccccgtaccgtctc

SEQ ID NO: 829087 - DNA, 120 bp, Artificial Sequence
  ENSG00000246067_30 (sequence is synthesized)
gaggctgcagtgagcctcgatcctaccactgtgctccagcctgggcgacagcaagcccgtgtctcagaaaaggcgggaggggtgggatattattgatgataggccttctgacgtctggca

SEQ ID NO: 829088 - DNA, 120 bp, Artificial Sequence
  ENSG00000246067_31 (sequence is synthesized)
atagattccagagtaacatcggtcatggataaattttttttttaactaagtgactgaaaccaaagttaattgtcttttgagtgattttgcacagtatctcaaaatgaactgtactttttt

SEQ ID NO: 829089 - DNA, 120 bp, Artificial Sequence
  ENSG00000246067_32 (sequence is synthesized)
gtggtggttcagtggggacggtgaggtggaggacgatctggtcggatagccgcgggcacgaacctgggaaccagagggtggaggccatgctggggactgatgtagggcgggaccgactgg

SEQ ID NO: 829090 - DNA, 120 bp, Artificial Sequence
  ENSG00000246067_33 (sequence is synthesized)
aagcggcatccagaggcccagtgagcctcggtctcagctcctgaaggggttgcatggggccctacgcttccttctccattttttagctaagagattgagagagtcggtttacttttgggc

SEQ ID NO: 829091 - DNA, 120 bp, Artificial Sequence
  ENSG00000246067_34 (sequence is synthesized)
actggtttcccttttatacatgactgcaaaactgactctcacctaggtttgtgatgttagaaactccagttgtttactattattattaaagtgggaaacggagttcgttgatcaaatgga

SEQ ID NO: 829092 - DNA, 120 bp, Artificial Sequence
  ENSG00000246067_35 (sequence is synthesized)
caggcgtgagccaccgcacccagccaatctaaccattttcaagatttgatctgcaaatacctgaagtgggttgggggagaaggagccaattcaatgtctagtctttactggaaagaagaa

SEQ ID NO: 829093 - DNA, 120 bp, Artificial Sequence
  ENSG00000246067_36 (sequence is synthesized)
ggggactcggccgccatgttaggagtactgggacgattccgcggagccgggcagaggttttaggggtgcgcaggagtcaagtggtggttcagtggggacggaatgattaacaaaggcgtc

SEQ ID NO: 829094 - DNA, 63 bp, Artificial Sequence
  ENSG00000246067_37 (sequence is synthesized)
actagaaaggtctcgactcactgcaatctccgctcctgggttcaagtgatttctcttgcctca

SEQ ID NO: 829095 - DNA, 68 bp, Artificial Sequence
  ENSG00000246067_38 (sequence is synthesized)
taaccattttcaagatttgatctgcaaatacctgaaattttgcactagcaaagtgcactgtttcagac

SEQ ID NO: 829096 - DNA, 120 bp, Artificial Sequence
  ENSG00000246067_39 (sequence is synthesized)
tacctgaaattttgcactagcaaagtgcactgtttcagacaatcaaggaaataaaacatttcttgatgaaatcctacctcgcctcaacaggaaactgaattggagtcctcaattctcagt

SEQ ID NO: 829097 - DNA, 120 bp, Artificial Sequence
  ENSG00000246067_40 (sequence is synthesized)
acatcagaactagtgtgtgaaaggatcaggagaggaccatagtattggagaataaaacattatgtattgatggttgagctttatgtcatcgtgtagtaaatgctatgaccataaagccat

SEQ ID NO: 829098 - DNA, 120 bp, Artificial Sequence
  ENSG00000246067_41 (sequence is synthesized)
tgctatgaccataaagccattactgttaacacttaagtttatcttctgaaagaagcctatgaaatatctccagaaagactaggggattttcttctgtttgtttgtttgtttgtttgagat

SEQ ID NO: 829099 - DNA, 70 bp, Artificial Sequence
  ENSG00000246067_42 (sequence is synthesized)
caaagtgctggccaccgcgcccagtcagacttgttttttagtgaaataaattgttttcctttaggacctt

SEQ ID NO: 829100 - DNA, 120 bp, Artificial Sequence
  ENSG00000246067_43 (sequence is synthesized)
ttgttttttagtgaaataaattgttttcctttaggaccttattctttatgataacagattccaagaatatgcagtcttgtcaatggctgtttcatcctcagtttctttaaaaataaaata

SEQ ID NO: 829101 - DNA, 120 bp, Artificial Sequence
  ENSG00000246067_44 (sequence is synthesized)
caattagaacatttttagatatgctatatctatccaatctattttcctgtcacccagtaaggttttctatcatcagcacaggtctatgaaaggacagtaaagggtctcctgttacatacc

SEQ ID NO: 829102 - DNA, 120 bp, Artificial Sequence
  ENSG00000246067_45 (sequence is synthesized)
ctacattcagtctttctctaccctctgtcctctatttacccacctatgcatgtggcctactaattatattgactgtacatgaccagcaagttgtaagttcttttaaaagcaggagctcaa

SEQ ID NO: 829103 - DNA, 120 bp, Artificial Sequence
  ENSG00000246067_46 (sequence is synthesized)
ccatatttgtattcacatttccttctgcttaaaacagggctcttgtttcttcagtaaatattcattcggtatccactaggtgtcagataatatacaaggtaggttctagggattccaaga

SEQ ID NO: 829104 - DNA, 120 bp, Artificial Sequence
  ENSG00000246067_47 (sequence is synthesized)
taaataaacacagatatgccaatatgagtctgacagttttggcggggagaggtggaaaatagatctgcaagccaaaaaagctacagtagaataatataaatattgtaatggcaataaaat

SEQ ID NO: 829105 - DNA, 120 bp, Artificial Sequence
  ENSG00000246067_48 (sequence is synthesized)
accagaactattaattttacatttagtaatcattcagtatcaattaaatgggtaaaatggatatgttggcatgaatgacatataactgaaaaaacactaagaactgtatagaaactgaat

SEQ ID NO: 829106 - DNA, 120 bp, Artificial Sequence
  ENSG00000246067_49 (sequence is synthesized)
tagacatatgagtaatattagtaggaaggggagagaatatttgattccaggtaggctaccaagcaggatgttttttcagcacagccttggaataaaatctgtaacctttgaaaacaatca

SEQ ID NO: 829107 - DNA, 120 bp, Artificial Sequence
  ENSG00000246067_50 (sequence is synthesized)
catttttgttcttatgcaatctttgtttttaaatgtatttattgttttggctctagtccctgaatgttaaaattttagtgtcagtgttaattctcacttatcttctccagaccttactcc

SEQ ID NO: 829108 - DNA, 120 bp, Artificial Sequence
  ENSG00000246067_51 (sequence is synthesized)
ctaattttctcattttcatttgccccaataagtgccaaccttaccttgaatagaatagtggatttatcagcttacaaggactaaaaagtcgtcatttccaaaaacatctgtccaataagt

SEQ ID NO: 829109 - DNA, 120 bp, Artificial Sequence
  ENSG00000246067_52 (sequence is synthesized)
ctgcctcagtgactacatttctagcattacaatgtcattcttagtacactgatttgatctttacaaattacataaatgtataaaattgtcgcatgtaccctaaattatatacatctatta

SEQ ID NO: 829110 - DNA, 120 bp, Artificial Sequence
  ENSG00000233420_0 (sequence is synthesized)
agggagaaggggaaaggcaaagggatgtcacctgcttctctccctttgagaaagctttcccaaaagtcccacctgcaacttctgcttatatgatacaccaagaaggtggccatctaccag

SEQ ID NO: 829111 - DNA, 120 bp, Artificial Sequence
  ENSG00000233420_1 (sequence is synthesized)
ccaggaagagatccctcaccagagtcctgccatgctggggcaccctgaccttaggcttccagcctccataatgacttaccagagactgggcaattcacaaaagaaagaggtttcattaga

SEQ ID NO: 829112 - DNA, 85 bp, Artificial Sequence
  ENSG00000233420_2 (sequence is synthesized)
cagaaaggcaagcaaagaaaggagcgcttgtgcaggggtcctctactgtaacacagatctcctggatgtgcaagtgacattctcc

SEQ ID NO: 829113 - DNA, 120 bp, Artificial Sequence
  ENSG00000233420_3 (sequence is synthesized)
ctgtaacacagatctcctggatgtgcaagtgacattctccatcttcttttcacctggtgtgtgaataatggggtgtgaagaaagaaagcaaaatattctcctggtaagaaaaatccacat

SEQ ID NO: 829114 - DNA, 120 bp, Artificial Sequence
  ENSG00000233420_4 (sequence is synthesized)
cgtgacacggaagagatggaggaagaagagaaaacaaaaggtcagagatgtagccctacatagctgattttaaaaggaacttaaaattttactttggctaaaattgacctctcctgtaat

SEQ ID NO: 829115 - DNA, 120 bp, Artificial Sequence
  ENSG00000233420_5 (sequence is synthesized)
ttaatccaaacctctattgcttgtgtgtggccaagttcagtagtctttggagtctcacttctctaattatccaaatgcatttgttgaagccccatcccctgcctcctccaaatcccttaa

SEQ ID NO: 829116 - DNA, 120 bp, Artificial Sequence
  ENSG00000233420_6 (sequence is synthesized)
taggtttgattctgctcactgctcattgctattttcatggtgccgctgaattccgctctccttctctgtttctagccttttcaacattgctttctcctctcatccctggcatgaaacaca

SEQ ID NO: 829117 - DNA, 120 bp, Artificial Sequence
  ENSG00000233420_7 (sequence is synthesized)
gatgctggttattcaatctctaaagcactgttcttttaagaataaacttttactgaagaatgggggataaaagatggagcgtaagctcagaacagcacagggagaaaatgtacaagtaaa

SEQ ID NO: 829118 - DNA, 120 bp, Artificial Sequence
  ENSG00000233420_8 (sequence is synthesized)
actaagttatttagtttagagcttcttggtcagaccctccttagtcctgcttgccaatttgtgctagattatttttttcctggtgactgtttcccgcacctctcctccccattcagggac

SEQ ID NO: 829119 - DNA, 120 bp, Artificial Sequence
  ENSG00000233420_9 (sequence is synthesized)
cccaaagcatgttcttcagtgaccaggaaaatattttatattcttaatacttcattatggagaaaaatttatttcattttgtataaccactgtgtgttagtttcccatggcttccttaac

SEQ ID NO: 829120 - DNA, 120 bp, Artificial Sequence
  ENSG00000233420_10 (sequence is synthesized)
aacttactacaaactgggtggcttaaagcaacagaaatttatttttctcagttttggaggccagaaatctgaaatcaaggtgtcaggaagaccatgctcttttcagaggctctagagaag

SEQ ID NO: 829121 - DNA, 120 bp, Artificial Sequence
  ENSG00000233420_11 (sequence is synthesized)
attcatttttctgcctccctccagcttcttgtggctccaggcgttctttgattctccttggcttgtggctgcatcactgatttccgcttccgtgttcatgtggctcttcttccgcgtgtc

SEQ ID NO: 829122 - DNA, 120 bp, Artificial Sequence
  ENSG00000233420_12 (sequence is synthesized)
ttctcctttctcttacaaggacacttcgttgcattcagggcccactcaggtaattcaggatgatctcatgccaagacccctaatctaattacatctacaaagatcccttatccaagtaag

SEQ ID NO: 829123 - DNA, 120 bp, Artificial Sequence
  ENSG00000233420_13 (sequence is synthesized)
gtcaccttcacgggttctgggaattaggatttaggcatatcttttggggagccatcattcaatgcacgacataatctaaacagactccagttttctcagctttaacagagacaatcaatc

SEQ ID NO: 829124 - DNA, 120 bp, Artificial Sequence
  ENSG00000233420_14 (sequence is synthesized)
aaaaacagtatttctgtctctcagaataattctgcagcccagttcttagagcaaattacagttagatttaaaagaatgcttttcttctcattttaaagatttctctttaaaaattgttaa

SEQ ID NO: 829125 - DNA, 120 bp, Artificial Sequence
  ENSG00000233420_15 (sequence is synthesized)
aatgacctaacattttaaaagacggaaaagtaattgtaatatcaaaaacttaacacaactacatatttatacaaatgcctttataatctttgtgtatatgtgtgtatatatacatgtgaa

SEQ ID NO: 829126 - DNA, 120 bp, Artificial Sequence
  ENSG00000233420_16 (sequence is synthesized)
tgtataaatacatacttgtaatcatgatgtacttaacaactgcagattgtgtttaatcttagcatattaaataagttttttcaatgttttaacgtatgttttaatttaccactttttaat

SEQ ID NO: 829127 - DNA, 120 bp, Artificial Sequence
  ENSG00000233420_17 (sequence is synthesized)
tttttaatcttaatgatttaagaaagtattagtcattgtagaaaatacaaataaactaaaagaaaaatgaatcacctgaaattcttttaaaaaagaaagccaatctggagacacatacat

SEQ ID NO: 829128 - DNA, 85 bp, Artificial Sequence
  ENSG00000233420_18 (sequence is synthesized)
tttttgagacggagtctcgctctgtggccagccgggagtgcagtggagcgatctcagctaactgcaggctccctttgagtagctg

SEQ ID NO: 829129 - DNA, 120 bp, Artificial Sequence
  ENSG00000233420_19 (sequence is synthesized)
tagctgtatctacatttatttagttttggctataaccccatttcaggaactagttgactaaaaaataaacttctattgtttttgaattattacatattttgtggtcttttaaaaagtact

SEQ ID NO: 829130 - DNA, 120 bp, Artificial Sequence
  ENSG00000233420_20 (sequence is synthesized)
gcaacctcctctatgaatgaatacacttgtttttataagttttgaaacatattgttgaatgacatttctcaaagcctaagcacagatgataatccctactgcttcttaaccaagattata

SEQ ID NO: 829131 - DNA, 120 bp, Artificial Sequence
  ENSG00000233420_21 (sequence is synthesized)
atgacaatcttagaatcaaatgttatcaattttaatatttattagagaatgtctgacaacactttctagagattctcttattttatcatgttgccaattttcctaaaaagtgttaagtga

SEQ ID NO: 829132 - DNA, 120 bp, Artificial Sequence
  ENSG00000233420_22 (sequence is synthesized)
gattgttaaggctacaatggatgcaaataatgttaatactataatgaatgcaaaattattaatttaaccattcttccatcattaaaccttgtatatatttctaattttttattgttatgt

SEQ ID NO: 829133 - DNA, 120 bp, Artificial Sequence
  ENSG00000233420_23 (sequence is synthesized)
ttatacatattgatttctctgcagctaaattattcagttacataaatttcccagaaatgtgggtattcagggaaattgtggaaataaatctagtcttcatacagattgcagtttgccttt

SEQ ID NO: 829134 - DNA, 120 bp, Artificial Sequence
  ENSG00000233420_24 (sequence is synthesized)
tataagggttatatgaagacagtttcatcagagtataagagtaaaccggttttacctcaagttcattatcattgttgtattttgatattaacatcagtatttttaatataaaagtaatag

SEQ ID NO: 829135 - DNA, 120 bp, Artificial Sequence
  ENSG00000233420_25 (sequence is synthesized)
aattccaccataagattagtttaattgcattgcttctgtctcagaattgaagtttatataagttcctaaatagctttaaactcatttaatgtaatttatttttgtctacttatttttggg

SEQ ID NO: 829136 - DNA, 120 bp, Artificial Sequence
  ENSG00000233420_26 (sequence is synthesized)
catactctccatgtctgctgcatttgaggatgctccttttttatctggaactcctgctattccaaccatatttgcatgagggagcaccctaagcccagtaacgctgtggttcttatagac

SEQ ID NO: 829137 - DNA, 120 bp, Artificial Sequence
  ENSG00000233420_27 (sequence is synthesized)
tcatagaggtaccaccttggttgtcttggataagatgtggaagaattctctggattaccagcagagagtattgctttcttttcttactttctcccaaacaaatggagtctctctctgtgc

SEQ ID NO: 829138 - DNA, 120 bp, Artificial Sequence
  ENSG00000233420_28 (sequence is synthesized)
tgagctgccggagctgtgggaggggtgacacaagcacacctgtggccaccaccactgggagtgtgctggatcagatctgaagccaacacaggactgggtcttatccaaggcctgcggtaa

SEQ ID NO: 829139 - DNA, 120 bp, Artificial Sequence
  ENSG00000233420_29 (sequence is synthesized)
ctgggtcatatctgaagctagcacacatctaagtctcatccaaggcccacacctggtaagaaaaatccacatcgtgacacggaagagatggaggaagaagagaaaacaaaagaaaatgta

SEQ ID NO: 829140 - DNA, 120 bp, Artificial Sequence
  ENSG00000233420_30 (sequence is synthesized)
ttaataagataatgttgtaaatgctgttgcaactgcaagctgcattacgtggcctcatattttcttccactgacaaaaaagtatgtataacatactatgaatctggaaatatatggaaat

SEQ ID NO: 829141 - DNA, 120 bp, Artificial Sequence
  ENSG00000233420_31 (sequence is synthesized)
atcaacttggttgcaggctgaagtccatgccctttgccattcacatcctcttccatggaatgaggactcatcagataaaatattgttttaaataaatggaccttgtgaaattgcacatga

SEQ ID NO: 829142 - DNA, 120 bp, Artificial Sequence
  ENSG00000248939_0 (sequence is synthesized)
gtaattaatgcctgaatgttcagcaagtgagtcgtgtcaataaatggcatctcagacatgcaggtaaatcgaagaagaatgcttaggcttctatatggaagtgctgcaatcttcagttat

SEQ ID NO: 829143 - DNA, 76 bp, Artificial Sequence
  ENSG00000248939_1 (sequence is synthesized)
gcttaggcttctatatggaagtgctgcaatcttcagttattttgcactgccccttctgccatgattgtaagtttcc

SEQ ID NO: 829144 - DNA, 120 bp, Artificial Sequence
  ENSG00000248939_2 (sequence is synthesized)
tggtggtgtggaataaggaacattggagagaaaaatcaccagcagaaggagggagcaaagaaatgttcccagaactgactgtttcttatttataccagtatcatcctggggtagctggca

SEQ ID NO: 829145 - DNA, 120 bp, Artificial Sequence
  ENSG00000248939_3 (sequence is synthesized)
aaggagacttgctcaccagaagcatctcaggaaactgccctgtagcttgagctctggtgcctgcctacaatggtgcttagcacagagccacactcacgcatttctggaaggaatgcaagg

SEQ ID NO: 829146 - DNA, 120 bp, Artificial Sequence
  ENSG00000248939_4 (sequence is synthesized)
cacgctgtggtaagcaggatgacacagccacagtccactctgctaaagggatgccgggtccttgaagaagaaattctgcattgcattggaaggcttctgggaagacctatggtttaactt

SEQ ID NO: 829147 - DNA, 120 bp, Artificial Sequence
  ENSG00000248932_0 (sequence is synthesized)
ctggccctggaggggggaaacggcgagggagaaggcgaaacgagtctccagtgtgttcttggggcctggtgcgaggcccagagaattctctgcaggcctttgcccgggcactgattaagg

SEQ ID NO: 829148 - DNA, 120 bp, Artificial Sequence
  ENSG00000248932_1 (sequence is synthesized)
ctgcgaagagacgcaccgggctgcgggcttagtagcttcaggcttctgaagtcagagggagggctgagagcttacacttctggagctccccgggagacggcaactacccaaccgtgtggc

SEQ ID NO: 829149 - DNA, 120 bp, Artificial Sequence
  ENSG00000248932_2 (sequence is synthesized)
ccgtgtggcacccagaaatactctccacaccatgctgcactgctgcggatgagggaaggatggtgtcggggcttcaagactgtttttcctacctcttcagtgcctctttcagtgatatga

SEQ ID NO: 829150 - DNA, 120 bp, Artificial Sequence
  ENSG00000248932_3 (sequence is synthesized)
cctatttctctccataagtataaaagaccataaaagaccatctagggacttcagaacccaaataatgacacaatggttctgaagcaacactgtaactgctgaatgcttctggctgcttct

SEQ ID NO: 829151 - DNA, 120 bp, Artificial Sequence
  ENSG00000248932_4 (sequence is synthesized)
ttccacagtaaaagatgaaaagaaatatcttttattgagatagactgaggtccaggaaaaacaagtgcaacttcatggtccttttcttcatattctggaatacaagaaaacgtgtaaatg

SEQ ID NO: 829152 - DNA, 120 bp, Artificial Sequence
  ENSG00000248932_5 (sequence is synthesized)
gtggccttccagaccgctggtagtggacttgaggctgtcgggaaggaggggtgtggcctagaccactaagggccgtgacgtggtgccgctgagcttggaccccgaccagaagatagagat

SEQ ID NO: 829153 - DNA, 120 bp, Artificial Sequence
  ENSG00000248932_6 (sequence is synthesized)
atctagggacttcagaacccaaataatgacacaatgttaatttgcaggttctccctctgcctgccaccccacccagcaaggaggagaggaagtgttgagaagggaagagatgagtcctgg

SEQ ID NO: 829154 - DNA, 120 bp, Artificial Sequence
  ENSG00000248932_7 (sequence is synthesized)
ccctgtcacttcttaggggtgtgcttttgaacaacctgctcaccatgtatgaacttcactcttcttgtttataaaatgaggacaatgacacctgcaagactgtgaggtttaaaaacaaaa

SEQ ID NO: 829155 - DNA, 120 bp, Artificial Sequence
  ENSG00000248932_8 (sequence is synthesized)
ctgtgttgagaggtaacttgcctcttttacttaccaatgatttcctcaatgcctggtgactggggctggttcatactagacgatcaataaatgctccttgaatgaataggtggatgaaag

SEQ ID NO: 829156 - DNA, 120 bp, Artificial Sequence
  ENSG00000248932_9 (sequence is synthesized)
aaatgtctggcatctatcacaggtgctggcactgataagtgcttgataaataggctggctgactgtgagtgatgctgacgggcaaaggacagagacaccaggaaggagaacaggacacga

SEQ ID NO: 829157 - DNA, 120 bp, Artificial Sequence
  ENSG00000248932_10 (sequence is synthesized)
aagataactgtctcagcccttggggagtttctgacccaggaggatgggaacatcaattatcaatagttacagatcattaaataattgcaagtgtgaggcgcactataaagaggaggctca

SEQ ID NO: 829158 - DNA, 120 bp, Artificial Sequence
  ENSG00000248932_11 (sequence is synthesized)
gagtccccgcatgctcacactcacacctggccacagacaggtgacacccctggcttgcccaggccagcgggtctgcaatgaggccaaggacctgggctcttgagaagttttaagtttgaa

SEQ ID NO: 829159 - DNA, 120 bp, Artificial Sequence
  ENSG00000248932_12 (sequence is synthesized)
aacattgctttttaagcttaaaacaatgaaccttaataaaagtaaacacttccattgagctttgaaacacttaataggagttaaaagtaattaggctaataaaatagtcttttgttccaa

SEQ ID NO: 829160 - DNA, 120 bp, Artificial Sequence
  ENSG00000248932_13 (sequence is synthesized)
ttcaggtgctaagagttttgcatgtatagcagtacttttaccatctgtttcatttggatgtttaatgatgtcaatcttcaatggaagtttcacaagtggaatctgttcaataggtacatt

SEQ ID NO: 829161 - DNA, 120 bp, Artificial Sequence
  ENSG00000248932_14 (sequence is synthesized)
ttcaactggaatgtaacatgtagagcagtagaacattctggaaccaccacatttgagacattttgatctcccactttgctgagctttttgaagaacttcttgagatgctaaacataagtt

SEQ ID NO: 829162 - DNA, 120 bp, Artificial Sequence
  ENSG00000248932_15 (sequence is synthesized)
ttgaaggggatcttctgaagctatggaagtagtttgtgactgttttgtttccacaaagtttgaattattttcttcacttcatttgagaaatataggtggattgagagacattcttcattc

SEQ ID NO: 829163 - DNA, 120 bp, Artificial Sequence
  ENSG00000248932_16 (sequence is synthesized)
aaacaaaagtttaacagctatttctaaaacacatatcatctgaagctatggaagtagtttgtgactgttttgtttccacaaagtttgaattattttcttcacttcatttgagaaatatag

SEQ ID NO: 829164 - DNA, 120 bp, Artificial Sequence
  ENSG00000248932_17 (sequence is synthesized)
gtggattgagagacattcttcattcaaacaaaagtttaacagctatttctaaaacacatatcatatgtgcactgcgagtcctcgaacagctccacgcgtctccagctctgcccaagcccg

SEQ ID NO: 829165 - DNA, 120 bp, Artificial Sequence
  ENSG00000248932_18 (sequence is synthesized)
agccacgcgacgggctgtgatcgcgcacggaccagacgagagctcttcaactgtgtgatccaaatgaatttgagaacacctatttactgctccgccctgtgtcctgctggccagaagtgc

SEQ ID NO: 829166 - DNA, 120 bp, Artificial Sequence
  ENSG00000248932_19 (sequence is synthesized)
ccatcaatttcaaaggcctctgtgtgactggattgaggaagccaagagcagggagaagaatagatccaggtcttcccattactccaaaatggagcctagccctctggcagcacagtcggc

SEQ ID NO: 829167 - DNA, 120 bp, Artificial Sequence
  ENSG00000248932_20 (sequence is synthesized)
cagctgggaccacggtggccattactggaagtgtgatcatctgccctctctcctcagtgcccttggaatatgtgctcttctgtctggcttcaatttctcttacttctttgtgtgtgaaga

SEQ ID NO: 829168 - DNA, 120 bp, Artificial Sequence
  ENSG00000248932_21 (sequence is synthesized)
gtcttcctttcaatcagcaaactcttcctgcacactataaagcccactttggtcttcagaatctttcagtgcctgagcttgtcagtatgaggtttctctttctttatttccaaatgtcct

SEQ ID NO: 829169 - DNA, 120 bp, Artificial Sequence
  ENSG00000248932_22 (sequence is synthesized)
gctttctttgtgtgcaacttcttaagaatttggcaaagtaaacaacaaagcagcaatatttcatagggtttaaacttccctttggtcctggatagaaaggattttttttttttttttgag

SEQ ID NO: 829170 - DNA, 60 bp, Artificial Sequence
  ENSG00000248932_23 (sequence is synthesized)
ggctattttttttgtatttctcaggagagacagcatttcaccatgttggtcaggctggtc

SEQ ID NO: 829171 - DNA, 120 bp, Artificial Sequence
  ENSG00000248932_24 (sequence is synthesized)
ccaaagtgctgggattataggcctgccacctggatctattcttctccctgctcctggctttttcaatccagtcacaaagaggcctttgaaattgatgcctgccaccacacctggcagaaa

SEQ ID NO: 829172 - DNA, 120 bp, Artificial Sequence
  ENSG00000248932_25 (sequence is synthesized)
ggatgtttttgtttcttctttttcctgttcctttctctgcaatcatctctctgagtctcagacatgtggcactggttggctggcagcaccttctgtgtgtctgagcccttacatagcttc

SEQ ID NO: 829173 - DNA, 120 bp, Artificial Sequence
  ENSG00000248932_26 (sequence is synthesized)
cagaggaaggggtgctccgttggggtcctgcctgcttttggagcattagaatctccttttttgcaagcctctgtctcccatcatttaacacccagctgtgtctctctgcccactgaccag

SEQ ID NO: 829174 - DNA, 120 bp, Artificial Sequence
  ENSG00000248932_27 (sequence is synthesized)
aatcttttcgcagtaggtgggttttaaaaagcactcaccagaactcccaaatgctagggtctcatggcccctcaaaaactcattaccttctctttgggatcctcagacctggcaggaacc

SEQ ID NO: 829175 - DNA, 120 bp, Artificial Sequence
  ENSG00000248932_28 (sequence is synthesized)
tcacataggaagaaaggcagccagggagcaggcagtgaggacaggttgtaatcaggcagttctggctgggcataaagtctgctcctgctgaaggcaagctgctcaacactgcactggaca

SEQ ID NO: 829176 - DNA, 120 bp, Artificial Sequence
  ENSG00000248932_29 (sequence is synthesized)
tcctccatgtgtggaatctaggcaaagcagctctgtcctctattaacaaataactgagcctgggcaatctgttacttcaactgtcctttcaagccaggctttgcagtaacaggaatttga

SEQ ID NO: 829177 - DNA, 120 bp, Artificial Sequence
  ENSG00000248932_30 (sequence is synthesized)
ggtccagcatgcagagacagacctaagtgtgagcctctgctacttatgagctgtgtgacctggggcaaattacttaacctctctataccctattcccttcacttgtgcaataagaataaa

SEQ ID NO: 829178 - DNA, 120 bp, Artificial Sequence
  ENSG00000248932_31 (sequence is synthesized)
taataccacacacttcggaggcatggcgtaagactcaaatgactaatatagggatagttcaggggcagatacacggttggaaagcacactagaaatatcagtagaatctgaattttcccc

SEQ ID NO: 829179 - DNA, 120 bp, Artificial Sequence
  ENSG00000248932_32 (sequence is synthesized)
tacctgcctccttgttttcactacaaataacatttcctttcctgcttttaagtcaagaggggaacacactgattctttagcagacagtttagcacacacttcaagccagagagtgtacca

SEQ ID NO: 829180 - DNA, 120 bp, Artificial Sequence
  ENSG00000248932_33 (sequence is synthesized)
gcaatgtggattcagaaataaatatgatgggagccctgctctcacaggatggggttgggggtgggggataaagtcccaagggagttggacagtctccagatgggtagtcactgctgggca

SEQ ID NO: 829181 - DNA, 120 bp, Artificial Sequence
  ENSG00000248932_34 (sequence is synthesized)
gaaacacatgagggaagtgtcaggagcccgaaagaagctctgaacaggttggaacacgttttctggaggatgggacattgaaactgaatcacctacaatgttgaaggcagatggtaacct

SEQ ID NO: 829182 - DNA, 120 bp, Artificial Sequence
  ENSG00000248932_35 (sequence is synthesized)
aagaaaggtaaagccttgttaatcaaatcaattcttttcactttaactgtattggaaagatactttaaaaaatcttcataacaactgaagctcgatgatgccttgattctgcattaacat

SEQ ID NO: 829183 - DNA, 120 bp, Artificial Sequence
  ENSG00000248932_36 (sequence is synthesized)
ccttgcccatttcttgatacattttcaatttaccttcatggtaatttacactcaaggaagctgtccaagatatgcgggggattcaataaaataggtcatggagttaaatgctgtggtgaa

SEQ ID NO: 829184 - DNA, 120 bp, Artificial Sequence
  ENSG00000248932_37 (sequence is synthesized)
acacagggcttaattttatggataaaatttaaactgcttagctgccttttttgcattattcatgttaagactaatgattactcactaaatgggaaggaatcactgtagaaatcaggaagc

SEQ ID NO: 829185 - DNA, 120 bp, Artificial Sequence
  ENSG00000248932_38 (sequence is synthesized)
cattttcttaattctttaagcacatctgatggagctgtggactctgcccttgaggttaacagcattgtattagggaagagacctgcttggcccaccagtcaacctcccttgcctgggctg

SEQ ID NO: 829186 - DNA, 120 bp, Artificial Sequence
  ENSG00000248932_39 (sequence is synthesized)
ctcctgaaactgctacaggaacaggaaacttgaaacaagattttttcctaaaattgacattgggtagaatgaacaggatagaagacaatatattaatgtcagttccttctggtatttttc

SEQ ID NO: 829187 - DNA, 120 bp, Artificial Sequence
  ENSG00000248932_40 (sequence is synthesized)
gtttaggcactttaattattcacaagcatcccaggcaattcttatgtgctagtggagaaccacagattggcattggctatagagagaccacttcctttcagtcatccaaggttattttat

SEQ ID NO: 829188 - DNA, 120 bp, Artificial Sequence
  ENSG00000248932_41 (sequence is synthesized)
taacttagcactgggctccaacgtaaacaagggctacttttctataatgatcaaattactaattttataagtatagaataaaaggatatgggtttcttagattgtaaatgtttgatgtag

SEQ ID NO: 829189 - DNA, 120 bp, Artificial Sequence
  ENSG00000248932_42 (sequence is synthesized)
ttaatgcaatttcatttttgaggtttgtttctaataatactcttaatttacatgtctaatggattccttgtacacaattctgatcatgtaaatttaagatgatcttttccactttgcaat

SEQ ID NO: 829190 - DNA, 120 bp, Artificial Sequence
  ENSG00000248932_43 (sequence is synthesized)
acaagacatttaaaataacctaaagttgcccattctcactaagcacctgaaaattagtccctgtggggaaacttttttcaagttttatttttctttttatttcaagtgttgtttatattg

SEQ ID NO: 829191 - DNA, 120 bp, Artificial Sequence
  ENSG00000248932_44 (sequence is synthesized)
tttctctaactgttctacctaatgattgataggcacctaccttccccaaagaaaaagggttaagtgatcaaatatgtttgggaaacacgagggcaaacaaagtgaaacagacttttactg

SEQ ID NO: 829192 - DNA, 120 bp, Artificial Sequence
  ENSG00000248932_45 (sequence is synthesized)
cagattgcggatcctttgagagcccttaatgtgcacagtaattctccaagaaggggacagaagtccctgggcttcccatgcttgtttagtttttatggatccctctgctggatgagtgtt

SEQ ID NO: 829193 - DNA, 120 bp, Artificial Sequence
  ENSG00000248932_46 (sequence is synthesized)
cacaggaccacactttgtgaaatactcagtcagctctatcagcaaattatatcacgggaattggttactttcatttggatgctttgcccatgttacccagacttaggaaaatattttaca

SEQ ID NO: 829194 - DNA, 120 bp, Artificial Sequence
  ENSG00000248932_47 (sequence is synthesized)
atttggggtgtatatgagatatttgggggcattttctccaatatcaacttcctgcttctgaaattcaggttaaaacactgacctaaattacggaaatcacaatctccttcaccatcacca

SEQ ID NO: 829195 - DNA, 120 bp, Artificial Sequence
  ENSG00000248932_48 (sequence is synthesized)
acagtgccaccatcatcaaatcatgatcagcatcgaccaacacgatgattcccactaccactatcacattaatagcaccactaccatcctaccgtgcccagcgagacaactgccatcacg

SEQ ID NO: 829196 - DNA, 120 bp, Artificial Sequence
  ENSG00000248932_49 (sequence is synthesized)
gtcactatgaccaacaccatattaccaccgctgccactaatatgcctcattgctatgccaataatcactaacagcattaccaccacactccaactaaccaatgctgctgccatcattact

SEQ ID NO: 829197 - DNA, 120 bp, Artificial Sequence
  ENSG00000248932_50 (sequence is synthesized)
gccatgatctgtactaccaccactgccactagtgcaaacatcaccactactgctgttaaagcagccaccaccactgcacccactgtcgccactgtcctttccacatccagatgaagaaag

SEQ ID NO: 829198 - DNA, 120 bp, Artificial Sequence
  ENSG00000248932_51 (sequence is synthesized)
aagaagagatagaaagcatagtttcattattctaggtcatattcaaaggttggtcactagatataattgcacatatgttcccctagttactatggcatcccaatagccatcaagtggaac

SEQ ID NO: 829199 - DNA, 120 bp, Artificial Sequence
  ENSG00000248932_52 (sequence is synthesized)
cagacatggtatcatagcagaatcctgaggtctaaggtctagtttaaataagacttctgatccaaggtaggggtccctcaattacctctatgacaggaggcaaagatgtcacacacgact

SEQ ID NO: 829200 - DNA, 120 bp, Artificial Sequence
  ENSG00000248932_53 (sequence is synthesized)
gcatgtcagctaaactcattggaagattcatttctgccttcataaatgtagacactgggcttcagctagttgtaagggagcagcccctggtgcaagccacgtagcaactagaggggcttt

SEQ ID NO: 829201 - DNA, 120 bp, Artificial Sequence
  ENSG00000248932_54 (sequence is synthesized)
aaaatcagcacaaaattaagttttattgctgctttgaggaatgttcaggttggtgggaggggattacagcagacaagtgtttaatttactcaactatatgctcaagtttatgtaactgag

SEQ ID NO: 829202 - DNA, 120 bp, Artificial Sequence
  ENSG00000248932_55 (sequence is synthesized)
ctattttaaaattacattttatgtatgcattgctgtatatattgcacatatataaatgtacaataataataaagagtggcatatatgagtctcaggaattgtgccaaaggctttacatat

SEQ ID NO: 829203 - DNA, 120 bp, Artificial Sequence
  ENSG00000248932_56 (sequence is synthesized)
actctctttaatccttttaactcctgtatgaaaggagtgtgactgtcattctcattttcctaatgaacaaactgtggcatgaagaggttaaataattagcctaagcttacaaagctaatt

SEQ ID NO: 829204 - DNA, 120 bp, Artificial Sequence
  ENSG00000248932_57 (sequence is synthesized)
aattgtaagactaagatctaaacccaggtagtctggttccagggcccatgatcttaaccaacactctacattttaacacactgtctgcacattgtctacacacagatgcagtgtgtgtac

SEQ ID NO: 829205 - DNA, 120 bp, Artificial Sequence
  ENSG00000248932_58 (sequence is synthesized)
atcagttgtataaatatatcatcttgcatgaagtaatttaagggatgttcaaggatattgttgattatatgcaatttatctcatgtgctgatttttaagcctagtcccagaggaaatgca

SEQ ID NO: 829206 - DNA, 120 bp, Artificial Sequence
  ENSG00000248932_59 (sequence is synthesized)
agttcactgaaatctaaggggggaaaaaagacacgaaaaaccaacaagtgcaaagcagtgtggtgcagaatgtggtggcagagcaacaaccactctcagcaaaatcctcattaattcatg

SEQ ID NO: 829207 - DNA, 120 bp, Artificial Sequence
  ENSG00000248932_60 (sequence is synthesized)
ccagtaagtatgcaatgaggaactgcagtatgcagggcactgggtggggcgatgccagccctcctgatccttatcccataacttatcaggtgtgttcaagttcttagtgcgtctcaagaa

SEQ ID NO: 829208 - DNA, 120 bp, Artificial Sequence
  ENSG00000248932_61 (sequence is synthesized)
aaaatatctcaggttcgaattgctgcaaagtttttcaagcacatccaccgatagcaagacccactggaggcagatcagcgatgagtctgagggcggcacaaagggtgctaccaggtgatc

SEQ ID NO: 829209 - DNA, 120 bp, Artificial Sequence
  ENSG00000248932_62 (sequence is synthesized)
accagtccttcctcctcatccttattcattccttagacatcttgatattagaaattattggtttgtgaatgcacctattgttaactctttcaatatacaaatacatgcaaacatatgtat

SEQ ID NO: 829210 - DNA, 120 bp, Artificial Sequence
  ENSG00000248932_63 (sequence is synthesized)
attctacatatatggacaggcacagatttttttttatgttgggctccctcaaacagaattaatctgtgagggtataaacccacttcacaatgtccacagtggggccaaaaccgcttttga

SEQ ID NO: 829211 - DNA, 120 bp, Artificial Sequence
  ENSG00000248932_64 (sequence is synthesized)
ggtgatcaactctatgctgggagcaggggagttctgggctgaactcaaagatgcttttcagctctaaagtaccatcatcatcttcatcctcatcttccttttctcttaagtgcccagaat

SEQ ID NO: 829212 - DNA, 120 bp, Artificial Sequence
  ENSG00000248932_65 (sequence is synthesized)
gtgccaggctctgtgctgtttacagggtttatattctcacaaaaatctcaaaagccaattgccagaatttctctaaagtttcttaattggtttggcacaagctggaaatggtagtgcttg

SEQ ID NO: 829213 - DNA, 120 bp, Artificial Sequence
  ENSG00000248932_66 (sequence is synthesized)
gatttgaaagcaggcccatttgcctggctttgaagttttttttttatgtttttggtgcttgtttttaccatactacgcatctcttaaattctttgtccctaaaatgggggagggggcaat

SEQ ID NO: 829214 - DNA, 120 bp, Artificial Sequence
  ENSG00000248932_67 (sequence is synthesized)
aatgccaacctcatgggattgttttggcaattaaataacaatgtaaaattctttttgtaaaatttaaagagccatgcacatataacattactattattttggcttcatgtgatttttttt

SEQ ID NO: 829215 - DNA, 120 bp, Artificial Sequence
  ENSG00000248932_68 (sequence is synthesized)
ttacttaaatatctagataatgacttcaagaaaattgtcttcctttgtaattctacatattttatttttaaataattttagacttatgagtgttttaaagatagtacaaagagttcccat

SEQ ID NO: 829216 - DNA, 120 bp, Artificial Sequence
  ENSG00000248932_69 (sequence is synthesized)
tacaaagagttcccatatatcctttattcagcttctactaatgttaataacttaaataaccatggtacagtgatctgaaccaggaaactaacattaattcaacactgatctagagacatc

SEQ ID NO: 829217 - DNA, 120 bp, Artificial Sequence
  ENSG00000248932_70 (sequence is synthesized)
atttctatttccctattgttccacagttcaatcgaggatctcacattgcacatagttgtcctgtatctacagtctctgctaatcaaggacagctcctcagtcttcagcacctgggctttt

SEQ ID NO: 829218 - DNA, 120 bp, Artificial Sequence
  ENSG00000248932_71 (sequence is synthesized)
acaaagagcactggtcagttattttgtagaacatccctcagtttggttggtgttttctcatgattagattaagcttattcaccttaggcaagaatacctcagaactgatgctgtgctctt

SEQ ID NO: 829219 - DNA, 120 bp, Artificial Sequence
  ENSG00000248932_72 (sequence is synthesized)
ctcaatacatcctacatcagagggtacatgatgttgatttgtcttcattttggtcatattaactttgatacttggttgagtggtatattctagatttctccacataagttagtatttccc

SEQ ID NO: 829220 - DNA, 120 bp, Artificial Sequence
  ENSG00000248932_73 (sequence is synthesized)
cctgcgtatctgtaaataatatgtgtcctgtaagaaaacactttgagattatgtaaatatcctgattcccatcatatttcacctactaattttagcatcattgatgattctgctctgtaa

SEQ ID NO: 829221 - DNA, 120 bp, Artificial Sequence
  ENSG00000248932_74 (sequence is synthesized)
acgtggtgccgctgagcttggaccccgaccagaagatagagattgaaacgatgaggaaaacgaagtgcctaatccccgctggacgctaactgcagggaacatggaggagacatatttcca

SEQ ID NO: 829222 - DNA, 120 bp, Artificial Sequence
  ENSG00000248932_75 (sequence is synthesized)
cctatttctctccataagtataaaagaccataaaagaccatctagggacttcagaacccaaataatgacacaatgatgagaaaggggaggctcagagaggggaagtaactgctgcatagt

SEQ ID NO: 829223 - DNA, 120 bp, Artificial Sequence
  ENSG00000248932_76 (sequence is synthesized)
gtgcactattccatctgcgtatccagcagcaaaatacaattctgctcagaataatgaacctaatgttctgaaggcaccagaaggttgtggaagtattgacctatctctagttagcatctg

SEQ ID NO: 829224 - DNA, 120 bp, Artificial Sequence
  ENSG00000248932_77 (sequence is synthesized)
ctcaccaggacccctgagactgtggagggggtaactcagcagaaggaccagggctaacagggactgaatccttaccacataccagggcccgttccaaacactttgcatgttttaaattgc

SEQ ID NO: 829225 - DNA, 120 bp, Artificial Sequence
  ENSG00000248932_78 (sequence is synthesized)
agacttggagctgaagaagtcagcaacatagaaacaccaatggacacaaacaaacgtagcccaaataaaagcctgttctcattaaccagtggaccaggaaaaggcagcctagcaaggcag

SEQ ID NO: 829226 - DNA, 120 bp, Artificial Sequence
  ENSG00000248932_79 (sequence is synthesized)
aaaacttttagacgataactgtaataatttctgtactccagccaagcaccaaaggaaaaaaatgctgctccaccccacttatgccaacaaagaccaagttatgagcttaaatgtccaccc

SEQ ID NO: 829227 - DNA, 120 bp, Artificial Sequence
  ENSG00000248932_80 (sequence is synthesized)
attaacttctcacactcagcagccactcgggagttgggaaacaatctcctggggtttgtgctggcgtgattaaggaaagaggccacttacaggcctttgtctaaagcctcgcgccggtgg

SEQ ID NO: 829228 - DNA, 120 bp, Artificial Sequence
  ENSG00000248932_81 (sequence is synthesized)
gtggtggctggggtcaggaaagctgggaggttcaactacgggcgagaaaattggggcactttccacgtctctcccgaaaataaaagaaaggatgccgggcacggcggctcacgcctgtaa

SEQ ID NO: 829229 - DNA, 120 bp, Artificial Sequence
  ENSG00000248932_82 (sequence is synthesized)
taaccctggagctgcctcctcaggaagtgaagagttgggcttggctggctggtatagcagcagcgacagcagcagagacagcatggcctgctcagaaggggcgccctagttgccaaggat

SEQ ID NO: 829230 - DNA, 120 bp, Artificial Sequence
  ENSG00000248932_83 (sequence is synthesized)
gagggcactggctttgcactctttgagactggggctttacctaacaaacacttgcaaaacttattacccctccagtcctcaagtttccttgtacctatagaataggaatgttaaaactta

SEQ ID NO: 829231 - DNA, 120 bp, Artificial Sequence
  ENSG00000248932_84 (sequence is synthesized)
cttcacacaactgttttgaggatgaattggctatttgaaaacttgggcactggaagaagtccagtgaaggacagtgtcacttccgctgttcaccctttcatgcttaattaacatttaatt

SEQ ID NO: 829232 - DNA, 120 bp, Artificial Sequence
  ENSG00000248932_85 (sequence is synthesized)
aatcaaatatgttgtttctttttgtatttttttaactgagataaatgtagatttacatatagttgtagaaataatacagaattatcccgtgtaccccttacctagttacccccaatggta

SEQ ID NO: 829233 - DNA, 120 bp, Artificial Sequence
  ENSG00000248932_86 (sequence is synthesized)
acatcttgcaatattataccacaatgtcacaaccaggatattcagatagatgtcatccactgatcttactcaaaattcactcattttccatacagtcctttgattgtgtggtagttctgt

SEQ ID NO: 829234 - DNA, 120 bp, Artificial Sequence
  ENSG00000248932_87 (sequence is synthesized)
gaaatttcatcccatctgtagttttcatgtaatcatcgccacagtcaaggcacagaatgcttcacttccatcactataaggaacccttgtgttgcccttttataaccacacccacttctc

SEQ ID NO: 829235 - DNA, 120 bp, Artificial Sequence
  ENSG00000248932_88 (sequence is synthesized)
tcctgtctcccaaactccatctctaatccctgttaaccactgatatgttccttacttacacaattttatcatttcaagaaagttacagatattgaatcacatagtatgtaaccttttagg

SEQ ID NO: 829236 - DNA, 120 bp, Artificial Sequence
  ENSG00000248932_89 (sequence is synthesized)
attggtgtttttcactcagcattattccctggagatcatccaagttgttgcacgaatgatttgtttcttttattgctggggagtagtctatggtatggatgtatcacagtttaattattc

SEQ ID NO: 829237 - DNA, 120 bp, Artificial Sequence
  ENSG00000248932_90 (sequence is synthesized)
gccccttgaaggacatttgggtggtttctagtttctggctattgtaaatgaaactgtgatgaacgtttgtgtacaggtttctgtgtgaacacaagttttcatttctctgggataaatgcc

SEQ ID NO: 829238 - DNA, 120 bp, Artificial Sequence
  ENSG00000248932_91 (sequence is synthesized)
tgtgagtgcaactgctgggtcatatggcaattgcatgtttagttttacaagaaactgccaaactgctttccagagtggctgtgccattttaaattccctccagcaattataagaggtgca

SEQ ID NO: 829239 - DNA, 120 bp, Artificial Sequence
  ENSG00000248932_92 (sequence is synthesized)
gtttctcggcattccttccaaaatttgatggtgttgccattttttatcttagccattttggcaggtgtgtagtaatatcttattgtgggttttacgttgcatttccctaattgttaatgt

SEQ ID NO: 829240 - DNA, 120 bp, Artificial Sequence
  ENSG00000248932_93 (sequence is synthesized)
tgttaaatattttctcatgtgcttatccgctatctgtgtatcctcttcgtgaaatggttcttcatgtattttgttcatttcctgattgtgttttgttaaatttttaaagttctttagata

SEQ ID NO: 829241 - DNA, 120 bp, Artificial Sequence
  ENSG00000248932_94 (sequence is synthesized)
tcttcacatcaaacctgaattatctccatttaatgatgaggaaactcgggctcaaagaagttaagtgttctagccaagactgcatagaacatggaggagacatatttccacctatttctc

SEQ ID NO: 829242 - DNA, 120 bp, Artificial Sequence
  ENSG00000248932_95 (sequence is synthesized)
acacggagagacagaagaaagtgttctaacagaagtctgtctgtggttgctttggaccaaggcagagtgctctaaaggtggctgtgctgtacccagtactgtgtcttctgatagaaggtt

SEQ ID NO: 829243 - DNA, 120 bp, Artificial Sequence
  ENSG00000248932_96 (sequence is synthesized)
gagtgactaccattacctcagcaccttcactgtctccatccactgtgcctgctcactctcccaagggtccacccggatccagtcggatgtctgcagggccagccgggccatggccactcg

SEQ ID NO: 829244 - DNA, 120 bp, Artificial Sequence
  ENSG00000248932_97 (sequence is synthesized)
gtgatgagaagctgcgaggtctttcttcccataggtgtcgttgacaggagagatgataccctggatgacctggtacattcctaggtaagagagagcagtggtgttgcacatacagacaga

SEQ ID NO: 829245 - DNA, 120 bp, Artificial Sequence
  ENSG00000248932_98 (sequence is synthesized)
agggagaacagggaatatgaaggcagagtttggggtgatacagcagaagccaaggaatgacaaatcctggaaagcagcatggaacaggttttccctcacagcgcttagaaggaaccaatc

SEQ ID NO: 829246 - DNA, 120 bp, Artificial Sequence
  ENSG00000248932_99 (sequence is synthesized)
acgggctgtgatcgcgcacggaccagacggttttgagacgaaacatggcacgagtctctcagaaccctgcttgagcagagcagttacattatattccacaagtcataaatatttggggag

SEQ ID NO: 829247 - DNA, 120 bp, Artificial Sequence
  ENSG00000248932_100 (sequence is synthesized)
caaaatcgattcctgcagcagtggtggagggatgcagagtgattgctgtactttgatacaagtcatctacctcgtggccagctgaggtggattaaagtcttcccaggaggtagggcttaa

SEQ ID NO: 829248 - DNA, 120 bp, Artificial Sequence
  ENSG00000248932_101 (sequence is synthesized)
tctctggccatagggctcctggaatggccatagagggtagtcagtgtgggctactgtccttctggtccctgccagaggtcaaggctgacaggcacaggaacaattccttcaaggcctgat

SEQ ID NO: 829249 - DNA, 120 bp, Artificial Sequence
  ENSG00000248932_102 (sequence is synthesized)
ggcccagaaaataaagtttgactccttcatttggccgcgggagtgtcttcgctgcacacagcagctgagctcagtcgggaatgctcattcaggctccctgcctgtgggtaacctggactc

SEQ ID NO: 829250 - DNA, 120 bp, Artificial Sequence
  ENSG00000248932_103 (sequence is synthesized)
tatcctggtctctccatgtttgctgtgtgagctgtgagccctgaataggatgcagagcagaagccccctgcctttagtttcctcttagcctatctacaattcttccctgcctggaaaggg

SEQ ID NO: 829251 - DNA, 120 bp, Artificial Sequence
  ENSG00000248932_104 (sequence is synthesized)
tgttcggaacaggcctctcaccatctgcttcttttacctgttttactctccctttctcctactcatggagggtggaatttctacttccagtttctatttaaaagggattttcccatatgc

SEQ ID NO: 829252 - DNA, 120 bp, Artificial Sequence
  ENSG00000248932_105 (sequence is synthesized)
catttctactccatcctttcctcccaccatgatgactggctggctgctgagaaacatgatttatgcaggagagggtgataaacacatagtttaatgttttctaaatatgaaccttgtttt

SEQ ID NO: 829253 - DNA, 120 bp, Artificial Sequence
  ENSG00000248932_106 (sequence is synthesized)
tctcattttatctacaagcatgtgtgactgtggtgtgcataaaactgtgtcaacaatggtttctttccttgaggagctcacatttacaaagaaaggaagaaatttcaaccaaaaaataaa

SEQ ID NO: 829254 - DNA, 120 bp, Artificial Sequence
  ENSG00000248932_107 (sequence is synthesized)
aaacaccaaacctgaaaggaaaatcaacagcaagagcctggactttctaaactaggaggaaggcagagctccaggagactcttctcatttctctgagggcatggaaactccaatgtggaa

SEQ ID NO: 829255 - DNA, 120 bp, Artificial Sequence
  ENSG00000248932_108 (sequence is synthesized)
tagagcttggagtttaaaaagatagtctcttctgtgtcctggatagagaccacaccaaaggtttgcaatatagaggcacaacaatcaaaatcatgaattgagatgtccttgacattccat

SEQ ID NO: 829256 - DNA, 120 bp, Artificial Sequence
  ENSG00000248932_109 (sequence is synthesized)
tctctgctaatcaaggacagctcctcagtcttcagcacctgggcttttacaaagagcactgcaaagaagccaactgctggttctccactctgaatgatcatcgcttcccatttggaagac

SEQ ID NO: 829257 - DNA, 120 bp, Artificial Sequence
  ENSG00000248935_0 (sequence is synthesized)
agtcagtattttgacttaaattatatcaaatctacagatcagttgatggaccactgcaatttttatgatttggagacttctgatccagggacatgttcttttagggaaggatgtagagca

SEQ ID NO: 829258 - DNA, 120 bp, Artificial Sequence
  ENSG00000248935_1 (sequence is synthesized)
actgcagttcttcttgcaaactctttatttctttgaagttaggtcaggagaataatacggcatcattctgtggacaagccatggttattgccaccaaataaaatgtctctgtatcaagaa

SEQ ID NO: 829259 - DNA, 120 bp, Artificial Sequence
  ENSG00000248935_2 (sequence is synthesized)
gctgcaagtggcaccaagtcactcaatgacatgcaacaagaacaactggacacagctttatacctcctgagagcagtgttaggagaaagcaggagcagaccctgtctttaatgtcctggt

SEQ ID NO: 829260 - DNA, 120 bp, Artificial Sequence
  ENSG00000248935_3 (sequence is synthesized)
ccctcattacatctcaatgtccctctcagcctgcgctcccaggctccagatacagctgcgaagcctctattacaaacatattcctttgccgatgctgacccctcattgttatttgtttta

SEQ ID NO: 829261 - DNA, 120 bp, Artificial Sequence
  ENSG00000248935_4 (sequence is synthesized)
gacccagattggcaagttcccccaaaataaacaagtcagtattttgacttaaattatatcaaatctacagatcagttgatggaccactgcaatttttatgatttggagacttctgatcca

SEQ ID NO: 829262 - DNA, 120 bp, Artificial Sequence
  ENSG00000248936_0 (sequence is synthesized)
caccccatctggattgttttctgttaccacctggaaaagaaagcgtaaaagatgaggagaagaaggtggaaggatgctagacagagaagggacttctgcttttctaatctgttaccttct

SEQ ID NO: 829263 - DNA, 120 bp, Artificial Sequence
  ENSG00000248936_1 (sequence is synthesized)
acagaggacacaggaacctcaccagggcacggcccactgcacgcagcagcaggaggggaaggagattctgacggattccttgccagggcatttgctcctcaagagttaaaggatgccgga

SEQ ID NO: 829264 - DNA, 120 bp, Artificial Sequence
  ENSG00000248936_2 (sequence is synthesized)
cccgagtcatcgcacaagcttcaaccacactaaattgattctgtgttgcttttcctaccgctgggccaatctcagctatgatttgtggacctgttcttttgcagctcaaagacatgcccc

SEQ ID NO: 829265 - DNA, 120 bp, Artificial Sequence
  ENSG00000248936_3 (sequence is synthesized)
cttgggcttcctggcagaaggtggactcatttcccacttgcccactgttccctgacccctccccaagctgggcttttccccatcatttcctttggaacaaaatcttctcttcatataaaa

SEQ ID NO: 829266 - DNA, 120 bp, Artificial Sequence
  ENSG00000277301_0 (sequence is synthesized)
acagattgctcttcagtggcagtgagaggagacctaatgcagaggctgcacagtggtgctgggattctataaccaacaacaaaagcaacaccctcattaccgacactcctgcagctcaaa

SEQ ID NO: 829267 - DNA, 120 bp, Artificial Sequence
  ENSG00000277301_1 (sequence is synthesized)
ctactttgcctttgtgcgttggaaacccaacccaagcccattttccccactggaattatttgtgatgatgtgaagtttttggagatgcaaccatcccagaacaggcacgctcagatgaga

SEQ ID NO: 829268 - DNA, 120 bp, Artificial Sequence
  ENSG00000277301_2 (sequence is synthesized)
agacgtgggagacacagttctagcaaacagttctaccgctcagagcaaagcctacgtcacacagcctctagggtctgggcacagtgtggggacaggagggctggccgccctgcctcttga

SEQ ID NO: 829269 - DNA, 120 bp, Artificial Sequence
  ENSG00000277301_3 (sequence is synthesized)
aaggaatacgcagctctgcaggttcaagccacccagctgaagtcctcaaactgggtaacacgggccaagatgccacctgcacgtgtcctgctacatcaccatggatctggccaaggagcc

SEQ ID NO: 829270 - DNA, 120 bp, Artificial Sequence
  ENSG00000277301_4 (sequence is synthesized)
accaccccctcggagcacgcatgctggggttgtcaaggagaccagtgcacaggacggccgcacccagggctggagaccggcagcgcaggacagctgcatccagggctggaagacagactc

SEQ ID NO: 829271 - DNA, 120 bp, Artificial Sequence
  ENSG00000277301_5 (sequence is synthesized)
gagttctgacccatctttcaatgggagagaaagaatccaatcccctgctagggccacaaggacatgatgggtttggatgccataagagatgagaacactccaagctgaagataaccagat

SEQ ID NO: 829272 - DNA, 120 bp, Artificial Sequence
  ENSG00000277301_6 (sequence is synthesized)
aagggcctctttgatttcccgtgtgtttacacaagctgtggccccaagtcttggaaagaatcaaccaccgccaggcaagtcaggacgcctccaggtggggtgaggggagacggccgcctt

SEQ ID NO: 829273 - DNA, 120 bp, Artificial Sequence
  ENSG00000277301_7 (sequence is synthesized)
tcattcgagtctgtttccatcctcgggcctgacttcagcaacttccacaggcccgatgcccgggagctggcatgatgcaccaggcagtcctggaaaccctgataaatcgcccacctgggc

SEQ ID NO: 829274 - DNA, 120 bp, Artificial Sequence
  ENSG00000277301_8 (sequence is synthesized)
accatttctcagggcagcattataattgtaccagccaaatgtgctgggccgtctcaatgtgccaaagccacctgcaaacagatgggcccccagatttcctggaggcctctgggatgttca

SEQ ID NO: 829275 - DNA, 120 bp, Artificial Sequence
  ENSG00000277301_9 (sequence is synthesized)
gtttgagggggtgcgggggtgctgaagtgaggtccttgctggtctcactgggcaggacagagctggagggcatggacgtcagtccaagggatcacctttggtggtcacaagtgctctggg

SEQ ID NO: 829276 - DNA, 72 bp, Artificial Sequence
  ENSG00000277301_10 (sequence is synthesized)
agtccaagggatcacctttggtggtcacaagtgctctgggcattttattttattgttttttgagatggggtc

SEQ ID NO: 829277 - DNA, 69 bp, Artificial Sequence
  ENSG00000277301_11 (sequence is synthesized)
cctggtcattttaaattctcatcagtcggccgggtgcagattacacacctgtaatcccagcactttggg

SEQ ID NO: 829278 - DNA, 120 bp, Artificial Sequence
  ENSG00000274964_0 (sequence is synthesized)
catatgtataacaaggcttttgggctgatttccttttgtggtgactcagaacgtctcctcaatcattatattgagaataaaagtaaaaccttctaagattttgctcctcaagaacattta

SEQ ID NO: 829279 - DNA, 120 bp, Artificial Sequence
  ENSG00000274964_1 (sequence is synthesized)
ggtcttagtataatgttcttgtagattgcaggccccccactggttaatgcttaccaacatgttcacacttagcttcactattttgcatttttctttcttccttccttcctttcattcttt

SEQ ID NO: 829280 - DNA, 120 bp, Artificial Sequence
  ENSG00000274964_2 (sequence is synthesized)
ttacttgttctatgaagaggcctaacttgaaaatgtgacatatggcaaatagagaaaattattcttgcaaataaaaatcatccttttaaggaatccctgcatgtgagtatagggcagaag

SEQ ID NO: 829281 - DNA, 120 bp, Artificial Sequence
  ENSG00000274964_3 (sequence is synthesized)
tggcaaacaaggagcccataaaccaaagtaagcttaaaggcagctgttatttgactattgccagaaaataaaaaataaaactatttaagttagttattgacagttaaaaattcaagagat

SEQ ID NO: 829282 - DNA, 120 bp, Artificial Sequence
  ENSG00000274964_4 (sequence is synthesized)
tttatatgaacatcagtatttctggcctcttttggaagattctgaatatctggcagccctaggtctgcgttcacgcatgtcaacacctgttggagctctgtagtggctgctgctgttagg

SEQ ID NO: 829283 - DNA, 120 bp, Artificial Sequence
  ENSG00000274964_5 (sequence is synthesized)
tattacttatacccagcctgctatcctcatttctattctctcctggcccctcctgtagtctttgagtttgccaccgttgaaatagaattttttttttcattttaccttaattcctttttg

SEQ ID NO: 829284 - DNA, 120 bp, Artificial Sequence
  ENSG00000274964_6 (sequence is synthesized)
caaacctcagcctttggatctctaatactttccttatctgattcatgaagtcagcctactgattgggattaaaagatgtggtgtagaaactgatagtgcatttcacgttctaaaggtgtt

SEQ ID NO: 829285 - DNA, 120 bp, Artificial Sequence
  ENSG00000274964_7 (sequence is synthesized)
tgaggaaattggtagtgataatgagttggaatggtgtaatagccaaaatatacacctaagaagaaaaaaagtaaaaactgcttggtgtttttaatttcataactgatttcctattgtttt

SEQ ID NO: 829286 - DNA, 120 bp, Artificial Sequence
  ENSG00000274964_8 (sequence is synthesized)
agacctccttggaaggtaccttgaagtattctgtgaatcaccaaagtggtaatgatttatcaggatacctaactcggataaaacccacaagtcttctttttagtgttccaaatggattta

SEQ ID NO: 829287 - DNA, 120 bp, Artificial Sequence
  ENSG00000274964_9 (sequence is synthesized)
gtagcactatctactggaacttagaaaagaaattggtatgattaataaataactcctattgctgtttaattaaaaagataacatctcaataaggttaaaaattaataatcaatgttaaca

SEQ ID NO: 829288 - DNA, 120 bp, Artificial Sequence
  ENSG00000274964_10 (sequence is synthesized)
acaataactgttttcatttttgtatgactggtttttgtttacatgaatatatactttatattgttatcattacattgtttaagccatgaacattatatcacaagcttttccatgttgcta

SEQ ID NO: 829289 - DNA, 120 bp, Artificial Sequence
  ENSG00000175773_0 (sequence is synthesized)
gtactgttggtgactccgtctccttagacggtggagcctgcgtgacccagaaaggccatggtgagctccttagagggaagtatagtacatatttcctccatgtctccagtacccaacaca

SEQ ID NO: 829290 - DNA, 120 bp, Artificial Sequence
  ENSG00000175773_1 (sequence is synthesized)
gtgcctgacgttgagagggctcttaataagtgtttgtgaaagactggtagagcaatgccctatgaaacaagaagctggataacactgcttaggactcagaggagagaggagtgtggtcta

SEQ ID NO: 829291 - DNA, 120 bp, Artificial Sequence
  ENSG00000175773_2 (sequence is synthesized)
cactgcacatctctgccaagcctggcacgggatttgaagttccacaccactgagccaaacacatccagaccctcttccaacccggggatctggtggtaagcaaaatactattccagcaag

SEQ ID NO: 829292 - DNA, 120 bp, Artificial Sequence
  ENSG00000175773_3 (sequence is synthesized)
acgatctggtttctgagtccctgggctgcagctgttgaatttccagacacaaacaagtatgcgttctgagagcctcgccgagcccacacaaccgggagagccaagctggattccattctg

SEQ ID NO: 829293 - DNA, 120 bp, Artificial Sequence
  ENSG00000175773_4 (sequence is synthesized)
ctttgcacatcagcagctctgctgccagctgaactccagggcaaaagctgtgcctggtaatgatgcaggcagcagggatggcacagctggcctggcttaggccgttaagggggacacgct

SEQ ID NO: 829294 - DNA, 120 bp, Artificial Sequence
  ENSG00000175773_5 (sequence is synthesized)
tggccttatttgggggagagcgagaaatggaaggcgatgaagagttgcggaagcatacatcagcctccacaaaactggtgcacagcagggaaacaatctggttttgctagtcatcaacaa

SEQ ID NO: 829295 - DNA, 120 bp, Artificial Sequence
  ENSG00000175773_6 (sequence is synthesized)
gacaaactctctcagtgcccctgggacttacaagatgtttggaatgaggaacgctctcccaatgcgagctcagcggaggcccccagaaaaacgtggggaggagagttttccccataagac

SEQ ID NO: 829296 - DNA, 120 bp, Artificial Sequence
  ENSG00000175773_7 (sequence is synthesized)
agactgtccttcagccccggccaccaaagaggagtaacccgggcctgctgttctctgggactgaatgcggctgcatccttcccttcctctgcttcctgtcccggtacttactgacggtgc

SEQ ID NO: 829297 - DNA, 120 bp, Artificial Sequence
  ENSG00000175773_8 (sequence is synthesized)
acatgcggggcttggggaagctgagtgtctaaccgcggtgcagctacggatgggaaattctgggcagggacgagcctgtcttcacctgaggaattccctcccacatcacacagggcagag

SEQ ID NO: 829298 - DNA, 120 bp, Artificial Sequence
  ENSG00000175773_9 (sequence is synthesized)
caccccgtctcctgttttttggggccatgtgttccgaaatgtagcttcaactcatcataggggcaaaaagaagtgatgagtctgtggcagcagaaatctgggaatccaagggtcgtgcta

SEQ ID NO: 829299 - DNA, 120 bp, Artificial Sequence
  ENSG00000175773_10 (sequence is synthesized)
catctagtcctctttgataaattctgccttcctgttcacatttttcgagaaaccattttgaattcccaaacagcaaaggaaatgctgcaggttcctggagggacctggtgatctggggca

SEQ ID NO: 829300 - DNA, 120 bp, Artificial Sequence
  ENSG00000175773_11 (sequence is synthesized)
gagcacacggagtcgagattgctgcggggttcacgagcctcccctcctgggaccaggggcacctgggcagggtagtctgcaccacgcaggaaagcccagtacacgcagctgctcaacgct

SEQ ID NO: 829301 - DNA, 120 bp, Artificial Sequence
  ENSG00000175773_12 (sequence is synthesized)
gcagacgccatagcgcagggctgacaaggcctccctctttatctgccctggaccacaagtggaaaatatcaagacaaagcaaaagccagtatcccttaagaactttccaattgttcttgt

SEQ ID NO: 829302 - DNA, 120 bp, Artificial Sequence
  ENSG00000175773_13 (sequence is synthesized)
catttgtagttttgttttttggggggtgtggggagggaggggtggtttgaaacaactccggagcacactccagaggaaaacaggaagggtgacatgtttggacaccagaaaagaggaaga

SEQ ID NO: 829303 - DNA, 120 bp, Artificial Sequence
  ENSG00000175773_14 (sequence is synthesized)
gtcctcactaagagggtgacttggttaaaaagttcaagcacaaaggatgtagaagcaggtggatgtcatcagagaacagatgcggatctagtgagatgggtcctaccacccctggaatat

SEQ ID NO: 829304 - DNA, 120 bp, Artificial Sequence
  ENSG00000175773_15 (sequence is synthesized)
gttcctgggagaggggtggtctgctagagtggactgggaatagtaatattgcatacttttgtaaattcacaaaaccctctgatctgtgatagaggaataaagggcagaggataaacccca

SEQ ID NO: 829305 - DNA, 120 bp, Artificial Sequence
  ENSG00000175773_16 (sequence is synthesized)
agaaaatgggccctcttggccgtcgggacttgtactgttggtgactccgtctccttagacggtggagcctgcgtgacccagaaaggccgcctcgggacccagaccaggatttccatcagc

SEQ ID NO: 829306 - DNA, 120 bp, Artificial Sequence
  ENSG00000175773_17 (sequence is synthesized)
tcccctggctcgcaggccttctgacttctgactcaccatcagctctcctggatccagcttgccaatggcagatcgtgggactccttgccctctaatcgcatgaaacaatgcccacagttg

SEQ ID NO: 829307 - DNA, 120 bp, Artificial Sequence
  ENSG00000175773_18 (sequence is synthesized)
cctcttggccgtcgggacttgtactgttggtgactccgtctccttagacggtggagcctgcgtgacccagaaaggcctttttgtagggaggtcgaaatagaaacacttcagcccctcttc

SEQ ID NO: 829308 - DNA, 120 bp, Artificial Sequence
  ENSG00000175773_19 (sequence is synthesized)
gacctggcaggacgtgcggttcttgagatgagtggagaaacggactcccaggtccctctcgttcttccaacacagggacagctagagctgctccaaaaatataccctacttcttccacaa

SEQ ID NO: 829309 - DNA, 120 bp, Artificial Sequence
  ENSG00000231607_0 (sequence is synthesized)
agctgctcatggggaattcagcagctgcttcaggccctccagggcatttcttgctggcatcttctgcctcaccagatcgccctgattattagtgatctgggccccctacctaatggaaaa

SEQ ID NO: 829310 - DNA, 120 bp, Artificial Sequence
  ENSG00000231607_1 (sequence is synthesized)
ccagccactcttcttcccagccccaatggatattgatgaggggtccttaaatctgggatcctttcccctccttgcccaataattgaactcctaaaatccttttactacctgggaatctgc

SEQ ID NO: 829311 - DNA, 120 bp, Artificial Sequence
  ENSG00000231607_2 (sequence is synthesized)
aaagacaaccttgaatttgaactggagctagaaggacttcctccgaacgaatttgcccatagatgactctctggtacatggtctctgttgttcaactttctctattctgaagtctagaag

SEQ ID NO: 829312 - DNA, 120 bp, Artificial Sequence
  ENSG00000231607_3 (sequence is synthesized)
acacccttgcttctgaaagtggggcctaagaacctgcagcctcaccagggagcttggtagaaatccagaatctgaggcaggattctagacttattggatcagattctgcatttcaacaag

SEQ ID NO: 829313 - DNA, 120 bp, Artificial Sequence
  ENSG00000231607_4 (sequence is synthesized)
attccccagtgacccccaggcatcttcaaatttgagaggccaggaaagtgctcaggccctgcccttcccttcccgttggctggggagaattcctgtaatttgccctgtttacgggtcctt

SEQ ID NO: 829314 - DNA, 120 bp, Artificial Sequence
  ENSG00000231607_5 (sequence is synthesized)
aatctccaacttcactgtcctcgctttccaaagaatcctgagtggcttccttccaacaccttatctgtcttcccccacgcccctgaagccagggcctcttttcttcaaggccacccccca

SEQ ID NO: 829315 - DNA, 120 bp, Artificial Sequence
  ENSG00000231607_6 (sequence is synthesized)
actcatctcaggctgaggctcctctcttgaggccatatcccatggtagcatttctttgagggctgcttttctgccgtttttctccccaggtagggcctctaaaaccgatggaagtgaagt

SEQ ID NO: 829316 - DNA, 120 bp, Artificial Sequence
  ENSG00000231607_7 (sequence is synthesized)
gctacacctcagagctgctttagcccttagagctggccagggtctgagtgggcctctcacagggccacaggactgccctttcccccagcatgcctagaagctgagaccactcacaccaca

SEQ ID NO: 829317 - DNA, 120 bp, Artificial Sequence
  ENSG00000231607_8 (sequence is synthesized)
tgaacatgctatccttgttcctctttcctgccagcctcaacacaaccagaatacagcccaataatggctgcctacaaatgggaggcacccagggaagggagggggtgctgattaagaacc

SEQ ID NO: 829318 - DNA, 120 bp, Artificial Sequence
  ENSG00000231607_9 (sequence is synthesized)
agcctggaggaggatcatggtttctctgaaacaagaaggaggtgagggttgatgcggaaggtatattagaaatgcttcaagcacttgatgctttgagggtttggggatttgagtttgggt

SEQ ID NO: 829319 - DNA, 120 bp, Artificial Sequence
  ENSG00000231607_10 (sequence is synthesized)
ttgttttttaagcttaacaatgtgaaaaagatgtcaaataacttttctgaactgtggcaatcagagccttgtccagaatcataacttaatggctttttggctctcaatttgatggtcagt

SEQ ID NO: 829320 - DNA, 120 bp, Artificial Sequence
  ENSG00000231607_11 (sequence is synthesized)
ttggctaaccaacactttttaattctgtgttatttattactcagttgatcccccccataatatgttaaaagcctacttccaacctgttaaaatgtacccttggagtgctgtccagattca

SEQ ID NO: 829321 - DNA, 88 bp, Artificial Sequence
  ENSG00000231607_12 (sequence is synthesized)
ggatctcattctgttgcccaggctggagtccagtggtgtgatcacagctcactgaagctttgacctcctaggctcaagctatcttagg

SEQ ID NO: 829322 - DNA, 70 bp, Artificial Sequence
  ENSG00000231607_13 (sequence is synthesized)
tagctgggactataggcacatgccactatacctggctaatttttaattttttgtagaaacttcctgacac

SEQ ID NO: 829323 - DNA, 120 bp, Artificial Sequence
  ENSG00000231607_14 (sequence is synthesized)
gctgggattacaggcatgagatgccatgcctggccatatttttatttttaaatctttctatttaaataaggagagggagagagagagaaagctctaggtgcattttttccaaatggacac

SEQ ID NO: 829324 - DNA, 120 bp, Artificial Sequence
  ENSG00000231607_15 (sequence is synthesized)
cttgccatgttttcaacacacatctaaagcctgaattgagagtataatttttctgtagatacatcaccttgaggaattttataaacttcagtttcctcatctgagaaatgaggtagttgg

SEQ ID NO: 829325 - DNA, 120 bp, Artificial Sequence
  ENSG00000231607_16 (sequence is synthesized)
attagatgaactggctcatcaagtgagtataaggagccttccaaatttaagaattattaacatttcccggaagactaaccaggcaatttttcttctttaggtttgactttctgagatgtc

SEQ ID NO: 829326 - DNA, 120 bp, Artificial Sequence
  ENSG00000231607_17 (sequence is synthesized)
atggcttagtattctttaagcaaattctggaatgttcttgtccctttggaataattgtaatgtggatttgttctgtgcaactgatgatattctaatgtgtttgggcaggtttaagtctaa

SEQ ID NO: 829327 - DNA, 120 bp, Artificial Sequence
  ENSG00000231607_18 (sequence is synthesized)
atttccaaagtctcacacctgtggttttaccaaaaaggtactgctcaaggaaaccagtgatgggcaaaggatgcatggtatagctatgatgcaagagcgccctctgcaggccatgcgaag

SEQ ID NO: 829328 - DNA, 120 bp, Artificial Sequence
  ENSG00000231607_19 (sequence is synthesized)
atgagtctctttcttaaagggtagcttttccgctctttgtgtagagtacaacccttcccttcctcctgtagcattctcatcaagaaacatttgtttagtgcttaccctgagctaggcaca

SEQ ID NO: 829329 - DNA, 120 bp, Artificial Sequence
  ENSG00000231607_20 (sequence is synthesized)
gtgtgcttagggctgggaacacaaaaataaaagcatcctaggcttaaaggatctcacggtctaatggggtacatcccaatcagatcattataatgcaacctgagaggtgtgtcactggag

SEQ ID NO: 829330 - DNA, 120 bp, Artificial Sequence
  ENSG00000231607_21 (sequence is synthesized)
ctgtgcctcatgtccccattagtttgcaatcacaagttgcacacaagagccgaaatcaaactgtacagtacaatgcttttttgttaggagagaaggactggtgactcaccctagcatttt

SEQ ID NO: 829331 - DNA, 120 bp, Artificial Sequence
  ENSG00000231607_22 (sequence is synthesized)
ctctttgcacagaaacagatgccctgcccagaagcaacacggctaatgggtgccaccgtggagacccaggcaacctgagagtagtcctgacagccagacctccagggtggaaatgggaag

SEQ ID NO: 829332 - DNA, 120 bp, Artificial Sequence
  ENSG00000231607_23 (sequence is synthesized)
gtctacagagaaagtgggagacatgaaactaaacaggaatgatacattgacaataaagaacatgaagagatggttcctggacactacaagaaacctgtggtcccagctactcgaagactg

SEQ ID NO: 829333 - DNA, 120 bp, Artificial Sequence
  ENSG00000231607_24 (sequence is synthesized)
acctgtggtcccagctactcgaagactgaagtgagaggatcacttgagcccagaaggtcgatgctacagtgagccatgatcatgccactatactccagcctaggtgacagagcgagactc

SEQ ID NO: 829334 - DNA, 120 bp, Artificial Sequence
  ENSG00000231607_25 (sequence is synthesized)
tgggattgcaggggtaagccaccgcgccccgccgcaacaatgacttttttaaaaaacaggcatttactgcattttcgtacactagaagctaaaataccatgctgtccagttcaaaacagg

SEQ ID NO: 829335 - DNA, 120 bp, Artificial Sequence
  ENSG00000231607_26 (sequence is synthesized)
acacctggcaaccctgttcctaacagctttctgcaaagccaacacccagtgctttctggctgcattggcctgtcctcatttccccctggaaaacttgttttaaacagtacagataacatt

SEQ ID NO: 829336 - DNA, 120 bp, Artificial Sequence
  ENSG00000231607_27 (sequence is synthesized)
ctgcctctattacaattagcagcttctctcaccaggttatctagtgtggcaagtgctagtgcggagtcacttagtatcttctttcaaaacctcccagtggctgccttcaggtagcatgtg

SEQ ID NO: 829337 - DNA, 120 bp, Artificial Sequence
  ENSG00000231607_28 (sequence is synthesized)
gtcaggatttaacagggaaatggaggagggcaagaatgggggtcaggaggtatctacgcattttgatatgaaattaagaagttcatttaaaatatacaaccaaggcccgtgacacttttt

SEQ ID NO: 829338 - DNA, 120 bp, Artificial Sequence
  ENSG00000231607_29 (sequence is synthesized)
gtaacaagattctagcttatcttcccactagattttgttggacttttttcaaattgtatctgattgtgtttttcaaactaggccaggagggcccctcaacttctaaaatacaaaaattct

SEQ ID NO: 829339 - DNA, 120 bp, Artificial Sequence
  ENSG00000231607_30 (sequence is synthesized)
ttctgctcctcttttcaaatcttctcagattctggacacacccagaaattccatgtgcctttttactcccttaatcctgttaactttttgtctcttcttagcaatgacttcctttcattt

SEQ ID NO: 829340 - DNA, 120 bp, Artificial Sequence
  ENSG00000231607_31 (sequence is synthesized)
tagagaaagttctgctggtaacatactgtataagccaggagagaaaaagaacttgaaagaggaacacatttttcttcattttttttttttcaaaaaaggtaagggaaaaaaataaaggaa

SEQ ID NO: 829341 - DNA, 120 bp, Artificial Sequence
  ENSG00000231607_32 (sequence is synthesized)
gtggagaaatatactactcagtacagttgtcaaacaaatttcttggaaccatggcctacaagaatacctatcttaactgcattgcactagaaaccacattttcatattccttttgtgata

SEQ ID NO: 829342 - DNA, 120 bp, Artificial Sequence
  ENSG00000231607_33 (sequence is synthesized)
attctaagataatgaattagatgttagccattgttttccagaatagaatttctggagttactggtagttcagggaattttagtcacaagatatatattttctgtacctttgtgtgtgtgt

SEQ ID NO: 829343 - DNA, 120 bp, Artificial Sequence
  ENSG00000231607_34 (sequence is synthesized)
atatgtgtgtatgcatatatacttatatacatgcacatatatacacatacacacaaacatgcatgtgctatagcttttgaatggagatatatgtgtgtgtacacacacacacattcattc

SEQ ID NO: 829344 - DNA, 120 bp, Artificial Sequence
  ENSG00000231607_35 (sequence is synthesized)
attcatttatatcatacagcttctctgaagagcaacaggagaaaaatgcaggaaatataaaggcaacctggggtcagtcctatgcagtgagctctttgaggtctccatcagaaataaaag

SEQ ID NO: 829345 - DNA, 81 bp, Artificial Sequence
  ENSG00000231607_36 (sequence is synthesized)
cagaaataaaagatttcagtcttttcttgggaggccaaggtgggaggattaacaaaaaatacaaaaattagccgggggtgg

SEQ ID NO: 829346 - DNA, 81 bp, Artificial Sequence
  ENSG00000231607_37 (sequence is synthesized)
atggtaggatcacctgagccagggagatggaggctgcggtgagccatgatcgcaccactgcacaccagcctgggtgacaga

SEQ ID NO: 829347 - DNA, 120 bp, Artificial Sequence
  ENSG00000231607_38 (sequence is synthesized)
cctaaaaaaaaaaaaaaaaaaaaatcaatcttttcatagttattcaaattaaaacaacaaaatagagatgtgaagacttggctcaggaagattcagtcatctcaacagtcactgtaaaga

SEQ ID NO: 829348 - DNA, 120 bp, Artificial Sequence
  ENSG00000231607_39 (sequence is synthesized)
actgccatcagactccttttgactctaaatggcaaaggataccaacactgttcttcctaggaagctaatctatagttaaaataggcacattgcatagctctgtgtatctacagtgttgta

SEQ ID NO: 829349 - DNA, 120 bp, Artificial Sequence
  ENSG00000231607_40 (sequence is synthesized)
attgtctaacagagtggagatactaaatgtactcagtgcataaaacacattttatttaaaatagagaggaaattcctgagggaacaataaaatcaaggatgttacagtaatttcatgagc

SEQ ID NO: 829350 - DNA, 120 bp, Artificial Sequence
  ENSG00000231607_41 (sequence is synthesized)
ggcggggttggctctaacgaatttgaatgaggagcctcagcgctttcggcgccattttcgagtgatgcctgatctcatcaatctagcgggagagacaggataacctgtccgagagtatag

SEQ ID NO: 829351 - DNA, 120 bp, Artificial Sequence
  ENSG00000231607_42 (sequence is synthesized)
cgccactatgactccgccggaaaaattactttaaaaatcgccaaaaattacttggagcaaagggcagtcggcggagcttcgccaaggctggcgcagtcggttttgacctgtagcagagaa

SEQ ID NO: 829352 - DNA, 120 bp, Artificial Sequence
  ENSG00000231607_43 (sequence is synthesized)
ccaattctggagaacagcctcacttctttgattgaatacttacataatgcattggaacatgacatgagattaaggtttaataatgatagaatgaagaccacaataaaagagacctctact

SEQ ID NO: 829353 - DNA, 120 bp, Artificial Sequence
  ENSG00000231607_44 (sequence is synthesized)
tagctcagcaattcttacctttcttacctatttgatgaagatgtcttttgaaaggtgtactgcaaggaacaaaatgtttgtaaattctccttttaccaaggtggataattactgtacctt

SEQ ID NO: 829354 - DNA, 120 bp, Artificial Sequence
  ENSG00000231607_45 (sequence is synthesized)
cctcatggaaaaagttttatttaaagtgttatttctcattgaatactatcaaaaaggaaaaaaaaatgacctaaacttttgagatagatttggctctagtaagtatttagttatatcact

SEQ ID NO: 829355 - DNA, 120 bp, Artificial Sequence
  ENSG00000231607_46 (sequence is synthesized)
tgcatatctgggagaagaaataagagactatcatcagtacattcccatctactaaaaaaatttattttacacatgtcaagggattacttataacttccattttattactaatagcttgaa

SEQ ID NO: 829356 - DNA, 120 bp, Artificial Sequence
  ENSG00000231607_47 (sequence is synthesized)
cccttttaatgaagacctaactcctccaccagaaatttaagtttatgttcttactttgtttacttataaaatacatctcaggtatttcggatgtcttttttttttctaagcctatatgaa

SEQ ID NO: 829357 - DNA, 120 bp, Artificial Sequence
  ENSG00000231607_48 (sequence is synthesized)
aagatgaaaagttagtgctgtttttgtctacgttatactgaaattaaatgtttataatttatattttgggtttatgtataaatcatggaatttatgcaaaaatatgagtagtacagattc

SEQ ID NO: 829358 - DNA, 120 bp, Artificial Sequence
  ENSG00000231607_49 (sequence is synthesized)
tcctctaattctgtaggactttgaataatgtgatatttttcttataattggacccttgtgttttgaagaaatgccaactgcttgaagaatctccttgttatttgtattatttgctatagg

SEQ ID NO: 829359 - DNA, 120 bp, Artificial Sequence
  ENSG00000231607_50 (sequence is synthesized)
gttagatgttgagaaattctgctgacaaaaaattttaagccagttttacactaaatgttcctcagtctgattaatttgttattggatgtattctgtatctttcttttgtaatttgtaact

SEQ ID NO: 829360 - DNA, 120 bp, Artificial Sequence
  ENSG00000231607_51 (sequence is synthesized)
tttatccacttagcacgaatgattctattaaagaaaatcattaggaagtggtagaaactttaaatcgccccagagtttgcctgtttccatattttattatcttataatcttcgggagtgc

SEQ ID NO: 829361 - DNA, 120 bp, Artificial Sequence
  ENSG00000231607_52 (sequence is synthesized)
ttacacttatggagctaacattttcagagatacagcttcttatagtaacactaaaactttcttcctctttggactgaatacctataattataactatatggtagtttaagtttccttgtg

SEQ ID NO: 829362 - DNA, 120 bp, Artificial Sequence
  ENSG00000231607_53 (sequence is synthesized)
attagtcaaaaataccattttagtatgaagcaatgaagtctattatttgttgtcccataattgagaaagcttaaatacaccttttattaagagtttgtaaattctagcttagtctacaca

SEQ ID NO: 829363 - DNA, 120 bp, Artificial Sequence
  ENSG00000231607_54 (sequence is synthesized)
gatttttatatcaatttgtttatatttttattaatgtcatttctggaagtgtgaaaatgttaatgttcaacaagcaacattaaaaatagatttgaaacatttatatatagagaggtacac

SEQ ID NO: 829364 - DNA, 120 bp, Artificial Sequence
  ENSG00000231607_55 (sequence is synthesized)
ggagctttgctgaaactgcacaaaaaatcgagccggggggttccctggtccccggcgatggggcggggagcgctgcgccgggggagggggcgggcgcggcggcgcgggccccgccgaggg

SEQ ID NO: 829365 - DNA, 120 bp, Artificial Sequence
  ENSG00000231607_56 (sequence is synthesized)
gggacacctggctgaggcacagctgccgccgtgcctttccgcgcgagcccagagctccgatccctgcgcgggctcgagagctcgccccgaacgggggtcttcctcctccgccgttgacag

SEQ ID NO: 829366 - DNA, 120 bp, Artificial Sequence
  ENSG00000231607_57 (sequence is synthesized)
tgctgcttgtcagctgttgtgcagaataacatcaatatgcaataatggtggccaaaggagcctgcacccatccgtttttacaaacccagtgtataaagccaaatgtcccatttaaagttt

SEQ ID NO: 829367 - DNA, 120 bp, Artificial Sequence
  ENSG00000231607_58 (sequence is synthesized)
actgtaacctgtatgagaatattatactaacatacaagaaacaagtagagaataatggaatgtaaactctggcttgctaacttaagtgtggtagaagcttgaaggaaatgtggacttaaa

SEQ ID NO: 829368 - DNA, 120 bp, Artificial Sequence
  ENSG00000231607_59 (sequence is synthesized)
cttatcagagaagacttataagaggatatgaaaggtgtaaattttgataccaccattgccgccttcccctcaaaaaaggtgagaactgactaaactactggtacttagaccatgtggaga

SEQ ID NO: 829369 - DNA, 120 bp, Artificial Sequence
  ENSG00000231607_60 (sequence is synthesized)
aggaactgaaaatggaaacagaaacacgtctgtacagagcagagtgtcagataatagctcattttagtagagggcaataaatgccacatgagatgatcacctcagcagaaaactgggatg

SEQ ID NO: 829370 - DNA, 120 bp, Artificial Sequence
  ENSG00000231607_61 (sequence is synthesized)
tggagacgctggtagcggggccaggaaggctccggacggagcaggttttctggaccacagacacactgccccggcgccctccgcaggccgctcctccccaggcccatgacagtgccccgc

SEQ ID NO: 829371 - DNA, 120 bp, Artificial Sequence
  ENSG00000231607_62 (sequence is synthesized)
cctgctgacctgggcaactccccaccctcgctgaaggttcgaggaccaccccgctttcccgagaggagccgggcggcgggtacttatctccgacctccggctagtgggaaaggccgcgcg

SEQ ID NO: 829372 - DNA, 120 bp, Artificial Sequence
  ENSG00000231607_63 (sequence is synthesized)
accgcccgtcctccaactacagggaccgcacgaacagcgactgggaaactgccactagaaaaagatgactgtccaactaaaacctgcatacacagctacatccttccctggaagagcaca

SEQ ID NO: 829373 - DNA, 120 bp, Artificial Sequence
  ENSG00000231607_64 (sequence is synthesized)
gtggaactagatcctagtacagatagcacagggattgtcaacattcttgtcacactgaaatttccttctactgatctccaaacttctaaaaatttgctgttgagaccagctgaaatgttt

SEQ ID NO: 829374 - DNA, 120 bp, Artificial Sequence
  ENSG00000231607_65 (sequence is synthesized)
gaaagaagcaactaaagaaagaaactttgaaagaagcttccaaaagaagcaaccaagtctacaaaggcacagtttgactcaaatggatccaactgattagcaaatggaaaataacatgga

SEQ ID NO: 829375 - DNA, 120 bp, Artificial Sequence
  ENSG00000231607_66 (sequence is synthesized)
ggaatatattttgcatgacaagcatagcagctccaagtcatccctaatgaagccaaaaatttaagtgcaacccagagaatggatggttcagaatcttttttttttttgagatggagtctc

SEQ ID NO: 829376 - DNA, 82 bp, Artificial Sequence
  ENSG00000231607_67 (sequence is synthesized)
cttttttaaattttttattattattattttttctgagatggagtccggctctgtggccaggctggagtgcagtggcacaatc

SEQ ID NO: 829377 - DNA, 85 bp, Artificial Sequence
  ENSG00000231607_68 (sequence is synthesized)
cttggcctcccaatgtaagaatctttgccttttgtttgcatagtttaatcttctaaaccagttgctttcccagaaaaggtgactt

SEQ ID NO: 829378 - DNA, 120 bp, Artificial Sequence
  ENSG00000231607_69 (sequence is synthesized)
taatcttctaaaccagttgctttcccagaaaaggtgacttaaagtcatagcctttgtgttcatcaccatactctccatagttttacaaattattcagtttatttttaaaaggggtaattt

SEQ ID NO: 829379 - DNA, 120 bp, Artificial Sequence
  ENSG00000231607_70 (sequence is synthesized)
ttaaaatttttatttttaattccgaagcattccttttaatacattctcttgagggaaaaaaaaaatcacacatagtgattgtgtgtggtagtgattatgtgtggcctaagtggcaattga

SEQ ID NO: 829380 - DNA, 120 bp, Artificial Sequence
  ENSG00000231607_71 (sequence is synthesized)
tcaataccccaatctcaagcctgtacattgttactggttgactggttggttgcctggtgggctttttgtccttccagatgtttttctaccttctgccttttccaataaagcttccattat

SEQ ID NO: 829381 - DNA, 120 bp, Artificial Sequence
  ENSG00000231607_72 (sequence is synthesized)
actgtaagtaactggggacttacaggagaattgaacagttgtttctgctgactcagtaaaaagtcttcattttataatttgtggcctgcatgcttgtaaattaaaatgcattgagttgtc

SEQ ID NO: 829382 - DNA, 120 bp, Artificial Sequence
  ENSG00000231607_73 (sequence is synthesized)
tatacaaggaaaaataacttcatatattgaatatattcaaaagtttaagcatttagttgtattgccctgttaagttggcatagcaaataaatgcttttcttttcctcattttattctttg

SEQ ID NO: 829383 - DNA, 120 bp, Artificial Sequence
  ENSG00000231607_74 (sequence is synthesized)
tgtttcctaacctatagcactgtgctgggcacagaatggacttcagttaagtttttgatgtagaaatgttttattattctacttaaaatctccttaaaaataattatgcatattacatca

SEQ ID NO: 829384 - DNA, 120 bp, Artificial Sequence
  ENSG00000231607_75 (sequence is synthesized)
atgttataatgtttaaacatagatttttttacatgcattctttttttcctgaaagaaaatattttttatattctttaggcgcgaatgtgtgtttaaaaaaaataaaaccttggagtaaag

SEQ ID NO: 829385 - DNA, 120 bp, Artificial Sequence
  ENSG00000231607_76 (sequence is synthesized)
ctttttattaaaggaaaattccaccgagaactcttttaccctttctagctgcctaaaagtaatttctcaactcctgtgtgatgtgtgagaattccataaactacgaaactatacaaacat

SEQ ID NO: 829386 - DNA, 120 bp, Artificial Sequence
  ENSG00000231607_77 (sequence is synthesized)
aaataaggtttaattacatatggcaaactctacacatttaaggtgttattttggagcatcagtgtatcaagcaagaaaaggttctaaacttgaactgtgatttcaaggcaaggcaaaaca

SEQ ID NO: 829387 - DNA, 120 bp, Artificial Sequence
  ENSG00000231607_78 (sequence is synthesized)
aatattacataaggtatcaggtacaaagcagtgtcatgaaaatgagcatatctgaacaaaagctgtgacagaattaaggccagataacctatcataaatgtatagaatgaacagaacagc

SEQ ID NO: 829388 - DNA, 120 bp, Artificial Sequence
  ENSG00000231607_79 (sequence is synthesized)
ccggttttaggaaaggacttcccagggaggtttagtaagccagctgggagaaaggaaaaaaaacgtatttttagggagggatagggacgctcccattgtgcaagaaggaagtatagccgg

SEQ ID NO: 829389 - DNA, 120 bp, Artificial Sequence
  ENSG00000231607_80 (sequence is synthesized)
ttaacagctccatcaagttctactagaaggagtgcctatgtaaatgaaattctgcttttaaagtgcctattatataaaggtctctagaaaactcaagccctgttctacaagccctagcag

SEQ ID NO: 829390 - DNA, 120 bp, Artificial Sequence
  ENSG00000231607_81 (sequence is synthesized)
cctgacaattcactaagcataggagaagggaaaaaaaagtaggaaaaaagtgtggaagcccctttcttcctttgtaatatgaatgtttggctatatttaagataaataccacataaataa

SEQ ID NO: 829391 - DNA, 120 bp, Artificial Sequence
  ENSG00000231607_82 (sequence is synthesized)
ttgctaaacgtgaattctgtttttctaagttttaacaaaatatgcaaagaacaaagaccaccaatgaaagtggatgggaacatacgtattctacacacagttccattttggaaggttcta

SEQ ID NO: 829392 - DNA, 120 bp, Artificial Sequence
  ENSG00000231607_83 (sequence is synthesized)
gaaaattattgtagtttacctctgtctcctacaagctgatgtatttggcagggttactatttcccagggcaaagcaggtcttttttttcacgttttgactaacgaactagaggctactgc

SEQ ID NO: 829393 - DNA, 120 bp, Artificial Sequence
  ENSG00000231607_84 (sequence is synthesized)
aaagaaagaagaaaaagaacagtattaacgcatttatttgcacagcaccccaatcttgaccctcaattttttcaatcgcccccacaaataaagcccggctgtttagacctggtgaaccgc

SEQ ID NO: 829394 - DNA, 120 bp, Artificial Sequence
  ENSG00000231607_85 (sequence is synthesized)
caggagcctggagctctttgtattaagcagcttctcggttagggcgccctcccccggcgccatgcaaccaaacgctggcggcgcgctgtaacctaaggcccacacccgtcttttcttttc

SEQ ID NO: 829395 - DNA, 120 bp, Artificial Sequence
  ENSG00000231607_86 (sequence is synthesized)
ttcttgtcacactgaaatttccttctactgatctccaagtaagtaactaacagctgaaacttggaatttatatatcagcacagcacgaagactatagatatatctagtcttatgtaagtt

SEQ ID NO: 829396 - DNA, 120 bp, Artificial Sequence
  ENSG00000231607_87 (sequence is synthesized)
ggggagcagaaggccgcgggcgggcggctggcgcgctgtgtacttaggtcgtgtgctggggcttttctctcccaggagccggcggggggaggggagggggaggggccaccgctccgcctt

SEQ ID NO: 829397 - DNA, 120 bp, Artificial Sequence
  ENSG00000231604_0 (sequence is synthesized)
agttatagatgtcgccacgtctggtgttttctcagtttttttcctagagaggaaaatatggggagatgtggccgtgcctggtcagccttcctgaaccacacattggctggattgctgtgg

SEQ ID NO: 829398 - DNA, 120 bp, Artificial Sequence
  ENSG00000231604_1 (sequence is synthesized)
gtggggcagactttgttgctacagaaccccagaccccgctgttacccactggagttatttacaaggcctgccggatgcctgtacgtcagtggcttcaatccggccactctcattggcttg

SEQ ID NO: 829399 - DNA, 120 bp, Artificial Sequence
  ENSG00000231604_2 (sequence is synthesized)
ctcctggagttgcccatgctgagaaccgttctgttccacccagccagcagccagtggaaatttcctgacccctcctgggcctgaagccccagagccaggaccggacctttgtggatactg

SEQ ID NO: 829400 - DNA, 120 bp, Artificial Sequence
  ENSG00000231604_3 (sequence is synthesized)
atggctggagaaaatgtctgtaagactctcagtagagaaatgctaggtgcaaaactgcacagggcctatcatcctagggtaatttagaaatacgtgcatataaaattatccctatcttga

SEQ ID NO: 829401 - DNA, 65 bp, Artificial Sequence
  ENSG00000231605_0 (sequence is synthesized)
cttggcattccaggcaacggaagagcctgaatgtgtcctgacttcttgcttagcaaaattggatc

SEQ ID NO: 829402 - DNA, 120 bp, Artificial Sequence
  ENSG00000231605_1 (sequence is synthesized)
catcccagctaaaacgcctgattatagtaactggctctgaattgctgcttctgctcaacttcctggatgctagcagtacccagggatgtaaagacctttcaactagagctcatagcaggc

SEQ ID NO: 829403 - DNA, 120 bp, Artificial Sequence
  ENSG00000231605_2 (sequence is synthesized)
ccttgtgtctgagaatgactgcttctgtgatctgatgagcacacgtggtgtgcatccagtggctctgctcttaaactaggcccatgactaccaacagtcattcttcctgggctgctgaga

SEQ ID NO: 829404 - DNA, 120 bp, Artificial Sequence
  ENSG00000231605_3 (sequence is synthesized)
ccttccaaagggttcacagatgcagaggaattttgcctcaggatgaattgcatcttcagtctcacccaaacctgatttagataatatttcaatgagacttcggacttcagactttacagt

SEQ ID NO: 829405 - DNA, 120 bp, Artificial Sequence
  ENSG00000231605_4 (sequence is synthesized)
tgatgctgcaaccagttaaggcttttgggattgtcggaatggaatgaatgtattttgcatgtgagaagaacatgaagtgtgggggggccatgggcagaatattatggattgcatgatttt

SEQ ID NO: 829406 - DNA, 120 bp, Artificial Sequence
  ENSG00000231605_5 (sequence is synthesized)
gtctccccagaatacatatgttgaaattctaatccccaatgtgatggtattatgtggtgggaactttgggaggtaattaggttatgagggtggagacctcatgtaaaggattagtgccct

SEQ ID NO: 829407 - DNA, 120 bp, Artificial Sequence
  ENSG00000231605_6 (sequence is synthesized)
tataagaagaaacacaagagcttgcttcctctctctgctctccactatgtgaagatagaacaagaagatggccatctgcaaaccaggaagagagccctcatcagacactggatctgccag

SEQ ID NO: 829408 - DNA, 120 bp, Artificial Sequence
  ENSG00000231605_7 (sequence is synthesized)
aaaaaaaaaaaaaaaaaaagactaaggtgtaatccatctagcatatttccagtgacccaacaggggctacctgattatagtaactggctctgaattgctgcttctgctcaacttcctgga

SEQ ID NO: 829409 - DNA, 120 bp, Artificial Sequence
  ENSG00000231605_8 (sequence is synthesized)
tgtgagaaatacatatatgttttttaaagcacccagtctgtggcattttgttgtagcaacctgagctaaaacagttgctattgaactctgttcagagctccagatgtcctgtgctggcac

SEQ ID NO: 829410 - DNA, 120 bp, Artificial Sequence
  ENSG00000231605_9 (sequence is synthesized)
tgggcagggtgctctcctgggccatttcatcagctcagaggcctcaccttccaccatatgctgaagacctcaaatctacatcacagtgagacctcccctgaggtctaggctattaagttg

SEQ ID NO: 829411 - DNA, 120 bp, Artificial Sequence
  ENSG00000231605_10 (sequence is synthesized)
tacagactctgcagctggactgcctgggttctgccctggttccaccattaactagctggtatccatggacaaattggtatcttctcggtgcctcagctccctcttttctagaatgagggg

SEQ ID NO: 829412 - DNA, 120 bp, Artificial Sequence
  ENSG00000231605_11 (sequence is synthesized)
taatgacagtgtctccctcatagattggatgtgaggattagatgagtttaacagatgtaaagtacttacaacagttcctggcacataataagctcttactatatcaggaactagcttatt

SEQ ID NO: 829413 - DNA, 120 bp, Artificial Sequence
  ENSG00000231605_12 (sequence is synthesized)
ctgtgcttgttagtgttttaatttaattcttagagtagcccgatgaggctttgagagaacttgcccagttccagagcttaagctctcaactccgtgctgttttcttgtcttaaggcataa

SEQ ID NO: 829414 - DNA, 120 bp, Artificial Sequence
  ENSG00000231605_13 (sequence is synthesized)
acactgttgagccttggccgattcctggcagagccaggcgctccctcctccatgttgtcaccctactccaggcttgctcaccctactgtgggcttgtgcatcagctctccacagctgctt

SEQ ID NO: 829415 - DNA, 120 bp, Artificial Sequence
  ENSG00000231605_14 (sequence is synthesized)
ctcacctgtaaaaaatcaggcttcgtttgtctcattcttgccatagaatgccttgtccaattatatgcaagcttagtacatgttgttaaataaaagattcaataaacgaattcataaaca

SEQ ID NO: 829416 - DNA, 120 bp, Artificial Sequence
  ENSG00000231601_0 (sequence is synthesized)
gcaacaacagccagaaggacccacccacaggagcttaaactggagcagtggcatgaggtggacagcaggacaaggtgaagaaagttccagttttctgactggaggattgaaatggggagc

SEQ ID NO: 829417 - DNA, 120 bp, Artificial Sequence
  ENSG00000231601_1 (sequence is synthesized)
gtggaggaaaaggagctcagaacaccaggacatcgtggaggaaaaggagctcagaacaccaaatccatgaagctgtttatgaacgtctgggctcacctctgaactatgcatgcatagatc

SEQ ID NO: 829418 - DNA, 120 bp, Artificial Sequence
  ENSG00000231601_2 (sequence is synthesized)
tgacttgaaacatatgtacaattttcataagacttaaacaagacctcaaatactgtaccataatattcaaattgtccaacatacaatccaaaattacttaatataaggccaggcacagta

SEQ ID NO: 829419 - DNA, 120 bp, Artificial Sequence
  ENSG00000231609_0 (sequence is synthesized)
cgggcgccaccgagcagcccaaattgaaaccccgagaggctcgggactaaagctgaaggggcaggtagaggggccgcccggcggtcccagaccatcctagcaaatctggggcgagggaag

SEQ ID NO: 829420 - DNA, 120 bp, Artificial Sequence
  ENSG00000231609_1 (sequence is synthesized)
ggttgtcagttggccgattgggagcggcttcgggagcgaaggagctgcttttcggcgaggcccctcgggagtgaaggttcctcgaatcaagcgtaaactggggccccctctgggatggtg

SEQ ID NO: 829421 - DNA, 120 bp, Artificial Sequence
  ENSG00000231609_2 (sequence is synthesized)
taaacttattcagcttcaaatgcagcccagtatcctgccctaagttccagaggaccattttccacatgaaaagtcttacggatagacaaacttccattcaagccaatgtcaagttttcat

SEQ ID NO: 829422 - DNA, 120 bp, Artificial Sequence
  ENSG00000231609_3 (sequence is synthesized)
gtgtttaaggtatggatggatatggtaagaaatggagttgactactcttattctcctgcgccatgtggtccttgaagatgtagaaaacacgggaagccgagtaaagatcagagcaagctc

SEQ ID NO: 829423 - DNA, 120 bp, Artificial Sequence
  ENSG00000231609_4 (sequence is synthesized)
attagcattctgacaaaattggagtggtggagatgtatagtttgcctagtttgtcgttttgaaagctaccggtggttccccattatgatattgaacagaagtgatagtggactttcctgt

SEQ ID NO: 829424 - DNA, 120 bp, Artificial Sequence
  ENSG00000231609_5 (sequence is synthesized)
cttttaatctgtcacaaatggaaagctttcaatatttcacaattaagtatgtttgctataggctttttatatgtacattttagcacattaataaagtaataaagttcctttctatcccta

SEQ ID NO: 829425 - DNA, 120 bp, Artificial Sequence
  ENSG00000231609_6 (sequence is synthesized)
gtccgctgtgtgccggggttggccctccagtgccggggcgcgtgaccttgccccattcctccaccttaactcattcctccctccaccaggccctgtttcgcctgcagcctcagcacctga

SEQ ID NO: 829426 - DNA, 120 bp, Artificial Sequence
  ENSG00000231609_7 (sequence is synthesized)
cttcttcggccctggatgtcagacaaacaggacaaacaggaaacaaaattatttttcttcgtggagggcagagcagcactcccccgtcgcccagtatttggatccccagcgggaatgggg

SEQ ID NO: 829427 - DNA, 120 bp, Artificial Sequence
  ENSG00000231609_8 (sequence is synthesized)
agcaccaggccagtgggaggctgccccggccctcccgcgacctctggattgaactttccgcacacttctcggcccctcggcaggtggcccagcctcgacccgaccccactgcccactcac

SEQ ID NO: 829428 - DNA, 120 bp, Artificial Sequence
  ENSG00000231609_9 (sequence is synthesized)
tgcttctcctgcgcgtccaggtccctgacgagcgcatcgcgcttgttcaccagggccaccagctcatctagcagaagctgttcgcgtcgcttctgggcctcggtcttctgccagtctgca

SEQ ID NO: 829429 - DNA, 120 bp, Artificial Sequence
  ENSG00000231609_10 (sequence is synthesized)
cccttcccgccttttccagtttccttatatttctcagcaaaccacattatagagccactagctagtgttttctggggagtttggctgttgtggtgaaggcttcctcgctaaaagtctact

SEQ ID NO: 829430 - DNA, 120 bp, Artificial Sequence
  ENSG00000231609_11 (sequence is synthesized)
tcctaaacaggtcctgtgaatggagatggctgcagcagtgttggaacctgcttagaaccaggtgtgaactggtggctagcctgaggtgcgcacctgaatccagccaaagtgggggagggg

SEQ ID NO: 829431 - DNA, 120 bp, Artificial Sequence
  ENSG00000231609_12 (sequence is synthesized)
agctagaggcccagaagaggttggcccaggggttggtagtgggggaagtgggtaaatgaggaggcgggaaacagtgatgggcgataaaatcattctgaaaaggctagagaatctgcctga

SEQ ID NO: 829432 - DNA, 120 bp, Artificial Sequence
  ENSG00000231609_13 (sequence is synthesized)
gaacctatcctcctcccccacccccactctcaccccaaacagcccattcttcgctaatttcctcttcgctctattttagcagttggatgtatctcacactgggcgccatatgcttcacaa

SEQ ID NO: 829433 - DNA, 120 bp, Artificial Sequence
  ENSG00000231609_14 (sequence is synthesized)
taactttaaaagtagtgaatcggctaattagcatttttctttgaagtaaaaaataaatttgctctgcaatattacactgcagctctcgatcgcatcacagccagttttcttttggagacg

SEQ ID NO: 829434 - DNA, 120 bp, Artificial Sequence
  ENSG00000231609_15 (sequence is synthesized)
tttgctgggtggtttcaaatcaaagcacttttgcaaaggaaaaattacatatttctttctgaaaccctatgttaaaggttggaaaacccgatgggcagtgctctttccatggatgggggg

SEQ ID NO: 829435 - DNA, 120 bp, Artificial Sequence
  ENSG00000231609_16 (sequence is synthesized)
cgttttttttttttttttttgaaggttttagaccccaataatatatttcctaatctttgctggtctgatgatttccttaagatgagcagcagtttcatttaatagaaacaggaccaaatc

SEQ ID NO: 829436 - DNA, 120 bp, Artificial Sequence
  ENSG00000231609_17 (sequence is synthesized)
gaacatttaaaacacttttgaaaccaaagccaactgctctctggccagactgtaagggcttgtagctgtcaatcaacccccagtctaccccgcctccctcattaggaaggtaaacaatga

SEQ ID NO: 829437 - DNA, 120 bp, Artificial Sequence
  ENSG00000231609_18 (sequence is synthesized)
cctccctcattaggaaggtaaacaatgaaaagaagaagtagatgatgaggcagatagcagaacaaatgaggacctagagggaaacaggacaccagcttaaaaaaaaaaaaaaaaaaaaaa

SEQ ID NO: 829438 - DNA, 120 bp, Artificial Sequence
  ENSG00000231609_19 (sequence is synthesized)
gcaaataccgacttcatttacttaaaataacttttcaataacttaaaagaaatgctcatcatgaaggaattctaccgtagcaagtttttatcattttgaaagactggcaactggaggtgg

SEQ ID NO: 829439 - DNA, 120 bp, Artificial Sequence
  ENSG00000231609_20 (sequence is synthesized)
ctgcatacttggaacgaaatttgtttgtgtgcacatacatacgatctacgctgaagtataaatgctagtggacttttttctctaagtttctggacttgttgaacaagctttctttgtttg

SEQ ID NO: 829440 - DNA, 120 bp, Artificial Sequence
  ENSG00000231609_21 (sequence is synthesized)
gacacccctgtgggggaatgaaggaaactagcatagaatcgctttttttttttttctgtagcctagaacttcttgttaaaagttctctttccctcatttcatacacacatacctgcatac

SEQ ID NO: 829441 - DNA, 120 bp, Artificial Sequence
  ENSG00000231609_22 (sequence is synthesized)
tcacttcagtacctacagacttgccggttatcagaagacacgactctccctaatacgacttcaaaactctaacaattcaaagtaatgacgtggaaaattcaagatataaatattggtttt

SEQ ID NO: 829442 - DNA, 120 bp, Artificial Sequence
  ENSG00000231609_23 (sequence is synthesized)
tcattggtgtggaatcacaaatttcctcaaatctttagcagagatgaccctttacaaaagacatgatagtttatactgcttaagaatatgactaattacttttcaattcgcattcgtgtg

SEQ ID NO: 829443 - DNA, 120 bp, Artificial Sequence
  ENSG00000231609_24 (sequence is synthesized)
acctgggtccggcgcagcgaggtgggacggcagtgcgctctggaatgtgccagcgcggtccccggggtacgcctcgcgggaggccggcgctctcggttccagatgctgccaccattctcg

SEQ ID NO: 829444 - DNA, 120 bp, Artificial Sequence
  ENSG00000231609_25 (sequence is synthesized)
agggcttgtttctggctatgttaaaggaccatcctctgaggaaagcagaggagaggaactccattatccttacagtgaaacgcaaccactgcagaaaaactccactgagttcgctccaaa

SEQ ID NO: 829445 - DNA, 120 bp, Artificial Sequence
  ENSG00000177738_0 (sequence is synthesized)
tactccgaagccctcagatcggcgacctgggcgctgtaggcaccgagaaaatacaggcaccgagccagaagcagtgccgcaaccaagagacctcggcttggcgaaatggcggcgtctgga

SEQ ID NO: 829446 - DNA, 120 bp, Artificial Sequence
  ENSG00000177738_1 (sequence is synthesized)
gcctgcgagtgacgccagctggtggggctgtcaaggagaacattcgttacggcgcaaccaacggtactgtcaccaagaaaccgtcgtctctgagaaaaaaagagacgttcggccgccgag

SEQ ID NO: 829447 - DNA, 120 bp, Artificial Sequence
  ENSG00000177738_2 (sequence is synthesized)
aaactccgtacaagtgctgtgacagaaaaaccgccggctccgcgcagcggcaaaagagccaacgggaacgccgggtgctgcgaccatgaccccggcactggaggacgtgggatggagaat

SEQ ID NO: 829448 - DNA, 120 bp, Artificial Sequence
  ENSG00000177738_3 (sequence is synthesized)
gggacacacggagcgagaagggaaacgtttcgtgcagaccaactagcgccgccgccaccggaaaactgactcgccagtgctgccaatgaagtgcgtgtgagaaaccgatgactggtggga

SEQ ID NO: 829449 - DNA, 120 bp, Artificial Sequence
  ENSG00000177738_4 (sequence is synthesized)
ggagcagcgctgggcgctggacccgcgagtgtgagaatctggcggcgctaggacccttcaggcgcgggcacgaggcgaaacccagcgctgttgccaaagacaaatgcgcgttcttttggg

SEQ ID NO: 829450 - DNA, 120 bp, Artificial Sequence
  ENSG00000177738_5 (sequence is synthesized)
cgccatcagcggtgcagccagtgatcactcccaggctctgagaaactagagatgtcagccacaaaccctccgttcagggaaagtttgcggcgccgtgacggatcgactggcactgggtgc

SEQ ID NO: 829451 - DNA, 120 bp, Artificial Sequence
  ENSG00000177738_6 (sequence is synthesized)
aacattgtcttgtggcctagagactagaatataaaaacaaaaaccaaatacaaaactgctgctggcattactcctactctcccccctcaagtcagtggcttcaggcttaagaaaacctgt

SEQ ID NO: 829452 - DNA, 120 bp, Artificial Sequence
  ENSG00000177738_7 (sequence is synthesized)
ggctcgtcctgggagagagctaaagcttatgctggtcgcaaacagcattacattgcaggaaactgctcttccaatggccgtggctgggtccttccacaccatccctctgccctagacctt

SEQ ID NO: 829453 - DNA, 120 bp, Artificial Sequence
  ENSG00000177738_8 (sequence is synthesized)
tgtccccgttcagagccatcagagattctaggagagctgtcgacaaccgcatctcttcggaacttggaaactctaggttcaagatctccgtggagaatgaaaggcacagtcgcctgaccc

SEQ ID NO: 829454 - DNA, 120 bp, Artificial Sequence
  ENSG00000177738_9 (sequence is synthesized)
gggcatcaggcttgccccgcacatcaagtccctcccctactggatggaactctgtggcaatcgctccttattctgatggttcactctgtcagatatcctcgatatttggggatagtagtt

SEQ ID NO: 829455 - DNA, 120 bp, Artificial Sequence
  ENSG00000177738_10 (sequence is synthesized)
caaaaacagccggggaggaaaatgggctgaaagattccagcgttggatgtagaattgacagcgagacatacacctcctctctaagcccagagaaaagctcaagttgtggttctctgtctc

SEQ ID NO: 829456 - DNA, 120 bp, Artificial Sequence
  ENSG00000177738_11 (sequence is synthesized)
tagcagcatgatcttcaaaatgcatcattgatttctatcttctgggaaatgcaatgcaggtgaacttcttttcatcttagcaaaaaagttgcaatcagcaccccctagacggaaggaata

SEQ ID NO: 829457 - DNA, 120 bp, Artificial Sequence
  ENSG00000177738_12 (sequence is synthesized)
tcctgtcttaatgggagtccataggaggctgcaggctgctcccctacagagactaacatcaaggaggaaatcagtggtgcttcaggatattgtgaatttggtcttctgaaagcagaattc

SEQ ID NO: 829458 - DNA, 120 bp, Artificial Sequence
  ENSG00000177738_13 (sequence is synthesized)
tgatttaacagtataatggaattcgtgaacgtcatgatgctaatttgaaccaacaagcacccttgtgagaggaatctgcttttcctcaagtctgaagaacaccaggagaatctttctgta

SEQ ID NO: 829459 - DNA, 120 bp, Artificial Sequence
  ENSG00000177738_14 (sequence is synthesized)
tggagttaccaggaatcctctgctaaggaaagtgaaagggaagatgcaatttctcctgggaaggggggatgctgatgtagagggtgacaagtaatatgccatgaaggattcagtcacctg

SEQ ID NO: 829460 - DNA, 120 bp, Artificial Sequence
  ENSG00000177738_15 (sequence is synthesized)
gttagatttagagttagagttatggttaaggaagaaggaaggaaaaaaggcagaagaggaagaaaggaagcaagaaaagataaaatttattctaagataaaatttgtgaattttgctaaa

SEQ ID NO: 829461 - DNA, 120 bp, Artificial Sequence
  ENSG00000177738_16 (sequence is synthesized)
tgagtaagactggatttagaattgtctgggggctttcaaaagagccattcagtaaataagaaagaatacaggcctgcagcaccagagtctgagctgggggcataggtttgtgtgaatttg

SEQ ID NO: 829462 - DNA, 72 bp, Artificial Sequence
  ENSG00000177738_17 (sequence is synthesized)
tgaggactgcttgagctcaggagtctgagaccaccctgggcaacatggggagaccccatctctacaaaaaaa

SEQ ID NO: 829463 - DNA, 120 bp, Artificial Sequence
  ENSG00000177738_18 (sequence is synthesized)
ttgctgccagctactgtggaggctgaggtgagaggattgtttaagtccaggatgttgagactgcagtgagccctgtttgtggcactgcactcctgcctggtccacagagggagactctgt

SEQ ID NO: 829464 - DNA, 120 bp, Artificial Sequence
  ENSG00000177738_19 (sequence is synthesized)
ctgaaggtggggaaagaaaagatttgtatgaatttggtgctgctttgtatttcaaaataggaaagtggatatacgaatatatggcataaaaggtccagatactggaccccagtgaactca

SEQ ID NO: 829465 - DNA, 120 bp, Artificial Sequence
  ENSG00000177738_20 (sequence is synthesized)
attgttttcaaggtctgactttaaccttgctaggctgaagaatctggaatggctcagatgtttctagttcagctgtaacttttgcctcctttagagtaaagctgtgggggacttgagtat

SEQ ID NO: 829466 - DNA, 120 bp, Artificial Sequence
  ENSG00000177738_21 (sequence is synthesized)
actcagagtggatctgagaggtatctgcttccagaatgaattagaattcctggatttgaatcataatcagatggctgttaaggggttattgaagacatatggctcttaagttcacaatat

SEQ ID NO: 829467 - DNA, 120 bp, Artificial Sequence
  ENSG00000177738_22 (sequence is synthesized)
tgaattcaggtgaatattataaatatttgtaagttggattatattattgaagcacttggtaaaaattgccatgcagggataaatgtaggaaggggattgcagagtctgatatctaaaaaa

SEQ ID NO: 829468 - DNA, 120 bp, Artificial Sequence
  ENSG00000177738_23 (sequence is synthesized)
taagtggagcagcatttggaaaccccgttcacattttcaatctcttttctctcattagaacctaactgctatcctctaatccctacttttgaaaaaatgtatttaaggctgggcgtggtg

SEQ ID NO: 829469 - DNA, 120 bp, Artificial Sequence
  ENSG00000177738_24 (sequence is synthesized)
gactccgtctcagaaaaaaaaaaaaagaaaaaatgtatttaaaaactcagcaaacattaatggagatattccaagagccaggctcctggttccaagaccccactcagaggactaagctca

SEQ ID NO: 829470 - DNA, 120 bp, Artificial Sequence
  ENSG00000177738_25 (sequence is synthesized)
cagaggactaagctcaaatctaataagatgtgtaggcttggggccagtggggcgaggggatatccacaggagggccaatcgaacaaggcctcagactcatgagcctcaaatgtagatgtt

SEQ ID NO: 829471 - DNA, 120 bp, Artificial Sequence
  ENSG00000177738_26 (sequence is synthesized)
agatttttcctccaattgagattatacatacagccacagagcttcatggatgcaaatgaaaatggtcatgtctcaacttttaaactgtgctcaattagaggaactcattgcctatggcat

SEQ ID NO: 829472 - DNA, 120 bp, Artificial Sequence
  ENSG00000177738_27 (sequence is synthesized)
gcagtggaagacggttggcgacccggatggcttttgttaccagggccagcccaatccgcccgattctcggtccctatactgcctccttttcccatgcgcatcgcaagggatcggttgatg

SEQ ID NO: 829473 - DNA, 120 bp, Artificial Sequence
  ENSG00000177738_28 (sequence is synthesized)
gggccctcagtatgacttcgctaggaaaaataaagtgcagctcgtttctcagagccggcggatgttcatgggcagcaccatcgagccagaagcagtatttgtcctggaggaaatcagtgg

SEQ ID NO: 829474 - DNA, 120 bp, Artificial Sequence
  ENSG00000177738_29 (sequence is synthesized)
ttcgctaggaaaaataaaggtcttcttaggcgggaggggactgatttgaggacggagggtgggagtagtgccagcagcactttgtcgtagtggcactgggtgggcagttatcagttgcag

SEQ ID NO: 829475 - DNA, 120 bp, Artificial Sequence
  ENSG00000237604_0 (sequence is synthesized)
acaggcgtgagccaccatgcccagccggcattttcatctggactctgccatggggctcagcaaatcagatgtgacctggtgacaggtgccaagaaggtctggcgaccacaggtttcttgt

SEQ ID NO: 829476 - DNA, 120 bp, Artificial Sequence
  ENSG00000237604_1 (sequence is synthesized)
gtacaaaccaagggcagccctgaagcccaggaccatgaggcctggaaggccccaggacaggtgatttgtggccctggtgtctcaggtcaggagcagggcagagccaccttcctccctccc

SEQ ID NO: 829477 - DNA, 120 bp, Artificial Sequence
  ENSG00000237604_2 (sequence is synthesized)
tgtgcggggctgcatgagctcagggacctttggacctgagaaaggtcaggctcacttcctccccgtgcctgcggttggccgcagggggaatattctcctgacccgagtcccgaagccctg

SEQ ID NO: 829478 - DNA, 120 bp, Artificial Sequence
  ENSG00000237604_3 (sequence is synthesized)
ggcgtggagtttccctggactgggagaaagtaaacaccgagggacttgccaagaggaaatggagaagcccaggtgttctgggcggagctgagtgtcccgcagggggttccgcagctcctc

SEQ ID NO: 829479 - DNA, 120 bp, Artificial Sequence
  ENSG00000237605_0 (sequence is synthesized)
gtgcctcccatctcctagctcgggaccccgcgcggggagaggcgccagttgggggtccggtcggccacgccacctacgccgggacggctgcctccgcggcgcgacgctcccacggactta

SEQ ID NO: 829480 - DNA, 120 bp, Artificial Sequence
  ENSG00000237605_1 (sequence is synthesized)
gctgggatgcagaatagaagctgggcctttgtctgactaccctgcaacagtcagccacagacgggaaggcagcgcaggaaactgaggccaaaggagccgcgcttcctcatgagcatgaag

SEQ ID NO: 829481 - DNA, 120 bp, Artificial Sequence
  ENSG00000237605_2 (sequence is synthesized)
cggcaaagcctgaactagaagcttctaacgcctaaccgtcctcttgccgcaccaggacctacctctgcaaggcccttcctgactttttccttagaatgtgtgtatatgtgtctttttcct

SEQ ID NO: 829482 - DNA, 120 bp, Artificial Sequence
  ENSG00000237605_3 (sequence is synthesized)
aacacccgaatacaagtgttttcttgagtgtggcatctggtcagatgttttatgggttggtttgtttttaaaaaaaaaaaatttcctgttagatgggtggtaagaaccagtcagagtttg

SEQ ID NO: 829483 - DNA, 120 bp, Artificial Sequence
  ENSG00000237605_4 (sequence is synthesized)
taaacccaccaagcacgaggcggtcggaccgtccagattctggagtccagaagacaccaaacgttctcagaatgccgaacgcgggcgccacctggtgggactagaacgcttattgtccca

SEQ ID NO: 829484 - DNA, 120 bp, Artificial Sequence
  ENSG00000237605_5 (sequence is synthesized)
aatcagcatagcacacagttcccataaatcttaaaaattcccatccaaggctcatttccgtgtgactaaaagtcatattctctgttctcgtgactccaagtaaaaatgtccctaaagagc

SEQ ID NO: 829485 - DNA, 120 bp, Artificial Sequence
  ENSG00000237605_6 (sequence is synthesized)
caaagtatcttcactgtataaactaataatctattggtttggggaattttattttttgtgatcaatgttactttagcctttctatgatatacatataaataaaaaagttttcttccatga

SEQ ID NO: 829486 - DNA, 120 bp, Artificial Sequence
  ENSG00000237605_7 (sequence is synthesized)
ggagaggcgccagttgggggtccggtcggccacgccacctacgccgggacggctgcctccgcggcgcgacgctcccacgggctttcccaccgcggggacggccctccgggggttgactta

SEQ ID NO: 829487 - DNA, 120 bp, Artificial Sequence
  ENSG00000237609_0 (sequence is synthesized)
aaacagaaacggagtcatcagattgctcacagtggccaaatcttgccctaaagtcaaagctctgaagcactgcactaaagagctcttggaacacccgtggattcccaaggaaaggaatgg

SEQ ID NO: 829488 - DNA, 120 bp, Artificial Sequence
  ENSG00000237609_1 (sequence is synthesized)
gttttgactttagggatggaagtccttccaggcatgccaagagggaaggaaacatggcaggtgcactggctttgaagttgccgtggtggttgcaatcctgcatctgtctgttcctgatgg

SEQ ID NO: 829489 - DNA, 120 bp, Artificial Sequence
  ENSG00000261346_0 (sequence is synthesized)
gttcattcccaataaatgtgtcatcctgcaggtctgccttcaggtcaagaaagcccccagcccagtccttggctcctactgcccccacgactgcatggccctgcccagggaaggagatga

SEQ ID NO: 829490 - DNA, 120 bp, Artificial Sequence
  ENSG00000261346_1 (sequence is synthesized)
gcgggtcagctacccaccgacccaccccccagagccaactgcactccctgcagcccattgctccagcccagcacgcaccctgctgaggtcagcactgatgccgctggaggacagctccat

SEQ ID NO: 829491 - DNA, 120 bp, Artificial Sequence
  ENSG00000261346_2 (sequence is synthesized)
ttctgaaattcatctggctgcaagctcatcgaaccatcaaacagaaataccaggtctacgttgcccttgatacattctgcagaagccagacgcaagggacccagtgaagcatctctggtg

SEQ ID NO: 829492 - DNA, 120 bp, Artificial Sequence
  ENSG00000261346_3 (sequence is synthesized)
agaagccagacgcaagggacccagtgaagcatctctggtgtttgacctgcccatgctggttctctctagggacagccatttggagggacaggattgaccaggctggtcttgaactcctgg

SEQ ID NO: 829493 - DNA, 120 bp, Artificial Sequence
  ENSG00000261346_4 (sequence is synthesized)
gattacagatgtgagccaccagcccggcctcatcaactttgtatctcactccccttcccctgtcagaacctcgcccaatgcctggctataatagtagctaaataaacaagctctacttaa

SEQ ID NO: 829494 - DNA, 120 bp, Artificial Sequence
  ENSG00000226676_0 (sequence is synthesized)
tcttgccattggactgtctagcccttgatgctgttatatcatggcttgttgatacagaagatgctacatgaactcaagtggaactctgactgccttgagagcatcccaccatccattgct

SEQ ID NO: 829495 - DNA, 120 bp, Artificial Sequence
  ENSG00000226676_1 (sequence is synthesized)
gctgcatcaaggtattaaaaagagagacagaaggaagaggtgagagaagcacaagtttaacagtgtgagggcattttgcttaataataagacatttcattaaaatattagctacttttgt

SEQ ID NO: 829496 - DNA, 120 bp, Artificial Sequence
  ENSG00000226676_2 (sequence is synthesized)
tttgcagctgacttcaatccaaagctgaatgtggatgttggcacctgctgctccctctctccagacatctccctgtatctttgcttatttggtttcatatttattgaccatcaaccaccc

SEQ ID NO: 829497 - DNA, 120 bp, Artificial Sequence
  ENSG00000226676_3 (sequence is synthesized)
cccatccctgtagaacgagaagctcatgagaacaggggtcttgttctctagcttttgtttctccaccgagaagagtgcctggaaacagagtcaatgctcaataaacatttatggaacaaa

SEQ ID NO: 829498 - DNA, 120 bp, Artificial Sequence
  ENSG00000273466_0 (sequence is synthesized)
tccagcatctgaagctggctccagaaagtttcactgtgcctctctactctgtccatccagaccagctttcctgcccctagacccttgagccactattcataactcctctgcccttgtctg

SEQ ID NO: 829499 - DNA, 120 bp, Artificial Sequence
  ENSG00000273466_1 (sequence is synthesized)
ctctaaggagtttctgaactccttcatctctccttagctaccttgtcttttttcttgggacttacctgccagtccatcaggcctgaacctatccatcccacttccctccccatccctcca

SEQ ID NO: 829500 - DNA, 120 bp, Artificial Sequence
  ENSG00000273466_2 (sequence is synthesized)
ttttggtcctgaccagcctccttgatgaggcgcttggccttggtttcagagaaagatgatatctcgtagaagtggtagtgctcctttgaatgtgtgaagctgcggaatgagacagacttc

SEQ ID NO: 829501 - DNA, 120 bp, Artificial Sequence
  ENSG00000273466_3 (sequence is synthesized)
ggcttggatttctggagaaggtggaaaagaagatggaattgaaccctcagcagtctgagagagaagaagataatggccatccaacctaaacctctgcccactgcctccccactgtattct

SEQ ID NO: 829502 - DNA, 120 bp, Artificial Sequence
  ENSG00000273466_4 (sequence is synthesized)
ccctcctgcctcacctgccgggacaagagaagggactcaggcttggaaataggagcctgggccacaatctgacaacagatagacggacaaaacagcgggcacgtcacaacctgggggtgg

SEQ ID NO: 829503 - DNA, 120 bp, Artificial Sequence
  ENSG00000273466_5 (sequence is synthesized)
gaatgggaataaaggcggtctgcatgtactgctgggatcagtgtcaacctctgggcttgtgtttgctctatgttatatcctgggtgacaggttttaaatttattattatatttaaacaga

SEQ ID NO: 829504 - DNA, 120 bp, Artificial Sequence
  ENSG00000259828_0 (sequence is synthesized)
tatgagaactgtaaatatctgcagacattttctctttcctattctaaaacttactaaaattttagatacaggaattctctgttgaaaaaaatatatatatgtatagatagatacacacgt

SEQ ID NO: 829505 - DNA, 120 bp, Artificial Sequence
  ENSG00000259828_1 (sequence is synthesized)
acgaaatgtgagaaaaaatatatatatatattcctttgatggtctttaatatttagtttaaaaactttaaggaaatcataaaacttttaaatttcaactctctctaagattatatgggca

SEQ ID NO: 829506 - DNA, 120 bp, Artificial Sequence
  ENSG00000259828_2 (sequence is synthesized)
tatgggcagttaagtttaaatatagagcatatatttcttcagttaaaaggaagtgtgtatttactgctgttcaattagaaaaagcaattaacacctgcctaatcataagctacactgttt

SEQ ID NO: 829507 - DNA, 120 bp, Artificial Sequence
  ENSG00000259828_3 (sequence is synthesized)
tttatgtttagattttcaaaatagagcttgcccataaggacatctacctactggggaacatagaattattttgaaaagtttgttaagaattggctgattacttgacctaaggatttaatt

SEQ ID NO: 829508 - DNA, 120 bp, Artificial Sequence
  ENSG00000259828_4 (sequence is synthesized)
cagcatgaatacacaaaagaaagaaaatgtatatttgcttgtgttcaagtctgaaattaagctttggtctacggttaaattaatacagccctgagaacaccttgtcttaacttcctaaaa

SEQ ID NO: 829509 - DNA, 120 bp, Artificial Sequence
  ENSG00000259828_5 (sequence is synthesized)
attaattttgagaaatagatttaatagtaccaaggtacattgttgttataatgaagaaggcgagaatagtttttattaccttaattgacgcgcttttataaaacgtcatttgcatctgga

SEQ ID NO: 829510 - DNA, 120 bp, Artificial Sequence
  ENSG00000259828_6 (sequence is synthesized)
ttctaaagggaacgtgaattatttttgcacgattatgatttggagtaatattgaaatattaaaaaaattcatccttttattcttaattgaattccaatgcagtaacttcaaaacaatgga

SEQ ID NO: 829511 - DNA, 120 bp, Artificial Sequence
  ENSG00000259828_7 (sequence is synthesized)
aatagcatgaggccagaaaggggaaagggagtagttgacactttgcataccaccagtaacatggaataggagggatgctacaattataggatgctactaaatatgaaaatttattcatta

SEQ ID NO: 829512 - DNA, 120 bp, Artificial Sequence
  ENSG00000259828_8 (sequence is synthesized)
attcagcatttgtacactgagcatctactatgtgtcagctatcaagtatgtaatgatgagcgaagaaaaaaaaacaaaaaacaataatcaacccaaaaagtaatactgtcatgtagatta

SEQ ID NO: 829513 - DNA, 120 bp, Artificial Sequence
  ENSG00000259828_9 (sequence is synthesized)
tagcattaagattatccaaaacttaaacattctacaaatagatgtgaaattaattacaagtgttaaagtgttattactgctacaaaagaaaggtaatgttttgcaagatcatagaatagt

SEQ ID NO: 829514 - DNA, 120 bp, Artificial Sequence
  ENSG00000259828_10 (sequence is synthesized)
caacttaaccttgtagaaagatcaaggaagtcttcccaaggaattaaatgatactttcattatctttgctttacctgtgaagagctgaagtacagttaaataacttgctaaagttttcac

SEQ ID NO: 829515 - DNA, 120 bp, Artificial Sequence
  ENSG00000259828_11 (sequence is synthesized)
aactgctaagtgataaagacaggactgggatccatgcactggtgccagagcctacaatattaacccctctaatatactgtccgccactgaattccttactataatgtcaagagtttatta

SEQ ID NO: 829516 - DNA, 120 bp, Artificial Sequence
  ENSG00000259828_12 (sequence is synthesized)
ggcaagcttcatcaggttgactaagcaatggtcatcaagggaacagtaaagagaggttaggagagaggaataattagaattataataactcaaatatgcagcaacctcacgaattaggaa

SEQ ID NO: 829517 - DNA, 120 bp, Artificial Sequence
  ENSG00000259828_13 (sequence is synthesized)
aggaaaagaaaaagaaaaataaataaatgtataactagccttgaatctagtttatggaaataagtagttttcatctaacagtctgcataggaaactacataagctcaattcacagaatga

SEQ ID NO: 829518 - DNA, 120 bp, Artificial Sequence
  ENSG00000259828_14 (sequence is synthesized)
agataaatgattattaaaaataatcctcatctatgacagaatactttgtgcccactcccaatcatatcatttaaagctaaattaccaaaagcatgtcatttgtctttgaatttcaggttt

SEQ ID NO: 829519 - DNA, 120 bp, Artificial Sequence
  ENSG00000259828_15 (sequence is synthesized)
attaactgtataatggcaattgaattacctttcctggaattaaaggtaaacagtcttttccccacattattctgaaattgattttgctttgaagataacatgtacacttacattgtgttt

SEQ ID NO: 829520 - DNA, 120 bp, Artificial Sequence
  ENSG00000259828_16 (sequence is synthesized)
ttaaaataatgttttcattcattaattcaatgaatacttagaaaattctattgaagatactggacaaaattaagagaggcataattttggagcttacattctataggaggagaaagaaaa

SEQ ID NO: 829521 - DNA, 120 bp, Artificial Sequence
  ENSG00000259828_17 (sequence is synthesized)
ttaacaagtagaccaagccatgtataaatacaatttatgtttataattgaatatggaacatgcagaagccattctcaaatggataactctagtctgggtggaaatcaaacatttcttgcc

SEQ ID NO: 829522 - DNA, 120 bp, Artificial Sequence
  ENSG00000259828_18 (sequence is synthesized)
caatgtaccaatgagactgtaccataataatgtgtaaatattcctaatataaataatagtataagtaatatttgcttcagtgcttcaatttcttaatcaaatacactaaagaataattgt

SEQ ID NO: 829523 - DNA, 120 bp, Artificial Sequence
  ENSG00000259828_19 (sequence is synthesized)
ggatctttaatttctacattttacatttactttgctgaataattattatatttataatattaccaatatttaataacctactctactgtagtagggcttctacggtaggaaagctaagat

SEQ ID NO: 829524 - DNA, 120 bp, Artificial Sequence
  ENSG00000259828_20 (sequence is synthesized)
tgtaaatcctattataaagttttgtttttcccttaagcaaaacaactcctattttttttgtgtaaactcatttttctacaataattggatgttttaaagagacatagttattcttctggt

SEQ ID NO: 829525 - DNA, 120 bp, Artificial Sequence
  ENSG00000259828_21 (sequence is synthesized)
attttctattttattttttcactgcaaattcatcacctcattctgttgactggatcaaatttattattaatgtatcacctgggctgtcagtaatttttaacatgtcaatattttccagta

SEQ ID NO: 829526 - DNA, 120 bp, Artificial Sequence
  ENSG00000259828_22 (sequence is synthesized)
tttctagtaagtatgctttaccagaaacatacatattttatagtttttctttgcttcttaaattttcctttatttattttcagaagtctttgtctttcttttcactgagaaagtcaacca

SEQ ID NO: 829527 - DNA, 120 bp, Artificial Sequence
  ENSG00000259828_23 (sequence is synthesized)
tggtttatgggtcagcttaattttttacttaaaggaggtctttcctaattacctaatttaaattgatatccactcagattgttctgttttattgtatcctaatgttttccttcatctgtc

SEQ ID NO: 829528 - DNA, 120 bp, Artificial Sequence
  ENSG00000259828_24 (sequence is synthesized)
acatttcaaaagtattgcttatgtaagtcctcaaaagtattgcttatgtaagtgttttagcatacacttttcctaccacttggagtctcatggtcccagtgactacgtgggttttgttca

SEQ ID NO: 829529 - DNA, 120 bp, Artificial Sequence
  ENSG00000259828_25 (sequence is synthesized)
ctgatacatgcccagtttttagcacagtgccttgtacagagtatgaaatatttttcctgtaaagaaatgagtgttggatgttacagtctgtgataataaggaaaatcctgcccttcattt

SEQ ID NO: 829530 - DNA, 120 bp, Artificial Sequence
  ENSG00000259828_26 (sequence is synthesized)
gttactttctcttgcataagaaatacttcactattatttaccttaattcttatctcaattctaatatgcatgctggtttgtgccattgctaagctcttttaattgcaaaagacaagaata

SEQ ID NO: 829531 - DNA, 120 bp, Artificial Sequence
  ENSG00000259828_27 (sequence is synthesized)
tttgtttttaacagagtaatttgttatgattccacatcctccaacagtgtcatggtacaaacataaaatataatagagaacaatgaccaacttttatctccttattctagtttttatctc

SEQ ID NO: 829532 - DNA, 120 bp, Artificial Sequence
  ENSG00000259828_28 (sequence is synthesized)
cttgtgaattaattttagaactcaaaacttagataaaagtatctatggagatttcttccttttcattttactttacctaattttattggcttgaaagacctcattgtgcttaattaatat

SEQ ID NO: 829533 - DNA, 120 bp, Artificial Sequence
  ENSG00000259828_29 (sequence is synthesized)
cagtgatcaaatctattatgttcactttcactatgtaggtctttaaggggtaccaaccactcaaatagtcaaaaagtccatgtataacttttgactaacccaaagagttaactactaata

SEQ ID NO: 829534 - DNA, 120 bp, Artificial Sequence
  ENSG00000259828_30 (sequence is synthesized)
gcctattattgactggaagccttaccaataacataaacagtcaattaacacatattttctatgtgatatgtattagatacagtattcttacaataaaataaactagagaaaggaacatat

SEQ ID NO: 829535 - DNA, 120 bp, Artificial Sequence
  ENSG00000259828_31 (sequence is synthesized)
tattaagaaaatcatatgaaagagaaaatatgtttactattaagtggaagtggatcattacaaaagtcttcatctttgtcatcattttgagttggctgaggaggagaggaagaggaagga

SEQ ID NO: 829536 - DNA, 120 bp, Artificial Sequence
  ENSG00000259828_32 (sequence is synthesized)
ttggttttgctgtcccaggggtggcagagggggaaggaaatctgcatatgaatgcattcatgccattcaaacctatgttgttcaagagaccactgtaaattaaaaaggcatcagattttt

SEQ ID NO: 829537 - DNA, 120 bp, Artificial Sequence
  ENSG00000236601_0 (sequence is synthesized)
tacggcagctttagggaggtgctctgagacccgaaactagactcgactttaacagacacagacgaccctgaagatggaaacgttttcttccaaattgtgctgcacgtttttggcgagagc

SEQ ID NO: 829538 - DNA, 120 bp, Artificial Sequence
  ENSG00000236601_1 (sequence is synthesized)
atggggctgtgcggcgtcccctccctggcgcccacctgtgccctgcacactggcctgcactgtggtgatctcgcttggcccccacctgattcccgacatacagcagaggaaccttaggct

SEQ ID NO: 829539 - DNA, 120 bp, Artificial Sequence
  ENSG00000236601_2 (sequence is synthesized)
aacagcctcaactgattctgtccctgaacttccgtacacagccctggagtcgtcttagagccatgatttatttaactgttctttcattttacagaacataaaatgtattgtttccaactt

SEQ ID NO: 829540 - DNA, 120 bp, Artificial Sequence
  ENSG00000236601_3 (sequence is synthesized)
ttttcctatggtaaataatactaaagtaaatatctctgtgcatgaatctttttgtatatgttggaatatccttaagataaggccccagaactaaaagtaccctgtcaaaaggtgagcatt

SEQ ID NO: 829541 - DNA, 120 bp, Artificial Sequence
  ENSG00000236601_4 (sequence is synthesized)
tccggttcccctgctgtgctttgctgcgttgttctctcctgctgcaacgttctcactccacaatcctggggcagggaggggaggcccagctgagtttggatcataatcctgaaagacaca

SEQ ID NO: 829542 - DNA, 120 bp, Artificial Sequence
  ENSG00000236601_5 (sequence is synthesized)
gaggtgctctgagacccgaaactagactcgactttaacagacacagacgaccctgaaggcgagactgtctgctggtgggatgctggatggaaacgttttcttccaaattgtgctgcacgt

SEQ ID NO: 829543 - DNA, 120 bp, Artificial Sequence
  ENSG00000236601_6 (sequence is synthesized)
cacacacagatacggattcaaagagacatgcacactctgagtttctgagagtaagccactgtcagttcctggggtgagccaccagccacatggacacaatttcctctttttgatggaaac

SEQ ID NO: 829544 - DNA, 120 bp, Artificial Sequence
  ENSG00000236601_7 (sequence is synthesized)
aattagtaaccgtagcgatatacgtgtacacgtttctcttttgacttatttctttatggtctgtcttcttataactgctacacccatgccgccgtcgttagttacctcagtgtttatgca

SEQ ID NO: 829545 - DNA, 120 bp, Artificial Sequence
  ENSG00000236601_8 (sequence is synthesized)
aaaatacctgttatcattgcctattttattgtgtaaagtggcctatgaaatgttctgttgtgtttttatgtttctcaaatacataccttttaaaaatgtaaataaataacatcgacatta

SEQ ID NO: 829546 - DNA, 120 bp, Artificial Sequence
  ENSG00000248202_0 (sequence is synthesized)
ataatgtgcttaaactgtggactgcaaggatcctgggcgattttctagtcctgactccatatgacagatggacacaaagagccagaaaggattttaaaacaatctatcacctatctttga

SEQ ID NO: 829547 - DNA, 120 bp, Artificial Sequence
  ENSG00000248202_1 (sequence is synthesized)
ccatatggactaaaattgatatccaccaatagacactgatgcctgcaagtcaacagcataaagagtggtaaagtcagtgctgcaaaagatgaaatgtttttaatgtgctctggaggctaa

SEQ ID NO: 829548 - DNA, 120 bp, Artificial Sequence
  ENSG00000248202_2 (sequence is synthesized)
ccatccaagaccaagatgtcagcaggattggttcctgagggccttgaggaagaatctgttccaggactttccctttggcttgccattggccatattctctctgtgtcttctcacgtcttc

SEQ ID NO: 829549 - DNA, 120 bp, Artificial Sequence
  ENSG00000248202_3 (sequence is synthesized)
cctctgtatttgtttccaaatttcctcttcttataaggacagtagtcatattggaaaaaggaacaccctaataacctaattttaacttgattacctctttaaagaccttatctccaaata

SEQ ID NO: 829550 - DNA, 120 bp, Artificial Sequence
  ENSG00000248202_4 (sequence is synthesized)
ccatcacattctgaactattaaagattaatgcgtcaatatatgaattttgtgaggggcagggagacagaatacaaccaacccacaacacccagatacatagcgaaatcttcttcttctag

SEQ ID NO: 829551 - DNA, 120 bp, Artificial Sequence
  ENSG00000248202_5 (sequence is synthesized)
gccccctgtgcctgtgtccaccacttcatcccccaattagctatatttgaaaaagtaagagggaaagaacagttggagggggaagagagagagaaagaagacagacaacttagattatgt

SEQ ID NO: 829552 - DNA, 120 bp, Artificial Sequence
  ENSG00000248202_6 (sequence is synthesized)
tcttaaccaatcattgtagcaaaaccttttgtttatgaaggaagttccttttgtttcttttcagtccactctacctgctaattaaaatcaataatatgagatgccgtgctatctttccta

SEQ ID NO: 829553 - DNA, 120 bp, Artificial Sequence
  ENSG00000248202_7 (sequence is synthesized)
cctgagccacttatactgtattgtcaggtttggtttatttcattttctgagcttatttgccagttaatcatttgtttttatattacaaagtggctcatctctgcctcattacacactgaa

SEQ ID NO: 829554 - DNA, 120 bp, Artificial Sequence
  ENSG00000248202_8 (sequence is synthesized)
agtaatgcctgacaagcgattgtccaacgctcaccaaaccgtgcttgtgcaggttggcaaaggatgctctcagcatagacaggctgacttacatacagccagcctacctttcctgtctca

SEQ ID NO: 829555 - DNA, 120 bp, Artificial Sequence
  ENSG00000248202_9 (sequence is synthesized)
ctatcagatctgttcataggtcccgacacaggggaaaaaaatcagaatgatatatagaattaaaggataatggaactggaataatgttgagcatcttaattagagactttgggcaggata

SEQ ID NO: 829556 - DNA, 120 bp, Artificial Sequence
  ENSG00000248202_10 (sequence is synthesized)
taatcatacatgtgagttgaatacgtaattagaagattagaatctttgaaaaagaaggaagcgttagtattctttagttagcaaaatgcactgttttatagaatgtaaaacaaacagcac

SEQ ID NO: 829557 - DNA, 120 bp, Artificial Sequence
  ENSG00000248202_11 (sequence is synthesized)
caaagaagacaaagttttataaaatgactttcccaaggtttactcatttcttcatataagagaatgtgcttccaatgtactgtgaagatctacagcattatttactgatgtaaaagaaaa

SEQ ID NO: 829558 - DNA, 120 bp, Artificial Sequence
  ENSG00000248202_12 (sequence is synthesized)
catttttcattaattattttgcccatcttctgagtcctcctgtatttcatattgtaccaaggtctatcaataaattgataagctcagtgcaaacagaataaatgtgcttttaagacattg

SEQ ID NO: 829559 - DNA, 120 bp, Artificial Sequence
  ENSG00000248203_0 (sequence is synthesized)
ggaaattgaagtctaagatgtcaaacaattgatgcacaaacttaatcaaggtataccaagacctctggcttcttcccagaaagctgctaaatatcagcaaggacatggctagagatcttg

SEQ ID NO: 829560 - DNA, 120 bp, Artificial Sequence
  ENSG00000248203_1 (sequence is synthesized)
attctcgctttttttgatgtttctatgaaagaaccaagagagatttcttcagcagacagtgtttccaatgagtgaattttctttaataactccaaattcttcagggaaaacttccaccca

SEQ ID NO: 829561 - DNA, 120 bp, Artificial Sequence
  ENSG00000248203_2 (sequence is synthesized)
cagtgatgactgctggtgctctgagggaattacggcacatagtaataaaagatgtatagaatttctacatcagcaacgtgaagtccagcccagcaccctagtatggagaacagatggagt

SEQ ID NO: 829562 - DNA, 120 bp, Artificial Sequence
  ENSG00000248203_3 (sequence is synthesized)
tccagaaggtagaagcccataccggaactgggggcagtggaggggatgccatgtggaaaattggttgccaaactgaggcctcagaaatgaatgtgaaataaaccttctccttcacaaata

SEQ ID NO: 829563 - DNA, 120 bp, Artificial Sequence
  ENSG00000259820_0 (sequence is synthesized)
atatgttctgaaattaaacttgaacttttttctgtgaattttgaagatttggtatcttataattatttggtgagcatttggcatgaattatttagcttctcccctgtttatgatttattt

SEQ ID NO: 829564 - DNA, 120 bp, Artificial Sequence
  ENSG00000259820_1 (sequence is synthesized)
ctcttgtcatcgatttccaataggaaaatgttatggttctaaatgtctcctgtagacttcagtaattgaaaaatgtcagtcaagatggggggaatctgtaatatataatagagtttatct

SEQ ID NO: 829565 - DNA, 120 bp, Artificial Sequence
  ENSG00000259820_2 (sequence is synthesized)
tttagttatgttcatttccactttttttaatgtgttttttttttagtaaatgtcaaaagtgttactcagtgcaacatattatgcaatattataatcaactaacctcttcattgataatga

SEQ ID NO: 829566 - DNA, 120 bp, Artificial Sequence
  ENSG00000259820_3 (sequence is synthesized)
atgacttcatattgagaggttttttaaatctagaaatattcttgttttaaattccaggttaaaatgtaaaggtatttttatttttttaattttaattcttctcaaagctactagtacatt

SEQ ID NO: 829567 - DNA, 120 bp, Artificial Sequence
  ENSG00000259820_4 (sequence is synthesized)
taaattaggattattttttaatattagccttaactttctttaacttttatgaaaaacaactagtcccaagggtatttttactatttaatatacattattcctgtgattcaaaatcttagc

SEQ ID NO: 829568 - DNA, 120 bp, Artificial Sequence
  ENSG00000259820_5 (sequence is synthesized)
ttaatatacattattcctgtgattcaaaatcttagcagtagaacctgttgagctacttaactttctgtcttgggactatccaggtgcagttataactggtttcaaagttgtgaccttttc

SEQ ID NO: 829569 - DNA, 120 bp, Artificial Sequence
  ENSG00000259820_6 (sequence is synthesized)
cttgcttgtttcaaaatcattccttaaaaaatgttcagtatttttcttttgtcaaaaaataaaaacaggatttgtgggttgttctgttttttaaaattagtttgagaaacttcctttgcc

SEQ ID NO: 829570 - DNA, 120 bp, Artificial Sequence
  ENSG00000259820_7 (sequence is synthesized)
acttgttttctgtgcaaatgttgtaagagctcaaattccctgggggtagggaggacttttataaggtttttttggttgaagggtataaaaggcacttaaaaggtatacagttacttttat

SEQ ID NO: 829571 - DNA, 120 bp, Artificial Sequence
  ENSG00000259820_8 (sequence is synthesized)
ttcgatatcccagtcattttgacattatgataagctttccccactttataggttatctgaaaatttggtggggggcgggtattttatttatacttaatataacaaaattattttcctatg

SEQ ID NO: 829572 - DNA, 120 bp, Artificial Sequence
  ENSG00000259820_9 (sequence is synthesized)
tgtagtcaatagcacatacaaaaaattatctcctgtttgtagtcagtagcacagtcagtattcaccaaaatactgagttatttttcaagtaaaggtataagtatgaatgagaaacagttt

SEQ ID NO: 829573 - DNA, 120 bp, Artificial Sequence
  ENSG00000259820_10 (sequence is synthesized)
gtgggttgggtattgtcagtccttctttttcagataactttctaaatggtcattcaatctgtaatcttaaacttttttaatgttataaattcttcaaatcagtatttgtattaaatgcag

SEQ ID NO: 829574 - DNA, 120 bp, Artificial Sequence
  ENSG00000259820_11 (sequence is synthesized)
tgaccagactatgtcactgatacaatgtcatgattagatgtgcagaagactatgttacatggatgataaatgaacttttaacatatagaaattaatatcagattaaactaaaacattaag

SEQ ID NO: 829575 - DNA, 120 bp, Artificial Sequence
  ENSG00000259820_12 (sequence is synthesized)
caaagttaatacatgcttgcatacatatatatatttatttattaatgatatgtggagaatctttgtgcttcatagtcactagacctaaagtagaagcagttgtcaagaatgtccaactgc

SEQ ID NO: 829576 - DNA, 120 bp, Artificial Sequence
  ENSG00000259820_13 (sequence is synthesized)
tattcatctttgtggccaaagtaaatttcagattttttttttgtaatggttttctttagtctctttattaacccatcatcatgacaagtctgtcaagtgacacatgtgaaaagcagatgt

SEQ ID NO: 829577 - DNA, 120 bp, Artificial Sequence
  ENSG00000259820_14 (sequence is synthesized)
cctttcttattcctggtgcttcctaaggaggcagtgcaatgcaggagaaggaacattattagagataaaggaaaaaaccagaagtgctttctcctctcacattccactcaacacttctct

SEQ ID NO: 829578 - DNA, 120 bp, Artificial Sequence
  ENSG00000259820_15 (sequence is synthesized)
caccaaatgtgtgtggggatttctctccaccaacaaccagcagttctttactgcagattctccagtggataccagccaggtgtcctctaattcagttcaattctgacattatctactggg

SEQ ID NO: 829579 - DNA, 120 bp, Artificial Sequence
  ENSG00000259820_16 (sequence is synthesized)
agatagtgtcagatcccgcaagtggagggctcagtcctacaagactaccccttacttcagatgtcagtcacaagcagttagcggtttgtgattctgaccaactggctagaggtccccctc

SEQ ID NO: 829580 - DNA, 120 bp, Artificial Sequence
  ENSG00000259820_17 (sequence is synthesized)
ctcaagtgtgattaatttgctagagcagctcacagaattcagggaaacactttatttacatttacccatttattataaaggatattatgaaggatacacatgaactgccagaaagacaag

SEQ ID NO: 829581 - DNA, 120 bp, Artificial Sequence
  ENSG00000259820_18 (sequence is synthesized)
gagcataggcaagatactgagaagggtcacggagcttctgtgccttctccaggtgcaccaccctctgggaatagtcagttcatgtgttcagctgtctcgaagctcattcgaaccctgtcc

SEQ ID NO: 829582 - DNA, 120 bp, Artificial Sequence
  ENSG00000259820_19 (sequence is synthesized)
ttctgagtttctgtggaggcttcattacgttaaggttcagaaatcaataccccaaaatatggggctttgacatgctgaattaaagaagcagcctcaaggcctcttggccttctccagctc

SEQ ID NO: 829583 - DNA, 120 bp, Artificial Sequence
  ENSG00000259820_20 (sequence is synthesized)
tcctcacccaaatcctgtctctcccaaagcacaagatgaggctgttcaccaaagttcccttatttacctagaaactggaccttaaagaggaacacagttgcctgcgattccatccctgta

SEQ ID NO: 829584 - DNA, 120 bp, Artificial Sequence
  ENSG00000259820_21 (sequence is synthesized)
attttattaaccagagattaaaacttatatcacagaggaagagactaaaaattaaacaccacacctggagcccagatgacctgtcccaatctattatctgttctccagtcccatttagtt

SEQ ID NO: 829585 - DNA, 120 bp, Artificial Sequence
  ENSG00000259820_22 (sequence is synthesized)
cccaaagggaatcatttacaaaccattgtctgatcttccggcccatttatttacagctccccctctttccccaatgaaaatgatacttaagtgtcagccatctatcggctctttgagttt

SEQ ID NO: 829586 - DNA, 120 bp, Artificial Sequence
  ENSG00000259820_23 (sequence is synthesized)
tcacattttgtatgactcctgtgcacacacatgcatgtaataactgttatacttgttaactttttttcattataggggtatccaccatgattatatatgatggggaggaaagggattact

SEQ ID NO: 829587 - DNA, 120 bp, Artificial Sequence
  ENSG00000259820_24 (sequence is synthesized)
ccatttctgcccctgcagtctgtaggcatgattgattacatcattggtcgccggtgattaactcagtctccaagccctgtcgtgtccctggaggttggagggtggcactgaaagctccaa

SEQ ID NO: 829588 - DNA, 120 bp, Artificial Sequence
  ENSG00000259820_25 (sequence is synthesized)
ccatctcatcatgctttgatctttccgatgaccagaccccaccctgaagctatctacgggtccccagcaacattcatttcgttatcatacaaatgacattcttacaatttcagagattcc

SEQ ID NO: 829589 - DNA, 120 bp, Artificial Sequence
  ENSG00000259820_26 (sequence is synthesized)
aatggagatgaagagcaaatatatatttcacaatatcacaaacatacccttgggaattagacctctgatctaatctaggctccctcacttgccatttttgtgaccttgaacaagttgttc

SEQ ID NO: 829590 - DNA, 120 bp, Artificial Sequence
  ENSG00000259820_27 (sequence is synthesized)
atcttttctggatagttctctgttaaaaaaattaaaataaaaaaatggtggctatcaggttgttaggaggactagataagagaactatgtgaaggaccctgcacagtgctagcaacaaag

SEQ ID NO: 829591 - DNA, 120 bp, Artificial Sequence
  ENSG00000259820_28 (sequence is synthesized)
ttgtttagtaagtgctatttcaatttattttgcttccaagctcatgtgagctccctcagtgtgtaccaccaaatcacatgatgtgtatcccagtcaaatcttaaaggtcatccaccttga

SEQ ID NO: 829592 - DNA, 120 bp, Artificial Sequence
  ENSG00000259820_29 (sequence is synthesized)
atctttaagttaattaacgtgtgtttttaaaactgcattataagaacgttagggtttttgttttgatcctatggaagttaaattttttacacaagcattcaactgtttagcttcaaactg

SEQ ID NO: 829593 - DNA, 120 bp, Artificial Sequence
  ENSG00000259820_30 (sequence is synthesized)
aacagataaatagtctgtattatttcattatgtattaaaaaatgattaagcctgcctcaggcagttcaggcaaagcaggtaaaagattatcaaggagtaacattagaaaacactaatcag

SEQ ID NO: 829594 - DNA, 120 bp, Artificial Sequence
  ENSG00000259820_31 (sequence is synthesized)
agtgcctaaaaagctttatgcggtccaggttgtacagggatgttggaacagtaaaacaaacaaaacattacaaggtatgaagcgttcgagataggtagaatagagcaggttatattagag

SEQ ID NO: 829595 - DNA, 120 bp, Artificial Sequence
  ENSG00000259820_32 (sequence is synthesized)
aagtctcttctaaaattgtgttggctagcctgggatttgaacttataccgtgtatgtatgtccatgtgtaacaggttgaacatgcaagaagcagtgttcataaaaggtggcaaacttgtt

SEQ ID NO: 829596 - DNA, 120 bp, Artificial Sequence
  ENSG00000259820_33 (sequence is synthesized)
ttacttgtttctcagtcttttcagatcagtacttataaaacactgatatttacagtaaatatcttatattaaatattagctaaccctattaaattgtgtgtccttgtgctgcagtcattt

SEQ ID NO: 829597 - DNA, 120 bp, Artificial Sequence
  ENSG00000259820_34 (sequence is synthesized)
aatgacctcattctttggtaagttggcatgtgatttgagatagctctaagtgctaatggattgtttgaaggagttaaaggcaaaaccaggaagagaaaactatttttaggaaaaagcgat

SEQ ID NO: 829598 - DNA, 120 bp, Artificial Sequence
  ENSG00000259820_35 (sequence is synthesized)
catacaacaggccttaaatagaagaaatgagatatctctatctttactatgtaacctttaattccttacacattttgacttcatattttttgtatgtaaatgagaatgttatagtcttgt

SEQ ID NO: 829599 - DNA, 120 bp, Artificial Sequence
  ENSG00000259820_36 (sequence is synthesized)
aaattccttttcctctgtgactacattcagttatttattttattgtgtgtttgtgcatgtcggtagagcacagtatttagtagaatgagttattggttaaaccacctggattcatttgta

SEQ ID NO: 829600 - DNA, 120 bp, Artificial Sequence
  ENSG00000259820_37 (sequence is synthesized)
aaatggggccacctgtctcttaaattgtaatgaggatttgattagataatctagataaatcacttagcacaagagtctccagcccccggactcttgactggtactggtctgtggcctgtt

SEQ ID NO: 829601 - DNA, 120 bp, Artificial Sequence
  ENSG00000259820_38 (sequence is synthesized)
aggcactgggctgcacagcaggaggtgagcagggagcaagctagcactagggcccaagctccgcctcctgtcggatcagtggcagcattagatactcataggagcacagaccctgttgtg

SEQ ID NO: 829602 - DNA, 120 bp, Artificial Sequence
  ENSG00000259820_39 (sequence is synthesized)
aactgtgcgtgtgagggatctaggtttcgtgctccttacaagaatctaattaatgcccgatgagttgaggtggaacagtttcttcccaaaaccgtctcaggaaacctgtccctggtgcca

SEQ ID NO: 829603 - DNA, 120 bp, Artificial Sequence
  ENSG00000259820_40 (sequence is synthesized)
aaatttgggggacctctgacgtagcacactatctggcacataccaagcactcagaaaatatcccatttctcaaaactcagttccagtgtcaagtcttaatagtatattgatcttggaact

SEQ ID NO: 829604 - DNA, 120 bp, Artificial Sequence
  ENSG00000259820_41 (sequence is synthesized)
ccaaggtagttggtcctctctttgtgccataaatgtgccttgtactcagtagtgctaaattgctatcaactagtgctaaatgtactactaattcatctgtgtgtccacttcccttcttag

SEQ ID NO: 829605 - DNA, 120 bp, Artificial Sequence
  ENSG00000259820_42 (sequence is synthesized)
attgtgagccccttgaggacagagatgggtttactcatatttataaattcattggcatgataaatatttgctgaaagaataaaattgtattcttatgttttaagcagggtcccctccacc

SEQ ID NO: 829606 - DNA, 120 bp, Artificial Sequence
  ENSG00000259820_43 (sequence is synthesized)
tctgagtggaagatggtctgggagcaaaggtgacaggtcttctaaaaaatctggccacattctcaacccaccacacccccgcttttttaaacagctatttaattgccattgtaatcctaa

SEQ ID NO: 829607 - DNA, 120 bp, Artificial Sequence
  ENSG00000259820_44 (sequence is synthesized)
ggattggatcaatttttcacttccctttttcacacttttttccttttactaagaaaataaagtaataaagtgactgccaaatggagaaaactgtccactaaatatgaattaataagtgct

SEQ ID NO: 829608 - DNA, 120 bp, Artificial Sequence
  ENSG00000259820_45 (sequence is synthesized)
attatcagaaattgtgtaaaagcaacataatggcactataaaaaggtattatcttagaatcaaaaaccttgggtttatattatagccctgctactttctagtcatatgacagtgatcaag

SEQ ID NO: 829609 - DNA, 120 bp, Artificial Sequence
  ENSG00000259820_46 (sequence is synthesized)
ctatattacctctttggcttgacaaaataggggtcatctctatttctggcttgttatgattgatgtgaaatattcatacaaactaccactgtgcctggtaagtagaagacactcaaatat

SEQ ID NO: 829610 - DNA, 120 bp, Artificial Sequence
  ENSG00000259820_47 (sequence is synthesized)
gtcttggagttacagttaatactgtatcgtttaaatttgagaaaaaccaactttaaaaaatcacatagatacagttgtttactgctagaaattttatttaaattagttgatactcttggt

SEQ ID NO: 829611 - DNA, 120 bp, Artificial Sequence
  ENSG00000259820_48 (sequence is synthesized)
taggtaatgaaaaacaatggttttatctccattatgctgtgatagggaagagtaacacagttcaaatggcaaaggcatacctgacaattaaaatgcatagttaaaggctaatacttcctg

SEQ ID NO: 829612 - DNA, 120 bp, Artificial Sequence
  ENSG00000259820_49 (sequence is synthesized)
aacacaagaagacaagtctctacttgatactactctccacagttaaatcattgatactttgtgccatacagtgaaaacagaaccatctaggtgttcacggattgtatttttccttatgaa

SEQ ID NO: 829613 - DNA, 120 bp, Artificial Sequence
  ENSG00000259820_50 (sequence is synthesized)
aggtagaaggttagagaaaattattcccaatacaattaatacaaataaaattggttattaggtgccttttaattaggcagtaagggcatatgaagcttcattacctatgagaattttgtc

SEQ ID NO: 829614 - DNA, 120 bp, Artificial Sequence
  ENSG00000259820_51 (sequence is synthesized)
aaaattatttcccagttaccatgttttaaaacagcctctcagaattccccacttctaatttctcctttctattctaccaattttactccatacctttttgctaaataaacattttcttcc

SEQ ID NO: 829615 - DNA, 120 bp, Artificial Sequence
  ENSG00000259826_0 (sequence is synthesized)
gctcctcgtcaggaggagggagagcaacgggacttgctggttgggccctaacctccacaacccctccttctcgcctcgctctttcggcttttcccctcagccctgacgtacgaccgggag

SEQ ID NO: 829616 - DNA, 120 bp, Artificial Sequence
  ENSG00000259826_1 (sequence is synthesized)
cgcgcccgcaattcacgctcagagaaagccgaagatgagaggtggccggggcaagagaggcgggaacaaagttaccgcgcactggcgtgctcgctcccgccaggggccggcaggccgcac

SEQ ID NO: 829617 - DNA, 120 bp, Artificial Sequence
  ENSG00000259826_2 (sequence is synthesized)
cggaagtggcatgatgtagaaaccgctcggcttccggcgagggtgggactccgtgtgaagaagggttaaagaaaggagaggattcgtgtgccgcccactgctgttgcttgagactctgcc

SEQ ID NO: 829618 - DNA, 120 bp, Artificial Sequence
  ENSG00000259826_3 (sequence is synthesized)
cgtggtggcgcgcctgtcgtgcttgttgcttgcgtccagcgcgcagtgccggttccggctctgcagacgccgcactgcctgcctgttgagcgaaaggtcacagtgagaacaagtgtttct

SEQ ID NO: 829619 - DNA, 120 bp, Artificial Sequence
  ENSG00000259826_4 (sequence is synthesized)
ggagactgcgagggaaataatgctgttggtggccttctggagtaggcagttaccccccgtgtaccttcagtcaagccctgggagtggaacagctgcgaaaggagagaaaacaccccgcaa

SEQ ID NO: 829620 - DNA, 120 bp, Artificial Sequence
  ENSG00000259826_5 (sequence is synthesized)
acagctgcgaaaggagagaaaacaccccgcaaaacagggtggagatggcgttggtttaacttgtctcacgtacgccaaagttcgaggccccattttttttttttttttttttgagactga

SEQ ID NO: 829621 - DNA, 120 bp, Artificial Sequence
  ENSG00000259826_6 (sequence is synthesized)
tggtgcgatctcggctcaccgcaacttccgcgaggccccttcttatcctaaaaaacacacttgggaatcacagctcaagcttcggtaacactatttactttaaaataaaaatttttaaag

SEQ ID NO: 829622 - DNA, 120 bp, Artificial Sequence
  ENSG00000259826_7 (sequence is synthesized)
ctttaaatcaatacaggaaataagtggaatgttaaaaggaactactgaaaattccaaattctcaggaggcttgaaataaaaacatcttgtgcgaatgaggactgccctcttagtacttca

SEQ ID NO: 829623 - DNA, 120 bp, Artificial Sequence
  ENSG00000259826_8 (sequence is synthesized)
cccactttcaccttcatatctaaacctttggggttgccaaacatagccatatagtgacctcacatctcatttcttgccttagaattgcccttcagttacagactaagcactcgggataat

SEQ ID NO: 829624 - DNA, 120 bp, Artificial Sequence
  ENSG00000259826_9 (sequence is synthesized)
agctactccggaggctgaggcaggaggatctctggagctcaagagttcgaggctggagtgagccatgaccgtgccacagcaccccagcctggccaatcagcagggcgaggccctgcctct

SEQ ID NO: 829625 - DNA, 120 bp, Artificial Sequence
  ENSG00000259826_10 (sequence is synthesized)
ggccctgcctctaataaaagaaaaagctaagccgtctgttcaatgactaaatgtagtaacccctttgaaaattcatttgttcagatcatcagttggtttagttcttaaacacttggtatc

SEQ ID NO: 829626 - DNA, 120 bp, Artificial Sequence
  ENSG00000259826_11 (sequence is synthesized)
tatccatcgttaataccttagtgtaaattattttaatcagtttgacatcacagtatcacagactggcctgatttaagctaagatcagacttcactgaccgagtacaaaggatgttggttt

SEQ ID NO: 829627 - DNA, 120 bp, Artificial Sequence
  ENSG00000259826_12 (sequence is synthesized)
gctgaaggataaaggaggaggcaaaggaataggtaatcttaaagtcagagcatttcccaggagggcaggcctgggtgggcaacaccatgggatgggcattgggaaactgaatagaaaaat

SEQ ID NO: 829628 - DNA, 120 bp, Artificial Sequence
  ENSG00000259826_13 (sequence is synthesized)
agggggcagggttcctaaaacaaatttctggttgacagtattgttgagtgaaggtcctgtagccagcctcctaccaaagactgtttagcaagtggctttttcagaaacatgtaggatcaa

SEQ ID NO: 829629 - DNA, 120 bp, Artificial Sequence
  ENSG00000259826_14 (sequence is synthesized)
cttgttccatcgtcctacgttagatagactggaataacagaacaaagagagcaaataagaggtttagcttgcagctcccctcgtgtacaaccagttccacttgagaatgtcatcttctat

SEQ ID NO: 829630 - DNA, 120 bp, Artificial Sequence
  ENSG00000259826_15 (sequence is synthesized)
catatattttcaaagaaaacttgatccatagtaaatggataattcccatgtgtaagtgtattaaatggagaagaagggaaaaaaagtaaatggatagttcccaatccagggtgcaaacaa

SEQ ID NO: 829631 - DNA, 120 bp, Artificial Sequence
  ENSG00000259826_16 (sequence is synthesized)
aaaacatgtactaaaatatttttactgtggttctaccacccacgtttcctcaaagattctacctttggtgggggaggttgaatgaacattttgagctcaagatacctgcccacgtggttg

SEQ ID NO: 829632 - DNA, 120 bp, Artificial Sequence
  ENSG00000259826_17 (sequence is synthesized)
gaaacactaataactaataggattcaaactccaaaaaatgggaaggacctttgaattagaagccgtctgtttctataagcctgtctgcttgcctgaatattaaagagatttgaaattccc

SEQ ID NO: 829633 - DNA, 120 bp, Artificial Sequence
  ENSG00000214106_0 (sequence is synthesized)
aaatggcggcttcaatatcagtcccactgagcatgaaattcatttacttaaataaaatctgaatctcagcccaaacctgggagattcaaaacctgagagcggtcttaccaaagacgcccg

SEQ ID NO: 829634 - DNA, 120 bp, Artificial Sequence
  ENSG00000214106_1 (sequence is synthesized)
tatgtctggtgaagtcagttggatgcaagcagtttgtgctggtaccagggccccagctactgatgaagtggcaggagtccacagaagcctacttcgaagttcccggggcttccaggggag

SEQ ID NO: 829635 - DNA, 120 bp, Artificial Sequence
  ENSG00000214106_2 (sequence is synthesized)
attgacgagattcctggggaggcgattcatgacagctgagttccttttggaggatccgtcttcaggcagtctgatcccccaggaaagcagctggaaaacaagagcatgtgaaggaagcgc

SEQ ID NO: 829636 - DNA, 120 bp, Artificial Sequence
  ENSG00000214106_3 (sequence is synthesized)
agcagctcctcgccagccagacagccagccccgcaccgcaggagtcgacatgcacggcagcctagacgccatcagttaaacttatatgtaggcttgttgaggaaaacgactttcaaacac

SEQ ID NO: 829637 - DNA, 120 bp, Artificial Sequence
  ENSG00000214106_4 (sequence is synthesized)
aaggcaaaagaaaaacatgaaaccaagggttccaacattcatcatccagtttcagagacacccttgaaggaatgctacagcctctttcttacccattcaaaccagtcgctctgctgcata

SEQ ID NO: 829638 - DNA, 120 bp, Artificial Sequence
  ENSG00000214106_5 (sequence is synthesized)
cccacatcacaggaggccctcagccccgacacacaggctcactcagcccggggacatcagcacctgtgccagctccgcaaggtatccaccatgcggccagaactgaggcccagcaatagc

SEQ ID NO: 829639 - DNA, 120 bp, Artificial Sequence
  ENSG00000214106_6 (sequence is synthesized)
tgaaatgtcctttaaattaacatgtacaacacacaacccccaagagctgacatccccaaagccccaccacaaatagctgactcctacttatacctgcaggagcaggtagtgacctctgca

SEQ ID NO: 829640 - DNA, 120 bp, Artificial Sequence
  ENSG00000214106_7 (sequence is synthesized)
attctaaaccgtccactttgggcaaaattcatcaagctatggatatgaaaaaaggcccccaaggatatgattcatagtccagcgtttgagtgagcactccagtcagaacgaactctgcat

SEQ ID NO: 829641 - DNA, 120 bp, Artificial Sequence
  ENSG00000214106_8 (sequence is synthesized)
agaaaatgagtttctcagtgaccgaacgctgaatgtgatacagggcaatgacggactcgctggcggactccactctacccaccgagttctgcttgtgctccatgagcttccggaaagatg

SEQ ID NO: 829642 - DNA, 120 bp, Artificial Sequence
  ENSG00000214106_9 (sequence is synthesized)
gctgcttggataacacctttcctcctgcacactctacgattgccttcatagtggaaagacttgggcagattccagtaaagaaaagttctctagagatgtgctgtggttcacaggaggaag

SEQ ID NO: 829643 - DNA, 120 bp, Artificial Sequence
  ENSG00000214106_10 (sequence is synthesized)
acctccagtggcaatgtccaagaaggaagccaagagtgtaccttaaagagtggagaaacgtgtgcccgttttaaggattcttccaagctgaaagagaaaagtacttctgcctcagcatct

SEQ ID NO: 829644 - DNA, 120 bp, Artificial Sequence
  ENSG00000214106_11 (sequence is synthesized)
cggagaatgtagttctgctcatctggaaaacagaacagcacatactctgaaaagtgtggacacgtgaagtgtggcaagtgtgacccacaaaattctcgcccatattcagcgtatggacca

SEQ ID NO: 829645 - DNA, 120 bp, Artificial Sequence
  ENSG00000214106_12 (sequence is synthesized)
gtttgctgactgctgggcaggagcaaccacatcatgacagaaatgcagggatctgttcaccaacggccagaaatacaaaatcaatccctgagtcaaccagcagatagaaaggctgctttt

SEQ ID NO: 829646 - DNA, 120 bp, Artificial Sequence
  ENSG00000214106_13 (sequence is synthesized)
taggtgaaaggagaaaaagaatgtctaaaatttggaaaaacaaaaaatgatgaattaaaaaaggaacaaaaaaagtactgttacacatgagatggtatatttgaagtgttactttcaaag

SEQ ID NO: 829647 - DNA, 120 bp, Artificial Sequence
  ENSG00000214106_14 (sequence is synthesized)
ttgaagtgttactttcaaagctgatatgccttctgaagaacttgtgtgagatcaccaagaatagttaatgtttatgatagagaaaacaccaccgggcgcggtggctcacgcctataatcc

SEQ ID NO: 829648 - DNA, 120 bp, Artificial Sequence
  ENSG00000214106_15 (sequence is synthesized)
tttaatttttagagtacataattctcatagattctgccctgagatttttgacaaaatttcaaattttatgacattatgaaggtactattctcctactagcactcaatctgaagtggaaga

SEQ ID NO: 829649 - DNA, 120 bp, Artificial Sequence
  ENSG00000214106_16 (sequence is synthesized)
gtgaataagcaagaatattacaaatatttttcacaatttctatacaattttaaatcagcattatatttcaccacacttatctgcccagcaacagcctctggcatagcatgctgcctggct

SEQ ID NO: 829650 - DNA, 120 bp, Artificial Sequence
  ENSG00000214106_17 (sequence is synthesized)
tatatcccttttctttattttctccatattatttgaactcagagcaggaaatgatattgatgcttaagatttaattatctaacaagattgctcctgaggataccacaaaatactattctg

SEQ ID NO: 829651 - DNA, 120 bp, Artificial Sequence
  ENSG00000214106_18 (sequence is synthesized)
tctgaaactgcaaataatttctaattcctgttgactccttaagaaggttaaagaaccgattatctttattgatttacttagttctttggtacaaaaaaaattcctagctgttctaacact

SEQ ID NO: 829652 - DNA, 120 bp, Artificial Sequence
  ENSG00000214106_19 (sequence is synthesized)
tatctaacatttaaaaatcttttagtactgaattatatctatgcacacactgaatattttcccaagtatcttctccagctgaatatacatttactgacaatagtacgaagtaagcgatgt

SEQ ID NO: 829653 - DNA, 120 bp, Artificial Sequence
  ENSG00000214106_20 (sequence is synthesized)
agtgtagaacaggctttcacaaatacaaacatgaatgttaggaaaaagtctggaaaaaatgcaagagtacatgttgtataaaaaccaaatgcttatagcatatctgtaaaaatttaacag

SEQ ID NO: 829654 - DNA, 120 bp, Artificial Sequence
  ENSG00000214106_21 (sequence is synthesized)
gcctcttatcattcctatcagtagctcctacaataattttctaatagatggcggtatggaatacagcaagctctggtatgaatggtaagagcgtttctgcaccaagcctcattccaacta

SEQ ID NO: 829655 - DNA, 120 bp, Artificial Sequence
  ENSG00000214106_22 (sequence is synthesized)
aatggtaagagcgtttctgcaccaagcctcattccaactagacaggctatttatttatggctaaacatgacattggattctgggactgaggcaaattttacttctttttttttttttttt

SEQ ID NO: 829656 - DNA, 74 bp, Artificial Sequence
  ENSG00000214106_23 (sequence is synthesized)
agtagctgtgattacaggtacccgccaccatggccagctaattttttctatttttagtagagccagggtttcac

SEQ ID NO: 829657 - DNA, 120 bp, Artificial Sequence
  ENSG00000214106_24 (sequence is synthesized)
ccaaattttacttcttaaaagtgcttttctctcagtgatatcaaggtcttctgtctactattataaccataagctctttagcgttaagaggaaaatgtttgataaatgtaattaactgga

SEQ ID NO: 829658 - DNA, 120 bp, Artificial Sequence
  ENSG00000214106_25 (sequence is synthesized)
agacactttagttagagatccactgctgtgcgtgcacacatactcacacaggtaagcggggaaacgtacctatgcctctggcaaaatattctcggcataaatgaaggtcattttcacagg

SEQ ID NO: 829659 - DNA, 120 bp, Artificial Sequence
  ENSG00000214106_26 (sequence is synthesized)
tctcatagatgtatttattaaatttgtgtacttatttttaaacattatagtaaagaaaagttctctagagatgtgctgtggttcacaggaggaagacctccagtggcaatgtccaagaag

SEQ ID NO: 829660 - DNA, 120 bp, Artificial Sequence
  ENSG00000214106_27 (sequence is synthesized)
gaagccaagaggtaaatgggatgcagggtgagcccagctcccctggaggcgcacttcccaccaaatcacctggtagttcccttgagcaggtccgtgtgttatgcttacttggactgattt

SEQ ID NO: 829661 - DNA, 120 bp, Artificial Sequence
  ENSG00000214106_28 (sequence is synthesized)
agccttcggatatttaaatgtcaccattatatttcatttacttccctctaaaaacagccagaccaaaaagacagacaggtattttttctcctagatcagtggtaattaaccatttggggt

SEQ ID NO: 829662 - DNA, 120 bp, Artificial Sequence
  ENSG00000214106_29 (sequence is synthesized)
ttcatgcctgtaattccagcactttgggaagccggggaaggaaagctgcttgatgccaggagttcgagaacagcctgggcaacacagtgagacttcatctctacagaaaaattttaaaat

SEQ ID NO: 829663 - DNA, 81 bp, Artificial Sequence
  ENSG00000214106_30 (sequence is synthesized)
gctgcttgatgccaggagttcgagaacagcctgggcaacacagtgagacttcatctctacagaaaaattttaaaatcagct

SEQ ID NO: 829664 - DNA, 120 bp, Artificial Sequence
  ENSG00000214106_31 (sequence is synthesized)
ggctgtggtgagccatcattgcaccacagcaccccagcctgggcaacaaagtgagatctggtctcaaaataatagtaatttttttttttttaacaacaaaaatgtaaaaaaagaaaaaaa

SEQ ID NO: 829665 - DNA, 120 bp, Artificial Sequence
  ENSG00000214106_32 (sequence is synthesized)
aaattactgaaaaatatgaaccctcttcccatagctgctcctcccctctttaccccccgactattttaggaagttcaccaactttccaagcccgcagatctcaggttaaaatctccagtc

SEQ ID NO: 829666 - DNA, 120 bp, Artificial Sequence
  ENSG00000214106_33 (sequence is synthesized)
ggctcataatcaattatgtgaattaccaaactttaaagatttaccaaacacacattcaagtatataaaagtatacagcaatttataaaggatagttttatcaatttttaaagacttctga

SEQ ID NO: 829667 - DNA, 120 bp, Artificial Sequence
  ENSG00000214106_34 (sequence is synthesized)
caattattaataattgacagattttcagttttcatagcaacattttaagaaatgtgtcaaaaggtaaagatcacaaaatgtttcaatcttcctataaatatgcctcatattcagaaaacc

SEQ ID NO: 829668 - DNA, 120 bp, Artificial Sequence
  ENSG00000214106_35 (sequence is synthesized)
atttctcctccgccgccatttcctaccaaccatacagcataataaggcagctcaaacccaataatatatacatcaaaagcagaaaacaaggaaaagtgatttgggattggcaaactgggg

SEQ ID NO: 829669 - DNA, 120 bp, Artificial Sequence
  ENSG00000214106_36 (sequence is synthesized)
ttgacaagatgatacatattttaggatttgtgggctatgtattatttctcctgcatattcctcttctcttttttaagcaatatttaaaaaatgtaaaaaccattttcagcgtatggacca

SEQ ID NO: 829670 - DNA, 120 bp, Artificial Sequence
  ENSG00000214106_37 (sequence is synthesized)
cccaggaggcagaggttgtagtaagccaatggcaccactctactccagcctgagcaacagactgggtgagactctgtcttaaaaagaaaagaaagtaatattgaaaaatacagtaataca

SEQ ID NO: 829671 - DNA, 120 bp, Artificial Sequence
  ENSG00000214106_38 (sequence is synthesized)
aaaaagaaaagaaagtaatattgaaaaatacagtaatacagctaagacgatcctgtcacagatgagacattgagattttggttttttcaaacagggttatgttaccttagtagtagcaat

SEQ ID NO: 829672 - DNA, 120 bp, Artificial Sequence
  ENSG00000214106_39 (sequence is synthesized)
gtaaagactcaacctgaacattaaacttttcatggaagtacaaaagaaatgagtatcctagaaattgattataatattgatgtctcaaattttatgtaagttacacataaatataaaatc

SEQ ID NO: 829673 - DNA, 120 bp, Artificial Sequence
  ENSG00000214106_40 (sequence is synthesized)
ccaaaaacatgcacctaccaaaacaggtggagaaaagagtgttttcaacaaatgatgctggaacaactgcacatccatatgcaataaaaggaagctggacacagactttaccctctttta

SEQ ID NO: 829674 - DNA, 120 bp, Artificial Sequence
  ENSG00000214106_41 (sequence is synthesized)
aaaaaaactgacccaaaaatggaacacagacctaaatgtaaaatgcaaaactatgaaactcctagaagataacacaggagagaatctaagggaccttgagtttggcaatgactttttaga

SEQ ID NO: 829675 - DNA, 120 bp, Artificial Sequence
  ENSG00000214106_42 (sequence is synthesized)
tacaacaccaaagacacaatccatgaaagaaataagaagtaacctggacctcacctattagaatggccaaaacccagagcactaacaccagcatatgctgaggaggatgtggagcaacag

SEQ ID NO: 829676 - DNA, 120 bp, Artificial Sequence
  ENSG00000214106_43 (sequence is synthesized)
gagctcccattcactgcaggtgggaatgcaaaatggcacaggcacttcagaagacagcctggcggtttcttacaaagctaaacatactcttaccatatgatcaagcaattgcaaccttgt

SEQ ID NO: 829677 - DNA, 120 bp, Artificial Sequence
  ENSG00000214106_44 (sequence is synthesized)
tgatttaccaaaaggagttgaaaacttacgtccacactaaaacctgtacatggatgttttagcagctttactgctaactgcgaaaatttagaatcagctaagatgtccttgtgtaggtga

SEQ ID NO: 829678 - DNA, 120 bp, Artificial Sequence
  ENSG00000214106_45 (sequence is synthesized)
ggggctgaacagatacattctgacaatggaatattatttagtgctaaaaagaaatgctttatgaagccatgaaaagacatggaggaagctgggacgtatattgctaagcaaaggaagcaa

SEQ ID NO: 829679 - DNA, 120 bp, Artificial Sequence
  ENSG00000214106_46 (sequence is synthesized)
atctgaaaatcctatatactgtatgattcccaatatgtaacattctggaaagggcaagactatagaaagaataaaagatcagtggttgccaggggtcagcaggcaggaaggaatgagtgg

SEQ ID NO: 829680 - DNA, 120 bp, Artificial Sequence
  ENSG00000214106_47 (sequence is synthesized)
gtggagcacagaggattttcagggcagtggaacaactccatatgacgctgtaaagcaaaatcatgtccttacacatttgttaaaacccaatgactgttcaaggccaagagtgagccctaa

SEQ ID NO: 829681 - DNA, 120 bp, Artificial Sequence
  ENSG00000214106_48 (sequence is synthesized)
tgtaactatggactttgggtgactggccaagagtgagccctaatgtaactatggactctgggtgactagccaagagtgagccctaatgtaactatggacttcaggtgactggccaacagg

SEQ ID NO: 829682 - DNA, 120 bp, Artificial Sequence
  ENSG00000214106_49 (sequence is synthesized)
gagccctaatgtaactatggacttcgggtgactggccaagagtaagccctaatgtaactatggactttgggtgactatgacccaaatgtcaatgtagcttcattaacagttaataaacat

SEQ ID NO: 829683 - DNA, 120 bp, Artificial Sequence
  ENSG00000214106_50 (sequence is synthesized)
ttcactgtggtgtgggatggtgactgtagtgggggtggcggtgtgtgtgcatgggtatgggctggggtatatgggaactcactgtactttctgtaattttgctgtgaacttaaaactgcc

SEQ ID NO: 829684 - DNA, 120 bp, Artificial Sequence
  ENSG00000214106_51 (sequence is synthesized)
tgccctaaaaattgtctatttttaaaaaacaataattataaactggaaaaattctcttaggaaatcctaaaatatggaagataaaatatgaaatgttttctcagtattaaatgtttataa

SEQ ID NO: 829685 - DNA, 120 bp, Artificial Sequence
  ENSG00000214106_52 (sequence is synthesized)
cactttctaaccctcagagagcaacacagcaaatacttattaacagtgccataaagaaataaaagctagtcaaccaaaacttcccattaaataggaactgtaaactttatatacagataa

SEQ ID NO: 829686 - DNA, 120 bp, Artificial Sequence
  ENSG00000214106_53 (sequence is synthesized)
aacaaccacattttcacaaactgaaacttgaaaaattaagtaaattggtcattcactaaattggctgcttggcaaactaattttcaaagaattagcatgttcttggttggaaaagaaaaa

SEQ ID NO: 829687 - DNA, 120 bp, Artificial Sequence
  ENSG00000214106_54 (sequence is synthesized)
gaataagcaaagtcagaaagtaacaaaaaagatctctaaagctgggtgttgcccaaaagcagccgatggagccaaccagaggctggaacattacagacccgctttccccaccacccaagc

SEQ ID NO: 829688 - DNA, 120 bp, Artificial Sequence
  ENSG00000214106_55 (sequence is synthesized)
tggtgtatgccatgctcccacagcagaagctaaaaaagtacacttactatttctattaacgaatagactatctccttctaaactgtataacattatatgaaattggaagctaaaatgttt

SEQ ID NO: 829689 - DNA, 120 bp, Artificial Sequence
  ENSG00000214106_56 (sequence is synthesized)
gtagtaattgtttctactatgttcttcttctgccttcattgttaagttttatgtttcattaatacctttttagagtcaaaaaattttcaaaatttcaattaaaaaaatttctaaatacca

SEQ ID NO: 829690 - DNA, 120 bp, Artificial Sequence
  ENSG00000214106_57 (sequence is synthesized)
tcaagccctctccccagcctgaagaacaccatgttcctcttagcgatcatcagtaacaaggcgtgccactcgaagaactacaaagataagggtttggggtttgtgctggggaaagctcat

SEQ ID NO: 829691 - DNA, 120 bp, Artificial Sequence
  ENSG00000214106_58 (sequence is synthesized)
gacactagctgcaggaatagaggactgagcctcccaagtcctggaaagcagagggaggatgccccgctctgatttcctcagcacctttgcagagctcttggtctcctgcctgtgccctgc

SEQ ID NO: 829692 - DNA, 120 bp, Artificial Sequence
  ENSG00000214106_59 (sequence is synthesized)
aggcctgactcaccttcctctctgcacgtgagactctgcacacctcctatcgtgtttattgacgcatggcagcctcagccctccatttcatgtgacctcccagctttgctctctacaaca

SEQ ID NO: 829693 - DNA, 120 bp, Artificial Sequence
  ENSG00000214106_60 (sequence is synthesized)
agaacgaaggcttgaaagagccagtttgaagaatgggagcaaggcctggctagagcactgatcgacaaacttttcctgtaaagggctgggtagtagatattgcaggctttgcaggccatg

SEQ ID NO: 829694 - DNA, 120 bp, Artificial Sequence
  ENSG00000214106_61 (sequence is synthesized)
aaatccacgctgcattgtagtggcatgcaagctgccatagccaatctgtaaatgaatgagtgtggctgggtcgcattagcattttatttccaaaaatagcaggtggccagatttggccca

SEQ ID NO: 829695 - DNA, 120 bp, Artificial Sequence
  ENSG00000214106_62 (sequence is synthesized)
gggactataattttccaattcctgagatactagaaacagaagtgttttgttgttgttttaactaactctttattgaagtacagcaaacaaaagtatacacattatagcattgtatgaact

SEQ ID NO: 829696 - DNA, 120 bp, Artificial Sequence
  ENSG00000214106_63 (sequence is synthesized)
atcacagagtgactacacgcatgtaaccaccaactgtgtgaagaaaacattgcctgcatcccagaaactatgtatgcacccttactagtcactaatctcacactcctccccaaaagtaac

SEQ ID NO: 829697 - DNA, 120 bp, Artificial Sequence
  ENSG00000214106_64 (sequence is synthesized)
taaaactctgatttgtattgtcagtggtttctcctgttttggactttatataaatgaagtcatattgtatgtatttctactttctgtctaacttctttgtatgatattctcccagtggaa

SEQ ID NO: 829698 - DNA, 120 bp, Artificial Sequence
  ENSG00000214106_65 (sequence is synthesized)
ttcatctgtattgtggtttgtaccaatggttcatttctttttattgttattataatattttattgcattactataatagtatttatttcattctactgtagatggacatttaacattgtt

SEQ ID NO: 829699 - DNA, 120 bp, Artificial Sequence
  ENSG00000214106_66 (sequence is synthesized)
tctagtttggggctgctgcatgtctttggatgaatatgtgtacacatttttgttggaaatagaattgctggtccaacatagatagatagataggtaggtagatacatagatagatagata

SEQ ID NO: 829700 - DNA, 120 bp, Artificial Sequence
  ENSG00000240057_0 (sequence is synthesized)
ccaagggccgcgccggggttctgcactgtcactgcgctgcggttccccgccttagggattctcacacggttccacggctccaggcccggcggcaccgcagccatcatgcgaggcgggggg

SEQ ID NO: 829701 - DNA, 120 bp, Artificial Sequence
  ENSG00000240057_1 (sequence is synthesized)
acttacgaaaggcggagctacgcgagagcacgtccagcgaccggagtctggaacagttcctcgttctttctctggctctggatctgcgtccctgacagtcttaaagaggacagacctttc

SEQ ID NO: 829702 - DNA, 120 bp, Artificial Sequence
  ENSG00000240057_2 (sequence is synthesized)
attcatgaggatgaccctcaacttggcccagtccatgtttcctcagactcaagccttgcattcctggcagaaagactgaagaaatgatgctgtgctcttctcagtgcttcgcgtcaggag

SEQ ID NO: 829703 - DNA, 72 bp, Artificial Sequence
  ENSG00000240057_3 (sequence is synthesized)
tactctctcaaccggccccactattgacgcagcctcatcctgtctctcccgtgttcaaacgattctcctgcc

SEQ ID NO: 829704 - DNA, 120 bp, Artificial Sequence
  ENSG00000240057_4 (sequence is synthesized)
ggcgtgagccactgtgcccggccgagactgttaagattttattgccctagtaccagcagttatgatgttctatagaacttatagctgagcccatgccagggattccccagctcactgaag

SEQ ID NO: 829705 - DNA, 120 bp, Artificial Sequence
  ENSG00000240057_5 (sequence is synthesized)
gggacgactcccattttgccaccctggcagctctcaaccggctctgctccagccaactcttcacagtacttaaagtcctttttcaacgccacgaagtgatgctctcaccgggttcagatg

SEQ ID NO: 829706 - DNA, 120 bp, Artificial Sequence
  ENSG00000240057_6 (sequence is synthesized)
agctcatctcctctctaactacactaaagtgcctcgagggctggaacactgcctcatgcttctccatccctgacatgctcaagcccaatgctgatacagtgctcagtaaattattgtcgt

SEQ ID NO: 829707 - DNA, 120 bp, Artificial Sequence
  ENSG00000240057_7 (sequence is synthesized)
agtaaattattgtcgtttggttgatttgcaacaagtgctttttaaattggaatgctcagggttgaaatagtccctcagttgttccagatcaccatttttttttttttttttttaagacgg

SEQ ID NO: 829708 - DNA, 120 bp, Artificial Sequence
  ENSG00000240057_8 (sequence is synthesized)
ttcaccgtggtctcgatctcctgacctcgccggatcaccattcttaattatcctcctcttgctggtgtgctacagtttctggattcccccagtctagatatattaacctcatgtggcctc

SEQ ID NO: 829709 - DNA, 120 bp, Artificial Sequence
  ENSG00000240057_9 (sequence is synthesized)
tcccccagtctagatatattaacctcatgtggcctcactggacagcctctttgaggctgccttcatcaacacctgttactctgttgcccacttcattttccccagtctgttgtgttggct

SEQ ID NO: 829710 - DNA, 120 bp, Artificial Sequence
  ENSG00000240057_10 (sequence is synthesized)
cgacatccctgagtcttgcccactgtctgctgtcttattcctgtgtttgttctgacttgacaaattactctcatctcaactactgtgtagcaatactttttattcaacttttaccaattt

SEQ ID NO: 829711 - DNA, 120 bp, Artificial Sequence
  ENSG00000240057_11 (sequence is synthesized)
ctttcctaaagagaagtccatacattctaactctgttatgacttgcttgctccttaatctcttgtcatttggtttccactcttcatgctgtgttgttcccactgggaaaggcaccataga

SEQ ID NO: 829712 - DNA, 120 bp, Artificial Sequence
  ENSG00000240057_12 (sequence is synthesized)
cttgaagagtctgtccttgatcttgtcttgcatggtttctctgcagcctttggtgctgtggaccactgcctggtcctgacactccttcttgcttttgctgccttaatgctccatgtgtct

SEQ ID NO: 829713 - DNA, 120 bp, Artificial Sequence
  ENSG00000240057_13 (sequence is synthesized)
gtttcttctgctactgctatttctccatccagtcctttctgagattcagtctctgcttggttttccttagaggcaattttcactcccatgacttcaattatggtcacctctatgccaggt

SEQ ID NO: 829714 - DNA, 120 bp, Artificial Sequence
  ENSG00000240057_14 (sequence is synthesized)
cacacttccagttgtctactggatttttctacttgtccatcctactattattaaaacttgagatatctcaaactggatttattcccccttccaaaactgcttattttcttctactaactt

SEQ ID NO: 829715 - DNA, 120 bp, Artificial Sequence
  ENSG00000240057_15 (sequence is synthesized)
caaggctgaaggtttctgcccatccattgattgtaatcttccatcagtcattaaagtacatgattccttcagatctattctctatcccatctatttagtttctgccaccaccctaattct

SEQ ID NO: 829716 - DNA, 120 bp, Artificial Sequence
  ENSG00000240057_16 (sequence is synthesized)
aacccttttgtcacatgtataaactattgaaattaatctgttaaaatacttttgcaaaaatgtactcttctactcaaaacatccagtagttccccattatttacagaatcaaatccaacc

SEQ ID NO: 829717 - DNA, 120 bp, Artificial Sequence
  ENSG00000240057_17 (sequence is synthesized)
ttcttcacctaaggttcaagaccttccttaatctaatcccaactttgttgttcccaccatttcttcctctattatatttgccttaaagaaataaatcagtttagtgaaactgttctgctc

SEQ ID NO: 829718 - DNA, 120 bp, Artificial Sequence
  ENSG00000240057_18 (sequence is synthesized)
ataagatcccaaacactttatatgcacacagttgttcatgtcctttcacctacctgctacatccatccctcatattcccatctcttctggcctaaccttccttcaaaccacctttcaaaa

SEQ ID NO: 829719 - DNA, 120 bp, Artificial Sequence
  ENSG00000240057_19 (sequence is synthesized)
aaagcttctttgaccatctcaatctaaattaacctcttcctcccataaactccctttgactccattaagctactgacagtttatgaaattatgtaaattccagtttatatgttaaatgat

SEQ ID NO: 829720 - DNA, 120 bp, Artificial Sequence
  ENSG00000240057_20 (sequence is synthesized)
tgcttaatttttcttacattatctttctaactagattgtttgcttcttctggatttgatcccccagctggcacctggctcagacttaattaatgctgcctgttcttgtctgagtttccat

SEQ ID NO: 829721 - DNA, 120 bp, Artificial Sequence
  ENSG00000240057_21 (sequence is synthesized)
gaacttataaatacaagttgtttttgtaaattgagtcccaaacccatatgtttataagagcaaacaccttgagcaggattaactatgtgcaggtatggatattctgttgcatttttttct

SEQ ID NO: 829722 - DNA, 120 bp, Artificial Sequence
  ENSG00000240057_22 (sequence is synthesized)
acaaatttcctccacaggctcaggggaaagatcacttgatcattcaggagaactcctgtggtctgggaggactcagagaattggaacaggcccggctctgctgccagatgtttctaagaa

SEQ ID NO: 829723 - DNA, 120 bp, Artificial Sequence
  ENSG00000240057_23 (sequence is synthesized)
atccagtaatgaagacaatcccatgatatgatccacagaggattgctgctttgcggggagagggggctagaattgcagaagagcaacagagtgagaaggaatttgcatccagctctgacc

SEQ ID NO: 829724 - DNA, 120 bp, Artificial Sequence
  ENSG00000240057_24 (sequence is synthesized)
ggggaatatcccaatcttcaaccctgaagcagcatatggagtctaggaagcgtatggggccaggctgtagcaatacacccagttaaaacatccgcttcccagatgcctttgcacagtaga

SEQ ID NO: 829725 - DNA, 120 bp, Artificial Sequence
  ENSG00000240057_25 (sequence is synthesized)
gtggtcacatgatccacttctggccaatgagagggcatcttgagacaatgttctgcctacacaaaattctaaactgagaggagtggctcagaagctctactaacatggaatcacatgtgg

SEQ ID NO: 829726 - DNA, 120 bp, Artificial Sequence
  ENSG00000240057_26 (sequence is synthesized)
agtgtagtgcagtgagaaaggggagggagagtcactcagtcaacatgtatactccttgactgagcagtgtttgagtgggcaccaagcttagacatgtgtgtagggaggcaattataacta

SEQ ID NO: 829727 - DNA, 120 bp, Artificial Sequence
  ENSG00000240057_27 (sequence is synthesized)
gttacagccatcctgcctcttctgtcctcctctcttccccagccttagccccccagcctcatggggcccagagtcctccttcagatgaggccagtgtcccaggcaactacctgacgtggg

SEQ ID NO: 829728 - DNA, 120 bp, Artificial Sequence
  ENSG00000240057_28 (sequence is synthesized)
aaaagctgccgtcctagagatcagaaagaacccaccagtcaggaacagcaattctgatgatgtcagcttctaagttttcagaagcgacagcctctggtgttcttacagcatcagaagagc

SEQ ID NO: 829729 - DNA, 120 bp, Artificial Sequence
  ENSG00000240057_29 (sequence is synthesized)
agaaaagctggccacttatgaacccacacattgttacagagcatctcggctttctgccaaggagcaccactcaggctttaaagatttgtcctttgattttactttttagggcatcttgag

SEQ ID NO: 829730 - DNA, 120 bp, Artificial Sequence
  ENSG00000240057_30 (sequence is synthesized)
gttctgcctacacaaaattctaaactgagaggagtggctcagaagctctactaacatggaatcacatgtgattcaagagagtgccaaaggaaacaacaggacagaaggagacatgaggaa

SEQ ID NO: 829731 - DNA, 120 bp, Artificial Sequence
  ENSG00000240057_31 (sequence is synthesized)
gagatgggacagacagcactcaaccctgagcagacgtgaggggcaaaagaaaaggcaacattaaggacccattcaagtttcaagtctcagcgtcccagaggatggtgaggatacagcaaa

SEQ ID NO: 829732 - DNA, 120 bp, Artificial Sequence
  ENSG00000240057_32 (sequence is synthesized)
aatggagagtgcaaaaggagaaaggcagttgaatgtgaagataacggggtcttcggagcctacctactaagtctggtgggataaccctgttaaatgggaagagggaggcctttcttggta

SEQ ID NO: 829733 - DNA, 120 bp, Artificial Sequence
  ENSG00000240057_33 (sequence is synthesized)
cattttaggaggaaaaaaatggctgcctggaaagttcatataccagcagcaaaaagaaaagcagaatgggatgagagattatgaaagcccttcacgaggaggttaagttctggcgggtgt

SEQ ID NO: 829734 - DNA, 120 bp, Artificial Sequence
  ENSG00000240057_34 (sequence is synthesized)
gcccatcagagaccagcagagacaactggctctccggcctgagttcgcctacatcagaactagcacatctctctgtctaatttctaatcactgtaaatatgttcaaaatgaaagaaaaaa

SEQ ID NO: 829735 - DNA, 120 bp, Artificial Sequence
  ENSG00000240057_35 (sequence is synthesized)
actctctcaaccggccccactattgggcatcttgagacaatgttctgcctacacaaaattctaaactgagaggagtggctcagaagctctactaacatggaatcacatgtgggttgcagg

SEQ ID NO: 829736 - DNA, 120 bp, Artificial Sequence
  ENSG00000240057_36 (sequence is synthesized)
aggctggagactatcccagcagcacatggcacaaagcaagaaccagccccggacaggacgccattccatcacaggtgcactcacacccaccagcactcactcagactgggcccatttaga

SEQ ID NO: 829737 - DNA, 120 bp, Artificial Sequence
  ENSG00000240057_37 (sequence is synthesized)
cacaccgattcatccaacatgcatatctctggggtgtggaaggaaactggattacctggtgaaaacccacacagacatggggagaacatgccagctctacacaaacagtggcctggtggg

SEQ ID NO: 829738 - DNA, 120 bp, Artificial Sequence
  ENSG00000240057_38 (sequence is synthesized)
gaggtaacaccttgtgcagccgtatgtacatggcagctggttgcaatgtccttccaggaattcattccttctgcaaactattcttatgaccctgaagttatctccttctgcttgacaaag

SEQ ID NO: 829739 - DNA, 120 bp, Artificial Sequence
  ENSG00000240057_39 (sequence is synthesized)
aaacagtacatcagcagtttataattacattgtgggaacaaggaatactgggcaaaaagcgagtggttaacatgtacaagcaagcaagggcctgttcaaaattttcattatttcatgcac

SEQ ID NO: 829740 - DNA, 120 bp, Artificial Sequence
  ENSG00000240057_40 (sequence is synthesized)
ccttctcagtgcaaggtaacatatttacagattatggaaattagcatgtgaacatctttgggtgggaggtggagggatctttattcagcctaccacagcctctctcacagaatttacctc

SEQ ID NO: 829741 - DNA, 120 bp, Artificial Sequence
  ENSG00000240057_41 (sequence is synthesized)
gctttattgtatttctttgtttactttcatgtctatttctccaatggcatatgaacctactgaaagcgagaactaccattgacatagctaactggtctttctatctcaatgcttagttca

SEQ ID NO: 829742 - DNA, 120 bp, Artificial Sequence
  ENSG00000240057_42 (sequence is synthesized)
gagcctggcatatagtagggcctcagtagatatttactggctgtatatgaggttggatgatgcttgaatagagtcttttgaaggatgaataggaactccccaggcagttaaaggaaaaag

SEQ ID NO: 829743 - DNA, 120 bp, Artificial Sequence
  ENSG00000240057_43 (sequence is synthesized)
gatattcctacagagaggttttaagcagcatgggtttgaagaatcactagtcctgagttggtactgctgggacgtgatttgtgctgaggggtggagctgggaatagtggtgtcagtcaga

SEQ ID NO: 829744 - DNA, 120 bp, Artificial Sequence
  ENSG00000240057_44 (sequence is synthesized)
gttataaatgaaacagtgttgaagtaaaggacctgctctacattccagaagagtgaaaaagcaaacgtaaaaaagtatacttacaggggaagagaagcataaaagtcaaggaagaaaaga

SEQ ID NO: 829745 - DNA, 120 bp, Artificial Sequence
  ENSG00000240057_45 (sequence is synthesized)
tctgaatagtaagagctaacatgtattgaatgctcaccaggcactctgctatgtacttaatttgcttattttatttaattctcacaagaatattatgattctaccacagtttacttttct

SEQ ID NO: 829746 - DNA, 120 bp, Artificial Sequence
  ENSG00000240057_46 (sequence is synthesized)
ctcctatcattagatgataattatttattctaatagagggacactataactatgaacctctagctcagaggtgcccgggattttgcagcagttagtcgtggagctgagctgaaatgggtg

SEQ ID NO: 829747 - DNA, 120 bp, Artificial Sequence
  ENSG00000240057_47 (sequence is synthesized)
gtctctgtcaagccctcgtcgatttacccaggatacttactcctcattctccctttgcagtgcttcctcagccataagactggcctgcttggcagtcatctgcccatccattactgtgga

SEQ ID NO: 829748 - DNA, 120 bp, Artificial Sequence
  ENSG00000240057_48 (sequence is synthesized)
atagcgtatctcactcctatctcactcatcccgaggccaaaggctacagtttcatgaacactggttccctctgacttttcctctattgtctaagccaacccaggaaaaggcaccatagaa

SEQ ID NO: 829749 - DNA, 120 bp, Artificial Sequence
  ENSG00000240057_49 (sequence is synthesized)
acagaaaatattattaaagctcatatcacaaatccagggatcatttccactgagctgagacagaaaactgatatgtttatcagaaaagataacacttgtctacaaagagtgctttccagg

SEQ ID NO: 829750 - DNA, 120 bp, Artificial Sequence
  ENSG00000240057_50 (sequence is synthesized)
ccataggataaacagagggagccgccagcttgacctctaggcagggcgtctgcacgaggctggagagtccgtgctctgtccacctccaacaaaaacaggctgctgacttcatccagcttc

SEQ ID NO: 829751 - DNA, 120 bp, Artificial Sequence
  ENSG00000240057_51 (sequence is synthesized)
cagtcctttcccagacaggtcccagctctcggccacaggcttcctcctctacacatttttattataagaagatattcaagaataattaacaaagtagaaataaatgatttctcagaaaag

SEQ ID NO: 829752 - DNA, 120 bp, Artificial Sequence
  ENSG00000240056_0 (sequence is synthesized)
gttttgtttttttgagaccgagtctcactcttgtcgcccaggctggaacgctgtctaaaaagaaaagcagggaatttgacacaaagaaaataaactagaaatagatctttgaggccaatg

SEQ ID NO: 829753 - DNA, 120 bp, Artificial Sequence
  ENSG00000240056_1 (sequence is synthesized)
cttgaggacaatgccatagaatgttgtgagcatctgcaagcataaccgggaggtgggctctcactgaacagcactcaccgactcccaccggggcccgcaccgtgtagtgcatgcagccca

SEQ ID NO: 829754 - DNA, 120 bp, Artificial Sequence
  ENSG00000125804_0 (sequence is synthesized)
agtgattgccactgttgcccgtggatgggtccccgagactttgcgaagtaggagccccgtgtgatagtgcgtcagagttgggtctgagagcagtcctggccaaggcattaacaggatcgt

SEQ ID NO: 829755 - DNA, 120 bp, Artificial Sequence
  ENSG00000125804_1 (sequence is synthesized)
ctccagagcctgggattctcggagggttgaccaccaggaagaaacctcagaaggaagaaacctcagaaggtaagattggggaagatgccaggtgatagaatccaccctgcctctgacagc

SEQ ID NO: 829756 - DNA, 120 bp, Artificial Sequence
  ENSG00000125804_2 (sequence is synthesized)
atccaatctggagcaaaggcttatttcaaccctcccccaagctcccaatacaagcccaaattctggaacaggtcctttccaacacctccttcagagaagctccctggctccaggcagtgc

SEQ ID NO: 829757 - DNA, 120 bp, Artificial Sequence
  ENSG00000125804_3 (sequence is synthesized)
ttgctcccctcactgcagcaggaagcctaacttgcgaactgcaggtgtgctccaggtggtcactggatgcaaggcattgacagatggatcccatcgatacccccactgcaaaaccatagt

SEQ ID NO: 829758 - DNA, 120 bp, Artificial Sequence
  ENSG00000125804_4 (sequence is synthesized)
aaggaaatgctggatggaggggttcctggaactactgtgagggatgatactccaaattgatacttaatatacagaaatgactatcatggacataacccacaacatgtgaaatgtatggct

SEQ ID NO: 829759 - DNA, 120 bp, Artificial Sequence
  ENSG00000125804_5 (sequence is synthesized)
cattctactgacattatacaggaaagttaatgacaactgaatttctagtcattttccacccaacaagttgcttataaaatgtcaaggaattgtagaaatggtgagagaactttggatgtg

SEQ ID NO: 829760 - DNA, 120 bp, Artificial Sequence
  ENSG00000125804_6 (sequence is synthesized)
gaacgtggaggaggaggaacacgaagtggggatctccacttggggtggtcagcactgcgggtgcccagcaaagtcactgcctggtccacatcccggaggggtctctgcgcctcagtcggc

SEQ ID NO: 829761 - DNA, 120 bp, Artificial Sequence
  ENSG00000125804_7 (sequence is synthesized)
atcgcagctgatggtgaaacttttggtgtggcagaagagtgtccacaaacttcggaagatcgctgctcagagtgaggaatggagttgtgttttgaataaaatatccacgcatccttttgt

SEQ ID NO: 829762 - DNA, 120 bp, Artificial Sequence
  ENSG00000125804_8 (sequence is synthesized)
gaggcatggcaaagtaggagccctccatggcagtgcttgagtgtcggggctctgagtctccggcctgacctctccacgtggtcgacgggaacgtccccagatgccaggattcgcaaaggg

SEQ ID NO: 829763 - DNA, 120 bp, Artificial Sequence
  ENSG00000125804_9 (sequence is synthesized)
ctgaccaggatggcgaaaccttaggcagagtccggggaaagcagcacggcatcccagcctcaggcctgcccggacggtgttggttggggtaagattggggaagatgccaggtgatagaat

SEQ ID NO: 829764 - DNA, 120 bp, Artificial Sequence
  ENSG00000125804_10 (sequence is synthesized)
gcttggcaaagcgggagccttccgcggcagagcttgggtgtccgggctctgaggctccggtctgacctctccacggggtcgacgggaatgtctccggatgccaggagttgcaaagggcag

SEQ ID NO: 829765 - DNA, 120 bp, Artificial Sequence
  ENSG00000125804_11 (sequence is synthesized)
acctagatgaggaaaccccaggcagagtcctggggaagcagcacggcatccgagcctcaggcttgcctggacggtgttggttggggtaagattggggaagatgccaggtgatagaatcca

SEQ ID NO: 829766 - DNA, 120 bp, Artificial Sequence
  ENSG00000125804_12 (sequence is synthesized)
gggtgtcgggactccgaggttccggcctgaccgctccacggggtcgacaggaacgtctccagatgccaggagtcgcaaagagccgaccacgacgatgagaccacgggcggagtccagggg

SEQ ID NO: 829767 - DNA, 120 bp, Artificial Sequence
  ENSG00000125804_13 (sequence is synthesized)
aagcagcaaggcatcccagcctcaggcctgcccggacggtgttcgggagaggagtggacccacgtcagaaatgaggttgtatcttttcccgggtcttctgtgagcaatgaagccacatca

SEQ ID NO: 829768 - DNA, 120 bp, Artificial Sequence
  ENSG00000125804_14 (sequence is synthesized)
atgggagttggcaatccctgtcactggaacgctggcctctctggacaagccacacttctggcccccctcctcttatgctcgtggaggtggcacggtgctgtatcctgcctgagctctggc

SEQ ID NO: 829769 - DNA, 120 bp, Artificial Sequence
  ENSG00000125804_15 (sequence is synthesized)
ctctgccctgccttccctcttgctctgtctcccctgtttctcagccgcctagatgcctcttgctctggctgaatgtcttcaacaaagatcatttccctgtccgtcagggagacacttcct

SEQ ID NO: 829770 - DNA, 60 bp, Artificial Sequence
  ENSG00000125804_16 (sequence is synthesized)
tgaaataggagccaaggtatgctatgagccaaggattatgagtaatccagttttgtgcac

SEQ ID NO: 829771 - DNA, 120 bp, Artificial Sequence
  ENSG00000125804_17 (sequence is synthesized)
tagggtgttatgctctgaatgtgtccccctaaaattaatcaccaatgtcataagattaggaagtagggctttaaggtagtgattcagtcatgaagggagagtgttcacgaatgagtttag

SEQ ID NO: 829772 - DNA, 120 bp, Artificial Sequence
  ENSG00000125804_18 (sequence is synthesized)
gatccttacacaaggactggatggagtgggcttcccctgttttgcccttccaccttctgccatgtgaggacacagtgcatctcctcctgaagacacagtgcacaagataccatcttggat

SEQ ID NO: 829773 - DNA, 120 bp, Artificial Sequence
  ENSG00000125804_19 (sequence is synthesized)
gcagagaccagaccctcaccagacaccaatcctgctggcaccttgatcttggacttctagcctatggaactgtaagattggggaagatgccaggtgatagaatccaccctgcctctgaca

SEQ ID NO: 829774 - DNA, 120 bp, Artificial Sequence
  ENSG00000125804_20 (sequence is synthesized)
atccactgggacatgatacccactgggaattttttgtgtcaatctggtctctgatgtccacctggggattgggtatccacctaaggcctgatgtttacctggagccagatgtgcacctga

SEQ ID NO: 829775 - DNA, 120 bp, Artificial Sequence
  ENSG00000125804_21 (sequence is synthesized)
gacctgatgtctatctgtggccttatgttcccctggggaccgatgcacacctgaaggataggtattcatctggggcctgatacccaccagtagtatgggtgtcaaccttggggctagtgt

SEQ ID NO: 829776 - DNA, 120 bp, Artificial Sequence
  ENSG00000125804_22 (sequence is synthesized)
tcagctggcgtccactgtctacttggggcctggtgtacacatggggcctgggcatccacctgagacttgatgtttaatatggtctggagttcttttggggcctgttgtaccctggagcct

SEQ ID NO: 829777 - DNA, 120 bp, Artificial Sequence
  ENSG00000125804_23 (sequence is synthesized)
gggtgtacacctggagcctgatgtcccaggtgaacaactgggtcccaggtgatcttcaggccctaggtgaaaactccaggctctaagtggacaaccaggctccaggctgatgtttactgg

SEQ ID NO: 829778 - DNA, 120 bp, Artificial Sequence
  ENSG00000125804_24 (sequence is synthesized)
ggccagatgtctaccaggccccaggtgaaatccccaggctccaaatggacaacatagccccaggttccaggtagacattggaatccaaatcaacaccaggccccagatggacacccaggc

SEQ ID NO: 829779 - DNA, 120 bp, Artificial Sequence
  ENSG00000125804_25 (sequence is synthesized)
ctgtggtggacatcagactgcagaaggtcatctggctcgaggtggacatcaagccccaggtggatacctagtccccaggtggatatcaggccccactttgacaccagtccctgggtagat

SEQ ID NO: 829780 - DNA, 120 bp, Artificial Sequence
  ENSG00000125804_26 (sequence is synthesized)
accttggcctcaggtggatatccagtctctagctaagcatcaggctccagggggacccaggccctagctgactggggactagtgttcatatggggccacatgtccatctgggccctaggt

SEQ ID NO: 829781 - DNA, 120 bp, Artificial Sequence
  ENSG00000125804_27 (sequence is synthesized)
gtcaacttgtagcctgatgtcaacctggaagctggtgttcaccagagaggactaaagtcctcctggtgcctggtgtccaacttgggactttgtgtccacctggagaccgatgtccacttg

SEQ ID NO: 829782 - DNA, 120 bp, Artificial Sequence
  ENSG00000125804_28 (sequence is synthesized)
ggaccagatgtccagctggagcaagatgtccacctgcagcctaaaacttcacctaaggcctgatgttccccagggcctacagagcctatgtatctacctagggacttgtgtccaggtggg

SEQ ID NO: 829783 - DNA, 120 bp, Artificial Sequence
  ENSG00000125804_29 (sequence is synthesized)
gcctgaattccacctggggcctggaattaacctgggacctgatgtccacctgagacgtgggtgttcctctggagtctgatatctatctggggcccgggtgtcctcctgtggtctgatgtc

SEQ ID NO: 829784 - DNA, 120 bp, Artificial Sequence
  ENSG00000125804_30 (sequence is synthesized)
cacttgtaggctggtgtccacctggggcctgggtgtccacctaggaacctgatgtatacctgaagtccagtgtctacgtgggtactgatgtctaccaggaaagtgatataaacctggggc

SEQ ID NO: 829785 - DNA, 120 bp, Artificial Sequence
  ENSG00000125804_31 (sequence is synthesized)
atatgttctgatttctcttttggccttagtgtagggcctgagtgccacctgcttcctgatgttcaccaggaacctaggtattcacttggggcttgctgttcacctgggacctaatgtcca

SEQ ID NO: 829786 - DNA, 120 bp, Artificial Sequence
  ENSG00000125804_32 (sequence is synthesized)
tgtgaggcctggtattcagctagagcctgggcatccccctgtggcctgaagttcagttgctgactaggaattccactaaagcttgatgtccacctggggcataggtaaccacttgtggcc

SEQ ID NO: 829787 - DNA, 120 bp, Artificial Sequence
  ENSG00000125804_33 (sequence is synthesized)
tagtgttgccctgaagcctaggtgtcaacccagggcataatgtccccttggggcctgctgtccacctgcagactggtgtctacatagggcctggtatccacctggggtctggtgtctgcc

SEQ ID NO: 829788 - DNA, 120 bp, Artificial Sequence
  ENSG00000125804_34 (sequence is synthesized)
tggggcctagtgtccacctgaagactgagtatagacctcagatctgatgtatgcctggggcctatttatccacctggggactagcattcatctggggcctcatgtccacttaagccctgg

SEQ ID NO: 829789 - DNA, 120 bp, Artificial Sequence
  ENSG00000125804_35 (sequence is synthesized)
gtgtcaacctggtgcctaatggccaccagggatctatgtactcacttggggcctggtgctcccacagggcctaggtataaacctggagaatgatgtgcaggtggaggtggatgtcttcct

SEQ ID NO: 829790 - DNA, 120 bp, Artificial Sequence
  ENSG00000125804_36 (sequence is synthesized)
gggtgctggtgttcacctggggacaagggtctccctggggaccagtgtttatcgggagcctcatatgcaccttgaacctgctgtctacctagggcccgatgtccatgttaaggctgggtg

SEQ ID NO: 829791 - DNA, 120 bp, Artificial Sequence
  ENSG00000125804_37 (sequence is synthesized)
tccacctgggacctggttgtccacttggggcctaatgtccacctaagacctagtgttcacctagggcctgggtgtccacctggagcctgatgttcagctggagatgcatccatccgaaac

SEQ ID NO: 829792 - DNA, 120 bp, Artificial Sequence
  ENSG00000125804_38 (sequence is synthesized)
ctaggtatccacccaggttctggtgtcgacctggggtcttatgtccacctggggactagatatctacctgaggcttgatgtccacctggagcccgatatccacctcagagctgggtgtcc

SEQ ID NO: 829793 - DNA, 120 bp, Artificial Sequence
  ENSG00000125804_39 (sequence is synthesized)
acccaagttctggtatccacccggagcctggtgttcatctggggcccagtgcccacctggaacctgggtatcaccatggggcctgggtgtccacttggaacgtgatgtgcacctgggacc

SEQ ID NO: 829794 - DNA, 120 bp, Artificial Sequence
  ENSG00000125804_40 (sequence is synthesized)
tgagtttccacctagggcctgatgaccaccggagacccaggtgtccacctggggtctgatgtctacctgaagcctaggtaaccacctgtgccttggtgttacctgtgccttgatttccac

SEQ ID NO: 829795 - DNA, 120 bp, Artificial Sequence
  ENSG00000125804_41 (sequence is synthesized)
ctgagcctgatgtacacctggggcctgggtgtccatctgaggcctgatgtacacctcaagtccagtgtccacttgtggcctgatgtcaacttggaagctgatatccacctggggactgat

SEQ ID NO: 829796 - DNA, 120 bp, Artificial Sequence
  ENSG00000125804_42 (sequence is synthesized)
gttctcctggggtctgatatccaactgggatcagatgttcacctaaggcctggagttaatctggggcctgatggtcaccagggacccaggtgtccacctagggcctagtgaccaactagg

SEQ ID NO: 829797 - DNA, 120 bp, Artificial Sequence
  ENSG00000125804_43 (sequence is synthesized)
gcctgatgtccacctggagtctagtatccgccttggccctgatgctacttgaggcctgggtgtcttcctagaacctgagtccccaactgggccctgatgtccacctgaggcctggtgtcc

SEQ ID NO: 829798 - DNA, 120 bp, Artificial Sequence
  ENSG00000125804_44 (sequence is synthesized)
ttgtagggcctgatatctacctaaggcctgggtatcctcctgcagcctgatgctcacctgtaggctggtgtccatatggggcctgggtgttcacctgtgagcctgatgtacacctggagt

SEQ ID NO: 829799 - DNA, 120 bp, Artificial Sequence
  ENSG00000125804_45 (sequence is synthesized)
ccggtgtccccttggttactaatacgtaccaggaaaatggtatatacctggggcctgatatacacctggagcctgtgtgtccacttgagccctgatgtccacctggggcctggtgtttac

SEQ ID NO: 829800 - DNA, 120 bp, Artificial Sequence
  ENSG00000125804_46 (sequence is synthesized)
ctggggcctctatccacccactaccgaaagtcaagttaggaaaagggcccaggataggtgaggagcacagaacagggacctcattcataagaaattctgctgtagaatgtgtgctctaag

SEQ ID NO: 829801 - DNA, 120 bp, Artificial Sequence
  ENSG00000125804_47 (sequence is synthesized)
ctcttaaaacagctctgcctcaggaaagactgtccagggcataggaagcccacacacagggtgggatgacaagtttgcatctggcacggctgggagccctgggggcctctgcccttttgg

SEQ ID NO: 829802 - DNA, 120 bp, Artificial Sequence
  ENSG00000125804_48 (sequence is synthesized)
ccgcgttgtctcctggcttttagggtggtgggattctcggctctgattgcagcaggtggattcacttagctctcctccccttttagcattactgtcttctgtaataaacctctcactttg

SEQ ID NO: 829803 - DNA, 120 bp, Artificial Sequence
  ENSG00000125804_49 (sequence is synthesized)
atctgccaggctgtcaaatgctttgattgccctctctgttttgttccaatggttcatcaatccaaatatccacaacacaaggacagattttagtctcttcatacagtgggatatttcaca

SEQ ID NO: 829804 - DNA, 120 bp, Artificial Sequence
  ENSG00000125804_50 (sequence is synthesized)
gctattaaaacaaatcaaataaatgcttgtgtattgatatgcaaagttgtcctgcatcaataacttttaaacacattttatgatcccacatctatatctatacataatgtttgccactgc

SEQ ID NO: 829805 - DNA, 120 bp, Artificial Sequence
  ENSG00000125804_51 (sequence is synthesized)
ttaaacaaaacaaaatctaagctttagactccaaatggaattacaggggaatcttgatgtctgtgttctgcagttctgtcatgtttgaaattgtcaaataaacatggtgcctttccagta

SEQ ID NO: 829806 - DNA, 60 bp, Artificial Sequence
  ENSG00000125804_52 (sequence is synthesized)
ggccggtgcagtggctcacacctctcatcccagttctttgggaggccgaggccatcaaat

SEQ ID NO: 829807 - DNA, 120 bp, Artificial Sequence
  ENSG00000125804_53 (sequence is synthesized)
atacaaagaattagccagagaagcagggaatctggaattttgggtgaaatgtctgtttccagaaggtgaaaatgctctcaaatggaaaattcagggtcagaatggccttgggtactgcac

SEQ ID NO: 829808 - DNA, 120 bp, Artificial Sequence
  ENSG00000125804_54 (sequence is synthesized)
atagaaggcgccagagctatagcacttctcttccctttagttctttggaaggatgagcaaattattcaccctctctgagcctcagtttcctcatccataaaatgatgacagtacaccaac

SEQ ID NO: 829809 - DNA, 120 bp, Artificial Sequence
  ENSG00000125804_55 (sequence is synthesized)
atccctcacagggtagcagcaagtgaaagggatccccctggccttgaggagctcacatctacttatttcccaggggtctctgtccagtgcccacacatgcctggcatgtagtaggtgcct

SEQ ID NO: 829810 - DNA, 120 bp, Artificial Sequence
  ENSG00000125804_56 (sequence is synthesized)
catccacatctggtgaaagagtggaaagcagagtgcagtgaatagaagacacttctctgcaccccaaaagctccatgctgattgtgagaaggaaatgctggatggaggggttcctggaac

SEQ ID NO: 829811 - DNA, 120 bp, Artificial Sequence
  ENSG00000125804_57 (sequence is synthesized)
catccacatctggtgaaagagtggaaagcaggtcattatcatgtattgtttggcacagaatctgcagtaggggacagagaaagtgcagtgaatagaagacacttctctgcaccccaaaag

SEQ ID NO: 829812 - DNA, 120 bp, Artificial Sequence
  ENSG00000125804_58 (sequence is synthesized)
cgcaaagagccgaccacgacgatgagaccacgggcggagtccaggggaagcagcaaggcatcccagcctcaggcctgcccggacggtgttcggatatatatatatggaaaagagaaggtc

SEQ ID NO: 829813 - DNA, 120 bp, Artificial Sequence
  ENSG00000125804_59 (sequence is synthesized)
caagaatatcaaagacattgaagaagaggaaagatttgtcctgccaaatatcagaacttttataaagctacagcaattaagacagtgtggtcctcactgataaactgactaatgaaacag

SEQ ID NO: 829814 - DNA, 120 bp, Artificial Sequence
  ENSG00000125804_60 (sequence is synthesized)
tgaaacagaatagagagctcccaagcaaatctctacaaatttaatcttcgatacgtgatgtaggtgacatggcagatcagtaaggaaagaaaggacttttcaataaatagaatagaaaaa

SEQ ID NO: 829815 - DNA, 120 bp, Artificial Sequence
  ENSG00000125804_61 (sequence is synthesized)
attgatataagaaacaaaatgaaattatattcctacttcactctatatacaaacattaaattccagaggaccaaagacttacatgtcagaaacaaaactttaaaacttttagtagaaaat

SEQ ID NO: 829816 - DNA, 120 bp, Artificial Sequence
  ENSG00000125804_62 (sequence is synthesized)
gtaagtgaatgggacacaaaaagccatttaaccattaaaaaagattagacattttgactatcacaaaattaagaactttttacatcaaaaagtggaaagataggctggtcacagtgtctc

SEQ ID NO: 829817 - DNA, 88 bp, Artificial Sequence
  ENSG00000125804_63 (sequence is synthesized)
tacatcaaaaagtggaaagataggctggtcacagtgtctcaatcctgtaatcccaatagtatatcacctgaggtcaggagtttgagag

SEQ ID NO: 829818 - DNA, 120 bp, Artificial Sequence
  ENSG00000125804_64 (sequence is synthesized)
attgaaattaaaaaataaaagtaaaaaagtcaaaagataaactataaattagagaagatatttgcagtacctaaaacctatgaaagattaatatcatatcaactaagcataaggagctcc

SEQ ID NO: 829819 - DNA, 120 bp, Artificial Sequence
  ENSG00000125804_65 (sequence is synthesized)
aaaattgggaaaagacattaatagggatttcacaaaagagaaagcttgcaaaacataaaaattttctcaacctcattagtaatcagggaaatgcacaagatactacacacctattctctc

SEQ ID NO: 829820 - DNA, 89 bp, Artificial Sequence
  ENSG00000125804_66 (sequence is synthesized)
aatcagggaaatgcacaagatactacacacctattctctccacaaatattaagaagtttgacaataccaaatgtattagtccataaggg

SEQ ID NO: 829821 - DNA, 68 bp, Artificial Sequence
  ENSG00000125804_67 (sequence is synthesized)
aagaaaaagaggcttaaatggattaagggttccacatagctgaggaggcctcagagttatggcggtgg

SEQ ID NO: 829822 - DNA, 120 bp, Artificial Sequence
  ENSG00000125804_68 (sequence is synthesized)
agaatagcatgggaaagaccagccccaaagattcaactacctccccctgattccctccccgaacacatgggaatcctgagcagtacaattcaagttgagatgtgggtagggacatagtca

SEQ ID NO: 829823 - DNA, 90 bp, Artificial Sequence
  ENSG00000125804_69 (sequence is synthesized)
gaacacatgggaatcctgagcagtacaattcaagttgagatgtgggtagggacatagtcaaaccatattattctgctcttcaaatccgat

SEQ ID NO: 829824 - DNA, 120 bp, Artificial Sequence
  ENSG00000125804_70 (sequence is synthesized)
gtaattgagtaaatacagctgttccaaatgggagtaattggccaaaaaaaaggggttacaggccccatgcaagtccaaaatccagcaaggtaatcaaattttaaagctccaaaatgatct

SEQ ID NO: 829825 - DNA, 120 bp, Artificial Sequence
  ENSG00000125804_71 (sequence is synthesized)
cctttgactccctgtttcacatcatggtcatgctgatacaagaggtgggctcccacagccttgtgtagttctgcccctgtggctttgtagggtatagtccacctcgtggctgttttcatg

SEQ ID NO: 829826 - DNA, 77 bp, Artificial Sequence
  ENSG00000125804_72 (sequence is synthesized)
ggctttgtagggtatagtccacctcgtggctgttttcatggactgatgttgagtgtccatagcttttccaggctcat

SEQ ID NO: 829827 - DNA, 120 bp, Artificial Sequence
  ENSG00000125804_73 (sequence is synthesized)
gggaagcaccgcggcagcctagcctcaggcctgcccagacggtgttcagggtcaagatgaccacactccacccgaggacaaaagccccacaggagctcactgtcctgcaggagaggagca

SEQ ID NO: 829828 - DNA, 120 bp, Artificial Sequence
  ENSG00000125804_74 (sequence is synthesized)
gctcttctctgagaaatgaagccacaccatgatacagtcttgaagaggaagccgggaatgggagatggcaacaatccctgtcacgggaacgctggcctctctggacaagtcactggttag

SEQ ID NO: 829829 - DNA, 120 bp, Artificial Sequence
  ENSG00000125804_75 (sequence is synthesized)
gggaacgctggcctctctggacaagtcactggttaggcccccctccccttgtgcccatgggggtggcaaagtgctgtatcctacctgagctctggcccctgctctgtcctccctcttgct

SEQ ID NO: 829830 - DNA, 120 bp, Artificial Sequence
  ENSG00000125804_76 (sequence is synthesized)
ctgtctcccctgtttctgtggtgcctagatgcatctaggtctagctgaatgtcttcaacaaagatcactttccagtccatcagggagacacttgatggacatgcgcatcactattttttc

SEQ ID NO: 829831 - DNA, 120 bp, Artificial Sequence
  ENSG00000125804_77 (sequence is synthesized)
tctctgccaatctgtttctgcttaattgggctggttggatgaccctggagagattgacttccatagctgtctcagataagcaagctaccttggtctccatgttccacctcatcggttggt

SEQ ID NO: 829832 - DNA, 120 bp, Artificial Sequence
  ENSG00000125804_78 (sequence is synthesized)
ctcattattgagaaacattctctcctctgctcctgggtggactgactccctgaatcttttggcctcctcctggatccaggtgttctttgattttccttggcattgatggaaaggtcactt

SEQ ID NO: 829833 - DNA, 120 bp, Artificial Sequence
  ENSG00000125804_79 (sequence is synthesized)
gtgccccccttccacctggcacatgcctgaacaccatcttgtgtttcaccatcaccccatatgccttcagtgacacacattcacaccatctgctctgggatacgccagtgccacgcatgt

SEQ ID NO: 829834 - DNA, 120 bp, Artificial Sequence
  ENSG00000125804_80 (sequence is synthesized)
tggaattgactccacttcggaatcgcccttgtccctgtttgcatgtgtcctgaaaagaggtgtcagcttgcaagggccccagagcttttacaagtgggacaggcgactgctctttcaaag

SEQ ID NO: 829835 - DNA, 120 bp, Artificial Sequence
  ENSG00000125804_81 (sequence is synthesized)
gaggagggaggcagagggctcatgggttagtgatttttctgctgacaccacaccttgaggcccatgtgatcattgtgccctgcaaggaggcccttcttttctcagcagatgtggtgagcc

SEQ ID NO: 829836 - DNA, 120 bp, Artificial Sequence
  ENSG00000125804_82 (sequence is synthesized)
catccgtcttcacccggaggggtccaaaatcggatcttaagaggggtcttcagatgccagcaggtgccctgaagctctccctccaccggtggaagtcagcttaaggaagtctttgagaca

SEQ ID NO: 829837 - DNA, 120 bp, Artificial Sequence
  ENSG00000278936_0 (sequence is synthesized)
gcaccagcacgcgcaccagcgcctctctgctcagcgcgggggagccgcggtctgtggcgcccacgcggaactcgaaagcctgcagggcctcgtagtccagcgacctgagggcgaacagcc

SEQ ID NO: 829838 - DNA, 120 bp, Artificial Sequence
  ENSG00000278936_1 (sequence is synthesized)
agccttggagtccccatatctgtgacggtgagggtgatattatattcagctcttgcttctctgtcgagtgctctctccgttaccaaggtgtaaaagttcttgactgaaggttttagaaga

SEQ ID NO: 829839 - DNA, 120 bp, Artificial Sequence
  ENSG00000278936_2 (sequence is synthesized)
aaagccggggagccgcggtctgtggcgcccacgcggaagtcgaaagcctgcagggcctcgtagtccagcgacctgagggcgaacaggtggccgttgtctgtgttgatggagaccagggag

SEQ ID NO: 829840 - DNA, 120 bp, Artificial Sequence
  ENSG00000278936_3 (sequence is synthesized)
gcgagttctctgggatggggctggtgagtgcagacatggtcacctgtgggggattgtcattcacgtccaccacctgcaggagaagagtgcactttcctgaaagacctcccccatctgtgg

SEQ ID NO: 829841 - DNA, 120 bp, Artificial Sequence
  ENSG00000278936_4 (sequence is synthesized)
ctttgatgcgcacttcataagacgtaaccatttcgaaatctacttgctttctcagtcgaacttcccctgtcataggatttacctccaaagttttactaatatcctccgaaggctgaaaga

SEQ ID NO: 829842 - DNA, 70 bp, Artificial Sequence
  ENSG00000278932_0 (sequence is synthesized)
ccctagttgtgggagcagacgcgtgggcacattgcgggcgggcagggcctgaagtgaataaatctctggt

SEQ ID NO: 829843 - DNA, 75 bp, Artificial Sequence
  ENSG00000278932_1 (sequence is synthesized)
gtctaagttgagtgcaaatttgttatgtgattggaatggaacccgagaagagagcatgctgtgttcttgtgggac

SEQ ID NO: 829844 - DNA, 80 bp, Artificial Sequence
  ENSG00000278932_2 (sequence is synthesized)
aaaaaggcagtcatgtttgttatgtgattggaatggaacccgacgtgcaccaagtctgaaccaccaccttcattggtgac

SEQ ID NO: 829845 - DNA, 120 bp, Artificial Sequence
  ENSG00000278932_3 (sequence is synthesized)
gtaaacacttgtagtgttgtgcagtggaaacggtcatcttccgctaaagcacggcgtgttgtgcagcggaaatggtcatctgctgctaaagcacagcttccatcgtaatgtatgctcctt

SEQ ID NO: 829846 - DNA, 71 bp, Artificial Sequence
  ENSG00000278932_4 (sequence is synthesized)
ccatctgtcccagtggaaacgcgtgcgcctctagtcttaaacttggcgtttgtattagttgggtttcctgg

SEQ ID NO: 829847 - DNA, 120 bp, Artificial Sequence
  ENSG00000278932_5 (sequence is synthesized)
gattccgcgagggagatggcttaatggatgatggtcgtcagccttaaggatacttcagtcttaactgtgtgttacaaagtttgaaagggagggttccctatgaataagaagcacacttga

SEQ ID NO: 829848 - DNA, 68 bp, Artificial Sequence; identical to SEQ ID NO: 808945
  ENSG00000278932_6 (sequence is synthesized)

SEQ ID NO: 829849 - DNA, 120 bp, Artificial Sequence
  ENSG00000278932_7 (sequence is synthesized)
gcggcacccagaggccgtcctgtagccgggccggcttggggcttggttctatgtccctgcgggtcggtgcaagggcgaagaggaacccgtgggcctcaggggatcccggggggccggacc

SEQ ID NO: 829850 - DNA, 120 bp, Artificial Sequence
  ENSG00000278932_8 (sequence is synthesized)
ctccacagacaacccccctgcctgaggtcacatagtggccagcaggccagagctggcgcagagaaaatacaagctgagcttagaacatcttctgccagaaagtaaaaaagtgccgacaga

SEQ ID NO: 829851 - DNA, 120 bp, Artificial Sequence
  ENSG00000278932_9 (sequence is synthesized)
tgggcctcaggggatcccggggggccggaccagtgttccctagttgtgggagcagacgcgtgggcacattgcgggcgggcagggcctgaagtgcagctatgtttccagtgtcctctgggt

SEQ ID NO: 829852 - DNA, 120 bp, Artificial Sequence; identical to SEQ ID NO: 270698
  ENSG00000272478_0 (sequence is synthesized)

SEQ ID NO: 829853 - DNA, 120 bp, Artificial Sequence
  ENSG00000272479_0 (sequence is synthesized)
taggatctcatttacatgtggaatttaaagaatttaacctcatagaaatagagagtagaatgatggttaccagagtatggagatggtcggaggaagggggaatagggaaagattagtcag

SEQ ID NO: 829854 - DNA, 120 bp, Artificial Sequence
  ENSG00000272479_1 (sequence is synthesized)
tgggtgcacagtcacagctagacaggaggaataagtcctggtgttctatccacattaaggtgactatggttaacaattttgtattgcatgtttcaaaatagctagaagaggggactgtta

SEQ ID NO: 829855 - DNA, 120 bp, Artificial Sequence
  ENSG00000272479_2 (sequence is synthesized)
caaaattaaaaaaacaaaataaaaaaacccacagatgtgtagccactaatcattaataggagtcagtcatcaccactggcctctgtgagtacagcccaaacagaatgttcttcttctacc

SEQ ID NO: 829856 - DNA, 120 bp, Artificial Sequence
  ENSG00000272479_3 (sequence is synthesized)
gtacagcccaaacagaatgttcttcttctacctcctggcccctgagccagagagaaacagtacatgccagagagttctttgaaaaatgaggcagcatcccttagcctggttggaggcatg

SEQ ID NO: 829857 - DNA, 120 bp, Artificial Sequence
  ENSG00000272476_0 (sequence is synthesized)
agagatgccctaaaacatctgttaagagcagctgcaacagggaaaccggagtcgggggatgagggccgcgaactggacggactgagagttgtgcccgcacgttcagtctcttcttggcca

SEQ ID NO: 829858 - DNA, 120 bp, Artificial Sequence
  ENSG00000272476_1 (sequence is synthesized)
actctttgctcacctcccaagtccccatcccgcttcctccataaagaaaaatccccaataaaagcaaaggcagagaagacaaagaggcaggaggaggctgcaaggagcgtccacaacaat

SEQ ID NO: 829859 - DNA, 120 bp, Artificial Sequence
  ENSG00000272476_2 (sequence is synthesized)
ggagaagatggagcgagcgaaactcctgaggacaatgaagggaggtggagaagcgccgagggaaacgctgctgacccgggccccgccagtggcggacgctggacacaggccgggccgcac

SEQ ID NO: 829860 - DNA, 120 bp, Artificial Sequence
  ENSG00000272476_3 (sequence is synthesized)
tggggccgggcaagcgggcgccgcagggcctgggggcgctggcggggcctgcgcgggttcgcgggcaaaggccggcgggactcaccggcattctgatctcggggccagaggtagtatgtc

SEQ ID NO: 829861 - DNA, 120 bp, Artificial Sequence
  ENSG00000272476_4 (sequence is synthesized)
ctgatctcggggccagaggtagtatgtcgccgggatcacgatgagccccacgaaggaggtgaggaagtagaagaaggtgttcccactgtcatcgtactggaactgctgcccggccatggc

SEQ ID NO: 829862 - DNA, 120 bp, Artificial Sequence
  ENSG00000272476_5 (sequence is synthesized)
accccctcctccgcctcgctcttctcaccgccgccgccacgaccacgctctgcactcccgctcccaacgccccggcccgagtggcgtagcttggacactgccgccgccgcctctcctccc

SEQ ID NO: 829863 - DNA, 120 bp, Artificial Sequence
  ENSG00000272476_6 (sequence is synthesized)
cgcccccacgccactctcacggacacgccgccgccacctctgccgctgccgccgccgtcgccagctctcgcgagaggagatagttcccgccccgctcagttttccctccccctgcgtgtc

SEQ ID NO: 829864 - DNA, 120 bp, Artificial Sequence
  ENSG00000272476_7 (sequence is synthesized)
cccagcgagctcgctaagggagacgtggcgagcgcaacggtggaactcggcgaggtctcgcccttagccccgccctaacgtcaaagccctcccccaacccctcccctagggtcccgcccc

SEQ ID NO: 829865 - DNA, 120 bp, Artificial Sequence
  ENSG00000272476_8 (sequence is synthesized)
taaccgctccgccttcctccaccgctcagtttcccagcgcaccacgccggattccgggcgtcggcgtacaggatcccagagaaggcttcccgccggagcagcggtcgcgggcggttcacc

SEQ ID NO: 829866 - DNA, 120 bp, Artificial Sequence
  ENSG00000272476_9 (sequence is synthesized)
tggctgcgcaggggtcccagatattcagagaagagctgaggctcagcctgtcctgccctctggattaattgccctggttgatcacgtttccttgggttctggatctgctcctccagcccc

SEQ ID NO: 829867 - DNA, 120 bp, Artificial Sequence
  ENSG00000272476_10 (sequence is synthesized)
agccggacgtggtggcgcgcgcctccatctcaaaaaaaaaaaaaattgggggatggggaggtgtgggttgcgggaggtgtgggttgcagttgtgttttcaaagcaatgtttactatctgg

SEQ ID NO: 829868 - DNA, 120 bp, Artificial Sequence
  ENSG00000272476_11 (sequence is synthesized)
gcgacagatttgaatctacgctgtgcccatcttgcagatgaagatttccccaagccgttacagatggttccctacccattccagagctgctaattataaccaccagcttcaggcggtagg

SEQ ID NO: 829869 - DNA, 120 bp, Artificial Sequence
  ENSG00000272476_12 (sequence is synthesized)
ctgagacctttattgttttgtgtcatttagtcatcagtaaaccccatggaataaagcaaagtatgtctgctctacaaatgagaaaattgaggcccagagagactgcccaaggtccctcac

SEQ ID NO: 829870 - DNA, 120 bp, Artificial Sequence
  ENSG00000272476_13 (sequence is synthesized)
agtaaaagaatgtctgaggattcaaacccatatcattttgatgccacaaagccagtgtgcccttgaccctccatcgcccaggaccttaaaatttcctgacagtgactggcattctccctg

SEQ ID NO: 829871 - DNA, 120 bp, Artificial Sequence
  ENSG00000272476_14 (sequence is synthesized)
cgggttgtgaacaggaaactgcatttcagggatggacggtggcgggagcagtcgctctcgggagcctctccttcccctggctgtgggaccctagaggctggtgtccgctgagctggaaac

SEQ ID NO: 829872 - DNA, 120 bp, Artificial Sequence
  ENSG00000272476_15 (sequence is synthesized)
tggacttctgcccagatctttgaacgaccccacggtccagcggcagctgtggctggggtctatcccagagtccattgcccctctctgggttaaaaggatagcccacctggttgcagagat

SEQ ID NO: 829873 - DNA, 120 bp, Artificial Sequence
  ENSG00000272476_16 (sequence is synthesized)
tgaaaggactaattgtgaaaatgcttttcaaaggagaaagtgtaatatgcaaataccaaatattacactatatttcaaggactcattttaatactttatactctgttaactaaatgcatt

SEQ ID NO: 829874 - DNA, 120 bp, Artificial Sequence
  ENSG00000272476_17 (sequence is synthesized)
ataatattccttccattgttggaggaaaaatctggttgctcattgtctttcatttcatgtcttcaaaactagtatcttaatcagtaatgctttccttcataatagattgtgttcatatgt

SEQ ID NO: 829875 - DNA, 120 bp, Artificial Sequence
  ENSG00000272477_0 (sequence is synthesized)
caggcactgaagtacttgatactaattggatattatgaccacttttcagcaattgtattactgtaatggtgggatccataaaggaaatggtaaacctgtcttatatgggtagttgtgtga

SEQ ID NO: 829876 - DNA, 120 bp, Artificial Sequence
  ENSG00000272477_1 (sequence is synthesized)
attgcaaaacttacatcaaataatttttttgcctcgtcttttgaacaagtcatgacatcattctagttcctttttcaacttagtgagatgtctgctctgtgttaatattataatgtgtat

SEQ ID NO: 829877 - DNA, 120 bp, Artificial Sequence
  ENSG00000272477_2 (sequence is synthesized)
aatctacaacagaattgtcctccaaattgcaagttttcctttttgaatctaatatatcaggctcatttttagatgacttagatgcataaggattttatcgtagcttgatgttagctctct

SEQ ID NO: 829878 - DNA, 120 bp, Artificial Sequence
  ENSG00000272477_3 (sequence is synthesized)
gagtttaagctatgccaatttagagagtgcttaacaatgtgtaattactttattttcacttaatagatttttacctgtgccttgtttcagatctgaataggtttcctttgacctcaaaat

SEQ ID NO: 829879 - DNA, 120 bp, Artificial Sequence
  ENSG00000272477_4 (sequence is synthesized)
cactaatgcagggaaaattaccatatcatgagagtatttttcctctttcttttttttgcctgatgcttagaataataaatactcccaaggcttaggagtagacatggcctgagagaaagc

SEQ ID NO: 829880 - DNA, 120 bp, Artificial Sequence
  ENSG00000272477_5 (sequence is synthesized)
ctattaaatgctattttctaatggttttaaaaaacaacttaaacaaatcatgctactcaaactgattttcttgctaaaacagaactagttttagagtatattttagacatctttttttct

SEQ ID NO: 829881 - DNA, 120 bp, Artificial Sequence
  ENSG00000272477_6 (sequence is synthesized)
caattactagttaaacttgaagttgggctctatctggatttgctttatagatctgcttcatttcatgccagatttgggcaaaccatgaacaacccccaactccaggaaaaaaaaaaaaaa

SEQ ID NO: 829882 - DNA, 120 bp, Artificial Sequence
  ENSG00000272472_0 (sequence is synthesized)
tttagaaggcagctatgatcaccactctatcaccaatgtcactaaaatcagtattcttgattgcctgctggaaataaaaatgtaattgctaaaatactcagtataagttaagtgatacgt

SEQ ID NO: 829883 - DNA, 120 bp, Artificial Sequence
  ENSG00000272472_1 (sequence is synthesized)
tacaagtaaagatctctcatgtgttaagtttcaagtttcacttaatgttcttaataaaataatggtaatttgaattctctacaaatacgttcagcctgtagtattctaatttacagatgc

SEQ ID NO: 829884 - DNA, 120 bp, Artificial Sequence
  ENSG00000272472_2 (sequence is synthesized)
ttgagaacacctaatatttttgattaacttaatgtcaaactattatcctaccttgtaaatagcatagaaattttaactatagtctttaaaaaatcaaatttcattggtagggaagtgtaa

SEQ ID NO: 829885 - DNA, 120 bp, Artificial Sequence
  ENSG00000272472_3 (sequence is synthesized)
atgtatggtttttttaaaacacaacattaaaaggttgaggttataactttcataaagatgaaatcactatttaaaagctgcacatagactgattattattgtttgtttgtcttagaagat

SEQ ID NO: 829886 - DNA, 120 bp, Artificial Sequence
  ENSG00000272472_4 (sequence is synthesized)
gtatctttaaattgctggaagacatcatgaatattttcattgctaattattggtaaagtctttagtatatgtcagttctgtttgtgtgggtatggttgctgtagtgcggcttaaaaaaaa

SEQ ID NO: 829887 - DNA, 120 bp, Artificial Sequence
  ENSG00000272472_5 (sequence is synthesized)
tcatatcgtgtgagctgattgcaaggggttaacccaaaatgagccacttcacttaaaattattctatatgttagtttgtgaattctgttgttggtatttaaacgtacatcatagtttaat

SEQ ID NO: 829888 - DNA, 120 bp, Artificial Sequence
  ENSG00000272472_6 (sequence is synthesized)
catatcacataaagttgtgatttcaggaatactttatatttcttttgctgtttttgcttgtgacaattgactggtccaccacatagaatttcttagtctttctaacactaggtgaacatt

SEQ ID NO: 829889 - DNA, 120 bp, Artificial Sequence
  ENSG00000272472_7 (sequence is synthesized)
tgaactgaccagatgattttatggaaacagcatgagacagtggaagtcaaatctctattctgtaccttgctttgcccctttctggctacaggagcctcagaagtcattcagagatgcagc

SEQ ID NO: 829890 - DNA, 120 bp, Artificial Sequence
  ENSG00000272472_8 (sequence is synthesized)
aaagtgcaggggatcaaaccattgatcgctgaatttgagtcttacttttgtcatttattattagctgtgtgacagctagtaaattaacttaatctctctgtctctgtgttttcatttgta

SEQ ID NO: 829891 - DNA, 120 bp, Artificial Sequence
  ENSG00000272472_9 (sequence is synthesized)
aatggtattaatattagtgcctctcccccagcgttcttaagaagattaaagcggttgatatttgtaaagtacttagaatattgcctgtacagctaattatttaataacattttaatgtga

SEQ ID NO: 829892 - DNA, 120 bp, Artificial Sequence
  ENSG00000272472_10 (sequence is synthesized)
tgtgacctcattagatctgatgtctacaaacagtactttgagtttgagaattgttatcattttaagtgtttcttgcctttgttttcaatacatcttgaaattattaaacttaaactggtg

SEQ ID NO: 829893 - DNA, 62 bp, Artificial Sequence
  ENSG00000272473_0 (sequence is synthesized)
ctcccaaagtgctgggataacaggcgtgaaccaccatgcccagccacgcccagctaattttc

SEQ ID NO: 829894 - DNA, 120 bp, Artificial Sequence
  ENSG00000272473_1 (sequence is synthesized)
agtactgagattacaggcatgagccaccgggcctggccccacggtgtgactttgacctcctcatgggaggaaaaagcaggatgaagcggggatgatgtctgtcggtcctcagcaggagca

SEQ ID NO: 829895 - DNA, 120 bp, Artificial Sequence
  ENSG00000272473_2 (sequence is synthesized)
tcagcaggagcatctgccaacgtctccacattgtggacctgagattgttctccggaagctgcagtcggagcatcgccaggcccagccctgggtcctccacccgggccactgcctctcagg

SEQ ID NO: 829896 - DNA, 120 bp, Artificial Sequence
  ENSG00000272473_3 (sequence is synthesized)
cggcctctccctgcccccgcccctccggggccccacagggcggccagtgcagacctgggtgtgcaacggccccatcagcgtttgtttcatgaacaaataaatgtctaaattcaggaccca

SEQ ID NO: 829897 - DNA, 120 bp, Artificial Sequence
  ENSG00000186235_0 (sequence is synthesized)
gcatttgacactcgacatcctcgtgcttcttaaagcacttgcccaacggtgagcaacggcctccaacggtgcccgagggactcgcgctgcccgttaagcagctttgcggtggcggaggct

SEQ ID NO: 829898 - DNA, 120 bp, Artificial Sequence
  ENSG00000186235_1 (sequence is synthesized)
gggctgccgtctctccgacatcccgggacggaggaagagatgaaggctctgcagcccccgccgcccgatttacgcttgagaaagcgaaggcgagagaggtcgtccagcccctgggggccc

SEQ ID NO: 829899 - DNA, 120 bp, Artificial Sequence
  ENSG00000186235_2 (sequence is synthesized)
cctcatgcagacagagccccggctcccatgttcaccatgctgagaaagacctgcgggggacagcaggaggacagccggggaatgggcccgcacttgcccaggtgagtgctgtggggagtc

SEQ ID NO: 829900 - DNA, 120 bp, Artificial Sequence
  ENSG00000186235_3 (sequence is synthesized)
aggccagccctgtggagaaggccgctggaaagggggaactgatgctgccattccttataaaaagggccacccagtccatgtagctgaggaccagcaccaggcaggatctttaatgggact

SEQ ID NO: 829901 - DNA, 120 bp, Artificial Sequence
  ENSG00000186235_4 (sequence is synthesized)
ggggcccggcggcctggacggcggagcgttgaaagctcccccagggataggaagtgcagccgaaatcaacgattgaggtcagtgaaggagcggacgcttgaggccttggaggggaagcag

SEQ ID NO: 829902 - DNA, 120 bp, Artificial Sequence
  ENSG00000186235_5 (sequence is synthesized)
ggccacaggcttgtttagggaggtggggacagagtcaggagggagaagtaccacttctcctgggagcggcacatggcatggaacaaaatagccctggggcacgccctgagcccagcccta

SEQ ID NO: 829903 - DNA, 120 bp, Artificial Sequence
  ENSG00000186235_6 (sequence is synthesized)
gttttctagctaaggatcaggtgagaacccccagacctctagctcctctcaggaggctggctgctggctggttcctcttccagaagtccgtgcagatcctgtcctctggctttgccttgc

SEQ ID NO: 829904 - DNA, 120 bp, Artificial Sequence
  ENSG00000186235_7 (sequence is synthesized)
ctaagacccagtctgcaccaaggctgagtccctggacttctggagagagagggctgtccctttgtgccctacaagtacagtgtgtgggcgcctcccctgggccctgcacaggttctgtgg

SEQ ID NO: 829905 - DNA, 120 bp, Artificial Sequence
  ENSG00000186235_8 (sequence is synthesized)
caccggcagcatgcgggaaggtgggaggaggcacaccctgcctttgggaagctgagaacagatccctgggggcaacctgtgcccctgtaaccaggaggagtctcaataggaaattttagc

SEQ ID NO: 829906 - DNA, 120 bp, Artificial Sequence
  ENSG00000186235_9 (sequence is synthesized)
tgctcctggtggagcagggcctctgtcttaaggagagtggaatttccgagggacagacatttcctgaccatttgtgtataggaatcaaggcaatgagagaacaatcaacagggcatggga

SEQ ID NO: 829907 - DNA, 120 bp, Artificial Sequence
  ENSG00000186235_10 (sequence is synthesized)
gatgagaaaaaggtgagatgacctctgacaggcaggctcctgaaggaaggcttcctggaggaggtggcatgtgagccctgcaggacaggtagaggttggaggatgagacagaggaggggg

SEQ ID NO: 829908 - DNA, 120 bp, Artificial Sequence
  ENSG00000186235_11 (sequence is synthesized)
gtgttggcgcgtggggtctgccctggggcgcgtgctgccttcgctagcttcaccccatttccctctctccccttcttaccatcagaggcagagctcgtgcatgcccgacctcgctcctca

SEQ ID NO: 829909 - DNA, 120 bp, Artificial Sequence
  ENSG00000186235_12 (sequence is synthesized)
cggctccctgggcagcagcgccctggcagttggaactggaaggcttatcagagtccacgcagccccaccgccctccccactctcgggggtgggcatcgggggacagggccagggcaggga

SEQ ID NO: 829910 - DNA, 120 bp, Artificial Sequence
  ENSG00000186235_13 (sequence is synthesized)
ggaagacagggcccggctcaccccacagctcagcccatgagggtgcgcagagcagggctggcaggagtgggccactccacacccagccctgttgaagagaaagaacagaaatagggaaca

SEQ ID NO: 829911 - DNA, 120 bp, Artificial Sequence
  ENSG00000186235_14 (sequence is synthesized)
gaaagttgtcgattgctgtgtaacaaattgcccgcagtttagtgccttcaaacaaacgtagctgcacagtgtctgtgggtcagacatccaggcccggggaaggagcctctgcctcaaggt

SEQ ID NO: 829912 - DNA, 120 bp, Artificial Sequence
  ENSG00000186235_15 (sequence is synthesized)
ccctcccgaggcctcagtcagggcccggccggactgtgagtagattgcacgctccgtgcggggaggctcggcttctctgctggccccgcgcctgtgggcaggattcagttcctcatgggc

SEQ ID NO: 829913 - DNA, 120 bp, Artificial Sequence
  ENSG00000186235_16 (sequence is synthesized)
tattagagtgagggcctcgatcttttctgctgtttggctggaggcctcgctcagttctctgctgcacggacctttccttggcacagctcccgcatagctgagcaagccgcgaaggcgggc

SEQ ID NO: 829914 - DNA, 120 bp, Artificial Sequence
  ENSG00000186235_17 (sequence is synthesized)
tcctgcagccgaagggaattctcccctgtttctgctgtgttctgtttgtgtaggttcagccccggggaggaggttccacaggacagacagaccaggagttgggggcgttgagggccatct

SEQ ID NO: 829915 - DNA, 120 bp, Artificial Sequence
  ENSG00000186235_18 (sequence is synthesized)
cacaggctgcccaccacagcccccacgcagccacctgtgtctgtgttcttgccactgtccctaccctccaggagtgggtctggtctcatcagggagggcagcgctctcttcactctgtcc

SEQ ID NO: 829916 - DNA, 120 bp, Artificial Sequence
  ENSG00000186235_19 (sequence is synthesized)
ttactctggtgtttcactgtgattttaaaaactgaaactgcacttgttaccccttgacagagctgcaccctgagagggcctctgcgacgcccctccttctcttaagcctttccaagctgt

SEQ ID NO: 829917 - DNA, 120 bp, Artificial Sequence
  ENSG00000186235_20 (sequence is synthesized)
ctgacgatttttaaatcccatttcctgagtgacacagagcatcttttcttaagcttatgagtgacttatttgtgttttcctcaaagctagaggggacccccaatctgtttgtttccagag

SEQ ID NO: 829918 - DNA, 120 bp, Artificial Sequence
  ENSG00000186235_21 (sequence is synthesized)
tccctgatggtgtcgtcttgggagtggaggaacctgagggaaaagcccagggacgagtcaggggagagctctgccctggtgctcttgcacgtatccacatgggccacagctgcacccggc

SEQ ID NO: 829919 - DNA, 120 bp, Artificial Sequence
  ENSG00000186235_22 (sequence is synthesized)
tctcagcagagggcatcgccatgctcctgggcacagccgggccctctcgcctccctgcggctcctgatgcctcccaggctccgctgaggtcaccttgggcacttagcgtggctgcagctc

SEQ ID NO: 829920 - DNA, 120 bp, Artificial Sequence
  ENSG00000186235_23 (sequence is synthesized)
tttgcagccccgtgtcctgtcatccatgtggccgtcatgtggtcacttttgggcattgccctgcgcaaggtccatggggactgggcacctttggccattctttctttggttgtctgtgca

SEQ ID NO: 829921 - DNA, 120 bp, Artificial Sequence
  ENSG00000186235_24 (sequence is synthesized)
ccagggataggaagtgcagccgaaatcaacgattgaggccctcttctctagcttctaggctgtaatctgtatgatctccatggcttcacctgctgtgctaccagctgcaaaatctatttc

SEQ ID NO: 829922 - DNA, 120 bp, Artificial Sequence
  ENSG00000186235_25 (sequence is synthesized)
cagcccagccctctctggagctctcatagagtttatccaaatgcccctggctgtcgcctctcaggaatcccacaggttctgcaacaagttcaaatgtgaactcagctttccaacaaaacc

SEQ ID NO: 829923 - DNA, 120 bp, Artificial Sequence
  ENSG00000186235_26 (sequence is synthesized)
tgctcctcccttcatgttctggatccttcagagcaacaagggcatcaatccttcaggctggaaaccagacggtccatggagacacctccctggagccctgcctgggcaaccttgacctcc

SEQ ID NO: 829924 - DNA, 120 bp, Artificial Sequence
  ENSG00000186235_27 (sequence is synthesized)
agcagaggagcagaggcctagacctcccttcgcccccaacacctggcgacggacatttgccggctctcagcagcgatgcgggaattttacattgcgcgtctggatatacacccaccacct

SEQ ID NO: 829925 - DNA, 120 bp, Artificial Sequence
  ENSG00000186235_28 (sequence is synthesized)
gagtgtgccattcacatgttactggactttgtcacatctagttaatcctccctgctttgatccgttttattttttatgcatttccaagtaaattatagacctcaggcggcttccctaaca

SEQ ID NO: 829926 - DNA, 120 bp, Artificial Sequence
  ENSG00000232721_0 (sequence is synthesized)
agcgcccgcctggcaggacgactgagcaaggctttggaaaaccagagagattagagcgcagaatggggaaatggagagagaacctgaaagagccccaaactcgaggacctattgctcccc

SEQ ID NO: 829927 - DNA, 120 bp, Artificial Sequence
  ENSG00000232721_1 (sequence is synthesized)
aagaataacatcttccagaactagacagaaactaagcgtctggaaaccctgaaatccttggaggagtagcatcatcctgaccctctgtgctccttttggcaaaggacttgcttccattgt

SEQ ID NO: 829928 - DNA, 120 bp, Artificial Sequence
  ENSG00000232721_2 (sequence is synthesized)
ttgtttgttcaattgtctgtttgttaaataaataaaactcttttcatatatctttaaaagtacgttggttctattattttatgattacaaacaatgctgcagtcatcattcttctacact

SEQ ID NO: 829929 - DNA, 120 bp, Artificial Sequence
  ENSG00000232721_3 (sequence is synthesized)
tgtcattggccactggtatatttccatagggtggaggcctggagagcagttgttccagcatagtgcttacatagattttatttcattccgttttctttcctttgttgctttattagctat

SEQ ID NO: 829930 - DNA, 120 bp, Artificial Sequence
  ENSG00000232721_4 (sequence is synthesized)
aacccttttcttatttcagtggctgctttagggtttctgggatatgtctttaatttatcacagtctgctttcaggtgtcattatgtctccctttctggcctttatcctagtgttatgtaa

SEQ ID NO: 829931 - DNA, 120 bp, Artificial Sequence
  ENSG00000232721_5 (sequence is synthesized)
tatacattataatccttgtgattcattattattacttttatttattacaccaaatattttttaaaagatttaaattctaagaaaatgtgtagtacatgctttctaaatgccatttccagt

SEQ ID NO: 829932 - DNA, 120 bp, Artificial Sequence
  ENSG00000232721_6 (sequence is synthesized)
tttccagtattcgtttctttgtataggcccacatttttatctggtatccttttgcctctgcctggaggacttttaataagatttcttgtaacgtgggttggtgaattgttttagcttttg

SEQ ID NO: 829933 - DNA, 120 bp, Artificial Sequence
  ENSG00000232721_7 (sequence is synthesized)
tatgtttttcgatgtccttatttcactcacagttttgaaattttatttttgcatagaattccaggttaactttttttctctgggtactttaaaaatgttaccatttatgaagcattgcca

SEQ ID NO: 829934 - DNA, 120 bp, Artificial Sequence
  ENSG00000232721_8 (sequence is synthesized)
ttataatatcatctttctttcctgtgtttgtaagaatggcataaagccggtttcttgcggtggttatataattttcagaatgtgtacttaaatttaaaatattaaattttactaaaaaac

SEQ ID NO: 829935 - DNA, 120 bp, Artificial Sequence
  ENSG00000232721_9 (sequence is synthesized)
taaaaatattaatcatgaacatcctagattcatcttaaattccaccaacagtgcacttaaaatgtgcccaacctgagggtcaaacctacctgctgacgtgtaatttgtgtttgtgagaca

SEQ ID NO: 829936 - DNA, 120 bp, Artificial Sequence
  ENSG00000232721_10 (sequence is synthesized)
ttctcaacagcatttgctttccctagctgagtgattttcctcacatctgaatgtcttcagtacaaaaggaaacctttgtctttgcaaaaatactttcaaatattcttacttcaagtaagt

SEQ ID NO: 829937 - DNA, 120 bp, Artificial Sequence
  ENSG00000232721_11 (sequence is synthesized)
atccgtggaaagcccgggagagacagtcaagtggttcaggatcaagagctaaacaagggaagacaaagcgtggcttcttcactaggagtccagccaaagtcaactgatttggtctccagt

SEQ ID NO: 829938 - DNA, 120 bp, Artificial Sequence
  ENSG00000232721_12 (sequence is synthesized)
ggaggtcggaactcggttcaccagcgacgtgaggacccggcccagaggaggcggactttctcttcctggtgccttcagataggaaatctagaatttctttctttccctttgatctacttc

SEQ ID NO: 829939 - DNA, 120 bp, Artificial Sequence
  ENSG00000232721_13 (sequence is synthesized)
taactctcccgttctatttcttcaagacctttttcggatccctactgcgaaggacctaaggggccgatgcccttccctaacggtccctccctggctgagtgtcttcggagcccaagctca

SEQ ID NO: 829940 - DNA, 120 bp, Artificial Sequence
  ENSG00000232721_14 (sequence is synthesized)
cctgtaaggttactgccctccggagacagcgagaggaccaaggagggcggcgggtgcggtgggaaccacagagtcaccgcgcacctgcgcctcgcgggctcctagcaaattgaataaatg

SEQ ID NO: 829941 - DNA, 120 bp, Artificial Sequence
  ENSG00000232721_15 (sequence is synthesized)
atccctgaagcttctctgcaggtcacagggaaggggagggtaggggtcgacccgcggaagaagcttcaagaagcatcgggaggacctggccctgcctctgggccttgaaaacaggcctgg

SEQ ID NO: 829942 - DNA, 120 bp, Artificial Sequence
  ENSG00000232721_16 (sequence is synthesized)
ccaggctgattttgtcgcgtaggcccaaagaaaagtgtcaagggcggcccaaaccctgacctcgagattaaggctcttaaatgtctgacggttttgagactcgtctgtagaatcgatccc

SEQ ID NO: 829943 - DNA, 120 bp, Artificial Sequence
  ENSG00000232721_17 (sequence is synthesized)
gcctgtatccggagaccggagactcctttgccaaaattcagagaccaagaaagagaaagattgggcagatcaaagtctgtaattaacccaaacaggaaacgtaatttttctgacaaattg

SEQ ID NO: 829944 - DNA, 120 bp, Artificial Sequence
  ENSG00000232721_18 (sequence is synthesized)
tatgtgtgctctgagaaaaagactagcctcaaggagaatctgtttttttggcttgagtgtagggaagaatggaattgccaccaacaatgttgcgttgaaacggcaggtgcatcaggctgt

SEQ ID NO: 829945 - DNA, 120 bp, Artificial Sequence
  ENSG00000232721_19 (sequence is synthesized)
agatgtgaaggaattaaaaatatttcaccccaaaatacatttctttgacacattttgagatgtctgttcagaaagccagctgcagaagtagccctgcaaagttgtattttgttggggaga

SEQ ID NO: 829946 - DNA, 120 bp, Artificial Sequence
  ENSG00000232721_20 (sequence is synthesized)
tttgcatctgtagggaatctgcattgatgcagccaagtctttctttgcccagatctaggaaagattaactgagagtctgacagctgtaaaggtctcaaagaaacttttagggtttactgt

SEQ ID NO: 829947 - DNA, 120 bp, Artificial Sequence
  ENSG00000232721_21 (sequence is synthesized)
ctctgagagctgctacctgtaaggtttcatttacatattaagaccacctttgctagctaagcctcctcttctctccctcctataacctgtcttgcccacaataaatggatatacatctga

SEQ ID NO: 829948 - DNA, 120 bp, Artificial Sequence
  ENSG00000232725_0 (sequence is synthesized)
gggagggagggaggccgcgggagctggaaggctggcggaagctgtgtcacagcgcgcccctgcgcccaccacccagacaagagagatctaagtcaggcgttgggcaggagatggagctga

SEQ ID NO: 829949 - DNA, 120 bp, Artificial Sequence
  ENSG00000232725_1 (sequence is synthesized)
ggaaggctggcggaagctgtgtcacagcgcgcccctgcgcccaccacccagacaagagagatctaagtcagaaaggggagacggagacacggacacacccagagggagagcgccgtgtgg

SEQ ID NO: 829950 - DNA, 120 bp, Artificial Sequence
  ENSG00000232725_2 (sequence is synthesized)
agacagaggctgaggccgacctgccgtggcagaagccagggaagcccgcagatgggcagcagagcagaagctgggacagaggccccgagcggaggcaccttctcggtccttggcagaagc

SEQ ID NO: 829951 - DNA, 120 bp, Artificial Sequence
  ENSG00000232725_3 (sequence is synthesized)
ccgccctgcctgcgccttcctctcggactgctattccccgagccgggagagaggccatctctgctgggaaagccactcaaagtttgtaacgctttgtgaccgcagccacaggatgctaat

SEQ ID NO: 829952 - DNA, 120 bp, Artificial Sequence
  ENSG00000232725_4 (sequence is synthesized)
catatgtggccctgcgcgcaggggccccatgagcttgcccgctgcccctgcctgcttgtgctgcccggggccagcctggaaaccaccttccttggactcactggtgatcagctcccccga

SEQ ID NO: 829953 - DNA, 120 bp, Artificial Sequence
  ENSG00000232725_5 (sequence is synthesized)
catcctaggaggggccgctgcgagcggagagggacccctcacaccatacagacaaaccaacccagagcacatcacaggctgatgtgtagtgtggcccaaagtatgaaactctcagaagaa

SEQ ID NO: 829954 - DNA, 120 bp, Artificial Sequence
  ENSG00000232725_6 (sequence is synthesized)
aatgggataaaacttcacgaccttggatatggcaatagttccttcactaggacaccaaaagcatgagcaacaagagaaaaacagatcaactgaacctcattcaactcaacacttttgtgc

SEQ ID NO: 829955 - DNA, 120 bp, Artificial Sequence
  ENSG00000232725_7 (sequence is synthesized)
accaaaggacaatatcgagacagtgaaaaagacaacctacagactgggagaaaactctggactggtgaaccacacatctgatgagggtgcagtatccagaatatacaaagagcttttaca

SEQ ID NO: 829956 - DNA, 120 bp, Artificial Sequence
  ENSG00000232729_0 (sequence is synthesized)
agcgcacagcacacacgctgttgtgagagttccgtgctcatttccttgtggatacaccaggaactcactctgctgtgacccttcagtacacctcatgttaggattagagacatctgggtc

SEQ ID NO: 829957 - DNA, 120 bp, Artificial Sequence
  ENSG00000232729_1 (sequence is synthesized)
atatcagctgccactgtcatcttctagtccctcaaagtgtcagctaaagaaacaggctcagaggatgttatttgattggactatgttgtatctctggagagcacagctgagatcagactg

SEQ ID NO: 829958 - DNA, 120 bp, Artificial Sequence
  ENSG00000232729_2 (sequence is synthesized)
ctgcactaccacagccgactggtctcgcagcatcttctcatatggtacaggtaccactgtggatttgcctaaagctttccctggggcagatgaaaagcggatgaacatcattcaatggta

SEQ ID NO: 829959 - DNA, 120 bp, Artificial Sequence
  ENSG00000232729_3 (sequence is synthesized)
agattacaaaatgaaatcatcgctagcttattgtggcttaataagggcatccatgattttttataatatatgatttcaaaattaattaatactacagcattctatctccccatgtcagca

SEQ ID NO: 829960 - DNA, 120 bp, Artificial Sequence
  ENSG00000232729_4 (sequence is synthesized)
gaactccctcactttccgcttcccagcattggcgggttccgggactggtggctgcggtagctcattggcctttggtctcttagacggtggagaataatcatcatcttgaaaaagaaaatg

SEQ ID NO: 829961 - DNA, 120 bp, Artificial Sequence
  ENSG00000232729_5 (sequence is synthesized)
cacttctatagacacttctgtgttaatcaagggaaatcttaagggaaggtgaaaatgcttctagaaggcgactggacaccagcacccttgcttgctgcctttgggctcttcctctaaggc

SEQ ID NO: 829962 - DNA, 120 bp, Artificial Sequence
  ENSG00000232729_6 (sequence is synthesized)
caacagtgacctgaaattattgactggctggccgtgctaatcaactggagaaaatggttccgaggtcaccaacatcagacaaattcattttaggacctatgtatgtgcttagaaagacag

SEQ ID NO: 829963 - DNA, 81 bp, Artificial Sequence
  ENSG00000232729_7 (sequence is synthesized)
tgttgaatgctactttagaaaaacatgttcaaatctaggaaaaaatttgatagaaaactatctatctatcggcagggtctc

SEQ ID NO: 829964 - DNA, 68 bp, Artificial Sequence
  ENSG00000232729_8 (sequence is synthesized)
gggagggtctcattctatcgcccaggctggagggcagtggcatgattatagctcactgcaacctcgag

SEQ ID NO: 829965 - DNA, 90 bp, Artificial Sequence
  ENSG00000232729_9 (sequence is synthesized)
tatctatctgtcgggagggtctcattctatcgcccaggctggagggcagtggcatgattatagctcactgcaacctcgagctcctggcca

SEQ ID NO: 829966 - DNA, 73 bp, Artificial Sequence
  ENSG00000232729_10 (sequence is synthesized)
tgggagattataggcatgagccacgggaccaggacagaaaacaattttaaaatgacaacctccctgtgaaata

SEQ ID NO: 829967 - DNA, 120 bp, Artificial Sequence
  ENSG00000232729_11 (sequence is synthesized)
acagaaaacaattttaaaatgacaacctccctgtgaaataaaacttgactggcacctgggtttgtatgactgtaaggattaaaaatggtcaagacaccctataaatagattaaggttcca

SEQ ID NO: 829968 - DNA, 120 bp, Artificial Sequence
  ENSG00000232729_12 (sequence is synthesized)
agggccaaaatgaaaagtagataaaatattttactttaaaaaacacatagagagagcaatggttggtttcttgcactattgtctttcttgaagatggtcccatcctggcatattctcagg

SEQ ID NO: 829969 - DNA, 120 bp, Artificial Sequence
  ENSG00000232729_13 (sequence is synthesized)
tacaatttggcctcagaatacagaagcccagcacatccaactattaccataaaataccaggaatgttttggctaatattctcattgaaaacttatcaggtaaatacaaacttcccattta

SEQ ID NO: 829970 - DNA, 120 bp, Artificial Sequence
  ENSG00000232729_14 (sequence is synthesized)
caaatgagtatatactgtcaacctattgggcagcgagcctcacacatactgaaaatcccattccagagaattgattttcacctatgaccctgcagtaaaacctcaatctcctcctttgac

SEQ ID NO: 829971 - DNA, 120 bp, Artificial Sequence
  ENSG00000232729_15 (sequence is synthesized)
tgttttcttgtaagagctttgttttatgatgtgacaagagtaagaaaaggtggctttgcatggaattagagagatgagcatgcttattagaaagaaacagctaggccaggcatggtggct

SEQ ID NO: 829972 - DNA, 120 bp, Artificial Sequence
  ENSG00000232729_16 (sequence is synthesized)
cttctcataaagagatcctaaaaaacctacagtaccagctgcagtaagtgtgccacgtgtggtcatggttgcaagatcatagttctcggggtgtttaaaggcaacaccttccggaagccc

SEQ ID NO: 829973 - DNA, 120 bp, Artificial Sequence
  ENSG00000232729_17 (sequence is synthesized)
gactcgagagctgacatgaggaatgtcaccaccatcctgctctccgaggactcctcatcttcaacggggagggtggacattgcaacttgggccatgatccctgtgcaggagaagtaagaa

SEQ ID NO: 829974 - DNA, 120 bp, Artificial Sequence
  ENSG00000232729_18 (sequence is synthesized)
gaaagtgagtggtagaaatctggtgtcctgaacccacagccaaagctgtgagggcccctcaccggctgcctaatttacagttttcttgctctagagacaaaataaggctcagaaactaag

SEQ ID NO: 829975 - DNA, 120 bp, Artificial Sequence
  ENSG00000232729_19 (sequence is synthesized)
tatttgacttgcccaaaccctcataagataaagaatctatcccctaattttctatatattgttatttccagaaaattgggtcaatatcacaccccaaataaatccaggtggcacccagaa

SEQ ID NO: 829976 - DNA, 120 bp, Artificial Sequence
  ENSG00000265445_0 (sequence is synthesized)
aaaacaagcggttcgcacgtctaaaaccacccagggaacggaggggtttccagaaaatatgagcagaggccactgcacgcttccacccaccccaagcacctcccggcgacctccctggaa

SEQ ID NO: 829977 - DNA, 120 bp, Artificial Sequence
  ENSG00000265445_1 (sequence is synthesized)
ccaagaggccctgcagggcatggagaaactggaatcagaagggagaagagctttgagtatgcctgaagcctgtgatgccaagactgttctctctggaagtgccaacctgtgtaatagcca

SEQ ID NO: 829978 - DNA, 120 bp, Artificial Sequence
  ENSG00000265445_2 (sequence is synthesized)
agaggtcccactggctcccctcccctcccagtgaattctgcagagattaaatatactgtgggaaggatctgtgtctacagtgttacatacgtgcaggtaagttttattttaaataaactt

SEQ ID NO: 829979 - DNA, 120 bp, Artificial Sequence
  ENSG00000256039_0 (sequence is synthesized)
agcctcttgagctgcttgcttggcccactctcactctgtggagtgtacatttgtttccataaatctgtgctttttttttcattgttttgtttgtgcatttcatccaattgtttgttcaaa

SEQ ID NO: 829980 - DNA, 120 bp, Artificial Sequence
  ENSG00000256039_1 (sequence is synthesized)
atgccaagaatctggacaccctccaccagtaacaggcattgggaaggggaaggcagaaaagcggagtgcaaaatgaagtggtagtgggtgctaactaacaagagaacctttgaacacgat

SEQ ID NO: 829981 - DNA, 120 bp, Artificial Sequence
  ENSG00000256039_2 (sequence is synthesized)
gggacagaaataaggtcatgcattttctactatctgtcacctgtggacaacttgccacttcaacagttctggacacttttaagctcccccgaggagaagataggaaacttggacaccctg

SEQ ID NO: 829982 - DNA, 120 bp, Artificial Sequence
  ENSG00000256039_3 (sequence is synthesized)
ccgtctgtcactacagacagcaagaagaggcaagaagagaatagaggcaaagcaagccactccagaagtcctctagccagctttgtctttagtttgatggccagaggtgggccatatgga

SEQ ID NO: 829983 - DNA, 120 bp, Artificial Sequence
  ENSG00000256039_4 (sequence is synthesized)
cactctgtagctgcaagggtgctgggaaagcgagtaacttctgagaatggcaggagatttggaatgattcatggattggccaacagtctctgctacttgaggctaatggttacacaagat

SEQ ID NO: 829984 - DNA, 120 bp, Artificial Sequence
  ENSG00000256039_5 (sequence is synthesized)
ttaacctttaaccagacatcaacaaatttttgagggcctattattcatactccaaaataaatacgaaagtcagggatccaagaaggctctttcaattcccagaaaggggataatatatat

SEQ ID NO: 829985 - DNA, 120 bp, Artificial Sequence
  ENSG00000256039_6 (sequence is synthesized)
gctatattccatagtacatagtggataaagaaaaacaatatactatattttttgtggtattttgatcctctgctcgtttacctgcagcaattatcagtaaaaaaaaaataaaaataaaaa

SEQ ID NO: 829986 - DNA, 120 bp, Artificial Sequence
  ENSG00000256039_7 (sequence is synthesized)
gagggaagaaaacagattctattaggggaaaaaaacatttaatcagaaaataaggctctggaaagaaaaggccaattggggctttgtctgaagaaataacagagtatttttctgccagag

SEQ ID NO: 829987 - DNA, 120 bp, Artificial Sequence
  ENSG00000256039_8 (sequence is synthesized)
aaagcaagtccaagggaggaattttcagattgaccaaagagtattggtctacatcattagtactttcagtgagaaataactgaaaataaactagagcaaaagttccccaggtgtggttcc

SEQ ID NO: 829988 - DNA, 120 bp, Artificial Sequence
  ENSG00000256039_9 (sequence is synthesized)
aggaccagcaactgaaacatcacctgggaactgttaaaaatgcaaattcttgggctctccgccagaatcactgaatcagaaactctgaaatgggacccaataatcagcagcttaacaagc

SEQ ID NO: 829989 - DNA, 120 bp, Artificial Sequence
  ENSG00000265443_0 (sequence is synthesized)
atcagtgcacggtgccaccatccttccaggccctccagccagaaccccaggagctgaaagccttgactcctctttctctcacccctaaatccagttcaagaaggcaggatttcgtcatgt

SEQ ID NO: 829990 - DNA, 120 bp, Artificial Sequence
  ENSG00000265443_1 (sequence is synthesized)
tttgtgtccagcttctcactcagcgccacgtttccaaggctcacctacgttatagcctggatccgggcttcattccgttttatggctgcgtagtattccactgcatgggtggaccatgtt

SEQ ID NO: 829991 - DNA, 120 bp, Artificial Sequence
  ENSG00000265443_2 (sequence is synthesized)
ttctttatccagtcatcggtaatggacatgtgggctgttgcacagaagggtcctttttattttctccctagctttactgaggcatcactgacaaatagaaattacatatatttaaggtta

SEQ ID NO: 829992 - DNA, 120 bp, Artificial Sequence
  ENSG00000269148_0 (sequence is synthesized)
tgagacggaaaattttcttgcgcccaccagcgcctgccagcctgtgtggaagagcagtgacagagatgcagtgacccagactgcagcaaaggcctgtctggtgactctcccaacttcaag

SEQ ID NO: 829993 - DNA, 120 bp, Artificial Sequence
  ENSG00000269148_1 (sequence is synthesized)
gactaggtaggcaacagagatggcccccatccccctgctgcctctccagttcctctgtgtctctgaggcacggtgtggcggtgggtaagaggaaggaagaggatgttattttggttttgc

SEQ ID NO: 829994 - DNA, 120 bp, Artificial Sequence
  ENSG00000269148_2 (sequence is synthesized)
agagggcgtcttacggaaggcttctgtgagtggggatctgaacggaggcagggacaagatacacaaatgtctgggggaccagctctccaggcaaaggcccttaggtgggaacagacttgt

SEQ ID NO: 829995 - DNA, 77 bp, Artificial Sequence
  ENSG00000269148_3 (sequence is synthesized)
acgagtggaggaggggtgagggtagcagaagagagctcggagggtagcagatcccgctcagctgtgttagtaagact

SEQ ID NO: 829996 - DNA, 60 bp, Artificial Sequence
  ENSG00000269148_4 (sequence is synthesized)
taataatggggacaatgatgatgacagccagtagcatttactacacaacaggaaccacgc

SEQ ID NO: 829997 - DNA, 120 bp, Artificial Sequence
  ENSG00000269148_5 (sequence is synthesized)
atgacagccagtagcatttactacacaacaggaaccacgcgaaatgcttgacaatcacaatcacttttcactcgagtatctagttacctaaccatcaccattaccacgaactaatttaat

SEQ ID NO: 829998 - DNA, 120 bp, Artificial Sequence
  ENSG00000223548_0 (sequence is synthesized)
tcctggccaggctggggctgttctcaccagaaaacaaaaatgtctttcagaccaaagcaaaacgaggccccagctggcccaggcaggccattgggcgttgttcacactgacccactatga

SEQ ID NO: 829999 - DNA, 120 bp, Artificial Sequence
  ENSG00000223548_1 (sequence is synthesized)
acaccaatcactggggctctcactttgcacccactggaaggaacccatcatctttggagacggaactggaggcctcggtggctgctgaggaaagcactacgccccaagattcacatgaat

SEQ ID NO: 830000 - DNA, 120 bp, Artificial Sequence
  ENSG00000223548_2 (sequence is synthesized)
taggagctacacaaaggaagtaggcccaggaataaccacacctaccacggatctcccgaggcagccgagcaaatgatgaggaaccacccctgggcatcctgaaggacaaccccaagggct

SEQ ID NO: 830001 - DNA, 120 bp, Artificial Sequence
  ENSG00000223548_3 (sequence is synthesized)
ccaacgcaaggaatgggagcatcacaccagaccatccagtgaggtgaggaccttgactgggaattcctctcatctatgcttggcagagtggcccaagctcccaatctgtcaggtgactgg

SEQ ID NO: 830002 - DNA, 120 bp, Artificial Sequence
  ENSG00000223548_4 (sequence is synthesized)
aaccttggagctctaaggaagcagcagccctcagagaagactctcttccacaaaactggtcacccagaagctgtgggttcactagttgattcattcattcattcaacaaacacttctgga

SEQ ID NO: 830003 - DNA, 120 bp, Artificial Sequence
  ENSG00000223548_5 (sequence is synthesized)
gcacctccttctattccaggctgcactggttctcagcacacagggttctccagtgaagggtaacctggccctgcctgcaaggagtttacacctgcttttccctactgcttctaacatatt

SEQ ID NO: 830004 - DNA, 120 bp, Artificial Sequence
  ENSG00000223548_6 (sequence is synthesized)
ggcatcatcccccacctgggcacagagcctagcatcctagcaggagcacactcaaaatctgttgtttactgattgacttgtggtaaggaaacagcttataaaacacattattaaaataaa

SEQ ID NO: 830005 - DNA, 120 bp, Artificial Sequence
  ENSG00000223542_0 (sequence is synthesized)
cttattgcctgcaaagctgcctgaaaaagtagtttctcaagaaaagcagtttctcaagaaacatttcagtaataaatgaatgagtgaaatggtgtgtaagccataaccatcttagaaaca

SEQ ID NO: 830006 - DNA, 120 bp, Artificial Sequence
  ENSG00000223542_1 (sequence is synthesized)
gctgtgaaatcaagcatgctggctgggagatgtggctcctctccgcggcacagtgtctatatcactgatcaggtggacagatagtcccagaaggaggccctcaccaacccatttccccag

SEQ ID NO: 830007 - DNA, 120 bp, Artificial Sequence
  ENSG00000223542_2 (sequence is synthesized)
tgggaaccgcaagaggaaggagacccttaacaaggaccaggaaagtggtgtatgcataaagaaaggaagctgttcttgaaatgtgccagtgacctcatccctgtccctgaggccagcatg

SEQ ID NO: 830008 - DNA, 120 bp, Artificial Sequence
  ENSG00000223542_3 (sequence is synthesized)
agtgcttgcagtgcaagtgacccatctgccagggtgacctcaggcctcggactaacagcaaataaagccatgaacacactgttctctggacacttttgcaatttttcctttccagggcct

SEQ ID NO: 830009 - DNA, 120 bp, Artificial Sequence
  ENSG00000223542_4 (sequence is synthesized)
acagctctagacttgagacctgcaactcttcccctttgttcactatgactctaacaaatttaaaacatgtcagttctctccaaccccaagaaatgtgaataaatgtttccgaaaaccaga

SEQ ID NO: 830010 - DNA, 120 bp, Artificial Sequence
  ENSG00000223546_0 (sequence is synthesized)
gagaccaatttggcctggggagaaccgccttcaggcgtttggactcagtggaggttgtgagtgcccagcagtgtggcctgaatctccgtggggtttagggagacgaaaggaccccagatc

SEQ ID NO: 830011 - DNA, 120 bp, Artificial Sequence
  ENSG00000223546_1 (sequence is synthesized)
gacgtcccctcgttcccactttggggatcggcgctctggctgtttcgtgaaggagagagaggttgattccataccctggctattgtgaataatgctgcagtgaacatgggagtacataca

SEQ ID NO: 830012 - DNA, 120 bp, Artificial Sequence
  ENSG00000223546_2 (sequence is synthesized)
tctgtttgaggaactcagagtggttttccagatgggaatcacattgctctctgtccctgagatcttgctggagacagggctactcagtccctctttgccaggtgagtatagatgcagtgt

SEQ ID NO: 830013 - DNA, 120 bp, Artificial Sequence
  ENSG00000223546_3 (sequence is synthesized)
tgggataggtctggcactgtggccaggtatgtctcctgtcccatatccatctgcatgtccattatacacagctgtattagtttgttttcatgctcctgataaagacatacccaaaactag

SEQ ID NO: 830014 - DNA, 66 bp, Artificial Sequence
  ENSG00000223546_4 (sequence is synthesized)
tgaaaagctcttcttacatggtggcagcaagagaaaataaggaagaagcaaaagcggaaacccctg

SEQ ID NO: 830015 - DNA, 89 bp, Artificial Sequence
  ENSG00000223546_5 (sequence is synthesized)
aaatatcccatcagatctcgtgaatctcattaactatcacgagaatagcacgagaaagactggcccccatgattcagttacctccccct

SEQ ID NO: 830016 - DNA, 66 bp, Artificial Sequence
  ENSG00000223546_6 (sequence is synthesized)
gggtccctcccacaacatgtgggaattccgggagatacaattcaagttgagatttcgatggggacg

SEQ ID NO: 830017 - DNA, 120 bp, Artificial Sequence
  ENSG00000223546_7 (sequence is synthesized)
atgaagagtgagtgcagatgaagaggaggcaggactcacaagcccttgaactttattccagatctgttagcacctacaggaccctgcaccaggatttcatctgtactatcagcttcttca

SEQ ID NO: 830018 - DNA, 120 bp, Artificial Sequence
  ENSG00000223546_8 (sequence is synthesized)
aagagagagaggttgttgaattgatattggaaaagcagtttcccattgagtctcaaatgaagagagtgcagatgaagaggagctcttcatgtggatgtctgagctcatatcaggtgtctg

SEQ ID NO: 830019 - DNA, 120 bp, Artificial Sequence
  ENSG00000223546_9 (sequence is synthesized)
aaagaggcagattctgaggatttgggtcatgatggctgccaaagcttctactcctgacttaaagggcaacaatcctaggagaccaccagcacttacatccctggtaggacatgacacctg

SEQ ID NO: 830020 - DNA, 120 bp, Artificial Sequence
  ENSG00000223546_10 (sequence is synthesized)
cttatggctcagaagtgacaaaagagaattatcaggatggcagtccttataaccagatgcttatcaacattcttcactacattctgaagatgaatttctacaagggaaattgtttatatt

SEQ ID NO: 830021 - DNA, 120 bp, Artificial Sequence
  ENSG00000223546_11 (sequence is synthesized)
tgttgttggggatagataaggaaagaagaaaaaggctctggtgagaaacccattgtaccttctggatatgatcactacccaattttatcagtgtcattgatcactaacccagtgcctcgt

SEQ ID NO: 830022 - DNA, 120 bp, Artificial Sequence
  ENSG00000223546_12 (sequence is synthesized)
tgtgcaactcttcatgcatgtgactgaacttatattaagtgtctgaaggaggttcgttctgaggatctgggacatgatgggtgctgaagcttctactcaagatttgaagggcagctgtcc

SEQ ID NO: 830023 - DNA, 120 bp, Artificial Sequence
  ENSG00000223546_13 (sequence is synthesized)
tcaggagacccctggcacttccctccatggtgggatgtgatgcctgattccagtgagttcatagagctgaacaaaagtacgttgtggaatagctcctgtgaggttcacaacatagtccgg

SEQ ID NO: 830024 - DNA, 120 bp, Artificial Sequence
  ENSG00000223546_14 (sequence is synthesized)
aagatgagaaactactttttttagtaacctggattcccatctaagagatgccttactttatcgtaaagcaatgagttgttcacttgaggagggaacttcatgtttaacatgtatttgcaa

SEQ ID NO: 830025 - DNA, 120 bp, Artificial Sequence
  ENSG00000223546_15 (sequence is synthesized)
caaatttacatacattttctgcctgtatgaatagttgtcagtgatgcccatgaatttctcagatggatgttgaagtatacagttagaaggttagaagatcttcctagcaatctgtgatta

SEQ ID NO: 830026 - DNA, 120 bp, Artificial Sequence
  ENSG00000223546_16 (sequence is synthesized)
cggtatgcattcttccatggtttctacgtttttgtctattctataatgaaattttctaagaagccagaaattaattaagtgctacctaaaaatatcaaaatgtcaggtacaagaatttgg

SEQ ID NO: 830027 - DNA, 120 bp, Artificial Sequence
  ENSG00000223546_17 (sequence is synthesized)
cattttcaaaattagtaattacaatgtaagtttgccctattataatgatacccagctatgtccagtaacataactagattgttctgaataccgttattatttcccaataatacaaacatc

SEQ ID NO: 830028 - DNA, 120 bp, Artificial Sequence
  ENSG00000223546_18 (sequence is synthesized)
acaatttcagttctgtagtacctggcctacctacccttcccactgccttgccccaggtaaacacagcatgcctgtcactatacattattttacatgcctggaaatatatttaaatggaat

SEQ ID NO: 830029 - DNA, 120 bp, Artificial Sequence
  ENSG00000223546_19 (sequence is synthesized)
catagaggtggtttcttttttttttttttatcaacacctggcttttttcattcactccacttatttttatatttatccattttattgcatttatctattgatatacttcattctttttga

SEQ ID NO: 830030 - DNA, 120 bp, Artificial Sequence
  ENSG00000223546_20 (sequence is synthesized)
ttgctaaatactattgcggtatacaaccacactaaacattttattatccatccatttgtcgatggacattttggttgtttctcatttggggctcttgtaaataaagctgctatgaacatt

SEQ ID NO: 830031 - DNA, 120 bp, Artificial Sequence
  ENSG00000223546_21 (sequence is synthesized)
tactgtgatgacagcaaaggctggaccacattcctgccccttacttgatgtgtgatgctgaaatcctttcttaccctctgtcagcttgcccttagttatctgtaaaaggagacttactac

SEQ ID NO: 830032 - DNA, 120 bp, Artificial Sequence
  ENSG00000223546_22 (sequence is synthesized)
gtcttccttacataactagtctatggtgtaaataagaaatcctgtacagcatatatgtcacctagtaggacatcaacaaatgcttatactgacccacttttcacctccctcctagagaag

SEQ ID NO: 830033 - DNA, 120 bp, Artificial Sequence
  ENSG00000223546_23 (sequence is synthesized)
tgatgactgttacctaagccaaacagcacaattgccatagagtctacctggaaacataccaagcagtaagaagttaaacctactcacatttgcattatgaatgaagctttgggaaccatt

SEQ ID NO: 830034 - DNA, 120 bp, Artificial Sequence
  ENSG00000223546_24 (sequence is synthesized)
ccagtgttgcaggagggctttgctgagggatcagggaaaagggaaggagataattaaaacatttcctttaatcccctgtcattttctgcccccttgtttgatcttctagattgatactgg

SEQ ID NO: 830035 - DNA, 120 bp, Artificial Sequence
  ENSG00000223546_25 (sequence is synthesized)
gaaatattttcagtccaagattggttgcattcatgtatgcagaatccacagatacaaaaggtcaactgtacttatttatttaattctcaccacaacctatgagaaggatctattgttgcc

SEQ ID NO: 830036 - DNA, 120 bp, Artificial Sequence
  ENSG00000223546_26 (sequence is synthesized)
tgactttagaaaaaaggaaactgaggtacagtgaagacagagttagcaagtgccaaggcttagatgtgaacacaggctgtgtggctcctgagtaaattcatctatccagtgtgtgctgct

SEQ ID NO: 830037 - DNA, 90 bp, Artificial Sequence
  ENSG00000223546_27 (sequence is synthesized)
tacagggatcacctcgtgatctcagtgatagataacaccaggtaagcaaagtgtggagtttgcctaatggctcctggactgtttggtata

SEQ ID NO: 830038 - DNA, 120 bp, Artificial Sequence
  ENSG00000223546_28 (sequence is synthesized)
cgtgatctcagtgatagataacaccaggtaagcaaagtgtggagtttgcctaatggctcctggactgtttggtatattaatatattacaggaaagctgggcacagtggctcacgcctgta

SEQ ID NO: 830039 - DNA, 84 bp, Artificial Sequence
  ENSG00000223546_29 (sequence is synthesized)
gcctaaaaagtagccaggcatggtgacgcacgcctgtaatcccagctgcttctcaggtgctgaggcaggagaattgcttgaacc

SEQ ID NO: 830040 - DNA, 120 bp, Artificial Sequence
  ENSG00000223546_30 (sequence is synthesized)
agaagtctgagtggaaaattgggcattcccagtgtgtaggaatactgacagcctccattaaaaaaatggagccttttactatgtggaagagaaaactatgtcagaataataaatatatat

SEQ ID NO: 830041 - DNA, 120 bp, Artificial Sequence
  ENSG00000223546_31 (sequence is synthesized)
tttaaatgctttgagacatatggataaatagctggagacctgggctcagaagtgacaaaagagaattatcaggatggcagtccttataaccagatgcttatcaacattcttcactacatt

SEQ ID NO: 830042 - DNA, 120 bp, Artificial Sequence
  ENSG00000223546_32 (sequence is synthesized)
ctgaagatgaatttctacaagggaaattgtttattccaaaggggcttgatgaaagcctcatactgtctgctgttcgggacactggagcaagagagaccagagatctctctgcatattggt

SEQ ID NO: 830043 - DNA, 120 bp, Artificial Sequence
  ENSG00000223546_33 (sequence is synthesized)
gccagacccaaaccagtaactgtgagatgttctgggctcagggttaacctcagagacctggtaatccatatgaccccacagctatgcctcatgcccaaagggcaggatttcatctctacc

SEQ ID NO: 830044 - DNA, 120 bp, Artificial Sequence
  ENSG00000223546_34 (sequence is synthesized)
atcctcttcctcaatgtgaagggctgttgagagaatctgtctcatggatggatgcccagcctcgatgaaccatatacagagcttctccaaacatggatatgaagcaatgcttaggtccct

SEQ ID NO: 830045 - DNA, 120 bp, Artificial Sequence
  ENSG00000223546_35 (sequence is synthesized)
actcccagagggacctgtagacctctgacctcatccctgtccaggagaaacctctcttcttctcccttctctgtgtcctcagaacccttcccctccctgccagatacaagcagcccaatc

SEQ ID NO: 830046 - DNA, 120 bp, Artificial Sequence
  ENSG00000223546_36 (sequence is synthesized)
tctgcatccagccctgctataaacccttcctgagacagagggaaagaggcccaagcctggttttctgctggaaatgcaggaagggtaaacacaaggagaacagagattaaactccttaac

SEQ ID NO: 830047 - DNA, 120 bp, Artificial Sequence
  ENSG00000223546_37 (sequence is synthesized)
agtatatgtcctcatgctaaagatctgccaccagcaactcaaggtacccaagctggcaggttctggcagtgggcctggctctggcaatgggcgtgctgagcaacatttttgccatccagc

SEQ ID NO: 830048 - DNA, 120 bp, Artificial Sequence
  ENSG00000223546_38 (sequence is synthesized)
tctgtggttaggagcatgtgctttgtagtcgcagacatccatgaagaagagaggatactggtacctcagtagcagggctgtcatgagatcaaatccagacactagaaggacctggagcta

SEQ ID NO: 830049 - DNA, 120 bp, Artificial Sequence
  ENSG00000223546_39 (sequence is synthesized)
ggctcctctaaacgctctgctccgtaagtggaagctatctttcctccctggagcagggaactcatctattaatttgacctgcctccatgtccagggcttcttaaccaggatgcatatcag

SEQ ID NO: 830050 - DNA, 120 bp, Artificial Sequence
  ENSG00000223546_40 (sequence is synthesized)
agtcaccttgatgagccttttctaaaccctcagctgaaactcctttgttggtagaaataggactgctgcacaaaggccattcaagtcattaagctgtaataatatgggcctcagaaaatg

SEQ ID NO: 830051 - DNA, 120 bp, Artificial Sequence
  ENSG00000223546_41 (sequence is synthesized)
tatacatcaatgttgcaccaatagtgtatatgaaagtctgtctcccctttatttcaccagcactaggtattactggtttttgtcctttttttcagtcttacctgctcattttccttagac

SEQ ID NO: 830052 - DNA, 120 bp, Artificial Sequence
  ENSG00000223546_42 (sequence is synthesized)
ttgcctcattggaaatattatgtcagaaggtcaataaaacttacatatccaaaggctacaccgtagggttgccagattttgcagataaaaatatgagatgcccagttgaattcaaataaa

SEQ ID NO: 830053 - DNA, 120 bp, Artificial Sequence
  ENSG00000223546_43 (sequence is synthesized)
gttgatcactttgcttggacaaatggctggacctgccatttctatatatactgattcatggactgtggacaatagtttggctgcatgatcaggaacttggaaaaaaacatgattggaaaa

SEQ ID NO: 830054 - DNA, 120 bp, Artificial Sequence
  ENSG00000223546_44 (sequence is synthesized)
caaatgtctctgcaaagaggttgtaccaatttgtcctccctaggccatgtatggaattatcatggccctgcattttccatttaatgaggatacagcataaacaccaactcactgattgag

SEQ ID NO: 830055 - DNA, 120 bp, Artificial Sequence
  ENSG00000223546_45 (sequence is synthesized)
tttgtttgagttcattgtagattcttattccaggacatatttaagacataaagttggatcattatgtttccatttggtaatttaaatgtgaaatatgccatttataggaaaataaaatat

SEQ ID NO: 830056 - DNA, 120 bp, Artificial Sequence
  ENSG00000223546_46 (sequence is synthesized)
aatgtgaaatatgccatttataggaaaataaaatatggaaaatgaaaaataatctaacattccaacaaaagtatatcacattagcaaatattaataatatagtgaaacccattatttgta

SEQ ID NO: 830057 - DNA, 120 bp, Artificial Sequence
  ENSG00000223546_47 (sequence is synthesized)
cagatcttggaaaatgagtattcatatcttgtatttcattgtgacaaattagcaaagagattttaaggtgaattagacaaatgtttaatattcatgctttttgaggaagcagtcccactt

SEQ ID NO: 830058 - DNA, 120 bp, Artificial Sequence
  ENSG00000223546_48 (sequence is synthesized)
tggaaacttatactctggttaacagcctgagaggtccttgccatcatcaatcatgtgtccctcctgctcagtgctgagctgaccatttgcctaattggcttggtgccttaaggactccct

SEQ ID NO: 830059 - DNA, 120 bp, Artificial Sequence
  ENSG00000223546_49 (sequence is synthesized)
gaccctgttccatccatccttttatccaaagagaaaaataggtctcatggctggatgcccaatttcaatggaccttggggttggatcaaacccaagggttgatatggagcagtgctcaga

SEQ ID NO: 830060 - DNA, 120 bp, Artificial Sequence
  ENSG00000223546_50 (sequence is synthesized)
tccttactcctggagggacaagtagatctctggcctcatccctatttgggataaatctctcttcctctcctttctctatgtcctcagaggccttccctttcctaccagataacaagcagt

SEQ ID NO: 830061 - DNA, 120 bp, Artificial Sequence
  ENSG00000223546_51 (sequence is synthesized)
ccaatctttcccttaagtttaagtttcctaaagaatggaagaaactggattcagacatctttggctcccaaccctgtcataaacctcccctaaggcaaggggaaggaacaccaagcctgg

SEQ ID NO: 830062 - DNA, 120 bp, Artificial Sequence
  ENSG00000223546_52 (sequence is synthesized)
ttccttgctggaaatgcaaggagggtaaacacagggaggacagacattaacttccttaacagtgtgtgtccagatacatttgctaaagatctgccaccagcacttaaggtgcccaggttg

SEQ ID NO: 830063 - DNA, 120 bp, Artificial Sequence
  ENSG00000223546_53 (sequence is synthesized)
ccagctactatctctggctctctcagtttctgtggtaatcaaatcctttgccattctactttgcccttgctcatctgtaaaaggggactcacaatgcctttcttagacaaattttctgtg

SEQ ID NO: 830064 - DNA, 120 bp, Artificial Sequence
  ENSG00000223546_54 (sequence is synthesized)
gggtaaatgagaaatcccatacagagtagatggcacctagtagaacttcaacgaatggtcatccaggcccacctttttcctccctcccagagaagtgatgactgttatctaaaccaagca

SEQ ID NO: 830065 - DNA, 120 bp, Artificial Sequence
  ENSG00000223546_55 (sequence is synthesized)
gcataattgccacagagaccacctggaaggagagcaggaagatggagcatgtgctcacacttacattatacatggacctttggggccatttctgtgttgcaggatggtttgctgaggtat

SEQ ID NO: 830066 - DNA, 120 bp, Artificial Sequence
  ENSG00000223546_56 (sequence is synthesized)
tggagtgagatgagaagatcgtcaaaccaatcccctatcattttctgccccctcatttgatctgctacgttgatttggaaaagcagtttctattgagcctcaaatgaagagagagtgcag

SEQ ID NO: 830067 - DNA, 120 bp, Artificial Sequence
  ENSG00000223546_57 (sequence is synthesized)
atgaagaggaggcaggagtcataagcctttgacccttataccagacccattaccacctataggaccttgcactgggatttcatctgcacgatcagctctttcaaagagagagaggttgtt

SEQ ID NO: 830068 - DNA, 90 bp, Artificial Sequence
  ENSG00000223546_58 (sequence is synthesized)
catctgcacgatcagctctttcaaagagagagaggttgttgagtgagtacccacaagggcataatcctggcaacataaaaaactgcaagt

SEQ ID NO: 830069 - DNA, 120 bp, Artificial Sequence
  ENSG00000223546_59 (sequence is synthesized)
cctgcctgtctgtcaccttaagagccagtcaattcatatggtccccatatcaaagtctcctgtgcccagagagaggatttcatttcaaccatcaccatcaccaccatcatcatcatcacc

SEQ ID NO: 830070 - DNA, 120 bp, Artificial Sequence
  ENSG00000223546_60 (sequence is synthesized)
gagtgcagatgaagaggaggtaggagtcacaagcccttgaccctcatgctagacccattaccacccacaggaccttgcagtgggatttcatctgcaccatcagcttcttcagagagagag

SEQ ID NO: 830071 - DNA, 120 bp, Artificial Sequence
  ENSG00000223546_61 (sequence is synthesized)
gatatgtattgacatagtggcacacatagagttgtgccatttaaactccccaaggggaggcatgtgaggtcggccacagaggactgaagaaattagttaatgctgacatcctatcacata

SEQ ID NO: 830072 - DNA, 120 bp, Artificial Sequence
  ENSG00000223546_62 (sequence is synthesized)
gggtgggtcctggactccgtcatggacctgctgtcatgccattgccacaattggaagacgtggaagtgatcagatgcaatcaaattttgtacacaagcacatcctgatgtagcgatgagg

SEQ ID NO: 830073 - DNA, 120 bp, Artificial Sequence
  ENSG00000223546_63 (sequence is synthesized)
gtagcgatgagggaaagggggaagaggaatgatcattgcttggacttacaggacagaggcagaagggctaggacacaggcactctttatacgcattctttttttttttttttttttgaga

SEQ ID NO: 830074 - DNA, 78 bp, Artificial Sequence
  ENSG00000223546_64 (sequence is synthesized)
tttttgtatttttagtatagtgctcgtaatccgcctgcctcggccttctacagtgctgggattacaggcgtcagccac

SEQ ID NO: 830075 - DNA, 120 bp, Artificial Sequence
  ENSG00000223546_65 (sequence is synthesized)
gtggtacaacagaagaccaggtcagtaccatatttttttttcatatgtacacggatttttattttgttttagacattgtcttacacacaatagacattcagtatttgttgaaattaatga

SEQ ID NO: 830076 - DNA, 120 bp, Artificial Sequence
  ENSG00000223546_66 (sequence is synthesized)
aagaaaagagaaacatgaaaacggtctgagaagacaataatctgctttttaatttatagacagcaattaggtcaaacaattatagcaatgatgacaaagaacaatatctgaggtacactc

SEQ ID NO: 830077 - DNA, 120 bp, Artificial Sequence
  ENSG00000223546_67 (sequence is synthesized)
aaaaccttatgagggttatttgccagttttcctggctatttctacaccctttgatctctagtgaatgtttctacttacaactacatattttgtaagttttgcctactgtatttcaatcaa

SEQ ID NO: 830078 - DNA, 120 bp, Artificial Sequence
  ENSG00000223546_68 (sequence is synthesized)
cactgtaaaaaatgaagagagtctttttggttcaaatttggtttttagttaattatgtgatgtgtatatgattttttgttaccttttctgtatagatatcaggagaatcgaaaatatgtt

SEQ ID NO: 830079 - DNA, 120 bp, Artificial Sequence
  ENSG00000223546_69 (sequence is synthesized)
gatggtggaattgtggtatgacatttttactgactactactctgcaaaagttttatctatgagctctatgggttgttcctggcttttgaaaatttactttaaggaagtgtttttggaaat

SEQ ID NO: 830080 - DNA, 120 bp, Artificial Sequence
  ENSG00000223546_70 (sequence is synthesized)
ggattataagtatacaagtatgcaatcttatgtatttgcaactgtctaagatgttatgatactttcctccctgcaatctggcattcatccattcaagacattttaattgaactcttacaa

SEQ ID NO: 830081 - DNA, 120 bp, Artificial Sequence
  ENSG00000223546_71 (sequence is synthesized)
tgttcttaatactatgataagccctgaaggtaaactgtgactaaaaatgttgcaggataaaatacaggattcctagttaaatttgaattttagataaacaacattcttatactaaaaatt

SEQ ID NO: 830082 - DNA, 120 bp, Artificial Sequence
  ENSG00000223546_72 (sequence is synthesized)
attccatgtttatctgaaattcaaatttagctgagtgtcctgtaactttttattttatttgtttacttgtttgtctgtgataaatatggcagccctagtaaaaataaatatagcccctga

SEQ ID NO: 830083 - DNA, 120 bp, Artificial Sequence
  ENSG00000223546_73 (sequence is synthesized)
attctaatttactctttggttggcaaggaaggcactaatcaaataaacctgcagataaatgaaaaattgcaactgagataagtatgaacaagaataaattcaaagctgaagaagaagaaa

SEQ ID NO: 830084 - DNA, 120 bp, Artificial Sequence
  ENSG00000223546_74 (sequence is synthesized)
ataattggaagagaaaccttgtcagaaaggggacttcgaagctctatggaagtgtcaatggacccacaatacagtggggaaggaaagagatgctctggcactctttcttttaaatgacag

SEQ ID NO: 830085 - DNA, 120 bp, Artificial Sequence
  ENSG00000223546_75 (sequence is synthesized)
ttttatattcaactttaatggtacaagcagtagaaagcctggctgctcacagagatgcagaaaacactcaaagccttgtttcaggacccacccactatctttcccatttggcatctgact

SEQ ID NO: 830086 - DNA, 120 bp, Artificial Sequence
  ENSG00000223546_76 (sequence is synthesized)
cataatgaagccagaggctgcaagttttagacgtatgcaaaggtggtacatttcaatattcaattccaattaatatggatattttctggggtcagagaaggaaaggttatttgtcccatc

SEQ ID NO: 830087 - DNA, 120 bp, Artificial Sequence
  ENSG00000223546_77 (sequence is synthesized)
aggccactggcctttgctcctaccagaagtgagaggaaccatgcctgtttttaaataacagggaagactttttcagcacaggctggtgggaaagacacaaatctatctagtcacctggga

SEQ ID NO: 830088 - DNA, 120 bp, Artificial Sequence
  ENSG00000223546_78 (sequence is synthesized)
gctgtcagacaggaatgttgcaagtgactacaccttgcagtgcctctggcaggattaggactctcaaactttcccaatagcccagcttgtgattccttcttgctttccaagttgccatat

SEQ ID NO: 830089 - DNA, 120 bp, Artificial Sequence
  ENSG00000223546_79 (sequence is synthesized)
gcatgcaatatttaaaaatggtcttggacagtttgtattaattactcagaatttgaatatgctcattgtttatcatcattataataacagtcctacctcaggtttatatgtttattccca

SEQ ID NO: 830090 - DNA, 120 bp, Artificial Sequence
  ENSG00000223546_80 (sequence is synthesized)
tatatttgggttcctttaattatcttatgtatttttatgatgtctgcaaaataaaaggggaatgagtgttattataccaatttttatggatgcgggaacctgagcatagcctctctaaat

SEQ ID NO: 830091 - DNA, 120 bp, Artificial Sequence
  ENSG00000223546_81 (sequence is synthesized)
aagttgctaaagtcatttttctgatacaatccacaaccagattgactgcttacctagactcttagctttgtctggagctgtatcaagctagttagaagtgcaaagtctaaatttattgac

SEQ ID NO: 830092 - DNA, 120 bp, Artificial Sequence
  ENSG00000235518_0 (sequence is synthesized)
agcattacatcacagatgtgtgagcacctacacaaagcctgcaaatgctggacagggaacctcgtgcaaataatatggcagtattggcaggaatgatggaggaatccctttaaaatgtac

SEQ ID NO: 830093 - DNA, 120 bp, Artificial Sequence
  ENSG00000235518_1 (sequence is synthesized)
acttcaggcagcagcagctaacagaaggcctgaccatcagaagggaaaatgcacatgcagatgaatgtgtggcagcactgggatcctccagatatccagttgattatgagaactatgact

SEQ ID NO: 830094 - DNA, 120 bp, Artificial Sequence
  ENSG00000235518_2 (sequence is synthesized)
gctactaacagctcaaaggtgaagaatattccattaaataaagcactaaagaagataagcctctcctcaggcgacaaagggccaaccccaaatgaagtccatgctgcgggtcttaaggtc

SEQ ID NO: 830095 - DNA, 120 bp, Artificial Sequence
  ENSG00000235518_3 (sequence is synthesized)
atctgctcataagaaactggtcacttctggtgtgagttaagatgaatggagagagaattggttcccagagaccacagtgaaaaaggttaagaacataataaagaccgtaagttccccaaa

SEQ ID NO: 830096 - DNA, 120 bp, Artificial Sequence
  ENSG00000235519_0 (sequence is synthesized)
ggtggcggcaggtgtgtcgggccataataatggcggccacttgagtgtcacgtgacagagccgctagggtgtggagggtccaggaaggcggtcacagacgctgcctcagctagctgcctt

SEQ ID NO: 830097 - DNA, 120 bp, Artificial Sequence
  ENSG00000235519_1 (sequence is synthesized)
ctcaggtcacagagccgtgcagatccaggtcctgggtgaccactctgtcccgaatgagcaagagacgtacctagtcctgacgacaagggacaacggccttaacgggcctggaaggtgagc

SEQ ID NO: 830098 - DNA, 120 bp, Artificial Sequence
  ENSG00000235519_2 (sequence is synthesized)
agagtccctacaacgagtggaacggttagcggcacttgctctatgttctatcgaccttgctgtcggaagagagaaatggcagaatgacatcccccatttggcccgctggaaatgcccacc

SEQ ID NO: 830099 - DNA, 120 bp, Artificial Sequence
  ENSG00000235519_3 (sequence is synthesized)
atcttttgggaagatttactggctgtttatagaatgcctgcctatataatatgaaaaagctgctctcaacttctcccccaaaaccttttaaaagaaaacatttgccacatccagcccttc

SEQ ID NO: 830100 - DNA, 120 bp, Artificial Sequence
  ENSG00000235519_4 (sequence is synthesized)
gttagaaaatcacacaccttgcaaattctcattagtttaaaaagaagtcatagaaaatgtcttctggagttgactttttgaaatggagttattagaccacttctggaagcaacacgtcca

SEQ ID NO: 830101 - DNA, 120 bp, Artificial Sequence
  ENSG00000235519_5 (sequence is synthesized)
cgtttgttcaatgggctagaggacatggagcagaagacctgagaaggaaaagaagttagaagactacatgttgaaagtttgctttgagcttggttcttcttgaacatgcagcttcaaatc

SEQ ID NO: 830102 - DNA, 120 bp, Artificial Sequence
  ENSG00000235519_6 (sequence is synthesized)
aatgtctgtctgctcataagttcaaccaaaccaggactgccactggctgctaaagggaagaaaaggctccatgaagaattccagcgtacctcctgccctggcagccattctgctgtttct

SEQ ID NO: 830103 - DNA, 120 bp, Artificial Sequence
  ENSG00000235519_7 (sequence is synthesized)
atggaaacattcaccagatagcagcatgctatactgtgcaagtgaagaagaaggcatcttcctttcatcaccacatctagagtgtgaccacttcacagaatgaaagaatgtggtgaacac

SEQ ID NO: 830104 - DNA, 120 bp, Artificial Sequence
  ENSG00000235519_8 (sequence is synthesized)
agttctttattctgacagataaatcgttcaagagaaaggggccagatgccagtgacattttcttggacttcccagcctttagaaccatgatccaaataaacttgtattgtttataaatta

SEQ ID NO: 830105 - DNA, 120 bp, Artificial Sequence
  ENSG00000235519_9 (sequence is synthesized)
agacgccccgagacctagctgtggcagccaaggccgggcagccaggctttgaagcagcggcgaacctctcttccctattccgcctggagacctgatggcagcggcggcctttcccagccc

SEQ ID NO: 830106 - DNA, 120 bp, Artificial Sequence
  ENSG00000235519_10 (sequence is synthesized)
gaaaaggttgaattggcacatggtctcagcatgaagcctaggggccagatgccagtgacattttcttggacttcccagcctttagaaccatgatccaaataaacttgtattgtttataaa

SEQ ID NO: 830107 - DNA, 120 bp, Artificial Sequence
  ENSG00000235512_0 (sequence is synthesized)
tatcactcgaggagatggtgatggagtacaagaaggtccagttggctgtgtatattgagtgttgattccgtggagatggttgattactgatgggtgaaggactcctattaattgctgtcc

SEQ ID NO: 830108 - DNA, 120 bp, Artificial Sequence
  ENSG00000235512_1 (sequence is synthesized)
ggataaactagatgctgtgtatggaagataggctactgaatggcttccctgtttctgatagctaggaggtccttgttgatatggatggggtggagtagttgaaggactaggtggcataaa

SEQ ID NO: 830109 - DNA, 120 bp, Artificial Sequence
  ENSG00000235513_0 (sequence is synthesized)
atcgaggagccttttacagaagtggctccaggagcatccacatctgcctctcggggcccacggggcccaggccagctacagaagcaccctgctttccatgggaaaatgctgcaaatgggg

SEQ ID NO: 830110 - DNA, 120 bp, Artificial Sequence
  ENSG00000235513_1 (sequence is synthesized)
gagaaaggagagaagggtttcagactgcaaagacccttcgacatcagctagcaccaagttccatcatgtaaataaactgaagggcttcagaccgggagtgaagccaagcagacctcccca

SEQ ID NO: 830111 - DNA, 120 bp, Artificial Sequence
  ENSG00000235513_2 (sequence is synthesized)
ctgtcactgtccagcctgaagccgccctggtgaagcaggtggaggagcagctccaggcccggctccccggcctccctccctcagctccagggcactcacgtgcttgaaacagctgacggg

SEQ ID NO: 830112 - DNA, 120 bp, Artificial Sequence
  ENSG00000235513_3 (sequence is synthesized)
tgcagagcagagaggacgagtcagactaggagcctgcgcagcagccactccaggagcctggaccccaagggccctgtgggacctgcagaggggacactctgaaggcacctggctcagaac

SEQ ID NO: 830113 - DNA, 120 bp, Artificial Sequence
  ENSG00000235513_4 (sequence is synthesized)
cactgccatccaaggagcgaggagtcccagggctgagcaaatgcagcggggaggtcggcagttcccctgcttcccgatcctcattttctgcttcacttgactcctccagataggagctgc

SEQ ID NO: 830114 - DNA, 120 bp, Artificial Sequence
  ENSG00000235513_5 (sequence is synthesized)
tctcactgcccacactgctgttataactccggaaactatcatagccaccaaacagctccaagtcgtcatcttcctcttcctccattggttctgaagatggggtctcctaatggaggatga

SEQ ID NO: 830115 - DNA, 120 bp, Artificial Sequence
  ENSG00000235513_6 (sequence is synthesized)
gtaccacactgtggagcccacctcgctgtcataggcctgcggctctgaaggatggctttgcccgctcccgctctgcccctcaagtggaacccaagctgggctcagaatctgtagagtgag

SEQ ID NO: 830116 - DNA, 120 bp, Artificial Sequence
  ENSG00000235513_7 (sequence is synthesized)
gccccaccaagggaaacgacacccacggcctgagagccaggtggagtcctgccactcagctgcctgcctttgctcccaccctctcccaccctcaaagaggtctcgaggggacactctgaa

SEQ ID NO: 830117 - DNA, 120 bp, Artificial Sequence
  ENSG00000235513_8 (sequence is synthesized)
ccccttttacaaacaccaagatcattacttctatttacacatttctccaccatgatgcaattcaacagcttaacaagacagaaaatatgtgttaggaattcaccaggctcctctgtggat

SEQ ID NO: 830118 - DNA, 120 bp, Artificial Sequence
  ENSG00000235513_9 (sequence is synthesized)
gaaaatatgtgttaggaattcaccaggctcctctgtggatttacaaatgatgatattttaacatggttcaaatagaatactgtataacaatgtgggccaggtgcggtggctcatgcctgt

SEQ ID NO: 830119 - DNA, 81 bp, Artificial Sequence
  ENSG00000235513_10 (sequence is synthesized)
tgaaaccctgtctctacaaaaaaatacaagagctacttgggaggctggggcagagaattgcttgaacccaggaggcaaagg

SEQ ID NO: 830120 - DNA, 120 bp, Artificial Sequence
  ENSG00000235513_11 (sequence is synthesized)
gtcattgttcagggcactccccagagttcagtggcagttctgaaaggaggagaggaagtggcttactctgggtaaaagactccctacttcctcaagactaaagaggcctcctcctggatt

SEQ ID NO: 830121 - DNA, 120 bp, Artificial Sequence
  ENSG00000235513_12 (sequence is synthesized)
tcccggagcttagggacgtggtgtgaagacaaaacaagagtgctgttgtgggctctgctctcccggcctgcaggctccacacgtcacagctgctggatattcggttcttgcgctcaagcc

SEQ ID NO: 830122 - DNA, 120 bp, Artificial Sequence
  ENSG00000235513_13 (sequence is synthesized)
cccctgagatgaggttccagcctcaattccgccattctcctcctacagagccacactaggtatgtcattctacctccttggacctcagtatacttatcaataaatgtgtgggttcaacac

SEQ ID NO: 830123 - DNA, 120 bp, Artificial Sequence
  ENSG00000235513_14 (sequence is synthesized)
cacatccaagaatctttccatctctaaagattctataaatatcagtaatttagaaaattggcaagactttctaggtagctgcctgtgacatggagtccgaggaggcatggtcttcctgaa

SEQ ID NO: 830124 - DNA, 120 bp, Artificial Sequence
  ENSG00000235513_15 (sequence is synthesized)
gccaccgtggctggtgaaccttgggcctgtttcccaacttcctttgaaaggatttataaaagtgtggggtgaagaccaagggtgtcagactcccccatagttcttgtttaaaatgtactg

SEQ ID NO: 830125 - DNA, 120 bp, Artificial Sequence
  ENSG00000235513_16 (sequence is synthesized)
aatacaccagactctgggggatgatggtaggtaatggagcgtagcttcaggaacctataatttaaaaagctccacaaatggattctactgtcctctgaagtttgagaacataataaatac

SEQ ID NO: 830126 - DNA, 120 bp, Artificial Sequence
  ENSG00000235513_17 (sequence is synthesized)
cagctggccacaagcaaggaccttttcaaactttcctggccctggccttcagtcacttggtggttcctgtctcagcaccaaaggcaccgggaaggatccaagtgattgcctctcacctgt

SEQ ID NO: 830127 - DNA, 120 bp, Artificial Sequence
  ENSG00000235513_18 (sequence is synthesized)
aacctagccaagatactggctttcttggagttggaggagtagctcctggagcaggagacgctgcagaacctcttggtcttggagaagaaggcttcccttgtacccacgataccacacatc

SEQ ID NO: 830128 - DNA, 120 bp, Artificial Sequence
  ENSG00000235513_19 (sequence is synthesized)
tcacagacagctgggaagagaacttagcacatgactcacccgatatgaccacctcaaagcaaacaaagtgatgggcccttcaaaacctggggcactgcattaaccaggtgagcccctgcc

SEQ ID NO: 830129 - DNA, 120 bp, Artificial Sequence
  ENSG00000235513_20 (sequence is synthesized)
cccacaaaggctaatggaataagaggaggaatgggaggtactggtgtgtatatcctgaatctacctgaatgaagtgctgctgcttggcctcccttggctacagatgtcaacagaggggct

SEQ ID NO: 830130 - DNA, 120 bp, Artificial Sequence
  ENSG00000235513_21 (sequence is synthesized)
actccatctcaaaaaaaaaaaaaaagtgaaatatcctaaggtacttcacaaagactttctggggtagaagatatattagaaattaattcttagccaggcacagtggcccacacctgtaat

SEQ ID NO: 830131 - DNA, 120 bp, Artificial Sequence
  ENSG00000235513_22 (sequence is synthesized)
agcctggtaatggagtgagatgctgtctcaaaaagaaaaacaaaaattcttccccgttcaatatacatcaaaatgatctcaactcagaaacaatttaagtcacagaaaagttaatttggg

SEQ ID NO: 830132 - DNA, 120 bp, Artificial Sequence
  ENSG00000235513_23 (sequence is synthesized)
acctagactgctccaaagaggatgggagaggcagatgacacacagataactgtggcatcttggtgtgtactacagcgctagattcagctctgagcctaactagctatagggccttgggca

SEQ ID NO: 830133 - DNA, 120 bp, Artificial Sequence
  ENSG00000235513_24 (sequence is synthesized)
agtcatttaacttctgtgggcttcaactttctcatctataaaataaaaatatttgactcgtgagatgcaaatgagataatgtatatgaatctacccagcatgtaacagaaaacgtgtgaa

SEQ ID NO: 830134 - DNA, 64 bp, Artificial Sequence
  ENSG00000235513_25 (sequence is synthesized)
ttggcaacacagccacaccccatctctacaaaagaaaaaaaaattagccaggtgtggtggcatg

SEQ ID NO: 830135 - DNA, 120 bp, Artificial Sequence
  ENSG00000235513_26 (sequence is synthesized)
tgtggtggcatgcgcctgtagtcccagcttcttggagctgaggtggaaggactgcttgagcctgggaggtcaaggctgtagtgagccataaccatgccactgcaatccagcctgggcaag

SEQ ID NO: 830136 - DNA, 120 bp, Artificial Sequence
  ENSG00000235513_27 (sequence is synthesized)
ggaggtcaaggctgtagtgagccataaccatgccactgcaatccagcctgggcaagagaatgacatcctgtctccaaagaaaaagaaaaaaaagctgggtgcggtggctcacacctataa

SEQ ID NO: 830137 - DNA, 72 bp, Artificial Sequence
  ENSG00000235513_28 (sequence is synthesized)
tcacttaagagtaaaaatacaaaaaatagctgggcatgatggtgggtgcctgaaatcccagctactcgggag

SEQ ID NO: 830138 - DNA, 120 bp, Artificial Sequence
  ENSG00000235513_29 (sequence is synthesized)
ggtggtggcatgcacctgtggctctagctactcagaaggctgaggtgggaagacagcttgagcctgggaggtcaaggctgcactgaatcatgatcacaccattgcactccagcctggatg

SEQ ID NO: 830139 - DNA, 120 bp, Artificial Sequence
  ENSG00000235513_30 (sequence is synthesized)
acagagggaagacactgtctcaaaggaaaaaaaaggtgtgaagaaaggagaaaagtttggcctctggtccagagctcaaatatctctagtgcttactcgctgtatgacctgcagcaagtc

SEQ ID NO: 830140 - DNA, 120 bp, Artificial Sequence
  ENSG00000224063_0 (sequence is synthesized)
gaaattaaagttatttcttatgggctagacagtatattgccaggtattgaagacaggatttatcttctctacttcttcttttagaagcagatcaagaaactggcgattgaagagtaactg

SEQ ID NO: 830141 - DNA, 120 bp, Artificial Sequence
  ENSG00000224063_1 (sequence is synthesized)
gcaatctgatcttactagcagtgaaagagcgagtggaggaaacagatgaaggaaacagcttacaccaagatttcagatacgatcattttgaatagctatttcctttactttccaggattg

SEQ ID NO: 830142 - DNA, 120 bp, Artificial Sequence
  ENSG00000224063_2 (sequence is synthesized)
gaggtcaggtccgcctcatcagctatgaagtctgtgaatcctgggagaatcaggaagtcgtcgtaggtgaggcagtcggcgctggcaaagagctgctgcgcggggagccagttatcgggc

SEQ ID NO: 830143 - DNA, 120 bp, Artificial Sequence
  ENSG00000224063_3 (sequence is synthesized)
tgcgcggggagccagttatcgggcacatagtcggtgccgcccctgatcagccatgtgaagaccatgattgctttcccttcagccttccacctttgtaagtttcctgaggcctccccagaa

SEQ ID NO: 830144 - DNA, 120 bp, Artificial Sequence
  ENSG00000224063_4 (sequence is synthesized)
actgattttagaatgccaagctgacattttgagtttttatgagaaaccagaaaatttggtgtgaagaccctaagtggtgtgtctgacttacagcaggcccacactgctgatttatggtgt

SEQ ID NO: 830145 - DNA, 120 bp, Artificial Sequence
  ENSG00000224063_5 (sequence is synthesized)
cagcagtggctaatgttgttgtcctcttgttgttgattacttccatccactcaatttggctgatctccagggggcctacccttctgtccactaaaacctggcagcctgttttttgttttg

SEQ ID NO: 830146 - DNA, 120 bp, Artificial Sequence
  ENSG00000224063_6 (sequence is synthesized)
ttttatctttaactgatgtgctttcattttgttttattctattttgattgtttttcattttgggtgagtttacagcacactaataccaaagaaaatgaataaagaaaacattagaataaa

SEQ ID NO: 830147 - DNA, 120 bp, Artificial Sequence
  ENSG00000224063_7 (sequence is synthesized)
actatgttggaggagaaggggaacaacaaactctacaggaattctgatagctttctatttcctttttttgaagtttactttttgcaagtagtattctcaattgtaaatccacaaaatatt

SEQ ID NO: 830148 - DNA, 120 bp, Artificial Sequence
  ENSG00000224063_8 (sequence is synthesized)
ctttaattgtgtatctacctacctgtctatgtaactcttggcaaatacattggagacttctcaactttctgcttctgatgatctcaacttgtggtatggcaaaaggagagcaaaatgttc

SEQ ID NO: 830149 - DNA, 120 bp, Artificial Sequence
  ENSG00000224063_9 (sequence is synthesized)
ggaacgagaagtcctggcagctgagtcatgatcccccaggagccattaagaagttaatcttcagtcacttccatccaaacagaagaaaacccatgaaggatgagaactatgggtcctgag

SEQ ID NO: 830150 - DNA, 72 bp, Artificial Sequence
  ENSG00000224063_10 (sequence is synthesized)
aactgaaagaaacgcaatctgatcttactagcagtgaaagagcgagtctccctctgatgccgagcagaagct

SEQ ID NO: 830151 - DNA, 120 bp, Artificial Sequence
  ENSG00000261373_0 (sequence is synthesized)
aaagcctgggcccgtgggggacgcacatggtcctgttcgtactccaggatggcggcgtaaagggcccgctgctcccgttcctccggggtcagggcgacttggctgcaaaacctcctgggg

SEQ ID NO: 830152 - DNA, 120 bp, Artificial Sequence
  ENSG00000261373_1 (sequence is synthesized)
agaaaggcacgcggtgggtgccggggccaggccctccccgcagcggccccaggggcgggcaggagtcccacctgttggcggcctcctggagccgcagccggcgctcctccatctttctct

SEQ ID NO: 830153 - DNA, 120 bp, Artificial Sequence
  ENSG00000261373_2 (sequence is synthesized)
ggagctgggtgcagagtcaaggggccgagcgtgggatctgagcgggccctcggttcccaaccccgtcccacacccggagaggccgggacgtcccagggacctcctctcggtgaggggctg

SEQ ID NO: 830154 - DNA, 120 bp, Artificial Sequence
  ENSG00000261373_3 (sequence is synthesized)
tccccagggaggcctcctccagtggcgtcagctctctggaaatgtgacaagctgctgtctagaccccaggaagcccagtggtgtctggacaccagaggagtctctctcatcctcccggat

SEQ ID NO: 830155 - DNA, 120 bp, Artificial Sequence
  ENSG00000261373_4 (sequence is synthesized)
tgctctgaggccaggagctttgtgactctgccccctgaagcttctggaagatctcgggtggcagaaaaggagagagctttcctccttcatcggagtatacacggcggtgtcggccggcag

SEQ ID NO: 830156 - DNA, 120 bp, Artificial Sequence
  ENSG00000261373_5 (sequence is synthesized)
gctggggaatgggagcagctgcaggcatggttggcttcaggcgtgttttccctgcaagccatgggtaaccaggggtcaagcggtgggccacatcccacagaggagatgcgggcttggggg

SEQ ID NO: 830157 - DNA, 120 bp, Artificial Sequence
  ENSG00000261373_6 (sequence is synthesized)
atgccccaggagagccgcctactgcaggagacccaccaagcttggcggccgtcgactgggccctctccagacactgctgtgctagcttcagcatcttggaggtgtcggggggcacagttt

SEQ ID NO: 830158 - DNA, 120 bp, Artificial Sequence
  ENSG00000261373_7 (sequence is synthesized)
aatgaggcaacggaaaaggcctctgggaagtggccgttttacagagacaaggacgtgctgaggggatcgcctcacccatctcccaccggctgtgtccccaaagtcctgccttcccgtagc

SEQ ID NO: 830159 - DNA, 120 bp, Artificial Sequence
  ENSG00000261373_8 (sequence is synthesized)
ttggcatggagcacctctgcgcgaccatggacctgctcacacagcccttctgcgcgccgtgggagctgcctctctgtgactcgcccctggacccaccgccccagcgcctgacccacctcc

SEQ ID NO: 830160 - DNA, 120 bp, Artificial Sequence
  ENSG00000261373_9 (sequence is synthesized)
ctgctgcccttcacagaaaacttctcatagactcccattttctcatcccgccccgatttagcccccgactccccccggaaactgcccttacccgtccccaccttgccagacacggtgggc

SEQ ID NO: 830161 - DNA, 120 bp, Artificial Sequence
  ENSG00000261373_10 (sequence is synthesized)
cactggagttcctctgtcttctgggactttgctctccccaggggatcctctgccactcctccacccaactcctcaatcttggagcgccagagctcagccgagctcaccggctccctaggg

SEQ ID NO: 830162 - DNA, 120 bp, Artificial Sequence
  ENSG00000261373_11 (sequence is synthesized)
agctggggcaactgttagctccccctgacctgtgtgatcctacgtccagtggctgccccgacctctgtgatcccacgtccaggggctcccccgacctctgtgatcccacgtccagtggct

SEQ ID NO: 830163 - DNA, 120 bp, Artificial Sequence
  ENSG00000261373_12 (sequence is synthesized)
cccccgacctctgtgctcccacgtccagtggctcccccgacctctgtgctcccacgtccagtggctcccccgacctctgtgctcccacgtccagtgggtccccctgacctctgtgatccc

SEQ ID NO: 830164 - DNA, 120 bp, Artificial Sequence
  ENSG00000261373_13 (sequence is synthesized)
acgtccagtggctccccctgacctctgtgctctatgtccagtggctccccctgacctctgtgatcctttgtgcagcggctgctggcctctcaaacttaatgtgttcattgcggaacttgc

SEQ ID NO: 830165 - DNA, 120 bp, Artificial Sequence
  ENSG00000261373_14 (sequence is synthesized)
agctttcctccttcatcggagtatacacggcggtgtcggccggcaggctggggaatgggagcagctgcaggcatggttggcttcaggcgtgttttccctgcaagccatgggcctctggga

SEQ ID NO: 830166 - DNA, 120 bp, Artificial Sequence
  ENSG00000264443_0 (sequence is synthesized)
ggggaggccggagaacgcgccgggggtgccagggtcccgcacactggagtggcggcgcctccccgtggtgtccccgctcctgggtcctttttgggactggctctggcactcccgggcact

SEQ ID NO: 830167 - DNA, 120 bp, Artificial Sequence
  ENSG00000264443_1 (sequence is synthesized)
cagtccagtagagaagtccagcaggaggcttccaggtcggactcctccgcggggtaaagagagggaaagggcctcacaaacacacccaggagcatctggcgatggaggatgagaagacaa

SEQ ID NO: 830168 - DNA, 120 bp, Artificial Sequence
  ENSG00000264443_2 (sequence is synthesized)
gagaatgacgggggcagggtcaggggtctaatctccttgcgagccacctgatctccccgggcctctgttttctcatctgtgaaatgacgggttggacggccttgtctctgaggcctcatc

SEQ ID NO: 830169 - DNA, 120 bp, Artificial Sequence
  ENSG00000264443_3 (sequence is synthesized)
cagttccacgtacaggaagatataaatgcaaatgtgcaaaaaaaggaagaaggaaagatggaccaagttcacctgtttggtacgtacagggtccacagctctgcagaaaggggagaaacc

SEQ ID NO: 830170 - DNA, 120 bp, Artificial Sequence
  ENSG00000264443_4 (sequence is synthesized)
tggtagacagagggcctgacgcaccatagcattgagcacattttccactgcttaattatgtgtgagattttcccttttaaaataaatctatggtctgtgaaatagtctgtataaaaatat

SEQ ID NO: 830171 - DNA, 120 bp, Artificial Sequence
  ENSG00000264443_5 (sequence is synthesized)
gaagccttgaataggccagtcatagcagttccgtcttgaatagaactcaattttacaagcacggagtgagagtatcattccactgcaaactcttttatttccacaacatattagatctca

SEQ ID NO: 830172 - DNA, 120 bp, Artificial Sequence
  ENSG00000264443_6 (sequence is synthesized)
ctttagtagagttacctcttaagtacgactattagtcatttcattaatatgaaaatctgggaaggcccacataaaataccaacataattgctggctaccaagataaaattatttaggcag

SEQ ID NO: 830173 - DNA, 120 bp, Artificial Sequence
  ENSG00000264443_7 (sequence is synthesized)
attccagccccaatggttcaatgataacaaaactacaaaacatgggacatcaaattcattaataaaattattaagtcacctcttccatcgaatgatgagatttttcttattcactgtttc

SEQ ID NO: 830174 - DNA, 120 bp, Artificial Sequence
  ENSG00000264443_8 (sequence is synthesized)
ccatcagggaaaaaagaatcctcccacctcatgcctttttttttttctgatgccaggaattagtattcattgcctctttaagaggccaatgcaaaaaaaggtagaaaaagccctagccca

SEQ ID NO: 830175 - DNA, 120 bp, Artificial Sequence
  ENSG00000264443_9 (sequence is synthesized)
ggagttgggattgccagttgtagtccctgggttgccttgctgggggtgcctaagtcagtgccataacctcagtttttctaatctgtgtaacatggggatagagtatatgatttccaaggt

SEQ ID NO: 830176 - DNA, 120 bp, Artificial Sequence
  ENSG00000264443_10 (sequence is synthesized)
cactttcacctctgtgattgagcctctaagaaagccaaatcttttcactttgtaatcatgacatttttaaaagatggagttaatatgaatgggaaacttttttttttttgagccagggac

SEQ ID NO: 830177 - DNA, 69 bp, Artificial Sequence
  ENSG00000264443_11 (sequence is synthesized)
cacctcagcctctcaaatagctgagactacaggcacacaccactgcacctggctaaagactatattctt

SEQ ID NO: 830178 - DNA, 120 bp, Artificial Sequence
  ENSG00000261379_0 (sequence is synthesized)
tgcaagcaaggcacttatactttagtattatatacatatacagagagaacaacagcaagaaaaattctacttaactgaggcttcattgtatttgggcttctctcttttcaatcacaggca

SEQ ID NO: 830179 - DNA, 120 bp, Artificial Sequence
  ENSG00000261379_1 (sequence is synthesized)
tcaaatctttctggtaagcatgaagagttattatcaaacagttgtgttagtgttttccaaggtgtgattgaaaatggagatttcttacctcatcccagtcctgctaaaccaaaatctctt

SEQ ID NO: 830180 - DNA, 120 bp, Artificial Sequence
  ENSG00000261379_2 (sequence is synthesized)
agggaaggatgggccccccagcattcacagtttaagcagcattacaggagattattatttacatcaaaatttaagaatcattggcttaaacacaaagaaaaaaatgtaattttattcttc

SEQ ID NO: 830181 - DNA, 120 bp, Artificial Sequence
  ENSG00000261379_3 (sequence is synthesized)
cagaattggcaaatgcacagccttaaccagtcaacaaagatcttcacctgtgggctgtttactacagctgggtggagcaggcaatgacccaaacctgcatgagtctcccaatatgaattg

SEQ ID NO: 830182 - DNA, 120 bp, Artificial Sequence
  ENSG00000261379_4 (sequence is synthesized)
gatttcatccctcatctcttctagagaactgagggaaaataaatgcaccaagaactaacatgggattttggaaagacagtaatgccctcaacagatgatttcaaaacatttgctgtttga

SEQ ID NO: 830183 - DNA, 120 bp, Artificial Sequence
  ENSG00000261379_5 (sequence is synthesized)
ggagcaaataaagcatgaaataaacaggtggatgaggttggaagaaaggagggaggtgaaaactccatgccactgtttaattctttcacttcagaaattctactgattgattggtgattt

SEQ ID NO: 830184 - DNA, 120 bp, Artificial Sequence
  ENSG00000261379_6 (sequence is synthesized)
ggggagtggtgaagagaatccataactgatatttgtctaaaaaacttggtcctggtccaggcatagtagcttatgcttgtaatctccgcaatttgggaggcagaagcagaaagatccttg

SEQ ID NO: 830185 - DNA, 89 bp, Artificial Sequence
  ENSG00000261379_7 (sequence is synthesized)
aatctccgcaatttgggaggcagaagcagaaagatccttgagcccaggagttcaagtttgcagtgagctatgatcatgccaccgcacta

SEQ ID NO: 830186 - DNA, 120 bp, Artificial Sequence
  ENSG00000234396_0 (sequence is synthesized)
ccacccccggccccaggcagcagtacctccaaggcctgggcggcaggaaagggagagatgacgtcattgccgcctggaatctgctgtttggaggcgtcgccatggagaccggaaggctca

SEQ ID NO: 830187 - DNA, 120 bp, Artificial Sequence
  ENSG00000234396_1 (sequence is synthesized)
ccactgcagggctgcagtcagaagcctcaggttgcagcctgcccgacagctcaagctcagcagggccgaatggagaatgtgtacctcctcctcctaacattgttaaaaataaaatttgta

SEQ ID NO: 830188 - DNA, 90 bp, Artificial Sequence
  ENSG00000234394_0 (sequence is synthesized)
aaagtttgggattcccagtctacaaaaccccacagctcctaggaattctctcaccacccttgtgcctttaggcttggatcccgggctgct

SEQ ID NO: 830189 - DNA, 120 bp, Artificial Sequence
  ENSG00000234394_1 (sequence is synthesized)
ttcggacacctgtcgaatagtaaatcccaagtaaggtacctgcggtcgtcggcagatctgaattttcttcttggacacctaatacccacagccctccagagaccgagaggttgatgtcac

SEQ ID NO: 830190 - DNA, 120 bp, Artificial Sequence
  ENSG00000234394_2 (sequence is synthesized)
tcccaatatcggaggaagtatacacccccgtgtgagatggtccttaataatattccacggcggagggggtgatatgactacatacatggcagaaagtggaaacctcccagggatattgtt

SEQ ID NO: 830191 - DNA, 120 bp, Artificial Sequence
  ENSG00000234394_3 (sequence is synthesized)
cccacgatcctggagggaagaagatgatgttactttcaatatgacagaaggtggatgaagtggtggactgcccctccacacctgtggacacgcccccactgatattccttctaattgcag

SEQ ID NO: 830192 - DNA, 65 bp, Artificial Sequence
  ENSG00000234394_4 (sequence is synthesized)
cctgtggacacgcccccactgatattccttctaattgcagcgtgggagaggaggatatgacacgc

SEQ ID NO: 830193 - DNA, 78 bp, Artificial Sequence
  ENSG00000234394_5 (sequence is synthesized)
ttactcccaatacagacgggtgtacaccctctgtacaccgagggtgtacacctgtctgtgaaagagttcttaaggctg

SEQ ID NO: 830194 - DNA, 88 bp, Artificial Sequence
  ENSG00000234394_6 (sequence is synthesized)
ggtgactccccccaggaggggctggctctgagaccccgcctcgcggggggtgcctccccgccctgtgatgggggtcccaagagccaga

SEQ ID NO: 830195 - DNA, 87 bp, Artificial Sequence
  ENSG00000234394_7 (sequence is synthesized)
gggggaagaggggctggctctgagaccccgcctcgcggggggtgcctccccgccctgtgatgggggtcccaagagccagaaggcttg

SEQ ID NO: 830196 - DNA, 120 bp, Artificial Sequence
  ENSG00000234394_8 (sequence is synthesized)
ggtgcctcctccccctgcgatgggggtcgtaagagccactgggggaataggggcttgctctcagtcaccgcctcgcggggggtgcctcctttcctttctacatagacacagtgacagtct

SEQ ID NO: 830197 - DNA, 120 bp, Artificial Sequence
  ENSG00000234394_9 (sequence is synthesized)
tgatattgtttttaatgcagcgtgggaggggaggatatgacacgcgatatcgcaggtagtagaaacacccctttgatagtgttcttaatattcagggaggaagaagatgatgttactccc

SEQ ID NO: 830198 - DNA, 120 bp, Artificial Sequence
  ENSG00000234394_10 (sequence is synthesized)
agatgatgttactcccaatacagacggatgtacaccctctgtacaccgagggtgtacacccgtctgtgaaggagttcgtaatctccagaggtggagatgatattactcacaatatggtaa

SEQ ID NO: 830199 - DNA, 120 bp, Artificial Sequence
  ENSG00000234394_11 (sequence is synthesized)
tcgcggatcctcagagccaggtggggaagaggggctggctgtcagtcccctcctcgcggggggtgcctcccccactgctatggggatcccaagagccagtgggggaagaggtgctggctc

SEQ ID NO: 830200 - DNA, 120 bp, Artificial Sequence
  ENSG00000234394_12 (sequence is synthesized)
tcagtctccgcctcgcgaggtgcctccccaccctgcgatcggggtccgaagagccaggggggaagaggggctggctctcttcgtggatgattctttttccattctcaggcagttttcttt

SEQ ID NO: 830201 - DNA, 60 bp, Artificial Sequence
  ENSG00000234394_13 (sequence is synthesized)
tgctttgctcgatctcgggtgactgcaaccactgcctcccaggttcaagagattctcctg

SEQ ID NO: 830202 - DNA, 120 bp, Artificial Sequence
  ENSG00000234394_14 (sequence is synthesized)
ctcccaaagtgctgggattgcaggtgcgagccaccgggtccagcctctcaggcgattttcatacctgcatactctgatcactactctgttaaacagtcaaggagggtaagtattatcttc

SEQ ID NO: 830203 - DNA, 120 bp, Artificial Sequence
  ENSG00000234394_15 (sequence is synthesized)
agatttccagagctctgtctctgtacagccctctcctcctcaatattctgccctatgaattctagccacattggccttcccaggctcacagttctgtcttctcaactcaggaagatctct

SEQ ID NO: 830204 - DNA, 120 bp, Artificial Sequence
  ENSG00000234394_16 (sequence is synthesized)
gagttccatctgcattctttcttcctgtgctgtggcctggaaagttttctaaggtgttagggaggtcaattgtggggctagcctcatttgtttctcatctcttgaggatcactgcccttt

SEQ ID NO: 830205 - DNA, 120 bp, Artificial Sequence
  ENSG00000234394_17 (sequence is synthesized)
gatgcttgattccagtgattgattccctttgttgcttgagggccatagtttcatatattttgtccagtagttttgttgttttaggtcagaaagtaattttggtctctgttactctatctt

SEQ ID NO: 830206 - DNA, 120 bp, Artificial Sequence
  ENSG00000234394_18 (sequence is synthesized)
ggccagaagtgtaagacctaagcatttacacatcaaaatactgcacacataattttagtttaagctactttttaaaaaatctccttcattttccatttagcattctatttagggtattac

SEQ ID NO: 830207 - DNA, 120 bp, Artificial Sequence
  ENSG00000234394_19 (sequence is synthesized)
attggtttttttgaaattctgttattggcagtttctattgcctatcaatcccatttaaagatagtgcatagggtattctaaaatagctgttaagcaaagagaaaattgggcctgataggg

SEQ ID NO: 830208 - DNA, 120 bp, Artificial Sequence
  ENSG00000234394_20 (sequence is synthesized)
tgagaatcacagctctaatacctagagtgaccttataatgtattgtccaaaggagatatttttgacagtgaaagagggtgttgttagtaattatatcaggaccatggcctaaaccaggac

SEQ ID NO: 830209 - DNA, 120 bp, Artificial Sequence
  ENSG00000234394_21 (sequence is synthesized)
tatcccaggaagcctgggacatatttgtaccccatctctatttaatgcctttatacaattctttacttaattctaccagcctttattgagcctgctttctttgtctagctgagtgccacg

SEQ ID NO: 830210 - DNA, 120 bp, Artificial Sequence
  ENSG00000234394_22 (sequence is synthesized)
tgctgacgtcactaagatcaatacagcaaactctgaaagatggacagagagacaggagatggtcctttataatgcagtgtgatctgtgctgcaatagagttttggaagctagaagttcaa

SEQ ID NO: 830211 - DNA, 120 bp, Artificial Sequence
  ENSG00000234394_23 (sequence is synthesized)
aacgaggtgttggcagcaccatgctctctctgaagatgctaggaagaatctgctccatgcctttccattcgctcctggggtttcctgcaagccctgacattccttggcttgtagatgcat

SEQ ID NO: 830212 - DNA, 120 bp, Artificial Sequence; identical to SEQ ID NO: 816441
  ENSG00000234394_24 (sequence is synthesized)

SEQ ID NO: 830213 - DNA, 120 bp, Artificial Sequence
  ENSG00000234394_25 (sequence is synthesized)
ccaattacatctgcaacaaccctatttccaaataaagtcacattctaagattcctagggagaacctgaatttttgggggtgtgtggatactgttcaacctgggatatggagtaaataaat

SEQ ID NO: 830214 - DNA, 120 bp, Artificial Sequence; identical to SEQ ID NO: 816443
  ENSG00000234394_26 (sequence is synthesized)

SEQ ID NO: 830215 - DNA, 120 bp, Artificial Sequence
  ENSG00000234394_27 (sequence is synthesized)
gcgtagtgcttggcgcggtgaccagacctggccgccttcctgactgcacagagcaagaggccacactctggatcccaggccgggtccctgtggttctgggagggaggtcccggatgcctc

SEQ ID NO: 830216 - DNA, 120 bp, Artificial Sequence
  ENSG00000234394_28 (sequence is synthesized)
ccagatctcgggcttctgtaaccctgaggctgggttttaaaatcacggctcttccaagttacacgaagagtccatggtcaagggtcaagggtggtcttcgaccctcgggatcgtcttctt

SEQ ID NO: 830217 - DNA, 120 bp, Artificial Sequence
  ENSG00000234394_29 (sequence is synthesized)
gagaaatggctgagagctaagcctagagctgcccagggaaggaagccaaagagctggagccgagcgcgaagggctgggaggcgcggggaggccccttacccccgccccccccccccacac

SEQ ID NO: 830218 - DNA, 120 bp, Artificial Sequence
  ENSG00000234394_30 (sequence is synthesized)
tgtcctggccgctaataacgctgataatagtaacagtatcggccaactgtttcccccctgctcctggtctgccaggcaccggatcctcctttagcactcccagcactcactgaagaagac

SEQ ID NO: 830219 - DNA, 120 bp, Artificial Sequence
  ENSG00000234394_31 (sequence is synthesized)
actatggaattctccgttttccagactagaaataagtaactcggagaaattaagaaactcgcccgacgaccctcaggcagtagcacctggccaggtgctgttgtaggagcaagggataca

SEQ ID NO: 830220 - DNA, 120 bp, Artificial Sequence
  ENSG00000234394_32 (sequence is synthesized)
atgatgatcaaggcagatgcagccgttaccttcaggttgtggagtccggatacagactggaggcaggcagctgtaagatgtgtgagaaatgctgcgctggatcagcccatggtataggag

SEQ ID NO: 830221 - DNA, 80 bp, Artificial Sequence
  ENSG00000234394_33 (sequence is synthesized)
aaaggagctggctcgcagtccctgtctcgcggggggtgcctccccccactgcgatgggggtcctaagagccggaggtgcc

SEQ ID NO: 830222 - DNA, 87 bp, Artificial Sequence
  ENSG00000234394_34 (sequence is synthesized)
aggtgcctccgccccttccgatgggggtcccaagacccagggaggggagaggggctggctctcagtcccctcctcccgggggtacct

SEQ ID NO: 830223 - DNA, 120 bp, Artificial Sequence
  ENSG00000234394_35 (sequence is synthesized)
agaggggctggctctcagtcccctcctcccgggggtacctcctccgcctgcgatgggggtcccaagagacagggggggaagaggggctggctctcagtccacgcctcgtgggggatgcct

SEQ ID NO: 830224 - DNA, 120 bp, Artificial Sequence
  ENSG00000234394_36 (sequence is synthesized)
cccccccctgcgattggggtcccaacagccagcgggggaagaggggctggttctcagtccccgcctcgcgggggatgcctccccgtgctgcgatgggggtcctaaaagccagggggtgaa

SEQ ID NO: 830225 - DNA, 120 bp, Artificial Sequence
  ENSG00000234394_37 (sequence is synthesized)
aaggggctggctctcagtccccacctcgcgaggggtgcctctcccccctgcgataggtgtcctaatagccagggggggaagaggggctggctgtcagtccctgcctcgcgggtggtcctt

SEQ ID NO: 830226 - DNA, 120 bp, Artificial Sequence
  ENSG00000234394_38 (sequence is synthesized)
caccccgctgcgatgggggtcctaagagcaagggggggaagtggggctggctctctgtccccgcctcgccgggggtgcctcgcacccttgcgatgggggtcctaagagccagtaggggaa

SEQ ID NO: 830227 - DNA, 120 bp, Artificial Sequence
  ENSG00000234394_39 (sequence is synthesized)
gaggagctggctctcagtcacctcagcatggagggcctttctgttctggttttgcccaagagtaagcttatttgcatctggttctagcaagggaattgctgcgaaggccctcaaacaggg

SEQ ID NO: 830228 - DNA, 120 bp, Artificial Sequence
  ENSG00000234394_40 (sequence is synthesized)
aagggaattgctgcgaaggccctcaaacaggggggccatcctttcgaatccctatctagttgtttagagatgtaggccaccggcctcagccaaggccccacagtttgggttaaaagtcca

SEQ ID NO: 830229 - DNA, 120 bp, Artificial Sequence
  ENSG00000234394_41 (sequence is synthesized)
gaaaaggctttgtgagatcgggtagcccctcggctggggctttcagaagtttttcctttaagtcatgaaagacttgctgttgttggaatccccattccaaaagttcccggtccccgcccc

SEQ ID NO: 830230 - DNA, 120 bp, Artificial Sequence
  ENSG00000234393_0 (sequence is synthesized)
ggtttacagggtgacgctgggttttcttcacatttccttccacaaagaagcagcacaaaagagcgctggacttgcggctagtcggagctctgcgtccacccgcccgtgtgacctgatccg

SEQ ID NO: 830231 - DNA, 120 bp, Artificial Sequence
  ENSG00000234393_1 (sequence is synthesized)
cccctcgcctacttccagagcccgtggaagtggagaagttgatggaagatgttggccccacattcctgcgtggtgccgattcacactcctgtgtggggcggagaacaccagctcgctcta

SEQ ID NO: 830232 - DNA, 120 bp, Artificial Sequence
  ENSG00000234393_2 (sequence is synthesized)
ctctggaaggtgcccctctgcagcagtgagggttcctaggacctcactgcagaagatgctgaagcatgtgagaactgctgtaccccgccaaacggaggggcaggaggaaaaggccactga

SEQ ID NO: 830233 - DNA, 120 bp, Artificial Sequence
  ENSG00000234393_3 (sequence is synthesized)
gattctttcaagtccagatcaacgggtatgagtctttcttccgaagctgatgaacgacacaaacggtggaggaaccacttcagatattttttaagtcaccatgaagaagtatgaatattt

SEQ ID NO: 830234 - DNA, 120 bp, Artificial Sequence
  ENSG00000234393_4 (sequence is synthesized)
ttataggcttatgctttacaaattgaattaacaatcattatcccactgattctgcaaagtacagatgagaggcaaagaaagacaaggcaaataaaactggccagggtagtttttcctcca

SEQ ID NO: 830235 - DNA, 120 bp, Artificial Sequence
  ENSG00000234390_0 (sequence is synthesized)
aaacttgcttgttcacgagaatcacgtggggagcgtgttaaaattacagattccttggctccacccgcaggcctactgaatcagaatctcgaagggaggtactccggaacctgtatctct

SEQ ID NO: 830236 - DNA, 120 bp, Artificial Sequence
  ENSG00000234390_1 (sequence is synthesized)
aactagggccccagaggctgcttatgatcaggtcctgcgcttcccgaaaaggatgaagctccagctgcagttctggggaggcctggaccccagctccgggggggccgggctaccaaggcc

SEQ ID NO: 830237 - DNA, 120 bp, Artificial Sequence
  ENSG00000234390_2 (sequence is synthesized)
gctgggcctggagaggcgcgtccctggcccatcttatcagcgctctgcagggtctgggcctgctgctcgcgtcctcctgggctcccaaggccacgggtgggttaatggcttgacagccgg

SEQ ID NO: 830238 - DNA, 120 bp, Artificial Sequence
  ENSG00000234390_3 (sequence is synthesized)
cctcctggcccagcagacgctgagcagcccgatggcacaatccacctcttctctccaaggccagctggagggacgaggcacgacaaggccatccctacagctggcacttcccctacagct

SEQ ID NO: 830239 - DNA, 120 bp, Artificial Sequence
  ENSG00000234390_4 (sequence is synthesized)
gagagggggcctaaactacaggacacactcccaagacccttaagccctggcagcatcccgggggaggggggcagcaggtggaagtggaaagaagcctgtggagctgccagcagggagagg

SEQ ID NO: 830240 - DNA, 120 bp, Artificial Sequence
  ENSG00000234390_5 (sequence is synthesized)
gagtcggacatgaggctgagaggcctctgggaacccctgtgccaaggggctgctggcactgggcagcagcaccccagagcccacgaggagtgtgcccagagcaagtggctcagacctggg

SEQ ID NO: 830241 - DNA, 120 bp, Artificial Sequence
  ENSG00000234390_6 (sequence is synthesized)
tcatggctcgagggtgtcgggctgtagctgctggtcccagagagtgcagcccagggcaggcatcaggacaggagtaggaggagaaagagtgttctaggaagagtctagtcccctaatcct

SEQ ID NO: 830242 - DNA, 120 bp, Artificial Sequence
  ENSG00000234390_7 (sequence is synthesized)
ggtggtggctggctgtagcctagtgcacgctgtctggcttgtgtggctgtgctgcctgagtatacataccctagcaacattctccttgctcagcactggacatcagctctccacctggcc

SEQ ID NO: 830243 - DNA, 120 bp, Artificial Sequence
  ENSG00000234390_8 (sequence is synthesized)
ccttcctctagggaggggatggggaggcctcctagggttagcagcaggagttgggcctcaggaatcaggagcccttgaaaggaggatgcgtggttcccataaaactgagggttgccctgg

SEQ ID NO: 830244 - DNA, 120 bp, Artificial Sequence
  ENSG00000234390_9 (sequence is synthesized)
agtcagctcttgcttcaattccttgaagcaccccagcatcctttcaataaatgcctgccctttgtggcctgcaaccagaggaactgcaactagcacactcactgaaggaatcctgctgct

SEQ ID NO: 830245 - DNA, 120 bp, Artificial Sequence
  ENSG00000234390_10 (sequence is synthesized)
gctgctgctgctaaaaacaaccgaggtcatggatgagggggtggaggatactctcatcccacctccagactgacaacaaaaagacctaaagatctctgtgtacctgggactgtctaccat

SEQ ID NO: 830246 - DNA, 120 bp, Artificial Sequence
  ENSG00000234390_11 (sequence is synthesized)
tgaagattagccatggtaacttgttgacttagtgatcaacttcctgcagaagcccataggtccacctggactctgcccaggccagcgtgttctgaaaatggagggctctgtcaccattca

SEQ ID NO: 830247 - DNA, 120 bp, Artificial Sequence
  ENSG00000234390_12 (sequence is synthesized)
ctcaacaaatgtttattctgcactgaccgagggccagatgtaccaagagctgtggacacagcactccaacttactccagggctactgaaatcagggatggcttccccaaaaggcacacta

SEQ ID NO: 830248 - DNA, 120 bp, Artificial Sequence
  ENSG00000234390_13 (sequence is synthesized)
aggaaagtctatgtcactagcagagaagaggcaccaaagacaaaaaatcaaaaaagaaaaaataccagaaacagtttgacatttgattttttttaagtagtcctcgtgggaaaaatcaga

SEQ ID NO: 830249 - DNA, 120 bp, Artificial Sequence
  ENSG00000234390_14 (sequence is synthesized)
actttgttgtacttccttacattcatttcctgattacatgatgcttttgttttgaatcacgtgtggagggtgtcaccaaaatctttagatgctttgtccttatgtggatctggacccaga

SEQ ID NO: 830250 - DNA, 120 bp, Artificial Sequence
  ENSG00000234390_15 (sequence is synthesized)
tcctagcaaatgttaccatctctgcctcacaaagatctgacagaatgcaggcagttggggctatccttaggagagacagctctccttcgcagtagatgcacctgggtgataaatccaact

SEQ ID NO: 830251 - DNA, 120 bp, Artificial Sequence
  ENSG00000234390_16 (sequence is synthesized)
ctgaccacaaggtggcaaaagagtaaatgacaattcctcatatatgttttgtatgtttatataaaactattggtttatataaaatgctctctaaaaatattaagaaaaacgtgtgctcct

SEQ ID NO: 830252 - DNA, 120 bp, Artificial Sequence
  ENSG00000234390_17 (sequence is synthesized)
tcacacatttttgggttgatgtctgatattttgcatcacaaatgtcaattggctacaaataatgtaatttgtgacaaatgttaatattcaaaaataaaactgttatgtcactatttcaca

SEQ ID NO: 830253 - DNA, 120 bp, Artificial Sequence
  ENSG00000239513_0 (sequence is synthesized)
gacagcaatgcattcccacaggatgaatcttctccagactgaagaccgtttccttcaaccttttttttttctgtcttattcctttctcctcctcttgtttagttttcttttttttttttt

SEQ ID NO: 830254 - DNA, 120 bp, Artificial Sequence
  ENSG00000239513_1 (sequence is synthesized)
taacctgtaaatactattgatgaatcagaaattttctttctaggtcttcataaattatcagtataattctttgtcatgcctgcttcttcctggtctcactttctctcactgtggtaatcc

SEQ ID NO: 830255 - DNA, 120 bp, Artificial Sequence
  ENSG00000239513_2 (sequence is synthesized)
attttcttaatcacctaatttttaatcaaccaaagtgagtatgaggtaaaaggattagcagtttgggcagaagttaaaatgtctcatggatgttttgactcaaactctatagacttattt

SEQ ID NO: 830256 - DNA, 120 bp, Artificial Sequence
  ENSG00000239513_3 (sequence is synthesized)
gtagcaagtgcttatgatataattcagctgaacgagagggcagctttaagacattttagaattgtttcttaccattgtcttttacttcctgggctcttcaatgtttgtcataattatacc

SEQ ID NO: 830257 - DNA, 120 bp, Artificial Sequence
  ENSG00000239513_4 (sequence is synthesized)
tagttagaaggcttcatttgctctgagttatcattgagaactaaatggagaagaaaagaactgaaggcctgaagatatgtcatctgtagaaaaggtgagctgaacttttctctgtctgaa

SEQ ID NO: 830258 - DNA, 120 bp, Artificial Sequence
  ENSG00000239513_5 (sequence is synthesized)
catactttgggtttacaatgagacatttacgtatttgtataaatcggttatactctgagctaatgtgaacacaaacttggtataaatacagatgactccctctctgctgctgtgggaggt

SEQ ID NO: 830259 - DNA, 120 bp, Artificial Sequence
  ENSG00000239513_6 (sequence is synthesized)
tcaactgacacctggggctcagaccagtcttgttaccacatgcttggtgaaattcaaagtgtgtcacacaactacaacagcattcatggccaacctatttggtagaaaggattgaagtca

SEQ ID NO: 830260 - DNA, 120 bp, Artificial Sequence
  ENSG00000239513_7 (sequence is synthesized)
gatgggaggtcaatttgctgtctaaatcaaaaaaacttagctcctttgcagataattgaagatgctgcaacattgcccgaaaacattttataataaacaggtgaaataagtgataatgaa

SEQ ID NO: 830261 - DNA, 120 bp, Artificial Sequence
  ENSG00000239513_8 (sequence is synthesized)
ggtgggtttggattttttattttagaaggagaaatttcatagaaaatatgaatccttgtctcatgattagtgtctctctgcaacagccccatccttctgcaggtggcctcttctcaagct

SEQ ID NO: 830262 - DNA, 120 bp, Artificial Sequence
  ENSG00000239513_9 (sequence is synthesized)
ttcttgtcctccagtattttttatggaaacagaaattaggttatcttccttatgctctagatggacatctgaaatcatcaaacccttgagagaaacagccctcattcttttatgagacaa

SEQ ID NO: 830263 - DNA, 120 bp, Artificial Sequence
  ENSG00000239513_10 (sequence is synthesized)
cctggaagaaaacaggactctgaagatttgtctccatattctctggaaagatgtactctgtttgcaataagagggagccacatggtttattagatggttattaattgagcattctgtgca

SEQ ID NO: 830264 - DNA, 120 bp, Artificial Sequence
  ENSG00000239513_11 (sequence is synthesized)
aagaagtttgtgccttagatttagaattccaccctcagttggaatacagatgatccctaacaagtcacatgaaaaaatgaactgtggagccagaagagtgagttcttggagaactaaggg

SEQ ID NO: 830265 - DNA, 120 bp, Artificial Sequence
  ENSG00000239513_12 (sequence is synthesized)
ccagagacctgtgagcaagatttgataattttataaaaattaaaagacgatttgaaatgttattggtcttactaaaacttttacttgtgaactgcaattgatgacatgatcacttgtgcc

SEQ ID NO: 830266 - DNA, 120 bp, Artificial Sequence
  ENSG00000239513_13 (sequence is synthesized)
aattataattttataccaaaggactgcagagcattggatgggtttgttgggcaggtttctcacaaacgctgacagaaaggtatgacgaaggatgggaggacaaactgggggggtgccaag

SEQ ID NO: 830267 - DNA, 120 bp, Artificial Sequence
  ENSG00000239513_14 (sequence is synthesized)
tagaaaaacagaagcgatggctaagtgctcgtcctggactctgccctttgataagggactgaaggtcccttatgatcttctttcaaattccaccgtcacagttttagtcacatccatcta

SEQ ID NO: 830268 - DNA, 120 bp, Artificial Sequence
  ENSG00000239513_15 (sequence is synthesized)
taatattatttactatcagacttttctttaaattgactcgctttttcactttagccttatcccaagcaataatgcatataaatcataagtttgttgtaatagattttttgtaatactaat

SEQ ID NO: 830269 - DNA, 120 bp, Artificial Sequence
  ENSG00000239513_16 (sequence is synthesized)
caaaattaaatttattcccctgtaacagagataatttctcaaattactttggaaaacaccaatttaaagtgctcagtttaccacttgaggaaaatgagagatcagaggagtaaagccaat

SEQ ID NO: 830270 - DNA, 120 bp, Artificial Sequence
  ENSG00000239513_17 (sequence is synthesized)
tttccaaggtcacacagcctgacaactggaaatcctggcctagcacctaagtcttttaggtattggcccagtactctttccttctatcatctttctcagaggcaaagaaaaaaaaaaaaa

SEQ ID NO: 830271 - DNA, 120 bp, Artificial Sequence
  ENSG00000239513_18 (sequence is synthesized)
gagggctgaggtgttcacacctgcccacggcagcctgcctcgccctcaagcgcctcaaagcttcctaagcgcttacattggtcttgggacagccgactttggcttctttgtttgtttgag

SEQ ID NO: 830272 - DNA, 120 bp, Artificial Sequence
  ENSG00000239513_19 (sequence is synthesized)
ggaccgcggaagtggcggggaatgtgcccccgcttgagaccgcttattgtgagccctcaacggaaatcctgcacggaaggcaaccgcctccccgctcgcgatggacatctgaaatcatca

SEQ ID NO: 830273 - DNA, 120 bp, Artificial Sequence
  ENSG00000239513_20 (sequence is synthesized)
aggatccacccgagtagcggggaccgaatcccatctttcttatctctcgaagactcctttcaggctgagatcagagagggagggaaaaagaagagagaatcattgttcttctttttttaa

SEQ ID NO: 830274 - DNA, 120 bp, Artificial Sequence
  ENSG00000239513_21 (sequence is synthesized)
tttaatataccaagccaccagctcagaaggcttcatttgctctgagttatcattgagaactaaatggagaagaaaagaactgaaggcctgaagatatgtcatctgtagaaaaggtggcct

SEQ ID NO: 830275 - DNA, 120 bp, Artificial Sequence
  ENSG00000239513_22 (sequence is synthesized)
atgaggctagagaaaatattatccatctccccctgttctccaattcagcagctcggactcctgttttcatcacagtcctgttagataattacagccccaaaggcctcctgttccttcttt

SEQ ID NO: 830276 - DNA, 120 bp, Artificial Sequence
  ENSG00000239513_23 (sequence is synthesized)
ctgtgttccctgaatcttctttcccagagccaggacctcttggaaattctcagcctctgttagttgcccgctctgggagcccgactcctcacatccgtcatctctttcttctcccccttc

SEQ ID NO: 830277 - DNA, 120 bp, Artificial Sequence
  ENSG00000239513_24 (sequence is synthesized)
acctgctgtagtgtccccactgtctctctttacctcagctccttaccattcctttccctctacacccttttcctttggttcatagtcaggatgtgctagttgcattcaagccctttttga

SEQ ID NO: 830278 - DNA, 120 bp, Artificial Sequence
  ENSG00000239513_25 (sequence is synthesized)
tactaagaattcagggggacaaatccaaaccctggagactactgtcttccccttagtgatgctaatgaatataattcctgatctgaaattacctgcactttatttggctccatctacttt

SEQ ID NO: 830279 - DNA, 120 bp, Artificial Sequence
  ENSG00000239513_26 (sequence is synthesized)
tctgccacttactccctgtataaccataggctacgtaccctacctctctctgggtttgtttactcctcagttaaaaggaggattaaaatggcaatcacaacaccttgctacagatatgtt

SEQ ID NO: 830280 - DNA, 120 bp, Artificial Sequence
  ENSG00000239513_27 (sequence is synthesized)
aggaagattaaatgggataacatgcagggtgcctagccttcctggcatatagtaaatgcctataaaatataacaagtgtcatgtattattattaaattgtatctacctggtagaaactaa

SEQ ID NO: 830281 - DNA, 120 bp, Artificial Sequence
  ENSG00000239513_28 (sequence is synthesized)
gagcaggcgcgcaccccaatgccgtggccggcgcccagtggagacttctttcacagggtctagaataatcttccgcggaacacccatccatatgcagtgtttgagaactaaggcagctcc

SEQ ID NO: 830282 - DNA, 120 bp, Artificial Sequence
  ENSG00000239513_29 (sequence is synthesized)
cttgctctgttttcctgcgcctagcccccggacttttgtgccgtttgcagctctttttcatttcgaatacccgcatagacgcgagcccacttctgccctcttcctacgctgggcggctcc

SEQ ID NO: 830283 - DNA, 120 bp, Artificial Sequence
  ENSG00000239519_0 (sequence is synthesized)
gttctcattgttcttaaataagttagaagagagtacctgtatcctggatcttttgaacttctgtgaagtaatgtgacaatacagatacttactgatctgattcgggatgttcctgagaaa

SEQ ID NO: 830284 - DNA, 120 bp, Artificial Sequence
  ENSG00000239519_1 (sequence is synthesized)
acaggctccctagttcctgagacattgacattaggccaattaagaatcctacaatgatctctaagtattcaaatgaaaggaggtggcacacatttctaactttgaatcagaagctagaaa

SEQ ID NO: 830285 - DNA, 120 bp, Artificial Sequence
  ENSG00000239519_2 (sequence is synthesized)
tgatgaagcttagtgaggaaggcatgctgaaagccacgagaggctgaaagctacacgtcttgtgccagtcaagttgtaaatgcagacaaaaagttcttgaaggagatgaaaagtgctact

SEQ ID NO: 830286 - DNA, 120 bp, Artificial Sequence
  ENSG00000239519_3 (sequence is synthesized)
ccggtggacatgtaaattataagggagcaaaacagccttattgctgatatagagaaagtttaagtggtcttgattaagaccaaatctgccacagcattctcttaaaccaaagcctaatcc

SEQ ID NO: 830287 - DNA, 120 bp, Artificial Sequence
  ENSG00000239519_4 (sequence is synthesized)
gccctaactctcttcaattctgtgaagattgaaagacatgaaggagctgcagaaaaaaagtctgaagctagtggaggttggttcataaggcttaagaaaataggtcatcttcagaacata

SEQ ID NO: 830288 - DNA, 120 bp, Artificial Sequence
  ENSG00000239519_5 (sequence is synthesized)
agaacatagaagtgcaaggtgaagcaacaagggctgatggagaagctatagcatgttatccagaacatctacctaagatcactaatgaaggcagctgcactaagcaacagcatttaaatg

SEQ ID NO: 830289 - DNA, 120 bp, Artificial Sequence
  ENSG00000239519_6 (sequence is synthesized)
tagatgaaacagtcctctattggaagaagatgccatttataactttcacaagtagagaatagaagccagtgcctgacttcaaagcttctaagaacagattgacttgcttgttaggggtta

SEQ ID NO: 830290 - DNA, 120 bp, Artificial Sequence
  ENSG00000239519_7 (sequence is synthesized)
atgcagctggtgattttaagttgaaaccaatgttcatttaccattctgaaaatcctaaggcctttaataaatatactatatctaatctgtgctccatcaatgttataacaaggcctgggt

SEQ ID NO: 830291 - DNA, 120 bp, Artificial Sequence
  ENSG00000239519_8 (sequence is synthesized)
gttagcacatctatttatagcatgttttattgaatattttaagctcaatgttgagactgagacctactgctcagaaaaagaaaaaaaaaaagattcctttcaagatattactgctcattg

SEQ ID NO: 830292 - DNA, 120 bp, Artificial Sequence
  ENSG00000239519_9 (sequence is synthesized)
caagatattactgctcattgacaatgcatctagttacccaagagctctaaaggagatgtataaggtcattaatgttgttttcatgcctgttaaacacaacatccattctgtagcccatgg

SEQ ID NO: 830293 - DNA, 120 bp, Artificial Sequence
  ENSG00000239519_10 (sequence is synthesized)
ttcaaattttgttatttaagagatacattttttaaagctatagctgccaagacagtgattcttctgatgaatctgtgcaaagtaaattaaaaacctactggaaatgattcaccattctag

SEQ ID NO: 830294 - DNA, 120 bp, Artificial Sequence
  ENSG00000239519_11 (sequence is synthesized)
ttgtgattcctgggaggaagtcaaaatatcaacactggcaggagtttggaagaagcttatcccaaactttatagatgactttgagacattcaagacttcagtggtggaagtaagtgcaga

SEQ ID NO: 830295 - DNA, 120 bp, Artificial Sequence
  ENSG00000239519_12 (sequence is synthesized)
tatggtaaaaatagcaagataactataagtagagcctaaagatgtgagtgaatcactgtaatctcatcatcaaacttaatggatagggagttgattcttatggtggagcaaataaaatga

SEQ ID NO: 830296 - DNA, 120 bp, Artificial Sequence
  ENSG00000239519_13 (sequence is synthesized)
tttcttaagctgaaatctactcctggtgaagatacagtgaccaatgtttttattttgcttttattttttgtttgttttgaattttttgcagaatcaaggtcttgctatgttgcccacggt

SEQ ID NO: 830297 - DNA, 120 bp, Artificial Sequence
  ENSG00000239519_14 (sequence is synthesized)
ttgaactcctggcctcaagcaatcctcacaccttggcctctcgaagtcctgggattataggcataagtcactgtgcctagccctgtgaagattgctgaaataatcacaaaggatttagaa

SEQ ID NO: 830298 - DNA, 120 bp, Artificial Sequence
  ENSG00000239519_15 (sequence is synthesized)
agaatattacataaatttagttgataaagcaatggaagggtatcagaggattgactttaatttttaaagcagttctactgtggataaaatttcatcaaacagaaatcgcacagaaatttt

SEQ ID NO: 830299 - DNA, 120 bp, Artificial Sequence
  ENSG00000239519_16 (sequence is synthesized)
caggaaaagaataatcaatcaatgtgtcaaaccttattgttgttttattttaagaaattgccttaccactctaaccttcagcaatcactcactgatcagtcagcagccatcaacatcaaa

SEQ ID NO: 830300 - DNA, 120 bp, Artificial Sequence
  ENSG00000239519_17 (sequence is synthesized)
gcaagatgctccagcagcaaagaaattacaactcactgaagactcagacgatcattagcattttttagtaataaaacaactttaaattaaggtacgtacattgtttttatggacatgatg

SEQ ID NO: 830301 - DNA, 120 bp, Artificial Sequence
  ENSG00000239519_18 (sequence is synthesized)
ctattgcacactgaatagactatgggatagttaacttttatatgcactaagaaacaaacaaaaatgtgtgagactcatgatattgtaatatgtgctttattgcggtgatctggaactgaa

SEQ ID NO: 830302 - DNA, 120 bp, Artificial Sequence
  ENSG00000239519_19 (sequence is synthesized)
cccatgatatctccaaagcatgcctgtactttaaatatacacatgaaaacttaaacttatctgtattcaaatgtttcactatagttttatacctaacaacaaatgcaaaaaatattgtaa

SEQ ID NO: 830303 - DNA, 120 bp, Artificial Sequence
  ENSG00000239519_20 (sequence is synthesized)
taaaatgactccatatattaatattttcatattcagaggaaggtcattaaaacttactaaaaacttaagaaatacagaattacaattattgacatattaagatgatcatgacataaatga

SEQ ID NO: 830304 - DNA, 120 bp, Artificial Sequence
  ENSG00000239519_21 (sequence is synthesized)
catattaagatgatcatgacataaatgataaaaagcatgcaaaataaaaatatttcacatcaatttttttgtataagcagtacacatgcatatgtttaaaataaaatctctgagaatatt

SEQ ID NO: 830305 - DNA, 120 bp, Artificial Sequence
  ENSG00000224018_0 (sequence is synthesized)
gtgctttgggacagatagagagttgagagacagaaggggtgggaacatcatgttgaagtgaagttcagaccacatgaagaagccacacataggtgttccatccaacagccaacatcagct

SEQ ID NO: 830306 - DNA, 120 bp, Artificial Sequence
  ENSG00000224018_1 (sequence is synthesized)
ggtgtacatgttgtttctcctagatcgtgtttcctgagaagcaaattttgagatggttttgagtgatggatgtctacttaagagtgctcctgggaataacatctataaaatcctggtgga

SEQ ID NO: 830307 - DNA, 120 bp, Artificial Sequence
  ENSG00000224018_2 (sequence is synthesized)
atttgaggcaacttggtcaagcattagtatcctacaattgataggttattgggtgcccagagagagagagagagagagagtgagagcaagaatgagagtgagactgaatatgagataacg

SEQ ID NO: 830308 - DNA, 120 bp, Artificial Sequence
  ENSG00000224018_3 (sequence is synthesized)
agagatgtagatatacctcaggatataaaatttattcattttttgtgtgaagtgtaagatttgcatctagtatctttattttgcataaggacatcccattgttccatcaccatttgttga

SEQ ID NO: 830309 - DNA, 120 bp, Artificial Sequence
  ENSG00000224018_4 (sequence is synthesized)
aaaggtatctgtcctctgaattaccactatactttgtcaaaaatcagttgactatatttgtgtgggcccatttttggatgctatattttatctttgaagataatctttccaaatttcagg

SEQ ID NO: 830310 - DNA, 120 bp, Artificial Sequence
  ENSG00000224018_5 (sequence is synthesized)
ccaacatcagctggtgtacatgttgtcttacaagtagaatgacaccaaggtataaaatttggctgagcacagaccaaagaccgattgaaactctaaatcaaaaatccaagtttctcctag

SEQ ID NO: 830311 - DNA, 120 bp, Artificial Sequence
  ENSG00000224018_6 (sequence is synthesized)
attggatacataacagataacaggagtaagtaaatcatattaagatgacatagattttgaatcagacagaattgaatttgcaacttgcattgctgattatatgtatataatattgtcaat

SEQ ID NO: 830312 - DNA, 120 bp, Artificial Sequence
  ENSG00000224018_7 (sequence is synthesized)
ttatttaaagccttaatttctataactgtaaagtgaacatgataaatactgacttggtaaggctatattaagttatctaaattatgtaggtatctataataaaatttctcagatgactca

SEQ ID NO: 830313 - DNA, 120 bp, Artificial Sequence
  ENSG00000224015_0 (sequence is synthesized)
acaggctgtgtctgtggctgccctggcttagggctctggctggcccctcctttccgacctggtctggcagagcagccccgcaggaccagctcgcaaggctcctggggccagtggggctct

SEQ ID NO: 830314 - DNA, 120 bp, Artificial Sequence
  ENSG00000224015_1 (sequence is synthesized)
gcaaggacagagtcagagagaggctgaaaccaggtcctgaaaaacatcacagaaactacagctggaaatttcctgttgaccctgatagactactacttgacaccagccgaccgatctgct

SEQ ID NO: 830315 - DNA, 120 bp, Artificial Sequence
  ENSG00000224015_2 (sequence is synthesized)
ggctgcccaccatggtcctgccacaattctgatgggacagagaattggccttactttctttcctgataaatagccatagacctcaagccagccagttttggccagcttatagagactgta

SEQ ID NO: 830316 - DNA, 120 bp, Artificial Sequence
  ENSG00000224017_0 (sequence is synthesized)
aaaaaatcagcagagtttgtaggttcatcctccgccaaaatatgagtggcttttcaccggcgaagtttttcaaccgcctggaagaagccatttgaggtttttgctgggctgaatgtacat

SEQ ID NO: 830317 - DNA, 120 bp, Artificial Sequence
  ENSG00000224017_1 (sequence is synthesized)
tttttggacactaaaaaagcacaagggtcaacatgatagccacatatggaaggggcgtggagaagaaaggataggggaaaaagaagaaaggttgtttttaccatcagccccgtgttgaag

SEQ ID NO: 830318 - DNA, 120 bp, Artificial Sequence
  ENSG00000224017_2 (sequence is synthesized)
tcaacaggaaatggcccagtgtggatcaaccaccatactgtcccgagtaaaagggaatgatgatctcttctgagtgacttaagagttaatcaggaccaggtcgagagtttatcacccaga

SEQ ID NO: 830319 - DNA, 120 bp, Artificial Sequence
  ENSG00000224017_3 (sequence is synthesized)
gttccatgtttgaattttggagaattccctttgtttcatttcagcacattcacttcagtgcccgtgtctattttaatagcctggaatgcaattccctttgcccattattctctttcacta

SEQ ID NO: 830320 - DNA, 120 bp, Artificial Sequence
  ENSG00000224017_4 (sequence is synthesized)
tgttccaagaatgacacatctctttggggatgactctttacctaaccagggtgggtgggaggtcaggggaagcccctacccagaagaaaatagtttctttgtgtgcttgaagaaaaacac

SEQ ID NO: 830321 - DNA, 120 bp, Artificial Sequence
  ENSG00000224017_5 (sequence is synthesized)
tcagatgatgaacagcctgatttgggggctgtgtgtgggtgagccactccagtgaagtcgtcctcaacgctccctcagaaggagattatgaatttaatgagcagaagaattctgacaagc

SEQ ID NO: 830322 - DNA, 120 bp, Artificial Sequence
  ENSG00000224017_6 (sequence is synthesized)
cttaaagccaaaggcaattagcaaaggatgaataacttgaattctttgcagttatgaaataatttcatcctaatgaaattacacatgcatatatctttaaaatatgttttatctatatat

SEQ ID NO: 830323 - DNA, 120 bp, Artificial Sequence
  ENSG00000224017_7 (sequence is synthesized)
ctacatggcacaaaagactataatgtaatcttctatgtgcatatacaagcatttcttactgtgcattcagtgacacactagtactaggagatgggacatgaaagtagagtgccatggtca

SEQ ID NO: 830324 - DNA, 120 bp, Artificial Sequence
  ENSG00000224017_8 (sequence is synthesized)
aatctaattggaaatgctacatgctagagctccaacatgtatgcacaaaggccattgggatattgtccttggataatggggacatccccattgggatataaatattctgagaaatcttac

SEQ ID NO: 830325 - DNA, 120 bp, Artificial Sequence
  ENSG00000224017_9 (sequence is synthesized)
acctattcttgctctctctcttgcttttgcttttgccatatgatgcacctgctccttccttaacttccgccacgactggaaacttcctaaggcctccctagaagcagatgctgctatgct

SEQ ID NO: 830326 - DNA, 120 bp, Artificial Sequence
  ENSG00000224017_10 (sequence is synthesized)
gttcagcctggctggggaggccccaggaaacttacaattatggcaaaaggtgaaggaggcccgaggaaacttacagttgtggcaaaaggtgaagcaaacatccttcttcacatggtggca

SEQ ID NO: 830327 - DNA, 120 bp, Artificial Sequence
  ENSG00000224017_11 (sequence is synthesized)
gagaactcactcactatcatgagaacaacatggaggtaactgcccctgtgattcaatgacctcccaccgggtcccttccacaacatgtaggaattacgggaactacaattcaagtattct

SEQ ID NO: 830328 - DNA, 120 bp, Artificial Sequence
  ENSG00000224017_12 (sequence is synthesized)
cgggaactacaattcaagtattcttccttggatgaaaggactaggagaaagccctgcaaccccacgagtccgcccgtttgttgaaatcagttcaagatcatccaggtctgcaaaactcgg

SEQ ID NO: 830329 - DNA, 120 bp, Artificial Sequence
  ENSG00000224017_13 (sequence is synthesized)
ctgaagcagcttgttgcataatttaccagagaaaagagggccatctggagagccaatctggagaactcgagcaaaggccttctgaccaagaatatccagagacaaggtcgaagaatctga

SEQ ID NO: 830330 - DNA, 120 bp, Artificial Sequence
  ENSG00000224017_14 (sequence is synthesized)
acttttaaaggccgcttaggaacatctgattatcagcaagtcttgggaaccactgataatacaacgcgcacccccccactcagtgcagaatgcttcccaacaaggtctctaaatgcttct

SEQ ID NO: 830331 - DNA, 120 bp, Artificial Sequence
  ENSG00000224017_15 (sequence is synthesized)
tccaaagcatgtttgggtttggagattcagctcaaatgctctgacacagactgtcctaaactggtatcatcccagcctgtgacagaaattgaaaaacaagtaatacttcgtgctctaaaa

SEQ ID NO: 830332 - DNA, 120 bp, Artificial Sequence
  ENSG00000224017_16 (sequence is synthesized)
aggatgacctagcttaatttgaagagacagtaacttgctggcatctggctactgaaaagaacaaaatggttgacctcctagtagtgccagggactatcttaaaagcaacaatgatcaatg

SEQ ID NO: 830333 - DNA, 120 bp, Artificial Sequence
  ENSG00000224017_17 (sequence is synthesized)
ggtcagaagttattaaaataaagagacaaagaagagggacattatgaagttaaaatggcaagatgtcatgattggttgctttagaaatggggcagaatgaatgaaaatggatgcgaatat

SEQ ID NO: 830334 - DNA, 120 bp, Artificial Sequence
  ENSG00000224017_18 (sequence is synthesized)
ttctcacccaggtaacggtcaacatgatagccacatatggaaggggcgtggagaagaaaggataggggaaaaagaagaaagcatcagattccttgccagaggaaaaaaatgccatccttg

SEQ ID NO: 830335 - DNA, 120 bp, Artificial Sequence
  ENSG00000264472_0 (sequence is synthesized)
cagaaagaaaaacctatggaaagatcctgtgctggaagaaagcatgaagtaattcaaatgactaaaagacttcatgctgagaagagcactcgacactgccaccgaagctctgtttctggt

SEQ ID NO: 830336 - DNA, 120 bp, Artificial Sequence
  ENSG00000264472_1 (sequence is synthesized)
gttgttttgtcaattatgctgatgccacgggaccatggaacagtgccactatttccaagagcaacagcaaatcgaaaaatcttcatgcaatggttgttctagaaaagtctattacattgg

SEQ ID NO: 830337 - DNA, 120 bp, Artificial Sequence
  ENSG00000264472_2 (sequence is synthesized)
caatctatcctttaaaagttcaagtgtattattgcattttttaagttgtaaaagaatgatgtacacatatccttaaacatagtatataaaagcaactactcaatggggatttatgtgatg

SEQ ID NO: 830338 - DNA, 120 bp, Artificial Sequence
  ENSG00000264472_3 (sequence is synthesized)
agattacttacgtaaagaaaattatttgtcttttgattaatagtgcaatttaaaactggaagtcgttttctttaaaaatgcattctctataccattgaaataaaaaaaccaaatgtaaaa

SEQ ID NO: 830339 - DNA, 120 bp, Artificial Sequence
  ENSG00000264472_4 (sequence is synthesized)
cagaaagaaaaacctatggaaagatcctgtgctggaagaaagcatgaagtaattcaaatgactaaaaggtcttaaacatctttgccatcatttataatgcagacttcatgctgagaagag

SEQ ID NO: 830340 - DNA, 120 bp, Artificial Sequence
  ENSG00000275799_0 (sequence is synthesized)
cctttgccacatgaggtaacattcacaggatccgggaatggggacatgggcatcctttggagggtggttcagctgagcatgggatcatgatacaggtcctgtgtataaaattcaaatact

SEQ ID NO: 830341 - DNA, 73 bp, Artificial Sequence
  ENSG00000275799_1 (sequence is synthesized)
atttttaaaaattagcagctggaggatctcttgagcccaggagacggaggctgcagtgagctatggttgtgcc

SEQ ID NO: 830342 - DNA, 78 bp, Artificial Sequence
  ENSG00000275799_2 (sequence is synthesized)
agcccaggagacggagggactagctagaccctgtctcaaaaaataaaaatttaaaataaaatacatagagaatctcaa

SEQ ID NO: 830343 - DNA, 120 bp, Artificial Sequence
  ENSG00000262133_0 (sequence is synthesized)
gaagctctgaaggctgctaggagggccacgggagctgtgggagagggtgaggctggagccctgtgggctaacagacagggctctaattcgtgacatcgtggcaacaaactattagaaatg

SEQ ID NO: 830344 - DNA, 120 bp, Artificial Sequence
  ENSG00000262133_1 (sequence is synthesized)
aggctagacctggaagccctgggggcacagtctggaggggagacagacgagagctaagtagaatgcaggcaatgacgccgtaacagagatctgcacagcgaccattgcacagcgtggggg

SEQ ID NO: 830345 - DNA, 120 bp, Artificial Sequence
  ENSG00000262133_2 (sequence is synthesized)
gggccatcatgctcaaaggttccaaggtacggaatccaaccacagtgcccactgtggtgaagccactgcgctggtccgagaagaaagtgacaaacaaaatgacatggagcccaattcatc

SEQ ID NO: 830346 - DNA, 120 bp, Artificial Sequence
  ENSG00000262133_3 (sequence is synthesized)
ctgagagcagaacctcggagccatgtggttaagatggaaattccacttttagtccaagcaaatcttctgatgtatcaagtttgagggtgaggtttcattaaaggaatttaaaataaaaaa

SEQ ID NO: 830347 - DNA, 120 bp, Artificial Sequence
  ENSG00000262136_0 (sequence is synthesized)
tcactgtgactgcggatttggaaggctgagagtcctggggagacatgctccgtggagacgaatttgtttcttcctttgcaagattcagattctgcacttgggggcccatacaacacactt

SEQ ID NO: 830348 - DNA, 120 bp, Artificial Sequence
  ENSG00000262136_1 (sequence is synthesized)
ccctgggtgcatgccactgcaccacccctgctcctcaaggcaggcgctccggtgctcacaggccatgggacagtccagttccctgcagacccagcggggcatgggcggacagagccgcac

SEQ ID NO: 830349 - DNA, 120 bp, Artificial Sequence
  ENSG00000262136_2 (sequence is synthesized)
ctcgctcttcaccttttcttcacaaacttctttctggaagcgttgggatttaagcgtctccgcccagctcccaaggtgctgtcccggacctgcagggtagctgagcggctggagatgtca

SEQ ID NO: 830350 - DNA, 120 bp, Artificial Sequence
  ENSG00000262136_3 (sequence is synthesized)
ttctcgacaaagggtgacaccccggcgatgtagtcaggggcgaacacgttggttttctgcctggccttttgggagagtcgcagctgagggaagcgctgatcctcggtgagatgggggttg

SEQ ID NO: 830351 - DNA, 120 bp, Artificial Sequence
  ENSG00000263843_0 (sequence is synthesized)
agccgcaagcggaactcgcttggctcgtcaccccttcacccggtgcgcctgggccgtgtccgggcccacgccggacccgccggcacctcgatcttgcgcgtggccccgcacccagccctc

SEQ ID NO: 830352 - DNA, 120 bp, Artificial Sequence
  ENSG00000263843_1 (sequence is synthesized)
cccggagctcaggtgcactgggccgggagacaccgctgggctgcgcggcgtgggaagagcctgcagagcgcgtggtggggacctggtggcaggaggaacagcatcagccctggtcgcacc

SEQ ID NO: 830353 - DNA, 120 bp, Artificial Sequence
  ENSG00000263843_2 (sequence is synthesized)
actttccccgctcccccaacccaggtagagaaggcaggggctgcagggccggggccagccacaaccctctcccgctccaaggaggacatgggcgaagcgagtttcaggtcataggggcag

SEQ ID NO: 830354 - DNA, 120 bp, Artificial Sequence
  ENSG00000263843_3 (sequence is synthesized)
ccccgagaaaggggccccattggcaactcgcggccgtcggttgttgcgaatgcccctgaagtggcgcggaccccaccgcccggcgtctgccctgggtgacaggagggcacctagaagtgg

SEQ ID NO: 830355 - DNA, 120 bp, Artificial Sequence
  ENSG00000263843_4 (sequence is synthesized)
gggaagaactgccgccgctcctgccgcgcgaccgggaggagcgctgccggcgctgcccgcgttctcgcctccttttaaaagaaccgccaaagtggtcaccgaaaacggaggaggaagaga

SEQ ID NO: 830356 - DNA, 120 bp, Artificial Sequence
  ENSG00000263843_5 (sequence is synthesized)
acgctcagctgcagcaaaagaaaccaatgggcaggaaagatgaagagaagaaactttaacggaatttcataaaaaatgcattcaggcagctgcatcctcgtggcccccgccgcagcctgg

SEQ ID NO: 830357 - DNA, 120 bp, Artificial Sequence
  ENSG00000263843_6 (sequence is synthesized)
accttgggaaccagcagcccagagccaggaagccccagcattcagggcccagacagaccccaaaatcccagaccagaggcagggaaggatggtgcgaggaggagcccaggacccacacgc

SEQ ID NO: 830358 - DNA, 120 bp, Artificial Sequence
  ENSG00000263843_7 (sequence is synthesized)
cagggccagggccagcgccggctcccagtgggtgcctctttccaaggctggagagggaggcagaatggagggcttcccaggtcggagcaaccctacaggccgggcagatggagggaaggg

SEQ ID NO: 830359 - DNA, 120 bp, Artificial Sequence
  ENSG00000263843_8 (sequence is synthesized)
tggaggtcatgttctggagacctcccctcagcctggaactggtttctcctctgcctctccgcctgtgggtgtccctctgctctggtaacaccccaggcaccagctgtgccctcaccaggc

SEQ ID NO: 830360 - DNA, 120 bp, Artificial Sequence
  ENSG00000263843_9 (sequence is synthesized)
tacgtgcccgccccttccttctgccatccccatcagtgggctgcttcagagccacggcccttctggggctacaggggaggatgcacccgcagcatgctctgcactgaggagcaggcagtg

SEQ ID NO: 830361 - DNA, 120 bp, Artificial Sequence
  ENSG00000263843_10 (sequence is synthesized)
atgccacctgtcctgctgatagctcctcacccagcaaggctgacccagctctgggtgaaagaggagtcagtgaggtagactggggagaggctgcaccttcacccacgcctgcccacagca

SEQ ID NO: 830362 - DNA, 120 bp, Artificial Sequence
  ENSG00000263843_11 (sequence is synthesized)
tggcccatccacttcctgcacgggcgctgggatctgctttccatggagccccacggccatgaccagcccggtcctgggagaggacagcctgggtggtggtgtgtctgcagacacgaaggt

SEQ ID NO: 830363 - DNA, 120 bp, Artificial Sequence
  ENSG00000263843_12 (sequence is synthesized)
ctgggcacggggcccagaaagtgactggctcagcctggagtctcccccagcactagaagcagagctgccaagggctgccgctatggagaacatgggatttgaggaaggcaggagtccttt

SEQ ID NO: 830364 - DNA, 120 bp, Artificial Sequence
  ENSG00000263843_13 (sequence is synthesized)
ccctcatactttgtgagtaggcagatgtgccaggggagatggagtaagataaggaatgtgtgtttagctttaatgtctattaaataggttggaaaaacaggccaagtgtagggacctgac

SEQ ID NO: 830365 - DNA, 120 bp, Artificial Sequence
  ENSG00000263843_14 (sequence is synthesized)
tcctgcaaagggcctaccgcagccctctgcactcaagcagcagccccatccagaccaggagtgtgttctgttctcctggcaggcagggctgataggtgtaggatggcgtctgtttccttt

SEQ ID NO: 830366 - DNA, 120 bp, Artificial Sequence
  ENSG00000263843_15 (sequence is synthesized)
ggagtgtgggctggtcagaggagaaacagcaacttcctgctccttctcactgtgtcgttggctcaccatagaccacgtcctgcattccctctgattctctcatggggagagccctggacc

SEQ ID NO: 830367 - DNA, 120 bp, Artificial Sequence
  ENSG00000263843_16 (sequence is synthesized)
ttctggtggtgtcccagctgggtgggttcaaggctgctaccccgcttggggcagctggcctgcagggaagggccagacggcacctctcagtggagactgaatcttccttccttcaggagg

SEQ ID NO: 830368 - DNA, 120 bp, Artificial Sequence
  ENSG00000263843_17 (sequence is synthesized)
ctgcctccagggaagacctggggtccttcctgcactcagcgctggctggctgtcctgttcatgcagtggaagacattacagaagaattcatacgagaagaacatgaagcctgtggagagg

SEQ ID NO: 830369 - DNA, 120 bp, Artificial Sequence
  ENSG00000263843_18 (sequence is synthesized)
gcagccttcagcaagctgggggacaggcccttgaagaagcccagggcgccttccttttgcagcacctgcttggcacagtccatgaggcccttgtatctccgtacctggggagaggaaagg

SEQ ID NO: 830370 - DNA, 120 bp, Artificial Sequence
  ENSG00000263843_19 (sequence is synthesized)
gatgaaaatatggatgcccgctctgctcccatcaacacagcccctggcacatcacagatcttaagaagtacttgctggacaaagaaatgaatgcaaaatagcaaattattttattttttc

SEQ ID NO: 830371 - DNA, 65 bp, Artificial Sequence
  ENSG00000263847_0 (sequence is synthesized)
agtagctgagattacaggcatgtgccactacggcaagcgtatcacttgaggtcaggagttcaaga

SEQ ID NO: 830372 - DNA, 90 bp, Artificial Sequence
  ENSG00000263847_1 (sequence is synthesized)
gtgacaacaaaaaaacccaatgaagtctttagttctttccctgtcttactatcaccactatttcagacattatttcatgtctgtgcatta

SEQ ID NO: 830373 - DNA, 80 bp, Artificial Sequence
  ENSG00000244239_0 (sequence is synthesized)
caccagccggaatagcaaccggcggagcccgtgcgcaccgcagcgcagcgcagcggccggggggtgcgggcgccctcgcc

SEQ ID NO: 830374 - DNA, 120 bp, Artificial Sequence
  ENSG00000244239_1 (sequence is synthesized)
gttccacgtggccatagcgtttgcgtcacaatgacctggcggacaggtgggagccacagcgtacaccccagggttccctctgtgctgtgcgtagtgcctactgcttgcttccaggttaaa

SEQ ID NO: 830375 - DNA, 120 bp, Artificial Sequence
  ENSG00000244239_2 (sequence is synthesized)
tttctgtagctttagaggacaggagacttcatgacttcactgccaagaaaagttacagaggcctgctgtacctggaaatcaagtttgagcttcgagaataaaggtcatgttttaaaaaca

SEQ ID NO: 830376 - DNA, 120 bp, Artificial Sequence
  ENSG00000225655_0 (sequence is synthesized)
acggggcagaaggactatgttgtgagcctgcgaaagaagtttgtgtggggactgtgggcagtgaacgcgttgggaacaatatggaaaactgggagctgccttggaatctacagggccggg

SEQ ID NO: 830377 - DNA, 120 bp, Artificial Sequence
  ENSG00000225655_1 (sequence is synthesized)
ctgaagaaaagaagaatggtattcacgcagttcccattttacagatgaaaacaagaggactttttctgtgaagtcaagaaagtggttacaatggtactttcagcctgtccgaattatgta

SEQ ID NO: 830378 - DNA, 120 bp, Artificial Sequence
  ENSG00000225655_2 (sequence is synthesized)
cgtcagttgaaacctgctgggactttttagccattctcttcaacataaagaatgggtgtttttggagggggtgagaggaatggggaaatgttgtcaaagagtacagtgttttagttgaga

SEQ ID NO: 830379 - DNA, 120 bp, Artificial Sequence
  ENSG00000225655_3 (sequence is synthesized)
caggaagaatatattttgttgagatctacagcacagcatggtgactgtagttaacaatgaagtattgtgtatttcaaaattgctaagacaataaatttcaaatgttctcaccacaaaaaa

SEQ ID NO: 830380 - DNA, 120 bp, Artificial Sequence
  ENSG00000225657_0 (sequence is synthesized)
gcgttttcaatcgctcacctgcagagccgccagattctggccaatctcggcttttttccctctcactgtgggttcttcagagccccatggtttagacacaacggtggattctcttgtgcc

SEQ ID NO: 830381 - DNA, 120 bp, Artificial Sequence
  ENSG00000225657_1 (sequence is synthesized)
gggacttgagcatccatggattttggtgcctgaggagagtcctggaaccaatcccccatggatactgagggacaactgtaatcttttttggaataaggaattaaaaatttccccaaaatg

SEQ ID NO: 830382 - DNA, 120 bp, Artificial Sequence
  ENSG00000225657_2 (sequence is synthesized)
tcattgcaatccctgcaaaaccagattcaggactggagagagaaaataagggctccgtgtacttgtggagacaggatttggacccaggtctctcctcccaccaaagttcagggtctatag

SEQ ID NO: 830383 - DNA, 120 bp, Artificial Sequence
  ENSG00000225657_3 (sequence is synthesized)
gcctgagttcaagtcccggttcctgcactcccagccatatgaccaaagaggattcaggttctgtatccgactcatggggacagcaacacactcatctctcacagtgaagacccagtaaga

SEQ ID NO: 830384 - DNA, 120 bp, Artificial Sequence
  ENSG00000225657_4 (sequence is synthesized)
ggaactgtgtgtctgaggtcgtggccatctgtccaaagagcttcttctgaccaaagtgctcattttcatagtgtgaccacagagtacacccgtgggaagaggagtcggggcatcccttgc

SEQ ID NO: 830385 - DNA, 120 bp, Artificial Sequence
  ENSG00000225657_5 (sequence is synthesized)
tggaaataccccagccctgaaggttgctggcaaaaccaccatttaattcagaacaaaaagtctgctccaggagcccctgagagcgtcaaaaagaacaaggtttcccccactggactttac

SEQ ID NO: 830386 - DNA, 120 bp, Artificial Sequence
  ENSG00000225657_6 (sequence is synthesized)
ctccagatgcccaggacatgggacatcatgcaaagacctagcacgtgcttttcctgactggagaagaacggggacagaaggcctgatttgcatttctactatttcccaggagatgttgac

SEQ ID NO: 830387 - DNA, 120 bp, Artificial Sequence
  ENSG00000225255_0 (sequence is synthesized)
tgcatagaatacatcctcccttcagttggcttgggtcaacttaggtcatgggccacctggctgatagcagtttccacagaaatgcttcaagatggaatctctggacactccaagggttga

SEQ ID NO: 830388 - DNA, 120 bp, Artificial Sequence
  ENSG00000225255_1 (sequence is synthesized)
tcctctcatggaagaccagtggggaggaggctgcgggaaaggtcaggcactgtgcacttccctgacagctgcaaatggttgtttccaagcccactggtcactacaaataagaatttctgg

SEQ ID NO: 830389 - DNA, 120 bp, Artificial Sequence
  ENSG00000225255_2 (sequence is synthesized)
gaacatgatgtttcctaccgacagttactcatgacgtctccatccaggactgaggggggcatccttctccatctaggactgggggcatccttctccatccagtattgggggtcatcctcc

SEQ ID NO: 830390 - DNA, 120 bp, Artificial Sequence
  ENSG00000225255_3 (sequence is synthesized)
tccatccaggacctgaggggtgtccttttctgcgcttccttggatggcagtctttcccttcatgtttatagtgacttaccattaaatcactgtgccgttttttcctaaaatatatggggc

SEQ ID NO: 830391 - DNA, 120 bp, Artificial Sequence
  ENSG00000225255_4 (sequence is synthesized)
gcgctttggaatcctgcagatataataatgataattaaacaaaacactcagagaaactgccaaccctaggatgaagtatattgttactgtgctttgggattaaaataagtaactacagtt

SEQ ID NO: 830392 - DNA, 120 bp, Artificial Sequence
  ENSG00000225255_5 (sequence is synthesized)
tatagaacttttatactgatacacagacactaaaaagggaaagggtttagatgagaagctctgctatgcaatcaagaatctcagccactcatttctgtaggggctgcaggagctccctgt

SEQ ID NO: 830393 - DNA, 120 bp, Artificial Sequence
  ENSG00000225255_6 (sequence is synthesized)
cttcaggtaaccactgatccacttccagtcactatccatgagtttttatttccaaatacatgaaatcatatgaatttctggtttttcctgttggagcccaaggagcaagggcagaatgaa

SEQ ID NO: 830394 - DNA, 120 bp, Artificial Sequence
  ENSG00000229140_0 (sequence is synthesized)
ataatcaggcaactgcagagtcttagggggttatctaatgtagtcttggggtggctggatagacttcccaaagaaggtgatgccgaagctgaggtcggaaattacgaagatcagctatat

SEQ ID NO: 830395 - DNA, 120 bp, Artificial Sequence
  ENSG00000229140_1 (sequence is synthesized)
tgtgcctgcagcctggcctgttgcccacagcggtctacctgccacactgggaaagatcgagcagagacagagaagaaaaggaggctccatttttcaggctgctctcccgcaggctcatgt

SEQ ID NO: 830396 - DNA, 120 bp, Artificial Sequence
  ENSG00000229140_2 (sequence is synthesized)
tttgtgttcatgccaggcagagaacacaaaatgttccaataaataagtatcaaaggctacacagaagcactgctgatttcagccctggcaggactcctgtttaaacatacttcccagaaa

SEQ ID NO: 830397 - DNA, 120 bp, Artificial Sequence
  ENSG00000229140_3 (sequence is synthesized)
tcttgggcagcttgccatgcatctacttgtttccaaagttatttgggtcagcattttcctccacccaccacttaaaactgatttgtttcatacatttgaaatgtatgaaaagccagaaat

SEQ ID NO: 830398 - DNA, 120 bp, Artificial Sequence
  ENSG00000229140_4 (sequence is synthesized)
ccaggacccaccctggcctgctccctttttctcacctactgtgttaaggataagtcaattgagcttcacttctctaattgaaatcaccgtgctgatggagtctgtctgtggaaatgaaag

SEQ ID NO: 830399 - DNA, 120 bp, Artificial Sequence
  ENSG00000229140_5 (sequence is synthesized)
gtggctaccataatctgttgggagttgaattaatcctctgggagtgaggctgacctaattactcagaaatactgggcttgctttcattctgtggaatacagccatgagaaagaggccagc

SEQ ID NO: 830400 - DNA, 120 bp, Artificial Sequence
  ENSG00000229140_6 (sequence is synthesized)
tgcctgaaactcacctaacatgaaactgagaagccttttcatttgaaagtggtatttcttatgttttttatctttttgcttgaaagtattcttaaactaaagaaaggagaaacagaaaag

SEQ ID NO: 830401 - DNA, 120 bp, Artificial Sequence
  ENSG00000229140_7 (sequence is synthesized)
gtgaagaagccaagaggctggagtttccttttgaatggatattcatccatgaagctgttgattctgtttttctgttcctccagatgtctacacttttacctctgcttgcctgatacaacc

SEQ ID NO: 830402 - DNA, 120 bp, Artificial Sequence
  ENSG00000229140_8 (sequence is synthesized)
accaccagtcacctcacagaataactcactccttaagaatctgatcaggaatcagccttccctgatcacaaacactgagtttagaagtccctccacagtgtcccccgtaaccctgtgcta

SEQ ID NO: 830403 - DNA, 120 bp, Artificial Sequence
  ENSG00000229140_9 (sequence is synthesized)
cctcactgcctcatagtttagtgccgtttgtgtacatgcctatcttcgtccatggatccagaacaacttgtaaaaatgactgtacttatcaccttcagtattcaatgactaaactataat

SEQ ID NO: 830404 - DNA, 120 bp, Artificial Sequence
  ENSG00000229140_10 (sequence is synthesized)
tttaacatatctggcagaatgaatcacttggggatttctgccaacactaccaatatattactcctaatttgtaattattacttagcatggattatagtaccggctgttggagagccaatg

SEQ ID NO: 830405 - DNA, 120 bp, Artificial Sequence
  ENSG00000229140_11 (sequence is synthesized)
tggcagaccctaagtggaataaaatgtcagtagcagtctaggagcatatatttattggaatagatcattcattcatttgttcattaactaatttgttcattaaataaacatttattaagc

SEQ ID NO: 830406 - DNA, 120 bp, Artificial Sequence
  ENSG00000229140_12 (sequence is synthesized)
cattcatttgttcatttgacacattgtttattgaagtgctattaagtgttaacattgtgtgtttattggtgaatgtaacaggcatgtttcttctatgggaatcttttaggatagtggaga

SEQ ID NO: 830407 - DNA, 120 bp, Artificial Sequence
  ENSG00000229140_13 (sequence is synthesized)
taacagacaatacaaatgtaaacatacaaatgtaagttatgtaaaatgtaaaattatgagttgtgataagtgctttgcaggaaaccaaaaatgtgtaataataaagaataaaaatgaaaa

SEQ ID NO: 830408 - DNA, 120 bp, Artificial Sequence
  ENSG00000229140_14 (sequence is synthesized)
actccggtacaagtcataaccatatccagatctggtttgtataggtgactgagataacctcagcctcatctcaggaagtggccacttttggagagtccgactatcacggtaggcacagaa

SEQ ID NO: 830409 - DNA, 120 bp, Artificial Sequence
  ENSG00000229140_15 (sequence is synthesized)
ctctgccatgtcactagctgaatgacctcggatgtcacttcaactctgagccttagaacttgtcaactgcaaagtggggcacttcaccgagctacatcattgagctacttcactgagcta

SEQ ID NO: 830410 - DNA, 120 bp, Artificial Sequence
  ENSG00000229140_16 (sequence is synthesized)
cttcattgaattgggaaaattaaaggagcaaatatgggagaaggatttggcccatagtaaacactatgactgtccgtcttctgccatctttcagtagacccagtggaattatatgaaggt

SEQ ID NO: 830411 - DNA, 120 bp, Artificial Sequence
  ENSG00000229140_17 (sequence is synthesized)
tgataggcacttaaaccaagaatatatgaacatctattctgtgcaagatgtgtgcattgaactcagtccaggactgaaggggacaggaggaagatctttaataaatgaaataaatgtgac

SEQ ID NO: 830412 - DNA, 120 bp, Artificial Sequence
  ENSG00000229140_18 (sequence is synthesized)
aaggaggaggaggcattgcgtgaaaaactaaacatgcaaaatattacacacaaagagaaccaaaatgcaggttcactggaaatgatagacaatatgttaaaacaagaggagagaagagag

SEQ ID NO: 830413 - DNA, 120 bp, Artificial Sequence
  ENSG00000229140_19 (sequence is synthesized)
ggaaacacacaatttagggctaagatcttgttgtgttcagccacaaatgatggccagcagtgaggaatctgtgtgttctccacactcttcgctcctgggaagtcaactcacatggaccat

SEQ ID NO: 830414 - DNA, 120 bp, Artificial Sequence
  ENSG00000229140_20 (sequence is synthesized)
gatatcaatatctgctccttcccctaatatctgtttgaccttgggtcagttacttaaacttcctaagccttagtttctttgtctggaaaatagggatagttatacctaccacacaaccac

SEQ ID NO: 830415 - DNA, 120 bp, Artificial Sequence
  ENSG00000229140_21 (sequence is synthesized)
tttgtaatgaatatgttggaaattatatgcaaattggcttccgttggtgtttggaacatagtaggtttttaactggaatataatagctaccattatcagtatcatcatattaatttatat

SEQ ID NO: 830416 - DNA, 120 bp, Artificial Sequence
  ENSG00000229140_22 (sequence is synthesized)
ttccatcttcagcccttaacccaggatcttcagtaaatgttgaattctcaaatttgttaaattcacttgtctatactaatattttactctaggtttcttagaatattctagataatatta

SEQ ID NO: 830417 - DNA, 120 bp, Artificial Sequence
  ENSG00000229140_23 (sequence is synthesized)
ttatgtagaatatgttatgtaagcttcatcttatctgtaaatatagttttactttttcctttctaatttttatgtcgattacttctttttcttggcttattgaattggctaggattcccg

SEQ ID NO: 830418 - DNA, 120 bp, Artificial Sequence
  ENSG00000229140_24 (sequence is synthesized)
tacagtgttgaatacgtgcagcaagactgcacatcttgccttgttcctggtcccacagagagaatatccagtacttcacaataagtatgtgttaattgtagattttattagattgaggaa

SEQ ID NO: 830419 - DNA, 120 bp, Artificial Sequence
  ENSG00000229140_25 (sequence is synthesized)
gttccctttcctttcaagtcagtctttttattttaaacatgtattgaagttttgtcaaatgtcttcatctattggaataattatacatatctcttttttattctgttaatattacatttc

SEQ ID NO: 830420 - DNA, 120 bp, Artificial Sequence
  ENSG00000229140_26 (sequence is synthesized)
aatcttctgtctacctaaaatccctagaataatctccatttggctatgatgtgttgtgcttttatatattactgaattctatatgccaatattattaaaattttctgtctttatgagaaa

SEQ ID NO: 830421 - DNA, 120 bp, Artificial Sequence
  ENSG00000229140_27 (sequence is synthesized)
attgtagctcccataatccccacatgttgtggagggaccctgtggaagatctttaataaatgaaataaatgtgactgtatgtcctacatcccattcctgttgtcttccatgtctcctcag

SEQ ID NO: 830422 - DNA, 120 bp, Artificial Sequence
  ENSG00000229140_28 (sequence is synthesized)
gagaaagtgaagaagagaaaatgggagagggagagaaaacatacaattatgtatgtctggagcacaccatattaaaggagggagtggcagaaaacgtgaggtgggaatcaaatcatgctg

SEQ ID NO: 830423 - DNA, 120 bp, Artificial Sequence
  ENSG00000229140_29 (sequence is synthesized)
aacagtgtgatatatgttctctatctctgcttttataaggcagctgtttctcggaggatcaagctcagatgtacccatagggtcaagctccagcacagagacccatcctgggatgcagga

SEQ ID NO: 830424 - DNA, 120 bp, Artificial Sequence
  ENSG00000229140_30 (sequence is synthesized)
gcttggtgtctgggaggtcatgaggaaaggcttcactgttactctcagggtcaacctggtgtgatgcacacaccaattcagcagccaagtttatctaggatatgtcaatctcacaagtta

SEQ ID NO: 830425 - DNA, 120 bp, Artificial Sequence
  ENSG00000229140_31 (sequence is synthesized)
tagaaacttccaagaagtagcaacaggacccaggagctcacagctgggttttcacttaatccttgtacagtgttgcctcagcttctcaaagtttctggtgtttatgaagatccataacag

SEQ ID NO: 830426 - DNA, 120 bp, Artificial Sequence
  ENSG00000229140_32 (sequence is synthesized)
ctggctgcaaacccaactcctgagaatcatttctgggagaatgccgaagactgcatttcaacttcaagaatggccttttaaaggaccatgggctgtttgaggggccaacatcattaactg

SEQ ID NO: 830427 - DNA, 120 bp, Artificial Sequence
  ENSG00000229140_33 (sequence is synthesized)
ggattgcatttgaaagacagacacaacactcaaacccttaggtcctgagtacagcggagtgaaagcaaacttggaaatcatgtcttagagatcaaggagccaagagatgagacaagcctg

SEQ ID NO: 830428 - DNA, 120 bp, Artificial Sequence
  ENSG00000229140_34 (sequence is synthesized)
ctgctgtgaatgacaccatgaatttctgaatgtgatgtcccttcaattcatgaggaatgaagcaacgatatctcctaaaacaccagggtaagtgatggggagaccacaaattatattatg

SEQ ID NO: 830429 - DNA, 120 bp, Artificial Sequence
  ENSG00000229140_35 (sequence is synthesized)
tatctattgggtaatatttcgcacccttaaggacagagactagtgaaggaagaagagaactatttcacccctacaacacctaggaacatcagccaaatgtaaactggtggatcacgtcat

SEQ ID NO: 830430 - DNA, 120 bp, Artificial Sequence
  ENSG00000229140_36 (sequence is synthesized)
atcccttgaccaccattccctctcaatcctctgaccttgaacatttctcttctagttatattgaaaagtatcccatataccttatctaatttaatcttctcaacagctttatgagtttgg

SEQ ID NO: 830431 - DNA, 120 bp, Artificial Sequence
  ENSG00000229140_37 (sequence is synthesized)
tattctccttctcattttacaaattagaaaattactgctcaaatagtttaagtgtatgttatccaaatgtaccaagtgacagaactggaacttccacacaggtctttcttgccaacaagc

SEQ ID NO: 830432 - DNA, 120 bp, Artificial Sequence
  ENSG00000229140_38 (sequence is synthesized)
catacaaaagctttaccctaaaataaactatctctggaagcttcgaattagaatgcacctctaaggggtaaaacttaattcactaatgaggaagagaattttctagaaacctctcaggga

SEQ ID NO: 830433 - DNA, 120 bp, Artificial Sequence
  ENSG00000229140_39 (sequence is synthesized)
tggaaagaattaattctaagcccaattccctcaatatctaaacatcttggaaatgagatactttaaagctgtttttgttctctagggtgctatttagtgcctgaagaaataatccactaa

SEQ ID NO: 830434 - DNA, 120 bp, Artificial Sequence
  ENSG00000229140_40 (sequence is synthesized)
aagtgtcttacctcactaaactactagtagctttccaacaaataatcaaaacactccatgtgcccaaagatgaattcaatcatcaggcaagctacagagaataaatagaaatataattct

SEQ ID NO: 830435 - DNA, 90 bp, Artificial Sequence
  ENSG00000229140_41 (sequence is synthesized)
tcttcaaccacctaagaagtcagtttcatagctcctgtgagtaagaagaaattgttttgacatcatcccaagaagtagagttacagagaa

SEQ ID NO: 830436 - DNA, 120 bp, Artificial Sequence
  ENSG00000229140_42 (sequence is synthesized)
tatcaagtaggtgcacgttctattcaagggaatttctatctctttcccttcttggtaagggatgctcatctaggatggctccgtgggttttagaaagggcttgagctcattcttcaccag

SEQ ID NO: 830437 - DNA, 120 bp, Artificial Sequence
  ENSG00000229140_43 (sequence is synthesized)
gactctgccatgtaattttagccacaagtgttaatgggaaaggtcatagagttcaggacactattcagtgaaaataaaactggagaagggcatgaggccaaaaataaggccctttctaag

SEQ ID NO: 830438 - DNA, 120 bp, Artificial Sequence
  ENSG00000229140_44 (sequence is synthesized)
tagtgtttggggacgtgggcttcagcacttcacgtgctcataagtcctccccttgctgcaggcccttcacagccccttgctcaagccctcccagggtaaaagagtttgtctaggaaggca

SEQ ID NO: 830439 - DNA, 120 bp, Artificial Sequence
  ENSG00000229140_45 (sequence is synthesized)
gaattgccatttcctgacaccaagctcaggagaaagtaatgcacctcaaatagccttgtttgctcagtaactgcttatgggcctgttagtccttagggccctcctctgtttgcaattgac

SEQ ID NO: 830440 - DNA, 120 bp, Artificial Sequence
  ENSG00000229140_46 (sequence is synthesized)
acgctgcagaaagccagctgtcgatagtaaagggacagtacgttttgtttaggggaaacacgttgatagcaaagggacagtatgttttgtttaggggaaagactgacgtaaaatgctgtt

SEQ ID NO: 830441 - DNA, 120 bp, Artificial Sequence
  ENSG00000229140_47 (sequence is synthesized)
aattgcaccctctctggaatgtctccttgtcccgatgaagacggagaactgaggtggaagaagaaattgtgctgtgtgataaaagttgcatatgcttatgtcttctatatggggtaggta

SEQ ID NO: 830442 - DNA, 120 bp, Artificial Sequence
  ENSG00000229140_48 (sequence is synthesized)
tcatagtacctgaaacacttttggaatccactggttaaaatcattgagggcagaggcggtcatatctgtctaatttgtaagagtatacttattgctaataaaaattggtaacttgaaaaa

SEQ ID NO: 830443 - DNA, 120 bp, Artificial Sequence
  ENSG00000229140_49 (sequence is synthesized)
tggggattctgaacatctctgaagctatcggtgcccctcaatggatctctgtaactttttagctgtgtggccatgtgcaaatcacttgaccattttgagactcagtttcctccactgtaa

SEQ ID NO: 830444 - DNA, 120 bp, Artificial Sequence
  ENSG00000229140_50 (sequence is synthesized)
ctgggcacagagtaggtccgctgtaaatgttaattgaatcatcagcagcctgaaagcattttgtggatggacctgaatgagctgcacacacgagtgatcatcattcttcacgggccgggg

SEQ ID NO: 830445 - DNA, 120 bp, Artificial Sequence
  ENSG00000229140_51 (sequence is synthesized)
catctgccagcttgccgatgaatctgtccccaaactaccaagcctgggctgtggacgcatttctggatgcccagaggccggctttgcaaagagaagcaaacaacagcatctattcacagg

SEQ ID NO: 830446 - DNA, 120 bp, Artificial Sequence
  ENSG00000229140_52 (sequence is synthesized)
gtcttaggcttggcctgccagagcccacgaggggtttggactcagagagctattgaagggaagccacaaagacacgttttctcccctgcggcctggagtgaagacagagcggcccaggca

SEQ ID NO: 830447 - DNA, 120 bp, Artificial Sequence
  ENSG00000229140_53 (sequence is synthesized)
ctcacatagttatcatttttgtggtaagaatactttatatccactctgttagcattcattgttcaagaatacaatatattgttaactacggtcatcatgttgtacagtagatcccttgaa

SEQ ID NO: 830448 - DNA, 120 bp, Artificial Sequence
  ENSG00000229140_54 (sequence is synthesized)
tttattcctcctatgtaactgaacttttgtattctttgaccaatatctccctaccacccccatcaaccaacccagcccacggtaaccaccattctactgtcgtctacttccctgtgatca

SEQ ID NO: 830449 - DNA, 120 bp, Artificial Sequence
  ENSG00000229140_55 (sequence is synthesized)
ttttttttctttttaagatgagtgagatcatgtagtctttgtcttcctgtgtctagctaatttcacttaatgtcctccaggctcatccatgttgtacatggtaaagacctacaatttcat

SEQ ID NO: 830450 - DNA, 120 bp, Artificial Sequence
  ENSG00000229140_56 (sequence is synthesized)
gtcaaaaaagggatactttgctaccagctttagaaaaggtagagatagtgaaccagtggtgagttttaagaagagacattgcagagatacttaagggaaatcagagtgatcccaatgcag

SEQ ID NO: 830451 - DNA, 120 bp, Artificial Sequence
  ENSG00000229140_57 (sequence is synthesized)
aacttttgagttttaatattgggataaaattttcattttggggggggtcaaagtttagtattccctccttacttcaaaaaataagaatgaagaagtcctagataggttctaaatttcaaa

SEQ ID NO: 830452 - DNA, 120 bp, Artificial Sequence
  ENSG00000229140_58 (sequence is synthesized)
cagagaactacctcaggaacataccaggaaagctgagagaatccaaagaccctttgaaggacctggatcactgctgcaggctccttgagatgccgaaaaactcatctacttgtttccaaa

SEQ ID NO: 830453 - DNA, 120 bp, Artificial Sequence
  ENSG00000229140_59 (sequence is synthesized)
caaagaccctttgaaggacctggatcactgctgcaggctccttgagatgccgaaaaactgtgagtcggcttgctttctcaatggggaggctcatggtctggggcaagttctcaattctgg

SEQ ID NO: 830454 - DNA, 120 bp, Artificial Sequence
  ENSG00000229140_60 (sequence is synthesized)
tcaccagctgcctggaaatagacttggtgccattagtggggtgcggtggaagtgagattggcctttaggactgtggtatatgtgggaacaggttgaggcctgtgactgccagctttcccc

SEQ ID NO: 830455 - DNA, 120 bp, Artificial Sequence
  ENSG00000229140_61 (sequence is synthesized)
tccattgggctgggaaccatccccccatcttccacagcagcagcagcagcaagccctgcccaaggagaggctgagctcagacatgcctatccctgcccccacccggtggtctttctctac

SEQ ID NO: 830456 - DNA, 120 bp, Artificial Sequence
  ENSG00000229140_62 (sequence is synthesized)
ccgcctggtaaacaaacacaaaggtcatatctcctgggagttctatagccctacccaccaccttagaaacctgaattcctagccaggtgtccctcaagcaagtgtatatctttcctatag

SEQ ID NO: 830457 - DNA, 120 bp, Artificial Sequence
  ENSG00000229140_63 (sequence is synthesized)
gactgcagtttatgtgctcttgaaagtgccacctccagactagaggccaaccaacacaaaaccagcacactaaacacaaacacaaccaaagaccttcaaagagtccacttcattcccctg

SEQ ID NO: 830458 - DNA, 120 bp, Artificial Sequence
  ENSG00000229140_64 (sequence is synthesized)
ctaccaccactagagcaggtgctggtctccatggctgcaagacctgaagacatcacatcacaggacaatttgcaggcatctccctagcaccagcctagagcccagtagctccgctaggtg

SEQ ID NO: 830459 - DNA, 120 bp, Artificial Sequence
  ENSG00000229140_65 (sequence is synthesized)
gctagatccagaagagcaaaaacaatcactacagttaagctctcaggaagccccattcaggagaacaccatatcaagggagcactccatgggacaaaagaatctgaagagcagtgcttga

SEQ ID NO: 830460 - DNA, 68 bp, Artificial Sequence
  ENSG00000229140_66 (sequence is synthesized)
attaattctggttatatgacaaaacaaggttcttttacacccccaaaagatcataccagctcaccagc

SEQ ID NO: 830461 - DNA, 70 bp, Artificial Sequence
  ENSG00000229140_67 (sequence is synthesized)
aaaggtcaattataaagctaatgaaggaggctccagagaaaggtgaagtacaacttaaagaaataaaaaa

SEQ ID NO: 830462 - DNA, 120 bp, Artificial Sequence
  ENSG00000229140_68 (sequence is synthesized)
agctgacagctgctgcctgaatctactcatctgtgagccacaaaggggcaaagtttaaaggaacagcacttcttagctgttcacagttctacgagggcagggcagaacaggaccagctgg

SEQ ID NO: 830463 - DNA, 120 bp, Artificial Sequence
  ENSG00000229140_69 (sequence is synthesized)
tgcctacagtccagttacttctttgctctgtccctggggtcggatctcacctgtttttgatctttggcacattttcctgcaatgatgaacgagtgaggcgggctgggagtgaataaggag

SEQ ID NO: 830464 - DNA, 120 bp, Artificial Sequence
  ENSG00000229140_70 (sequence is synthesized)
cttcaagaatgctattttgcttattactgagttgcaatttccttctatattctgaatacaaattcatcatcagatatatgtgttgtgaagttttcttcgaggattttccaggcacctcaa

SEQ ID NO: 830465 - DNA, 120 bp, Artificial Sequence
  ENSG00000229140_71 (sequence is synthesized)
attcaacatgtacaaaatggatcctggtgtctttattccctgcatcagaagtagctcctgagttttcatcatggaaaggattcaaggaaggcatcaacctttgtgaaaagaggatgaagg

SEQ ID NO: 830466 - DNA, 120 bp, Artificial Sequence
  ENSG00000229140_72 (sequence is synthesized)
aaccaggggatttatcacaaatctgttcacaccaccctatgcttgtccatagcaaagaattggggtgggggctgatgaggattgcagagggagaaactaatggctccttccaaggagttt

SEQ ID NO: 830467 - DNA, 120 bp, Artificial Sequence
  ENSG00000229140_73 (sequence is synthesized)
caaaccagctcagtcccattatcttacaacaagcatttactgaaggcatgctatgtgcctatcactgtcaaccagacaaggacctgcatacctgtaagtaagaccatagccctagagact

SEQ ID NO: 830468 - DNA, 120 bp, Artificial Sequence
  ENSG00000229140_74 (sequence is synthesized)
gaggtcagctgaactcatgagtcctgctttccatccatggagagccaaggctctcagagtgtcctttgggaacagagatgactgagcaggggttcacctaggctggtttggaattcacag

SEQ ID NO: 830469 - DNA, 120 bp, Artificial Sequence
  ENSG00000229140_75 (sequence is synthesized)
tgttttttttttttaattacaaactagaaatccaattttttataaaaaaggataaactcgaagttgtaatctctagggagacatttatagcatcttctttgacttcagcatgtgaaagag

SEQ ID NO: 830470 - DNA, 120 bp, Artificial Sequence
  ENSG00000229140_76 (sequence is synthesized)
taaggaaggatagtccaggccaaggaatcaacttttgcagggaagggaattttgtagggtagtcagaggccagtgtgtcattctctgcggttacagtgtactgtaggtggtgcgaggtga

SEQ ID NO: 830471 - DNA, 120 bp, Artificial Sequence
  ENSG00000229140_77 (sequence is synthesized)
cataagcaaaagtgcctggagcttagtgggtgatgactaaatcagtattcttttcctttctttccctttccctaagcctcggctgatgcttctctgtcaaatcaggttcattgtcagcct

SEQ ID NO: 830472 - DNA, 120 bp, Artificial Sequence
  ENSG00000229140_78 (sequence is synthesized)
gcctgctgggttttttttttttttagtatatcgactatagttaagacttcaatttttccaattagtattttaaattatataataattaaattcatcctgttaaaaaattaacccttgtaa

SEQ ID NO: 830473 - DNA, 120 bp, Artificial Sequence
  ENSG00000229140_79 (sequence is synthesized)
gattattcttctctccagaatgaagtgctgttacatttttcttacatatccttcagaaagacttctgtatatataaatgtccatatgttttcttcttttcaaaataaatcatattataaa

SEQ ID NO: 830474 - DNA, 120 bp, Artificial Sequence
  ENSG00000229140_80 (sequence is synthesized)
tctctatctctgcttttataaggcagctgtttctcggaggatcaagctcaggtatcggcagtgtgaattatgagtcctaatcaacttggtcatgctttgtggcctgggaaaagccagaat

SEQ ID NO: 830475 - DNA, 120 bp, Artificial Sequence
  ENSG00000229140_81 (sequence is synthesized)
tcccttttatgatttgagagtgcactttttgcagcctgtggagcaattagtcaatctttgaaatggatacgcagtaaatgcagcatgtccttggagagccactgggacagcttactatgg

SEQ ID NO: 830476 - DNA, 120 bp, Artificial Sequence
  ENSG00000229140_82 (sequence is synthesized)
gaggggaggccataaggtgatccccacaacaaatgccctagctttggctaaaagatctgcaagacaatggaaaacatgactttaagagaaagaaaacgaaacttccagacagtcaggaac

SEQ ID NO: 830477 - DNA, 120 bp, Artificial Sequence
  ENSG00000229140_83 (sequence is synthesized)
atcgacatattcatagatgcccctccccacatgaaatcactaacttgtcaaagagattttatagcatgaagaataaaggttaaaaaggaacctactatttactttataattttaaagtta

SEQ ID NO: 830478 - DNA, 120 bp, Artificial Sequence
  ENSG00000229140_84 (sequence is synthesized)
tttacataactttatacatagttgaaactttcaactatttctctaattgtcacattgatttgtcaggcttaacattatgtttgtgtaaagaaatgatgatctgaaagtgtggaggaagac

SEQ ID NO: 830479 - DNA, 120 bp, Artificial Sequence
  ENSG00000229140_85 (sequence is synthesized)
cagaaatcaaacatacctcaggtttagatgagaactgggaagtgggagcttttgtccttggcatgattatttttcccctgtgcatatttttagaaaggtatattgaggtagcattcaccg

SEQ ID NO: 830480 - DNA, 120 bp, Artificial Sequence
  ENSG00000229140_86 (sequence is synthesized)
aacataaaattaaccattttaaagtgaacagttatgtgacatttagtacattcataatgttgtacaagcaccatgtctctctagcttgaaaatatttttgttactccaaaagaaaacttc

SEQ ID NO: 830481 - DNA, 120 bp, Artificial Sequence
  ENSG00000229140_87 (sequence is synthesized)
aaaacagttaagcagttattccctttccccctttcccatacccgctggcaatcactaatctgctttctgtttgtgtggatttacctattctagatatttcatataaatgaaatcatatac

SEQ ID NO: 830482 - DNA, 120 bp, Artificial Sequence
  ENSG00000229140_88 (sequence is synthesized)
tgtgaatgacaccatgaatttctgaatgtgatgtcccttcaattcatgagcacgaccaacacctcctcttctccgtcctttgcagcctactcactgtgaagacaatgagggtgaaaacct

SEQ ID NO: 830483 - DNA, 120 bp, Artificial Sequence
  ENSG00000229140_89 (sequence is synthesized)
aacattttcttttctcttgcatgcttgattgtaagagtgcagtacatattatatatatataatatacaaaatatgtgttaatcagctatgtgttagccaactatgttattaatgtaagac

SEQ ID NO: 830484 - DNA, 120 bp, Artificial Sequence
  ENSG00000229140_90 (sequence is synthesized)
tttttatgattttctatataacattttcttttttctagcttactttattataggaatacagtatacagtacgtacaacatgcaaaatcagtgttaatcaacagtttatgttattggcaag

SEQ ID NO: 830485 - DNA, 120 bp, Artificial Sequence
  ENSG00000229140_91 (sequence is synthesized)
gcttcaggtcaatagtaggctatttgtagttaagttttctagttaaagttgtatgtggattttcacccgcttgggggttcggcacccctaagctctgttttgctcaaggtcaactgtata

SEQ ID NO: 830486 - DNA, 120 bp, Artificial Sequence
  ENSG00000229140_92 (sequence is synthesized)
atttttcagccttggcccattggcaaatggacagaaacatttgtaaactttgcaactacaaagaaaagtacagtttgggggcaataaaaagttaaaatttcttttggatattgatagaaa

SEQ ID NO: 830487 - DNA, 120 bp, Artificial Sequence
  ENSG00000229140_93 (sequence is synthesized)
cttcaaagaaagatgatgcaagactatgaatacaaataagttttaaaaatcatgtcaaagatgattccttttattgttcttagaacactgtaatgtatagaataaactcagttttaaatg

SEQ ID NO: 830488 - DNA, 120 bp, Artificial Sequence
  ENSG00000229140_94 (sequence is synthesized)
tggatagacttcccaaagaaggtgatgccgaagctgaggtcggaaattacgaagatcagctatgccttttaaaggaccatgggctgtttgaggggccaacatcattaactgatctttaat

SEQ ID NO: 830489 - DNA, 120 bp, Artificial Sequence
  ENSG00000229140_95 (sequence is synthesized)
tccaaagaccctttgaaggacctggatcactgctgcaggctccttgagatgccgaaaaactatgtacccatagggtcaagctccagcacagagacccatcctgggatgcaggacttggtg

SEQ ID NO: 830490 - DNA, 120 bp, Artificial Sequence
  ENSG00000229140_96 (sequence is synthesized)
acccgcagtcctgggcttaggtcttacaacacagggaaagctgatgggagttcctcccgagcttagtagcgaggctagagagagacagaatgacagagagagaaaatgattctctgctgc

SEQ ID NO: 830491 - DNA, 120 bp, Artificial Sequence
  ENSG00000229140_97 (sequence is synthesized)
tggagacctgggcttgagttccagctgagctgccttctggctattccctggggaagccacctcacctccctagagcctctgcttcctcatccaagactgggggtatagctgtgctcaccc

SEQ ID NO: 830492 - DNA, 120 bp, Artificial Sequence
  ENSG00000229140_98 (sequence is synthesized)
ttgcttccccttccaccatgattgtaaaatcaacaaggaaggcgatgagcacagcagtgtgaagcaatgacaaggatgccctaagctctatgaaactgcgagataaacatctaccaggtt

SEQ ID NO: 830493 - DNA, 120 bp, Artificial Sequence
  ENSG00000229140_99 (sequence is synthesized)
gctctatgaaactgcgagataaacatctaccaggttgatatcatatcactcaaaagcaaaatttattcctcaggtctcttcacagcgtggcgcctgggttccaaggggaatcatcccaag

SEQ ID NO: 830494 - DNA, 120 bp, Artificial Sequence
  ENSG00000229140_100 (sequence is synthesized)
tagaacaccattccctactcttagctaaggaagtcacagagatctgactcccttccttcaagggagggaaccatagactctacttgtgggactggctgggttctgatagaatatggacat

SEQ ID NO: 830495 - DNA, 120 bp, Artificial Sequence
  ENSG00000229140_101 (sequence is synthesized)
atgacttcagccatttttggaaattatactgtgccacaccttaacgtgtcagaagacgaggacactgtcataactttcagtcaattgctcaaaccaaatatcaaagtattatcctgaata

SEQ ID NO: 830496 - DNA, 87 bp, Artificial Sequence
  ENSG00000229140_102 (sequence is synthesized)
tcctctccagcacagtggaactgtaaaatcaacaaggaaggcgatgagcacagcagtgtgaagtccaacttcaaagcactgacacat

SEQ ID NO: 830497 - DNA, 120 bp, Artificial Sequence
  ENSG00000229140_103 (sequence is synthesized)
gcacagcagtgtgaagtccaacttcaaagcactgacacatttggtgtctgatgatgtccggctttctcatagacggctaccttcttctcactgttacctcatatggtggaagtcagtttt

SEQ ID NO: 830498 - DNA, 120 bp, Artificial Sequence
  ENSG00000229140_104 (sequence is synthesized)
caagttctatcaccaaggattacttaggacttccttgaccagtcctgcaggccagtaaaatctgcattgacaacctggatcaacttaagaagaaagtgatcagagttaggaacacattca

SEQ ID NO: 830499 - DNA, 120 bp, Artificial Sequence
  ENSG00000229140_105 (sequence is synthesized)
gaaccataagacagcaagaattcttcaaagaaacgaattgtttgtcctggagacaagactatttgtgtcattgttttcaaatatgtaaataatttttatgtaaaaaaaagaattattatt

SEQ ID NO: 830500 - DNA, 120 bp, Artificial Sequence
  ENSG00000229140_106 (sequence is synthesized)
ttcaaagaaacgaattatttgtcctggagacaagactatttgtgtcattgttttcaaatatgtaaataatttttatgtaaaaaaaaagaattattatttttaatgaagtaataagtggca

SEQ ID NO: 830501 - DNA, 120 bp, Artificial Sequence
  ENSG00000229140_107 (sequence is synthesized)
gaattcagacctactaatgaaaaatgcatgcagcagaatttggaacaactggagaaaagaactttgtaatagccacagaaaaatactggttgacttgggaggtagtggggtctggtagag

SEQ ID NO: 830502 - DNA, 120 bp, Artificial Sequence
  ENSG00000229140_108 (sequence is synthesized)
gtgttcacctgtggactcattggccacatggtggagatgttgtagaaggtattcaggtatcaccacaggggatgagctctacgaccttgacagtccctttgaactctgagattttgtaag

SEQ ID NO: 830503 - DNA, 120 bp, Artificial Sequence
  ENSG00000229140_109 (sequence is synthesized)
cctacaaattcatacttatttgtatcgagtttgtgctggctgaggactgttgcagagcatattgcagctttcatagaaatttataagaaatgatccttgatttcaaacaatagaatcacc

SEQ ID NO: 830504 - DNA, 120 bp, Artificial Sequence
  ENSG00000229140_110 (sequence is synthesized)
aatgttacagctgaaataaaacttaagagagcacctcacctgactctcattgtaaaaatgagtgtgctaaggccaagagagttcaaatggccttcacaaaatcactcaaaagttgtcacc

SEQ ID NO: 830505 - DNA, 120 bp, Artificial Sequence
  ENSG00000229140_111 (sequence is synthesized)
aagtcagagctcaaattttcaaatgagagataaaagatataggttatatctccaaggaacatttagaggaacacctccttttaaaaagaaagctgcaatgaataatctcttctcctatac

SEQ ID NO: 830506 - DNA, 120 bp, Artificial Sequence
  ENSG00000229140_112 (sequence is synthesized)
tttacttagtagatacaaagtacacagctttaaaaaaaaaacaaaaaacaactaaccaagtgatccatatttagcaaaaagcaagtaagcaagaaacagagtattcaactatgcagcctg

SEQ ID NO: 830507 - DNA, 120 bp, Artificial Sequence
  ENSG00000229140_113 (sequence is synthesized)
ctcctaaattttggagacaaatgggcctgaaatagtaaattagtaagattttagaaaagctgcaggaagatagttcttaacttgaactactgccctgggagacatctgattggagatttg

SEQ ID NO: 830508 - DNA, 120 bp, Artificial Sequence
  ENSG00000229140_114 (sequence is synthesized)
gggcttctaagggagttgaggaagcctatttcaggtaaaagttgtcattcctgggcaaaaagcaaaggaaaaaaacaaaatacttcccactgttgtaatgcagagaaagatacctgtgtt

SEQ ID NO: 830509 - DNA, 120 bp, Artificial Sequence
  ENSG00000229140_115 (sequence is synthesized)
agggtttcagattgtgtatggagtcaaggaaacttcttacccttcagcatgtttatggatttgtgaacagcaaaaaaggaattaaagcaattataacagagtaattgatggtggcaactt

SEQ ID NO: 830510 - DNA, 120 bp, Artificial Sequence
  ENSG00000229140_116 (sequence is synthesized)
taaagaccagaatacattgagaaattatacatatagagacatataaatctgtgatgtaggaaatgagcagtctaacataggtccctggatctagtgagatgttcacatctcctaacacta

SEQ ID NO: 830511 - DNA, 120 bp, Artificial Sequence
  ENSG00000229140_117 (sequence is synthesized)
agctccagacctccagtgctgtacacaggaattcacacagcagaggttatcacgtaattaacacttgacatgaatggaaccctgccacacagaaatggccaaggcttatatcctgggaat

SEQ ID NO: 830512 - DNA, 120 bp, Artificial Sequence
  ENSG00000229140_118 (sequence is synthesized)
catgatgaaggtcagggccagctctaggcaaaactcgaccactctcattgcatttcctgcattacaactaaattatacattttcacatctatctttcaggtgataatgtgaatagctcaa

SEQ ID NO: 830513 - DNA, 120 bp, Artificial Sequence
  ENSG00000229140_119 (sequence is synthesized)
agtcaggatctattgaaatctatctcttgtttgctgtgcaaagcccagaacttgctatagggtagatgtgcaatgaattttagttaagctgaagctatactgcatttctctgatattccc

SEQ ID NO: 830514 - DNA, 120 bp, Artificial Sequence
  ENSG00000229140_120 (sequence is synthesized)
tagtgctaagaaactgtacgttaatctgaaactttctctcacaaatgaatcttggcactaggaatgtgtatgtaaatgtagcatgtttaagctcaggcataactttggtaatttgtcttt

SEQ ID NO: 830515 - DNA, 120 bp, Artificial Sequence
  ENSG00000229140_121 (sequence is synthesized)
agcatcaataagtcaaatggcttaacttctccaaaattcaatttcttcgtctataagatggaggtaattatacttacttctagatttctaaaattgtggtgatggtaaaaaaaattctat

SEQ ID NO: 830516 - DNA, 120 bp, Artificial Sequence
  ENSG00000229140_122 (sequence is synthesized)
atgcaagttatctagaacaatgtttgtcacaaataagcatttaataaatgatgtcggtggccattatcaacaaattattcatttttgtctctttattaggatctgagataagaaatcact

SEQ ID NO: 830517 - DNA, 120 bp, Artificial Sequence
  ENSG00000229140_123 (sequence is synthesized)
tgtgttaacttttaagatatgagatctgggccagttggatccgctgaggattcaggcaggattctcattctcagagaggacatagctgttaactctagaccagcactttaataatacata

SEQ ID NO: 830518 - DNA, 120 bp, Artificial Sequence
  ENSG00000229140_124 (sequence is synthesized)
ttcctgttagaacctgctcactgtaaaacatcatagaagataattatgttgtttaattgaatataccacccgttaacttggtgggtaattttcgccaagtgtataatattttctgtcact

SEQ ID NO: 830519 - DNA, 120 bp, Artificial Sequence
  ENSG00000229140_125 (sequence is synthesized)
ccctattttttttactttaacttaatttagcccatggctttatactgctcctacttcagagcagacttttccccagtctctctgttctgctgaattgcatcttcacatgtgttcaaaaag

SEQ ID NO: 830520 - DNA, 120 bp, Artificial Sequence
  ENSG00000229140_126 (sequence is synthesized)
aaagaacaagaaatgagaagacaatgatcaagatcctttccatcttgttgcctccaagagattttttaaattgaacacatgaaaggttatatgactagtaaggtgctgtacagaggagga

SEQ ID NO: 830521 - DNA, 120 bp, Artificial Sequence
  ENSG00000229140_127 (sequence is synthesized)
aataactagacataagaaaaatataaaggcccctggactaaaagaattctagactgtaaacagccagttgtactctctccaagtctccaggcctttatctactaaaggaggaggttgggc

SEQ ID NO: 830522 - DNA, 120 bp, Artificial Sequence
  ENSG00000229140_128 (sequence is synthesized)
tataaggccctctcaggggttccggagaacaccagtatttttcatctctatgagcttcctcttccctcctctaccactttggggctttgagattttaaggtattaatggagaaaaagaaa

SEQ ID NO: 830523 - DNA, 120 bp, Artificial Sequence
  ENSG00000229140_129 (sequence is synthesized)
acactaaacaacaaaagatgaatagtaaagcgcaacttgaatttagaatccatcttatacctaatcttttgctgcaaatgccttcaggacactgaatttaaaagcactaaaacttagttt

SEQ ID NO: 830524 - DNA, 120 bp, Artificial Sequence
  ENSG00000229140_130 (sequence is synthesized)
atatgttttgcatactcaatggccaatgatgggaaattactcaagatatgaatggaacaaaatttttaaacttttctggaaatttctgtacttttttgagattgggtagttttgaaaatc

SEQ ID NO: 830525 - DNA, 120 bp, Artificial Sequence
  ENSG00000229140_131 (sequence is synthesized)
tgtaatataattaaatactattaaaaatagtacattttcaaagtagaaaattaaaaagcaaaaaagctcatgaacaaagaatatagtttattcatggtttcttactcaaatcagcttgat

SEQ ID NO: 830526 - DNA, 120 bp, Artificial Sequence
  ENSG00000229140_132 (sequence is synthesized)
gtttcttactcaaatcagcttgatatgaatgatataccattatcattccacagtttgcaaagaattacaagttgatgctctgagaagtgatgggatgtgcatttggtataacacaggtac

SEQ ID NO: 830527 - DNA, 120 bp, Artificial Sequence
  ENSG00000229140_133 (sequence is synthesized)
tttggaatagagctaggataaatctccggggttagagtttttgaacataggttataaaatcaagttaaggtttttgcaaatcttggaaatgaccaaatcaaatcttaagtgattgatttg

SEQ ID NO: 830528 - DNA, 120 bp, Artificial Sequence
  ENSG00000229140_134 (sequence is synthesized)
agttcacatttttgtgctattgaataacaactacagacaacacagtgtttggagaaagaaatggtgtcatgacatctttgaaaaaaggtaaaagcaaagataaaaacctgtgtgaatact

SEQ ID NO: 830529 - DNA, 120 bp, Artificial Sequence
  ENSG00000229140_135 (sequence is synthesized)
tgcagttgagaatgtgaaataatatgatttagggatgatttacggaagtgaaagtttttttgaccaaaaaaaaaaaaattggccaagaatcatggaaatgaaacctcatgtaagagtcgt

SEQ ID NO: 830530 - DNA, 120 bp, Artificial Sequence
  ENSG00000229140_136 (sequence is synthesized)
gtttgatgagttgccttaagaaagttctcagtgaacatctctttgagtcagcttctggataagtgagttgcacaaaagcctctctgacatagtgtgctgccaacccttgaggaatctaca

SEQ ID NO: 830531 - DNA, 120 bp, Artificial Sequence
  ENSG00000229140_137 (sequence is synthesized)
tttgggcattatttctctatgatataaatttttagtcaatcatgtttgagaaatcatcacttaaattttttcctttccttaacagaaagctctgtcagtgctttgaaaacaaatatgctc

SEQ ID NO: 830532 - DNA, 120 bp, Artificial Sequence
  ENSG00000229140_138 (sequence is synthesized)
tataaatgtaaaaatcaacactagcattaccattatcactaacattttttattttccatctaaatgcaatacttcatatttatggataactttctttcaaaaatctcctgagtttgtcac

SEQ ID NO: 830533 - DNA, 80 bp, Artificial Sequence
  ENSG00000229140_139 (sequence is synthesized)
tatggataactttctttcaaaaatctcctgagtttgtcactgtgcaaatggtacacatttgtttagaaattggtatagct

SEQ ID NO: 830534 - DNA, 120 bp, Artificial Sequence
  ENSG00000229140_140 (sequence is synthesized)
cagagatgattgcttttattaaaattatttttgaagtttgtaactaaactttaagaggagaaagatttttcagtctgtttgtattaatatcatgtctcatagtgatcattaacttttctt

SEQ ID NO: 830535 - DNA, 120 bp, Artificial Sequence
  ENSG00000229140_141 (sequence is synthesized)
caaacttatatgccttcaccaaatagttactgatagtttgccaaaaaaacagaagagaagagacatgaactaatatgtattaaacatgaactacttgaaaggtattgtgatgaatatttt

SEQ ID NO: 830536 - DNA, 120 bp, Artificial Sequence
  ENSG00000229140_142 (sequence is synthesized)
atattcattgttcgattaactccacccattatgagcaaactgatggtcctctaagagctcatgaatgactcagaaatagtcacacagcttgtacaaggtagagattgggcttcaacaatt

SEQ ID NO: 830537 - DNA, 120 bp, Artificial Sequence
  ENSG00000229140_143 (sequence is synthesized)
tctggaaatgtttcaggatttcccttggccctgaccccttcctctaccaagtaataatttttgaaagctgcgtatgagagaggtggagtttttgaaaactcagtggttccaggcaaaata

SEQ ID NO: 830538 - DNA, 120 bp, Artificial Sequence
  ENSG00000229140_144 (sequence is synthesized)
actgagtgaagttcacgagctgagaagaagcttgcaacactgtaggagctatcagaaggttagcacagtcacagggacagatgtaattgaaacttcaggtgagtttagagcacatgcgac

SEQ ID NO: 830539 - DNA, 120 bp, Artificial Sequence
  ENSG00000229140_145 (sequence is synthesized)
cctatggaccatggtaaaggttttggtcttcatattaagagaatgggaaacttttaatgtttcctatgattatgacattatcatatcagtgacttaagaagatggctctagcctggccaa

SEQ ID NO: 830540 - DNA, 88 bp, Artificial Sequence
  ENSG00000229140_146 (sequence is synthesized)
caggtgtggtggtgcagtatgagaatagctcgaacccagtaagctgaggttgcagtgaggcaagatcatgccacagctctccagcctg

SEQ ID NO: 830541 - DNA, 120 bp, Artificial Sequence
  ENSG00000229140_147 (sequence is synthesized)
tgaggtatgagaatagctcgaacccagtaagctgaggttgcagtgaggcaagatcatgccacagctctccagcctgggcatcagagcaagaccctgttaaaaaaaaaaaaaaaaaaaaaa

SEQ ID NO: 830542 - DNA, 120 bp, Artificial Sequence
  ENSG00000229140_148 (sequence is synthesized)
agaataggtgaaagaaggaaagccattcaaatagacggcagtgagagaaatttaagggaaagatgctggtgatttggatttcactattggctgcagagaaagtaagaagccgagagattc

SEQ ID NO: 830543 - DNA, 120 bp, Artificial Sequence
  ENSG00000229140_149 (sequence is synthesized)
aagatgtaagaaaaatcaacgtggttctgtgattgactggatagggtaaaatcaggagaatgatttcagccatgatatcaggtttctatcgtaaaaatacagacagaagttggaattaat

SEQ ID NO: 830544 - DNA, 120 bp, Artificial Sequence
  ENSG00000229140_150 (sequence is synthesized)
tatgtattattgattaaagttattaatcatgcatttttgattaaaacaattattttagcatctcagtaaattaaagaggatacactgaaaaactttctaatctagaaatgttcaactagt

SEQ ID NO: 830545 - DNA, 120 bp, Artificial Sequence
  ENSG00000229140_151 (sequence is synthesized)
caatctagactgaagaatttcccaacatatatgtgatgtgcatgttctctggagagagcatgcatgttcattccttctaaatcaatgtctacattggtaaacttaaaatatcaaagaaca

SEQ ID NO: 830546 - DNA, 120 bp, Artificial Sequence
  ENSG00000229140_152 (sequence is synthesized)
aaaaataaataattcaattcagaagcagttttagttaaatgtggctgaataaatgcatgcccttacctgtgcccttttttgaaataaagtcataaactccaaagacaaagaaaatggaag

SEQ ID NO: 830547 - DNA, 120 bp, Artificial Sequence
  ENSG00000229140_153 (sequence is synthesized)
agaaactaacagagaaagcaaggatgaggagaagaaagtggaagaggaggagaagaaagtggaagaggaggagaaggaaaggaagtaatgaagaatggaagggaggaaaaagggagggag

SEQ ID NO: 830548 - DNA, 120 bp, Artificial Sequence
  ENSG00000229140_154 (sequence is synthesized)
ggaggaagaaagaaaagagaaagagaaagaaataaagaggaaagaaagaagaaaaagaaagaaagagaaagaagaaagagaaagaaagaaggacagaaagaaagaaaaaagaaagaaaga

SEQ ID NO: 830549 - DNA, 120 bp, Artificial Sequence
  ENSG00000229140_155 (sequence is synthesized)
aagaaagaaagaaaagaaagaaagaaaaggaaggaagggtaaggaaggaagggaaatagagaggaaggaaaggaggaaggaaggaagaagaaagaaagagaaagaaaaaagaaagaaaaa

SEQ ID NO: 830550 - DNA, 120 bp, Artificial Sequence
  ENSG00000229140_156 (sequence is synthesized)
aaaaaagaaagaaaaagaaagagaaagaaatgtaggtgggcagggagggaggcagggaaggaggaaggaaggaaggaaggaacaaaggaaaagaattcatgattgggggaagattaaaaa

SEQ ID NO: 830551 - DNA, 120 bp, Artificial Sequence
  ENSG00000229140_157 (sequence is synthesized)
tgaacggagaaaatagcaaagcagagaaataccattcacatgtacagaggaaagccatagacaagcaagataacatgtaacagtacccgcaaagttccaaaaattagcaataccatgtgc

SEQ ID NO: 830552 - DNA, 120 bp, Artificial Sequence
  ENSG00000229140_158 (sequence is synthesized)
cagcaaatgtgagagtaagtaatgatactccaaataaggggatgtgttagacaaccagtacaactgtggtcttacttccaacatcacgcagttcttctatcccattctagcagaaatttc

SEQ ID NO: 830553 - DNA, 120 bp, Artificial Sequence
  ENSG00000229140_159 (sequence is synthesized)
attcggtagattaattgagacagagagacctcagggtcgagtatacttggcacagcacaggaaatcaggaggattaacgacaataaagaaattgaatgaggccacttttagctccctttc

SEQ ID NO: 830554 - DNA, 120 bp, Artificial Sequence
  ENSG00000229140_160 (sequence is synthesized)
tttgttaggctccaaaaacctgggtaatcaataactactgtcaccaccactgcaaccaccatcacttcccatcctacatcattctccaaggtccccaccatgtcttccttaagcaggaga

SEQ ID NO: 830555 - DNA, 120 bp, Artificial Sequence
  ENSG00000229140_161 (sequence is synthesized)
ttggtagagtgttcactagagaaaagaaataacccctgaaaatacacttgtaattatttttatttgaaggcatctcaataaatacaataaactggtccctacaatgtcatcttaaccaaa

SEQ ID NO: 830556 - DNA, 120 bp, Artificial Sequence
  ENSG00000229140_162 (sequence is synthesized)
agtttatcagttaacaaatccaacccgtccacatagagctcataagttttatagcacgtcattctcaaatataaatgaacagccaaatagtatcaataaatttaaaatatcttccaattt

SEQ ID NO: 830557 - DNA, 120 bp, Artificial Sequence
  ENSG00000229140_163 (sequence is synthesized)
gaaagtcaaaggacaaaataaataggaagaaagcagcttggagtaaataaagacaatacagataacagaaaatgaatatctttaaaaatactatagctaatatcctcagatagaaaacag

SEQ ID NO: 830558 - DNA, 120 bp, Artificial Sequence
  ENSG00000229140_164 (sequence is synthesized)
aagatagtctatcaataaaacaagaacagggtattatacaacaggagcaattagacaataagaactattttaaattaaaaacatgatgcttaaaaagtctcaacattatattaaaaatta

SEQ ID NO: 830559 - DNA, 120 bp, Artificial Sequence
  ENSG00000229140_165 (sequence is synthesized)
aagttgaaacaatctcccaaaaagtaatacaaaaagataaaatagaaaataaaaaagatacagttgcttaacaaatttaagatattcaaattattagagttttagaagaagaaaacagag

SEQ ID NO: 830560 - DNA, 120 bp, Artificial Sequence
  ENSG00000229140_166 (sequence is synthesized)
aacagaaaattatacaaaagaaaatgaattaagaaaatatctcagaattgaaggacgagtgtctctgaagtgccaaggaaaataagtcaaaaaagatgcacatcaaagtatatcaccata

SEQ ID NO: 830561 - DNA, 120 bp, Artificial Sequence
  ENSG00000229140_167 (sequence is synthesized)
taagctcaaaatacgagtgtaaagagaaaaattctaaaattttgaggataatgtagaaagttccacattgaaaaaataaagtaatggcattggacttctcaaaagcaacactagaagcta

SEQ ID NO: 830562 - DNA, 120 bp, Artificial Sequence
  ENSG00000229140_168 (sequence is synthesized)
gaatgcaatagatgaatgcttttaaaattctgtagaaaataattttcaacctgtaattatttacttggtaaaatgaaagttaaatataggccctgaataaaaatgcaaggttacaaacca

SEQ ID NO: 830563 - DNA, 120 bp, Artificial Sequence
  ENSG00000229140_169 (sequence is synthesized)
tggacaccatatgcaagctcacaaaattatccaaaaatagatgatgcaacctctgattaagataagggtaagtctcaggatggcagctgtgtggcagacctatgaaatagcctttctaga

SEQ ID NO: 830564 - DNA, 120 bp, Artificial Sequence
  ENSG00000229140_170 (sequence is synthesized)
gtggcatggtaaaaagagggatactctggaaaaagatctcaaagaaaatggaaggcatgggataattgatatgcttgaatgtaagaaacattttacatagaaaggctttatattactttg

SEQ ID NO: 830565 - DNA, 120 bp, Artificial Sequence
  ENSG00000229140_171 (sequence is synthesized)
aagggcttgggaaaaatattgataaaagaaacataaaagccaaacaataaacaaaaaaataactgcagagagaaaatttacccaaaagtaaacattgtgtataattttgaattactatta

SEQ ID NO: 830566 - DNA, 120 bp, Artificial Sequence
  ENSG00000229140_172 (sequence is synthesized)
aaaatacgtatttttaaaatccaaacaccaaatagcaatttaactaaaattattataatgataatagaagtagataagggaattagataaaaattacaaatcattttcaccaatccacaa

SEQ ID NO: 830567 - DNA, 120 bp, Artificial Sequence
  ENSG00000229140_173 (sequence is synthesized)
aatcgataaaaaatatacaaaattgataaatcaagaaattgttttgaaagcaaaatatttagtatgaattaaactgtcaggaagacacaaatgtaagtgagtagaggaatttgacagtga

SEQ ID NO: 830568 - DNA, 120 bp, Artificial Sequence
  ENSG00000229140_174 (sequence is synthesized)
gtagaggaatttgacagtgaagcatatggcatagaatatgttttttaaattatagtcttatactttgattttatttattaaaatgtaaaatgttgggccaggcgcggtggctcacgcctg

SEQ ID NO: 830569 - DNA, 120 bp, Artificial Sequence
  ENSG00000229140_175 (sequence is synthesized)
aataaaagaaaaaaaaagtgttttagatatatacaaatataaaaagtaatttattaaaaatgtcggggaaaatagttgggaaatcctcttgtagttaaaacgaatttagttttactaact

SEQ ID NO: 830570 - DNA, 120 bp, Artificial Sequence
  ENSG00000229140_176 (sequence is synthesized)
atgcttagaatttgattaataaatgtatttgcaatatcaaaatgatctttatatttcttcttgcattttactcatcaaatgcagaatatactgacataatggataactgtaggaagctaa

SEQ ID NO: 830571 - DNA, 120 bp, Artificial Sequence
  ENSG00000229140_177 (sequence is synthesized)
ctttctgaaatgaggcctaattgagctgtttttcatgtaaaataagggtcgtgattttgtctcaaatcaagcattatcaacaattatctagacttttcttgagcagtctttctgccataa

SEQ ID NO: 830572 - DNA, 120 bp, Artificial Sequence
  ENSG00000229140_178 (sequence is synthesized)
gcaaatagcaaagcatcaataacaaaatactgtatttgacactggatcagataatagtcacagcattataaataagaagtttaaatatgtgcttataaagtatccttttattaattgagg

SEQ ID NO: 830573 - DNA, 120 bp, Artificial Sequence
  ENSG00000229140_179 (sequence is synthesized)
aaatatttgtttgattatttgtctgtgataaaattgaagcttgagttggatgaacataatcttaatggttgtaataatagtcaataaattatttcaactattttataaacctttttattc

SEQ ID NO: 830574 - DNA, 120 bp, Artificial Sequence
  ENSG00000229140_180 (sequence is synthesized)
aatgtacagacaaccctaactaataataacaaaataacaatgacaacaaagtaataataacagataaccttacagaaacaaagctgacagccaaactggatgaagtgataaagatcactg

SEQ ID NO: 830575 - DNA, 120 bp, Artificial Sequence
  ENSG00000229140_181 (sequence is synthesized)
ggaattaataattttgatttaactagtatttattgagcacacaatatgtaccaacagccatatttggtactttgcaaacattatctcattaagtcttcaatttattgatgagaaatccaa

SEQ ID NO: 830576 - DNA, 120 bp, Artificial Sequence
  ENSG00000229140_182 (sequence is synthesized)
gatcacagaagctaggtaattttcccaaaaattatacaactaaaagaaattatagaaccagggttcaaacttggctcagtctaaatctaaaactcattcctttctactgtcagaaaaagt

SEQ ID NO: 830577 - DNA, 120 bp, Artificial Sequence
  ENSG00000229140_183 (sequence is synthesized)
ctatttctaaaagaaaggaatgaatgttaacagaggtttataaaagcaaaattattttggttgtggctccccaagcaatgagtcaattatgcacatactgagttaaagaagaaggagaag

SEQ ID NO: 830578 - DNA, 120 bp, Artificial Sequence
  ENSG00000229140_184 (sequence is synthesized)
aaaatagaagacgaccatgatctctgattagatatttggttagcttgatagaaaatgagtactgaaataaagtagagatggagatgaagatcaaatatacaaaacaaagttggagcaggg

SEQ ID NO: 830579 - DNA, 120 bp, Artificial Sequence
  ENSG00000229140_185 (sequence is synthesized)
aaaaaatagaatgagagaagataaaaaataggagagaaagaataaaatgagaagataagagaagagaggaaggaaggaagagacaaggaaagaaaagtaaatagaaaaaggaaaggaaag

SEQ ID NO: 830580 - DNA, 120 bp, Artificial Sequence
  ENSG00000229140_186 (sequence is synthesized)
agaagaaaggaggagggaaaggaagtgagaaaggaggaaaaaaaaatcaatatccctctttgtaataaatacgctgtgaaatcacttacggaaaaattgagtagatgtaattttccctat

SEQ ID NO: 830581 - DNA, 120 bp, Artificial Sequence
  ENSG00000229140_187 (sequence is synthesized)
tctccctgctaagtaaaacaaaaaactctgtgtattatacataaaaccataataagaatactctgacaggtagagtcaaggcagacaagctagggagcaaggaatgatatggtgatgagt

SEQ ID NO: 830582 - DNA, 120 bp, Artificial Sequence
  ENSG00000229140_188 (sequence is synthesized)
ttcctgaattttgtttttgctttacatttcccagattagaactgaagacgtcagcaacccaaaaatgtcaatgggcacagattaaataattattattaataataaataaataattaaatc

SEQ ID NO: 830583 - DNA, 120 bp, Artificial Sequence
  ENSG00000229140_189 (sequence is synthesized)
tgttctcttgagtgaaaaaagcaggaaaggagccatctagcaagtcagaaatattgtacatagtaaatttactattctagccaaacaccaaacaccacagtatatgttgtggctttatcc

SEQ ID NO: 830584 - DNA, 120 bp, Artificial Sequence
  ENSG00000229140_190 (sequence is synthesized)
ttacacatgacaacaaaggctgaatggggaactcaactttcacccttatctggcattaacaaggtattctaacctccccactgtgatggtttcagagaaggctgtgtagggagtctatgc

SEQ ID NO: 830585 - DNA, 120 bp, Artificial Sequence
  ENSG00000229140_191 (sequence is synthesized)
ttccattcccacctgacaataatgcagcaccactacactccttcctggatttatgccagaggaatcccagtagagagtcagaacttttactactgcccaagaataacaaagctaaaaccc

SEQ ID NO: 830586 - DNA, 120 bp, Artificial Sequence
  ENSG00000229140_192 (sequence is synthesized)
ttgtggtgttgatggtagaagacgggttgatgttgaacacatcttctttagaacttttactactgtccaacagtaacaaggctaaaaccctaaatggtgttgatgggaagaaaagatcct

SEQ ID NO: 830587 - DNA, 120 bp, Artificial Sequence
  ENSG00000229140_193 (sequence is synthesized)
gaatcattattgccagatgaaagtagatgttcagattcccttgttagcctttgttgacactcaagggaggaggctctttgttaatgctgcagatagtggaagttttggcttctcactagg

SEQ ID NO: 830588 - DNA, 120 bp, Artificial Sequence
  ENSG00000229140_194 (sequence is synthesized)
tctacactgatatctcccagaccaagaggggtaggagtacatcagtggagaccccgtgaggagccaagacttccactatacccagtgttaacaaacagcctcctcccttgggtgtcaaca

SEQ ID NO: 830589 - DNA, 120 bp, Artificial Sequence
  ENSG00000229140_195 (sequence is synthesized)
gaggcgaagaaggaatcttgacatctactttcatctgacaataatgatgcagcatctcttcttcccctgctaaagtactatcaaaataatttagctaaaatataagatttacataatatc

SEQ ID NO: 830590 - DNA, 120 bp, Artificial Sequence
  ENSG00000229140_196 (sequence is synthesized)
cagaatcttataacataatactgaagatgtcctaggtttgaaaaataagtaatttgtcacagcaaaaaccaggaagatctcaaactaaataaaaaagtctctaattaatgtgaagactaa

SEQ ID NO: 830591 - DNA, 120 bp, Artificial Sequence
  ENSG00000229140_197 (sequence is synthesized)
ggtgaaaaagatattagcttatctaaaaaaatttaaagctgacatcagaaaaatgttctaaccagcaattacaaaggtgcttaaaacaaacagaaaaacagaaagtcccaacaataaaat

SEQ ID NO: 830592 - DNA, 120 bp, Artificial Sequence
  ENSG00000229140_198 (sequence is synthesized)
aaaaaatctctgacaggaaatcgaagacattaaggagaaacaaacaaaaagggtaagcttaaaaatataataaccaagttaaaaatctcaatgaatggctcaacatcagaatggagggaa

SEQ ID NO: 830593 - DNA, 120 bp, Artificial Sequence
  ENSG00000229140_199 (sequence is synthesized)
aggaaagaatcattgaactggaagataggataacaaaattgcccattccaaacatacactgttccagaaaatagactggagaaaataacagagcctcagaaacacattgaactatttttt

SEQ ID NO: 830594 - DNA, 120 bp, Artificial Sequence
  ENSG00000229140_200 (sequence is synthesized)
gaaatgctaaaaaaggggctaaaaatttcccaaatttgagaaaatacataaatagagagattcaagaaactgaatggatttcaaacagaataaatctaaagaaatccacatcaaaataca

SEQ ID NO: 830595 - DNA, 120 bp, Artificial Sequence
  ENSG00000229140_201 (sequence is synthesized)
taatagtcaaaattctaaaaactaaaattagaaatcttgaaagaagtgaaataaaacaccttacctatagggaaaaacacttctaataataacagattactcattagaaactatagtggt

SEQ ID NO: 830596 - DNA, 120 bp, Artificial Sequence
  ENSG00000229140_202 (sequence is synthesized)
caggagaaagtgacaataattttcaagtataaatattccttgacttatgacgggtttacatactgatgaacccataatattttgaaaatatgccaaaaatgcatttaatacacctaacct

SEQ ID NO: 830597 - DNA, 120 bp, Artificial Sequence
  ENSG00000229140_203 (sequence is synthesized)
gctgaacatcaggaagcttagcccagtcttcctaaaatatattcaaaaacttacattagcttatagttgggcaaaattatctaacaaaaagcctattttattgtgttgaataactattgt

SEQ ID NO: 830598 - DNA, 120 bp, Artificial Sequence
  ENSG00000229140_204 (sequence is synthesized)
aatttatggagtatagtactaaaagtgaaaaacagaatggttctatgggtactgaaagtgcagtttttactgaatgagtatttcttttgtaccatagcaaagttaaaaagttataagttg

SEQ ID NO: 830599 - DNA, 120 bp, Artificial Sequence
  ENSG00000229140_205 (sequence is synthesized)
aactaccataagttcaggaccatctctttaaaaaagaaacaaaacaacaataacaaaacaaaaaacaaacaaacgaaaaaaccctgccaacttataatcctatatgcagtaataatatac

SEQ ID NO: 830600 - DNA, 120 bp, Artificial Sequence
  ENSG00000229140_206 (sequence is synthesized)
ttccataatgaagaaaaaatcaacatatcctcatatgaacaaaaactatcagaatttgtcactaggagacctaccctaagaaattaggtaaatgaacttccctgaacagaaatgaaacaa

SEQ ID NO: 830601 - DNA, 120 bp, Artificial Sequence
  ENSG00000229140_207 (sequence is synthesized)
taaaaggaacctaagaacatcagtaaagaaaaacaaacagacaaacagagtaagcaaaaatatgggtaattttctcttcccttgagattttgaaattatgtttgatgatggaagcaaaag

SEQ ID NO: 830602 - DNA, 120 bp, Artificial Sequence
  ENSG00000229140_208 (sequence is synthesized)
ttgtaatactgtttgatgtggttctaaatgcatgtagcaaaaatatttaagacaattataaacaggaaggtaaagattgtaaaaagaggtaaattttctatacttcactcaaactggtaa

SEQ ID NO: 830603 - DNA, 120 bp, Artificial Sequence
  ENSG00000229140_209 (sequence is synthesized)
gtgtgtgtgtgtgtgtgtgtgtacatgtattcaaaatgtatttaacatgcctaacctattgaacatctacagttataactacctagagttatgacatataacaactagatcaacaattaa

SEQ ID NO: 830604 - DNA, 120 bp, Artificial Sequence
  ENSG00000229140_210 (sequence is synthesized)
tataacaactagatcaacaattaaaaatagctatacaagtagatacactcaaaatgcaatagataaattaaaattgaattttaaaatacgttcaagtaacccacaaaaagggaaaaagcc

SEQ ID NO: 830605 - DNA, 120 bp, Artificial Sequence
  ENSG00000229140_211 (sequence is synthesized)
agggaaaaagccagtgcagtgaaaaacaataacaaagagtaaataaaaaatgaaatgaaatattataagtgttataaaatgaaataaaaaattactcttttaagtcctaacatattaata

SEQ ID NO: 830606 - DNA, 120 bp, Artificial Sequence
  ENSG00000229140_212 (sequence is synthesized)
tcaaccaattaaaagacagaaataccaagaggattaaaaacatgggttaactatatgctatctacaactcttttcaaatatgacattgttggaaaattgaaagttaataaaaaatatata

SEQ ID NO: 830607 - DNA, 120 bp, Artificial Sequence
  ENSG00000229140_213 (sequence is synthesized)
atgaaaacactaagcaaaagaaaacaggagtgactaagttaatatcagatagattatattttagagcaaaggaaattataagagataaggagagatattatataatgacaaaaagattac

SEQ ID NO: 830608 - DNA, 120 bp, Artificial Sequence
  ENSG00000229140_214 (sequence is synthesized)
tccacagaaaagatacagcatttcttaaggtgtatgcatcaaaatatataactgcaaaataaagaaagaaaaattttatagaactccaaagagaaatagacaaatccataattatatttt

SEQ ID NO: 830609 - DNA, 120 bp, Artificial Sequence
  ENSG00000229140_215 (sequence is synthesized)
gtaacttcaacatccatttctcaaaaattgatggaacaactatactaataatcagcaaggatatacaggaactcaaatcaccatctaccaccaggatctagttaacatttatagaacact

SEQ ID NO: 830610 - DNA, 120 bp, Artificial Sequence
  ENSG00000229140_216 (sequence is synthesized)
ccacccagtatcagcaaaatacacattattttcaaatggccatagagcatattccttgagacatgatatccagaaacatttaaaaacataaaattaaaactaacgcattttaaaaattga

SEQ ID NO: 830611 - DNA, 120 bp, Artificial Sequence
  ENSG00000229140_217 (sequence is synthesized)
aaatagttgttctcagacaaaaatggaagggaactaaaaattcataataaaatgataccagaaaaatttccaaacatttgtaaaatttccaaactgtatacttctaaatagcaggtaata

SEQ ID NO: 830612 - DNA, 120 bp, Artificial Sequence
  ENSG00000229140_218 (sequence is synthesized)
aggaaatctcatgggaaattaaataaaaatatattgaacatgaaaatgaaccttatgaacataaaaattccactctgtttccaataccactttcatgtttgatgattaactagaataact

SEQ ID NO: 830613 - DNA, 120 bp, Artificial Sequence
  ENSG00000229140_219 (sequence is synthesized)
cacagaatacagaaaagctattgtactcacccttatagtttatatcagaaaaaaatagatgaaaaatagcaaaaggaaaaacacacatgggtaaaatccaagagaaattagatgtaagtt

SEQ ID NO: 830614 - DNA, 120 bp, Artificial Sequence
  ENSG00000229140_220 (sequence is synthesized)
tccgggtgtctcctcctactggcattacacagggttgtacttaattctcctactaatgatgtgcataacacagatggagtattgcctaccaggtaagctttcctgagtcttggcatcagg

SEQ ID NO: 830615 - DNA, 120 bp, Artificial Sequence
  ENSG00000229140_221 (sequence is synthesized)
gggcttgcagagaggtggtcagttacataggcatgtagcacctaagcaactgacctcagttattaagtctcctgccctctagacgtcaaactgacatagcctgactgagagtctcagaca

SEQ ID NO: 830616 - DNA, 120 bp, Artificial Sequence
  ENSG00000229140_222 (sequence is synthesized)
tataaaaactgacatttaccataaatcacattgctagcatacactatcaggattcaacagagatctataacatgggccaagatctcagagacccatagtataagccaagatctcaggcat

SEQ ID NO: 830617 - DNA, 120 bp, Artificial Sequence
  ENSG00000229140_223 (sequence is synthesized)
acacaaacactcttattagatagaatattctaagggataaaaagttatctcccaggagccattcaagaccagatccttctttggaatgtgtagcgtttgacaacacaggtctgctaagct

SEQ ID NO: 830618 - DNA, 120 bp, Artificial Sequence
  ENSG00000229140_224 (sequence is synthesized)
aatcttttactgcacaacaacatattacaatttgtgggacacagctaaagtgttgctgagagagaaaattacatcacaaaatgcatttgaagtgttgcaaagaaaagaacaaaagtttca

SEQ ID NO: 830619 - DNA, 120 bp, Artificial Sequence
  ENSG00000229140_225 (sequence is synthesized)
aatcaaaagcctaaagtattatttcaagaacctagagaaaggatagcaaaataaatccaaaataagggaatcagagtcatgactgggtgtgaagcaggcaaaaaaatcactgcaggaggt

SEQ ID NO: 830620 - DNA, 120 bp, Artificial Sequence
  ENSG00000229140_226 (sequence is synthesized)
agttctgattggtccattcttgctgcagtttctgattctctgcagagcaacagccatggcccctgtctgcaccatcacctctgccttcattgttattggaggttgagctgtctggactct

SEQ ID NO: 830621 - DNA, 120 bp, Artificial Sequence
  ENSG00000229140_227 (sequence is synthesized)
ggcatcactgctgaggaatgaggaaaggagaatagactctgtgatccaccttggcctagggccttgccttggagctgtgaggaaaaatattctcccctacaaaagcaacttcaaaaaatt

SEQ ID NO: 830622 - DNA, 120 bp, Artificial Sequence
  ENSG00000229140_228 (sequence is synthesized)
ggaacaagtgactgctacaacagatatgcagatatcaatggaggacacagaaaacatgaaagagcagagaaatatgacactaccaatgggcaacaattgtctggcaacagatcccagtaa

SEQ ID NO: 830623 - DNA, 120 bp, Artificial Sequence
  ENSG00000229140_229 (sequence is synthesized)
aaaataatttcacaaaattccagataaagaattcaaaatattggctttgaatgaaatgagaagctgaataagatgaaacaaaaatctgaaaatcgatacaaagaaagcagaaaatcaatt

SEQ ID NO: 830624 - DNA, 120 bp, Artificial Sequence
  ENSG00000229140_230 (sequence is synthesized)
aagaaaatgaatgtaaaatttaccaaggtgataaatatcttttaaaaaaagcagaaatgctggagctaaaaattcaatgaaggaaatactaaatacattaaacacctcaataatagacta

SEQ ID NO: 830625 - DNA, 120 bp, Artificial Sequence
  ENSG00000229140_231 (sequence is synthesized)
gaccaagcagaagaaagtctttcagaacttgacatggcttttgaaataattcagtgtgacaaagataagaaaacataaataaaaaagaataaacaaagcctttgagatacctcagataac

SEQ ID NO: 830626 - DNA, 120 bp, Artificial Sequence
  ENSG00000229140_232 (sequence is synthesized)
ataaagtgaccacacttaccaattattggtattcccaagaggaaagacagatcaaaaagtttagaaagcctatttaaggaactaatcaatgaaaacatttcaagtctagcaagacaatta

SEQ ID NO: 830627 - DNA, 120 bp, Artificial Sequence
  ENSG00000229140_233 (sequence is synthesized)
aacatccaggtacaggaggctcagagagcctcaggcaaatgtattacaaaaaggacttcatcacagcatgttatatttagaatgtctaatgtcaaaatgaaataattttaaaattagcga

SEQ ID NO: 830628 - DNA, 120 bp, Artificial Sequence
  ENSG00000229140_234 (sequence is synthesized)
gataaaaatacctagtcgcctataagggagactaccttagattaatagtagacttttcatcagaaacctaagaagccagaagcaaacaggatgacattttcaaagcattgaaaggaaaac

SEQ ID NO: 830629 - DNA, 120 bp, Artificial Sequence
  ENSG00000229140_235 (sequence is synthesized)
agtgtcagccaagaattttatatcctgccagagcaagcttcataagtaaagaagaaataagatatttcctcaataagcaaacactgagggaatttgtcaccactagactagccctacaag

SEQ ID NO: 830630 - DNA, 120 bp, Artificial Sequence
  ENSG00000229140_236 (sequence is synthesized)
aaatactcaaagaggtcttaaacattaaaaacaaagatctgtagttaccatcacaaaaatacatggaaatataaaacttacacttcttacaaaacaatcacatgaagaaggaagagacag

SEQ ID NO: 830631 - DNA, 120 bp, Artificial Sequence
  ENSG00000229140_237 (sequence is synthesized)
gaatcaaatgtcaacacaacagaatttcattaaaccacaaagacaaaaagaaaaagaaaaaaattatacaacttataaacaattaacaatatgacaggaacaaagcttcacatctcagta

SEQ ID NO: 830632 - DNA, 120 bp, Artificial Sequence
  ENSG00000229140_238 (sequence is synthesized)
ttaatcttgagtgtaaatgagttaaaatgtaccacttaaaatatagaaattggcagaatggatttttaaaaagcatgatgcatctatatactgcctacaagaaactcaccttactcaaaa

SEQ ID NO: 830633 - DNA, 120 bp, Artificial Sequence
  ENSG00000229140_239 (sequence is synthesized)
agacacatatagactgaaagtaaagacattaaaaaagatattccatgcaatttgaagcaaaaggccatgaggattagctacacttattttagataaagcagactttaaatcaaaatcaat

SEQ ID NO: 830634 - DNA, 120 bp, Artificial Sequence
  ENSG00000229140_240 (sequence is synthesized)
aaaaagtgacaagaaagattattacataatgataaagggatcaattcagtgagaagatataacattctaaatatatgcacccaacatcagagcacccaaatttacaaaacaaatattacc

SEQ ID NO: 830635 - DNA, 120 bp, Artificial Sequence
  ENSG00000229140_241 (sequence is synthesized)
agacataaagaaagaattagagagcaatatatttatagtgggagacttcaacaccccactcagagtagtagacagattgagacagaaaattaataaagaaacttagaacttaaattagac

SEQ ID NO: 830636 - DNA, 120 bp, Artificial Sequence
  ENSG00000229140_242 (sequence is synthesized)
tttaggccatgtacacttaatggtcatttacagaacattctactcaatgaatgcagaatatactttttttaatcagcagatgaaacattttccattttcataccacatattagggcataa

SEQ ID NO: 830637 - DNA, 120 bp, Artificial Sequence
  ENSG00000229140_243 (sequence is synthesized)
agcaagtcaacatattttttcaatttatattatgtcaagtatcttctcagactacagtggaataaaactagaaatcaataccaagaacttcagaaactacacaaatacatggaaattaaa

SEQ ID NO: 830638 - DNA, 120 bp, Artificial Sequence
  ENSG00000229140_244 (sequence is synthesized)
cagcatgttcctgaacaatcattgagttaatgaagaaattaagatataaattttaaaaatttttaaataaatgaaaatcatgcacaacatacaaaaacctatgtgatacagcaaaagcag

SEQ ID NO: 830639 - DNA, 120 bp, Artificial Sequence
  ENSG00000229140_245 (sequence is synthesized)
tgttcagagggaattttatagcattaaatgcttacatcaaaaaagtggaaatatcacaagttagctatctaatgttatacctcaacgaactagaaaaaccagaaaagtcaaagccaaagt

SEQ ID NO: 830640 - DNA, 120 bp, Artificial Sequence
  ENSG00000229140_246 (sequence is synthesized)
tattaggaaaaaagaactaacaaagatcagagcagaataaaatagagaccaaaaaaattactaaagatcaacaaaacaaaaggttggttctttgaaaaggtaaacaaattgataaaccac

SEQ ID NO: 830641 - DNA, 120 bp, Artificial Sequence
  ENSG00000229140_247 (sequence is synthesized)
taactaaactaaagagaagactcaactatgatcagaaatgaaaaacagaaacattacaaatgataccacagaaatataaaagatcatcagaaactattatgaacaactatatgctcacaa

SEQ ID NO: 830642 - DNA, 120 bp, Artificial Sequence
  ENSG00000229140_248 (sequence is synthesized)
atcagaaaacctagagaaaaatagataaattcctggaaacatgcaatctgctgagattgaaccaggaagaaagacaactcctgaacaggctaatgatgagtagcaagaattaatcagaaa

SEQ ID NO: 830643 - DNA, 120 bp, Artificial Sequence
  ENSG00000229140_249 (sequence is synthesized)
aaaaaagcccaggacaagatggattctaccacaaatacaaagaagggctaatacccatcatcctgaaactattccaacaagttgaggaggagagaaattttcctaactcattctacaagg

SEQ ID NO: 830644 - DNA, 120 bp, Artificial Sequence
  ENSG00000229140_250 (sequence is synthesized)
ccaaatatccatgatgaaaatagacacaaatatcctcaacagaatattagcaaatcaatggctgggtgtggtggctcagacctataaccccagtactttgggaggcttaggctagaggaa

SEQ ID NO: 830645 - DNA, 120 bp, Artificial Sequence
  ENSG00000229140_251 (sequence is synthesized)
catttaaagctagaagtttgagaccagcctgggcagtatagcaggaccccatctctacaaaaaattaaaataaagaaaataaattagtcaggcatgctggaacatgcatatagtcctagc

SEQ ID NO: 830646 - DNA, 120 bp, Artificial Sequence
  ENSG00000229140_252 (sequence is synthesized)
tacttggaaggctgaaatgggaagataaattgagcccaggagttcagggatgcagtgagacatgaccatgccaccgcacttcagcctgggtgacagagacagaccctgtctcaaagaaaa

SEQ ID NO: 830647 - DNA, 120 bp, Artificial Sequence
  ENSG00000229140_253 (sequence is synthesized)
aaaaaaaaaaaaactagcaaattaaatgtaacagtgcattgaaattgaaaaataataaatacattatggtgaggctgaatttatcccagggaggtgaggatgagtcaacatatataaatc

SEQ ID NO: 830648 - DNA, 120 bp, Artificial Sequence
  ENSG00000229140_254 (sequence is synthesized)
aataaatgtgatatatcacataaacagaattaaggacaaaaactatattatcacctcaatagatgcagaaaaagtaactgacagaattcagcatattttatgatggaaaattctcaacta

SEQ ID NO: 830649 - DNA, 120 bp, Artificial Sequence
  ENSG00000229140_255 (sequence is synthesized)
tgaatagaaggaacatacctcaacataataaaggccatatatgacaaatatgacaaacccacagccaacattatagttaacagagaaaagttgaaagcgttccctctaagaactggaaca

SEQ ID NO: 830650 - DNA, 120 bp, Artificial Sequence
  ENSG00000229140_256 (sequence is synthesized)
aggcaaggatgaccactttcaccactcttattcaacatagtactagaagtccttatcagagcaatcaggcaagtgaaaataaaaattaaaggcatccagattggagaagagaaagtcaaa

SEQ ID NO: 830651 - DNA, 120 bp, Artificial Sequence
  ENSG00000229140_257 (sequence is synthesized)
ttatgcctgttggccaatgatataatcttacgtctagaaagctctaatgatgccaccacaaacctcttatatttgataaatgaattcaataacatttcaggatacaaaattaatgtactg

SEQ ID NO: 830652 - DNA, 120 bp, Artificial Sequence
  ENSG00000229140_258 (sequence is synthesized)
aaatcagtagtgattctatacacaaataattctctagctgagcaccaaatcaagaaggcaatcacatttacaatagctataaaaatgtctaggaatatattaaaccagggagatgaaaga

SEQ ID NO: 830653 - DNA, 120 bp, Artificial Sequence
  ENSG00000229140_259 (sequence is synthesized)
tctttataagaattacaaaacactgatgaaagaaattgtagatgatggaaaaacatcctatgctgatatggtttgtttgcgtgcctacccaaatcttaccttgaattgtagctcccataa

SEQ ID NO: 830654 - DNA, 120 bp, Artificial Sequence
  ENSG00000229140_260 (sequence is synthesized)
attgtagctcccataatccccacatgtcaagggagggacctggggcaaggtaattgaatcatgggggcaggtttttgctgtgctgttctcgttatagtaagtctcatgagatctgatggt

SEQ ID NO: 830655 - DNA, 89 bp, Artificial Sequence
  ENSG00000229140_261 (sequence is synthesized)
tttataaagggcagttcccctgcacatgtgctcctgcctgatgccatgtaagacgtgcctttactcctcctttaccttccgccatgttt

SEQ ID NO: 830656 - DNA, 120 bp, Artificial Sequence
  ENSG00000229140_262 (sequence is synthesized)
tttctctataaattacccagtctcaagtgtgtctttattagcagcatgagaactgactgatatacatgatcatggattggaagaatcattattaaaatgaccatactgtgatatggtaca

SEQ ID NO: 830657 - DNA, 120 bp, Artificial Sequence
  ENSG00000229140_263 (sequence is synthesized)
catgtgtaatatttggaatagatatggtatagtattacaggtataatgtaggaaagcacattatcttgtataatcagactcttctagctaatccatatgcttatatttaattgtgatgtt

SEQ ID NO: 830658 - DNA, 120 bp, Artificial Sequence
  ENSG00000229140_264 (sequence is synthesized)
tcacttgacatagcactttactgattacaccagtttttacatatcattaaatgagccagattatatgaattcatttggaaagcctcaagtgccaccgaaaggcaaaacacttgatgggtt

SEQ ID NO: 830659 - DNA, 120 bp, Artificial Sequence
  ENSG00000229140_265 (sequence is synthesized)
attaacagttattgagcactagttttttgccaggtattctgtgtgacatgtgtaggtaaaggacatgatcactgccttggaggacctcagagaaaacaatttaaatagtgcagtaaatgc

SEQ ID NO: 830660 - DNA, 120 bp, Artificial Sequence
  ENSG00000229140_266 (sequence is synthesized)
tgcaaagagggaagcacaagatgatatggaaccacaaacaacaaccacctagcctagactttgtgagaatatgtagagctgcctaccagtggtgacatccaaactcagatcttaaagaaa

SEQ ID NO: 830661 - DNA, 85 bp, Artificial Sequence
  ENSG00000229140_267 (sequence is synthesized)
agaaaatcaacaaggaaggcgatgagcacagcagtgtgaaggtatatagaccaacggagcagaacagaggcctcagaaataacag

SEQ ID NO: 830662 - DNA, 120 bp, Artificial Sequence
  ENSG00000229140_268 (sequence is synthesized)
aaagataagaaaaatcacccacaaatttgtaataatatttactcacttttcaaaggtttctccaactttttgagtcaggactaatcatctttaaattaatttctttaaaaaaagaagtag

SEQ ID NO: 830663 - DNA, 120 bp, Artificial Sequence
  ENSG00000229140_269 (sequence is synthesized)
taagcttttgttctaacaaaaacgggtttccctctatcaagtacacacctgatatatgctttttcttaatgtaaatattaatagatggccaattgtttccatcattcagaggcctcctct

SEQ ID NO: 830664 - DNA, 120 bp, Artificial Sequence
  ENSG00000229140_270 (sequence is synthesized)
gtttaaacattctctgctgaatttgtttattccactgtaaaaaccatggcaaccacaaggaaaaatgttttcctgtttttcagagtgttggactattagaacactagggatcactagaaa

SEQ ID NO: 830665 - DNA, 120 bp, Artificial Sequence
  ENSG00000229140_271 (sequence is synthesized)
taaaaaatacaacttagaacaaagtcttaactccatgtcaggaagatggagtatgaccaagcagctgtgtagcaagttccagggaccacagcagaataggctctgttggccgggtgcggt

SEQ ID NO: 830666 - DNA, 120 bp, Artificial Sequence
  ENSG00000229140_272 (sequence is synthesized)
gatggctttataaggggcaatttccctgcacacattctcttgcttgccacaatgtaagacatgcctttgctccttcttcaccttctgccatgattgtaaggcctccctggccatgtggaa

SEQ ID NO: 830667 - DNA, 74 bp, Artificial Sequence
  ENSG00000229140_273 (sequence is synthesized)
ttgagtaactggagattgcagagcactagccaaactacatgggactgtgacttgaatgagaaataaactttcac

SEQ ID NO: 830668 - DNA, 120 bp, Artificial Sequence
  ENSG00000229140_274 (sequence is synthesized)
catgctgcaagtattagaatgacttttgtgttatttttcatatcttaatgtctcaattttaattttaatcaaaataatgcatagatgtaatagaggtcaaatataattaaacattttaaa

SEQ ID NO: 830669 - DNA, 120 bp, Artificial Sequence
  ENSG00000229140_275 (sequence is synthesized)
taattatctcttgtgccacagattactttctgatagttgaggactcagatctttcatccccttccacaatctatctttcccatatcatactaacatgtgttttctcctattgtaagtatg

SEQ ID NO: 830670 - DNA, 120 bp, Artificial Sequence
  ENSG00000229140_276 (sequence is synthesized)
cgaatggttttgctgctaaagcagaagtgcgcaataaacttatctccgtacgcataaccttttattcttatgtataaccttttattcttccctggtcactgactctctctaatcctgtat

SEQ ID NO: 830671 - DNA, 120 bp, Artificial Sequence
  ENSG00000229140_277 (sequence is synthesized)
catcttcccacattgccttggttttcctttggtcccagtatgatacacatatgatatataatgtatcatatatgtatatatgtgtgtatatacatatatatactatatatatgcatttgt

SEQ ID NO: 830672 - DNA, 120 bp, Artificial Sequence
  ENSG00000229140_278 (sequence is synthesized)
atatatgtgtgtgtatttatatgtgtgtgtgtgtgtgtgtatatacacacttcttttctgaaggccagaacatctgtactacaggcctacttataagctcaaaacatcaattaaaaaaaa

SEQ ID NO: 830673 - DNA, 120 bp, Artificial Sequence
  ENSG00000229140_279 (sequence is synthesized)
ttgcttccccttccaccatgattgtaaaatcaacaaggaaggcgatgagcacagcagtgtgaagttcctggcaaccatcattctactttttgtctccatgattttgaatactctaagtac

SEQ ID NO: 830674 - DNA, 120 bp, Artificial Sequence
  ENSG00000229140_280 (sequence is synthesized)
gtgtgaagttcctggcaaccatcattctactttttgtctccatgattttgaatactctaagtacctcatattatagccatcctaatgggtgtcattttcatgcgcgtccatgtgaagaga

SEQ ID NO: 830675 - DNA, 86 bp, Artificial Sequence
  ENSG00000229140_281 (sequence is synthesized)
ctggctgcagaggtgggaaggccaaacccgcggtgaccttctcagaccctgtgggaaagacctctacctatccagtgaaagtgtct

SEQ ID NO: 830676 - DNA, 72 bp, Artificial Sequence
  ENSG00000229140_282 (sequence is synthesized)
cagttccaggggctctgagagtggctgccagcctactcactgtgaagacaatgagggtgaaaaccttcatga

SEQ ID NO: 830677 - DNA, 120 bp, Artificial Sequence
  ENSG00000229140_283 (sequence is synthesized)
acacaaaatgttccaataaataagtatcaaagaacaagcagactccagtcgtatgtccctgatatagctggaggatcaggtaccagcttttctataccttggcctgaagatgaatgataa

SEQ ID NO: 830678 - DNA, 120 bp, Artificial Sequence
  ENSG00000229140_284 (sequence is synthesized)
tgcatgatctatttgtggtggcatgaggcactacaggagaggtaccctgctgccttccagcagtaatggaagagattatgtggactatgtgttctaggaaataaacttttaagactccag

SEQ ID NO: 830679 - DNA, 120 bp, Artificial Sequence
  ENSG00000229140_285 (sequence is synthesized)
ctggctcggcaataatataggtggttctaacgacactgcttagttatgggaaaccatcactgaagaaatgggcccatttagtatcatctcccatcttgtcatgaatatcagaagcctgga

SEQ ID NO: 830680 - DNA, 120 bp, Artificial Sequence
  ENSG00000229140_286 (sequence is synthesized)
agacagggataaaaaaatgggtgaaacatgtttggcatctggagtttctggaaagtgcagccaaacctcttcgctatgctttgtgttggttctgggctgattaaagttatccacattgta

SEQ ID NO: 830681 - DNA, 120 bp, Artificial Sequence
  ENSG00000229140_287 (sequence is synthesized)
ataaatgtgactgtatgtcctacatcccattcctgttgtcttccatgtctcctcagaggaaggcctgaggagagaagacacatagtcatgctgactaaaccagatcacctagaattacca

SEQ ID NO: 830682 - DNA, 120 bp, Artificial Sequence
  ENSG00000229140_288 (sequence is synthesized)
attggcagaatagtacaaggagtttccctcgtgttaataatttaccaactttacttaatttaatatatatgtaccatctattatatatgccatatatttttatatgataccatatatttt

SEQ ID NO: 830683 - DNA, 120 bp, Artificial Sequence
  ENSG00000229140_289 (sequence is synthesized)
catataatgccatattttttcctgaattatttgaaatgtatagacataatgttctttatccctaaagacttcgatgtgtactttctgaaaatgcattttgttacataagcactattgtta

SEQ ID NO: 830684 - DNA, 120 bp, Artificial Sequence
  ENSG00000229140_290 (sequence is synthesized)
atcatcaaaactgggaaattaacattaatacaaaactattacctaatctacagacctcagttgaatttcaccaattgttccagttttatgctatatggtaaaagaaaacactggatcaca

SEQ ID NO: 830685 - DNA, 120 bp, Artificial Sequence
  ENSG00000229140_291 (sequence is synthesized)
ggcttgactaaactcatttcctccatccacaatgtgcctctgatgtagtgttggctgaggctccctcttgccggctcctgctcttgaaacacacccaagtgcaatgttcaatgtgagtgt

SEQ ID NO: 830686 - DNA, 120 bp, Artificial Sequence
  ENSG00000229140_292 (sequence is synthesized)
ttggcttggcttaaatttggccaaatcatctgtactttgtttcatttgaaagccttacttttttcttgctctctctttttctctctcaactagttcattccagatgtttttgatttgtct

SEQ ID NO: 830687 - DNA, 120 bp, Artificial Sequence
  ENSG00000229140_293 (sequence is synthesized)
ttttgtggtctactccacccagttcctaaatcagtaaatcattttcgtgcttcttccaaaatctaaggaaagaaaatgctcaattagagagaaactgattataggtctcatagagcttat

SEQ ID NO: 830688 - DNA, 120 bp, Artificial Sequence
  ENSG00000229140_294 (sequence is synthesized)
tcaactttttagcatctggactaggagagtaggcaaaatattgatatgctaatataatgcacgtccaagctcatcctctactttaagtcttgatatataattgctattcttgcttgaagt

SEQ ID NO: 830689 - DNA, 120 bp, Artificial Sequence
  ENSG00000229140_295 (sequence is synthesized)
cgttcaattactgaagtgcaaatagaagttcccattctatgaactcatatgtggtagcgatagaatgtactaacatataatattaatggcctttctctctttactgtcaccttttaccct

SEQ ID NO: 830690 - DNA, 120 bp, Artificial Sequence
  ENSG00000229140_296 (sequence is synthesized)
tctcagcattttgattgtgatgatgtgggtaagggcaaagtgtttgctttattgttattatgcagggtgaagaacttgtccttggtggaaatcacagacctgataggctagtgaaggaat

SEQ ID NO: 830691 - DNA, 120 bp, Artificial Sequence
  ENSG00000229140_297 (sequence is synthesized)
ttagagagaaaactcagtagactccctgaatttgggaagagagttttggatatattgagagcaaagatgagagattgaaggtagctgattgtataataagctagaaaaaagagaagaaaa

SEQ ID NO: 830692 - DNA, 120 bp, Artificial Sequence
  ENSG00000286262_0 (sequence is synthesized)
agtgcgcagcctgggtgggggctcaggacaaggggctcttatggagcccctcgagacccccaggaggtggacactgcccccagctcttggtggagcccttgggctgcaacagcaggaact

SEQ ID NO: 830693 - DNA, 120 bp, Artificial Sequence
  ENSG00000286262_1 (sequence is synthesized)
gaaccccaggggctttggggttaagagaagaatgtctggacgttagcggcaaaagcaggcgggtggggcagtgagcacaagcgggggtgcccctgatactggctacccctccacatctat

SEQ ID NO: 830694 - DNA, 120 bp, Artificial Sequence
  ENSG00000286262_2 (sequence is synthesized)
gtgagccacatactttccggataggagaaggtccagaaggtgaagtctgcgcccaggacctgcagaggtgagaggcccgaagccttccccggatgcactcatgaccggggcctggccagc

SEQ ID NO: 830695 - DNA, 120 bp, Artificial Sequence
  ENSG00000286262_3 (sequence is synthesized)
aggcgtccgggagtcagcggctgcttggggaaccagggccccactcacacgcgggaaggtgatggtggcaggcagactggtagctgagagcgaaaggtgtggcgggatccgcctggctgc

SEQ ID NO: 830696 - DNA, 120 bp, Artificial Sequence
  ENSG00000286262_4 (sequence is synthesized)
tgctggagccccaggctcgtgaatcgcctctgcgtcccgtcccctgcgttgggcagcttcacctgctcatcctgctcggcctgggtgtttctgctcctaagcgcccccctcacggtggtc

SEQ ID NO: 830697 - DNA, 120 bp, Artificial Sequence
  ENSG00000286266_0 (sequence is synthesized)
agttttaggctacagtgagcaacaattacaccactgcactccagcctgagcaacagggcaagactctgtctcaaaaaacaaataaacaaacaaaagaaacaaacaactgggaatgccata

SEQ ID NO: 830698 - DNA, 120 bp, Artificial Sequence
  ENSG00000286266_1 (sequence is synthesized)
cacctgggaagagttaggagcaatgcagctggagaaggcagcagaaacaggctgagcaagcctcatgggctttatcctgaaggcagctgtggaccactgaagattttcaggcagggaaat

SEQ ID NO: 830699 - DNA, 68 bp, Artificial Sequence
  ENSG00000286266_2 (sequence is synthesized)
aggcagctgtggaccactgaagattttcaggcagggaaatgatacgacagatttgcattttaggaaca

SEQ ID NO: 830700 - DNA, 120 bp, Artificial Sequence
  ENSG00000286266_3 (sequence is synthesized)
ggcgtgagccaccgcgcccagccgcttcaacattttaaagtactttgaagggtccctccttctggattgataagggtgggaacattcaagctaccgataagacctctgcacccagctcct

SEQ ID NO: 830701 - DNA, 120 bp, Artificial Sequence
  ENSG00000286266_4 (sequence is synthesized)
gtccctccactccctacggctcagctttgaagttccaaaaaccctgcctctgtgacctgattgtgttatcttcataaccaaggtgagaaaacagagaatcactttatggtttcctgtaag

SEQ ID NO: 830702 - DNA, 120 bp, Artificial Sequence
  ENSG00000286266_5 (sequence is synthesized)
cagccttctccaaagccatgatttcctataatgggggtggaagaagatctggggtttctcagaaattacagcactatctggcacagggtaggtgctctaggagctgttagagcagtggtt

SEQ ID NO: 830703 - DNA, 120 bp, Artificial Sequence
  ENSG00000286266_6 (sequence is synthesized)
ctcaaccagaggcgatcttgctccccaggtgacatttggcaaattctggagacatttctgattattacaacttgggggatgagtgctgaaggcatccagtggatagtggccagggatgtt

SEQ ID NO: 830704 - DNA, 120 bp, Artificial Sequence
  ENSG00000286266_7 (sequence is synthesized)
cccaagtgtcctgcaatgcatagaacagtctagcaagcaaagaattatctggctcaacacatcaatagtactgaggttcagaaacgctggtttagaaaatggagagaagaggaatggaaa

SEQ ID NO: 830705 - DNA, 120 bp, Artificial Sequence
  ENSG00000286266_8 (sequence is synthesized)
gagagaaagatacttccatgaatataaagagtgaggcaccatggcatttttgctctgctgctcttttaatcttcacgtatccacacttcaaagagatgtcaaaaatccgtcatggttcta

SEQ ID NO: 830706 - DNA, 120 bp, Artificial Sequence
  ENSG00000286266_9 (sequence is synthesized)
aacagtatacaggaaaagtaagatctatttgtctccttgttttacatgagctgacaaactcacttgagagagggcacaaattcatggttcatggtgcccagagaccttataggtcctggc

SEQ ID NO: 830707 - DNA, 120 bp, Artificial Sequence
  ENSG00000286266_10 (sequence is synthesized)
gcagaggggcttagggttcccttgggaacagtgaattctctgataccttagaaaaggaagggctgacatcagcaagagctggaggacctcagggaggagggcaggtgggctggattgtgc

SEQ ID NO: 830708 - DNA, 120 bp, Artificial Sequence
  ENSG00000286266_11 (sequence is synthesized)
actggccttggaaagaagagatatctgagcccaggacagcaaggggtgaacagaattcaataaatcgaggtgggaaagagggttttaagagaaccacacaagcaaagccttgaagtagag

SEQ ID NO: 830709 - DNA, 120 bp, Artificial Sequence
  ENSG00000286266_12 (sequence is synthesized)
ataaaatgtgtgtctgacccattgtagttgctcataaatgccggctccttcacccttaagaaaactgaggtgagcagatgaagcttactctactgggacccaaccctagttagaccacct

SEQ ID NO: 830710 - DNA, 120 bp, Artificial Sequence
  ENSG00000286266_13 (sequence is synthesized)
gacagcgtccttagttacggaaaccttagggccttcagtgatacttcagaaggggagaactgggagaaagcaccagaaccatctacttgagtgattcaacacattttctggtaggaaaac

SEQ ID NO: 830711 - DNA, 120 bp, Artificial Sequence
  ENSG00000286266_14 (sequence is synthesized)
ccctttccaggataatttcctcaaaattatactgttttttaataggatcagtttattgggaaaacacataatggcaataatttaagaagctctataaagtgtaagtgaatgtgttttagt

SEQ ID NO: 830712 - DNA, 120 bp, Artificial Sequence
  ENSG00000286266_15 (sequence is synthesized)
cttctcaaatggtgtttatgtacttttttttcttttaatagacatttttagagcagttttaggttcatagcaaaattgggctgaaagtacagagatttcccgtatacccccagcccccac

SEQ ID NO: 830713 - DNA, 120 bp, Artificial Sequence
  ENSG00000286266_16 (sequence is synthesized)
aaattcccagcttcccccattatcagcatcccccagcagattgtttcatgtgttacaattgaacctacattgacacatcattatcacccagagcccattatcaccgagaacccattaggg

SEQ ID NO: 830714 - DNA, 120 bp, Artificial Sequence
  ENSG00000286266_17 (sequence is synthesized)
ttcactcttggtattgtacattttatgggtttggacaaatgtatattgacatgtatccatcattatagtatcctacagagaagtttcactgccctaaacatcttctgtcctctacctccc

SEQ ID NO: 830715 - DNA, 120 bp, Artificial Sequence
  ENSG00000286266_18 (sequence is synthesized)
tccctcctgacccctgcacaccattgattttttactgtctccataagttttgccttttccagaatgtcatatgtttggaatcatatagtttgtagacttttcagattggattgtttcact

SEQ ID NO: 830716 - DNA, 120 bp, Artificial Sequence
  ENSG00000286266_19 (sequence is synthesized)
tggtaatatgcactgaaggttcttccatgactttttatggtttgtagctcatttatgtttagtgctgaataatattgcattttctggatggaccacagtttatgtatccattcacctact

SEQ ID NO: 830717 - DNA, 120 bp, Artificial Sequence
  ENSG00000286266_20 (sequence is synthesized)
gacctgattgtgttatcttcataaccaagctcatgttgcatgtggatggctgcagctcagcagctgtagaatctgcaccacctgtcttatgctgagatccagcctggaggaacacccctc

SEQ ID NO: 830718 - DNA, 120 bp, Artificial Sequence
  ENSG00000286266_21 (sequence is synthesized)
tgtggaatgtggcactctcttggcagaaagagcaagaaagcaggcagaaactcatgaagactcttaaaggcttctgcttgggcacggggtgggaaatgtttagattcaaagtggacatta

SEQ ID NO: 830719 - DNA, 120 bp, Artificial Sequence
  ENSG00000286266_22 (sequence is synthesized)
caagaatcttgacttttcaggaggtgacaatcggacatgatacttgcagtaagagagaggtgctgacctaaagcagaaagatttttcagctctgaacccttcagtctattaatgtctaca

SEQ ID NO: 830720 - DNA, 120 bp, Artificial Sequence
  ENSG00000286266_23 (sequence is synthesized)
ccacctgttaaatgagatgatcaaatgccttctatggtgtcagcctctctatgtcaaggtttccattaatcttaaagcaatgctaaagagttcaccactgcaccactgcctcctttgcct

SEQ ID NO: 830721 - DNA, 120 bp, Artificial Sequence
  ENSG00000286266_24 (sequence is synthesized)
gattcccctgatgccttttgttccccccatttttggccacaactaaccattcagtcattcaacaaatccctcttgggcacctcctctgtgccagacacgatgctaagcattgggagtaaa

SEQ ID NO: 830722 - DNA, 120 bp, Artificial Sequence
  ENSG00000286266_25 (sequence is synthesized)
tgaagaataaaatgcagactaaaccctcagagcatcccccagctagtagaagagacaggcaaataaagtgattgttacagaatcataatctcactgcattgggaagtctgagaggcctga

SEQ ID NO: 830723 - DNA, 120 bp, Artificial Sequence
  ENSG00000286266_26 (sequence is synthesized)
ggtcaagtctcagcgttactatttattacctgtgtcatcctgggaaaatctgcatttgatttctcatcaataaaataaggataaagttccctatcaaatagggtttgggtgaggattagc

SEQ ID NO: 830724 - DNA, 120 bp, Artificial Sequence
  ENSG00000286266_27 (sequence is synthesized)
aaggtaatgtacaggacttggcacattattgaatgtagatggtaataatgtattgtatatttcaaaatacctaagagtacattttaaatgtttcactataaaaaatgatagttaaacaag

SEQ ID NO: 830725 - DNA, 73 bp, Artificial Sequence
  ENSG00000286269_0 (sequence is synthesized)
aaagaggatacaaagaagtggggccatactgcccaaggtaatttatactttcaatgccatccccattaagcta

SEQ ID NO: 830726 - DNA, 85 bp, Artificial Sequence
  ENSG00000286269_1 (sequence is synthesized)
ctctactgggagaatgttcattacatcatcatatatctgtctgaattggaaaaaacatctctaaatcctacatttaattttttgg

SEQ ID NO: 830727 - DNA, 120 bp, Artificial Sequence
  ENSG00000286269_2 (sequence is synthesized)
ttggaaaaaacatctctaaatcctacatttaattttttggtcaagttgtgaagaatcactacccaatgcatagaattactttaacgaaactgaattttctgtgaggttttaataattaac

SEQ ID NO: 830728 - DNA, 120 bp, Artificial Sequence
  ENSG00000286269_3 (sequence is synthesized)
agtaacacttcacttcatcttttatgctactaaagatggggttcccatgttaagaagagggtatctgaagtacagactaagttgtgatttggctgcaaataataaggaaaagtctccagt

SEQ ID NO: 830729 - DNA, 120 bp, Artificial Sequence
  ENSG00000286269_4 (sequence is synthesized)
gagttattaaggtttcttcccttgaaaaaggtagtaatttacagaaactgatacattattactaaaacacaataaaaatggtgcacacagttaaaatatttgaagtcatatatcaactta

SEQ ID NO: 830730 - DNA, 120 bp, Artificial Sequence
  ENSG00000286269_5 (sequence is synthesized)
aaatagctattatctttgctatcaattggataatatttatattacatattaactgaagtaatcagaaggaaataaaactgaaaaaatacagccagataggaaaaaattaatttgaaatat

SEQ ID NO: 830731 - DNA, 120 bp, Artificial Sequence
  ENSG00000286269_6 (sequence is synthesized)
aatagtataattaaaaagactaactctttttttttaaaaaaactatgatgttcttgttaaaattaaaataaagttcacttttatatatatggtatgcagaataatagccgtcttccacaa

SEQ ID NO: 830732 - DNA, 120 bp, Artificial Sequence
  ENSG00000286269_7 (sequence is synthesized)
cgtcttccacaaaagatccatgcctctattctcagaatttgggatgatgttacgttaagtggcaaaggaattttgcagatgtgaataaattaagcattttgaggtggggaggttatatgc

SEQ ID NO: 830733 - DNA, 120 bp, Artificial Sequence
  ENSG00000286269_8 (sequence is synthesized)
tggatgatcttgatagttccaaagttattacaagagttcttacaaggggaagaggaaggcaggagagtgagaggagtgtggaagcagaggctggggtgatgcaactgctgataagaaaac

SEQ ID NO: 830734 - DNA, 120 bp, Artificial Sequence
  ENSG00000286269_9 (sequence is synthesized)
tagaaaagtcaaggaacagcttctcccctagagcctccagaaggaaccaaccctactaacactttgatcatagtcctataagactcattttggaattctgaactccagagctacaagaga

SEQ ID NO: 830735 - DNA, 120 bp, Artificial Sequence
  ENSG00000286269_10 (sequence is synthesized)
ataaatttgtgttgtattaagccactaagtttgtggtaatttgttatagcagcaacaaaaaaaactagtataatgcaaaaggagagtgtaattttagttctaggctataaattcattgaa

SEQ ID NO: 830736 - DNA, 120 bp, Artificial Sequence
  ENSG00000286269_11 (sequence is synthesized)
tattaaaataatctcaacattaattctcgtatgaatcatgaatatactaactttaaacacttattgaaagccaatgcctctaaattaaggattcagctatgagttttagatttcttagaa

SEQ ID NO: 830737 - DNA, 120 bp, Artificial Sequence
  ENSG00000286269_12 (sequence is synthesized)
gttcaggaggccatgttgggattcatcaaggaagcaacagagacccatggagtgcagacaggagcaaggcaggacagctgcccacccaagattgatgcagagccagagaaggctccctac

SEQ ID NO: 830738 - DNA, 120 bp, Artificial Sequence
  ENSG00000286269_13 (sequence is synthesized)
tgtggggaaaggggtccctactcctactgcccccaagctggggagggaaaaaaaggctgagctactcccaaggctgtggtggtagcctggaattgccaagctgaggtttgtgaatggcac

SEQ ID NO: 830739 - DNA, 120 bp, Artificial Sequence
  ENSG00000286269_14 (sequence is synthesized)
ttaagcagaagaggagctgcactgtaagagcactgggaaagctgagtctcaggattgtgtggtctgccatgggagtggggcatgccttcctctcagggctggcccagaaaatgcctgtgc

SEQ ID NO: 830740 - DNA, 120 bp, Artificial Sequence
  ENSG00000286269_15 (sequence is synthesized)
ctgaggaagtgctgtgggccaaatacttgacaaaataaatgaaggtacagtggcagtgattggagggggctcctccattgtccaggagctgacttggtgaggggatcacctctctcccca

SEQ ID NO: 830741 - DNA, 120 bp, Artificial Sequence
  ENSG00000286269_16 (sequence is synthesized)
ctgcactgcagagcatgaatgcaaatgccaggaaataaaaaggagccacatggctgagtaaaagcttatctactggccatgactcttaagcatcatctactggattgcagcacaagctac

SEQ ID NO: 830742 - DNA, 120 bp, Artificial Sequence
  ENSG00000286269_17 (sequence is synthesized)
aacaacaaaaatacactgttaattctctccctatgaaaccaagggcaagaattcagccaccaaggccctgcgcagtgcctggaccatctgaaaacctgcagaaacaaagcgaatcgtcta

SEQ ID NO: 830743 - DNA, 120 bp, Artificial Sequence
  ENSG00000286269_18 (sequence is synthesized)
tcctcagcttacaccttacttaaaggaacactaaccctcccatatgagacaaaatcagcccaagaactctggaaattcaaaaagccaaagtgtctttataccaccaaatgagtccactag

SEQ ID NO: 830744 - DNA, 120 bp, Artificial Sequence
  ENSG00000286269_19 (sequence is synthesized)
ctcccaagtgatggctcttaaccagtcagaaatgactgaaatgacagacatagaattccgcatctgaatgatgaggaagttcattaagattcaggagaaaggtgaaacccaatccaagga

SEQ ID NO: 830745 - DNA, 120 bp, Artificial Sequence
  ENSG00000286269_20 (sequence is synthesized)
atccagtaaaataatccaagagttgaaagacaaaatagccatttttagaagaatcaaagtgaacttctagggctgaaaagttcactacaagaatttgataatacaatggaaagtacgaac

SEQ ID NO: 830746 - DNA, 120 bp, Artificial Sequence
  ENSG00000286269_21 (sequence is synthesized)
agcagaataggccaagctgaggaaagaatttcagagcttgaacactagttgtttgaatcaactgtcagaaagtaataaaaaaaaaagagaattaagaaaaatgaacaaaacctttgagaa

SEQ ID NO: 830747 - DNA, 120 bp, Artificial Sequence
  ENSG00000286269_22 (sequence is synthesized)
atatgggactatataaacagatcagatctatgattcatcagcatccttgagagaaaaggagaaagaataaataactcagaaaatatatttgtggaaaagtccagaaaaatttccctaatc

SEQ ID NO: 830748 - DNA, 120 bp, Artificial Sequence
  ENSG00000286269_23 (sequence is synthesized)
tttctagaaatgttaacatgcaaattcaagaaatacagagaaccccggctagatcctatgcaagatgaccatactcaaggcacacagtcatcagattcactaaggtcaacacaaaagagt

SEQ ID NO: 830749 - DNA, 83 bp, Artificial Sequence
  ENSG00000286269_24 (sequence is synthesized)
cacacagtcatcagattcactaaggtcaacacaaaagagtaaatctttttgtttttgtttaatttccaacttttaagtttagg

SEQ ID NO: 830750 - DNA, 120 bp, Artificial Sequence
  ENSG00000286269_25 (sequence is synthesized)
cacccagatattaagcccagtatccattaactattcatcctgatcctctcccttctcccaccccctgccctctcacaggccccagtgtgtgtgtttttccccccatgtgtccatgtgttc

SEQ ID NO: 830751 - DNA, 87 bp, Artificial Sequence
  ENSG00000286269_26 (sequence is synthesized)
cctaatggtctccagctcaattcatgtccctggaaaggaccaacctcgtttcctcttatggctacatagtattccatggggtatatg

SEQ ID NO: 830752 - DNA, 120 bp, Artificial Sequence
  ENSG00000286269_27 (sequence is synthesized)
gtttcctcttatggctacatagtattccatggggtatatgtaccacattttaaaagaataaatcttaaaagcagctagagtcaagtcacgtacagagggaatcccatcatgctagcagca

SEQ ID NO: 830753 - DNA, 120 bp, Artificial Sequence
  ENSG00000286269_28 (sequence is synthesized)
gatctctcagcagaaatattaaaaaccagagagattctgagcctatttttatcttccttaaataattagaaataaaaaaatttccaaccaagaattttgtgtctcaccaaacgaaactta

SEQ ID NO: 830754 - DNA, 120 bp, Artificial Sequence
  ENSG00000286269_29 (sequence is synthesized)
ataagtgaaggagaaataaaattattctcagacaagaaaacacttgtggaatttcttttaagaccagccttatgatagataggtccttaggaattgctaaacatggaattgaaagaacaa

SEQ ID NO: 830755 - DNA, 120 bp, Artificial Sequence
  ENSG00000286269_30 (sequence is synthesized)
taccggctaccacagaaacacaattaagcacatattccacaagcactataaagcaaccacacaatcaagtctatataaaaaccaggtaacaacatgacagtatcaaaatctcacgtttca

SEQ ID NO: 830756 - DNA, 120 bp, Artificial Sequence
  ENSG00000286269_31 (sequence is synthesized)
atactaaccctgaatgacatgggttaaatgtcccactttaaaggaatagagtgctaaactggataaaaagacaaaagacccaaccatacgctgtcttcaagagaccttcccatatgtaac

SEQ ID NO: 830757 - DNA, 120 bp, Artificial Sequence
  ENSG00000286269_32 (sequence is synthesized)
aatatccacagacaggctcaaagtaaagggaaggagaaagatataccatgaaaacagaaaacaaaagagcaggagtaactattatatcaggtaaaacagatttaaaaccaataaaaatta

SEQ ID NO: 830758 - DNA, 120 bp, Artificial Sequence
  ENSG00000286269_33 (sequence is synthesized)
agaagggcaaagaaggacattacataattacaaaagggcagaattcaacaaaaagacttacacatacatgtactcaacattggagtacccaaaatcataaaacaagttcttcttggccta

SEQ ID NO: 830759 - DNA, 120 bp, Artificial Sequence
  ENSG00000286269_34 (sequence is synthesized)
tgaaacaacttagacaacaacataataatagtgggagacttcgacacgcgctgacagcattagacggatcatcagggcagaagactaaaaaagaaactccagacttaaactctacactag

SEQ ID NO: 830760 - DNA, 120 bp, Artificial Sequence
  ENSG00000286269_35 (sequence is synthesized)
accaattggacctaatagacatctgcagaacactccacccaacaatcacagaatatacattttcctcatttgcacatggaacatattctaagatcaacaacatattcagtcataatgcaa

SEQ ID NO: 830761 - DNA, 120 bp, Artificial Sequence
  ENSG00000244586_0 (sequence is synthesized)
gctttggggccacagaacaatcaggcgcgcatggctttttctccgggagatgccgctgaaaacgcacaagtcgccatctgagctgcaagagtcagccccaaattgtgtcctttcatttta

SEQ ID NO: 830762 - DNA, 120 bp, Artificial Sequence
  ENSG00000244586_1 (sequence is synthesized)
gggttcggcaaaaacggggagcaaaataggtgaaagtcgccccggaacttattgctgtgcgggcgaagggcgaagagcagcgagtgcaccgcgggcgcgaggctggggaagggcgagagc

SEQ ID NO: 830763 - DNA, 120 bp, Artificial Sequence
  ENSG00000244586_2 (sequence is synthesized)
gcgagagctcggagctccgcggcggcgactcagctccggcggtccatggccggcgaagctgcccacctcctcgtttggcgcccgggtccgaggggcgggagagcgggccggcgggaggcg

SEQ ID NO: 830764 - DNA, 120 bp, Artificial Sequence
  ENSG00000244586_3 (sequence is synthesized)
gaagggctcgctgggcagctgccgcacggaccccggctctgggcggcggaggcggctccgtggagctcgcagcagatttccacgcgatcctgtgccccgcaaacagactgaccgaccgcg

SEQ ID NO: 830765 - DNA, 120 bp, Artificial Sequence
  ENSG00000182257_0 (sequence is synthesized)
acacgcgtcctcccctcggcggggaggccggctaggggcaggcgggcagcgatgcctgcgtcggccacagctgcctggcactgccctcctttgtgcctgcctcctctgccagcctccgct

SEQ ID NO: 830766 - DNA, 120 bp, Artificial Sequence
  ENSG00000182257_1 (sequence is synthesized)
cctccgctccaacctccccccccaaccccgcaacgaggcctgctcctgggcccggccgcagggcccgttgcccacagagcgcccaccctgcgcccacccggggtgccctcaccttctggg

SEQ ID NO: 830767 - DNA, 120 bp, Artificial Sequence
  ENSG00000182257_2 (sequence is synthesized)
tcctggcctcgggtcctgctggtgcccaggtcgcccggccccgtcctccgtgctccgcgtttgccccaccctgctgcccgagctcggcggcgagcctggcacggtgccaggctgcctggg

SEQ ID NO: 830768 - DNA, 120 bp, Artificial Sequence
  ENSG00000182257_3 (sequence is synthesized)
agcccagcccgggcagggcgaactttccagcgagggttggtctcaaactcctgggctcatgcaatcttcctgcctcggcctcccaatgtgctggaattacaggtatgagctaccgcgctc

SEQ ID NO: 830769 - DNA, 120 bp, Artificial Sequence
  ENSG00000182257_4 (sequence is synthesized)
agcccaaacccagggctcttaaccaccctactatgtactgtgctggcccccggtcaagggagagaactcacgtcaggcaaaaatgttttacagagaggcagctaagtcttttccacagtg

SEQ ID NO: 830770 - DNA, 120 bp, Artificial Sequence
  ENSG00000182257_5 (sequence is synthesized)
gatgacacagtccccctcacaaaccaccccacagatccaaccccaaggaactctgcttctacgtgtgcccttggggcaagggatgcaaagcaccaggcgatggagctcagaggatggcac

SEQ ID NO: 830771 - DNA, 120 bp, Artificial Sequence
  ENSG00000182257_6 (sequence is synthesized)
tcttccagagagctgtgtgtctctgggaaagctaacacacctctctgagcctgttgctacagctttaccatcagcgatgtgactgcaagccttctcagctgcctgtcagcagatgcacag

SEQ ID NO: 830772 - DNA, 120 bp, Artificial Sequence
  ENSG00000182257_7 (sequence is synthesized)
gcctgtgcacagagctctgcggagaccacgccgacatcgccgcacacccaccctcctgctcatgggacagaccattcacacctgcttcaccaccagccacaggcttgtcggaaggagcag

SEQ ID NO: 830773 - DNA, 120 bp, Artificial Sequence
  ENSG00000182257_8 (sequence is synthesized)
actcttctccacggacaagccactgcccctttgagggcctcagcttccttaccctatgagatgaggaaacagatcttcacttgccacaggacttggggggatgaaaaggtaacctccgta

SEQ ID NO: 830774 - DNA, 120 bp, Artificial Sequence
  ENSG00000182257_9 (sequence is synthesized)
aagctgcccctggtgtggggaagccaccccatagatgacattgcccgccctccccctaggcccagagctctacagagtcctcaagctggtgtccctccaggctaaaacacttccaccccc

SEQ ID NO: 830775 - DNA, 120 bp, Artificial Sequence
  ENSG00000182257_10 (sequence is synthesized)
tgggcagtgcactacagggtggtggggaaggggccatctgtggaagaaacacagggcctggcctggggtcctgggcaagacctctgtgacctcagtttccccagatccctccaggtgtga

SEQ ID NO: 830776 - DNA, 120 bp, Artificial Sequence
  ENSG00000182257_11 (sequence is synthesized)
tgaaggcattccttcagtcccctggggaggttcagatgctcagactccctgataccacctttcctgggcagaataaagtccccaagatgtccaagccctaatccctggagcctgggaaag

SEQ ID NO: 830777 - DNA, 120 bp, Artificial Sequence
  ENSG00000182257_12 (sequence is synthesized)
tgttacctcccagaccaaagggactttgtaggtgtgtgattgagttgaagatctgcagtgagagggtagcctggattagccacgtgtgcccaaaagcagagactccttcccagccgtggt

SEQ ID NO: 830778 - DNA, 120 bp, Artificial Sequence
  ENSG00000182257_13 (sequence is synthesized)
cagagacagaacaaggggacgctgctggctttaaagacggaagaagggacgaggagccaaggagtgcaagtgccgccagaggccagaaaaggcaagggatggatttttcccctggagttc

SEQ ID NO: 830779 - DNA, 120 bp, Artificial Sequence
  ENSG00000182257_14 (sequence is synthesized)
caggaggaaccagccctgccaacacctggattttagttctgggaccccacctcagacatctgacccccttgactgtaaggtaataaatgtgcgttgcttaagccactgagtcagccataa

SEQ ID NO: 830780 - DNA, 120 bp, Artificial Sequence
  ENSG00000182257_15 (sequence is synthesized)
gttgttacatggctgccacaggaaactaacaggccctcccctctggccccaacatgcccagctgcctgtgaaggggaagaaggatggcacaaggcacggccctcatcgatgtgttcacac

SEQ ID NO: 830781 - DNA, 120 bp, Artificial Sequence
  ENSG00000182257_16 (sequence is synthesized)
accttgctcccctactgagctggccctggggctgcagacctgatccctgctctcaggagccttcgccagctgagagacgcccgcagagcctcccctccactgcggaggctcgaaccttcc

SEQ ID NO: 830782 - DNA, 120 bp, Artificial Sequence
  ENSG00000182257_17 (sequence is synthesized)
ctcctgctgctgctgccccatcctctcctcttcctcctgctgctgtttgttgagtgctccctgtgagtaggcaccaggctagtgtcctcctcccaaccccagcctcataggctcagcggt

SEQ ID NO: 830783 - DNA, 120 bp, Artificial Sequence
  ENSG00000182257_18 (sequence is synthesized)
caggccacccgagcagtcacattgtagacccctgaatcctgcccatggtttggcaggacaaagggccttttctgcttcagagtcacaaatgtgtcctcctcacaataagggtggcatgga

SEQ ID NO: 830784 - DNA, 120 bp, Artificial Sequence
  ENSG00000182257_19 (sequence is synthesized)
ggtccctgggccagtgcctcagcctattgagcctggggtccttgtctgtacagggggatgaaggtagcacctcacagatggcgataaacccagccagtgcagggcaggcagtcagcgctc

SEQ ID NO: 830785 - DNA, 120 bp, Artificial Sequence
  ENSG00000182257_20 (sequence is synthesized)
caggcagtcagcgctccaaactcgcttcaagtctttgcctatgctgccaatcaagtcagctgtgggaagagtcaggtttttctcttgaaagtcagggccgggcacggtggctcatgcctg

SEQ ID NO: 830786 - DNA, 120 bp, Artificial Sequence
  ENSG00000260409_0 (sequence is synthesized)
acaccggcttcagcgcccgagcgtgcgcgcgggtctccgctcgtcgcccggctcggcgtcgggagtgcactctgtgtggccgctgctgcagtgttgttgtggttgtgagaaggcggcggc

SEQ ID NO: 830787 - DNA, 120 bp, Artificial Sequence
  ENSG00000260409_1 (sequence is synthesized)
ggcggcggagtagcagccggaccagacgccctagtagctcagtcgctgccctgcgccgggcctggcagggagcctggtgagatggtggaggaggaggctgtgccgtggcgggccttgcca

SEQ ID NO: 830788 - DNA, 120 bp, Artificial Sequence
  ENSG00000260409_2 (sequence is synthesized)
tgtcctgctgcctgatggagtcttgctctgctgcctaggctggtgtggaatggcacaatctcggctcactgtgacctcagcttcccagattcaagcgattctcccccctcagcctcccaa

SEQ ID NO: 830789 - DNA, 120 bp, Artificial Sequence
  ENSG00000260409_3 (sequence is synthesized)
tgatccacccaccttggcctcccaagtggtgaaataacaggtgtgagccaccgctccccaactcaacccaaatttttaaaatgggcggagtatttgaacaggttcctcaacaaagaagat

SEQ ID NO: 830790 - DNA, 120 bp, Artificial Sequence
  ENSG00000260409_4 (sequence is synthesized)
aagaagatacatgtggcaaataagcgcacaaatgaatgctccacaccactagtaattaagggaattcaattactacttactggaggctaagagaccagttagggggttacgggagaaatt

SEQ ID NO: 830791 - DNA, 120 bp, Artificial Sequence
  ENSG00000260409_5 (sequence is synthesized)
ggagaggatatgaggaatattgaggagataaaattgcaaaagcttcacacttggttggaagtggaagctgacgtgtaagagaatcagcaatgattctcaggtttccaacttgagcaaagg

SEQ ID NO: 830792 - DNA, 120 bp, Artificial Sequence
  ENSG00000260409_6 (sequence is synthesized)
ggcggaggccactgatagactctgaggtcataaaacacaaggtggagcagatctaggcgggtatggaggaagagatgtgaccattgaagtattttctttgttgttgtgttgttggaatat

SEQ ID NO: 830793 - DNA, 120 bp, Artificial Sequence
  ENSG00000260409_7 (sequence is synthesized)
ttcaagtcaaatccctgacatcatgttgttccatctctacacacttcaacatgtatcactaaaagtagggacactttctcccataatcacattgctgtgatcgctcctgaagatgtgctc

SEQ ID NO: 830794 - DNA, 120 bp, Artificial Sequence
  ENSG00000260409_8 (sequence is synthesized)
aatgattctgattatcatcccatacatagtccacagtcatacatacttgattatcacaagtatttctctttttgcagtctgtctattggaatcagaatcctgacaaggtccaccctgcac

SEQ ID NO: 830795 - DNA, 120 bp, Artificial Sequence
  ENSG00000260409_9 (sequence is synthesized)
accactttctcacaaaggtcctctcatcctgagcagtcctccctgccactgatttgttgtccttcataatgtcccacaatctgcacctgtctttgttctccctcatgatactgcttcact

SEQ ID NO: 830796 - DNA, 120 bp, Artificial Sequence
  ENSG00000260409_10 (sequence is synthesized)
tctatgccctgaatttcctataatggggaaggagctctgaagcctggttgtaggaacacttcatgaacagtactgtgcatggcacacaatctctagccatcccacttgtcacgctaaaat

SEQ ID NO: 830797 - DNA, 120 bp, Artificial Sequence
  ENSG00000260409_11 (sequence is synthesized)
cgatgactcgcttctggtagtgtcagcctgactctttggacatgctgagtaagcagagcgagaaaggaagagggcttcgaccagaggaagaggagcagagaaaacagggaaggagaattc

SEQ ID NO: 830798 - DNA, 88 bp, Artificial Sequence
  ENSG00000251179_0 (sequence is synthesized)
tcctgagcttccccatagtcccagcccctgagctgggactacagggagaagtctcggcgggagattaagtcttgagattcatcagacc

SEQ ID NO: 830799 - DNA, 120 bp, Artificial Sequence
  ENSG00000251179_1 (sequence is synthesized)
aagtctcggcgggagattaagtcttgagattcatcagaccagagatggtctgtgaagccgcagatcaggatgacagccactatgggaatgaacaaagatgaagaccggagaccccaagac

SEQ ID NO: 830800 - DNA, 120 bp, Artificial Sequence
  ENSG00000251179_2 (sequence is synthesized)
agacctccggggcagccatcactgagagagggcggaggaggagggggaagtgaaggctcctgaggagaaggccatgtggaggagggaaaccaggggaaggtggagtcggagacattggaa

SEQ ID NO: 830801 - DNA, 120 bp, Artificial Sequence
  ENSG00000251179_3 (sequence is synthesized)
gttggatgcagaaggcgaaatgtcagaagctggagtcctgcatctcagctggaaggtgagggctgataatttatcagttgccattgatcaaagttcacaaggcaaatcttcataaacttc

SEQ ID NO: 830802 - DNA, 120 bp, Artificial Sequence
  ENSG00000251179_4 (sequence is synthesized)
taaagctgcctacagtttcccgtaaacaaatctctaaatttacaaaagcaatgcttgctgattgtaaaaaacacacagtgccaaagcatacaaaggaagaagacccgcttgcaatttgct

SEQ ID NO: 830803 - DNA, 120 bp, Artificial Sequence
  ENSG00000251179_5 (sequence is synthesized)
acctacatcccactcttggggccaacaactattggaagtgtggtgagtgattgacttacatccttctagatcttatctacatatttgcaaagaaaaaatatacatatataaaataaaata

SEQ ID NO: 830804 - DNA, 120 bp, Artificial Sequence
  ENSG00000260402_0 (sequence is synthesized)
ccccacacatcgcagcagtaaacaggtactttgtattctcaaattgcatctgcttaccctggccccctcaaaatggaagagtgatgactatttgtcttcgtaacactgtggggacacaga

SEQ ID NO: 830805 - DNA, 120 bp, Artificial Sequence
  ENSG00000260402_1 (sequence is synthesized)
ttccaattttcaagcgaggttggaaaccaaccatgatgtatgaaacactgttggccaaagtgcacaattagtaatacaaaatgaataatataaactattgtaaatatgtgtagacatcgt

SEQ ID NO: 830806 - DNA, 120 bp, Artificial Sequence
  ENSG00000260402_2 (sequence is synthesized)
ggcaatttggacatcaaaaacactgccaaattcagaaagaggaagctgtaaactcatggctgttaggaagcttaacttctgtgtactagaacctatcaaaattaaatttctccatgtcaa

SEQ ID NO: 830807 - DNA, 120 bp, Artificial Sequence
  ENSG00000260402_3 (sequence is synthesized)
taaatagaaagacatttaatgtgcatgaacataaaatctcaatattgtcaagatataatttctccccaatttgagttataggcaagagagtcacatcatctgggtgattggccaaacata

SEQ ID NO: 830808 - DNA, 120 bp, Artificial Sequence
  ENSG00000260402_4 (sequence is synthesized)
tgtcacaatcccttccattgacagctcccaaaaaaggagttacatcacctaggtgctcagctctgagatgtgtcacaacattgcccaatacaggcagggcacaggcgggagagtcacatt

SEQ ID NO: 830809 - DNA, 120 bp, Artificial Sequence
  ENSG00000260402_5 (sequence is synthesized)
tcctgggtgcttggcccagtggtatgtcacatttccttatgtaggaagggcacacgtagcaaaagagagtcacattacctaggtactgtgctagagctatcagtctctgtgtcattcaat

SEQ ID NO: 830810 - DNA, 120 bp, Artificial Sequence
  ENSG00000260402_6 (sequence is synthesized)
gtgagagttatgatctctttagacatccatgtaacagagcctcaactccttcatcctcagatgtaaaggctagtgaagaccaaataagccttgaaaggtaattcccctaaaaaggcagaa

SEQ ID NO: 830811 - DNA, 120 bp, Artificial Sequence
  ENSG00000260402_7 (sequence is synthesized)
tgtcttaggctttggcctctccccttcaagcacaatgagatcataacctctcttttgacttctcactatgcccagcagtggaacaaagctcctgactccacaccctcacctttccaccct

SEQ ID NO: 830812 - DNA, 120 bp, Artificial Sequence
  ENSG00000260402_8 (sequence is synthesized)
tgtaccttcactgggcagacaagagacgagaagacctgaactctgggacagtctggggagaaaagaatccaaaaagggttgaggcggcaagggctgagctcccatgggtgccccggccca

SEQ ID NO: 830813 - DNA, 120 bp, Artificial Sequence
  ENSG00000260402_9 (sequence is synthesized)
aaggtgcaggtccaggctgttttccaggtggcattcagtgcaggttcttcaatgccactagaaggcatgaaaaacccactgtagctgctgcttcttccttttcttaagctctgaaaatgc

SEQ ID NO: 830814 - DNA, 120 bp, Artificial Sequence
  ENSG00000260402_10 (sequence is synthesized)
aaacactttttcaaggttttcagatatgcccaggtacccccaactgaaaaggaggataatggcattgttcatcatggcttattgtcttgcccaggcaggagccagcctctgacttgccaa

SEQ ID NO: 830815 - DNA, 120 bp, Artificial Sequence
  ENSG00000260402_11 (sequence is synthesized)
tccagctgccccaggctggaggtgatcttgtcgagcctcctccctgcaactccactcctcttttttctcttcctcaaccaccggcatacttttggtcatccttcttgttgtcacaatggg

SEQ ID NO: 830816 - DNA, 120 bp, Artificial Sequence
  ENSG00000260402_12 (sequence is synthesized)
ggcgtgataccataaagacctgggaactccaatgatctcaggtcccgcaggggtcaggtgagcatataggaagtccagaaggacagtcatctgccacctccagttaaaaaagaacaaaac

SEQ ID NO: 830817 - DNA, 120 bp, Artificial Sequence
  ENSG00000260402_13 (sequence is synthesized)
gctcacgcttgtgtcctgcaggctggagcccatgcgagggtctgcagtctttgttccggatggggaactactgcttcagctggttacccaggtgccccgatggggaaaggaaggaaatgg

SEQ ID NO: 830818 - DNA, 120 bp, Artificial Sequence
  ENSG00000260402_14 (sequence is synthesized)
tgagaatcttcagcacagcggatcacatcaccctggaagagaccagtcctgcctgcgcatagcacaagcagccgcaggctagaggcagtcatgtcaggcctcctccatacagcatctctc

SEQ ID NO: 830819 - DNA, 120 bp, Artificial Sequence
  ENSG00000260402_15 (sequence is synthesized)
ctgcttttttttcaaacggccctaatcacttaatttggtcatcttccctgtcacaatggggcacctggcgctatagacacttgggaaacacacagatctgggatcctacattgtccaggt

SEQ ID NO: 830820 - DNA, 120 bp, Artificial Sequence
  ENSG00000260402_16 (sequence is synthesized)
aggtgaagacgccgggagtcagagaggaaagtcttttgaagcctccaaaaggaatgcacaggaccctacttgaagaggtggcgtgcccagtggcggatacaggccccacacatcgcagca

SEQ ID NO: 830821 - DNA, 120 bp, Artificial Sequence
  ENSG00000260402_17 (sequence is synthesized)
cggtgtccagctctccagcctggggtttctcatcacccagtgattccaaaagaaacgatctacaatggcatgactaagttccagaaacaaataaacaaaatactgagggaagcccattgg

SEQ ID NO: 830822 - DNA, 120 bp, Artificial Sequence
  ENSG00000260402_18 (sequence is synthesized)
gaagcccattggtcactttgattcttcaaaggtgacaattgtccctccctgaaatcttatgagtgcatgaacagactattctaatgtaaatgaaattcacactaaaactgattgaaagat

SEQ ID NO: 830823 - DNA, 120 bp, Artificial Sequence
  ENSG00000260403_0 (sequence is synthesized)
gcaaggcacgggcagcccagggtctccgggagacacgcgccctagcacggccgagagaagccgggccgtgggtcgggcgcaacggccgagttcacaccctggtccacccaggcagaaggg

SEQ ID NO: 830824 - DNA, 120 bp, Artificial Sequence
  ENSG00000260403_1 (sequence is synthesized)
acgggacgtccagtctgtaacggagactctgccaagccccaccctgctgagtgacccccagcttggagttcaggcccaggggtcaagggacagctttgggccctcctgggcctgtgactt

SEQ ID NO: 830825 - DNA, 120 bp, Artificial Sequence
  ENSG00000260403_2 (sequence is synthesized)
gttcaagagggtccccacgatgcaagggaccgaagcagggtcccccttcctggcctccaagcattcccgggggccccgccccgtccgtgtgccgggacggcggcagctgtgtcgcaggcg

SEQ ID NO: 830826 - DNA, 120 bp, Artificial Sequence
  ENSG00000260403_3 (sequence is synthesized)
aacgcggagtcaggaaccccgggagtccgggcagcacataacccagccgggcgacaacacacagatcccacccacctttctctataaataaacctgtggaggagaagcagcgctcgcccc

SEQ ID NO: 830827 - DNA, 120 bp, Artificial Sequence
  ENSG00000260400_0 (sequence is synthesized)
aaattttgtcacacctgatctgagaatataaaatttgttcatttgcaaaacatgcttctgaaatattttgtttccattatttatttagccagctagtttcttatgggtactaaagaaggt

SEQ ID NO: 830828 - DNA, 120 bp, Artificial Sequence
  ENSG00000260400_1 (sequence is synthesized)
ctcccaaattacctaaattccacaatagggcttagatttatgaagttttatattttttcctccttataaaaagctctttttataaagaatatccatgtaatactaaaacggggaaatctc

SEQ ID NO: 830829 - DNA, 120 bp, Artificial Sequence
  ENSG00000260400_2 (sequence is synthesized)
ctaaataatatattttttaatattacttttttaaaaagctagggtgagcacctcacaatcaaaatttaatgtatttgtcatattgaaatgcagggttttttgaaggaaacatggtaggta

SEQ ID NO: 830830 - DNA, 81 bp, Artificial Sequence
  ENSG00000260400_3 (sequence is synthesized)
tattgaaatgcagggttttttgaaggaaacatggtaggtaaacattttagttcccaactcctgatcgttaaaatgcaaaat

SEQ ID NO: 830831 - DNA, 60 bp, Artificial Sequence
  ENSG00000260400_4 (sequence is synthesized)
aaaattgttggcatctctaagacagagcaagactccctctctaagagatagtagtgtctc

SEQ ID NO: 830832 - DNA, 120 bp, Artificial Sequence
  ENSG00000260400_5 (sequence is synthesized)
gacagagcaagactccctctctaagagatagtagtgtctcccacttaattgaattcgttttgttttgtttgctttgctttgattcttgccacgtaaaatctgtgggtcttgacccagaga

SEQ ID NO: 830833 - DNA, 120 bp, Artificial Sequence
  ENSG00000260400_6 (sequence is synthesized)
ttgacccagagatttgctcagacagttaagaaaaataataagatgtatttgtaaatttttacataatgaaaaatgagatgtatttgtaaaattttaaaataacctctttataaatacgtt

SEQ ID NO: 830834 - DNA, 120 bp, Artificial Sequence
  ENSG00000260400_7 (sequence is synthesized)
gaggtaggatgttttggctaattagcacattctgggtcatacacacacacacacaaacaggccaaacactctagatagtcaaataaattccccttttggtgattcagttcagtaatggtg

SEQ ID NO: 830835 - DNA, 120 bp, Artificial Sequence
  ENSG00000260400_8 (sequence is synthesized)
tgcctatcctcatcaatgcttgtttgtgatgatgaaatagttgacaaccgggactttacaaaaatagctcctgaaaaaaattaaatattttattgcaatatatgttcatattttttttaa

SEQ ID NO: 830836 - DNA, 120 bp, Artificial Sequence
  ENSG00000260400_9 (sequence is synthesized)
cttttatgaaataacattgtgataggtgctttaagaaaaatatttttccagaagtggtttatagtataaactaagggcagtttttacattgtgatgtgtgggtggatggtcatatttagt

SEQ ID NO: 830837 - DNA, 120 bp, Artificial Sequence
  ENSG00000260400_10 (sequence is synthesized)
taggttattaagaaatcatgaagtgttccctaacaagaaacttgcaaagctatttggcaggaagaaaatcattaacttctagtttatttattttttttctcatgctatacgcttaattac

SEQ ID NO: 830838 - DNA, 120 bp, Artificial Sequence
  ENSG00000260400_11 (sequence is synthesized)
caagtaaattcacttgcataccattaccttaattcaaaggagaagccagaatgtttatcattggtgggagtaaaatatacacagattctttaccatggtgaaatagaataatactgaatt

SEQ ID NO: 830839 - DNA, 120 bp, Artificial Sequence
  ENSG00000260400_12 (sequence is synthesized)
cccaatacagaaatactaatttcataagctaatattcctatcttttagctgacttctttctctcttcaggatatatttactatttattatttacctttgaatttttgatttgggggattt

SEQ ID NO: 830840 - DNA, 120 bp, Artificial Sequence
  ENSG00000260400_13 (sequence is synthesized)
ttacctattgccatcctactatcttaagtatcctgtacaatgaaatatcttagcaaggaaacacttttaaaacttcacaaatatccaatttcattcttaacatatgggggaagcagtaaa

SEQ ID NO: 830841 - DNA, 120 bp, Artificial Sequence
  ENSG00000260400_14 (sequence is synthesized)
agaaaaagcacttcaccacgtagaagagaaagtgatcattttaattaagataatttcaattcattatcaacatttaatcctctgcaaacaagggaacacttactagcagtacttgaagac

SEQ ID NO: 830842 - DNA, 120 bp, Artificial Sequence
  ENSG00000260400_15 (sequence is synthesized)
ttgtgagttggaattgcatgttacttgaaagatctaattaagctaaattttggtgcacagcaggttgtacatgatttcatgtttatgtagcaaaatgcattgaaatgtattagtgttgaa

SEQ ID NO: 830843 - DNA, 120 bp, Artificial Sequence
  ENSG00000260400_16 (sequence is synthesized)
acatacatgtaaaggtagttgtggaaattgttatattttccttgtgtgtcatttatttagagcataaaggttttttttattcagcctaactgaataaggctaaatgaatactgtaattga

SEQ ID NO: 830844 - DNA, 120 bp, Artificial Sequence
  ENSG00000260400_17 (sequence is synthesized)
aaatatattttaaatctttgtcatgagtttttttaaaaaaaactattgcaaattgtatcattcctgattacacagaactttgtgggtggttttaaataaattttatacttctattttgca

SEQ ID NO: 830845 - DNA, 120 bp, Artificial Sequence
  ENSG00000260401_0 (sequence is synthesized)
taatcttgcagcacctcagttttcccatttctaaagtgtgctgctaccttccatgcagggcgttgaggggcttccctacgttattacgcacaaagtcctcctcacagtgcctggtgtgtg

SEQ ID NO: 830846 - DNA, 120 bp, Artificial Sequence
  ENSG00000260401_1 (sequence is synthesized)
gtcagcatttatatgcctggcaccaggccgggggctatggaggcaaatcagctgggccctgccctcacagagttgacatcacttagtacgtaaccacattgggatacatgttttgaagga

SEQ ID NO: 830847 - DNA, 120 bp, Artificial Sequence
  ENSG00000260401_2 (sequence is synthesized)
gaggacagtgtgtctggccagtgagcaacagtgggccatacgtctccagggaacccccgtggggtgtgggaggagggaagcaggtctgtcctgggggaatgtgtgggaccacctctgccc

SEQ ID NO: 830848 - DNA, 120 bp, Artificial Sequence
  ENSG00000260401_3 (sequence is synthesized)
tgcttggcagtaggtggatttcaggaccatgggcctgtgctgtttacagaaccttgtccaggtgcccagctgtgggagggcagcatggagaggaggaagagggggcccctagtagcaagc

SEQ ID NO: 830849 - DNA, 120 bp, Artificial Sequence
  ENSG00000260401_4 (sequence is synthesized)
ttcagaaacttgccacttcaggctagagagctcgcaccctcccacggcagcagggtagccatttctccctgactggggtgtccaccatggtgctctgcagccacctctcacttcattaag

SEQ ID NO: 830850 - DNA, 120 bp, Artificial Sequence
  ENSG00000260401_5 (sequence is synthesized)
agtccacagatctaggagcagaggactggtctggagctgggcaagggcaggcagcaaatggggagtttttgctgtgtgacctgaggtcacttgcctgccttctctggactgcactgtagg

SEQ ID NO: 830851 - DNA, 120 bp, Artificial Sequence
  ENSG00000260401_6 (sequence is synthesized)
gcctggagacctgttcccctgttccaatttccccacctcagtgaaggcacaaccaacagctgctccccgggcatttccaagaccctccaggcccccagctctgaggactagggtggaggc

SEQ ID NO: 830852 - DNA, 120 bp, Artificial Sequence
  ENSG00000260401_7 (sequence is synthesized)
agtgtttctccccagcatcaagtgaccagagaagtgaagtgaccccactgccgccacacagagccacacagtgcgatgtctggagctcctgcctcctgcaaggtggagggtggggcttgg

SEQ ID NO: 830853 - DNA, 120 bp, Artificial Sequence
  ENSG00000260401_8 (sequence is synthesized)
ccaggagtgaccagactacagagtgaggggtgtgcttgtgggggtgaagggttggggtgagaactgagcccgagtcgaactcatcctcctctgccctgatgcactgtgcaacttggggga

SEQ ID NO: 830854 - DNA, 120 bp, Artificial Sequence
  ENSG00000260401_9 (sequence is synthesized)
gtcactgtccctctctgggcctcgctttccccatcttcgataggacttggctctgcctggccactcctcctccaatgggggaattcctgggcttgcctctgtcttggctccagctcaggt

SEQ ID NO: 830855 - DNA, 120 bp, Artificial Sequence
  ENSG00000260401_10 (sequence is synthesized)
gtcagtctcagccctgtcccagccaggaacaatgggccaggcagggccagtcaccccctgtccctgggggctccacccacggccctggactattttcagcccttgcagatggagtcagaa

SEQ ID NO: 830856 - DNA, 120 bp, Artificial Sequence
  ENSG00000260401_11 (sequence is synthesized)
gaggattttccactcccagtacaatgactgccctggaccattgtccagcagtgacgcgggggacctgcctgccccaaaatatctcctgcccctagtttccaagcctctttgccctgctcc

SEQ ID NO: 830857 - DNA, 120 bp, Artificial Sequence
  ENSG00000260401_12 (sequence is synthesized)
tcacctcctggccctgctccttacctccccaccctgatgtcatttcctggggctcttaactcctgaaggccattgtgaaacatcacgtgagactcctgggagacacaaccagttggaatg

SEQ ID NO: 830858 - DNA, 120 bp, Artificial Sequence
  ENSG00000260401_13 (sequence is synthesized)
agttttccctcctggcagggaccccagggattgtttggctgcttagtgggactggtggcccagagagggctgtgccttacccagtcacacagcagtcagtgtgaagcttaggtgtaagcc

SEQ ID NO: 830859 - DNA, 120 bp, Artificial Sequence
  ENSG00000260401_14 (sequence is synthesized)
agggctctttggctgctcccactgcctcagccaacttcattagctccagtctgtggctcctggactggagctacagtggtgagagctcaccactgagcttcctgggatgggcacctggga

SEQ ID NO: 830860 - DNA, 120 bp, Artificial Sequence
  ENSG00000260401_15 (sequence is synthesized)
tagcagcccaagtggtgtgggtggagaggtgcagctcatgctctgaccttggagtgagcccagtgcaggggcctgaccttaaaccctttctccccactgagtcccatttttaccaaatgt

SEQ ID NO: 830861 - DNA, 120 bp, Artificial Sequence
  ENSG00000260401_16 (sequence is synthesized)
ggctgttaggaactgaatgtttgtgtcccccgccccacaaatccatatgtcaaaatcccaactgccaaggtgatggtattagaaggtggggcctttgggaagtaaccaggtcctaagggt

SEQ ID NO: 830862 - DNA, 120 bp, Artificial Sequence
  ENSG00000260401_17 (sequence is synthesized)
gcagccctcatgaatgggtttagtgcccttacagaatggaccccagagagctcctcaccctctttccaccatgtgaggatataatgagaagttggcagtctgcaacctggaagaggtccc

SEQ ID NO: 830863 - DNA, 120 bp, Artificial Sequence
  ENSG00000260401_18 (sequence is synthesized)
tcaccagatcccaaccatgctggcaccccgatcttagacttccagtcttcagaatggtgagaaataaatgtctcttgtttctaatccacccagtcggtggcattttgttatagcagccca

SEQ ID NO: 830864 - DNA, 120 bp, Artificial Sequence
  ENSG00000260401_19 (sequence is synthesized)
cgctgactgtgactgaactcagggtgacagagcagcagctctggggcaaaggggagggtgggggccacagggcagctgatgcaggagcagggctctggcacagttcagccatcaccaatt

SEQ ID NO: 830865 - DNA, 120 bp, Artificial Sequence
  ENSG00000260401_20 (sequence is synthesized)
ctgggactgcaaattcagtttcttcatctggaaaattgaactggtaataccaatacctcttttcccggtttactagacagagacaatgcagtgaggcacaaacatgcaactgtttgattt

SEQ ID NO: 830866 - DNA, 120 bp, Artificial Sequence
  ENSG00000260401_21 (sequence is synthesized)
tcctcccacccatgctccctgctcagtgacgtgtgattttcctttcccatccataaactgcgcatttggcaaactccaaacttttgagtcacttttgggtaacaaagtcaggtttaagat

SEQ ID NO: 830867 - DNA, 120 bp, Artificial Sequence
  ENSG00000260401_22 (sequence is synthesized)
ttccatcgcctgcttaattgaatgctcacctgtcctcttcccccatgctgtgaggaccttcatcactcctcttctgggtccctctctcctctaggtgttggggcagggtggggaggaaag

SEQ ID NO: 830868 - DNA, 120 bp, Artificial Sequence
  ENSG00000260401_23 (sequence is synthesized)
ggaccaatgtgtctttcctggtgatgctacagccctctcttgctgaccttgcttcctgggccatcagtgccccctgcacagaactctccaaacatcagtccacacctttgtaaaaacagt

SEQ ID NO: 830869 - DNA, 120 bp, Artificial Sequence
  ENSG00000260401_24 (sequence is synthesized)
ctctccgctaagctatcccaaaatgacctgattagagtgtgcaacgtctttcctgctgggactctgactgataccctggtctccctgagtgattttcctgcacaccctgctggggatgtg

SEQ ID NO: 830870 - DNA, 120 bp, Artificial Sequence
  ENSG00000260401_25 (sequence is synthesized)
gaagcctgtccccctcccaccccacaccccacacttggctgagatctcacagtggcaaagatgtctttgaatccatggtgcccagggttcagcgtgtagagtgaggtggggtgtgtagag

SEQ ID NO: 830871 - DNA, 120 bp, Artificial Sequence
  ENSG00000260401_26 (sequence is synthesized)
agctggggcaaggaaccctgagaagatgtcttaccccagttgtttccaggtttctttagaaagcgggctattttaccccatgtgtcctcagatttatgtcctggaaccaaattccaaatc

SEQ ID NO: 830872 - DNA, 120 bp, Artificial Sequence
  ENSG00000260401_27 (sequence is synthesized)
agcagccacatgaaaagtcccctcctctctggcgtggaattaaactgttagacctgcctttgtgaccaaagcaattgtaaaacgtgggggaggaaattaaaagcctgccaccttagtcca

SEQ ID NO: 830873 - DNA, 120 bp, Artificial Sequence
  ENSG00000260406_0 (sequence is synthesized)
agaagaaggagccgtattgcacaatgaactaccaatcatcaatccaggctctcctgtcgcttccctacatcctctaccctctccaaacttctcccctctcttgacttagcacctccgaaa

SEQ ID NO: 830874 - DNA, 120 bp, Artificial Sequence
  ENSG00000260406_1 (sequence is synthesized)
gtgatgtgaatggcaaagcttggcttgaagctgttcccttgtgcctctgtcacttcaaggcctgggacccgattcgatctaagccagttcggtctggcttcccctgaccatatgggtgtt

SEQ ID NO: 830875 - DNA, 120 bp, Artificial Sequence
  ENSG00000260406_2 (sequence is synthesized)
gggtaagaaagagctatgaggaaggtcatagaaagagtcatgaagaaagatttgcacagcccatcaggacccagggagctttgcatcttgaagaaaaataaagcacactgaaatactgaa

SEQ ID NO: 830876 - DNA, 120 bp, Artificial Sequence
  ENSG00000251173_0 (sequence is synthesized)
ggttgtggagacgggatttgttggtgggtgttccttgagtgtatggagcagtccttttgatggagtctttaattttgggcgaagtttctggaaacccatcctttcaccatcccaattact

SEQ ID NO: 830877 - DNA, 120 bp, Artificial Sequence
  ENSG00000251173_1 (sequence is synthesized)
ctaaagctcgagtctctgaagcatttgagaaaaagcacaaattcaacagatatttatcaagtgtcttctctgtgatgtggctgaagataggaatttacagcatggcaacaaagaatgata

SEQ ID NO: 830878 - DNA, 120 bp, Artificial Sequence
  ENSG00000251173_2 (sequence is synthesized)
tgcccaaaactagcagtgggagagtgatgcagccaggatttaaacccaggtagcccaaatacggcatctacaatctatctcaaatctatggcatcacagatgagctggtgtccacctttc

SEQ ID NO: 830879 - DNA, 120 bp, Artificial Sequence
  ENSG00000251173_3 (sequence is synthesized)
cctgaaggagttgaaggagcttttatagaagaagtgatatctgaactggaccttagagagtaagtaaaattctgccagataaagaatatgtaaaagtgttagtccagcctgagatttgtg

SEQ ID NO: 830880 - DNA, 120 bp, Artificial Sequence
  ENSG00000251173_4 (sequence is synthesized)
gaggtcgtgcatacaagcaagaacaagcagtctaaatggcagaattcttagccaggtgtggtggtgtgtacctgcagtcccagctacttgagaggccaaagtgggaggattgcttgagcc

SEQ ID NO: 830881 - DNA, 120 bp, Artificial Sequence
  ENSG00000251173_5 (sequence is synthesized)
actgcattccaacctgggcaacagagtgagaccccatctcttaaaataaataaatacataataaatggcagaattttgggattaaaaaataagtttaaaataaaatgatgaaatttaaca

SEQ ID NO: 830882 - DNA, 120 bp, Artificial Sequence
  ENSG00000251170_0 (sequence is synthesized)
agtaacttctcccccatcaaagagatcctctataaagaggtctggacctcagccctggatgtcatgcctcttccagacatgttcttacttgggtgctctgcaacagccctgtgggttatg

SEQ ID NO: 830883 - DNA, 120 bp, Artificial Sequence
  ENSG00000251170_1 (sequence is synthesized)
gttactccatataccttcgattcctgtattctttagaatatgcttagtatctactttaaatactccaatttgctgttcagatcaatggataaattcctctcccctgctaggattctaata

SEQ ID NO: 830884 - DNA, 120 bp, Artificial Sequence
  ENSG00000251170_2 (sequence is synthesized)
gatggaagcactaccaaagaaataggacaggctctattcattgtttattctggcttattcaacccagaagaaagaataatatgttaataagcaacattactagaatgccgtggaaatcta

SEQ ID NO: 830885 - DNA, 120 bp, Artificial Sequence
  ENSG00000251170_3 (sequence is synthesized)
agtttatactcagggatataggttccttgatcctgtgtagttaaaggcagaactaagaagtatgataaaaagtctaatgtgagtgagaagtcttctttcatcttatggctgtgcaatctg

SEQ ID NO: 830886 - DNA, 120 bp, Artificial Sequence
  ENSG00000251170_4 (sequence is synthesized)
gaatatgaagcctccaaggtcaccacagcagagatgagtcaagcaagacctagaaaaatgaaggtggtacatcaggttttcacttcctctgtgtagaaattatattctttactcttgctc

SEQ ID NO: 830887 - DNA, 120 bp, Artificial Sequence
  ENSG00000251170_5 (sequence is synthesized)
acatttccttgacacaactagttaaatgattcttatacagaaacataggatatttgatgattactaaagtttatttcatagctctaataataataaactttctagaaaagttcagctcca

SEQ ID NO: 830888 - DNA, 120 bp, Artificial Sequence
  ENSG00000251170_6 (sequence is synthesized)
aggaggcaaggattctgattctggttctggaatttcaactaactagctgtttaagggcaaccctcatctaatcaactgaaaacttgaatagaagaaaaagattgagtgtggcccatttcc

SEQ ID NO: 830889 - DNA, 120 bp, Artificial Sequence
  ENSG00000251170_7 (sequence is synthesized)
tatatgcttggagtgaactttggctacatagctggccttatttcactactctggatggtgtacatttttaaagacatctaattgacccagtgccatttcgtaaaagttctcctttcccca

SEQ ID NO: 830890 - DNA, 120 bp, Artificial Sequence
  ENSG00000251170_8 (sequence is synthesized)
tgacaatctttgggtctgtttaacaactgtctctcatgttgcattttataactcctatctttgcatcaatgctatgctgatattaattactctcattagtgttttaaataagtcttgata

SEQ ID NO: 830891 - DNA, 120 bp, Artificial Sequence
  ENSG00000251170_9 (sequence is synthesized)
tctggtagcattggttctccaactttatgttcttcttgattattaccttacctattctacattatctgagcttaactgcatgaggcaatttccatttaaacatttcctcttataaagcta

SEQ ID NO: 830892 - DNA, 120 bp, Artificial Sequence
  ENSG00000251170_10 (sequence is synthesized)
ttcagtaacttctcccccatcaaagagatcctctataaagaggtctggacctcagccctggatgtcatgcctcttccagacatgttcttacttgggtgctctgcaacagccctgttcctt

SEQ ID NO: 830893 - DNA, 120 bp, Artificial Sequence
  ENSG00000251170_11 (sequence is synthesized)
gatcctgtgtagttaaaggcagaactaagaagtatgataaaagtgtggcccatttcctatatgcttggagtgaactttggctacatagctggccttatttcactactctggatggtgtac

SEQ ID NO: 830894 - DNA, 120 bp, Artificial Sequence
  ENSG00000251170_12 (sequence is synthesized)
gtgagggaagagaagatcccggagtgtgatggctggggcaaaaaggaggcaaatatctaaaaagctaaataaaattctctaacagagaggctcttcgggatgatgaaggaaaatgcagag

SEQ ID NO: 830895 - DNA, 120 bp, Artificial Sequence
  ENSG00000251170_13 (sequence is synthesized)
cagttacaattctgaaattaatggttatttctaagaatcagtcacatttcagaacattgaccactgtacataaaaaaagtcattgtctttttaagttttttcttaaaaaactaatttttg

SEQ ID NO: 830896 - DNA, 120 bp, Artificial Sequence
  ENSG00000251171_0 (sequence is synthesized)
caaagatttactattaaaaatcctggggatgaggtcttaacacagaaaacccatctgtcgtcgctacagaggactactatgaagaaagcgcctggcataatcttggcacatcgaaggcat

SEQ ID NO: 830897 - DNA, 120 bp, Artificial Sequence
  ENSG00000251171_1 (sequence is synthesized)
tcaaaaaataccagtcgtctctcttcactccctctaactctaactcattttaacctcatttaaactttgaggaaaaagaactcaaggtcagacaaggcttggttcaacaccctgagctgg

SEQ ID NO: 830898 - DNA, 120 bp, Artificial Sequence
  ENSG00000251171_2 (sequence is synthesized)
ggtaaaggcaattgtgggaagagcggacggacctgggaagaaatctagaagccaacgagcagaacaccaaagcttgtcactgggcaacagagaactggtccaacaaagctgtcaccatca

SEQ ID NO: 830899 - DNA, 120 bp, Artificial Sequence
  ENSG00000251171_3 (sequence is synthesized)
gaaatgtgtgtcaccaggtcagagaaacaggaaatcaaggaaagacagaagagagaaaaaaagaaaagagaaagcagaaatgtgggttttgctgcaaagaaataccaaaattgtttccaa

SEQ ID NO: 830900 - DNA, 120 bp, Artificial Sequence
  ENSG00000251171_4 (sequence is synthesized)
tcagtcaaagtgaatcatctgtctaccaacatgcctcatttttcattgtctatagtggtgtccacagctagctgacacttcacatgaagattgaagaagaataaatttcattttaaatac

SEQ ID NO: 830901 - DNA, 120 bp, Artificial Sequence
  ENSG00000259368_0 (sequence is synthesized)
aaagctggggctccgacgccgtgccaggggctgtagctcatattgctctgagcaggacccgggcatccctcccactgaccctggtcgtgggcggcctgccttctccccaccagggtcccc

SEQ ID NO: 830902 - DNA, 120 bp, Artificial Sequence
  ENSG00000259368_1 (sequence is synthesized)
agtaccagcatcccatggcaggtgggcacagggccagaggatctgcccacagttcttctctggcccgaagaaacagcagagagattggaagaagaagctggcaaagccacaactgacgca

SEQ ID NO: 830903 - DNA, 120 bp, Artificial Sequence
  ENSG00000259368_2 (sequence is synthesized)
tgaccatcatgaggatgatgcccagcttgcgatagagcagcactgtggcaggcagcatgagcacgcctgccgcaaacagggctgcagcccccacggctgtggcgcagctggtctggcgca

SEQ ID NO: 830904 - DNA, 120 bp, Artificial Sequence
  ENSG00000259368_3 (sequence is synthesized)
gagagaaggccagcgccaaagccaggcccagcaccacagcaggctcagtgctcaggctgtgctgcaggctatacagctctagacggctagtgaaccaaccacggcggaggcctggaggtg

SEQ ID NO: 830905 - DNA, 120 bp, Artificial Sequence
  ENSG00000263873_0 (sequence is synthesized)
gacatgggatgttcgtttatttgggcaaatgtgtctcgttagggtcattctgaaaagaagcccagtgtgcagtcattagcccctggggtagcgttgctactaagtggttggggagaagtc

SEQ ID NO: 830906 - DNA, 120 bp, Artificial Sequence
  ENSG00000263873_1 (sequence is synthesized)
agggaagaggaagaggtggcgttccccagcctcacccgtggagaccccagcgaagcgggggcagggagggatgatgaaccctcatcctttacctccttctccaaccctccactagcgctg

SEQ ID NO: 830907 - DNA, 120 bp, Artificial Sequence
  ENSG00000263873_2 (sequence is synthesized)
catgccccaaggcctctgagggacttccacagtggtaaggagggctgccctttttatttttttttggttgtggctgagaatgctggagatgctcagttctctccctcacaaggtaggcca

SEQ ID NO: 830908 - DNA, 120 bp, Artificial Sequence
  ENSG00000263873_3 (sequence is synthesized)
caaattcttggtggtgccctcacatctggggtcttcaggcaccagccatgcctgccgaggagtgctgtcaggacagaccatgtccgtgctaggcccaggcacagcccaaccactcctcat

SEQ ID NO: 830909 - DNA, 120 bp, Artificial Sequence
  ENSG00000263873_4 (sequence is synthesized)
ccaagtctctcccaggtttctggtcccgatgggcaaggatgacccctccagtggctggtaccccaccatcccactacccctcacatgctctcactctccatcaggtccccaatcctggct

SEQ ID NO: 830910 - DNA, 120 bp, Artificial Sequence
  ENSG00000259363_0 (sequence is synthesized)
tgggattccaggcgtgagccaccgcgccgggacccaaggcccttaagttttaaggcctcattcttcagtcaggttttccctgttcccgcgtgttcggccaattttttgttgttgttgttt

SEQ ID NO: 830911 - DNA, 120 bp, Artificial Sequence
  ENSG00000259363_1 (sequence is synthesized)
tgttgttttgtttttgtttttgtttttgagtcaattttccagacatctttaattagcaatatgtttaagtagttacaagcctttccttcttttcttgtgacagtttgggttgaatttcta

SEQ ID NO: 830912 - DNA, 120 bp, Artificial Sequence
  ENSG00000259363_2 (sequence is synthesized)
tcgtttgcagcctgtcactgtaaggcacaaacatgatcacgcaagatgcgatagtagatttaagccagttgtttttaagtttgtgtttaaggagaaactaacaatgaaaacggcctcgtt

SEQ ID NO: 830913 - DNA, 120 bp, Artificial Sequence
  ENSG00000259363_3 (sequence is synthesized)
cctctggtgctgtttgagcgatccctctccccggggcctggccgcgcgctgctgtgttctggaagggctcattgtacagtcaaggcggcagggccttcttctgtcacccatgctggagtg

SEQ ID NO: 830914 - DNA, 120 bp, Artificial Sequence
  ENSG00000259363_4 (sequence is synthesized)
tcagccttccaagtagctgggactacagtcttgaggatccattttctgagacggtgatgggaaagatgttggttgtcaagtggaatctcagcagtcattttcagacaaagttagagaaaa

SEQ ID NO: 830915 - DNA, 120 bp, Artificial Sequence
  ENSG00000259363_5 (sequence is synthesized)
atctcagcagtcattttcagacaaagttagagaaaacaagtatggaagatgcctgattctcaaagagtcatccagtcttgggattaccgcctacgtccatggaagtgaaagtcctctttt

SEQ ID NO: 830916 - DNA, 120 bp, Artificial Sequence
  ENSG00000259363_6 (sequence is synthesized)
tctttgtaccacttactgagacatgctgaatgctgtttctagatttgtaaaagtgcagtgtgcattagctgcctcagtgtgacactttccttttgtgagactaaagaaattgaggtagta

SEQ ID NO: 830917 - DNA, 120 bp, Artificial Sequence
  ENSG00000259363_7 (sequence is synthesized)
ctatatggtacctcagaattgtcatcaagaagttttgaaagctaacttgagtgcatttctttgatgctcctcctagctgaaattagaacatgtataaactattatcgatatttcattagg

SEQ ID NO: 830918 - DNA, 120 bp, Artificial Sequence
  ENSG00000259363_8 (sequence is synthesized)
gaaatcttgaaatatatgataaattaagtttgtgaaattgttctgaagcaatgaatgaactctctagattaactctactaggataaaataaaatattcctatttattttcattcacaaaa

SEQ ID NO: 830919 - DNA, 120 bp, Artificial Sequence
  ENSG00000259363_9 (sequence is synthesized)
gaaggttgaggcggcggggagaggcgaagccgcgagcgctcggccgggcggtcccgccgggtggtcgcagccatgacagcggctccccttccgcgcccctcccgccggagatgagggaag

SEQ ID NO: 830920 - DNA, 120 bp, Artificial Sequence
  ENSG00000259363_10 (sequence is synthesized)
atgtccctgtcagggttaaggccaagctgaagttgctggcgtctaccttccacaagaaccaggagccgcagccgcggctcacgctccactgcaacagacgtttgtgtttaaggagaaact

SEQ ID NO: 830921 - DNA, 120 bp, Artificial Sequence
  ENSG00000259363_11 (sequence is synthesized)
cttgcaacttccacgtgcagtcctccgcaatgctgccagagcggcagctacaactctatgattgaaggcatcgccctcctggttctccatattgtttgccatcttggacagataaactag

SEQ ID NO: 830922 - DNA, 120 bp, Artificial Sequence
  ENSG00000259363_12 (sequence is synthesized)
atgagctcttttttcaacactcagagaatgttttgaattcacatttctgccatcttactcacctattcgaatcagttccctccccctcccttgtatcaaatattgtctctgataataata

SEQ ID NO: 830923 - DNA, 120 bp, Artificial Sequence
  ENSG00000259363_13 (sequence is synthesized)
cattgagttatttgtagttcctgaagaatttcatgttcttataacatgaaattttttcccacactatttgttataactagtttacctatttctgcctaaataaaatcttctccaaatttc

SEQ ID NO: 830924 - DNA, 120 bp, Artificial Sequence
  ENSG00000259363_14 (sequence is synthesized)
ctgggacgggtcagctgagcccccattctgagagtgagccctctggctgcttgttgcacactgggcttgggttgcagggctgcaggccccctcgctggctggctcctggaagcgctgtgc

SEQ ID NO: 830925 - DNA, 120 bp, Artificial Sequence
  ENSG00000259363_15 (sequence is synthesized)
tcccacaaaaagccagccaggcctgagggctcagggctcacaggtccatggaaatcagccccaggtgactccttcccacctctgcccatgaaatgtgcctcccaggctccaggtttcccc

SEQ ID NO: 830926 - DNA, 120 bp, Artificial Sequence
  ENSG00000259363_16 (sequence is synthesized)
tggaatacaggcccctggtgttcccagtgctgtacctgcagtgtctgctttgctctgaggccatggcattattgacttaaaataagctgcttgggcttttaaaaaacaaagaatctgcag

SEQ ID NO: 830927 - DNA, 120 bp, Artificial Sequence
  ENSG00000259363_17 (sequence is synthesized)
actctgtagcccttttcctttccacctgtgctggggagcatggcagtggagagggtgggcaggccgcttcctgttgcgtaggtcaggccccccccagcccgccctgctccacgctctggc

SEQ ID NO: 830928 - DNA, 120 bp, Artificial Sequence
  ENSG00000259363_18 (sequence is synthesized)
ccctctatcaagagctatttctcattttttccaagcatgaggttcaggtgtctccatcctcccaggcccccggccccctgcccagggatgccttttatgggaccatgtctgccctcaact

SEQ ID NO: 830929 - DNA, 120 bp, Artificial Sequence
  ENSG00000259363_19 (sequence is synthesized)
gggccgccctccgagttctctccattttattcccctgatgcctgaagtggtgtttgtttgtttgtttggttgtttctggagatccgaatacacaacacttggggttgaggttttttttta

SEQ ID NO: 830930 - DNA, 120 bp, Artificial Sequence
  ENSG00000259363_20 (sequence is synthesized)
gtgaagactttccagtctgacttcccttacccgaggtaggtatttattctttcctcatttcacaggactttgcaaatcccactattatggtagatagaatattaaaatctaaattgctgg

SEQ ID NO: 830931 - DNA, 120 bp, Artificial Sequence
  ENSG00000259363_21 (sequence is synthesized)
ctggcccagcccttccgtgacagtgcctttggcctcatggactgaggtttcaggaagtttgcgacagtgtctgcgggtctggacactcatgtgacatgtggaggacgtcctgcaacatgc

SEQ ID NO: 830932 - DNA, 120 bp, Artificial Sequence
  ENSG00000259363_22 (sequence is synthesized)
tgtggaaacaccctcatttgtctccagcgctggggattgcccagggaagagccgcctgttgtccattccccaggccttgtaatactttctctaactgtgcttgggggtcctggaatttgt

SEQ ID NO: 830933 - DNA, 120 bp, Artificial Sequence
  ENSG00000259363_23 (sequence is synthesized)
gtgagaaaatccatgggtccacatctgggctgtccgggtagaggggccatccgtacccctccctcactgtgatgggtggcactgcatcctctgaggactcgtatgttgaagccccgtccc

SEQ ID NO: 830934 - DNA, 120 bp, Artificial Sequence
  ENSG00000259363_24 (sequence is synthesized)
ctgtaccgcagaactggtcccatttaggttgttgcagatgtaacgagttaagacgaggccatactggagtagggtgggtccctaatgcggtgcaactggtgtccttataaaaaggggaaa

SEQ ID NO: 830935 - DNA, 120 bp, Artificial Sequence
  ENSG00000259363_25 (sequence is synthesized)
ttcggacccagagacaggctcgcacgtagggagaacaccaagtgaagatgagggcagggatggggcgagacctacaggccaaggaacacagaagattgtgacaaccaccagaagttagac

SEQ ID NO: 830936 - DNA, 120 bp, Artificial Sequence
  ENSG00000259363_26 (sequence is synthesized)
aagaggcctggagcagtccccagtcagggcccccaggaggaaccaaccctgcctcaccttgatctcagacttctcgactccagagctgtgacaagataaatgtctgctgttgaagccgca

SEQ ID NO: 830937 - DNA, 120 bp, Artificial Sequence
  ENSG00000259363_27 (sequence is synthesized)
ggtggggcctggtgggaggtgactggatcgtggaggtggatttctcatgaacagtttagcaccatcctcttggtgctggcctcctgatagtgagtgacttctcagaaaatttcgttgttt

SEQ ID NO: 830938 - DNA, 120 bp, Artificial Sequence
  ENSG00000259363_28 (sequence is synthesized)
aaaagtgtgtcacctctgtctctctcttgctcctgcttttgccatgtgatgtgtcttcccccgctttgccttccaccattagtaaaagctccctgaggcctctccaaaagccaagtagat

SEQ ID NO: 830939 - DNA, 120 bp, Artificial Sequence
  ENSG00000259363_29 (sequence is synthesized)
ggcctctccaaaagccaagtagatgctggtgccgtgtctcctgtaaagcccgcagaacctgagctaattagacctattttacttatcaattattcagtctcaggtatttctttatagcaa

SEQ ID NO: 830940 - DNA, 120 bp, Artificial Sequence
  ENSG00000259363_30 (sequence is synthesized)
tacatattttttacatttaattgtgtttatatgtatactatacataattattaaaatataaaatactttttctgatgacacacatgttacttcagtgtgcaactcattggactaatttgg

SEQ ID NO: 830941 - DNA, 120 bp, Artificial Sequence
  ENSG00000259363_31 (sequence is synthesized)
ggactaatttgggagactagaaaccacagttcctgcagtgaataattatccttttatttacatttgccagtctttgcaaaatgtcactcttttggatttgtgcttagcctgaaattttgc

SEQ ID NO: 830942 - DNA, 120 bp, Artificial Sequence
  ENSG00000259363_32 (sequence is synthesized)
tcaacatgggtcattccattcttgagatatttttatgttttatttaatgtttagttgtcacctttcttcaatttgaatttctttgatttgcccacagccttttccccttgaacatattgt

SEQ ID NO: 830943 - DNA, 120 bp, Artificial Sequence
  ENSG00000259363_33 (sequence is synthesized)
ccttaacaaaggttgcacacagcagttacacttccactttaaaatgtacagttatcctaagtgagtaataaaagtgacagaggtctctttcacctctacaataaagtcctgtcattgaaa

SEQ ID NO: 830944 - DNA, 120 bp, Artificial Sequence
  ENSG00000259363_34 (sequence is synthesized)
gggactgcgcgaggcttgggtgggaggaggcggagggcgcgtctctccggctcctggcgcggggctgactcgggggccgctggcccctcttggccgccgtcgccacgcaccgagtttgtg

SEQ ID NO: 830945 - DNA, 64 bp, Artificial Sequence
  ENSG00000259363_35 (sequence is synthesized)
tagctgggattacaggcacctgccaccccacctggctaagttttgtggttttagtagagacggg

SEQ ID NO: 830946 - DNA, 120 bp, Artificial Sequence
  ENSG00000259363_36 (sequence is synthesized)
tgtgagccactgtgcctggctgaactttcaagaagaagtttgtgtatcaattttcaaaaaactatcatatcaaaagagagctgtgtcctacatttggaaagatacaaaaactgaaccttc

SEQ ID NO: 830947 - DNA, 120 bp, Artificial Sequence
  ENSG00000259363_37 (sequence is synthesized)
tagatacagaaagttatttataaataagaccaaaaaatccttttcttgagcagtgacaggtaaagaggttgtcttggttaaccttgaaatgtgttgcccttgatcaagacagttttatgg

SEQ ID NO: 830948 - DNA, 120 bp, Artificial Sequence
  ENSG00000259363_38 (sequence is synthesized)
tggggatggtagtggagataaacttgtttgacatttgtccacttatggtaacctttgtggtggctgtcacagacaacttcatcctcacagaccttaaaattactgtaaaactaatagaat

SEQ ID NO: 830949 - DNA, 120 bp, Artificial Sequence
  ENSG00000259363_39 (sequence is synthesized)
ggaggagaaacaagggacctgaataattagatgcttagataattgtaatgtgttttcataactggtgaaaaacagcagtgttagaagcacttaaacattctatgtaaggaacactgcctg

SEQ ID NO: 830950 - DNA, 120 bp, Artificial Sequence
  ENSG00000259363_40 (sequence is synthesized)
aatttatattgtgatttttgagcaccattcactgtttaaaaactggcatattgtaggtcatattttaaagacaaatagaaaacttatcttttcaagattgatataaagcttaaccttatc

SEQ ID NO: 830951 - DNA, 120 bp, Artificial Sequence
  ENSG00000259363_41 (sequence is synthesized)
caggcagaggtggaagagaatctgtgtgtaaagcacctgcacagttcaaacccatgctgttcgagggtcaactgcattcttgaaaattgctaaaagactccattgtaagtgttgtcacca

SEQ ID NO: 830952 - DNA, 120 bp, Artificial Sequence
  ENSG00000259363_42 (sequence is synthesized)
caaaaaatagtaagcatgtaatgtcatgcatatgttaaatcagctcaatttagccattccacaatgtatacatttttgaaaacgtaatgtacacaatatatataattttgtcaattaaaa

SEQ ID NO: 830953 - DNA, 120 bp, Artificial Sequence
  ENSG00000259363_43 (sequence is synthesized)
tcagccttccaagtagctgggactacagatcagacattactttaggtgaagactttccagtctgacttcccttacccgagtcttgaggatccattttctgagacggtgatgggaaagatg

SEQ ID NO: 830954 - DNA, 87 bp, Artificial Sequence
  ENSG00000259363_44 (sequence is synthesized)
aagccattgcactcaaacctgggggacaagagcgagacttctctcaaaaaaaaaaaaaaagtttttttttcttttcttttttttttt

SEQ ID NO: 830955 - DNA, 83 bp, Artificial Sequence
  ENSG00000259363_45 (sequence is synthesized)
tatgtcccttgacagtccacgggttattacaggccccgccaccaaggctggctaacttttgtgtttttagtagagagggggtt

SEQ ID NO: 830956 - DNA, 120 bp, Artificial Sequence
  ENSG00000259363_46 (sequence is synthesized)
aagactccaagttaacccacttcatagctaatcattccagtctagacactaaatattgcagtgtcagtcaacattcccagggccagatcttacctcacacctcagggtcataactctctt

SEQ ID NO: 830957 - DNA, 120 bp, Artificial Sequence
  ENSG00000259363_47 (sequence is synthesized)
gactacattgggttctgtcctacttttctcattcttggccatgtgtattttgtcctatcctgggaacaaggagaggaggcaagagctttctcttgcatttccatgttaaccttactacca

SEQ ID NO: 830958 - DNA, 120 bp, Artificial Sequence
  ENSG00000259363_48 (sequence is synthesized)
cattcttcccagaaagccaggaaatacaatgccaatgttttccattcagtttatatttcatgtataattaacttttgtgttgaacatgaataaactgaaaatttcttgaaatagaaacaa

SEQ ID NO: 830959 - DNA, 120 bp, Artificial Sequence
  ENSG00000259361_0 (sequence is synthesized)
actcagctcccagaagttctcagagggtgagggtcccacatctcctgcaggacaggccctagctactgagtcacagaaacccagggccgaagcaaagtcccaatcccagagaggctgggg

SEQ ID NO: 830960 - DNA, 120 bp, Artificial Sequence
  ENSG00000259361_1 (sequence is synthesized)
cacacctacaactgaaaggaggcttagaaatccttcagagaccaccctatcggttctcctccacctggacaggatgagccagcaacacagaaggaagaggccttcctccgaaagacaggt

SEQ ID NO: 830961 - DNA, 120 bp, Artificial Sequence
  ENSG00000259361_2 (sequence is synthesized)
ttctaagacagccaccgatgggtcctacctcctcgtattcacatcctatgtaatctcctccccagtgtgggctggacctggtgacttgcttccagtgaatagaatatagcaaaagtgatt

SEQ ID NO: 830962 - DNA, 120 bp, Artificial Sequence
  ENSG00000259361_3 (sequence is synthesized)
atgactatgactttcctcttggctagcattctcgctaacccttcctgcttgcttgtactgagctgccctatgaagaggcccatgtagggtggcctgggtgggggtgatctgtggccaaca

SEQ ID NO: 830963 - DNA, 120 bp, Artificial Sequence
  ENSG00000259361_4 (sequence is synthesized)
gccagcaaggaactaaatcctgtttacaaccacatgagcttggaaggagatccttccccagtaaagccaggagatgaatacagccccagcctccagcttcattgcagcatcgtgagacac

SEQ ID NO: 830964 - DNA, 120 bp, Artificial Sequence
  ENSG00000259361_5 (sequence is synthesized)
ccacaagcaggactcagctaagccacagccagaattctgtcccacagaacttcaagacaactagtgctgttgcttttcagctgcagagttttgacataatttgttgtatagcaatagcca

SEQ ID NO: 830965 - DNA, 120 bp, Artificial Sequence
  ENSG00000259361_6 (sequence is synthesized)
gctagttatcaataaccactattgctcctattgtttctcaccacatatccatatagtcatgaggaaacctctttaaatgagacaaagaatcagaactaataaaagataagcaaattcctt

SEQ ID NO: 830966 - DNA, 120 bp, Artificial Sequence
  ENSG00000259361_7 (sequence is synthesized)
ttgtggagagagatcccattcaggagggctaagcttgaatccaggacttactgaggagcaatcacacagaaaaggacagacacttcgagggaagtacctcagaatgagagccttgcattc

SEQ ID NO: 830967 - DNA, 120 bp, Artificial Sequence
  ENSG00000259361_8 (sequence is synthesized)
atttactttggctcagtagctcctactcctatagcatttgggaaggaagaatgattgcctccatcccatgtaacacagctcatattatacagaaggagaatgcaaacttccttctctcaa

SEQ ID NO: 830968 - DNA, 120 bp, Artificial Sequence
  ENSG00000259361_9 (sequence is synthesized)
gcctctaaaggtggaagcaaacctaccttacaaacagcaggcttgctcctaatcagtgccgtgaagggaccaatgctgcctggtacatggagtcagtaggaggatgggcagatggccact

SEQ ID NO: 830969 - DNA, 120 bp, Artificial Sequence
  ENSG00000259361_10 (sequence is synthesized)
agcatcagtgacaatgcagcctggagtggattcaacagacaacacagacttcccttcactctcatctctgcccccaccagaggcactgagtcactggcttaactgagtcactgaacctgg

SEQ ID NO: 830970 - DNA, 120 bp, Artificial Sequence
  ENSG00000259361_11 (sequence is synthesized)
aagggaccacgtcctccttcattcactcattatctcagtcagcatatacctctatgtgtcaggcactgtcatggccgctgctccagcaatagataggacagggcccctgccctcaaggag

SEQ ID NO: 830971 - DNA, 120 bp, Artificial Sequence
  ENSG00000259361_12 (sequence is synthesized)
cttccagtccagtcagggctaccccttcaatgccacccccctgctggagagcctggatcttgggtaaggttccacatctgttactgctgtaacctggtgatgtcacttactcctctgtgt

SEQ ID NO: 830972 - DNA, 120 bp, Artificial Sequence
  ENSG00000259361_13 (sequence is synthesized)
cttggtttctttatctgatatgaaagtctcatgacttgctgaataaatgtcataacatttcatttaactcagtttataatgttgcactagtcatcagattcactgagttcttcaaaaata

SEQ ID NO: 830973 - DNA, 120 bp, Artificial Sequence
  ENSG00000259361_14 (sequence is synthesized)
tagctctttggcaaaattcattgttaaaaaataaataagccattgtaagcaatttttataaatttagtttgtttttattcattctaaaccatgggatgccctttggacataatacaataa

SEQ ID NO: 830974 - DNA, 120 bp, Artificial Sequence
  ENSG00000259361_15 (sequence is synthesized)
tgattctagggttcttagaaacatgctatttgtttccttccttatccctctggatgtgaagtaaaataataacttaaataacttgaagtaaattatactttaaaaagaatctcagccagg

SEQ ID NO: 830975 - DNA, 61 bp, Artificial Sequence
  ENSG00000259361_16 (sequence is synthesized)
acaaaaattagccaggcatgctggtgtgtgcatataatcccagctgctctggaagctactt

SEQ ID NO: 830976 - DNA, 120 bp, Artificial Sequence
  ENSG00000259361_17 (sequence is synthesized)
cactccactctagactagtcaacagagtgagactccatctaaaagaagaagaagaagaagaatctcagatttataagatgagagattcagaaatatttggtttccaagatctaggcatat

SEQ ID NO: 830977 - DNA, 120 bp, Artificial Sequence
  ENSG00000259361_18 (sequence is synthesized)
ttggtttcagcacccaaaactttggacagcagcctcctcattctctcctggtagaactgacttgagagaaagcctggttagggctaactgattcttaacatctctctttaaccaaggtca

SEQ ID NO: 830978 - DNA, 120 bp, Artificial Sequence
  ENSG00000259361_19 (sequence is synthesized)
tctcaattctaggaaggagagtgtgcccctggctcagataaaccagtgagagttgaagggtaccaaggacaaggtactcagatgacaaggctaaggggaaagctgcactgtgggcagcag

SEQ ID NO: 830979 - DNA, 120 bp, Artificial Sequence
  ENSG00000259361_20 (sequence is synthesized)
gaagtaactggacccacatcagagctaacagcaaatattcacaccataactccgaattctcagatcccaggtagactctgacttcctcagaatcccactgtgatgtctgagcctcagagc

SEQ ID NO: 830980 - DNA, 120 bp, Artificial Sequence
  ENSG00000259361_21 (sequence is synthesized)
aaggcttggatgccacagtgggctctcctgcttagttgtagtttgagtcactcctttgctcttttgcaccatttcagctaaatcctgtgcatggggtgtgggggtttctttagaccttga

SEQ ID NO: 830981 - DNA, 120 bp, Artificial Sequence
  ENSG00000259361_22 (sequence is synthesized)
gccgaagctagaaaccagatttcaaaaaattctgtgagcagcattgagaagctataccagggagaagcaaggaccaggcttttcagtcaagcataactgagctattaagacacaagagac

SEQ ID NO: 830982 - DNA, 120 bp, Artificial Sequence
  ENSG00000259361_23 (sequence is synthesized)
tcaggcgtctgcctgtccgcatcaatctaaggaaaactcagcacacattgctgcagcaagcagaggtttggacatgggatgggctgttatactgtgcataatttaaccaacacatgtcgg

SEQ ID NO: 830983 - DNA, 120 bp, Artificial Sequence
  ENSG00000259361_24 (sequence is synthesized)
tggctgaatgctacaaaatccacttcttgctcaagtcttacatgaccagtagggggtcagcagggggctcttctccacatgtctttcaaggaccctgatggaggctgatggaggttctac

SEQ ID NO: 830984 - DNA, 120 bp, Artificial Sequence
  ENSG00000259361_25 (sequence is synthesized)
cacagcatggctgcaccgtctggaatccatggccttctgggtcacctggcagggaaaggaggagatgaggagcctttggactggcaattaaatgctgcagcctagaagggacacactcat

SEQ ID NO: 830985 - DNA, 120 bp, Artificial Sequence
  ENSG00000259361_26 (sequence is synthesized)
ttcctttcacaatctattaatcagaaatagtcaaaagtgatggtccccaaaaaaaaggaagagctggctgtggctgagcactagaagattctgccacagtccctgctatggatgagtcct

SEQ ID NO: 830986 - DNA, 120 bp, Artificial Sequence
  ENSG00000259361_27 (sequence is synthesized)
cctccccttctgagaccactcgtttcttcctgcatatttactgtacaaaaatattataacaatacaaggaataaaaatggaaaggaagccctccgcaattccatcactctaacaaatcaa

SEQ ID NO: 830987 - DNA, 120 bp, Artificial Sequence
  ENSG00000259361_28 (sequence is synthesized)
aagaaagatggacacatggcagagtcttaaagtcaaagaagtattctgtaagcataattcttcctatgaatgccttctctataaagaggttgaagcaaggtatagaggccagaagaggtc

SEQ ID NO: 830988 - DNA, 120 bp, Artificial Sequence
  ENSG00000259361_29 (sequence is synthesized)
attgtctccaaatagcaagcaagacctctccgaggctaactttgtgcagtctgtaggtgtattcatgccgtggctcaaatctttaaatccaactttaaagatatttttatccttattcaa

SEQ ID NO: 830989 - DNA, 120 bp, Artificial Sequence
  ENSG00000259361_30 (sequence is synthesized)
tggacggactgggtatgcagaagagactctctgactgcagactcggctgccacacatagaaatgtctgctccctggaccctcagactgcctcggtccctcccccgtgaaacccactccac

SEQ ID NO: 830990 - DNA, 120 bp, Artificial Sequence
  ENSG00000259361_31 (sequence is synthesized)
catttccacgcacactcccatgctgtcaccctcaggaagcatcatgacagcttgatgctggcagcaactgtccatgaagaggggaagagtgacaatgcaggaaagagaagaagactcaag

SEQ ID NO: 830991 - DNA, 120 bp, Artificial Sequence
  ENSG00000259361_32 (sequence is synthesized)
acacaaagtcctcagggggcgagggtcacctccttctaccaggccagagagcagaacgtgtgggaacaagggcaggcaagctcgtggaggtggtggttgaaaggtgagaattggaatata

SEQ ID NO: 830992 - DNA, 120 bp, Artificial Sequence
  ENSG00000259361_33 (sequence is synthesized)
atttccatccagggaaggaagtgtcccctttagagtaacaacaccttgggcacaccattaacaaatgacagacttgggctctgctgctcagagaactgaagtcagaggatagcacatgca

SEQ ID NO: 830993 - DNA, 120 bp, Artificial Sequence
  ENSG00000259361_34 (sequence is synthesized)
ccaaatccatcatcagatgacacttgaacatgcctctcaaaggatgagattaggcaagatcatctctctaccaaaccctcttctctcacttcccaagaagagagattgcctggccctgct

SEQ ID NO: 830994 - DNA, 120 bp, Artificial Sequence
  ENSG00000259361_35 (sequence is synthesized)
tgaatgtcatgaacaggtgtgctggggggtctagtctggaccaggtagctcccaccaggacagagctgccaactgcacatggagaccctgaagcttttttggcctttaaccagctcctga

SEQ ID NO: 830995 - DNA, 120 bp, Artificial Sequence
  ENSG00000259361_36 (sequence is synthesized)
gctgctgcaactcacagagaaaggaaatagcataatgggccaatgacaagttatataatttggttgaaacttcaaacaacaggacccatatggataggaaattattttaaatggactcaa

SEQ ID NO: 830996 - DNA, 120 bp, Artificial Sequence
  ENSG00000259361_37 (sequence is synthesized)
atgtctaatttacataatctatgtttcttgttcatatttgcacccagtgggtggttatatgaatatttgaatacttgatgactgattaatagaatataatttgccaggacccttcactgt

SEQ ID NO: 830997 - DNA, 120 bp, Artificial Sequence
  ENSG00000259361_38 (sequence is synthesized)
tgagaagggtttgaacgaactgcctttttttttcttaccccatatatggaagaaagtaaaaaagtttcagaatgagtttaggataattatactacatcttaaatgtttacatttaccaaa

SEQ ID NO: 830998 - DNA, 120 bp, Artificial Sequence
  ENSG00000259361_39 (sequence is synthesized)
acgacacacaaacgcaacacatcttatgtataagcctcatttggagtccgtgtccaaggtcctctgtgaggtccttggtgaccctggtcctgacattcatcctcccctacatgtcagggt

SEQ ID NO: 830999 - DNA, 120 bp, Artificial Sequence
  ENSG00000259361_40 (sequence is synthesized)
ctgttatttacatcttacagtttggctacaaatcctccagctaaaactcttaccagatcggccatcagaagaccaagcatgactccccaccctcaactttgttcctccctcaacgcgtca

SEQ ID NO: 831000 - DNA, 120 bp, Artificial Sequence
  ENSG00000259361_41 (sequence is synthesized)
ctttgggcagcgtattccctgggcctggaaaaggaaaggattgcctttcgatgaaccccagcaacgtaactaagttcacttttgactcctgataggctttttcatcaagaattttaattt

SEQ ID NO: 831001 - DNA, 120 bp, Artificial Sequence
  ENSG00000259360_0 (sequence is synthesized)
ctcttttattggtcctccacatttggtaggatcagaaattcagatccaaggcatcagccaggaagtcaaaggaattcaagtctaggaagtcagaattttggaagagatgggttcagacgg

SEQ ID NO: 831002 - DNA, 120 bp, Artificial Sequence
  ENSG00000259360_1 (sequence is synthesized)
tggatgtacacttatcaagccctgagtggagtaagattctggagagattcagcaggatggtggctggaaatgaaaaaacagcaatggaaatttttccagaggaaaaaaatctcaacaaac

SEQ ID NO: 831003 - DNA, 120 bp, Artificial Sequence
  ENSG00000259360_2 (sequence is synthesized)
aaagcaaggaaatgctgaagtttcatctgaatgagttattccacactaaatattcttaattagtatcacagaaagcatggaaaacaggttaattatttacagaaataaaacaataaaatc

SEQ ID NO: 831004 - DNA, 120 bp, Artificial Sequence
  ENSG00000259360_3 (sequence is synthesized)
acctctaacaagcatgcatatagtatatcaatgtacaatttctgctggaaaagcaaatcctctccaaattaggagttcagaaagactctgagagaaaaataagactcttgaataactagt

SEQ ID NO: 831005 - DNA, 120 bp, Artificial Sequence
  ENSG00000259367_0 (sequence is synthesized)
aaagaacaagttgccttttttgtgacaaacaacactgatccaatccaagtatgtttttgagcatcacaaggccctgcgcttatggatgccatgacatctctacataacttccaacaccag

SEQ ID NO: 831006 - DNA, 120 bp, Artificial Sequence
  ENSG00000259367_1 (sequence is synthesized)
ttgatctgaatccgcatacaggtccactaacccctttcagatgcaatcctactggccctcactgaactaaatctctgtctcagtcttgctttgtccttcttgagcttgacattgttgaaa

SEQ ID NO: 831007 - DNA, 120 bp, Artificial Sequence
  ENSG00000259367_2 (sequence is synthesized)
gatctctgccttccagactcctctctattaaaactctcaaaggggtcaaaaacaatgaattaaaaagaaatcaagcagaatccaatgccttgaactgactgagaacttgctgataacttc

SEQ ID NO: 831008 - DNA, 120 bp, Artificial Sequence
  ENSG00000259367_3 (sequence is synthesized)
agagtgctggaaagatgaatgtagaactcataatataaacaataaataccacctaatgctatactttgtgcagatcttgactgaaagagaagcaaacaccgtttccatcactggcaatga

SEQ ID NO: 831009 - DNA, 120 bp, Artificial Sequence
  ENSG00000259367_4 (sequence is synthesized)
ctccagtaaaaaaataaagaataaactggctaagcataacggccgatacacgtagggaaaaaaacccaagaaggcaataaaaatccagtatatactttgccaggaagagggagagaaaga

SEQ ID NO: 831010 - DNA, 120 bp, Artificial Sequence
  ENSG00000259366_0 (sequence is synthesized)
ttttttttttttttgcttgtgcttattaaatagcaagggtcatctgtcaggatgttgtggtggtgtgtgatcagagcagagggcctttcttttcctgtactgtgctctacttccttatgc

SEQ ID NO: 831011 - DNA, 120 bp, Artificial Sequence
  ENSG00000259366_1 (sequence is synthesized)
atgcttggtttcaaagatgaccgccactttaaaagaaagatttcctcacagctctccagagaactatcatactaaggtgataggaaaggcttctcggatacaagccaacaagtcagtttt

SEQ ID NO: 831012 - DNA, 120 bp, Artificial Sequence
  ENSG00000259366_2 (sequence is synthesized)
gataagctactgtcttgtgatcttgcagggccagtggttgactcatctctgaaaggtaacttcgttcatatctatgtattttcaaacctggaagcttgtaaattggaagtttcagtatta

SEQ ID NO: 831013 - DNA, 120 bp, Artificial Sequence
  ENSG00000259366_3 (sequence is synthesized)
gctttattattctttcttggtgaggaatagaaatggcagcaaaaagaaagccaacaatctgaaaactccagtctcctctaacactggctttgttttaaatcaagatgggaagagatacat

SEQ ID NO: 831014 - DNA, 120 bp, Artificial Sequence
  ENSG00000259365_0 (sequence is synthesized)
tgaggaagcccacattcttcttactgcatgcttcctggtgcttacagtgggcaaggctctgtcaaccacaagccatcttctgtaggaaaaaaaggagaggggacttgtaggttaatataa

SEQ ID NO: 831015 - DNA, 120 bp, Artificial Sequence
  ENSG00000259365_1 (sequence is synthesized)
ctgaggcgtctgagtaggtggcttcaggtatggctctatccagggcctctctatctcatcttatcacagcttcatggagccgtagcttccatggagagagaagtggagtgatgggccaga

SEQ ID NO: 831016 - DNA, 120 bp, Artificial Sequence
  ENSG00000259365_2 (sequence is synthesized)
ttctttcccactctcccagaggaaactaagaaaaaagtgaaatgtaagcactgctgccgaagctgcctttgccccacgaccaccgtctcgtcccagctcatacctcacggggtcagatag

SEQ ID NO: 831017 - DNA, 120 bp, Artificial Sequence
  ENSG00000259365_3 (sequence is synthesized)
cttcagtcttccagcgagagaaatcctggtgccccaggcacctggggagaagctcacagttactgtggctattgtcgctgttggtttgaactttctaataaaactgtatctgtggccagg

SEQ ID NO: 831018 - DNA, 120 bp, Artificial Sequence
  ENSG00000259364_0 (sequence is synthesized)
aaaagatgtcaagaaagctctcactggagaaaaccagtctgattgtctccagctctgacacagctgccaggaaggatagtggctggctggtggacatccaggccaaagacccagagaacc

SEQ ID NO: 831019 - DNA, 120 bp, Artificial Sequence
  ENSG00000259364_1 (sequence is synthesized)
acaggttgaatcccaaatcctcagaagtgtactctaaagacagtaaacaggccaccttcacctcaggggcatcaggatctcaaaatcgagggggaggtcaggcccagctaaactgtcata

SEQ ID NO: 831020 - DNA, 120 bp, Artificial Sequence
  ENSG00000259364_2 (sequence is synthesized)
caagcagagcacaaccaaggctggagtgcagtggcgcaatcatggatcatggtagcctcgaactcccagactcaagtgatccttccacctcagcctccccagtaactgagactataagcg

SEQ ID NO: 831021 - DNA, 120 bp, Artificial Sequence
  ENSG00000259364_3 (sequence is synthesized)
cgtgacaccatgcccagctaaaaccacaactggagctgagttaagcattgtcctcctctgcattctctcttggaataacccctcccatccatgaaaggaataaaacacttgtcatgagca

SEQ ID NO: 831022 - DNA, 120 bp, Artificial Sequence
  ENSG00000226304_0 (sequence is synthesized)
agtcaccaaccctctacttggtcctttgcaatcctttccagaccttctgtggtctcctgtcacacagggctcacctggggggaccctgatggccagattctcttgaacagtctctaggga

SEQ ID NO: 831023 - DNA, 120 bp, Artificial Sequence
  ENSG00000226304_1 (sequence is synthesized)
catattgggtattgctataccttcatccattgaacagttttccagtggctccataatatgtgatatcacaacagattgaatgcagaaacagaacaaatgaagcatccattaacttcgaat

SEQ ID NO: 831024 - DNA, 120 bp, Artificial Sequence
  ENSG00000226304_2 (sequence is synthesized)
atcagatgctagggtgtgaggaattttcaggccaaaatgcactgggttattgtctcctattgacagtgtgatattacagataacctctaggagatcctgaacatattcaggctaaaccag

SEQ ID NO: 831025 - DNA, 120 bp, Artificial Sequence
  ENSG00000226304_3 (sequence is synthesized)
gcaaacaaacattcaggatgttaccagtgtggaaaacccctaggagagacagccaaaattaagactgatggagaaatttcccccagcaataccacttaaaaatatgtattttttacttta

SEQ ID NO: 831026 - DNA, 120 bp, Artificial Sequence
  ENSG00000226302_0 (sequence is synthesized)
aaatgagtttcttcacatgctgagagcagtgctcctcagacagtaacatgcacacgaaatatgtgaggatcctgttaaagcacagattctgattcagcaggtctggggtggggtctgaaa

SEQ ID NO: 831027 - DNA, 120 bp, Artificial Sequence
  ENSG00000226302_1 (sequence is synthesized)
aactatgtttcttacaagcttctgggttattccagtggtgctgatccaaggaccatactttgtgtagcaaggacttagaagcctgcctcacttagtgaatgttacatgtggtagctataa

SEQ ID NO: 831028 - DNA, 120 bp, Artificial Sequence
  ENSG00000226302_2 (sequence is synthesized)
agggattcatgtccccatttacaagtaagagatttgaggctcagggggtaactcagagtgaccaactgtccaagtttgcttgggattttcctgggtctagcactggaagtcttgcatccc

SEQ ID NO: 831029 - DNA, 120 bp, Artificial Sequence
  ENSG00000226302_3 (sequence is synthesized)
aagaatcccctcagccccagacaaactaaaaggggttggtcaccctagaactaataagtactctactggaattcaaagccaggtctctgaattccaaagatgtattctttcctggagact

SEQ ID NO: 831030 - DNA, 120 bp, Artificial Sequence
  ENSG00000226302_4 (sequence is synthesized)
agcactgcctcgaggctaaacagaggagggatatatgctcatacactgtaagagattgtctccaaaggtgccccctcagcccccaatgaataatgcctctcagtacttatgtctttatat

SEQ ID NO: 831031 - DNA, 120 bp, Artificial Sequence
  ENSG00000226308_0 (sequence is synthesized)
gtttactgagtgcccacggggtgcctagagcctggcgggacgtcgcggggatgcggctggaggaatcggagccggccctgccctctcggcactcgcggtccggaccaggaaggcggcccg

SEQ ID NO: 831032 - DNA, 120 bp, Artificial Sequence
  ENSG00000226308_1 (sequence is synthesized)
agcaggacgggtgggctgcggaccgcggtgggaaaagttgggggagcgcggaggtggcgcggaaatagaaggcttcctggaagcggtgacccttgagccggtcttgcccctcagtccctg

SEQ ID NO: 831033 - DNA, 120 bp, Artificial Sequence
  ENSG00000226308_2 (sequence is synthesized)
tatccttttaagccagccacgctgacccctccgcgcctccctgaagccgttgccagcctgtctctgcgctcgccattccctccgcctggacctctccccactcaccacctcccgccccca

SEQ ID NO: 831034 - DNA, 120 bp, Artificial Sequence
  ENSG00000226308_3 (sequence is synthesized)
cccactcaccacctcccgcccccatcagacgctgctttctcctcccagagacctccaagacctgccaagctgagagtctccctaagtcactgaggctggagtacagtggcatgatctcgg

SEQ ID NO: 831035 - DNA, 120 bp, Artificial Sequence
  ENSG00000226308_4 (sequence is synthesized)
ctaaaaataacttttttaaaacaaacataaattttaaaataacttcttttaggcagtccattccatggaattggtggcactgacctcatctgatgtcccagaaagctggccacaaaagtt

SEQ ID NO: 831036 - DNA, 120 bp, Artificial Sequence
  ENSG00000226308_5 (sequence is synthesized)
tccatcccccatgacagacaaacagttctactctggggcaattctccctgtgtccagaccacaaacgcccctgcctgtttggtgcatctcagcagcagaaaatcaccaaccacaaagctt

SEQ ID NO: 831037 - DNA, 120 bp, Artificial Sequence
  ENSG00000226308_6 (sequence is synthesized)
tcaggaccggcatttaaaatcaacccaaagacactccccttccacatgctctgggctccgtgcgatctttcatagcgcagctccacgctcctcctcgcagacgagactggcattcaaacc

SEQ ID NO: 831038 - DNA, 120 bp, Artificial Sequence
  ENSG00000226308_7 (sequence is synthesized)
aggaattcttctgaggggctctgtgtgcaggaatacaatcacctcaagctcgtgtaagaagaagagagctccagttaccagggcttccgaaggcttttaatagaaaacatttgtgccaaa

SEQ ID NO: 831039 - DNA, 120 bp, Artificial Sequence
  ENSG00000226308_8 (sequence is synthesized)
aattgaggctcaaatacttgagggaacctgcccaaagccacaccaatgctgcggccctaactcagtccagtgtggttcctgacttctcatccacctccgtcatgagaccatctgccacag

SEQ ID NO: 831040 - DNA, 120 bp, Artificial Sequence
  ENSG00000266729_0 (sequence is synthesized)
gctctggactttgtttttggaggtagcctgtgatgcagggcagaaaagagctgatgccttggagagagactgggagaggctggagttaatagagggtcccagggtatccaagaagctgtc

SEQ ID NO: 831041 - DNA, 120 bp, Artificial Sequence
  ENSG00000266729_1 (sequence is synthesized)
atccaggtcttctccaatgaagctacaacaacccacagagccagcaggggaacctacaccttcgatgtcatatatgagcaaacagtcattagatgggcgtccttcatcttcatctgcatg

SEQ ID NO: 831042 - DNA, 120 bp, Artificial Sequence
  ENSG00000266729_2 (sequence is synthesized)
gactctgggtctgttctacaaaattaaagctttctcagcacaaaaaacagcatagactgtgagtgatggcggccatcttggttcatgtgtaaagactgaatttcagtgactaccaacggc

SEQ ID NO: 831043 - DNA, 120 bp, Artificial Sequence
  ENSG00000266729_3 (sequence is synthesized)
tatttcttagaatgtggcacttaccctgggttcaggctgtggtccttctactgcccatgaatgaattgctccatctgaacattcgggaacaggctcaaagccagctgcactacgaggagc

SEQ ID NO: 831044 - DNA, 120 bp, Artificial Sequence
  ENSG00000266729_4 (sequence is synthesized)
acctccacaatcacaacagatcatcaaaaatgggaccactggtggtggagggatagtaatactagagttagcactgggtgcaaataaaaaacaaaacaacctgattttttatggttaaat

SEQ ID NO: 831045 - DNA, 120 bp, Artificial Sequence
  ENSG00000266729_5 (sequence is synthesized)
gccctttaggggagagaagagtgtggagggaggaatcggggaagcccagtgccgtactgatgctctggactttgtttttggaggtagcctgtgatgcagggcagaaaagagctgatgcct

SEQ ID NO: 831046 - DNA, 120 bp, Artificial Sequence
  ENSG00000266729_6 (sequence is synthesized)
tggagagagactgggagaggctggagttaatagaggtgcccacgcacccaaagggccagctcctgcattttttcacttcaccgatgccaaagccactttgcccacctttgcagcagacgc

SEQ ID NO: 831047 - DNA, 120 bp, Artificial Sequence
  ENSG00000266729_7 (sequence is synthesized)
ttgcaacatgactttttcagcacagcaacaggaaaatttgactctgggtctgttctacaaaattaaaggtgatcaaagacacttttaaaaaatataatctctctaaattcaaagtaaaag

SEQ ID NO: 831048 - DNA, 120 bp, Artificial Sequence
  ENSG00000266729_8 (sequence is synthesized)
attgataaataaacaaatcctgttgctgctcaccaagaggactgcttaacagatttacccatgtgagaggtggctcgcttacaagttaatgcccacgcacccaaagggccagctcctgca

SEQ ID NO: 831049 - DNA, 120 bp, Artificial Sequence
  ENSG00000187013_0 (sequence is synthesized)
cttcctcctccactcccccgccgctgctgtggagaaccggagccaccggtatggcctggccctgccctcccgaaggccgcagctcccgggcccgcctccccagctgaccgcgaactcctg

SEQ ID NO: 831050 - DNA, 120 bp, Artificial Sequence
  ENSG00000187013_1 (sequence is synthesized)
cgtggggtgctcctggggcgggaggggcgcgctcagcctcgctctccccgggactctcacgctcaagcgccccggcttgaggccgggaccccctatttcccggttatgggacggcccctt

SEQ ID NO: 831051 - DNA, 120 bp, Artificial Sequence
  ENSG00000187013_2 (sequence is synthesized)
gagggacagcctctacgagccctggatttataccccgagcctgccttcctccgctctgggaaggacccaaaatccagtcccgcttcctccccctccttcgctgtccttggccccgaggtg

SEQ ID NO: 831052 - DNA, 120 bp, Artificial Sequence
  ENSG00000187013_3 (sequence is synthesized)
cggagcaccggcggtcaggcgggatcccgcaggaggccgagcgctccctgctcgcaggacagggcggcagcggagggagcccccgccctcttgggaggaagcccgagctccgggtctcct

SEQ ID NO: 831053 - DNA, 120 bp, Artificial Sequence
  ENSG00000187013_4 (sequence is synthesized)
gggcaccctcccgggagcgccttcggggtggaggctggttgccgggcgctgaacgtgtccgagcacgcccggggcggttttgcacttggacttccttttgggctctccggaggcgcatat

SEQ ID NO: 831054 - DNA, 120 bp, Artificial Sequence
  ENSG00000187013_5 (sequence is synthesized)
ctgttcctcctattggatggggccggggaccccaaacccactccggaagcaccgatttccagcgctgacggccgcgcctggtttcccagcgagtcctcttggcagctcccgcagctcccc

SEQ ID NO: 831055 - DNA, 120 bp, Artificial Sequence
  ENSG00000187013_6 (sequence is synthesized)
cagggcccgggccgcggcctcacagcccgcctcgggcgagagcgggagatagactgcggaccccggcaagcggggcacggaggcacagccaccgacacaggcagagccgggtccggagcc

SEQ ID NO: 831056 - DNA, 120 bp, Artificial Sequence
  ENSG00000187013_7 (sequence is synthesized)
cggcacaggccgccgagggaccgagggactccggggctgcggacacactgagcggagggcttgaggctcggggtggggccttctcccctgctgccagaaccgcccggcagcgccagctcg

SEQ ID NO: 831057 - DNA, 120 bp, Artificial Sequence
  ENSG00000187013_8 (sequence is synthesized)
gcgaccttccaggctgctgcagaccccagcttgtcctcttctgcgcgcccgcggggctgggccctcgcgttctctctgcgggaagtgagccgccggcctccggcctcctgggcccctccg

SEQ ID NO: 831058 - DNA, 120 bp, Artificial Sequence
  ENSG00000187013_9 (sequence is synthesized)
aagggggctgtggctggcatccgcagcgcgcggggcgcacggccctaggagcgcggggcccactcgacggtgaggacttacgggcgggataggggaaggatcggcggggatccagcgctc

SEQ ID NO: 831059 - DNA, 120 bp, Artificial Sequence
  ENSG00000187013_10 (sequence is synthesized)
ctccagcggagagggccccctcggctccgacccgccctcctcaccaccctcatccggctcttcagggcggggtcttcagggtcgagggcaggatgtgccctgtggagctgctcacctaag

SEQ ID NO: 831060 - DNA, 120 bp, Artificial Sequence
  ENSG00000187013_11 (sequence is synthesized)
ttcctgcctccataggggaggctttgggctgcgttattccagcgggaggtggtggggactggggagggcccaggggtcagcctgagaatctcgcccttggattaaaagccaccaatgctc

SEQ ID NO: 831061 - DNA, 120 bp, Artificial Sequence
  ENSG00000187012_0 (sequence is synthesized)
ggacaggcgatggagacggggatcagatgggagggtgacctggtgagagattttccagctggcagaaatgtcctctaccttgagggaggcgtgtgacatgggagttctgtttaaagagga

SEQ ID NO: 831062 - DNA, 120 bp, Artificial Sequence
  ENSG00000187012_1 (sequence is synthesized)
gaatggatggttacacatcctgcttgggatccaatcactgaaccagaggggaacaccgtgcatgatgggctgccctacccactttacggatgaggaaatggaggctcgggagatgaagct

SEQ ID NO: 831063 - DNA, 120 bp, Artificial Sequence
  ENSG00000187012_2 (sequence is synthesized)
gcagacttcctctggaacttcctctggacatctggagggacgtcctgtcagcagagcaggctggactgcttcacaaagaggatgcagccccacctcccagcgggagtcagttctgctctg

SEQ ID NO: 831064 - DNA, 120 bp, Artificial Sequence
  ENSG00000187012_3 (sequence is synthesized)
agacgtgaggctcagaatcagatgaagactcctgctgctgcatcttgaagataatgatgctgttgctcccggctggaaccacagcagtggcgatgagtgaacagccagcagagtggagcg

SEQ ID NO: 831065 - DNA, 120 bp, Artificial Sequence
  ENSG00000187012_4 (sequence is synthesized)
agggaggagggggagagggatgcagagggatgaactgagtggcctgagtctcagcacagctgtggccatgggctgcctccatgtccaggaacaccaggtctgccatgcaccacccacctg

SEQ ID NO: 831066 - DNA, 120 bp, Artificial Sequence
  ENSG00000187012_5 (sequence is synthesized)
cccccatgtttgcacagggcaccggggaagaccttcagccctactgggctaccccttgagtaccctctcctcccacattggaaggtcttctgcttcctggagcttggcctgcctcgggag

SEQ ID NO: 831067 - DNA, 120 bp, Artificial Sequence
  ENSG00000187012_6 (sequence is synthesized)
gaggagaaaatggtccatgtccccagagagcccatgatgtgccggcctaggtgagcactcttcgcacctcatgccatggaacttttgccacagccctacccactttacggatgaggaaat

SEQ ID NO: 831068 - DNA, 120 bp, Artificial Sequence
  ENSG00000187012_7 (sequence is synthesized)
acactgatacaggtgaggctccagcactgccgcagcccagggccaggcaaaaccgccttcctatcccccgggagccgaggcctccgagatcggcgctgggaggtcgcacagtgcaggcaa

SEQ ID NO: 831069 - DNA, 120 bp, Artificial Sequence
  ENSG00000187012_8 (sequence is synthesized)
atcacacggacctcagagcagggtccctggccgtgaaaactcaaaagacacagtctttaaaataaggacagaaaactgtatttagtgccacaataaagctgtgtcacaaactacccaaaa

SEQ ID NO: 831070 - DNA, 120 bp, Artificial Sequence
  ENSG00000187012_9 (sequence is synthesized)
tgctgctggccggccatgtttcagcttctcaagctcacctagtgggttacggctcatccaccaggtttccagtctccaaaatgttctgtttaaagaggagaatggatggttacacatcct

SEQ ID NO: 831071 - DNA, 120 bp, Artificial Sequence
  ENSG00000187012_10 (sequence is synthesized)
aaggaggcgtcgagctgagatgctaacaatagccaagcacgatgccggcctgattggagaggctaaaaaaagcagctcattccaaagcctcatcagggaagaaaagggccacgaaggcag

SEQ ID NO: 831072 - DNA, 120 bp, Artificial Sequence
  ENSG00000187012_11 (sequence is synthesized)
atgctgatagaaatcggaacagcacggcctgcaggggatggggaggacaggcgatggagacggggatcagatgggagggtgacctggtgagagattttccagctggcagaaatgtcctct

SEQ ID NO: 831073 - DNA, 120 bp, Artificial Sequence
  ENSG00000187012_12 (sequence is synthesized)
agacggggatcagatgggagggtgacctggtgagagattttccagctggcagaaatgtcctctaccttgagggaggcgtgtgacatgggagtgatctggcggattgcttccccggggggt

SEQ ID NO: 831074 - DNA, 120 bp, Artificial Sequence
  ENSG00000227658_0 (sequence is synthesized)
tacagattagaaaattaaggttcaggtcaattaaagatgtggagctttgcttctccatgggagaaaatttggcctagttttagatggacataccttatgccttttagagcacaaacccaa

SEQ ID NO: 831075 - DNA, 120 bp, Artificial Sequence
  ENSG00000227658_1 (sequence is synthesized)
ttaagtgtaagaccaaaagattgtctagaaaagtttgagggcagtgtgtatttggattggcacatgcatcctttgagcctaaatataagaagagaatccagagaaatatcatcattcctg

SEQ ID NO: 831076 - DNA, 120 bp, Artificial Sequence
  ENSG00000227658_2 (sequence is synthesized)
tcaaggaaaaaagtgagcactaacaggagtggtggtaagaggcccataggagaaggcataagagtcagaggggagaaggagaaaagggagaataagctgctggattgtccactcctggag

SEQ ID NO: 831077 - DNA, 120 bp, Artificial Sequence
  ENSG00000227659_0 (sequence is synthesized)
aactaaacaaaacacggtaggtctcagtgtgagagagcgcttttgttcacataggaggctgacagctatttgcgatgaggggtttttgtttgtttgtttgttattcaaataacttttttc

SEQ ID NO: 831078 - DNA, 120 bp, Artificial Sequence
  ENSG00000227659_1 (sequence is synthesized)
cccctgaggaaactgaaagggaaaatgtcagaagtatgtgattaatgattttttaaaatagatgggatctccccggttgaattgaaaagtaggtactgaaaaagaatccatttctaaatg

SEQ ID NO: 831079 - DNA, 120 bp, Artificial Sequence
  ENSG00000227659_2 (sequence is synthesized)
tcctcggaagggcagctgttcagaaacattctcaaatcatgaagataaatagaaccggaacactgatgattccatcaactgatggttccttttaatcagatcttaaagcaaagacagaag

SEQ ID NO: 831080 - DNA, 120 bp, Artificial Sequence
  ENSG00000227659_3 (sequence is synthesized)
ctgaaaacatttctagtaaataaaaagcaaagaactctgaatgcttagccgaccagaaccccggaaggagcccgcctggtactgccaggcatgactgcctttagtggatttaacaataaa

SEQ ID NO: 831081 - DNA, 120 bp, Artificial Sequence
  ENSG00000227659_4 (sequence is synthesized)
aaagaagatggcgccaaatgaccaaactacatgcgactttcccttcccgcaagaaaagtgaataaaactttccactggggctgggggaggaggcaagggaccagtccagagagataaaat

SEQ ID NO: 831082 - DNA, 120 bp, Artificial Sequence
  ENSG00000223930_0 (sequence is synthesized)
attcaccaaatgtccaattacatatcctccctgcctggaccttcagaacaatataaaactgaatgaaggctatgaaagaagtcacaggaggatttttgcagagcttccatccagttcaga

SEQ ID NO: 831083 - DNA, 120 bp, Artificial Sequence
  ENSG00000223930_1 (sequence is synthesized)
aacaaagcaattcaatacatgtcttcaagatttctaaaggcaatgacttaattctaagttccatgaaagcaggcattgtgtgaatttctcctgcatctggaactggcctagcacaccaat

SEQ ID NO: 831084 - DNA, 120 bp, Artificial Sequence
  ENSG00000223930_2 (sequence is synthesized)
agaaccatggagaattgccaagattgctgactagatgtggccaggagaaatatctcccactgagagactgggacattggaaagactataacacacctctgagtagatcttctgatggaag

SEQ ID NO: 831085 - DNA, 120 bp, Artificial Sequence
  ENSG00000223930_3 (sequence is synthesized)
acattaagagtggatgcagagaggatgcagatgctgggctgaagagagaggaagctggaaaccctgcatagtgtggctgagcctcaggacttgtacctggccctcagagactcctggggg

SEQ ID NO: 831086 - DNA, 120 bp, Artificial Sequence
  ENSG00000223930_4 (sequence is synthesized)
aagggtgagtttacaggtgaggagtggcctgctctcaccatggacccattctggtaggtccctcaacctctatgggcatctgagatggtaggaaaagctgctcagagaggtcatatgggc

SEQ ID NO: 831087 - DNA, 120 bp, Artificial Sequence
  ENSG00000223930_5 (sequence is synthesized)
aggactccagcctatgcagagcccagagtggtgggagaacagctgcagtgaagcacatccagggacggccatcctccaaggctcactgtgcttctccaggatactttagcctcaatatga

SEQ ID NO: 831088 - DNA, 120 bp, Artificial Sequence
  ENSG00000223930_6 (sequence is synthesized)
ctgttagagctagacaaagcagggcagtcttgctcgtgggatgcggcctgatgcctgatctgatgctctgttacctgctggcctctcttggggagccagtctggtcgtgcttgcttgaag

SEQ ID NO: 831089 - DNA, 120 bp, Artificial Sequence
  ENSG00000223930_7 (sequence is synthesized)
tgcagccttggatacccaacaggggtgcttctaggaaccctcatcatagctccttcaatggcagacttagctccttcaatggcagactgtgcctgattatcagagaactccagcagacca

SEQ ID NO: 831090 - DNA, 120 bp, Artificial Sequence
  ENSG00000223930_8 (sequence is synthesized)
ggccccacttacatgaaccagcccacgcacagcttcaccctatcacagccctcccgtaatgctttactgacatgcatttgctcatggccattctccatcgctgtgcttgtatgagtccac

SEQ ID NO: 831091 - DNA, 120 bp, Artificial Sequence
  ENSG00000223930_9 (sequence is synthesized)
cttgttgcttccccctgccattaacatgcaggttcactcctgtgccagcactaatgtgtgcacagatgctggcaacactgttctccccccaacccctgctaccaccgccaccaatgctgc

SEQ ID NO: 831092 - DNA, 120 bp, Artificial Sequence
  ENSG00000223930_10 (sequence is synthesized)
cggtgtgaatgcatacatggacaccagcaactccatctctgctagtgtactgcccttgctgtgctgtcatcactggcataaacatgtgcaggaacaccacctccctgctcccacagttgc

SEQ ID NO: 831093 - DNA, 120 bp, Artificial Sequence
  ENSG00000223930_11 (sequence is synthesized)
tctgtgcaagccaacatgtgtgcaccttgccacattgctgtggctgctggtatgcatgagccagcatggatcccactgccactactccagtgacatgctttgaccagcacccctccccat

SEQ ID NO: 831094 - DNA, 120 bp, Artificial Sequence
  ENSG00000223930_12 (sequence is synthesized)
cagagtgtggtggccagtggacaagaacacctcagtctctccagtgcagcagcttcctaaccttgaggggccagagaacaaggctgggggcccagtaccagcctcccagagttaaaacat

SEQ ID NO: 831095 - DNA, 120 bp, Artificial Sequence
  ENSG00000223930_13 (sequence is synthesized)
gcagcccagcagtgtagagctgagccttggctttctaaaatcttccagaaataaatgaagccagttgactgaacccatcatatgccacaatctaactcccagggcatcaaagaagataaa

SEQ ID NO: 831096 - DNA, 120 bp, Artificial Sequence
  ENSG00000223930_14 (sequence is synthesized)
aaacgatcactccatttcctcagtggtggttcttaactaggctgaaaagacagaaatgacagatatagacttcagaatatggataggaaagatgatcaagatttgggagaagattgaaac

SEQ ID NO: 831097 - DNA, 120 bp, Artificial Sequence
  ENSG00000223930_15 (sequence is synthesized)
ccaatcctaggaagctaaggaatacaataatgcaatacaggagctgaaagatgaaatggccattttaagaaagaaccaaactgatgtgatagagtgacagagctgaaaaactcactttga

SEQ ID NO: 831098 - DNA, 120 bp, Artificial Sequence
  ENSG00000223930_16 (sequence is synthesized)
gaatttcacaatacaattgcaagtattaacagcagagtagaccatgctgacgaaggactctcagatcttgaagaccagttctccaaagttaacttggtcagacaaaaataaagaaaaaag

SEQ ID NO: 831099 - DNA, 120 bp, Artificial Sequence
  ENSG00000223930_17 (sequence is synthesized)
gatataaaaagaataaacaaaacctccaagaaacatgagattatgtaaagagatcaaatttctgatgcattggcatccttgaaaatgagggagagaaagcacgcaacttagaaaacatat

SEQ ID NO: 831100 - DNA, 120 bp, Artificial Sequence
  ENSG00000223930_18 (sequence is synthesized)
ttcaagatattgtcaatgaaaaattccccaacctcgctagagagtccaatattcaaatccaggaaatgaagagaacgcctgcaagatattatacaagatgatcattcctaagacacagag

SEQ ID NO: 831101 - DNA, 120 bp, Artificial Sequence
  ENSG00000223930_19 (sequence is synthesized)
tcacctgattctctgaggttgaaatgaaagaaaaaatgttaaaggcagctaaagagaagggacaggttgcttacaaaggcaaccccatcaagctaacagcagacctttcagcagaaatcc

SEQ ID NO: 831102 - DNA, 120 bp, Artificial Sequence
  ENSG00000223930_20 (sequence is synthesized)
cagcagacctttcagcagaaatcctacaagccagaagagactgggggcttagattcagtatttttaaagaaaataaaatccaaataagaattttgtattcagccaaactaagcttcataa

SEQ ID NO: 831103 - DNA, 120 bp, Artificial Sequence
  ENSG00000223930_21 (sequence is synthesized)
cagataagcaaatactgaaagaattaccatcagatatgccttacatgaggttgtgaagggagtacaaaacatggaaaggaaagatcattatcagcaaccacaaaaacacacttaagtaca

SEQ ID NO: 831104 - DNA, 120 bp, Artificial Sequence
  ENSG00000223930_22 (sequence is synthesized)
tagaccattgatactataaagcaactacacatcaagtatgtataataccagctaaaaacatgatgacaggattaaatctgcactatcaatattaaccttaaatggcaatgggctaaatgc

SEQ ID NO: 831105 - DNA, 120 bp, Artificial Sequence
  ENSG00000223930_23 (sequence is synthesized)
atcaattaaaaggcacaacatcgcaagctggataaagaagcaaaattcatttgtgtgctgtcttcaagagatccatctcacatgaaacaacatggataggctcaaaataaagagatagag

SEQ ID NO: 831106 - DNA, 120 bp, Artificial Sequence
  ENSG00000223930_24 (sequence is synthesized)
aaaatcaaccaagcaaacgagaaacacacaaccataaaaaagaatgtattcatgtcctttgtggtgacatggttggtgctggaggtcataatcctgagcaaactaatcaggacagaaaac

SEQ ID NO: 831107 - DNA, 120 bp, Artificial Sequence
  ENSG00000223930_25 (sequence is synthesized)
caaatactgcatgttgtcacttataagtggaagctaaacactgaatacacatggacacaaagaagaaaataacagaccctgaggcctacttgagaatgggaggagagtgaggattgaaaa

SEQ ID NO: 831108 - DNA, 120 bp, Artificial Sequence
  ENSG00000223930_26 (sequence is synthesized)
actatctattgagcactatgcttattaccttggtgaaaaaataatctgtgcagcaaatccctgtaacatgcaatttacctataataagcctgtgcatgtacctctgaacctaaaatgaaa

SEQ ID NO: 831109 - DNA, 120 bp, Artificial Sequence
  ENSG00000223930_27 (sequence is synthesized)
cctctgaacctaaaatgaaagttacaaaaagaaaaaaaaagaaactatacaaaatatatttgtaggaaaaatgagtaaagtgaattcagtgttaaactctttgatgattattattaaaat

SEQ ID NO: 831110 - DNA, 120 bp, Artificial Sequence
  ENSG00000223930_28 (sequence is synthesized)
ggctatgaaagaagtcacaggaggatttttgcagagcttccatccagttcagaaacaaagcaattcaatacatgtcttcaagatttctaaaggcaatgacttagtgttgaaaagctaatt

SEQ ID NO: 831111 - DNA, 120 bp, Artificial Sequence
  ENSG00000223930_29 (sequence is synthesized)
cacagctccccagctgcctacttgtggggacagctttcttcggctgcaggcagtaattgctttactgctatcctaaattgccctggagaagaaagcaaagctttgcttgctttatcctgt

SEQ ID NO: 831112 - DNA, 120 bp, Artificial Sequence
  ENSG00000223930_30 (sequence is synthesized)
acaagattttgaagacacgccctagtgtacattttatctgcactggcctcatgaggaaaatcaaataagattatcttacattacaaaattttcttgcatactttatgcaacagtggaaac

SEQ ID NO: 831113 - DNA, 120 bp, Artificial Sequence
  ENSG00000223930_31 (sequence is synthesized)
aacacaggattggaattagaagacctggttttaaataccaaattgttccccagaatgatctgatcctactgcttagcctatctggatgtcagtttctacatctctaaaaggaaggtgtgc

SEQ ID NO: 831114 - DNA, 120 bp, Artificial Sequence
  ENSG00000223930_32 (sequence is synthesized)
cagaggaaagtacgaatgagcagaaggtaagggaacattatatttccttccaggttgttgagactaggcctccagagaagcacagtctaataataaatcatttgtaattctcctgagtat

SEQ ID NO: 831115 - DNA, 120 bp, Artificial Sequence
  ENSG00000223930_33 (sequence is synthesized)
tactttactgagtcattcattaacctcagatttaacagtatggagataaggagtcatactgtatcacagaagttggcaaactatgacctgcctgccaaacattgcctgtagtaaatacat

SEQ ID NO: 831116 - DNA, 120 bp, Artificial Sequence
  ENSG00000223930_34 (sequence is synthesized)
aagcctgtaatagctatctggtgttttacagaaaaaggttgctggcccctattctagtcttacatatttctctttttttcaacaatgtagataaaattctgcaatcccataaaagtgatg

SEQ ID NO: 831117 - DNA, 120 bp, Artificial Sequence
  ENSG00000223930_35 (sequence is synthesized)
aaataatactcaatttctagttcatatactgtctgatgtgctactgtctgccagattgttgacaaatagtaaatagttcatgaaaactctgtattacataaaagcagccaccaaaaacac

SEQ ID NO: 831118 - DNA, 120 bp, Artificial Sequence
  ENSG00000223930_36 (sequence is synthesized)
attacataaaagcagccaccaaaaacacatcctgtgctatttcatgttgccattacaaggtgtttagataaaatgaagatcatccaggtgctgtggctcatacctgtaataccagcactt

SEQ ID NO: 831119 - DNA, 120 bp, Artificial Sequence
  ENSG00000223930_37 (sequence is synthesized)
cacctcagcacctcattttttttgaagaatagtttagttgtatccttcctattctttctggcctcacatttctttctcaaacactgagccatatgtattcttttctcagaataaactctg

SEQ ID NO: 831120 - DNA, 120 bp, Artificial Sequence
  ENSG00000223930_38 (sequence is synthesized)
gtgccagcttataaaataatacccttttcaatttatgaaattatttctgtctcagcacaaatcatccgaggaaaggttttaagcttagggtggcaaggagaaagatataacgtccatatt

SEQ ID NO: 831121 - DNA, 120 bp, Artificial Sequence
  ENSG00000223930_39 (sequence is synthesized)
agaatgacgtgtgtggcaagtagagggtaaacagagtaggaaggggtttcagtgtccctagaatatgcatgttacacagcacaacacagcttagacttgtccctgctctctgcaaccatt

SEQ ID NO: 831122 - DNA, 120 bp, Artificial Sequence
  ENSG00000223930_40 (sequence is synthesized)
ctctattttccatgtctccatgaacacaagttcttgattccaagtgtttttttttttaaaccaaaattttggccttgcacattctattttattgctgtttccagattcccaaattatgcc

SEQ ID NO: 831123 - DNA, 120 bp, Artificial Sequence
  ENSG00000223930_41 (sequence is synthesized)
tttcagaattacttttgtcaccacttctctaccagctaataatattttctctatataaattattgaattaatgactcaggattataatcgcctgtgaattgtatggtatttaatttcttt

SEQ ID NO: 831124 - DNA, 120 bp, Artificial Sequence
  ENSG00000223930_42 (sequence is synthesized)
tccagcaggtaagagtagaataaagagaatgtaataagttacatgcagtcacaaaatgagtcattagaatcagagacagaatttggacactgaagacacaagtcctgcttctcagtagtc

SEQ ID NO: 831125 - DNA, 120 bp, Artificial Sequence
  ENSG00000223930_43 (sequence is synthesized)
ccttcatgcaaaacagctgaatcatactgttctcttctgtgtcatgcgtcccatttagacaggcttccctgccttgccttcttctttgtaattcttttatctttctgtctctttgtctgt

SEQ ID NO: 831126 - DNA, 120 bp, Artificial Sequence
  ENSG00000223930_44 (sequence is synthesized)
ctggtttatgtatttatctaaataatttttttaagtttacaaatatttcaggaactctcttacatggtggttgaatgctgatcgtttcaaaggagttgaaatgatcccaccctaaatagc

SEQ ID NO: 831127 - DNA, 120 bp, Artificial Sequence
  ENSG00000223930_45 (sequence is synthesized)
aaagtactacaatattattcttgcctagaagctgcccatgtgtattaatttaacttaaggtcattgtgggtgctttttaactttaggttacttgagctaaagagacttttcttgaaagaa

SEQ ID NO: 831128 - DNA, 120 bp, Artificial Sequence
  ENSG00000223930_46 (sequence is synthesized)
agtttggcaagaggaattggagtaatacttattggaaccttcagtaattggggaaaggtagggaaggaagaactgaattagaaaaaaacccacactcaaaatgtgccaaaccaagatttg

SEQ ID NO: 831129 - DNA, 120 bp, Artificial Sequence
  ENSG00000223930_47 (sequence is synthesized)
attaattcaaaagtttacttggaggtatatttatttctgaatctcaatttctatttgttatagttccatgaaaagtattatctatcaatatatgcccttattactcaggaagcaaatgga

SEQ ID NO: 831130 - DNA, 120 bp, Artificial Sequence
  ENSG00000223930_48 (sequence is synthesized)
atgactggctttcagaaggtgagatcagagagaacattcaagaagcggtctctgagacttgaattcaaatgcaaaaatgtgatttgagaggagcagaggaaatactggcagggaaatggg

SEQ ID NO: 831131 - DNA, 120 bp, Artificial Sequence
  ENSG00000223930_49 (sequence is synthesized)
caagaaatatagctggatcttctgttacaagattgaataaaagtggtaagaggggctatccttgctttgtgccccgtcatagaagaaatgcatctattttctcatcatttaatgtgatgt

SEQ ID NO: 831132 - DNA, 120 bp, Artificial Sequence
  ENSG00000223930_50 (sequence is synthesized)
aaatgaaaaacaaaatattcttgtgcggaatttcagagaattgcagttcctgtttcagcctgaacctcagatttttccacccacatggagtttggagagtcttacaacatgaagttcaaa

SEQ ID NO: 831133 - DNA, 120 bp, Artificial Sequence
  ENSG00000223930_51 (sequence is synthesized)
acagaaacattaatcgcctccacactttaatgccttgtttttctccaccacaaaaatgtttacccaggctgaagtactttttctcctgagcccagacttgataatcactttctcaatctc

SEQ ID NO: 831134 - DNA, 120 bp, Artificial Sequence
  ENSG00000223930_52 (sequence is synthesized)
tgcttgttaaatggcttctaaaaattcttgggtaaatatgggtatggttgcataaaagaaaaatcccttaaaggataagccaaaatttttcagtgatagtgcataaaagccttgttatct

SEQ ID NO: 831135 - DNA, 120 bp, Artificial Sequence
  ENSG00000223930_53 (sequence is synthesized)
tctgatttagtgcccaaaagtttttaatgctttgggtcctccagttgctctaagaattttttgtggctttgaagctttttatcaggttttaattttatccttatattttgactgatattt

SEQ ID NO: 831136 - DNA, 120 bp, Artificial Sequence
  ENSG00000223930_54 (sequence is synthesized)
ccattaaatgaattaggggatgtacaatatgccaaccatatactacataaaagtattgtcactcaggcctacaaagtgcctaacaaccaaacagaatattcactgcaaatgactcatgga

SEQ ID NO: 831137 - DNA, 120 bp, Artificial Sequence
  ENSG00000223930_55 (sequence is synthesized)
atgttacctgagagagtaataaatattctttcaacattcatccaagtaaataagctctgtcaggaaagaatgttcagaagcaaagggcccttcactggaaaagaggtaacaataaatata

SEQ ID NO: 831138 - DNA, 120 bp, Artificial Sequence
  ENSG00000223930_56 (sequence is synthesized)
taagaaaggaagagaagatatgaagattttagattgtctaaggggaagtgtttatatgtaaaaggaaaatgtaaaatatgatgactatctcttattgtataatattccttacataaaaat

SEQ ID NO: 831139 - DNA, 120 bp, Artificial Sequence
  ENSG00000223930_57 (sequence is synthesized)
aaatctacttgccattaatttatttttctaatgtagaaattagacatgtgattcattattttctagtagccattaatcaagtatgatcatgttctgccgacttatcctctggaagaaggc

SEQ ID NO: 831140 - DNA, 120 bp, Artificial Sequence
  ENSG00000223930_58 (sequence is synthesized)
tgttctccaataggtcaactttctccaagtcccagctaatatatcacccatgttatgatgccttgtttctgaaactcttcagctgaattatgttgtccctccaatgacttttcctacagc

SEQ ID NO: 831141 - DNA, 120 bp, Artificial Sequence
  ENSG00000223930_59 (sequence is synthesized)
catgtcttcaagatttctaaaggcaatgacttagtcatgaaatctgatgtaattacaagcaaaaaatacatctggtatttactaggttagaaagcatgaaaatgtgtgtaacaagattag

SEQ ID NO: 831142 - DNA, 120 bp, Artificial Sequence
  ENSG00000223930_60 (sequence is synthesized)
aaaaaggttacttctccaagaaaggaaaaaacaaaagaaagaaatgctgtgggattgtattggactcctgacaatggcaccaacttcacaatgtgatattaatagattttgaaggatggg

SEQ ID NO: 831143 - DNA, 120 bp, Artificial Sequence
  ENSG00000223930_61 (sequence is synthesized)
gtgagagtgccgaagatatgacagtatccttctggtgttttctttggagatgaaagagataaggcaattttttaaatgtatatcctagatgcttatttagctcatgaccctttcaaaaca

SEQ ID NO: 831144 - DNA, 120 bp, Artificial Sequence
  ENSG00000223930_62 (sequence is synthesized)
tttgcaatcacacattttgatgatttttctgatgtgactaaatcttatgagttatttttattaagatcttgcaaggttgccagacaactaattgtggtggaaaacagccaaggagcaggg

SEQ ID NO: 831145 - DNA, 120 bp, Artificial Sequence
  ENSG00000223930_63 (sequence is synthesized)
tcaaagtggtgcacaatgtggactgtttctccagcctattagttatctgcattcctaatcattccagaaacctcttttaaatctgaacaaatatttgtctgcatactcttctcttttttt

SEQ ID NO: 831146 - DNA, 120 bp, Artificial Sequence
  ENSG00000223930_64 (sequence is synthesized)
tcaatttttgtgtctgtgtcatgtgtgcatttataacttacttatctcactagattgccatctcctcccaggcatagtctgtgtcttgtcttatcttgaagagtactggtaggatctaat

SEQ ID NO: 831147 - DNA, 120 bp, Artificial Sequence
  ENSG00000223930_65 (sequence is synthesized)
ctctaacatggatccttttggttgcaggaaaaggagtttgggttgtagataggactaacctcctcactagatgtacacattttacaattatctttacaaaatttgctccttatcttctca

SEQ ID NO: 831148 - DNA, 120 bp, Artificial Sequence
  ENSG00000223930_66 (sequence is synthesized)
tgatgacctcaaagaagaaaagaaacttagcttattccttcacatggattcgtgcatcaaacactattgagtgcatattgcatgccaggttctgtgttagcaactggaatgaccaaataa

SEQ ID NO: 831149 - DNA, 120 bp, Artificial Sequence
  ENSG00000223930_67 (sequence is synthesized)
atgtgacaagaattctgtcttagaggaacagttgaataagaataaggatttcagagaaagagaagctcagagaaggagaattccagctgaataaagtcatgggaagggacaccccagctg

SEQ ID NO: 831150 - DNA, 120 bp, Artificial Sequence
  ENSG00000223930_68 (sequence is synthesized)
ctgggctttaagattaatatgtatttgtgcctcatttgttttttctatcctggctgtcttttatttttttattaattaatttcttttgtaatttgcaaacattgtatatatttgtaatgt

SEQ ID NO: 831151 - DNA, 120 bp, Artificial Sequence
  ENSG00000223930_69 (sequence is synthesized)
acagcataatgttttgatacatctggtggttgtgattcagagtgggctctggttagcacacaaattacatcattagttccatattagtctattttagatagatagaaataaatcaaaggg

SEQ ID NO: 831152 - DNA, 120 bp, Artificial Sequence
  ENSG00000223930_70 (sequence is synthesized)
aagaagatgacttggaatttgtgtgaagcaaatgagacacatacatatagagaaggtcaagacatgggatgactaatctcaccagataggaatctctctttgtgaataaatacactaata

SEQ ID NO: 831153 - DNA, 120 bp, Artificial Sequence
  ENSG00000223930_71 (sequence is synthesized)
tatgtagaaacacacacattatagtatcgtttaaaagaggaaaatatggaaaaccacataagtatcagatatattagaaaccacagaaatatcttcttatcatttcttcatttcttaggg

SEQ ID NO: 831154 - DNA, 120 bp, Artificial Sequence
  ENSG00000223930_72 (sequence is synthesized)
ctattttgggggggatacttttttctcagcttctattcatttttaagagctattttttgtattaatacatcatatatgttgtaaatagtttcagagtttatgtttgcatttaattatttc

SEQ ID NO: 831155 - DNA, 120 bp, Artificial Sequence
  ENSG00000223930_73 (sequence is synthesized)
ctttgctgttatatgtgatatcctaatttttaattagttgtacttatgagtctcgtacttttggtttctgcttttggtatcatgcttagaaagactttctccaccacgatgccatataaa

SEQ ID NO: 831156 - DNA, 120 bp, Artificial Sequence
  ENSG00000223930_74 (sequence is synthesized)
agatgctggccatttttatattatatggatgagtgtccagattcagttatattcttttaacaactgttgaaatttattctggcagatagttaattttatgtgtcaacttgactgggccac

SEQ ID NO: 831157 - DNA, 120 bp, Artificial Sequence
  ENSG00000223930_75 (sequence is synthesized)
gacacacagaggagaatgctatctgaagatggaggcagagattgaagtgatgcatctacagggattgctggccgccaccacaagctagaagaagcaagggaggattattccctagagcct

SEQ ID NO: 831158 - DNA, 120 bp, Artificial Sequence
  ENSG00000223930_76 (sequence is synthesized)
ttggatggagcaagaatccaagaagactctaaaacctccagtactcatgaagagatgagtttgctcattatcaatctcattgatccttagcatcggagctgagagggagccaggatgttc

SEQ ID NO: 831159 - DNA, 120 bp, Artificial Sequence
  ENSG00000223930_77 (sequence is synthesized)
atcacactgtgtaaatggcctctgtgaagaacttcctgggttccatgaaaagtattatctatcaatatatgcccttattactcaggaagcaaatggaatgactggctttcagaaggtgag

SEQ ID NO: 831160 - DNA, 120 bp, Artificial Sequence
  ENSG00000223930_78 (sequence is synthesized)
atcagagagaacattcaagctggatcttctgttacaagattgaataaaagtggtaagaggggctatccttgctttgtgccccgtcatagaagaaatgcatctattttctcatcatttaat

SEQ ID NO: 831161 - DNA, 120 bp, Artificial Sequence
  ENSG00000223930_79 (sequence is synthesized)
tataaatgatgtgtggaaaatgtagtagaagaaacaatggaacaaagttatggacagtagaaacaatgggacaatttattgaatgtgcagatttaccgtccaagcaccgtggaatcctct

SEQ ID NO: 831162 - DNA, 120 bp, Artificial Sequence
  ENSG00000223930_80 (sequence is synthesized)
ccttgttttcgtcattaaaattttgccctgaaggtagtctgcatcacttttgttcacatttttctcccgagaatcaatatatggttattcttcaatgcaaggagggttacaaaatatagc

SEQ ID NO: 831163 - DNA, 120 bp, Artificial Sequence
  ENSG00000223930_81 (sequence is synthesized)
ccgtgtctcaccaatggcctagagccattccagaaagaaaaacattttgtggacaactagtagagcctgccatagaaggcattcaatgtattttcataatccacttttcccttctcctga

SEQ ID NO: 831164 - DNA, 120 bp, Artificial Sequence
  ENSG00000223930_82 (sequence is synthesized)
ttagagtactctctttcaaatcttagcagaggaatgagaagaaacgtgaaaagaactctaacaggtagaatcgcttcattctcagatatcatattctgaatggcatatatcagatcttgg

SEQ ID NO: 831165 - DNA, 120 bp, Artificial Sequence
  ENSG00000223930_83 (sequence is synthesized)
tacctggtacctggttatatattaatatttcataaatgtttgaaaaatactgtggaccagaagtacttagggataatgcaaatcataacctttctctttgaaaatgtttctaacatatca

SEQ ID NO: 831166 - DNA, 120 bp, Artificial Sequence
  ENSG00000223935_0 (sequence is synthesized)
ggcgatgggaggcgaggtcgagggaagattgggtgctgggggtggtattccagagtgggagacttggcaggatttctttcagagaattccaacaaaatcgggggaaggattcattctgct

SEQ ID NO: 831167 - DNA, 120 bp, Artificial Sequence
  ENSG00000223935_1 (sequence is synthesized)
ctctagggcagaaagagaatggaaggtctgaaggcttgcagaaataaatgtgtgacctgaaagaacgaagcagagaggactcaaggggagtgccagctgattactctgggctcaagaaca

SEQ ID NO: 831168 - DNA, 120 bp, Artificial Sequence
  ENSG00000223935_2 (sequence is synthesized)
tgacatagctccacctacatgcaaggggagccaggaagtgcaatccctggctgggctgccacgtctcagaaaccattaagcctatggaaggtctctggatttgatggcaaatggcagcag

SEQ ID NO: 831169 - DNA, 120 bp, Artificial Sequence
  ENSG00000223935_3 (sequence is synthesized)
aaatgtggaaaagatcaaagtgatgtcaaggttgatctctgagtttggcatggctgaactcaaacatcatttgccatggacccacagtgtcttcagtagctgagtgtggtgtcattcccc

SEQ ID NO: 831170 - DNA, 120 bp, Artificial Sequence
  ENSG00000223935_4 (sequence is synthesized)
tgtgacctgaaagaacgaagcagagaggactcaagtgcagaaaggattgatttcagaaaatctccagcttaagaagagaataatgaacgcattcccaggaggagctcaaggcttcaaagg

SEQ ID NO: 831171 - DNA, 120 bp, Artificial Sequence
  ENSG00000223935_5 (sequence is synthesized)
tatgctctgcttcaagccccggggaatgtcaccgtggaccctttacgtgtctgagaagtcctccctagaacagaaagcctggccaatggagaagtggaatgcgcgctgtccagggaaaca

SEQ ID NO: 831172 - DNA, 120 bp, Artificial Sequence
  ENSG00000223935_6 (sequence is synthesized)
gaacccttgcttccagcatttggaactgacagtgtgaatgagatattttaacactctttccagtggagctttttgtgtataaagagtcaaccatgtgcttctgagccttctctccagcct

SEQ ID NO: 831173 - DNA, 120 bp, Artificial Sequence
  ENSG00000223935_7 (sequence is synthesized)
cacctttggcaattccaacaggcgggtctgtggtcagccaatcttttacccatcaggaatgtgacaggcctgtgtggcggtgctccaggcctaattatgctctctcattatgcttgtcat

SEQ ID NO: 831174 - DNA, 120 bp, Artificial Sequence
  ENSG00000223935_8 (sequence is synthesized)
ttctgttttcatttgctcgtttatagttctcctctttaccgcctctgtgattttattttcttgttgtcaagtggcataaagggcttcttagttttgtagtttcatggaaacttgcctggc

SEQ ID NO: 831175 - DNA, 120 bp, Artificial Sequence
  ENSG00000223935_9 (sequence is synthesized)
ttggctgggtggaagaagaccaagatttggatttagcagtcatttggaaatcctgactaatggggaggaaaacccaggaggcatgttgccaggtggtcatttgatttttggaggaaacat

SEQ ID NO: 831176 - DNA, 120 bp, Artificial Sequence
  ENSG00000223935_10 (sequence is synthesized)
atttggatgacacagatttctggattttttcaaaggtgaactacacagagtatgggttaacagcacagcttctgagcaaaccaccaaccagaagagacctgggaatttaaacctggcatc

SEQ ID NO: 831177 - DNA, 120 bp, Artificial Sequence
  ENSG00000223935_11 (sequence is synthesized)
caaatttgattgcccaaggtgactgagagaaagcatacttcatttatttattcaagaacaatttattgagctatgctctgttttagttgccattatgataatttttagtttttttaaaag

SEQ ID NO: 831178 - DNA, 120 bp, Artificial Sequence
  ENSG00000223935_12 (sequence is synthesized)
tgcacaatgcctcttccatgtgacatattcagagtggatgtaggagctcccttgccaacatggcaacagagcccagaaaatcaaaatgaaatgctttcaattcaggggctcgttgcatcc

SEQ ID NO: 831179 - DNA, 120 bp, Artificial Sequence
  ENSG00000223935_13 (sequence is synthesized)
cacctccatttaggtaatatgatttccatctaaatccagtttttctggtacatgttgatttcaggcctgaattgttcaaatgattatcccatagagaaagattaagagttgaagaaaatg

SEQ ID NO: 831180 - DNA, 120 bp, Artificial Sequence
  ENSG00000223935_14 (sequence is synthesized)
ttttaaaccgaagaagaaattcacattgacagtctacattgattcaactcagcacatttcattcattcacattattggcctttgttggttcagtgcttctctgaaacctgataattagtt

SEQ ID NO: 831181 - DNA, 89 bp, Artificial Sequence
  ENSG00000223935_15 (sequence is synthesized)
tttgttggttcagtgcttctctgaaacctgataattagttcaaactgtataaattcaggaggctttgggctggcacgactttttaaaag

SEQ ID NO: 831182 - DNA, 120 bp, Artificial Sequence
  ENSG00000223935_16 (sequence is synthesized)
ttcagctttttaaattttaattttaattgttatgtattatttgcacatttttatgggggttcatgtgatattttgttacaggcatagaatgtgtaatgatcaagtcaaggtctttagggt

SEQ ID NO: 831183 - DNA, 120 bp, Artificial Sequence
  ENSG00000223935_17 (sequence is synthesized)
atccatcacctcgagtatttatcatttctgtgtgttgggaacatctcaagttctcttttttcgctattttgaaatatagaatacattattgctaactatagtcacccaactctactattg

SEQ ID NO: 831184 - DNA, 120 bp, Artificial Sequence
  ENSG00000223935_18 (sequence is synthesized)
aacattagaacttattccttctatctaactgtatgttcgtacctgttaaccaatccctcttcatcccctgcctccctcacacccttctcagcctctggtaacaatccttctactttctac

SEQ ID NO: 831185 - DNA, 120 bp, Artificial Sequence
  ENSG00000223935_19 (sequence is synthesized)
ctccatgaaatcaactcttttagctcccacatatgagtgaaaatatgtgatatttgtcattctgtgcctgtcttatttcacttaacataacgatctccagttccatttatgttgctggaa

SEQ ID NO: 831186 - DNA, 88 bp, Artificial Sequence
  ENSG00000223935_20 (sequence is synthesized)
cttaacataacgatctccagttccatttatgttgctggaaatgatatgattcaactgttttttgtggccaagtagtatttcattgtgt

SEQ ID NO: 831187 - DNA, 120 bp, Artificial Sequence
  ENSG00000223935_21 (sequence is synthesized)
gtatagtgcagcaataagcataggagtgcaggtatctctttgatatactgatttcctttcctttggataaatacctagaagtgggattactggattttatggtagttctatttgcagagt

SEQ ID NO: 831188 - DNA, 120 bp, Artificial Sequence
  ENSG00000223935_22 (sequence is synthesized)
gggggaaggattcattctgctctctagggcagaaagagaatggaaggtctgaaggcttgcagaaataaatgtgtgacctgaaagaacgaagcagagaggactcaagacactgcatttggg

SEQ ID NO: 831189 - DNA, 120 bp, Artificial Sequence
  ENSG00000185700_0 (sequence is synthesized)
gcctgtcttttctgtgggatacacaggacagtgccatgattctagtagatggtagatgtgagccagcccgaaggaacatcaaggagagttccaggaatgaaccgtgaaatccctaaggat

SEQ ID NO: 831190 - DNA, 120 bp, Artificial Sequence
  ENSG00000185700_1 (sequence is synthesized)
ccaaaaggatatgcagaaagaagagcagcacgtcatacccaagaccaacatctctcagtgtttcacgctaacccaaggagagacactagcagtcttctctgcaggaccccttgaatttac

SEQ ID NO: 831191 - DNA, 120 bp, Artificial Sequence
  ENSG00000185700_2 (sequence is synthesized)
ccattttcttggaatttcattctggcaaagagggtgtgagcagcaataaggtgggtcttcctgaagaaccaaccaaactcaggagctaccaggctgcttgtttctgtgaaaatgttgtga

SEQ ID NO: 831192 - DNA, 86 bp, Artificial Sequence
  ENSG00000185700_3 (sequence is synthesized)
aggagctaccaggctgcttgtttctgtgaaaatgttgtgagtgttggatgtctgcatgtgtgtgtgccattgtgtgcttagggttg

SEQ ID NO: 831193 - DNA, 120 bp, Artificial Sequence
  ENSG00000185700_4 (sequence is synthesized)
aacaggggacactccattttcttggaatttcattctggcaaagagggtgtgagcagcaataaggtgcttcacatcatgaagggatatttttccatcatcttgggatttcattctgggaca

SEQ ID NO: 831194 - DNA, 120 bp, Artificial Sequence
  ENSG00000185700_5 (sequence is synthesized)
tagagtatgagccacaataaggtcagagaggagtgaggatacaatcttgtgaggggtgaactgggtccagcaactttgcctgcaaaaataaataaattaattaattaattagtaaatgaa

SEQ ID NO: 831195 - DNA, 120 bp, Artificial Sequence
  ENSG00000232920_0 (sequence is synthesized)
acaatgcgcagctgaattgggatgaggggccaggacaaagcagaaatctgctgcagagagcaggaaagatattctgtagcaggatctgggcaagcggcactcatccatatcctttgcatt

SEQ ID NO: 831196 - DNA, 120 bp, Artificial Sequence
  ENSG00000232920_1 (sequence is synthesized)
gcaaagagaggagctacctccttcctttttattttccagtttattggtggctcctagaacctctgagaactaactgattttgacctcttaacagttgcctttcaactaccattcatttac

SEQ ID NO: 831197 - DNA, 120 bp, Artificial Sequence
  ENSG00000232920_2 (sequence is synthesized)
tgcaagcctactgtgtaacaggcccttgctaaccacttcagatatattgtctcttgtccagcttcaagtgactctcttagggagggattagcctcacctcactagtatggaaatggagac

SEQ ID NO: 831198 - DNA, 120 bp, Artificial Sequence
  ENSG00000232920_3 (sequence is synthesized)
caaagctgcatatcaaaactgaactttagcatggagtctatgatgactggctcatgtctctccacccagcacctagcccaaggccaagcacagagaaggctcacagtggacacttttgga

SEQ ID NO: 831199 - DNA, 120 bp, Artificial Sequence
  ENSG00000232920_4 (sequence is synthesized)
atgagtagattttttatggaatggtcgagcacactgaactacctggagtaaaggggcatcatgtctgaaactgatgcttaagtggctcagaaaaaaaattctgggagctagagggagaga

SEQ ID NO: 831200 - DNA, 120 bp, Artificial Sequence
  ENSG00000232920_5 (sequence is synthesized)
gagacagaggagtgtggtaaaaagttaacattttggggatctgcgtaaaggtatatgaggattctttgtacagattttgcaatttttctccaaatgtgaaattatgtcaaaatataaaat

SEQ ID NO: 831201 - DNA, 120 bp, Artificial Sequence
  ENSG00000232920_6 (sequence is synthesized)
taaaagacaaaattaaaagaatgaatgagagtttgctaggtagagaagcagggggatcttctggcaaaggaacaggataagcaaaagcatcacaagtgtgcgagtcttctgtgttgacaa

SEQ ID NO: 831202 - DNA, 120 bp, Artificial Sequence
  ENSG00000259589_0 (sequence is synthesized)
agaagcaagtgagggaaagacgggaggaagacgtgctgccctctttgaccactcccagcagcgtggcatggcgcccagtttgcttgtgaacacaccgacctccaactctaagaccagcat

SEQ ID NO: 831203 - DNA, 120 bp, Artificial Sequence
  ENSG00000259589_1 (sequence is synthesized)
caactcctcctatcacagccagcacgggccacacctctatgcaaagagtcctcagctgcagctctgagagtaagtccaacggtctgttcggtgaaggatacggatgagctgaatagtggc

SEQ ID NO: 831204 - DNA, 120 bp, Artificial Sequence
  ENSG00000259589_2 (sequence is synthesized)
caggaaggtctgtgctgacccttcgctcttgctgagactgaggaggtggatcatcagctcgagccccagaccctgccccactgttcattctatctcggtctcggctacgagctacttcac

SEQ ID NO: 831205 - DNA, 120 bp, Artificial Sequence
  ENSG00000259589_3 (sequence is synthesized)
gggctgagaggaaacactgaaagatttctgtaacatgcaacacaaaaacaaggtcttaacacatggggagagaagagcaaagaaaataacaataaaaatagtcaaaaagtttggaccaaa

SEQ ID NO: 831206 - DNA, 120 bp, Artificial Sequence
  ENSG00000259588_0 (sequence is synthesized)
ggacttcccctgacttggagacagccttattctcagatctctctctcttttaaaatggactatcctctttacaacccagagagccccatccaaatatcactcattgtggaagaaatctga

SEQ ID NO: 831207 - DNA, 120 bp, Artificial Sequence
  ENSG00000259588_1 (sequence is synthesized)
tggtcttagtcattgccaagagcatcacagaaggcctctgcctccggttcctacctgggccctttctatgctcgttaactgatgctgcagcctgacttcttcaagactaagttgggctgt

SEQ ID NO: 831208 - DNA, 120 bp, Artificial Sequence
  ENSG00000259588_2 (sequence is synthesized)
atgcttgcagtcatgggaggaaaacaaaagagggtataaacacaatgcaatgcctcgacacatcactccatctcagggggtcagaaaataaattaaatgttaggaaaaacagaaaagaaa

SEQ ID NO: 831209 - DNA, 120 bp, Artificial Sequence
  ENSG00000259587_0 (sequence is synthesized)
attacaggtgtgaaccaccatgcctggactaaagttgttgttgttgttttttttaatggtgtgaaatatggtgatagttcatataaatatctgtgtcagttcctaaaaagaatatagagg

SEQ ID NO: 831210 - DNA, 120 bp, Artificial Sequence
  ENSG00000259587_1 (sequence is synthesized)
gtgtcagttcctaaaaagaatatagaggaataaaagaccaatgcagtaagtattgacttaacagtccttggaaggcatttttctcccttcttcaagttttaataaaaataaaaccctaaa

SEQ ID NO: 831211 - DNA, 120 bp, Artificial Sequence
  ENSG00000259587_2 (sequence is synthesized)
attcatagcatcatggaatagaagtctggtaaagcgagcagaataatttatgcataattataaaataactggtgcattaagtggttatatgatctgtctcatgagttagttggtcaaatt

SEQ ID NO: 831212 - DNA, 120 bp, Artificial Sequence
  ENSG00000259587_3 (sequence is synthesized)
ataattaattatttcttaatctccctccaattgtttaatggttcccatatgcttgcttgtgctttagcttgtatgcacttggtgaatcttacctaccacaaacagaagtctggaaagtga

SEQ ID NO: 831213 - DNA, 120 bp, Artificial Sequence
  ENSG00000259587_4 (sequence is synthesized)
aaatttatttccttttcaccatgaccagccttgttcagaacatctgagaggcacagacctgagaaagaatccccaggctgaagaggtagaagttggcagaagttaaaagcaatgtctcca

SEQ ID NO: 831214 - DNA, 120 bp, Artificial Sequence
  ENSG00000259587_5 (sequence is synthesized)
caatggagaagtgacatgctaaaggaacctggcatctagacatttcctaacccccaatccctccttacatatgacctgctcttagaggagtacagcgtggtggttaggagtgtggactcg

SEQ ID NO: 831215 - DNA, 120 bp, Artificial Sequence
  ENSG00000259587_6 (sequence is synthesized)
gcagccagaaatcctgggatctgttgcttgttagctgtgggccttaagctaagaacttaacctctctgtgcctcagttgctccatctgttcaaatgaagataatgataatgaagatgata

SEQ ID NO: 831216 - DNA, 120 bp, Artificial Sequence
  ENSG00000259587_7 (sequence is synthesized)
tcacctgctgtgtaggattgttatgaaaaatcaagaattaatatttgtaaatcacttacagggtctggcacataataagtgctgtgtgggtgtttgttaaataaaataatatacaatgac

SEQ ID NO: 831217 - DNA, 120 bp, Artificial Sequence
  ENSG00000259584_0 (sequence is synthesized)
ggaaggaagcatgataagtggactgctaaccatctctggatacaagggtagccggctccacgcactgaccgcagctctgaggctgacacttccctgaagacccagagtgtggatcgtcag

SEQ ID NO: 831218 - DNA, 120 bp, Artificial Sequence
  ENSG00000259584_1 (sequence is synthesized)
tcaggacttccatcttgctcccgcagcccttctgcatgagtgaagtcaagtgagcgtgaggccgttcaccactctcctggtcttttccatttctcacttggtgctcccctcagtagcagc

SEQ ID NO: 831219 - DNA, 120 bp, Artificial Sequence
  ENSG00000259584_2 (sequence is synthesized)
acatgcctctaagcccctgtgtattcattctgccaagaaagtcccagtgctgtagtgccacgcgattggccgagatggctaagataccccaactcactcaattccctccttctcctatca

SEQ ID NO: 831220 - DNA, 120 bp, Artificial Sequence
  ENSG00000259584_3 (sequence is synthesized)
attccaatggtgttattttcctgccccgtgtacctctttccctttcagcttttacccaggatcttgccagtctttcttactggaaattcccgtcctcaaccccctcccctttgggaggta

SEQ ID NO: 831221 - DNA, 120 bp, Artificial Sequence
  ENSG00000259584_4 (sequence is synthesized)
ggaagtcatttttgctgactcatttgtcctctgcccttctgctgccccacgttgcttccccctttctccagagccactggagtcttctccacaaggtttactttgcggcctttatggaaa

SEQ ID NO: 831222 - DNA, 120 bp, Artificial Sequence
  ENSG00000259584_5 (sequence is synthesized)
ccagcccctctactcttttgggatttggagtttcagagcgagttcctgttggctccgggcccactgttcacctgggcttctggcttgcttacggtcctacctatttatcagaggtgacag

SEQ ID NO: 831223 - DNA, 120 bp, Artificial Sequence
  ENSG00000259583_0 (sequence is synthesized)
ccgcgccggggccgggcccagacgcacttcctcaatcctgaggcgggcgggcggggagggcggcgcgaagagcgcgcagagcaaggccgccgccagctctcccaggaaccgtcgcgaggc

SEQ ID NO: 831224 - DNA, 120 bp, Artificial Sequence
  ENSG00000259583_1 (sequence is synthesized)
gcaaggccgccgccagctctcccaggaaccgtcgcgaggcgtcccctcggcggccgcctcagtttccctggccgtaaaacgcgggcgatggcgctcgatgccccgggagacgccggggtc

SEQ ID NO: 831225 - DNA, 120 bp, Artificial Sequence
  ENSG00000259583_2 (sequence is synthesized)
cgcgggcccttccggcaccgggtcctccttcaggttcgggcacccggctgcctccacgcggggcgagcgcggcgatgggatcggtccgtgctgcgctcagccccgctttcgctatccctc

SEQ ID NO: 831226 - DNA, 120 bp, Artificial Sequence
  ENSG00000259583_3 (sequence is synthesized)
tgctccaggggcagcaaaatcagcagatgagcccccagcgcgcctgcggcccacacactgcggccgtaacagttaaacagacggggaacattcatgtgcgtagagctcttcacggggcga

SEQ ID NO: 831227 - DNA, 120 bp, Artificial Sequence
  ENSG00000259583_4 (sequence is synthesized)
tacagaaatgtgtcgttctaaagcgttaacgacctgcaatttgcatatcctccaacacatggattttactgattcaattatggatgtgtgcaaagaatctgctgctcgcaccctgtgagg

SEQ ID NO: 831228 - DNA, 120 bp, Artificial Sequence
  ENSG00000259583_5 (sequence is synthesized)
agggttacctctgtggagccggtgaaggcgatcttgttgatctgagggtgagaagaaattgctgctcccactgtgggcccgaatcctggcacaatgttcaccactcctggagggaacccg

SEQ ID NO: 831229 - DNA, 120 bp, Artificial Sequence
  ENSG00000259583_6 (sequence is synthesized)
gcctgggaagaaatcaagatagcacttgaagaagaacggacttcatccaccacggatccacatttgggccgagagagccgtggctgcctcacatccccacagggaacccgggccgggctg

SEQ ID NO: 831230 - DNA, 120 bp, Artificial Sequence
  ENSG00000259583_7 (sequence is synthesized)
gatttacccaggacccagaagcagttgaccgtgggcaccctgggagctgacctgggcttctcatcccctgctgccagcccagtgtgcaggctgggcaaggggagatgcccacttctcctt

SEQ ID NO: 831231 - DNA, 120 bp, Artificial Sequence
  ENSG00000259583_8 (sequence is synthesized)
ctggggggggaccccatcccaaagtgatatgcagtgcaaatgtgtggttatgcttcaaggtggccatggcccgcctgtagcacagcacctttccatgtggggtgtgtgtgtgtgtgaggg

SEQ ID NO: 831232 - DNA, 120 bp, Artificial Sequence
  ENSG00000259583_9 (sequence is synthesized)
agagtgtgtgtatgcgttaaggggagaggggtaccttgatcagaatgccctgcccaggatcagaggcacctgcaaaatatctgccaagagcttcagttttgttttttcttcttttttttt

SEQ ID NO: 831233 - DNA, 120 bp, Artificial Sequence
  ENSG00000259583_10 (sequence is synthesized)
ccaaagtcctgggattacaggcgtgagcccagttttcattttttaatcagacccgttattattccaaatggtgacagggtatcactcccttaaagttctttgcttgttcaacctgggtct

SEQ ID NO: 831234 - DNA, 120 bp, Artificial Sequence
  ENSG00000259583_11 (sequence is synthesized)
gtctcacctggagcaagcccttctggaaggcagggactgccacctcgttcacgttcatgcctcgtgtttttcatatactaagcctctttatcaggcgagaacacaaaacaaacgaggtgg

SEQ ID NO: 831235 - DNA, 120 bp, Artificial Sequence
  ENSG00000259583_12 (sequence is synthesized)
aggatgctcttccccacctgtgctgagtcttacttagaacacattatttcagaaaatcaagattttaggcacgctgcttgagtctttagatttttaggcactgtttcttaacagttggga

SEQ ID NO: 831236 - DNA, 120 bp, Artificial Sequence
  ENSG00000259583_13 (sequence is synthesized)
ttttcacattcctaagtctcaccagtgtgacttaattatgccccacatcaccaaaggaaagtggaaaattggctcatcaccagctgttcccaccttgcttctaagcaactgtggacctgc

SEQ ID NO: 831237 - DNA, 120 bp, Artificial Sequence
  ENSG00000259583_14 (sequence is synthesized)
ctgccggtcatatcagcccgactaagaagagaaaggaatggatcttttcttctgtccctctttgcttcctgttgctttctctaaatctttgctccatacaacctggggatggaatgacta

SEQ ID NO: 831238 - DNA, 120 bp, Artificial Sequence
  ENSG00000259583_15 (sequence is synthesized)
gcacacggactgctgcagccgcccagctagagctgacgaggccacctctccagagaaaaatggaccatttcataaactgagaatgcaaatcccagagaacctcccaaatatttggctccc

SEQ ID NO: 831239 - DNA, 120 bp, Artificial Sequence
  ENSG00000259583_16 (sequence is synthesized)
tcttggttgaccccccctgaaaattctctagacaaaccactgggtcctcaaccataggtttgagcccataataagagttaagcattctcattaggaccactgggaggaatggagtttctc

SEQ ID NO: 831240 - DNA, 120 bp, Artificial Sequence
  ENSG00000259583_17 (sequence is synthesized)
cagctcagtggccacaagcaggagaaagaacgtgcagtcgccaaacaaaacactggaagtcattcccttcccactcgattgccagcagtctgccactgtcccatctcgtgacggtggcct

SEQ ID NO: 831241 - DNA, 120 bp, Artificial Sequence
  ENSG00000259583_18 (sequence is synthesized)
ggttcctaggagtgggaatgttaccaagaacatgtgatattttctttttggatgtctcacctctttgatcagagagccgagataaagggcggtgagaggtgtctgctccgcaggcttcag

SEQ ID NO: 831242 - DNA, 120 bp, Artificial Sequence
  ENSG00000259583_19 (sequence is synthesized)
gaccatggtgttcccacagcagagggcgggtgccagcttccacaccagcatcagcagggggaagttccactgcgacagagcacaggggctttggaggcccagatccaccctcttaccctg

SEQ ID NO: 831243 - DNA, 120 bp, Artificial Sequence
  ENSG00000259583_20 (sequence is synthesized)
tcccatgtgctcaacgatgcctttgtggaggacacttgcttttcatggtctggatttggggtatgtggggtaacataggagtgtgcaatgatcagaactgcaatcctgcacagcacttcc

SEQ ID NO: 831244 - DNA, 120 bp, Artificial Sequence
  ENSG00000259583_21 (sequence is synthesized)
taaactgcattctgggtggtactaataggcagcctttgcaaagaggatgctgttgcatgtgttctacctctccctctaaaacatctgctgaagacgtgtcctcctccctgcctccatggg

SEQ ID NO: 831245 - DNA, 120 bp, Artificial Sequence
  ENSG00000259583_22 (sequence is synthesized)
cactttttgaaccctcacttcatgttgccacctggctcttcagcttcctgcctggctgttgttgcaatggccagaggcttcccaaacagacaggcagcattgttgcacttcttgggcacc

SEQ ID NO: 831246 - DNA, 120 bp, Artificial Sequence
  ENSG00000259583_23 (sequence is synthesized)
tataagcatccccaccgcccaatgaataaagtcccggccccttagcagccaaagctgctggaagctggcccacaccacctgccacgtgtgctcacccttttcctcacttttgctcctgcc

SEQ ID NO: 831247 - DNA, 120 bp, Artificial Sequence
  ENSG00000259583_24 (sequence is synthesized)
tgagctctagccccaccagctttcctgctgttcccttccaagtagcccagccacctctgcacttttgcctaggccattcccactccttggaaaatccttttccttgttgaacaagtcttt

SEQ ID NO: 831248 - DNA, 120 bp, Artificial Sequence
  ENSG00000259583_25 (sequence is synthesized)
cttatctttaaggcccagctaagagaccaccttcctgggaatgctggccattcctgaccactctggctgggaaccacagtgctttctgtggcatgcctaaagccggtcttaggagagcag

SEQ ID NO: 831249 - DNA, 120 bp, Artificial Sequence
  ENSG00000259583_26 (sequence is synthesized)
aaatggggtctaatccatctcaagagcccccaagcatggagttccatgccacgaagaaaatgcttgttcaacgctggtgcaatcagataaaaacacaccagaaattgattccaaaggaca

SEQ ID NO: 831250 - DNA, 120 bp, Artificial Sequence
  ENSG00000259583_27 (sequence is synthesized)
cagggcagtggggcaggatctacatagaatctactgagaaaggctgccatacttactggagtgatggccccacagacaccaatgggctcatgcctggtgaagcacacgacgttgtcatct

SEQ ID NO: 831251 - DNA, 120 bp, Artificial Sequence
  ENSG00000259583_28 (sequence is synthesized)
ggaagagggttacatggtggggaaggacacactcacttagtccaggttaggaacttcaagtagtaaaaagacaagaaagaaaccaacaagggtgccagattcaagtcttgtctattatac

SEQ ID NO: 831252 - DNA, 120 bp, Artificial Sequence
  ENSG00000259583_29 (sequence is synthesized)
agagaagtgatttgacctcaactttaaaagtgaagttcttagaagaagaattggcagtaccatttggagagggagtggggttgggaatggtgccttagggaaacagtcagggggggctct

SEQ ID NO: 831253 - DNA, 120 bp, Artificial Sequence
  ENSG00000259583_30 (sequence is synthesized)
ggattaatgaaaagatatagccccaaagggatcccaaatgaagctataatccaccttgctcacctgtggggatggtcttgccctggattttgtctgcccaccctgcaaagtatctgaggg

SEQ ID NO: 831254 - DNA, 120 bp, Artificial Sequence
  ENSG00000259583_31 (sequence is synthesized)
ttctaatacagccctccaggtcgatgaaaaaagcatgaagaaatggcttccctgtatccatcgtctccagggcctgcaataacaagatgatgtctgtttcggacatagcttgcttttctt

SEQ ID NO: 831255 - DNA, 120 bp, Artificial Sequence
  ENSG00000259583_32 (sequence is synthesized)
ttgcactgtcaggttgttaaagatggaagttggggagagaacacagtcctaggacattgctctgtagacctcacagtcagatgcacctcttcagaaagcatgacaccaaatgtaaagcga

SEQ ID NO: 831256 - DNA, 120 bp, Artificial Sequence
  ENSG00000259583_33 (sequence is synthesized)
gattcaattatggatgtgtgcaaagaatctgctgctcgggcgtggtgtcctcagtgctgagagagccccgcgacggcggtgcagctcctccagggcgcgcagccccgccacctggcgcca

SEQ ID NO: 831257 - DNA, 120 bp, Artificial Sequence
  ENSG00000259583_34 (sequence is synthesized)
ccgcgagggagcgcaggcccagggcccgggcagacgctggaggggacgcggcaggtgaagatggggcacctccacttcccttctaaaggagcctgggaataggctaggaaatgtccccac

SEQ ID NO: 831258 - DNA, 120 bp, Artificial Sequence
  ENSG00000259583_35 (sequence is synthesized)
cgttagccacaacttcgcataggaaggttattgcagctatatgggaacactttcagtttcccaagttaaaacatgaaattgcacatcatcatttggatccccaaagaggaaaagaaaaat

SEQ ID NO: 831259 - DNA, 120 bp, Artificial Sequence
  ENSG00000259583_36 (sequence is synthesized)
tcacaacctgccagtgaaatactcaggccacttggatgaagaccgaggtcctccatagaatccaggtgttatttactaactaatcagaaattaatatcaaaataggacttaaaaataaca

SEQ ID NO: 831260 - DNA, 120 bp, Artificial Sequence
  ENSG00000259583_37 (sequence is synthesized)
aggctgtgttattacagcagtctttccagttgtgtacgctttactaatctaaattgggtaacagaactggagaaaaggaagactacacagacttatcataagctgttagtgaacgtgata

SEQ ID NO: 831261 - DNA, 120 bp, Artificial Sequence
  ENSG00000259583_38 (sequence is synthesized)
ttgtggcgttagaagattggatctttagcagcaaaggtaacctcaacaatattttctgcttaagaaagtgccttggttaaggtagaccgtgatatcgtctttgactaagctctctgggct

SEQ ID NO: 831262 - DNA, 120 bp, Artificial Sequence
  ENSG00000259583_39 (sequence is synthesized)
attgattctgtcatattccaaaggcagtattggtttgaagccgaatctcacggtcaatgtcaacatgcaatccacaaagaccctggcgcccttccacggtatgcactaaccaaaactttc

SEQ ID NO: 831263 - DNA, 120 bp, Artificial Sequence
  ENSG00000259583_40 (sequence is synthesized)
tcactgtgaaatcctttttttaaaaacaagaaaacaaaaaacaaaaaccaaaaaaccttactgtgaatcctttcccaaggaatggtcccaccttcacctcggaaagaggcgtggcttgct

SEQ ID NO: 831264 - DNA, 120 bp, Artificial Sequence
  ENSG00000259583_41 (sequence is synthesized)
ctgtaagcaggtccaccctgaggagaccgctggtgcaagagccctgcttgcagaacacacagggggttttcccacattcttactggagtcagattcggcaaagcatttcaagcaactgct

SEQ ID NO: 831265 - DNA, 120 bp, Artificial Sequence
  ENSG00000259583_42 (sequence is synthesized)
ggacacttcaaataccactccctgttaacaacgccctgagtatctcactgtctccaggatctggtttaaagggaaacacagaaatggccaacagctccctccccaggcaggactgcgatt

SEQ ID NO: 831266 - DNA, 120 bp, Artificial Sequence
  ENSG00000259583_43 (sequence is synthesized)
tcacagacaacctataggcatccccagtctggtgaataaacaggagagtgagaggaaaacagcaatcattcaactccagtagatgtaaagcctccagaagaatgtgtcccgggaaggtca

SEQ ID NO: 831267 - DNA, 120 bp, Artificial Sequence
  ENSG00000259583_44 (sequence is synthesized)
tgtcgccaagtttgatggtgacagttttcacttctgtgtattcggccaaagcgtattcacctctgtgatcacagaaaagaggaaaattcaaaatgggtacatcccttagccattgtgtag

SEQ ID NO: 831268 - DNA, 120 bp, Artificial Sequence
  ENSG00000259583_45 (sequence is synthesized)
aaactgttctgaggcttcatcattccatcaggccgttggaggcttatgcaaaaggttaaaatgtgacgacctcatggaataatagccaggactataacagcactagtaagtgtcagtagc

SEQ ID NO: 831269 - DNA, 120 bp, Artificial Sequence
  ENSG00000259583_46 (sequence is synthesized)
tgcatatgtgacttaaatgtaaatatcaaggtcttcttctgtgtgatgcttttgaaatggccaggactaagggtttccctttagagaatgaaggggattttaaaaaaagtaaagaggtga

SEQ ID NO: 831270 - DNA, 120 bp, Artificial Sequence
  ENSG00000259583_47 (sequence is synthesized)
attccctggggtggcaatagagagcaaaacgagagagcctggtggacggtggggtgtctgtgaacgagggaggggcagaaattacactgggttgataacttttagatggcaattgggagc

SEQ ID NO: 831271 - DNA, 120 bp, Artificial Sequence
  ENSG00000259583_48 (sequence is synthesized)
tgcttgaagaggagacagaagaggcagaggcccaaagctattggctggggatgtggccagaggaccagtgggaagaacaccaagggcctgaagctggcctcagagtgcacagctggggac

SEQ ID NO: 831272 - DNA, 120 bp, Artificial Sequence
  ENSG00000259583_49 (sequence is synthesized)
cagctgtcaggcagtgaggccagcctagggggcatgagagaagcagacgttagcacagagtggacatggggaggccacagcttttgggttcacatccttggtatagttcctttctttaaa

SEQ ID NO: 831273 - DNA, 120 bp, Artificial Sequence
  ENSG00000259583_50 (sequence is synthesized)
tcttgcagggctcaggtgatccttccctggcaccatgggccgtcttcagggtagcttcccttccaagacccaagaggcagctttggagagatttaaatccttctaagcgcttgatctgct

SEQ ID NO: 831274 - DNA, 120 bp, Artificial Sequence
  ENSG00000259583_51 (sequence is synthesized)
gtcaggtgaagaaaaatgtgtgcttgtttaggaagagatgaaggtagaggtggccactggagtctctgtagttaaaaagacctgtgacagaatcccatctcctcccttagatcaatggtt

SEQ ID NO: 831275 - DNA, 120 bp, Artificial Sequence
  ENSG00000259583_52 (sequence is synthesized)
ctcaaagtgtggtccccagaccagcagcatcagcctcacctctgaacttgctagaaatgtagattctcaggcctcccccagccctactatcgtaggcagaataaggatctccccaggtat

SEQ ID NO: 831276 - DNA, 120 bp, Artificial Sequence
  ENSG00000259583_53 (sequence is synthesized)
ccaaaattggatcccccaaacctgtgaatatgttgggctacagagtgaagaattaatgttgcagatggaattcaagttactaatcaattgactttaaaagagggagactctcctggatca

SEQ ID NO: 831277 - DNA, 120 bp, Artificial Sequence
  ENSG00000259583_54 (sequence is synthesized)
tccaggcagacccagtgtaatcacaagggtccccaaaactggcagaagaagagaggcagagcaaaatgagattatagaaacaggttcagagagcagcagtgctggctttgaagatggagg

SEQ ID NO: 831278 - DNA, 120 bp, Artificial Sequence
  ENSG00000259583_55 (sequence is synthesized)
atggggccaccagcctaggaatgcgagcagcctctagaggatggaaaaggcaaggaagtagattctctcctgagaacctccaaaaaggaatgaagcccttgattttagctcagggagacc

SEQ ID NO: 831279 - DNA, 120 bp, Artificial Sequence
  ENSG00000259583_56 (sequence is synthesized)
tgtgtcagatttttatcctacagaactataagataatagatttatgttatttaagccactgatgttatggtaacttcttgcaggagcaataaaagactaataaacttactgaatcagaaa

SEQ ID NO: 831280 - DNA, 120 bp, Artificial Sequence
  ENSG00000259583_57 (sequence is synthesized)
accctcactgccatttcacagaaccggggcagccgcagggctcctgcaggacctcccggacgccgcggggccgtgttcccttgagcggcttcttgggtccctggttggagaggggaccac

SEQ ID NO: 831281 - DNA, 120 bp, Artificial Sequence
  ENSG00000259583_58 (sequence is synthesized)
cgagcagcttcgctctgctcctgggaggctacttctgccactggacgactttccaaaagggtgagcgcagttctgcaatcctgttctcacccctgagggcctcacaccagtttgcaggag

SEQ ID NO: 831282 - DNA, 120 bp, Artificial Sequence
  ENSG00000259582_0 (sequence is synthesized)
aacattggaccctaaacagaaccaatgacaaacctgtgagctcacaagcacacttctggagaacctggctaccagagaagtgttacttccaagctgtaaaatcactcagcaatgctgctt

SEQ ID NO: 831283 - DNA, 120 bp, Artificial Sequence
  ENSG00000259582_1 (sequence is synthesized)
gcctgacagaggaatggaatgacttgctgaaggagtagcagaaacactgacttggaggtgatgacttgcaagagaggagagtcatcctccaagatgtcaggtgctgaagtatttatctca

SEQ ID NO: 831284 - DNA, 120 bp, Artificial Sequence
  ENSG00000259582_2 (sequence is synthesized)
agctgccagtcctccttatgaattacctaaagctaagataattttttcatccaaggtcacactcccttgctggggaagcccacattcaattactggtcagtgtgggagtataaaagctgg

SEQ ID NO: 831285 - DNA, 120 bp, Artificial Sequence
  ENSG00000259582_3 (sequence is synthesized)
ttctttcccttcaatttggtacaatgtgaggggccatctttgcttcagctcctcatataagttggctgagactttcatggaggtgatgttgtagcccagttgctttgtgtccaatcctgc

SEQ ID NO: 831286 - DNA, 120 bp, Artificial Sequence
  ENSG00000259582_4 (sequence is synthesized)
ctgtacttatcaagctgaacatatccttaatcagaccacagtgcttggagcacaatgggcccttaaaaatggggacaagagggaagaagaaaggaaggctggggcaagcaaaaaggagag

SEQ ID NO: 831287 - DNA, 120 bp, Artificial Sequence
  ENSG00000259582_5 (sequence is synthesized)
ccagatttctttgtcaagttttaaaagtatcgctgtacggaaattttacagaagaaattttgaacaccacagatttttgccttttgagttattatttgcattaacgtaatattaacaggg

SEQ ID NO: 831288 - DNA, 120 bp, Artificial Sequence
  ENSG00000259582_6 (sequence is synthesized)
caacaatgtttttcgatttatcatgtggttaagcaaattgttaaacacatttgattaccgaaaacagggaatatggtagaagatcaaagacatgccagaaatttttattttatgtgggac

SEQ ID NO: 831289 - DNA, 120 bp, Artificial Sequence
  ENSG00000259582_7 (sequence is synthesized)
actcggaatttagttgagcctgacagagtcctgctggctaacaccaaggagagactattgctggccccatgcaagtggctggaataatggaagtcaagaaggaaatctccacatggtcga

SEQ ID NO: 831290 - DNA, 120 bp, Artificial Sequence
  ENSG00000259582_8 (sequence is synthesized)
cactttgaagttggtcatagataggaagttagaacaaactccagtgggtgaggggtcatgagtttaccaggagaaggtaacttaagactgaatgaacaaaaagaatttgtggtcacacga

SEQ ID NO: 831291 - DNA, 120 bp, Artificial Sequence
  ENSG00000259582_9 (sequence is synthesized)
gaacttcccgtctggaggaaagaagagaatgaatgacatgcaacattggaccctaaacagaaccaatgacaaacctgtgagctcacaagcacacttctggagaacctggctaccagagaa

SEQ ID NO: 831292 - DNA, 120 bp, Artificial Sequence
  ENSG00000259582_10 (sequence is synthesized)
gtgttacttccaagctgtaaaatcactcagcagtccctgcaactgatgcaacctttactttaagagaataggaggacatcatgttcataaagaaaccttggatctcgaacgtacctaaaa

SEQ ID NO: 831293 - DNA, 120 bp, Artificial Sequence
  ENSG00000259582_11 (sequence is synthesized)
agcagcttaaagtccttggagcaaacagtacagctgagaaatgttacaccagttgggtgtcaatccataaaacccgttctagagaaaatcgtggagatgtttaaagacatgaaggcaaag

SEQ ID NO: 831294 - DNA, 120 bp, Artificial Sequence
  ENSG00000259582_12 (sequence is synthesized)
acaaatttttcaaccagaaccctcaagaaatgtcacttctctgtcttgccaagagagatccagcattttttctacataaacatctgctggaaacattttaaagggaggcattttaaataa

SEQ ID NO: 831295 - DNA, 120 bp, Artificial Sequence
  ENSG00000259582_13 (sequence is synthesized)
tgacgtttatagcttcttggtctttaataagtctgaaaaagaagaaaaatgaatttgtgatacattccttcccaaagcaacttttcttcactgatatgcatcatattagatgatctaaaa

SEQ ID NO: 831296 - DNA, 120 bp, Artificial Sequence
  ENSG00000259582_14 (sequence is synthesized)
gcgaaaatattaacattatgttgggggaaaatgattaagaacatttctctgaactgtctgtatcaatcatacctgagagtcagtcataaatcacaggttccttaaactccagaaactcca

SEQ ID NO: 831297 - DNA, 120 bp, Artificial Sequence
  ENSG00000259582_15 (sequence is synthesized)
ccgttctagagaaaatcgtggaggtaaaaataaaggaggaagagtatagggcaggatggtagctttacaaatgagtataacacctgaatggaaaaaaaaattaaaaagaccttcttggta

SEQ ID NO: 831298 - DNA, 120 bp, Artificial Sequence
  ENSG00000257636_0 (sequence is synthesized)
ttgattctataaacagcaactataaacacataaatacagaagaatgaacctcggagtcctgaaaacactgccactatgaaactatgaaaaaggagacagcgaaatagacttgtcatcctg

SEQ ID NO: 831299 - DNA, 78 bp, Artificial Sequence
  ENSG00000257636_1 (sequence is synthesized)
actatgaaaaaggagacagcgaaatagacttgtcatcctgtgcagttttttgtagagacaagttctcactatgttacc

SEQ ID NO: 831300 - DNA, 120 bp, Artificial Sequence
  ENSG00000257636_2 (sequence is synthesized)
ttcaaagtctggctgagaatttttgctgcttctttccctacctcctcatttccgaaggaggtacctttctggcttctctgttgaacatttcctaaataaagtgtggatgaaaagcaatag

SEQ ID NO: 831301 - DNA, 120 bp, Artificial Sequence
  ENSG00000257636_3 (sequence is synthesized)
aggaaggaaatgcagaaaattataaggctgaaatagaaactggccacagcagagattaaaggcccttcctgggttagctgatgctcacctacattgatgaggacaatctttgtttagttt

SEQ ID NO: 831302 - DNA, 120 bp, Artificial Sequence
  ENSG00000257636_4 (sequence is synthesized)
gctgattcaattgctcacctcttctggaaacaccttcacagactcaccagaaataatgttttaccagccatctgggcatctgttagcccagtcaagttgacacttaaaattaaccaccac

SEQ ID NO: 831303 - DNA, 120 bp, Artificial Sequence
  ENSG00000257636_5 (sequence is synthesized)
cagatccggactggaacctataccatcagctgtttggctccagacattcaaactacactgcgggactttcctgggtctccagtttgcaaacagataatgggactgttcacactacataat

SEQ ID NO: 831304 - DNA, 120 bp, Artificial Sequence
  ENSG00000257636_6 (sequence is synthesized)
ctgattcagaatctgagatctgaagtgcaggaatcagcattgttgaacaaatccttcaagaactaaggttaaaccatgaccactcctcgaggccttccctggagattcgggctcatagat

SEQ ID NO: 831305 - DNA, 120 bp, Artificial Sequence
  ENSG00000257636_7 (sequence is synthesized)
attcgggctcatagattccttctttctctgaattctaaagtacttatggaagattcagcagataatttttaatgaattaaattttaatacatcaaattacttaataataaaatttaataa

SEQ ID NO: 831306 - DNA, 120 bp, Artificial Sequence
  ENSG00000257636_8 (sequence is synthesized)
gttcctattcggccatcttggctcctggatctctgtgtcaaccttcttttatttttaaaagatattcactgtctcttactaaagcttcctgttcaaagtctggctgagaatttttgctgc

SEQ ID NO: 831307 - DNA, 77 bp, Artificial Sequence
  ENSG00000257636_9 (sequence is synthesized)
aaagcttcctgttcaaagtctggctgagaatttttgctgcttctttccctacctcctcatttcctcgcgtcctgggt

SEQ ID NO: 831308 - DNA, 120 bp, Artificial Sequence
  ENSG00000257636_10 (sequence is synthesized)
atagtgttttatcccctctctgcactccccaaattagactgcttgtttattgaaattggtcaaacagtttaattagcattccatgtttgttatttctttaatcgaggtttcaaacagaac

SEQ ID NO: 831309 - DNA, 120 bp, Artificial Sequence
  ENSG00000257636_11 (sequence is synthesized)
aaggcaacaagccaggccagtaatgagtctcctccacctactcttaagttaaatacttgctgagattcccattggtttcccagagacatctcatcactgatgtactttcacttatcaaca

SEQ ID NO: 831310 - DNA, 120 bp, Artificial Sequence
  ENSG00000257634_0 (sequence is synthesized)
agcttcattcatgattcagagatagaggggtgggggcttaggtggatatcattccatccacacctattagacagcccagaggagggaaggaatgtgcctgtctgctgtgtagcagagtgt

SEQ ID NO: 831311 - DNA, 120 bp, Artificial Sequence
  ENSG00000257634_1 (sequence is synthesized)
gttgtgcacagtggagctggggctagctttgggagaagtgtcccaagcagcaggaatgtgaacaggtgaggcttccagcccacaggagcctgcagagagtgtgcgagactgaattggaag

SEQ ID NO: 831312 - DNA, 120 bp, Artificial Sequence
  ENSG00000257634_2 (sequence is synthesized)
gagagaggtcacggttgagagctggaaaggtagcttcccaaagtcatcaaggatgcaggcttctgtattgctgtttcaccatcctgagttttggctttcaccctcctggatacttcatgg

SEQ ID NO: 831313 - DNA, 120 bp, Artificial Sequence
  ENSG00000257634_3 (sequence is synthesized)
tctctagtgagtgctgaaactatggaccctggacccactctgaagggagcagaaggagctggtctgcccccctttaacaagtcttctcatcagtctcattcagcatttctgattccatcc

SEQ ID NO: 831314 - DNA, 120 bp, Artificial Sequence
  ENSG00000257634_4 (sequence is synthesized)
caaccaccacatgggagacacatggccacacctagctgcaagagaagccaggaaatatagcttatctgttacacatattgtccaggtttttgtccctgaggaagaaggggaggatggatt

SEQ ID NO: 831315 - DNA, 120 bp, Artificial Sequence
  ENSG00000186056_0 (sequence is synthesized)
gatgacgctgtagctctccacgtaatcgacgtgttcgtcctgcggctcgctggcgatctgccgcagcgtggccttgtccacgctgcccactccgatggcgaacagctcgacgccgctggc

SEQ ID NO: 831316 - DNA, 120 bp, Artificial Sequence
  ENSG00000186056_1 (sequence is synthesized)
ccgggcccgcgcagacacgtcctgcacgctgtcctggggcctcccgtctgtcaccacgatgaccacctgcgacacgcggggcggtgtgacaccgggctcccggaagcccacgggactgtc

SEQ ID NO: 831317 - DNA, 120 bp, Artificial Sequence
  ENSG00000186056_2 (sequence is synthesized)
caggagaggaggctgaggcccggagaggcgggaggactgccgggtcgcacagccaggcggcacccgggggaagaggacccggctggccgaagaggagacccgtttcctctgactgagaga

SEQ ID NO: 831318 - DNA, 120 bp, Artificial Sequence
  ENSG00000186056_3 (sequence is synthesized)
cgtggctggggggctttccatctgcttcgcctccctcgggcaggcagctctgagatgcccggagggatgtgatgccccatcgccaaattggggtctctaaggtcagggccatgccttccc

SEQ ID NO: 831319 - DNA, 120 bp, Artificial Sequence
  ENSG00000186056_4 (sequence is synthesized)
ctcagactgaggcggctgagggcagggtcctcaggctgatggctgtgggagtcgtgccacgcccctcgtgcccccgggaggcccggccggggctgggtggggggatccggtggttccaca

SEQ ID NO: 831320 - DNA, 120 bp, Artificial Sequence
  ENSG00000186056_5 (sequence is synthesized)
tggtgcagttctgcgctttggccaccagatggcagccgaagctaagggatggggctgccgtctcccgtcttgctgtccttgtcccggtaagaccggggaccctggaccagggaaccgacg

SEQ ID NO: 831321 - DNA, 120 bp, Artificial Sequence
  ENSG00000186056_6 (sequence is synthesized)
gagggccactcccatgtggatgcccaagggaccaacccaagaaagatgccgcccttatcctcctccactccccgctatgaaatggccacctcacggggcatcatgggaatcaaagtgtct

SEQ ID NO: 831322 - DNA, 120 bp, Artificial Sequence
  ENSG00000186056_7 (sequence is synthesized)
gcaggcaaagctcataactccgagcgggagcctccaaacagcagcatcctagcagggtggcgtgcacgtaccttgctgatgtcaggggacctggaacgaccaccctctgcatcgccgaag

SEQ ID NO: 831323 - DNA, 120 bp, Artificial Sequence
  ENSG00000186056_8 (sequence is synthesized)
tggagacatgagcccgcagcgagaactcctgcttcacggtgctggcatagttgaccatgcccacccgggtggcattgggccccacgtccagcgactcgatgacctgggacaggaatacct

SEQ ID NO: 831324 - DNA, 120 bp, Artificial Sequence
  ENSG00000186056_9 (sequence is synthesized)
tcactttctcaaattcaacaggccgaacgctgcgagagctgtcgacaacaaacaccagggtcacacaagggccatccacggtgaccagcggtgagaaacgcaatgctgtcctcgtgccat

SEQ ID NO: 831325 - DNA, 120 bp, Artificial Sequence
  ENSG00000186056_10 (sequence is synthesized)
gctggaggtgaacgaggagaacgtgagctggggtctcctcaccaactgctccccccaccccaacccccctgacggccagggctgtgtccagggctcagggcacaaggctccgttagctgg

SEQ ID NO: 831326 - DNA, 120 bp, Artificial Sequence
  ENSG00000186056_11 (sequence is synthesized)
gcagcagctggcccatgaaacagccctttcagctccacctctgaatggcagttctatgggctcctcggaagaacacaggcgccttctctgtgtcacttctccgctcattagcagagctgc

SEQ ID NO: 831327 - DNA, 120 bp, Artificial Sequence
  ENSG00000186056_12 (sequence is synthesized)
agaaatacactacaggactcaaaattgagaacagtgtgtccggtatgagccagaaggaaaaaaaaatgcacgaaggggccttctgcaaggttgctcacaagtcaaacaggcagctgtgaa

SEQ ID NO: 831328 - DNA, 120 bp, Artificial Sequence
  ENSG00000186056_13 (sequence is synthesized)
gggctctgctgttccctcctcctgttttcacatccctcgggcttccagaaacttaaagccgttagtgtttcatgcaagagagagcatctgtgatccacggagaggcccctgggcagtgtg

SEQ ID NO: 831329 - DNA, 120 bp, Artificial Sequence
  ENSG00000186056_14 (sequence is synthesized)
gttcagtgggaagcacacaggactccctccccagtgctcccaggatcagctctttccctaaagagcaaacctggttatctcgcaatgacctagctaacacaaatgcaacatcagccgggg

SEQ ID NO: 831330 - DNA, 120 bp, Artificial Sequence
  ENSG00000186056_15 (sequence is synthesized)
cagcctgcccccttcactctttgcccaccatcagctgtttggcagtatccatatacgcctttaccagtatttatttaatctttttgtttaattcactctaaaccaactcacttcttaaaa

SEQ ID NO: 831331 - DNA, 120 bp, Artificial Sequence
  ENSG00000186056_16 (sequence is synthesized)
atttctctgccttataagaaataatagccatgaaatcactggtttgatgtacggtttatttatttattccaataaacactcattcaatataaaattcaaataaattcaaaactaattaaa

SEQ ID NO: 831332 - DNA, 120 bp, Artificial Sequence
  ENSG00000186056_17 (sequence is synthesized)
ggcagctctgagatgcccggagggatgtgatgccccatcgccaaattggggtctctaaggtgaggaaaccgagcaccagtgacatgacgtcacttgctcggggtggcacagctagtatgg

SEQ ID NO: 831333 - DNA, 120 bp, Artificial Sequence
  ENSG00000186056_18 (sequence is synthesized)
tggagcagggcgtgaacccaggcaggctggtggcggaggccacaccttcactcctcccataagcatctggcctgtctgcaatgtcttcaaggggctcagactggtcgggaaccaaggtca

SEQ ID NO: 831334 - DNA, 120 bp, Artificial Sequence
  ENSG00000186056_19 (sequence is synthesized)
ctctctccgtctccgcctccgcccccggctcctccccggccccgccccggcactgacattctatctctctcccgtctccgcctctgccccccccccggccccgcccctgccctgcgccgg

SEQ ID NO: 831335 - DNA, 120 bp, Artificial Sequence
  ENSG00000186056_20 (sequence is synthesized)
cagcctcggtcccgcctccagccctggccccgccccgccgctctccccttctccgcccctgccctggctccgcccccgcctgcccgcgcaccgcagaaggcctcctggaacttcctggac

SEQ ID NO: 831336 - DNA, 120 bp, Artificial Sequence
  ENSG00000186056_21 (sequence is synthesized)
ccagagagggaaagaatctgcctgctcccctcccactaggctcctctggtctgtaccctggaaagaaagaggtggcggactctgtcactgagatccggcttcgtgaccccctgtctgcac

SEQ ID NO: 831337 - DNA, 120 bp, Artificial Sequence
  ENSG00000186056_22 (sequence is synthesized)
ccgccctgaggctagggcgctcccagctctgcccagtctgggttaggcatccagtcccgctttgctgcttctctgcttctgacttgggtctgtttctgattcctgggtcccatccttagc

SEQ ID NO: 831338 - DNA, 120 bp, Artificial Sequence
  ENSG00000186056_23 (sequence is synthesized)
cccaggtcctgacaccctgtcctgatgacaggcagttgagacaggccgtgtttagaaatgcagctccacaagctacaggtcaccttcctgagcctcagtgtcttcaactgtaaaaagggt

SEQ ID NO: 831339 - DNA, 120 bp, Artificial Sequence
  ENSG00000186056_24 (sequence is synthesized)
tgtggtgaggttgagtgagatgactcctggttagaagccagaaggggcaactattatttttaccatcattaccctgggctacctggggagtgactttgtacaatctcttcctctccaggg

SEQ ID NO: 831340 - DNA, 120 bp, Artificial Sequence
  ENSG00000186056_25 (sequence is synthesized)
gcctgggctcctggctctgaaaatctagctgtgactattcgctgccatcccgaggcccactgcctcctcgagtccctactcccctccctgcaacccagctttcagattgtccaccttgct

SEQ ID NO: 831341 - DNA, 120 bp, Artificial Sequence
  ENSG00000186056_26 (sequence is synthesized)
gggtcctcccacaggtgaactccaggctgaacacctggagtctggtgccagctcccccagcgccgctgtgtcacctgctggaggagctctctcctcacttgcccaccccacgccaccacc

SEQ ID NO: 831342 - DNA, 120 bp, Artificial Sequence
  ENSG00000186056_27 (sequence is synthesized)
cccatctccttcaccctctccaccacctcaaccatcagcttcatctacagcaccccgtgctgaaacttgtagttggccccaagaccgacaggctgcctgatacgtcatttctctaagggg

SEQ ID NO: 831343 - DNA, 120 bp, Artificial Sequence
  ENSG00000186056_28 (sequence is synthesized)
ctcagtttcaccatctgtaaaatggggataccacctccgagcagaatcatgttcatttatccactgtgtgctagagagtggggtatggaggagggataagaaagaacctcccctgagctg

SEQ ID NO: 831344 - DNA, 120 bp, Artificial Sequence
  ENSG00000186056_29 (sequence is synthesized)
gggccctgagcagggaagtggcgactcgggctaacgaaggctgcagtggggaagtgctggagcctgtgggggtgccacaggaacagaggacacctggcttagcctcaggttctgtgctga

SEQ ID NO: 831345 - DNA, 120 bp, Artificial Sequence
  ENSG00000186056_30 (sequence is synthesized)
gccctgaacatgacagtgaggatacaagtcctgggaaacgctcagccctctgcctggagccctcactgacagcacaggtggcagcacagcccttccatttctgagcccctgccctcggag

SEQ ID NO: 831346 - DNA, 120 bp, Artificial Sequence
  ENSG00000186056_31 (sequence is synthesized)
aattatgaaattaaaaattatcaaatgccatgatgggaagccttatgcttttgaactcagtcctcagcagcacttggagaaggtgttatcattactcccattttacaggtgaggaaaccg

SEQ ID NO: 831347 - DNA, 120 bp, Artificial Sequence
  ENSG00000283341_0 (sequence is synthesized)
cagggagttgagggtttctgcctttcggagggtttggggggctgtcggtcccgttagaaggccaccaacagccccccaggttgccaagggcctgttagttgtgttcctggaaggtgggca

SEQ ID NO: 831348 - DNA, 120 bp, Artificial Sequence
  ENSG00000283341_1 (sequence is synthesized)
agcagcctgatgggttaacattgggatttgccgtcgttatagcggtcaaggggcctgtagcggctgcagggataacactagatagccaagaatggcagtacctgttttgtctgtctacac

SEQ ID NO: 831349 - DNA, 120 bp, Artificial Sequence
  ENSG00000283341_2 (sequence is synthesized)
gaattggacctcattgtttctgccacaatgtactgctccataaattccgccttatttccatggtattgtctgattggacaactgaatttaaagccaagtgaaggattcagctatgtccca

SEQ ID NO: 831350 - DNA, 120 bp, Artificial Sequence
  ENSG00000283341_3 (sequence is synthesized)
agtactgatggaattggaaaatcatatgcagaagagttagcaaagcatggaatgaaggttgtccttatcagcagatcaaaggataaacttgaccaggtttccagtgaaataaaagaaaaa

SEQ ID NO: 831351 - DNA, 120 bp, Artificial Sequence
  ENSG00000283341_4 (sequence is synthesized)
ttcaaagtggagacaagaaccattgctgttgactttgcatcagaagatatttatgataaaattaaaacaggcttggctggtcttgaaatcggcatcttagtgaacaacgtgggaatgtcg

SEQ ID NO: 831352 - DNA, 120 bp, Artificial Sequence
  ENSG00000283341_5 (sequence is synthesized)
tatgagtatcctgaatactttttggatgttcctgacttggacaatgtgatcaagaaaatgataaatattaatattctttctgtttgtaagatgacacaattggtactgcctggcatggtg

SEQ ID NO: 831353 - DNA, 120 bp, Artificial Sequence
  ENSG00000283341_6 (sequence is synthesized)
actggatcctattaaataattcaatggtagcggtgtaattttggttggaaccagcacggattcccaagtcgtgactgcaaaaagtggtcaaacctgtcctgacacccagaggtctgcatg

SEQ ID NO: 831354 - DNA, 120 bp, Artificial Sequence
  ENSG00000283341_7 (sequence is synthesized)
aggggtggccactgaaggaggagttctcaaaggccacaggtgatgaagagcttggatgaataaacttagaagtcccaggaaaatagcaaaaatttcatctcctgaagaaatttgaagatt

SEQ ID NO: 831355 - DNA, 120 bp, Artificial Sequence
  ENSG00000283341_8 (sequence is synthesized)
ccggaccttggtcgtctggcattctgcctttgaaatatctgggtggccggcgcctaggcatatggggttgtgctttctgtgttgtggtttgtagcttgcatcctccactgttcttagcgc

SEQ ID NO: 831356 - DNA, 120 bp, Artificial Sequence
  ENSG00000283341_9 (sequence is synthesized)
atttggctctgtccatatggctgttggtactcatggccctatttggggttggactgggctctttttcttgggtctggtgggatttaagcaagaactggaattttgtaagatgtacagcag

SEQ ID NO: 831357 - DNA, 120 bp, Artificial Sequence
  ENSG00000283341_10 (sequence is synthesized)
tgtcctgggtgttgtctgtctggtgtggggtgtgagcagttgcaggagttatgaacgtgtccatgatcgtgtggttggctttcccttgcatgtggtgaactttcccctcgtttgctaatg

SEQ ID NO: 831358 - DNA, 120 bp, Artificial Sequence
  ENSG00000283341_11 (sequence is synthesized)
ctgaaaggcagtgtcaggcagttcctacttgtgaaatgccttcttattaacttggatgtgttcctaaatcttgggagctttgcaattgcttgtagaaagatatgtgtgcaaaactgaatt

SEQ ID NO: 831359 - DNA, 120 bp, Artificial Sequence
  ENSG00000283341_12 (sequence is synthesized)
taaaacgagcaccagggttgcaggtacctttagttctagggagccagctcccccaggcttccctggtgctgtgaagttgtttgagtttatttatggaaattaggtttgctttgagctgtg

SEQ ID NO: 831360 - DNA, 120 bp, Artificial Sequence
  ENSG00000283341_13 (sequence is synthesized)
ttaccttactcttggctcagagtttctctgcatgttgggaccctgatctttgatattgggtactgtttcaacatttgaggctaaatgaagcaccgtgtactgatgtgtaatgtcgtgtat

SEQ ID NO: 831361 - DNA, 120 bp, Artificial Sequence
  ENSG00000283341_14 (sequence is synthesized)
tgctccataaattccgccttatttccatggtattgtctgtaagttttgaaatctaactggtcatgaaaagccatttttcaggcagtatttaaaagctttttcccacaagtagaactggta

SEQ ID NO: 831362 - DNA, 120 bp, Artificial Sequence
  ENSG00000283341_15 (sequence is synthesized)
tctaaaacattttttcattcaagtttggtaaggtgggagatttgaaataaggtacaacagtggttttggaaatcagctatcaagttttagttttaggggccaccacgtgacagaaatgat

SEQ ID NO: 831363 - DNA, 120 bp, Artificial Sequence
  ENSG00000283341_16 (sequence is synthesized)
ttatagagagagtaaaaattgtattccatttctcttggtattttagtgcatataaaaactaaataaaccactttcatatatcattaaaaagccctttgtgtcttgtgatgaatgaggttt

SEQ ID NO: 831364 - DNA, 82 bp, Artificial Sequence
  ENSG00000283341_17 (sequence is synthesized)
tcattaaaaagccctttgtgtcttgtgatgaatgaggtttttataactcccctattgtctgggtttgcttagaatatagtaa

SEQ ID NO: 831365 - DNA, 66 bp, Artificial Sequence
  ENSG00000283341_18 (sequence is synthesized)
ctactaaaaatacaaaaaacttagctgggtgtggtggcatacgcctataatctatcagtgaacgga

SEQ ID NO: 831366 - DNA, 120 bp, Artificial Sequence
  ENSG00000283341_19 (sequence is synthesized)
ctactctggaggctgaggcaggagaatcggcttgaacctgggaggtggaggcggcagtgagccaagatcacttcactgtactccacccctccaacctgggcaacagagtgagactgcatc

SEQ ID NO: 831367 - DNA, 120 bp, Artificial Sequence
  ENSG00000283341_20 (sequence is synthesized)
caacagagtgagactgcatctcaaaaaatatatgtatagtaatggtagagaaagcagcaaagctggctgggtatgtacatgtgattctgttgaaactgatttcaggtatggattgatagg

SEQ ID NO: 831368 - DNA, 120 bp, Artificial Sequence
  ENSG00000283341_21 (sequence is synthesized)
ctaatattgttgggttgctagtcagatctcaggaaagtatttccttccctctaacctgacctaagtgtgtcttagaatgttaactaacttgacaattgaataaaaaagattgagaaattt

SEQ ID NO: 831369 - DNA, 120 bp, Artificial Sequence
  ENSG00000283341_22 (sequence is synthesized)
gtatcttaggaagaccggatggctagactttgtagatgtgtagaatcatttagaatgaaccacagccacagtgcccatttgccttgaaagaagatacatgaatttttaattgacaagtta

SEQ ID NO: 831370 - DNA, 120 bp, Artificial Sequence
  ENSG00000283341_23 (sequence is synthesized)
cctctggcttgagttaaacagaacaaatagttcattagagggtgctttgaatggactttgagagtggaaagaaggtggagtcttttcacttccttgaatctgagtggatccttcgactgt

SEQ ID NO: 831371 - DNA, 120 bp, Artificial Sequence
  ENSG00000283341_24 (sequence is synthesized)
tttgaccaagactatgtggtagaagcgaagttccagttccaggtattgctcttatttcacctgacaagtttggtttcctgccttttggaagctgaccactatgttagaaatgtaatcacc

SEQ ID NO: 831372 - DNA, 120 bp, Artificial Sequence
  ENSG00000283341_25 (sequence is synthesized)
ctgaaatcactatgtcgtgagaaacccaaaggcaagtgaagaagccctggaggatgcgacatcaagtgtagaggcaaaagagcaccaaggaagaggccaaagaacactaagtgaagaagc

SEQ ID NO: 831373 - DNA, 120 bp, Artificial Sequence
  ENSG00000283341_26 (sequence is synthesized)
cattttgaaaatggatcctccagccccagctgccctagttgttacgtaaatcagataaattgcccagtggtacccttcccaatttctgccccataaaatcatgagccaaataaaatggtt

SEQ ID NO: 831374 - DNA, 120 bp, Artificial Sequence
  ENSG00000283347_0 (sequence is synthesized)
aagcgtctcacctgtagtcaaagagggacagcatcaaagcagacactgcttttggcagtgaaatgagcaaagagtgcccccacgggtaacccttcatgttggtgaggacatgggaaagca

SEQ ID NO: 831375 - DNA, 120 bp, Artificial Sequence
  ENSG00000283347_1 (sequence is synthesized)
ctgctacaaatctctggagaacaatttctatgaagtgtgaagaatagagtttttgacattgtacttgttctcttcactcttcgggattctataagagatgtccagcaagcagcagagctg

SEQ ID NO: 831376 - DNA, 120 bp, Artificial Sequence
  ENSG00000283347_2 (sequence is synthesized)
gctacttcaagtaggatgtgaccatttgacatatccttgctgacaattgaacaaaatgctctaatacggcaaagaatgagccgtatcttcaaaaccaagcagcaacttcgttctcattct

SEQ ID NO: 831377 - DNA, 120 bp, Artificial Sequence
  ENSG00000283347_3 (sequence is synthesized)
gcagaagagtggtttacaaacaaatctccaaccacttcaaattcactcaaccttcaacctttggagggcaaatgtgcttgcaaacattgatttccagaaaaggtaactgtgtctccagta

SEQ ID NO: 831378 - DNA, 120 bp, Artificial Sequence
  ENSG00000257185_0 (sequence is synthesized)
agtttctgctaccacttaagtgttaatagctaataatagagcaagcttgattactaccttggtgtcctaaaacggatgttggcctgccagggagcagccaaggtgaagttttcaaccagg

SEQ ID NO: 831379 - DNA, 120 bp, Artificial Sequence
  ENSG00000257185_1 (sequence is synthesized)
ccgaccaacttcagagtccactggcttcaaaacagtgctttacatcctccttccaacattattcacaagccgatcaagactgagagagtcacaagtgtgtgaaacctgtattctttctga

SEQ ID NO: 831380 - DNA, 120 bp, Artificial Sequence
  ENSG00000257185_2 (sequence is synthesized)
cttcattttccctgggaacctcaaagaattcaaatatgctacttagtatacacactaatgtttgctcaccctttgagcataagctcaaattttattgtggcttatcttctccaaaaaatg

SEQ ID NO: 831381 - DNA, 120 bp, Artificial Sequence
  ENSG00000257185_3 (sequence is synthesized)
ggtcgaaatttttgtagaatagacaaatcaagaatgatgacttcttaagatgcagtattcaagttcagaaatctatactcagatgaccttatgtaggtcatctgcttctgaggtttatct

SEQ ID NO: 831382 - DNA, 120 bp, Artificial Sequence
  ENSG00000257185_4 (sequence is synthesized)
gtatacatttgcaatatctgatttttaaccacacactcttcatcctattgacccagagtgaaaattgatactcttagctgaaggactgttcccttgagtatatttaaaccagaccaatct

SEQ ID NO: 831383 - DNA, 120 bp, Artificial Sequence
  ENSG00000257185_5 (sequence is synthesized)
ctgtgtttaatctgggttcatcaggaaccattagccttgattggtttgtttttctccccctccatctcaggacttgattctattgagttaacaactattctccccagagaacagctaccg

SEQ ID NO: 831384 - DNA, 120 bp, Artificial Sequence
  ENSG00000257185_6 (sequence is synthesized)
caagcctgtttcaagtaattccaatatctggctcttagaaattgaactgatcttttttttctttagttttatgtgaagaactgcagtaatgaattctgaatttgttcaaatcattgaaga

SEQ ID NO: 831385 - DNA, 120 bp, Artificial Sequence
  ENSG00000257185_7 (sequence is synthesized)
tgtgtgaagacaaaacattcactcaaatctctatcatgttagcatgttatttatcattgctctgttcttcattgttgaataatgcaattgagttaaaaagaataaacattatttaccgaa

SEQ ID NO: 831386 - DNA, 120 bp, Artificial Sequence
  ENSG00000257185_8 (sequence is synthesized)
ctgaacaagagagatggcgagcagagtttcctgaatgctgtgagcagaacaattggacagatgagggaagtctgtgacaatccagtggaatcacgcagtgtgtttaagtaaagctccctt

SEQ ID NO: 831387 - DNA, 120 bp, Artificial Sequence
  ENSG00000257185_9 (sequence is synthesized)
tgtaaagaaactgagaccaagaatggttaagtaaagcatcctaattcacatgattatagaacaaaagaactgggactcaaactaaggccctctgatttcaatacacatgtttttaactgt

SEQ ID NO: 831388 - DNA, 120 bp, Artificial Sequence
  ENSG00000257185_10 (sequence is synthesized)
tatgccatgctgtctccaagtaagcatattattaatattattatcaggtacaagaacatattatgtagaaaatgccagggttgttcagtgcttcttttcaacatttctgttattaatagt

SEQ ID NO: 831389 - DNA, 120 bp, Artificial Sequence
  ENSG00000257185_11 (sequence is synthesized)
ttaattttctcactgtgctctttaagctccctatctataaacctgttttatatgtgtgtgtctgtacatgtacatgcaagtaacaacgaataaaattttgaaattttataaagaacataa

SEQ ID NO: 831390 - DNA, 120 bp, Artificial Sequence
  ENSG00000257185_12 (sequence is synthesized)
attcctttatctgggaaatatagatggaatcagtgatatacctgttgctgagcacattattatatcattaatgcttatatatttcaaattatatgcatattctctccagagtgattagat

SEQ ID NO: 831391 - DNA, 120 bp, Artificial Sequence
  ENSG00000257185_13 (sequence is synthesized)
cccttctacagttagggtaatgaaggctttatttgcctgaggggacacagggaaccatttaggagagtgaggcaattaagcaattatataacattttgaaaacattcaatacttcccacc

SEQ ID NO: 831392 - DNA, 120 bp, Artificial Sequence
  ENSG00000257185_14 (sequence is synthesized)
atttgatttgtacttctggagaactgcttttctcatactagctggttagaatagtaaaaatcctcacaccctcccctcccatctgtcattttttttggtcatgaaattatacctcatttt

SEQ ID NO: 831393 - DNA, 120 bp, Artificial Sequence
  ENSG00000257185_15 (sequence is synthesized)
acaaaatgcatttttctgagaaactaatgcttacattgaattttgcaagtttaataattaaggattggaatgttttatttaaaataattaagattattttttaaaagtatcacgtgtgaa

SEQ ID NO: 831394 - DNA, 120 bp, Artificial Sequence
  ENSG00000257185_16 (sequence is synthesized)
agtaattatcacccccaaattgtattttgcaaattgtgcctattttatcactactatacatttaggacgaaaagaaaaaaagttgggggtggataatctatcataatacaaaaagaaaaa

SEQ ID NO: 831395 - DNA, 120 bp, Artificial Sequence
  ENSG00000257185_17 (sequence is synthesized)
ctcttgagtcagtgttacttttcattggggaaaaggcaggtgggaaaaatagataaatacaagttagagttaatcctaaaatctcattacagcttaaaatatcaatctctagaaatacaa

SEQ ID NO: 831396 - DNA, 120 bp, Artificial Sequence
  ENSG00000257185_18 (sequence is synthesized)
aacatttgccaaaataattgttaatatgtgcaacactacccaaattaaaaaatgcaattctcccttctgctagtcctccttctgtaccaatataattagcaataaaattgaaggcaacaa

SEQ ID NO: 831397 - DNA, 120 bp, Artificial Sequence
  ENSG00000257185_19 (sequence is synthesized)
aaataagaaaagacataatgatcctggaaaatctacaaaatggattatcattttctaacaattgttaatacactgtgttttttatgtggtggtgtgataacatttttttcttgctttctt

SEQ ID NO: 831398 - DNA, 120 bp, Artificial Sequence
  ENSG00000257185_20 (sequence is synthesized)
gtaagttaggtactgtgctatatttatctttgacagggcacctagcatctgatagaaattctaaacagcaaatggtagtatgatatttttattatctatgcctcttaaaactctggccaa

SEQ ID NO: 831399 - DNA, 120 bp, Artificial Sequence
  ENSG00000257185_21 (sequence is synthesized)
taaatcacatagcatggacacagaatcttttctaaataaataacctattaaaatagaagttggcagtcttataaaaagaaaataaaagttctgatgaggaaacctgggttgtttctcagc

SEQ ID NO: 831400 - DNA, 120 bp, Artificial Sequence
  ENSG00000257185_22 (sequence is synthesized)
tctaactacaaaaataaacatccttgagaaattgctgaacctccttgttcttgcttaatgtaaaatgagagggcaagattaaatgatctcaaagctccctttcagttcagggactgtgaa

SEQ ID NO: 831401 - DNA, 120 bp, Artificial Sequence
  ENSG00000257185_23 (sequence is synthesized)
ataatatggtaaataggcttacttaggaccttctcgggcactagcactttaagagttttacgtggattgtataatcatcaaaataatcctgcataatagacaccattgttagttgcattt

SEQ ID NO: 831402 - DNA, 120 bp, Artificial Sequence
  ENSG00000257185_24 (sequence is synthesized)
acctgcattcttatggctgtaaattaatttcattatataatttatataaaaaagataatagattgatgcatgttattatttccttaccttcactaattaggttattactaaatgagatca

SEQ ID NO: 831403 - DNA, 120 bp, Artificial Sequence
  ENSG00000257185_25 (sequence is synthesized)
tgagatcagctaaattctgaagcttttaatggaaaattgatgtagctattgtgagctctggaaatcttatttctttgttctatcactataatatgtgtataaggattcatcaccaaaact

SEQ ID NO: 831404 - DNA, 120 bp, Artificial Sequence
  ENSG00000257185_26 (sequence is synthesized)
tgatatttaagtcaaattaaagggcatttttactgtagtgatcaaccttatacaatttatgaagatttgtttttaaaaacaaagttcatagagaaattaatgtttcaccttttcccttat

SEQ ID NO: 831405 - DNA, 120 bp, Artificial Sequence
  ENSG00000257185_27 (sequence is synthesized)
aaccagatggcttctggagggaaaactgcttacagcttattcactggcttctcaatgacttcagtgcaagatgaataatttcaggggccactttatcttgactatgctgtttagtaacta

SEQ ID NO: 831406 - DNA, 120 bp, Artificial Sequence
  ENSG00000257185_28 (sequence is synthesized)
gtgtgattgtttgtaatgaaatgaaaagagagactgaagaacgtaaaaaatgagaaactaaggaggaaacagggagaaggttaataactcattctgaaaatacctgtaagatttagccat

SEQ ID NO: 831407 - DNA, 120 bp, Artificial Sequence
  ENSG00000257185_29 (sequence is synthesized)
gccctaaagttttaatcggttgggccacattttattcagaaatttagtgaggagcctattaaccaccaagacttcatttcttttcatatataatatttatttgagatttggggattattc

SEQ ID NO: 831408 - DNA, 120 bp, Artificial Sequence
  ENSG00000257185_30 (sequence is synthesized)
cccccagctaacctgcaaactcacagagtgatgagtgagaaaataatgcttcttcttctgtgcctatgtgatttagtgattctgctatgcaacaaaagttaatgtaattttttaaagcag

SEQ ID NO: 831409 - DNA, 120 bp, Artificial Sequence
  ENSG00000257181_0 (sequence is synthesized)
gagttcataatacttcagctagaacttattccttcaaatttaactctgtacccattaaaagtggttttgtgtgcaattaacagacacatgttctacccatacattgttttccaaaattat

SEQ ID NO: 831410 - DNA, 120 bp, Artificial Sequence
  ENSG00000257181_1 (sequence is synthesized)
tgtgtggctttaaaaaaaaaaaaacccacacaacaaattgcaaaaggcactgagataacatctgcttctagatcattgctaggctcgaaaaataaagcttgttctaccaggaatgacaag

SEQ ID NO: 831411 - DNA, 120 bp, Artificial Sequence
  ENSG00000257181_2 (sequence is synthesized)
ttagaacttagtatttgccaaagcagaaattatatagtgtcagttatttcaggcaaaccttattcggctctcatccccaactatctgtcagaacaattaaaagagatcaaaacagtccag

SEQ ID NO: 831412 - DNA, 120 bp, Artificial Sequence
  ENSG00000257181_3 (sequence is synthesized)
caagaaggtactttaaagtgtcttagagttgtttttcaacttagggggaaacaacagattccattaaatcccataaaggatttttttgtgtgtgaaaaagggcctgatgtaatctaggtt

SEQ ID NO: 831413 - DNA, 120 bp, Artificial Sequence
  ENSG00000257181_4 (sequence is synthesized)
agactcaggaggctttaacaagttttgtcttacgggtaaatggtggctattttcacagataacatcattactcccatcccttactatggtttatacaaaagaggctggagaataagtaca

SEQ ID NO: 831414 - DNA, 120 bp, Artificial Sequence
  ENSG00000257181_5 (sequence is synthesized)
atacaaaagaggctggagaataagtacatttttacagccgggtgtggtggctaacgcctgtaatcctacttagcactttgcgaggccaagacaggaggatctcttgagcccaggagttcg

SEQ ID NO: 831415 - DNA, 120 bp, Artificial Sequence
  ENSG00000257180_0 (sequence is synthesized)
agtgaaaagtgagtttgtgttcgtgaatgccctggtgacaagagtctctttttccccgaagaaagagattcacgtatggctgaaatttcccggagaacacaggaggggggggaatattgc

SEQ ID NO: 831416 - DNA, 120 bp, Artificial Sequence
  ENSG00000257180_1 (sequence is synthesized)
aataaatcaaatgtcttttggaaatgaaggtggctctgaaggaagatcaaaacaaaagccactagaggcctcctgcatgccttggctcgtggccccttcttccatcttcaaagccagcat

SEQ ID NO: 831417 - DNA, 120 bp, Artificial Sequence
  ENSG00000257180_2 (sequence is synthesized)
tgcctgctgcaagtccagcttaaaggaaggaaagttctaataaattgaaaatgttaactctgtggactagacatcttcacgtgcttcgtgttcaacatgttataacttcaccataataca

SEQ ID NO: 831418 - DNA, 83 bp, Artificial Sequence
  ENSG00000257180_3 (sequence is synthesized)
caactttgtcgaagatcagatggttattggtgtgtggcattatttctgggccctctgttctgttccattggtctttgtgtctg

SEQ ID NO: 831419 - DNA, 120 bp, Artificial Sequence
  ENSG00000257180_4 (sequence is synthesized)
ctttgtcgaagatcagatggttattggtgtgtggcattatttctgggccctctgttctgttccattggtctttgtgtctgtttttgtatcagtagtgccatgctgttttggttactgtag

SEQ ID NO: 831420 - DNA, 120 bp, Artificial Sequence
  ENSG00000257180_5 (sequence is synthesized)
aatgttctatttgcttaggattgccttgactattcaggctcttttttggttctatatgaatttaaaaatagtgttttttaattcctatggtgggaagaaagtgtggataaaaaactgcct

SEQ ID NO: 831421 - DNA, 120 bp, Artificial Sequence
  ENSG00000257183_0 (sequence is synthesized)
agccatgcagctatttcactgaagagtattttaggtaaactaaacaacaagactatccatgaaactcaaaagcagaatgagtggtttcgtgcatggccaatatgattgtggctcccagca

SEQ ID NO: 831422 - DNA, 120 bp, Artificial Sequence
  ENSG00000257183_1 (sequence is synthesized)
actgcggcacagctactctcccatctggcagtctgatccatcctccttttattatttgcctcccgtctgcatggaagaagtctttttcttctttagaatagatttgaaataaaacctccc

SEQ ID NO: 831423 - DNA, 120 bp, Artificial Sequence
  ENSG00000257183_2 (sequence is synthesized)
aattataacatctcatgctctaatgaagtagtaatcatagagggggaagcataatacttcattaccatgtctgtagaggaatggaagagcatattatgcaaataagaaatacaaggcatt

SEQ ID NO: 831424 - DNA, 120 bp, Artificial Sequence
  ENSG00000257183_3 (sequence is synthesized)
ccttgaaccatagtcatccttgagagaagtggaatgtgtctcaagttctgttttatgaagatatcaacatttttgaaaaatatggagatgaaaaatagcaacataaaaataaatctcaga

SEQ ID NO: 831425 - DNA, 120 bp, Artificial Sequence
  ENSG00000258185_0 (sequence is synthesized)
agaaaaacaggcttgcagactgcagatgagagagtctggagcagagacaattttaacttagccattcctaatttatctcaagcgttttcaattcatcttcactgctctatgcacacagga

SEQ ID NO: 831426 - DNA, 120 bp, Artificial Sequence
  ENSG00000258185_1 (sequence is synthesized)
cttctggagaactgagcccagggaatgaaactctccatcaagtcatggctttgcgggcaatagatcagaggatattgccagttttctaatggattattgttatcgggcaggttttctctg

SEQ ID NO: 831427 - DNA, 120 bp, Artificial Sequence
  ENSG00000258185_2 (sequence is synthesized)
aagcttctcagctgctgttacattctacttggatggctgtaaaatgggataatgttcaccccaccaccctgctgtgagctcagatatgtgatactttagactgtaaagcactataacaat

SEQ ID NO: 831428 - DNA, 120 bp, Artificial Sequence
  ENSG00000258181_0 (sequence is synthesized)
gccgagatttcgccactgcactccaggctgggcaatagagggagactttgcctcagaaaaaaaaaaaaaaaaagaatcactaacctggttcagccttttcatttggcagatgagaaaact

SEQ ID NO: 831429 - DNA, 120 bp, Artificial Sequence
  ENSG00000258181_1 (sequence is synthesized)
gcttatcttagagccaaaacatttcaattttaaaaaatggcctcgtatggcagatacataagtcaggtatgccactcctgggatcatatcggatgggaggcaggattagattacagctcc

SEQ ID NO: 831430 - DNA, 120 bp, Artificial Sequence
  ENSG00000258181_2 (sequence is synthesized)
accagaaattatggtgctacaaaaatacctgcttatcttagagccaaaacatttcaattttaaaaaatggcctcgtatggcagatacataagtcagctccagatcgactgcaagaacaaa

SEQ ID NO: 831431 - DNA, 88 bp, Artificial Sequence
  ENSG00000258181_3 (sequence is synthesized)
cccaaatactatcctgtgcatgtccacggagcgtttctgatccagctccccgtttttaataaggaactcttcaacaagaaataaactc

SEQ ID NO: 831432 - DNA, 120 bp, Artificial Sequence
  ENSG00000258183_0 (sequence is synthesized)
gctttgatgtcatatagtatctgaacagagcaatgttcttgatgatgcagataagaaacgtgggaagccacaagaaagccaagtagcctgggaaaaagtggtcattgagccatgagaaaa

SEQ ID NO: 831433 - DNA, 120 bp, Artificial Sequence
  ENSG00000258183_1 (sequence is synthesized)
aattaacatttgatcctgttggtgccacctgaaggcagagatggctgaggacccccgagtgtaagtccagagagctcccctgcagccccaccctgactttccaggatgagccttctctag

SEQ ID NO: 831434 - DNA, 120 bp, Artificial Sequence
  ENSG00000258183_2 (sequence is synthesized)
gaagccactgctcattcggaaagtgaagaacgcctgtgtttccaacaccaaccccagctctgctgacatctcaggatggcaggaccacgcgtgatggaataccaggcaggggagactcaa

SEQ ID NO: 831435 - DNA, 120 bp, Artificial Sequence
  ENSG00000258183_3 (sequence is synthesized)
ggcaggggagactcaaatttataagttacatgagatattttgaaacaggcacacaatgcataatcacatcagggtaaatggggtatccattatgtcaagcatttatcatttctttgtgtt

SEQ ID NO: 831436 - DNA, 120 bp, Artificial Sequence
  ENSG00000258183_4 (sequence is synthesized)
acattccagttatatgtttagttattttaaaatgcacaataagttgttgttgactgtggtcactccattgtgctatcaaatagtagatcttatcttattcattctatctaactatatttt

SEQ ID NO: 831437 - DNA, 120 bp, Artificial Sequence
  ENSG00000258183_5 (sequence is synthesized)
tcccagcctctggtaaccatcattctactatctatctccaggaattcaattgttttaatttttagtctccacaaatcagtgagaacacgcagtttatctttctgtgtctctcttatttca

SEQ ID NO: 831438 - DNA, 120 bp, Artificial Sequence
  ENSG00000258183_6 (sequence is synthesized)
ccatccatgttgctgcaaatgatagaatctcatctttttttcaattgctgaatagtactccgaaacagtgtgtatttggtaagtgctgatatatgtaaacaccactgaagtcttcagcaa

SEQ ID NO: 831439 - DNA, 120 bp, Artificial Sequence
  ENSG00000258183_7 (sequence is synthesized)
aatcagaataatgaacatgtgtcaatcccaaaaacttctatctgtcttctttgtatttcatttctcccatccctctacccccatcccccatccccaggcaaaactaatctgcttccttta

SEQ ID NO: 831440 - DNA, 120 bp, Artificial Sequence
  ENSG00000258183_8 (sequence is synthesized)
tttactattggttagtttgcattttctagaattttgtataaatagactcatatagaatgtactctgttttggtctagtttctttaatttagcataattattgtgagatgcatctatgttg

SEQ ID NO: 831441 - DNA, 120 bp, Artificial Sequence
  ENSG00000258183_9 (sequence is synthesized)
ttgcatacatcttttttttttgctgagtagtaatctattgtataaatgtaacaccaatttactatttcattgatagatattttagttgtttccaagtttagtttaggttattacttaaac

SEQ ID NO: 831442 - DNA, 120 bp, Artificial Sequence
  ENSG00000258183_10 (sequence is synthesized)
atgaaattatgaatgttcatgtttaagtcattgtgtgaaaacatgcttttattatttttgaatatatacctagaagtaaaattgttggatcatatggttagtatatgtttacttttctgg

SEQ ID NO: 831443 - DNA, 120 bp, Artificial Sequence
  ENSG00000258183_11 (sequence is synthesized)
gataatgtcaatgtcttagtatatattctagatgttgttttttcttgttactttactttttaatcaaaataatctgtcaataactttagagaagtaaaattttcttctagaattccccat

SEQ ID NO: 831444 - DNA, 70 bp, Artificial Sequence
  ENSG00000258183_12 (sequence is synthesized)
attcttctccttcctgtcaccatgtgaaagatatgcttgtttcctcttctgccgtgattgcttataaggt

SEQ ID NO: 831445 - DNA, 77 bp, Artificial Sequence
  ENSG00000258183_13 (sequence is synthesized)
tcagatgagactttggacttagacttttgggtaatgctgcaatgagctaagacctgcgctgatggaaagactgaagt

SEQ ID NO: 831446 - DNA, 120 bp, Artificial Sequence
  ENSG00000258183_14 (sequence is synthesized)
cagtgcgatgccagtagcaccctcaactgtgaaaataaaaaatgtctccagacatcgccacttgtttcctgagggctaaattaccagttgttgtaaactactgttttacatactttttgg

SEQ ID NO: 831447 - DNA, 120 bp, Artificial Sequence
  ENSG00000258183_15 (sequence is synthesized)
ttttttaatctctaaagagaggagttgtgaaaagatgtgtcttttccagctctgatattctctgacctgtccagctatgctcacaaaattgatgagaaactctatctgttcttatcagat

SEQ ID NO: 831448 - DNA, 120 bp, Artificial Sequence
  ENSG00000258183_16 (sequence is synthesized)
gaatacatctgacccaggcagcctgggttcaactctccatgtgagaataccaagcttggctgggcacagtgcctcacatctgtaatcccaacactttgagaggctgcggcaggaagatta

SEQ ID NO: 831449 - DNA, 120 bp, Artificial Sequence
  ENSG00000258183_17 (sequence is synthesized)
caaagtgagacttcatctctacaattttttttttaattagccggatgcagtggtgcacacctgtagtctcagcttctcaggaggctgaagtaggattgcttgagcctgtgagcccagaag

SEQ ID NO: 831450 - DNA, 120 bp, Artificial Sequence
  ENSG00000258183_18 (sequence is synthesized)
tttgagacggcagtgagttacgatcacaccactgcattagagcctgaatggcagagtgagagcctatctctaaactaagtaaacaaatacagacatacatacataaagtaagaattatta

SEQ ID NO: 831451 - DNA, 120 bp, Artificial Sequence
  ENSG00000258183_19 (sequence is synthesized)
taataacaagaatacaagcagtctgcaatttgtgtttatggtgctaactgcaactcatgtatgtggtaccctcatttttcacaatatcatggtaactaaataactgtgcaaattaagagt

SEQ ID NO: 831452 - DNA, 120 bp, Artificial Sequence
  ENSG00000258183_20 (sequence is synthesized)
acagttcttatgtgtatgttttatagttaatacatactgttcaaaaaaagaactacctgtactaaataagaataatataggtggacttgtctactgcctaataaaacacatgataaagca

SEQ ID NO: 831453 - DNA, 120 bp, Artificial Sequence
  ENSG00000258183_21 (sequence is synthesized)
ctacaaatgaaagacaatagttcttacaagcaaatagggaatgcagaggaaaaataatagaggggcatctcagtcaagattcaaatttagtttataataaatacaaaacttttctctcaa

SEQ ID NO: 831454 - DNA, 120 bp, Artificial Sequence
  ENSG00000227078_0 (sequence is synthesized)
catcaaaccacgccgcgagcaaggaataaacttttactgcatgaaggggatgcgacatctaggtcgacttagtacaccatcacccaccctactctaacacacacagaaatgggttctttg

SEQ ID NO: 831455 - DNA, 120 bp, Artificial Sequence
  ENSG00000227078_1 (sequence is synthesized)
aaatggagtgatgctgtatcagacaggccttagttctacagaatccagctgctgtgaggtccctggtgaagctggtggaagagaaccttctgtatgtacctggggagtgggcttaaaaga

SEQ ID NO: 831456 - DNA, 120 bp, Artificial Sequence
  ENSG00000227078_2 (sequence is synthesized)
gctacctgctcagcaggcatagtgaagtggagtgcctttaagatcacttttcactgggggatggttttgttgatgacacaacattactaatcaagcaaatgggaaccaaggtacaatatt

SEQ ID NO: 831457 - DNA, 120 bp, Artificial Sequence
  ENSG00000227078_3 (sequence is synthesized)
attttgttagctaattcccatagtccagtcagatttttttagcccctttcttattccatttgtcaatttccttttgtgatgcatagttttgaaagtaaataaaaattacttatgttaaaa

SEQ ID NO: 831458 - DNA, 120 bp, Artificial Sequence
  ENSG00000276814_0 (sequence is synthesized)
attttctctacacagctttctgttaaatagtttcctccatcctttttatttccggtgatattgtgcatccctcatagactgagactctgaggaagcccctcaggctaggtgttttacaag

SEQ ID NO: 831459 - DNA, 120 bp, Artificial Sequence
  ENSG00000276814_1 (sequence is synthesized)
cacgtgtttaagcactggccttagtcgccctgaagggtggagtgaaaagatggtttgactatggaaataaaagccaccttgttctcaggtttttatagcctgctgaccttgtcctcagga

SEQ ID NO: 831460 - DNA, 120 bp, Artificial Sequence
  ENSG00000276814_2 (sequence is synthesized)
tcttagagtctgtattagagtctgtagaccttatagttaactaatttaggaagctaagcaaacaccaagcaatataccttatcaagaaggcagactcataggcatgtagttccatacaga

SEQ ID NO: 831461 - DNA, 120 bp, Artificial Sequence
  ENSG00000276814_3 (sequence is synthesized)
actagaagtagaggatgaaggggcaaaggtggaggtaagtcagggataatgttgcctttatctgcctatctatatgattcttcctaatttttaaaaagttgacttatttaaaataaactg

SEQ ID NO: 831462 - DNA, 120 bp, Artificial Sequence
  ENSG00000276814_4 (sequence is synthesized)
tttgactggaaactccctggtaaaaaggacttgatggtgtttgtctctctgtccccctgtctctgtggctgtttgctctgtctctgtctgtgcctgtgtctcccgatccaagctggacca

SEQ ID NO: 831463 - DNA, 120 bp, Artificial Sequence
  ENSG00000276814_5 (sequence is synthesized)
gtgattggatcctcggtgtggtctggatttctgagtccaccccttacccaggagtctgaatactgttcattcatttatttcatcccatatacctggaagtgaagcctggaacgcaaataa

SEQ ID NO: 831464 - DNA, 120 bp, Artificial Sequence
  ENSG00000276814_6 (sequence is synthesized)
catgcaaatttgtggctctttggcactttaaaaaaccaaacctgtctgtggaggctgccaaagaactttcctgaggccaaacacaccaatcaggacttccaacccaccctgctaactgtg

SEQ ID NO: 831465 - DNA, 120 bp, Artificial Sequence
  ENSG00000276814_7 (sequence is synthesized)
gccttctgttcttgctcctctcctgcacccctttcttctcacaatataacttcgaagtgaagtgcttgccacttttctacctgtaaaactcacactcatgacagtaaaacataagaaagc

SEQ ID NO: 831466 - DNA, 120 bp, Artificial Sequence
  ENSG00000280018_0 (sequence is synthesized)
ggcacaggagcttgggatctgtctcctctttcgcctcctgcaccttgagagccctgggctactctgtcacagcccctgttgccctgcgatctgtaggtccttggggacgcatagttaagg

SEQ ID NO: 831467 - DNA, 120 bp, Artificial Sequence
  ENSG00000280018_1 (sequence is synthesized)
tgccaggacatcctggaagctgggaaatgaccatggctggagaaggaaagaaggtgtgttttgcctgattcagggactatagagagaaccaagttctgcaggcctgtcatctaagtctca

SEQ ID NO: 831468 - DNA, 120 bp, Artificial Sequence
  ENSG00000280018_2 (sequence is synthesized)
ccaggcacttggctagaggtaagtaaaaatagcctttgggccagaagacctgatagtttgggtactcgtctggacataagtccccatcttcccagaaatgtcgtcttttgtctgcaacaa

SEQ ID NO: 831469 - DNA, 120 bp, Artificial Sequence
  ENSG00000280018_3 (sequence is synthesized)
ctggctggagaaatatttcagaaagatgtgtgcctggaacacccaaaggcatacctttcctttctccttggcataggccttgcagcactgaagaaagaccaggtttgcaacggagccttc

SEQ ID NO: 831470 - DNA, 120 bp, Artificial Sequence
  ENSG00000280018_4 (sequence is synthesized)
aatactcttcatccctatggatctcaggggctcatagggtgacaggagaggagacaagctagcttgggaagagtctttgtccttcagcttctcctctactgaaacactatatacttgggg

SEQ ID NO: 831471 - DNA, 120 bp, Artificial Sequence
  ENSG00000280018_5 (sequence is synthesized)
gggtgtcacaaactctgaactggattccaaggctttcatgaatgcacttatgtttgctgtggcagctgcattatgtcgtgggggatgtggatgcagaacctcccattctgtcgtcttgct

SEQ ID NO: 831472 - DNA, 120 bp, Artificial Sequence
  ENSG00000280018_6 (sequence is synthesized)
agattcaaaagttctaaaataaattgctcaaatttacacattatgtaagctgttaataaaatttcttgtaggtgctacatatttattaaaatttttggttgtaattttaagctcactgta

SEQ ID NO: 831473 - DNA, 120 bp, Artificial Sequence; identical to SEQ ID NO: 825772
  ENSG00000280018_7 (sequence is synthesized)

SEQ ID NO: 831474 - DNA, 120 bp, Artificial Sequence; identical to SEQ ID NO: 825773
  ENSG00000280018_8 (sequence is synthesized)

SEQ ID NO: 831475 - DNA, 120 bp, Artificial Sequence; identical to SEQ ID NO: 825774
  ENSG00000280018_9 (sequence is synthesized)

SEQ ID NO: 831476 - DNA, 120 bp, Artificial Sequence
  ENSG00000280018_10 (sequence is synthesized)
gacatagcaatggtgttgactccctccttatgtgtggattgctcagcgggggaacttgactgtccaacatgctgggtgcaagaacagcagaaaggggacttttaagatgtggcaaacatg

SEQ ID NO: 831477 - DNA, 120 bp, Artificial Sequence
  ENSG00000280018_11 (sequence is synthesized)
aggcctcttcggagaggactttggaaaccaggccttgcttggctgaatgctatcccagtgattgtacgtgccctgtttgctgaatctactcatccttaagggtacatttgcttccaggta

SEQ ID NO: 831478 - DNA, 120 bp, Artificial Sequence
  ENSG00000280018_12 (sequence is synthesized)
acatgtttgtgactaatactacaatgtgcatatatctattccatgttctgctttgtctgtttgggatatttttcatacactgattcagtaccatgtgtattcccttgcttttgttgtctc

SEQ ID NO: 831479 - DNA, 120 bp, Artificial Sequence
  ENSG00000256588_0 (sequence is synthesized)
taaccaaacttgtttatcttacaagacaaattatatgtgctttcatttttcttctgctgaaaattatactttttcctttttaatccattctttcctgaggaacatcttggtttataagct

SEQ ID NO: 831480 - DNA, 120 bp, Artificial Sequence
  ENSG00000256588_1 (sequence is synthesized)
gaatgggaatttaacagaaagaatttttgaacccatttctctttccttccctaccttcccagaataagcttgattttaggattactatttcttttagtaaaggtactggtaattcctttg

SEQ ID NO: 831481 - DNA, 120 bp, Artificial Sequence
  ENSG00000256588_2 (sequence is synthesized)
tggattagaaatttgtttttatcttattaaattctgttgactctagtgcccaagagtagagtatcttgcttaagtttgaaatacgaaatatttggccgggctggtctcgaactcctgacc

SEQ ID NO: 831482 - DNA, 120 bp, Artificial Sequence
  ENSG00000256588_3 (sequence is synthesized)
ttacaggcgtgagccaccgcggccggcctgcaacattttttttttcctaaatttctttgagttttaaattgacattggaagtgcagtattcaagaaagagaccatactattgttactgtt

SEQ ID NO: 831483 - DNA, 120 bp, Artificial Sequence
  ENSG00000256588_4 (sequence is synthesized)
tgttgcaattcaattttgtactcagtcactgtaagtcatgttaaacactctagagcagattctttactatttttttttgtcagttaagctcaagattaacttctctttttcttcctctat

SEQ ID NO: 831484 - DNA, 120 bp, Artificial Sequence
  ENSG00000256582_0 (sequence is synthesized)
ttttcaatgatgaatcatttagtttacaagacatatcttgtattttctttaggtaattgccaaatcagagtcaaatttatgaatgggcaaccagttctcttcaccacttccagcttatac

SEQ ID NO: 831485 - DNA, 120 bp, Artificial Sequence
  ENSG00000256582_1 (sequence is synthesized)
tcctctggagtgtatcctgaaccattgggacggctttgaccctcagaatctggaggaaaaacacctcatagccctacgcacaaagggttggccaaattatgatttacaggaaggactgag

SEQ ID NO: 831486 - DNA, 120 bp, Artificial Sequence
  ENSG00000256582_2 (sequence is synthesized)
aggccacatatatgcaggctttctatatcttgcaaggcaatcgagaccttggctaacaatgtaagatagatctagccctcctgtttgccatcttagggaaggctgcaaggggcaagccta

SEQ ID NO: 831487 - DNA, 120 bp, Artificial Sequence
  ENSG00000256582_3 (sequence is synthesized)
gagaattaaagatatgagtcccagaggcacccccaacaggggagccagctccctcaagccctgctcctccaggtctatcccaacctccctatccagcttcagcctctcacttgccccctc

SEQ ID NO: 831488 - DNA, 120 bp, Artificial Sequence
  ENSG00000262692_0 (sequence is synthesized)
cattgctacttcttcagttgagacctcacaaatgtcacctggatcactgtaaaacattaaacttgatcacttgatcactagttcccactttagaataagtgatcagggaaggcctctcta

SEQ ID NO: 831489 - DNA, 120 bp, Artificial Sequence
  ENSG00000258829_0 (sequence is synthesized)
aagatatgccagctgcaatgaagagaagccctgtttcagttcgtggattacagactgcaacatccatcagcatcaagacaaacaccttcaaactactgtccttggcgtccagcctaacag

SEQ ID NO: 831490 - DNA, 120 bp, Artificial Sequence
  ENSG00000258829_1 (sequence is synthesized)
atctgaggaatgtgataaaggaacactggattcccaaggtctgctcaggtttccttccataacaagaagtagccaaatacagctgaacaggcctgttcagaggttcgtaacctgctcaat

SEQ ID NO: 831491 - DNA, 120 bp, Artificial Sequence
  ENSG00000258829_2 (sequence is synthesized)
aatcaggacaccactgttaaccaccttaacaagactgcaaacacaggctgtctattcctcatcaacagaatctttgatactggcaatttgtttagattggcttgcagaagcatatattgg

SEQ ID NO: 831492 - DNA, 120 bp, Artificial Sequence
  ENSG00000258829_3 (sequence is synthesized)
tagctatgttatgaatatttaccggtttcatacacattcataaaaatcagaaacattttcctcctaggtatctgcattggtcttgaatggctgtttaaaaataatcagaaacccccactc

SEQ ID NO: 831493 - DNA, 120 bp, Artificial Sequence
  ENSG00000229969_0 (sequence is synthesized)
tacacgcactcgtcggggcagccgtactgcagaagcacgttgatgcactcctggctggaggcctgccgggcgtaggtcagcgctgtgttcccgtgggcatctcgggccatgacgtccacc

SEQ ID NO: 831494 - DNA, 89 bp, Artificial Sequence
  ENSG00000229962_0 (sequence is synthesized)
accacatggctgctgctgggggatggggcaggcgtggtgtgggcaattcaagactatcttttctatcctcttcggcagagaatgattgg

SEQ ID NO: 831495 - DNA, 120 bp, Artificial Sequence
  ENSG00000229962_1 (sequence is synthesized)
tgaaggcttctatttggtcaacttgctctgtctttatagccaatttatattgataagagataccatttgcggtattcctgagtcagaagagaggaaaggtgatactgccaccccctgtat

SEQ ID NO: 831496 - DNA, 120 bp, Artificial Sequence
  ENSG00000229962_2 (sequence is synthesized)
gtatttccttttagatgtgggatgtggtaggcagcatgttccctccccagacttctctccgagagctgtctatgccctaatccctgcaacctgtgaatatgttatgttagttggcaaagg

SEQ ID NO: 831497 - DNA, 120 bp, Artificial Sequence
  ENSG00000229962_3 (sequence is synthesized)
ggactttgcagatgtaattaaagttactgaccatataatgaggagattattctggattatccaagtaggcccaatctaattacataaagccttcaaagcagagagctttctccaactgga

SEQ ID NO: 831498 - DNA, 120 bp, Artificial Sequence
  ENSG00000229962_4 (sequence is synthesized)
ggcagaagagatgcagcagcagcagcagcagcgagaacaattcaaagtacagggactcaatgggaactttctggtttgatgttggagggagcagcatgatgaggaatttgcacagcctta

SEQ ID NO: 831499 - DNA, 120 bp, Artificial Sequence
  ENSG00000229962_5 (sequence is synthesized)
actgaattcttccaacaacttgaatgagttatccctcagagccttcagataagagtccagtttgccagcaatttgatttcagtctgtgaaacctggaccagaggaaccagctgaattcac

SEQ ID NO: 831500 - DNA, 120 bp, Artificial Sequence
  ENSG00000229962_6 (sequence is synthesized)
cagacttctgacccacagaactatgagataatacattgaatacattgaagttgtttaaaggagctcaatttgcagtaatttgttatggcaacaatagaaaactgacatatggaggtattg

SEQ ID NO: 831501 - DNA, 120 bp, Artificial Sequence
  ENSG00000229962_7 (sequence is synthesized)
atatagtcatgattttgatgactaactagtttgtgatctggatatgaagtgtcaccatgctacagtgcctgagtctgcttcagattcttctacttcttggccatctttattgggaaaata

SEQ ID NO: 831502 - DNA, 120 bp, Artificial Sequence
  ENSG00000229962_8 (sequence is synthesized)
agtatgtgaaataagtatagtctattgccctttttgagtaccactggttaattaattttgttattttcaagtgtatgtgctttaattcacatggcattaaaagaatcggtagtatagttt

SEQ ID NO: 831503 - DNA, 120 bp, Artificial Sequence
  ENSG00000229962_9 (sequence is synthesized)
cactcagccagatgaatccagaaatctcttgctcattgaatcttcagaaatgagagtgagagcattccatgaatctagaatcaaaacacattagtacaaataaagatcactaaaaataaa

SEQ ID NO: 831504 - DNA, 120 bp, Artificial Sequence
  ENSG00000229962_10 (sequence is synthesized)
aaggttgcatgccaccaacatccgctggctttgaatccaacacagcaccaggacttgcccaggaattgcagtccctgttgcctttcaagtttatttaggacttcagagtactttaaccca

SEQ ID NO: 831505 - DNA, 120 bp, Artificial Sequence
  ENSG00000229960_0 (sequence is synthesized)
cggcagtccataaagacctggcaggagggaagagcaggttgccatggaatgaaggaactacgatggggatcgagaccaagagcagtgattatgaatggcaagtggcaagaaacggggtgg

SEQ ID NO: 831506 - DNA, 120 bp, Artificial Sequence
  ENSG00000229960_1 (sequence is synthesized)
gtgatccccaaaaagatatgtccacacctaacaaccggaccctctgaatgtgacctcatttggaaaaagggtctttgcagatgccattaagttaaagatcttgtgatgaggagatcatcc

SEQ ID NO: 831507 - DNA, 120 bp, Artificial Sequence
  ENSG00000229960_2 (sequence is synthesized)
tagattacccaggcctatcagcatctccttggacactccacatcccatgaaccacatccaaaagcgatggtccttggtgtgccacttcctgttgaagctgcctgtctaccagaattagcc

SEQ ID NO: 831508 - DNA, 120 bp, Artificial Sequence
  ENSG00000229967_0 (sequence is synthesized)
gttggtttcaggttgtaattagcagatctccggaaccatactgccttaaccaacccaattttcctgctgtcctgctattaccctagggttactggaatcgtgttttgaggtgctgcctca

SEQ ID NO: 831509 - DNA, 120 bp, Artificial Sequence
  ENSG00000229967_1 (sequence is synthesized)
gattgtgcagtgcagtgaggtggagattttaaaatgttcatcctattcattctgtcatctgacgtctaggcaggctatagacttcaacatccctgcagccaacccccctccaactgacac

SEQ ID NO: 831510 - DNA, 120 bp, Artificial Sequence
  ENSG00000229967_2 (sequence is synthesized)
cgccccaaacataagtaccagttcaacacagtcctcagtctcacccaggactttctgtgttttgttgcttagattttattgcttatattgttgttttttctttctttctttttctcttct

SEQ ID NO: 831511 - DNA, 120 bp, Artificial Sequence
  ENSG00000229967_3 (sequence is synthesized)
agagttgatttgggaaccagagaacagcagcctaagtgtgactgtaatttttggcagctacagctacacaatccatggcattttgttatggaagtcaaagctaactaagacataacccca

SEQ ID NO: 831512 - DNA, 120 bp, Artificial Sequence
  ENSG00000229967_4 (sequence is synthesized)
gattcccaagacaactaggaagggaaaaggaacccttcaaggaagttccaggaaaaacgtctctcccaaaaagaccaccgcttcaggaaaacctgaggaagggagtgggccaacagtatc

SEQ ID NO: 831513 - DNA, 120 bp, Artificial Sequence
  ENSG00000229967_5 (sequence is synthesized)
ctgccactgtgaccagctgaacgaggaactccatcaaaatgagccacagctggaccaaaacagtgaggagacctccaccttcttcagtgtctccctgagcagtcagtaatttcagggcaa

SEQ ID NO: 831514 - DNA, 120 bp, Artificial Sequence
  ENSG00000229967_6 (sequence is synthesized)
gctgagaggtctccagaggtctaaccccagataaatagccaacagggtctagagtacattttatacccaacagggtataccccatggtgatcaaaataaaataaacctgttgtaaaatga

SEQ ID NO: 831515 - DNA, 120 bp, Artificial Sequence
  ENSG00000229967_7 (sequence is synthesized)
gatggcggtatgagagaggtggggggttgaagaggagaggagtgctggtgggggatgggggcgtggatggtttgggagtgcaaatgagcctgggcgggcttccctccgccagtctcaagc

SEQ ID NO: 831516 - DNA, 120 bp, Artificial Sequence
  ENSG00000229967_8 (sequence is synthesized)
tgcgagtcagacgcagaagctcgcttgtctctaacccccagtgcgcaagtcagtggcatcacatccgggcagctggggctttccttggttgaaagcgggggcggaaccggggatcctgcc

SEQ ID NO: 831517 - DNA, 120 bp, Artificial Sequence
  ENSG00000229967_9 (sequence is synthesized)
tggatggggagcctgcgcctgcttccctccgtggatctcgagttgctggtcagaccaatgcgcaagtcagggatgtcacatccgggccacctgggttgacagcaggggtggaaccggatt

SEQ ID NO: 831518 - DNA, 120 bp, Artificial Sequence
  ENSG00000229967_10 (sequence is synthesized)
acatatagaataatagagagactaacataatgaacccagcatacctgacgctcagcatcaacaaccttaaatacacggcaaatctggttccagttagacactcacctacctgcatctcag

SEQ ID NO: 831519 - DNA, 120 bp, Artificial Sequence
  ENSG00000229967_11 (sequence is synthesized)
ctgctggaataatgtggatcaaatcaaagacagcataccatttcatctctaaataattcaatattcatttttaaaagacaaggacattgtacccagctgtacccctcgcagagaatggct

SEQ ID NO: 831520 - DNA, 120 bp, Artificial Sequence
  ENSG00000229967_12 (sequence is synthesized)
gcaggtaccaggcgaggtgttccctgggtggctgcagcacccgtgattgtagtcacctctgggtcacaatcactacaaataaaaacccaatacaattctcatttctaaaaaataaataaa

SEQ ID NO: 831521 - DNA, 120 bp, Artificial Sequence
  ENSG00000287633_0 (sequence is synthesized)
acaggcagcggcggccgacagccaggcaggaggagggcggaggagcggcgcacagcctccaccagagcatctgggggctcaagccgccagagagccctggagactagatgtactgattca

SEQ ID NO: 831522 - DNA, 120 bp, Artificial Sequence
  ENSG00000287633_1 (sequence is synthesized)
tttcccatttttacctcattcccctcacggatttggtccagcagagttagatggcgctggtaccttttccctccatgacctttaaagcttagactgatggcctcacagatatttttcttc

SEQ ID NO: 831523 - DNA, 120 bp, Artificial Sequence
  ENSG00000287633_2 (sequence is synthesized)
ggggacaaaggatgaggattttccatcccgaacaacatgaagcaaatgcgcatggatctcctgatttttcattcagacagtgattacagagtaaacagcactgggtcagatcagcgtgca

SEQ ID NO: 831524 - DNA, 120 bp, Artificial Sequence
  ENSG00000287633_3 (sequence is synthesized)
cggtcaatgtggcctgcatatggtgactatccctccctgcaccgtgtggcagccacattgtcctgacccactgggaagcttgtcacttccagagcggcccaggagatgcatgtcgaccat

SEQ ID NO: 831525 - DNA, 120 bp, Artificial Sequence
  ENSG00000287633_4 (sequence is synthesized)
ccccacttcaggctcccacgtggcaggctgcagacccctggccaggctttttttctgaaacctttagtggattttccttgaggatgaccgacagaatgatggtgatgtattctagtctca

SEQ ID NO: 831526 - DNA, 120 bp, Artificial Sequence
  ENSG00000287633_5 (sequence is synthesized)
tggtcaggcctgcaatcacatttcgaagcagcctccagatccctgctcagcattctgtgactgacgcgggtggaggcattacagtccagacagagtcagtgctaatcagaacaggatgcc

SEQ ID NO: 831527 - DNA, 120 bp, Artificial Sequence
  ENSG00000287633_6 (sequence is synthesized)
ctttagcttcctcgggaaagctttatctctttagcaggagctatctgcatttttaaagccacagcctgttggaaagagctccgaaccacaaaaatgtacagcaggggtaagcagagttcc

SEQ ID NO: 831528 - DNA, 120 bp, Artificial Sequence
  ENSG00000287633_7 (sequence is synthesized)
gttctgattctcacaatgccctgctgagcggacgggagtcccccgttgtatggacaagcagatgaagctcaatgaattagttgactgctctaaggtctcatggttgatcttgggcacagc

SEQ ID NO: 831529 - DNA, 120 bp, Artificial Sequence
  ENSG00000287633_8 (sequence is synthesized)
tggggttcgaagcccgttctttctggctcagagtcctgtgctcttctcagcaggatgtgacgctacctcccccactgccatttttctgtgtgattatatgggacccaagctccaggtaaa

SEQ ID NO: 831530 - DNA, 120 bp, Artificial Sequence
  ENSG00000287633_9 (sequence is synthesized)
tctgattgttaagaaaaagccccaatatacacagaggcacaagaaaaaggaatagatctcaccctgttggtgaagccaatgcgtgaacctaatgtgcagaaagacaccactgacgtcttc

SEQ ID NO: 831531 - DNA, 120 bp, Artificial Sequence
  ENSG00000287633_10 (sequence is synthesized)
ccgggcccctgcctcgcatccttgccttgctgactatttggccctggcctagaaaatacagtgctcattctcagacgtgtatgtgcaagtgtttgtctctccagccaagctgtcctcagg

SEQ ID NO: 831532 - DNA, 120 bp, Artificial Sequence
  ENSG00000287633_11 (sequence is synthesized)
tccttagccgtctgcgtgttccccagctctctacaaacagctatcctggaatagctaaaactgagattttaataatgtgtgcttaaagcatttatgctaaaaaaaacttgccagttctgg

SEQ ID NO: 831533 - DNA, 120 bp, Artificial Sequence
  ENSG00000287633_12 (sequence is synthesized)
ccatttccagtaacaatatgtgctctcatcactgctaagagtctggcaatgagcagatgatgctactgaaagcaagtgaagacagtgagacagggctcaatccatgccatgcctctgaga

SEQ ID NO: 831534 - DNA, 120 bp, Artificial Sequence
  ENSG00000287633_13 (sequence is synthesized)
gcctaggagtcatggcacagcgccaagaataccccttcaacatgacaagcaggactcagtttcccccttttgagcatatcaaggaaaaacatatgtaagggcctgcgcagtgactcacga

SEQ ID NO: 831535 - DNA, 81 bp, Artificial Sequence
  ENSG00000287633_14 (sequence is synthesized)
tgcttgaggccagggtttgagaccagcctgggcagtacagctggaccctgtctgtacaaaaaatttaaaaaaataaataaa

SEQ ID NO: 831536 - DNA, 120 bp, Artificial Sequence
  ENSG00000287633_15 (sequence is synthesized)
acaggcagcggcggccgacagccaggcaggaggagggcggaggagcggcgcacagcctccaccagagcatctgggggctcaagccgccagagagccctggagactagccagcaaaggaca

SEQ ID NO: 831537 - DNA, 120 bp, Artificial Sequence
  ENSG00000287633_16 (sequence is synthesized)
aggctagcatgggcatttaccccactgcctcagctgcctcaccaggaatgcaggagatgcagatgcacggatgagaaagctttgcctgtcccaatgcacagcgatgcctgacgctgcctc

SEQ ID NO: 831538 - DNA, 120 bp, Artificial Sequence
  ENSG00000287633_17 (sequence is synthesized)
agagtacctgtgctctgcccatccagcttctggtcatccgaggcccaggtcccaaaggggcgtgggaggagatggtgggagagacagctaggccccatgctggacacctgagagggagac

SEQ ID NO: 831539 - DNA, 120 bp, Artificial Sequence
  ENSG00000287633_18 (sequence is synthesized)
cctggctttgtgttgaggtaagttcgagagatctgagactacccttgactgtggatcggcagtagtaggaatctaactcgctctctgtcgttgttttttttctttacaccgagtcgtgct

SEQ ID NO: 831540 - DNA, 87 bp, Artificial Sequence
  ENSG00000287633_19 (sequence is synthesized)
ggcctcccaaagtgctgggaaaacaggcgtgagccaccgcacctggcctctgtcatctttttttagagacaagttgtgatcacagat

SEQ ID NO: 831541 - DNA, 120 bp, Artificial Sequence
  ENSG00000287633_20 (sequence is synthesized)
cctcagcctccctgagcagctgggactacagacacacgccaccacagcaggctaatttttaaattttttatagcgagagggtcttgctgtgttgcccaggcaggtcttgaactcttggcc

SEQ ID NO: 831542 - DNA, 120 bp, Artificial Sequence
  ENSG00000287633_21 (sequence is synthesized)
gcaatcctcctgcctcaacctcccaacgtgctgggattaacaggcaggagccactatacccggccaactctctttgatcttaaaccaaagaaatgagatttctccgaagccagagttata

SEQ ID NO: 831543 - DNA, 120 bp, Artificial Sequence
  ENSG00000287633_22 (sequence is synthesized)
tataagtgatgggggtcaattgtgaggaactgaatggatttaactgtgaatggtgtagaacttattctacagcacactaaggtcaaatcagatctgtattctcctacgcaaacagtagga

SEQ ID NO: 831544 - DNA, 120 bp, Artificial Sequence
  ENSG00000287633_23 (sequence is synthesized)
aatgtgggagattatgtgatactgaaaaaaaaaatggaaaaggaaagcaattcattttcttcactgttacaaaacatcacttttgtgtgtataaacctggaatcaattattcaacttccc

SEQ ID NO: 831545 - DNA, 120 bp, Artificial Sequence
  ENSG00000287633_24 (sequence is synthesized)
ttatggataaagcataacttgtaataaacagcaaagagggttgttcatttcacttaatgataaataaaatgatgtttgaccaatttgatgaagacagtaagtcaaacttaaatggtcggg

SEQ ID NO: 831546 - DNA, 120 bp, Artificial Sequence
  ENSG00000287633_25 (sequence is synthesized)
cattttatgttgctgaaactactaatcttattaagaagcttttcacatttaaaatatgcaaaatgcaagcaaaatttagtagagaaagtaaagttaaatatttaatgacataattaagtc

SEQ ID NO: 831547 - DNA, 120 bp, Artificial Sequence
  ENSG00000287633_26 (sequence is synthesized)
catccgaggcccaggtcccaaaggggcgtgggaggagatggtgggagagacagctaggccccatgctggacacctgagagggagaccctggctttgtgttgagagttagatggcgctggt

SEQ ID NO: 831548 - DNA, 120 bp, Artificial Sequence
  ENSG00000204971_0 (sequence is synthesized)
gggaaactgcccccatgattcagttacctccacctcgcctctcccttgacttgtgggaattacaaggattatacttcaagatgagatttggctggggacacaaagcctgagcatatcact

SEQ ID NO: 831549 - DNA, 120 bp, Artificial Sequence
  ENSG00000204971_1 (sequence is synthesized)
aaccccctggctgctaatgtagtccaggaaagagaaatgaacagaatccctctgataacccacattaaacattgcagcttgagcaagaaataaacatgatttgtggccaggcacagtggc

SEQ ID NO: 831550 - DNA, 120 bp, Artificial Sequence
  ENSG00000204971_2 (sequence is synthesized)
tcacatctgtaatcccagcattttgagaggatcacttcagtgcaagttcaagaccaacctgggccatcaaactccaaatggtcgtgcaaccggagcctcggaagatggcgccttctgccg

SEQ ID NO: 831551 - DNA, 120 bp, Artificial Sequence
  ENSG00000260188_0 (sequence is synthesized)
ccatggcattccaagccacactttggagtgggcaggggtttggcccatagccaacccaggcagggggtgaccttccttctggaaggtatcaagtgaatgaactttagggaagaaaggtca

SEQ ID NO: 831552 - DNA, 120 bp, Artificial Sequence
  ENSG00000260188_1 (sequence is synthesized)
attgctggtccacagcgctgaagcagaaaagccagtttccgactatatccacagtgagagttgccttctctagtcagcctggcagtcactggccccactgttggcgtgctattccactct

SEQ ID NO: 831553 - DNA, 120 bp, Artificial Sequence
  ENSG00000260188_2 (sequence is synthesized)
ataaggccactaaaccttgagttcctagagaacagggatgcattctcttcgtcactttggtagcctcagttccatagcaaatgccctctctctgaacttctccacctcatccttaaaatc

SEQ ID NO: 831554 - DNA, 120 bp, Artificial Sequence
  ENSG00000260188_3 (sequence is synthesized)
tgagcacacctatcgctttctcagagaagtccaacagtttgagggccagggcagagctctaccagagcagagcatcaagagtgggtctgatggctccgagaagcggcaggatcttgcaag

SEQ ID NO: 831555 - DNA, 120 bp, Artificial Sequence
  ENSG00000260188_4 (sequence is synthesized)
gctgtgttgaacattttactttgaccaaaggacaaggagaactccctgtagacagtcttaaagcagaagagtaacaggcgcaaacttgtacttgaataatatttgaaagagaggagagtc

SEQ ID NO: 831556 - DNA, 120 bp, Artificial Sequence
  ENSG00000260188_5 (sequence is synthesized)
catttcccaaagtgcttccctcccctacttgtcacagagcctacaataacaccattaaaaattgacttatttttgttatgcacaatcctatctagacattctcttctgaaacataaatac

SEQ ID NO: 831557 - DNA, 120 bp, Artificial Sequence
  ENSG00000260188_6 (sequence is synthesized)
gcctaagttcttcaggtgaggaatgctagagggatacaaggtggggggaagatgagagggtagtgaggagtagttatgtcaagggctgagcctaggaggaaaggtgggggccatggcagc

SEQ ID NO: 831558 - DNA, 120 bp, Artificial Sequence
  ENSG00000260188_7 (sequence is synthesized)
cagtcaagacgccatattgcttcaaagcaccaaagggagagttacctggaaaagatatggagaaattgaactttgatatgaacactattcttattacaccagatagaaatgtcacaatat

SEQ ID NO: 831559 - DNA, 120 bp, Artificial Sequence
  ENSG00000260188_8 (sequence is synthesized)
ggataaaatggacaaattactgaaaaatacaatctaacaacactcaagaagaaatagataaccaaaataggcctacatctattaaagaaattgaatatgcaattaaaaaccttctgatat

SEQ ID NO: 831560 - DNA, 120 bp, Artificial Sequence
  ENSG00000260188_9 (sequence is synthesized)
agtttggatgtttgtcctctccaaatctcgtgttgaaatgtagtccctaatgttggaggtggggcctggtgggaggggtttggatcatggatccttcatgaatgtcttggtgccatcctc

SEQ ID NO: 831561 - DNA, 120 bp, Artificial Sequence
  ENSG00000260188_10 (sequence is synthesized)
cccagtaatgagtgaattctcagttatgagttcacacaatatctggttgtttgaaagagtctggaacttcctcctccttctctcttgttccttctctcaccatgtgattcagggaccgct

SEQ ID NO: 831562 - DNA, 120 bp, Artificial Sequence
  ENSG00000260188_11 (sequence is synthesized)
tcatcttctgccatgactggaagcttcctgaggccctcaacagaagcagatgctggcactatgcttcatgtacagcctacagaaccatgagccaaataaatctcctttctttataaatta

SEQ ID NO: 831563 - DNA, 79 bp, Artificial Sequence
  ENSG00000260186_0 (sequence is synthesized)
ctgcaaagacactttcagaagaggaacgaaggcctggaaggaaaagcatcaggggaacgacgcttacgtctctcctcct

SEQ ID NO: 831564 - DNA, 120 bp, Artificial Sequence
  ENSG00000260186_1 (sequence is synthesized)
ggaaaagcatcaggggaacgacgcttacgtctctcctcctccctccggtctcccaccagtgctcccattggctgaagccaaccagaagccacaggactctatcacccaggctggagtgca

SEQ ID NO: 831565 - DNA, 120 bp, Artificial Sequence
  ENSG00000260186_2 (sequence is synthesized)
cagcctcctgagtagctaggattacaggaatcctgaggtcagcatcatcccaatttcacagagtatgacatgacgtctcagagagggtaagcagcttgccaaacattccacagccaggaa

SEQ ID NO: 831566 - DNA, 120 bp, Artificial Sequence
  ENSG00000260186_3 (sequence is synthesized)
attccacagccaggaagctgtaggaccagcctgtgctcctaaggactggctcctggctgctatatatagaactaagcctggtggaggtgtcagaaatagaggttcacttctgtcatcacc

SEQ ID NO: 831567 - DNA, 120 bp, Artificial Sequence
  ENSG00000260186_4 (sequence is synthesized)
gacctccctccacacctttgcaaaggaggaaactgagaggcagggatttccgcagagcaaggaacccaaattgctgcctcctgtgatttatacactgcaccccaagctgtaggggtaacc

SEQ ID NO: 831568 - DNA, 120 bp, Artificial Sequence
  ENSG00000260186_5 (sequence is synthesized)
tctaggcagatggcactgtgcatgtaaaacccagctaggagagccaccagggggctggtgagcagccagaacccagctcttcaaatcttcaggccagtgtcctcacctgtaaaacaagga

SEQ ID NO: 831569 - DNA, 120 bp, Artificial Sequence
  ENSG00000260186_6 (sequence is synthesized)
tttgaacccaaagaacaccaagatcccctctcatactaggattccagctgatcaccccggcctgggcctgggctctgctctttgcccctgctccccccagcagagaagtagtccagcaag

SEQ ID NO: 831570 - DNA, 120 bp, Artificial Sequence
  ENSG00000260186_7 (sequence is synthesized)
atttgcttctccttctgccatgatcctaggatttagaacctggacctggacgcctcactgcttcctgcttccttagtgccttgtggcctggagtcagaataatctagctcaaacttggga

SEQ ID NO: 831571 - DNA, 120 bp, Artificial Sequence
  ENSG00000260186_8 (sequence is synthesized)
ggagatcaacgatgctcaataggaggaagagagagatggcaaggtctgggaaagctcgttcctttaattctcagggtcttaggatggaggagaaggagcctggagacaggactctggaag

SEQ ID NO: 831572 - DNA, 120 bp, Artificial Sequence
  ENSG00000260186_9 (sequence is synthesized)
tctagaactcttcccaggggtatctgggcaatccccaacagagcacttggtctctaatttctcagagtggccacctgctttggactcactcaggaaacttattaaggatacagatgcttt

SEQ ID NO: 831573 - DNA, 120 bp, Artificial Sequence
  ENSG00000260186_10 (sequence is synthesized)
ggtgcccttgtccccaaccaaccagggtcccagggtcaggactcaggggttttgtgagtcacaaggtctccagatgattctgagactttcaaccagagactttaaagtagggaggagaaa

SEQ ID NO: 831574 - DNA, 120 bp, Artificial Sequence
  ENSG00000260186_11 (sequence is synthesized)
ccaagatgcctgtccttcggctttatgtgctaacacttgccaaatgccttcaaatctgaggaaatgggagggaagagttcagttcaagaagggaaaacttcggcgatgacctggggtttt

SEQ ID NO: 831575 - DNA, 120 bp, Artificial Sequence
  ENSG00000260185_0 (sequence is synthesized)
gattcaacagagaaaacagatgacccccacaggcttttgaaagagccgaagtccccgcactccatgctcatatagagaatgatcatagaagacaacaacgaaaggtctgtaactgattgt

SEQ ID NO: 831576 - DNA, 120 bp, Artificial Sequence
  ENSG00000260185_1 (sequence is synthesized)
tatgcactgatccgtcaggagattgttggtcagataaagcagctgcagcatactcaaactctcctctccagtgcaggcggatggtaaagactccagactatttgcagatgcattcaagta

SEQ ID NO: 831577 - DNA, 120 bp, Artificial Sequence
  ENSG00000260185_2 (sequence is synthesized)
tctgagactgacagaacacacacagatcatcacctcctttaagtttatttgctgccttcctatatagaaaccatcatgtcacctcagtatggaatgctgccattctaagcttccaaatgg

SEQ ID NO: 831578 - DNA, 120 bp, Artificial Sequence
  ENSG00000260183_0 (sequence is synthesized)
tgcattcctgaccacggttgagcatgtctcggcctgcagctgcattgcaactacctagagaacatttgcaaaatttacacgtgcaggcactgctcccaggagtatggagttatgcagtgg

SEQ ID NO: 831579 - DNA, 120 bp, Artificial Sequence
  ENSG00000260183_1 (sequence is synthesized)
ggctcagacatctgttgcatacaaaggtttggctgtttggcttcagtctcccttgtctccctcagccttgggaggagatatgaaggtgaatttggaattgctatcaaattccttaggtat

SEQ ID NO: 831580 - DNA, 120 bp, Artificial Sequence
  ENSG00000260183_2 (sequence is synthesized)
agaatgtgggtccagaaacgattaaacgagacaagcgctttcaagaatggaagagtgttacaaacttaggattttaccaggttttcataaaaatcttgaagaccatcaattttgactttg

SEQ ID NO: 831581 - DNA, 120 bp, Artificial Sequence
  ENSG00000260183_3 (sequence is synthesized)
aagactgatttctctttcttttaagataactgctatgtccagaatgttttgctaaacagtatgaggataatatttacaggaaaacctattcaataaataaagcataataaaaaccttgct

SEQ ID NO: 831582 - DNA, 120 bp, Artificial Sequence
  ENSG00000260182_0 (sequence is synthesized)
gtacgtcacggacttgctatgtggagagagaaatcacacgggggtcttgctggaaggagagagaccggtgctgggatgagacctgcctgccctccatccctgtgctacagacaaggcaca

SEQ ID NO: 831583 - DNA, 120 bp, Artificial Sequence
  ENSG00000260182_1 (sequence is synthesized)
tgggcccatggtgccatctcccctgcccgtgactctgccaccaagtccacgaagcagcacccagccggccccagacccggctccacgcccccctccgcccccagtgcacctgccgccgcc

SEQ ID NO: 831584 - DNA, 83 bp, Artificial Sequence
  ENSG00000203472_0 (sequence is synthesized)
tggagcctttgggaggtgattagataatgaaggtggagacctcaagaatgggattagtgacattctttaaaaggccctggaga

SEQ ID NO: 831585 - DNA, 120 bp, Artificial Sequence
  ENSG00000203472_1 (sequence is synthesized)
gaaggacccggcgcagagctccctctggaacccggcactgcggcccgcgccctctactccccgcgcgccggccggcaaccctcggcgctgcccggtgcagcccgcccgagcgcacacaat

SEQ ID NO: 831586 - DNA, 120 bp, Artificial Sequence
  ENSG00000258301_0 (sequence is synthesized)
gtctcttccttcctaggcctacctctgttggtgcttttgtcttccaacctccctatgtagtaagaccagccaagcccacatgcccactgggagccctgaaaccagatctggttttctgtc

SEQ ID NO: 831587 - DNA, 120 bp, Artificial Sequence
  ENSG00000258301_1 (sequence is synthesized)
ttacctgaacaggttcccagaacccacaccaggcctctgaatcagtctctgagaatctgattgatttaaagccacttggttgcttccattgcactacctgggttgcgatcccctcaattg

SEQ ID NO: 831588 - DNA, 61 bp, Artificial Sequence
  ENSG00000258301_2 (sequence is synthesized)
tgcttccattgcactacctgggttgcgatcccctcaattgatttagtaaaaagaaaactta

SEQ ID NO: 831589 - DNA, 120 bp, Artificial Sequence
  ENSG00000258301_3 (sequence is synthesized)
catcatttgtcctcttggcctgttcagctggtgactgtagatttgatgaaaaggaaacttgggactccggaggaccaagatggagcgagacggtcaatactgatggacttgcagctagca

SEQ ID NO: 831590 - DNA, 120 bp, Artificial Sequence
  ENSG00000258301_4 (sequence is synthesized)
ccatggcagccctgcctggtctaaggaagctggcaggaggcgatggtacctggcgggggcagactgcccacctccccactccttcagaggactgtttcctgcccttcacaccatcatcat

SEQ ID NO: 831591 - DNA, 120 bp, Artificial Sequence
  ENSG00000258301_5 (sequence is synthesized)
ggccctgcatgtatgttcctgcacttggagcgagcccagggacacagggcagacactgggctcacagatgttgctgcagctgagccagaaaacattccaggcaggaaaagcaggtgcaca

SEQ ID NO: 831592 - DNA, 120 bp, Artificial Sequence
  ENSG00000258301_6 (sequence is synthesized)
cattcacacaggcctctggtcactcgaccagccagaatgagacggactccttgacctgggaagtcaagtcccagtgggaagggctggaaatcacacgtggtcaacttcttggctctctct

SEQ ID NO: 831593 - DNA, 120 bp, Artificial Sequence
  ENSG00000258301_7 (sequence is synthesized)
gctccccaaaccctggccctaggcttgctttatcatcacatcccaaggccagagggctgctgctgtccccatcttggccctgctagaagagggataggggtggctggcatgatgggtgag

SEQ ID NO: 831594 - DNA, 120 bp, Artificial Sequence
  ENSG00000258301_8 (sequence is synthesized)
gggaacatgagaatatgcagaggccttggaggaagaggactggcagttatgacaggaaggctctctatacctggctccccagtgttctgcccctggcactgagcatgaggagccaggctt

SEQ ID NO: 831595 - DNA, 120 bp, Artificial Sequence
  ENSG00000258301_9 (sequence is synthesized)
tggggagactttgcaatcacccccccaacctggtccattttccacaggtagctttcttgaactcaccttgacccctcctcagccagcagcccccacctccaggggcaaaggagctgaaag

SEQ ID NO: 831596 - DNA, 120 bp, Artificial Sequence
  ENSG00000258301_10 (sequence is synthesized)
acagtcctgaactggggggagctgggatcacatcagccaggccctgtccctcacaggaagtgagatgaggtgataccatggatggtgactaaggccccaaagtccctgcctctctgcctc

SEQ ID NO: 831597 - DNA, 120 bp, Artificial Sequence
  ENSG00000258301_11 (sequence is synthesized)
cccagaaacctcacagccaggccagcccccagagcagagcctgtgtaaacatgcccaggaggggaggaggggttgctacatatgagaaacagttaaaaataaatttaaaaagcaccacta

SEQ ID NO: 831598 - DNA, 120 bp, Artificial Sequence
  ENSG00000258301_12 (sequence is synthesized)
aagaaagaaaactcagctaggaattagaaacatcatttgtcctcttggcctgttcagctggtgactgtagtcccagatgtctatggattcctgcgggtcacctctccttttcctgctgcc

SEQ ID NO: 831599 - DNA, 120 bp, Artificial Sequence
  ENSG00000258301_13 (sequence is synthesized)
atgcctcctcctcccctggtcactaccacaccactgaaaatgagggggtcttggcggtgcgaagctacacttctagccacgatcttgtggggactggctgggatgaaaaatttgatgaaa

SEQ ID NO: 831600 - DNA, 120 bp, Artificial Sequence
  ENSG00000226889_0 (sequence is synthesized)
gtacgacacaggaaaacgtcagagactaagcaaatttgaatagacctctgagtaaatatttcccttttggagttttcaggactttctgtcccgctgttttatggggaaggcgggggaaga

SEQ ID NO: 831601 - DNA, 120 bp, Artificial Sequence
  ENSG00000226889_1 (sequence is synthesized)
cacgcagacatcaattcgactaaacaaagtttatcaataatattaaaaataaaaagtaaagcccctttctgaacattatggcttattccttgattatccttcttaatgccacagcgtggc

SEQ ID NO: 831602 - DNA, 120 bp, Artificial Sequence
  ENSG00000226889_2 (sequence is synthesized)
gaaagaaaaacactactatttttccacattcgtgaaaactgcttaactgggacagtaaccgagcggccagtgaatatttaaaatactgtaaccgacgaatacgtatgcttctaggaccac

SEQ ID NO: 831603 - DNA, 120 bp, Artificial Sequence
  ENSG00000226889_3 (sequence is synthesized)
gtggaatctttcccatggtaggtaagcaaaacaaatgtgcttcccagaaccctccaaactgctcgtgggtatattactacagattacataatgcagcagcgttccgggacgcaagcccag

SEQ ID NO: 831604 - DNA, 120 bp, Artificial Sequence
  ENSG00000226883_0 (sequence is synthesized)
ttcatgagctcttcaagattgggccttgccctttgtattttcatttctggagcctggaatatcactcagcacaaagtatatactcaataaaggttttcctggccagatcagcctccccaa

SEQ ID NO: 831605 - DNA, 120 bp, Artificial Sequence
  ENSG00000226883_1 (sequence is synthesized)
ctagactgtgagcgccttaaagcaggaattgttataattattttcactgccaaactcggcatctggcatatcgtatgcactcagggaatgtctacggaatgaatgaacttaaggataata

SEQ ID NO: 831606 - DNA, 120 bp, Artificial Sequence
  ENSG00000226883_2 (sequence is synthesized)
cacgtgacggaatgttaaaatggaagttttggctgagatctaaagatgacagatataagataccaaagtgaactggaaacagaccaccctgaagaatgtgcaagaagggtgcctgaggac

SEQ ID NO: 831607 - DNA, 120 bp, Artificial Sequence
  ENSG00000226883_3 (sequence is synthesized)
agatggatttttaggaaagagctgttggtttactgcacatcaggcctccttccagggtgaagtatgaagagatcctctcccttcaggagtcaggaagacacagaccagcagagaatctgc

SEQ ID NO: 831608 - DNA, 120 bp, Artificial Sequence
  ENSG00000226883_4 (sequence is synthesized)
tgcatgtccctgaggttgtggcacatggtggcttgtatgtgactcctgtctggaagagacaggctggctgacagctgcagtgtaaaagtgaagtagaggttaccctgggatcaaccagca

SEQ ID NO: 831609 - DNA, 120 bp, Artificial Sequence
  ENSG00000226883_5 (sequence is synthesized)
ctgccagagtctgtccagatccaaaagacaaaggtttcccatagaccccaagtggcccatgtatgagagagctgccaggggttctcagatcctgtccaacatggccacctaacgaggtgg

SEQ ID NO: 831610 - DNA, 120 bp, Artificial Sequence
  ENSG00000237445_0 (sequence is synthesized)
tagagttattgtaatcaatgtgaatatcatgttttttcaaatctgtaatgagcctatagtatttgctttctgaaacttaagtgtattgtatatattctgtatagttatattgtattagct

SEQ ID NO: 831611 - DNA, 120 bp, Artificial Sequence
  ENSG00000237445_1 (sequence is synthesized)
atgtattgagtatctttttgctagcctgaattgtttagtttttttaaaaaaggtttaaacttttttattttttaatctttaaactgccctttattacatggtcacaaataaagttgcagc

SEQ ID NO: 831612 - DNA, 120 bp, Artificial Sequence
  ENSG00000237445_2 (sequence is synthesized)
taggaaagggatgggcagaaaaaaaactagttttgagtgtctttagatagaaacacgagactaagatttggttttctttttgttttctcattaaaatatcttaagctttatggagtaaaa

SEQ ID NO: 831613 - DNA, 120 bp, Artificial Sequence
  ENSG00000277020_0 (sequence is synthesized)
gggcggggagggaaaggctcgcggccagtagatgcaggagggaggagggcctagaggggctccgggctggcggcctctgtgaggaaggggaaggatatggaaccaagatcctttaaatcc

SEQ ID NO: 831614 - DNA, 120 bp, Artificial Sequence
  ENSG00000277020_1 (sequence is synthesized)
tgatgaactcatccgtaaagcagatgcccaaaggatgatacaaggcaatttacttctatagaagggtgcgccctcacagatggagcaatgagatggatttcaccgtgttaggatggcctc

SEQ ID NO: 831615 - DNA, 120 bp, Artificial Sequence
  ENSG00000277020_2 (sequence is synthesized)
tacaggtgtgagccaccgcatctggccagaagttaagtttaaaagtagaagacaaagaattgaacatactgacattgattcttcgaagagaaatttagaactcatatctaacaccagcct

SEQ ID NO: 831616 - DNA, 120 bp, Artificial Sequence
  ENSG00000277020_3 (sequence is synthesized)
taacaccagcctccaattgattgagccaattccttcaaataaatctctctctgcaatatgcatcctattggatctgtttctgtagggaattctgattaatataccctttcaaggaacagc

SEQ ID NO: 831617 - DNA, 120 bp, Artificial Sequence
  ENSG00000277020_4 (sequence is synthesized)
ggcggagaacggcgggtcagagagaaggcagcccggtccccctcagtggaagggagtggcgatgcccaaaggatgatagtaagcttactgtgacataactcccggagccgcagcacgagc

SEQ ID NO: 831618 - DNA, 120 bp, Artificial Sequence
  ENSG00000277020_5 (sequence is synthesized)
cttgtgaaccttggaagcccgttttccgcgcagtcactaactcgcttagtcaccctgtgtaaaagttattctgggatgacacctgcctgggaagtctcacctttccccccacctcctcct

SEQ ID NO: 831619 - DNA, 120 bp, Artificial Sequence
  ENSG00000277022_0 (sequence is synthesized)
actatttcagaaagcagccacaggccctgtctggggcatcctcagatgtcagcatctcaaggcagcacaggtgacaggctctctgcaaagagaaaggaatttgttaattgtcgttgctga

SEQ ID NO: 831620 - DNA, 120 bp, Artificial Sequence
  ENSG00000277022_1 (sequence is synthesized)
agcccttgacttggacactgtgcagctggcagatcctagaccctcccagaaatgagcacctctggtcctccctgcagtcaaggcaacagacaagaaggcagtgagtttgccaagcctgga

SEQ ID NO: 831621 - DNA, 120 bp, Artificial Sequence
  ENSG00000277022_2 (sequence is synthesized)
ggggggtggctcaggagcactgcagactcactctgcagggtggctgcctcagtgttcccatctgaaaaaggggaacaggtaagacggctcagattatttcagaggtgcttctagcagtga

SEQ ID NO: 831622 - DNA, 120 bp, Artificial Sequence
  ENSG00000277022_3 (sequence is synthesized)
cctcctgccaagctggcttttggaagatgtgttaagtctgcggtttcacaggacacgtcgccactttctcctcggaaggcagagagagcctcagcatcagaggagggacactgtgtaggt

SEQ ID NO: 831623 - DNA, 120 bp, Artificial Sequence
  ENSG00000277022_4 (sequence is synthesized)
gcgaggggtgtaggacctgtgaactctacctctttgcctcagatcttccctccggacctgctcctcgccttaacccatgccctgggttcccggctctcttgtgtggcagatcctggctca

SEQ ID NO: 831624 - DNA, 120 bp, Artificial Sequence
  ENSG00000277022_5 (sequence is synthesized)
ctcctgcttctccaggaagtggttctccttccttctgcagcggccatatccaaagatcttgcagatcctggagctgatgttgaagaaggacctggaaggaaggctccaggtagaaggcag

SEQ ID NO: 831625 - DNA, 120 bp, Artificial Sequence
  ENSG00000277022_6 (sequence is synthesized)
gtggcggggctccagagacaaaggagggtcaataagaagatggtcatcacagcggtctacacagcaagcagcagaaacaaccggcatggccaagcatggtgactcacacctgtaatccga

SEQ ID NO: 831626 - DNA, 120 bp, Artificial Sequence
  ENSG00000277022_7 (sequence is synthesized)
tcatctcaaaaaaaaaaaaggtccacctggtgcccctggcttcatcaccaatgggcttaccatggccacacgggtcctctttcaggcccttgtgtcactctctcccatgctgaccagctc

SEQ ID NO: 831627 - DNA, 120 bp, Artificial Sequence
  ENSG00000277022_8 (sequence is synthesized)
tggccacaaagctgcctcttccatcactgggagctcttccccacctcggagctgttcccgtcacctggattgtcttccctccacattcctgccacctccttctgctcagcctaaaggtca

SEQ ID NO: 831628 - DNA, 120 bp, Artificial Sequence
  ENSG00000277022_9 (sequence is synthesized)
ctttctcacagaagctgtccctgagcctcaatctaaattgcatccccacaaggacacaaagatgtgagcaataaacactaaggattccagaaggggggatggaggagagcaaaagttgaa

SEQ ID NO: 831629 - DNA, 120 bp, Artificial Sequence
  ENSG00000277022_10 (sequence is synthesized)
aaactacctgttgggtactatattcactgcttgggcgacgggatcgttggaagcccaaacctcagcatcatgcaatacacccgtgcaacaaacctgcacacgtactttctgaatctaaaa

SEQ ID NO: 831630 - DNA, 120 bp, Artificial Sequence
  ENSG00000277022_11 (sequence is synthesized)
gaatttctaaaataaaataaattgtacccccttagttctttctgagcaccctctttttatcttcataacaccatcatttgtatttatggaatgattatgcatcattatttggtaaatgac

SEQ ID NO: 831631 - DNA, 120 bp, Artificial Sequence
  ENSG00000277022_12 (sequence is synthesized)
ctcaccagctagactctaaatcaaaaagggctggggctgtatctgacatattctcagttgtatcagcagcacctagcacggcatctaacataaatgatacttatttgtggtttggcttaa

SEQ ID NO: 831632 - DNA, 120 bp, Artificial Sequence
  ENSG00000285958_0 (sequence is synthesized)
tggaggccccagcgagatccgccaccgggtgagggccggactcgttccgggctcccccggagcaacggcgggcttacagggtaggcgccacctaaagatgctccagggccccgtaggcca

SEQ ID NO: 831633 - DNA, 120 bp, Artificial Sequence
  ENSG00000285958_1 (sequence is synthesized)
ccgtcttccagaggggaacggatcaactgctggtgtgcccaaccaaattcaactcctgagtcctcagtctccggtcccgggaaggtatcaagggagccactcgaaaacccatgaatctgt

SEQ ID NO: 831634 - DNA, 120 bp, Artificial Sequence
  ENSG00000285958_2 (sequence is synthesized)
cgaagacaactgaagtggtccaggggcccgatgagtcaccaggagcgtttctagaatgcctccaagaggcctattggacttataccccttttgacctggcagctcccgagaatagccgtg

SEQ ID NO: 831635 - DNA, 120 bp, Artificial Sequence
  ENSG00000285958_3 (sequence is synthesized)
ctattaatttggcatttgtggctcaggcagcccctgatagaagaaagttacaaaagctgtagggatttgctggaatgaacaccagccaacttttagagatagcccagaaagtttttgaca

SEQ ID NO: 831636 - DNA, 120 bp, Artificial Sequence
  ENSG00000285958_4 (sequence is synthesized)
attgagaggttaaaaagcaaaaacaggcagctcaggcagctgaaagggctgctgacaaagcatcaaaaagacaggcaaaaatcttcgtggctgccatccaagaagccaagacagaagggc

SEQ ID NO: 831637 - DNA, 120 bp, Artificial Sequence
  ENSG00000285958_5 (sequence is synthesized)
ccccatcacagagcactggccaagggatcccgggtccctgccagaaaggccaaaagctgagcaggctcccctacaaagaaaccaatgcacttattgcaagcagattggacactggaaaat

SEQ ID NO: 831638 - DNA, 120 bp, Artificial Sequence
  ENSG00000285958_6 (sequence is synthesized)
ggaatgcccattaaaaccagaagaaaaaccagaagagaaaaaggtcctcaccctccctgctgcggaggaatctgatgattgatggggccggggctccctctcccttggcccctgggagcc

SEQ ID NO: 831639 - DNA, 120 bp, Artificial Sequence
  ENSG00000285958_7 (sequence is synthesized)
catggtgactgccacactggggggccagcctatacgcttcctaattgacaccggggcggaacacttggtactgcagatacccttgggcagtgtctctaataaaaaggtggctgtgcaagg

SEQ ID NO: 831640 - DNA, 120 bp, Artificial Sequence
  ENSG00000285958_8 (sequence is synthesized)
gtctatgggagctattcaggaatatcctgtcacccactcacgagaggtgagtttgggacagaaaagagtaacccactcatttcttgcagtcccagagtgccccttccccctcctcagacg

SEQ ID NO: 831641 - DNA, 120 bp, Artificial Sequence
  ENSG00000285958_9 (sequence is synthesized)
agacctacttcataagctacagacgtccatctccttctcggcccaacaagctcacatcatgttaggggacacagcaccccctactgctcagcttctgctaaccacccctctgtcagagga

SEQ ID NO: 831642 - DNA, 120 bp, Artificial Sequence
  ENSG00000285958_10 (sequence is synthesized)
atatctcttagtttcaccctcacaactgctgggaaatagtactaatcctctcctactggatttacagactctgtttccctgagtctgggccgaatcaaaccccccaggaatggcaaagca

SEQ ID NO: 831643 - DNA, 120 bp, Artificial Sequence
  ENSG00000285958_11 (sequence is synthesized)
ccatctgccagtagttgtagagctcctggccactgctgccagtccaggtaaaacaatatcctgtgagtcagcaggctagagagggaatcgatccccatattcagcgactattacaagctg

SEQ ID NO: 831644 - DNA, 120 bp, Artificial Sequence
  ENSG00000285958_12 (sequence is synthesized)
gtatactcccaccatgtgagtccgcctggaatactccatttttgccggtccagaaacccggaacaaatgattaccggcctgtacagatttgtaggaagttaacaagtggacagttaccat

SEQ ID NO: 831645 - DNA, 120 bp, Artificial Sequence
  ENSG00000285958_13 (sequence is synthesized)
ccatccaactgtgcctaacccttatactttactcagcctgctcccgcccgaacatacaatgtatactgtccttgacttaaaggatgctttctttgctattcctctggcccccaaaatcca

SEQ ID NO: 831646 - DNA, 120 bp, Artificial Sequence
  ENSG00000285958_14 (sequence is synthesized)
acctgtctttgcttttgaatggacagatcctggctcgggagacaccacccaattaacctggactcaattaccccagggttttaaaaactcccctaccctttttggggaagccctccaaca

SEQ ID NO: 831647 - DNA, 120 bp, Artificial Sequence
  ENSG00000285958_15 (sequence is synthesized)
ggatcttataccattctgagccagtaaccctcactgcactcttctccagtatgtagaccacctgttattggctattaaaactactgacagctgcctgcaacatactagggacctacttta

SEQ ID NO: 831648 - DNA, 120 bp, Artificial Sequence
  ENSG00000285958_16 (sequence is synthesized)
cctccttcaggaactcgggtatcgggtctcggccaagaatggccagctttgtcttcccagagtttcctacctggggtacgagataaacaagggaaaaagggcactcaccagtgcttgaaa

SEQ ID NO: 831649 - DNA, 120 bp, Artificial Sequence
  ENSG00000285958_17 (sequence is synthesized)
gaaggccatcctgcgaatctccactcccaccaccaaaagacaggtacatgaattcccgggggctgtgggacagtcacctatggatattagggttcgcggaaatcaccaagcccctttata

SEQ ID NO: 831650 - DNA, 120 bp, Artificial Sequence
  ENSG00000285958_18 (sequence is synthesized)
ccgctactggagttaatggcccgctagtttggactgacaaagaagaacaggcttttctaaacctgaaaaaggtattaacggaggcccctgctcttgtcctcccaaatatctcaaaaccat

SEQ ID NO: 831651 - DNA, 120 bp, Artificial Sequence
  ENSG00000285958_19 (sequence is synthesized)
ttcacctttttgttcatgaaagccagggagtcactaaaggggtactcacttagactttgggaccatggcaatgcccagtggcctacttgtctaagagactagaccctgaggcctcctggt

SEQ ID NO: 831652 - DNA, 120 bp, Artificial Sequence
  ENSG00000285958_20 (sequence is synthesized)
ggccaagttgtctgtgagctgtaggggcaacagcaagcctggtccaggaggctgataaactgactctgggccagaatttaaccctcacggctcctcatgccatagagaatttgctacgaa

SEQ ID NO: 831653 - DNA, 120 bp, Artificial Sequence
  ENSG00000285958_21 (sequence is synthesized)
gtgcctctggcaaatggatgtcgaatgctcgcatcctgcagtatcagagcttactgttagatcagcctcatttaactttctctctcacaaggtgtttaaatccagctaccttgctccctg

SEQ ID NO: 831654 - DNA, 120 bp, Artificial Sequence
  ENSG00000285958_22 (sequence is synthesized)
atccacaccttaccacacctgtccatgactgccaagaactgttagagactacagaaactgggcgacctgatctccaagatgtgcttctaaaggaggcagataccactgtgtttacagaca

SEQ ID NO: 831655 - DNA, 120 bp, Artificial Sequence
  ENSG00000285958_23 (sequence is synthesized)
gcagcagcttccttaaacagggagtacgaaaggctggtgcggccgttactatagattcatatgtactgtgggcccaggcactgctggcaggtactttggcacaaagggctgaattggttg

SEQ ID NO: 831656 - DNA, 120 bp, Artificial Sequence
  ENSG00000285958_24 (sequence is synthesized)
ccctcactcaggccctctgatggggtaaggacaaatgtattaatatctgcactgacagcagatacgcttttgctactacacatgcacgtggagccatctatcaagagcgagggctactca

SEQ ID NO: 831657 - DNA, 120 bp, Artificial Sequence
  ENSG00000285958_25 (sequence is synthesized)
cctccgcgggtaaaactataaaagacaaagaagaaattttgaccctgcttgaagctgtttggctccctcagcaggtggctgtaattcactgcaaaggacatcaaagagaagacacggccg

SEQ ID NO: 831658 - DNA, 120 bp, Artificial Sequence
  ENSG00000285958_26 (sequence is synthesized)
ttgctcgaggtaaccaaagagcagattctgcagcttgagaggcagctcggctcctggtcgtgcctttcaccctgctgcccgctgtgtcctttccgcaaccagacttgccaggccacccag

SEQ ID NO: 831659 - DNA, 120 bp, Artificial Sequence
  ENSG00000285958_27 (sequence is synthesized)
aatactccccagaggaagaaaaacaaacttcggatcttcaggccagtaaaaatcaggaaggttggtggattcttcctgatttcagaatcttcatgccccaagctctcggggaagctttaa

SEQ ID NO: 831660 - DNA, 120 bp, Artificial Sequence
  ENSG00000285958_28 (sequence is synthesized)
atctgggaggagtaaaactggcccagcttttaaagagccatttcaagatcccccaccttcaggacttaactaaccaagcagctctccagcatacggctagtgctcaggtaaacgccaaac

SEQ ID NO: 831661 - DNA, 120 bp, Artificial Sequence
  ENSG00000285958_29 (sequence is synthesized)
aaggtcctaaacccagcccacgtcactgcctccggggaggctcgccaggagaaaggtgggaaattgactttacgaaggtaaaaccacaccgggcaggatataaatacatcctggtgctac

SEQ ID NO: 831662 - DNA, 120 bp, Artificial Sequence
  ENSG00000285958_30 (sequence is synthesized)
tagacaccttttctggatagactgaggcatttgccaccaaaaacaaaactgctaccatggcagttaggcttttattcaatgaaatcatccctcgacatggactgcctgttgccatagggt

SEQ ID NO: 831663 - DNA, 120 bp, Artificial Sequence
  ENSG00000285958_31 (sequence is synthesized)
ctgataatggaccagccttcacctcgtccatagctcagttggttagcaaggcattaaacattcagtggaaactccattgtgcctattgaccccagagctctagacaagtagaatgcatga

SEQ ID NO: 831664 - DNA, 120 bp, Artificial Sequence
  ENSG00000285958_32 (sequence is synthesized)
accacaccctaaaaagtactcttaccaaattaatcttagaaactggtgaaaattgggtaaagctccttccttcagcccttcttagagtaagatgcaccccttgccaggctggtttttcac

SEQ ID NO: 831665 - DNA, 120 bp, Artificial Sequence
  ENSG00000285958_33 (sequence is synthesized)
cttttgaaatcatgtatggaagggctccgcctgtcttgcctaagctaagggatacccattcagcagaaatctcacaagctaatttgttacagtacctgcagtctctccaacaggtacaag

SEQ ID NO: 831666 - DNA, 120 bp, Artificial Sequence
  ENSG00000285958_34 (sequence is synthesized)
acatcatccagccacttgtccggggagcacaccccaatccagttcctgaccagacgggaccctgccactcttttcagcagggtgacctggtgtatgttaaaaggttccagaaggaaggac

SEQ ID NO: 831667 - DNA, 120 bp, Artificial Sequence
  ENSG00000285958_35 (sequence is synthesized)
tcactcctgcctagaaaggatctcatactgtcatcctcaccacgccgacggctctgaaagtagatggcattcctgcttggattcatcactcctgcatcaaaaaggccaacaaaggccagc

SEQ ID NO: 831668 - DNA, 120 bp, Artificial Sequence
  ENSG00000285958_36 (sequence is synthesized)
aagaaacatgggtccccaagcccgggccaggccccttaaaactgcgcctaagtcaagtgaagccaccaaatttattctttttatttacctcttttgtttgtttatgcctgttatgccccc

SEQ ID NO: 831669 - DNA, 120 bp, Artificial Sequence
  ENSG00000285958_37 (sequence is synthesized)
tgccccttcctactcttttctcctcacctctttcatgacaggacgtgtttgccaacaccacctggaaggtgggaacctccaaggaagtctcttttgcagtcgatttatgtgctttgtttc

SEQ ID NO: 831670 - DNA, 120 bp, Artificial Sequence
  ENSG00000285958_38 (sequence is synthesized)
cagtgcctgcccgtaccctcaaagagcaatgcaatctgccgatcataggagtagggaacgtcgacctcgctacagggcttggacacaccggaagccagactggatgtggaagttccaagg

SEQ ID NO: 831671 - DNA, 120 bp, Artificial Sequence
  ENSG00000285958_39 (sequence is synthesized)
gtgcaaagaaaggactccagagcattaacttttacctctgtcctggaaatcaccccgactctagttgtcgagattcttaccagtttttctgtccttactggaggtgtgtaaacttggcca

SEQ ID NO: 831672 - DNA, 120 bp, Artificial Sequence
  ENSG00000285958_40 (sequence is synthesized)
cttactctggagaatcaacgaggtcctcaaccctatccatagcccgcacttcctgttctagacagtgtactatgggaaactgcaatcttcttactataactgtccataaccctagtttaa

SEQ ID NO: 831673 - DNA, 120 bp, Artificial Sequence
  ENSG00000285958_41 (sequence is synthesized)
ctcagtggtattacggcatgtcatggggattaaggctttatatctcaggatttgatgttggaactctgctcaccatccagcagaaaatcctggtcccatggagccctcctaagccaatcg

SEQ ID NO: 831674 - DNA, 120 bp, Artificial Sequence
  ENSG00000285958_42 (sequence is synthesized)
gaccattaactgatttaggtgacccaatgttccaaaaacacccagacagggtcgattcaactgtcccaccagcattcctggttcatagacctcagctgcaacgacaacacctccaaccca

SEQ ID NO: 831675 - DNA, 120 bp, Artificial Sequence
  ENSG00000285958_43 (sequence is synthesized)
gtctgatgtccattctggatggggtacatcacctctttaatctcacccaggctagactagcccaagattgttggttatgcctaaaggccaagcccccatattatgttggattgggagtag

SEQ ID NO: 831676 - DNA, 120 bp, Artificial Sequence
  ENSG00000285958_44 (sequence is synthesized)
aagccacacttaaaattaactctttttttgtcatacatgcccccatgtccttacactaggagacatgtcagggaacgcctcctgtctaattagcgccgggtacaacttacctgcttctcc

SEQ ID NO: 831677 - DNA, 120 bp, Artificial Sequence
  ENSG00000285958_45 (sequence is synthesized)
ctttcaggctacctgtagtcaatctctacttactttcttaaatgcctcagtctcctaccaggcacccaacaatacttggttggcctgcacttcaggcctcactcgctgcatcaacgggac

SEQ ID NO: 831678 - DNA, 120 bp, Artificial Sequence
  ENSG00000285958_46 (sequence is synthesized)
tgaacctggacctctcctatgcgtgttggttcatgtactgccccaggtctatgtctacagtgggccagaaggacaacctctcattgccccccgctgagttgcagttaaggtttcgccaag

SEQ ID NO: 831679 - DNA, 120 bp, Artificial Sequence
  ENSG00000285958_47 (sequence is synthesized)
ctgccccactccttgtaccccttctagccggccttagcacagctgggtcagcagccatcggcatgagtgccctgattcaaggagaaactggattaatatccctatctcaacaagtagatg

SEQ ID NO: 831680 - DNA, 120 bp, Artificial Sequence
  ENSG00000285958_48 (sequence is synthesized)
ctgatttaaacaatctccaatcagccgtaaatatactacatacccaggtagagtctctaactgaagtagttcttcaaaactgccgaggcttagacctgctatttctctcctaaggaggtt

SEQ ID NO: 831681 - DNA, 120 bp, Artificial Sequence
  ENSG00000285958_49 (sequence is synthesized)
tatgcgcagcactagaagaaagttgttgtttctatgcaaaccagtctggagtcataaaaatactcttcaaagagttagagaaaatctagatagacgccagcaagaacgagaaaataacac

SEQ ID NO: 831682 - DNA, 120 bp, Artificial Sequence
  ENSG00000285958_50 (sequence is synthesized)
ccccggtaccaaaatatgttcaaccggaatccatggctaactactctaattactgggttggcgggacctctcctcctcctcttgttaggtttagtcttcaggccttgcatgttaaattgg

SEQ ID NO: 831683 - DNA, 120 bp, Artificial Sequence
  ENSG00000285958_51 (sequence is synthesized)
tttcttaactttataaagcaacacatagcttatgtcaaacttatgtatcttaaaacccaatataaccccctcgttataactgaggaatcaatcatttgattccccaaaaacatgagtggg

SEQ ID NO: 831684 - DNA, 120 bp, Artificial Sequence
  ENSG00000285958_52 (sequence is synthesized)
aaatgtgataccctaccttgttttaacctgattgactctcacttagctgagagagccagactccattttggtttcttcatttgcagccccttatccccttcccttaaggacataactggt

SEQ ID NO: 831685 - DNA, 120 bp, Artificial Sequence
  ENSG00000285958_53 (sequence is synthesized)
gcaagctgactccaagcacattcaggaacgcacttactgttaagatactggggcaagctgtaccagcagcccctgggaacgcactcggttgatggtacccaaagcccctgcatttatctc

SEQ ID NO: 831686 - DNA, 120 bp, Artificial Sequence
  ENSG00000285958_54 (sequence is synthesized)
tttgtgatactttaagcccttgcacctggaactgtttatttttctgtaactgtttctgtaaccatttatcttttaactttttgcttgttctgcttctgtaaaattgcttcagctaggctc

SEQ ID NO: 831687 - DNA, 120 bp, Artificial Sequence
  ENSG00000285958_55 (sequence is synthesized)
cgcctccactttttagaccaaggtataaaaaaaaacatctagccccttcttcggggctgagagaattttttagttctagctgtctctcggtcgccggcaataaaggactcctgaattagt

SEQ ID NO: 831688 - DNA, 120 bp, Artificial Sequence
  ENSG00000280707_0 (sequence is synthesized)
cagccatggcactagcgagcagggtcatcagagctgctccattcttctggaagctgcagagaaagggagcccggaaacctggtatgccggcaaaaaggatggagtttcactcttgtactc

SEQ ID NO: 831689 - DNA, 63 bp, Artificial Sequence
  ENSG00000280707_1 (sequence is synthesized)
atgggattacagtttataatcaggtataagtctcttggggaatctgacctcatacctcatcta

SEQ ID NO: 831690 - DNA, 120 bp, Artificial Sequence
  ENSG00000280707_2 (sequence is synthesized)
aatcagaaaatctgtgaatctgcctgtgatctggaagcctctgcttcctggtgtgccacctttcccgtctgaactgatgtacagcttaaatgtattgattgatgccttatgccctatagc

SEQ ID NO: 831691 - DNA, 120 bp, Artificial Sequence
  ENSG00000280707_3 (sequence is synthesized)
atgtataaaacctagctgtgccctgatcacctgggtcacacgttctccgggtctcctgaggactgtgtcacgggctgtggtcactcacgtttggctcgaaataaatctctccaatatttt

SEQ ID NO: 831692 - DNA, 120 bp, Artificial Sequence
  ENSG00000280707_4 (sequence is synthesized)
gaagacgccagagcgatccgcagtcttttcccatcttcataggctaacctcaagattaaggtgttataaaacacaaagggagggattgaaactacctttgcaaaattatgactgagacag

SEQ ID NO: 831693 - DNA, 87 bp, Artificial Sequence
  ENSG00000280707_5 (sequence is synthesized)
tgaaagaaatctaacttgatcgactccatcttgcttctaacctgcaagctgtccttgtccattcttggaccgaggctgaattcaaag

SEQ ID NO: 831694 - DNA, 120 bp, Artificial Sequence
  ENSG00000280707_6 (sequence is synthesized)
ctccttcttgcctgaagactaaattgcctttgtagggctaacaataaccacgagataagaaatcatggtggaggagtcatgtagctggagggtacaagattctgaccctccctaaactgc

SEQ ID NO: 831695 - DNA, 120 bp, Artificial Sequence
  ENSG00000285954_0 (sequence is synthesized)
cagggccagtaaggagcagggccgggactggaacatggagggtctgaccagaggcccaggtgcctctcccctgccaggctgcctctcctctgggtcttggtgtctccatctgtaagagct

SEQ ID NO: 831696 - DNA, 120 bp, Artificial Sequence
  ENSG00000285954_1 (sequence is synthesized)
cctgctgctccttcctgctgagcaaacccaccagaagccagaggccagggagctcgtgtgaggcatcagtccacagagcagaggcagagaacgcagctgcagggccggcggagaggacct

SEQ ID NO: 831697 - DNA, 120 bp, Artificial Sequence
  ENSG00000285954_2 (sequence is synthesized)
agtcctggcaggtggggctgggagggcagaagctctgcagatctgtgggaagagcctggaagccagagtcagctgtcttgtgtcacacctactgtgtgccacaggatgcgccgcttctcc

SEQ ID NO: 831698 - DNA, 120 bp, Artificial Sequence
  ENSG00000285954_3 (sequence is synthesized)
tccccctaggagtgcagagaagccgccatgggtcaatgtaggggatgcaatggatatctctgtcattcatctttctggacatgtggaagtgtatctgttgaattaattcctggaagctga

SEQ ID NO: 831699 - DNA, 120 bp, Artificial Sequence
  ENSG00000285954_4 (sequence is synthesized)
atgcctgggtcacaggtctaactgtgagaaaagcgcgggacaaatccgaattgaaggacagtctcctcaaaactgtcaaggtcatcaaagacaaggaaagtctgagaaactgtcacaacc

SEQ ID NO: 831700 - DNA, 120 bp, Artificial Sequence
  ENSG00000285954_5 (sequence is synthesized)
aagaggagcctagggagacacaccgactgaatgcaatgtggggtcctagatggggtcccggcccagaaaaggacgttcgggaaaacaaaggaaatctgaatcatctatggacttcagttc

SEQ ID NO: 831701 - DNA, 120 bp, Artificial Sequence
  ENSG00000285954_6 (sequence is synthesized)
atgactgacataggttcagttcatggactgacataggttcaataattgtaacaaatatacccacactcaggtaagatgctaatattaggggaaacagtatacataaactctatacaaact

SEQ ID NO: 831702 - DNA, 120 bp, Artificial Sequence
  ENSG00000285957_0 (sequence is synthesized)
ggagccgtggtgtcctcgtgtgcaagataggagtgaatgacacctcgcatcactagggccgtgctcagaaatgcactgatcatggggaaggggctgcagcggccagcgcacccgagggga

SEQ ID NO: 831703 - DNA, 120 bp, Artificial Sequence
  ENSG00000285957_1 (sequence is synthesized)
cacgtgccttgcgtcgtccctgtcaccctcactctgcagatggaggaggcagctcgtagctctgatttgacagctgacagaaaaccaaagagcatggactttccgtttcctgccctagct

SEQ ID NO: 831704 - DNA, 120 bp, Artificial Sequence
  ENSG00000285957_2 (sequence is synthesized)
ctgccactttctaaccaggagcccagaacttggtgcatttttgttagaaacagcagaagccatcggacgcaggcccgggaggtcaggttaaggaaccagtgatggtttctgccagctgcc

SEQ ID NO: 831705 - DNA, 120 bp, Artificial Sequence
  ENSG00000285957_3 (sequence is synthesized)
agctctgtccatcccaattatacacctggagacccataggcccttgtgagacggacatgggcctaactctacgcgccatgtggctttcataagacccctctacagcccaaggtgccgctc

SEQ ID NO: 831706 - DNA, 120 bp, Artificial Sequence
  ENSG00000285957_4 (sequence is synthesized)
tgcttgtctgctcagcggcgactcagagcctggacagtttccaaggtctgctctttcccgttaccactgcagtcttcccagcacacgcatgcaggtccctttggggaagcatcgaccaaa

SEQ ID NO: 831707 - DNA, 120 bp, Artificial Sequence
  ENSG00000285957_5 (sequence is synthesized)
gggacctgcagcctacgtgtggggtccttcctcaggtgaacctgactcccccttcagtcagtgagctccgagcctgtgagctgactcaggtgtgggacttggaccatgacctgcaggttt

SEQ ID NO: 831708 - DNA, 120 bp, Artificial Sequence
  ENSG00000285957_6 (sequence is synthesized)
ttgttcattgctgagcaatgcctcttggtgccttcctgtctccgttcgggctgctgtgatgaaacaccaagcctggccacgccccagaggacaggggccccatcaggaggtgagatcgtg

SEQ ID NO: 831709 - DNA, 120 bp, Artificial Sequence
  ENSG00000285957_7 (sequence is synthesized)
atgccagccaggctccttgttgatcaagttaccgagggtctacccagcagatgggggcccggaagctgggggagacgcagccatttggccctgggctcccaagtgtcctgctgtcactgg

SEQ ID NO: 831710 - DNA, 120 bp, Artificial Sequence
  ENSG00000285957_8 (sequence is synthesized)
gttaatccctgtccaggaagagcccagggctctgcagaggagagggggaataaaccagcagtggcaaccccaaagggaggctttttctctcttgtcccatcctcagggcctaagacagag

SEQ ID NO: 831711 - DNA, 120 bp, Artificial Sequence
  ENSG00000285957_9 (sequence is synthesized)
cttggcctcacctctgacactcatcaggtgctcagtagaagcttgttgcttagagaacgcacttgcctgtctgcacggcttcatttgttggtgatatgcttgttttcctcattcactgtg

SEQ ID NO: 831712 - DNA, 120 bp, Artificial Sequence
  ENSG00000285957_10 (sequence is synthesized)
aaagcagaacccgcgtcctggcatagcgggagttctttgtagcccacgttctccaacctcttcctccctcaaagccctcccgcgtctgcctctctcaggatctctggaagtctctcttct

SEQ ID NO: 831713 - DNA, 120 bp, Artificial Sequence
  ENSG00000285957_11 (sequence is synthesized)
ctaggagggcagagggagttaaggagtcagttacacagaccccactctgtccatgtcccgcaccatcaatcgtgtggaaagatttctgtcccagcaagttaactttacacatccatttca

SEQ ID NO: 831714 - DNA, 120 bp, Artificial Sequence
  ENSG00000285957_12 (sequence is synthesized)
tgtaggctgggcatgactgtgaagtcagaaccactgaattaggaacatcaattggaagcctctgaacccccctccccttttctaccaaattagtaaatccatcctgccttcctggaagaa

SEQ ID NO: 831715 - DNA, 120 bp, Artificial Sequence
  ENSG00000285957_13 (sequence is synthesized)
tcgcagagatcagagccgccatcagaggcttgaagggtggcaaaattctgccaaccaactcctggctcacactaggaaacttagcactttgggaggctcagacacgaggactgcttgagg

SEQ ID NO: 831716 - DNA, 120 bp, Artificial Sequence
  ENSG00000285957_14 (sequence is synthesized)
gcttgaggtcaggagtttgacactagcctggacaacatagcgagaccccatctctacaaaatgttaaaaagaaaaaaagagttaggtgtggttgtgtgcatctgtagtcccagctactca

SEQ ID NO: 831717 - DNA, 120 bp, Artificial Sequence
  ENSG00000285957_15 (sequence is synthesized)
aggtgggagaactgcttgaacctgggaggttgagactgcagtgactgtgggagcccagggggttatggtgagccatgatcacgcccctgcactgcaacctgtgcgacagagggagacttt

SEQ ID NO: 831718 - DNA, 120 bp, Artificial Sequence
  ENSG00000285957_16 (sequence is synthesized)
gtctcttcaaacaaataaagaacaagtacatgagttgcttgaaagattcccagtgcctacttccaattcagagcgcggtgctccacgcagttgggtgcgttgctgggattcagacacgga

SEQ ID NO: 831719 - DNA, 120 bp, Artificial Sequence
  ENSG00000285957_17 (sequence is synthesized)
gtctccccaaagcagcaagtggtgatgcagctaggaacgggcaggccaagccccccacccagccccccgaggttgatgtccctttccacttgacacagaaaagaggcaactcatcctact

SEQ ID NO: 831720 - DNA, 120 bp, Artificial Sequence
  ENSG00000285957_18 (sequence is synthesized)
gcattttaaaataaaaatactttattgatgaagtcagacagcagctaacagtttgagaagcttgggaagaaatcactttcacatgggggatatatgcaacctagaacatatttggctaag

SEQ ID NO: 831721 - DNA, 120 bp, Artificial Sequence
  ENSG00000285957_19 (sequence is synthesized)
tcataaaattaacatttttagtcatctgtaaagtgctgagacatttatttctggtgcctgcctgtgttaggatttttttcttgttatccgtccagtaagtgaaacactgaaatacacgtt

SEQ ID NO: 831722 - DNA, 120 bp, Artificial Sequence
  ENSG00000285957_20 (sequence is synthesized)
cagcaggatggcgctcactaagtatgcaccttgacatgatggtgtgcactcattatgcacgttctcacgcggggctggctctgcaactgcagaatagaaactgatgcgttctgcagagga

SEQ ID NO: 831723 - DNA, 120 bp, Artificial Sequence
  ENSG00000285957_21 (sequence is synthesized)
ggcgtctgcacaacagacaggctggcccgaggtcacgcctcttggcctgagtcccgctcagtgacagcagccagcatggcctagcaccaggagtcattcggagcgtgcgtgctaaagcag

SEQ ID NO: 831724 - DNA, 120 bp, Artificial Sequence
  ENSG00000285957_22 (sequence is synthesized)
acacagcattccacgtcaacaggggcaagaagctgcacgaaggaactaagcaagacttctctgcctatctcctctaatactaaagcacacacttttctcctgtggatagtcactctattt

SEQ ID NO: 831725 - DNA, 120 bp, Artificial Sequence
  ENSG00000285957_23 (sequence is synthesized)
atacgagaagggaggaataatttggtgttgatgcttgagtccaaatgttgataggcactgagcattttggttcaaagcaaacattatttgtgaaatgctacagataatacattgactgaa

SEQ ID NO: 831726 - DNA, 120 bp, Artificial Sequence
  ENSG00000280703_0 (sequence is synthesized)
cacttgctgactgagctgaaaagggactccccactgagcaggctcaccagtgtcccgacagccgggcagatcatggggacggggaattctgagcagaacctcttcagaagttgagtctca

SEQ ID NO: 831727 - DNA, 120 bp, Artificial Sequence
  ENSG00000280703_1 (sequence is synthesized)
aggggccttggggaacttggtcagcagatggcaagacttcatctgtcagtgggcgggtcagctcagcgggactcctgtctttggaactgagactcaagtctctactctgtaccaagacag

SEQ ID NO: 831728 - DNA, 120 bp, Artificial Sequence
  ENSG00000280703_2 (sequence is synthesized)
agatggaggccaggaaacaagacacacaaccattttccatcatcgaggggcaaggcagggcttggcatgaggcagaaccaggctccatcaatgccacatgtcaggaggaaccccttttct

SEQ ID NO: 831729 - DNA, 120 bp, Artificial Sequence
  ENSG00000280703_3 (sequence is synthesized)
gtttcaatccctcctgcccatttgtgggaggcattagagaggcctgacatagttttttttctccacagcctgaggacgtgataggatttcattcccgccccaccttgtggttggatggaa

SEQ ID NO: 831730 - DNA, 120 bp, Artificial Sequence
  ENSG00000280703_4 (sequence is synthesized)
ggcagagcccagagacctggagtgtggctgccagtgggcacccggctgagggacaagcaggtgggcctcagtggtggctgccaggtccctggacgcagggggccaccggctttgcctctc

SEQ ID NO: 831731 - DNA, 120 bp, Artificial Sequence
  ENSG00000280703_5 (sequence is synthesized)
ctctgcctcggaagcaccggaggctttggggatctggtggtcctccggccctgaacgtggacctggtgtgacaaagggaagtttgccatctccatcctcctcaagctgcctgtgcacccc

SEQ ID NO: 831732 - DNA, 120 bp, Artificial Sequence
  ENSG00000280703_6 (sequence is synthesized)
agtagcactcaccctctctgtgctcccgtctgcaccgcatgtcctggggtccttctttgtgctgcacccagtgacaggaaccagtgtcccgactgtgacttacttcccccctcagggaca

SEQ ID NO: 831733 - DNA, 120 bp, Artificial Sequence
  ENSG00000280703_7 (sequence is synthesized)
cacaaggactttcacatcgaggctacttttcaccccttctgcctcctgcagggacgctgcatgcagaggcaggaggacagaggggctggtctcaggtgtggcttctctcatacctggcgc

SEQ ID NO: 831734 - DNA, 120 bp, Artificial Sequence
  ENSG00000240211_0 (sequence is synthesized)
gctgagggctgtcgggccgcgggctcaggctcaagtccaggccgggctcgggcactggggctcggagttgcgggacttggggctccgggggtggccccgggaccgccgcggcttcttccc

SEQ ID NO: 831735 - DNA, 120 bp, Artificial Sequence
  ENSG00000240211_1 (sequence is synthesized)
tgctgtggaacatcagatagaatggatagcacagcccaaattttacaaaaaggattttaaaggaagatctcaatggtggaacactagaggctttcctgctaaagttaagaacaagcaagt

SEQ ID NO: 831736 - DNA, 120 bp, Artificial Sequence
  ENSG00000277790_0 (sequence is synthesized)
gaaacatgctatgagatcaagccaaaagaaaagaaaaagtagaatgcaaaattttacatttgcattaaggaaaaaacacgttagaagaaaatgcacttaaataaattgctctgtgtgata

SEQ ID NO: 831737 - DNA, 120 bp, Artificial Sequence
  ENSG00000240215_0 (sequence is synthesized)
actactgggagacatcctctgtagccccaactgtgccatgactatcaggttcctccgccaagtggccttttattttctggaggcaggccttaaggaagctgaaatctaccagaccccaag

SEQ ID NO: 831738 - DNA, 120 bp, Artificial Sequence
  ENSG00000240215_1 (sequence is synthesized)
gggcaggaaagaagatcactctggaatgttctcaaaccatgggccatgacaaaatgtactggtcaagatccaggaatggaattacacctcatccaccattcctatgggttaattccacag

SEQ ID NO: 831739 - DNA, 120 bp, Artificial Sequence
  ENSG00000240215_2 (sequence is synthesized)
agaagggagatctttgctctgagtcaacagtctccagaataaggatagagcgttttcccctgaccctggagtctgccagcccctcacatacctctcagtacctctgtgccagcagtgaat

SEQ ID NO: 831740 - DNA, 120 bp, Artificial Sequence
  ENSG00000277797_0 (sequence is synthesized)
ctgctttggttcaccctcaaactgactaaattttagcaatggataaaataatttttgctaacaaatatgtagaaggtttacacagccctttacaacttgggctagaaacttcagaaggaa

SEQ ID NO: 831741 - DNA, 120 bp, Artificial Sequence
  ENSG00000277797_1 (sequence is synthesized)
tatgataaacgcccacccaatctttccaggatacatgtagattaaacaatgtcacatctgtttgtaagttaaaaagcttactctatggcttttacattttatcttcatgtttcctactct

SEQ ID NO: 831742 - DNA, 120 bp, Artificial Sequence
  ENSG00000277797_2 (sequence is synthesized)
aataatatacatgtgactacagctaacttgtaacataattgagattattatattcatacaaccatatatcttttataaaacaaacaacatattgttacatatatccctctagatcatatg

SEQ ID NO: 831743 - DNA, 120 bp, Artificial Sequence
  ENSG00000277797_3 (sequence is synthesized)
tatgtggaaaacattcactgtatgttataagaaattagtgctttttatcaaacattagtgacgtgtagaaatcatgacttcagctatacaaagtgcattgtgatccagagggcttttttt

SEQ ID NO: 831744 - DNA, 120 bp, Artificial Sequence
  ENSG00000277797_4 (sequence is synthesized)
atgatcccatgtagaagagagatcattacatccatgcttctcaaacacattctattgtttttaaataaatggttaagggatttgcaactaaagaaattgggaaacaaaccaaaactagaa

SEQ ID NO: 831745 - DNA, 120 bp, Artificial Sequence
  ENSG00000277797_5 (sequence is synthesized)
gacgaggtgaagcgctacagataagagaaagaatttagcaagaacaggtcagagggtagctacaagaatacaaagagccagtgggaagggaggcttagggagcagaaattggggcaaagt

SEQ ID NO: 831746 - DNA, 120 bp, Artificial Sequence
  ENSG00000277797_6 (sequence is synthesized)
gttaagaagagaccaccgtgttgtactggggtccaaaagacaatgtggaggctttaccctcagtgacaaggtagtctaaagatttctcctgtttaaactataaatatttctctgaaactt

SEQ ID NO: 831747 - DNA, 120 bp, Artificial Sequence
  ENSG00000277797_7 (sequence is synthesized)
gtacatatcttctatggacaaagtaggacttccagaagcccttttgtgctaaagcctagaataactaagagggttttggctcatgtaattcatttgcatcttcacaaaatgaatgtgtac

SEQ ID NO: 831748 - DNA, 120 bp, Artificial Sequence
  ENSG00000277797_8 (sequence is synthesized)
tcatttgagtccttcgaactttaaaacagccatattcttcttgttgtttatatattttccttaggcattttttttccacgaaatagacaagttttatccatatgaaaattgtctgatgca

SEQ ID NO: 831749 - DNA, 120 bp, Artificial Sequence
  ENSG00000277797_9 (sequence is synthesized)
gataatgcctctcttgataaggatcacagcaagtctcttccttagcatctagcatgcactgccacacaatttgatgatgtgcagaagggaaaactggcctggagcctgtgaatcaccctg

SEQ ID NO: 831750 - DNA, 120 bp, Artificial Sequence
  ENSG00000277797_10 (sequence is synthesized)
aggaaaaaaaaatcaccagaagtaatttcatctctaccttcttaaagtcttatcttcacttgagataacattaagtcaatcggcatttcacattgatcctgatcttcttagccatagtga

SEQ ID NO: 831751 - DNA, 120 bp, Artificial Sequence
  ENSG00000277797_11 (sequence is synthesized)
atattgtttaaaatttcatttataactattccctgtcattggctgtacagataacatttgacattttgaataatttgtcctttgtccttctgaattattcctaagtcaaataatttttca

SEQ ID NO: 831752 - DNA, 120 bp, Artificial Sequence
  ENSG00000277797_12 (sequence is synthesized)
cttctgatgagctcattttatgtttttatcataatcataatgcctctgcatgaaactctcccagcttctgtatctgttgatcatattgcacttaataatggtcagcatctcaaaatgaca

SEQ ID NO: 831753 - DNA, 120 bp, Artificial Sequence
  ENSG00000277797_13 (sequence is synthesized)
ggcaaacatgacaaaattgtagtaatctagggaatataagatgacaagaatgaaaatgctcgtatctcactcctcatgcccactgttagggcaggcagtgttgagtcactttttctggac

SEQ ID NO: 831754 - DNA, 120 bp, Artificial Sequence
  ENSG00000277797_14 (sequence is synthesized)
catacattaaaaaatgctgtatacattaagcaaaaaattgtagataatggctttctctctatcccttctgctagattgtgagtcactcaaaggcagcacccatgtttagtgttttcagta

SEQ ID NO: 831755 - DNA, 120 bp, Artificial Sequence
  ENSG00000277797_15 (sequence is synthesized)
tgtctcatcataactgttacataataataattcctaggatatgttttttttaaactcaacggaacaagttgataaaaaatctgttatttcaaagagaaaacataatttccttagaactac

SEQ ID NO: 831756 - DNA, 120 bp, Artificial Sequence
  ENSG00000277797_16 (sequence is synthesized)
attcctacatctgagactgaatagcagaatcatctaggaaagtttgcttaaactcacatatcttaccttttccacactgaatatgtattatttaagaaagtttccagaagatactctgga

SEQ ID NO: 831757 - DNA, 120 bp, Artificial Sequence
  ENSG00000277797_17 (sequence is synthesized)
aactgtgtctccatcttagaaccacagcaataaaaaaaattgagattgctttctttgttatttttactatgttataaacacaaaggcaatgaagagttaaatatatatatatatatatat

SEQ ID NO: 831758 - DNA, 120 bp, Artificial Sequence
  ENSG00000277797_18 (sequence is synthesized)
atacgtacttatatacataccacacaaacgtatatatttatacgtagattcacatataagtttgtgtgtgtacctaaatatatatagatgatatagatataggagacataagtcatggtg

SEQ ID NO: 831759 - DNA, 120 bp, Artificial Sequence
  ENSG00000277797_19 (sequence is synthesized)
gaacacttgatctggccttacattcaagatatataaatgtgaaaggaaataattaagcaatattaaaattttcagatatgagcaaaaatgatttgactatagtagaaagaacaaaaagaa

SEQ ID NO: 831760 - DNA, 120 bp, Artificial Sequence
  ENSG00000240219_0 (sequence is synthesized)
ttagtaggtcatgaaaacaatttaacgtgggtcacgatctacattaaaaaaatgaatagaaaatatcatactgcattgtatgcggccagactaagcattgttttgagatgctgcccccta

SEQ ID NO: 831761 - DNA, 86 bp, Artificial Sequence
  ENSG00000240219_1 (sequence is synthesized)
ctagggctgtagctataaaagcttgaaaaccattactctgagaatctctctgttgggaaaatgagtcccttcaactctagttgttg

SEQ ID NO: 831762 - DNA, 120 bp, Artificial Sequence
  ENSG00000240219_2 (sequence is synthesized)
tctctgttgggaaaatgagtcccttcaactctagttgttgccactgggatgctaacagaaagcaaagtctcagaggaaagatgtggcattcctgagtgtcttccatgtaccaggacttct

SEQ ID NO: 831763 - DNA, 120 bp, Artificial Sequence
  ENSG00000240219_3 (sequence is synthesized)
atttgctagccactttatgttcctcatcccatccttctgtgagggacatacttttcagatgagaaacgtaagctccgcgaagctaaggggccggactgaggtcccacagcgagagtgtgg

SEQ ID NO: 831764 - DNA, 120 bp, Artificial Sequence
  ENSG00000240219_4 (sequence is synthesized)
aggagccaggatccgaaccccatcgccagcccttgccagttccatgattccggtgccagcgctcgcctgacctccagggctgtcatggtgggaagggactggagggcatctgctgggcaa

SEQ ID NO: 831765 - DNA, 120 bp, Artificial Sequence
  ENSG00000240219_5 (sequence is synthesized)
aggaaagagacaaacatcatcccagagcctgtcttccctgggcaatacccgggccactccagacatggcgtctttagcccttccttggtcactggcccccaggtgaagagagcatttttc

SEQ ID NO: 831766 - DNA, 120 bp, Artificial Sequence
  ENSG00000240219_6 (sequence is synthesized)
tctgactcaagttcttgcctctggatttgccaagctcctatgacagtcttcgcccttctgaagctctctcaggctccccttccagaaatcccgcaggttccaccgacctctctgagagca

SEQ ID NO: 831767 - DNA, 120 bp, Artificial Sequence
  ENSG00000240219_7 (sequence is synthesized)
caggcgagtggttgaacggtgggctttagagacggcgcggcaccagagtcctgtactggctgtgtgatcctgaacctcctcactgagattctcatctgcaagatggagacagacctgcct

SEQ ID NO: 831768 - DNA, 120 bp, Artificial Sequence
  ENSG00000240219_8 (sequence is synthesized)
catagcgagggggaatctgaaaaagatgtctagagagtgcccggtgctcattagagtgtcctgccctttttatccacttcgatttgttggaggcacatttccctgggggcgcttcgagac

SEQ ID NO: 831769 - DNA, 120 bp, Artificial Sequence
  ENSG00000240219_9 (sequence is synthesized)
gcaacctcttccttggaaccttcccagtgcaggtgacactccttcctaacggagctgccctgtccgatgtcaactataagcactccctgcagtctccaaccggggtcctagttctagtct

SEQ ID NO: 831770 - DNA, 120 bp, Artificial Sequence
  ENSG00000240219_10 (sequence is synthesized)
tccggacagctctaggactcagttcatttaaagatcattggtgttggacacaactctcacccaataaacaactcagcaccagctcctcctggcttaggggagcagctcctctgcttcccc

SEQ ID NO: 831771 - DNA, 120 bp, Artificial Sequence
  ENSG00000240219_11 (sequence is synthesized)
acatgctctccagaagggtcaagagcgcccctcccagaagagttctaaatgtcccagctgatggcctcccatagacattccatgctggccacagttgcaggcctcagatgggcagccaag

SEQ ID NO: 831772 - DNA, 120 bp, Artificial Sequence
  ENSG00000240219_12 (sequence is synthesized)
cccagtgctgacccatgagcttctccacctctctgcgtcaggagtcaggtgggggtgctgaacagaccctgtagcatggctcctctagcagtctgggccccaggacatccctttagcccc

SEQ ID NO: 831773 - DNA, 120 bp, Artificial Sequence
  ENSG00000240219_13 (sequence is synthesized)
agtggatccctgggacagaggcaagggcggggggaaggggagggaagacccaagagcaatacaagtgatagtctctcctgtcccatgccttcacacatgcagggaccttgccacaagtcc

SEQ ID NO: 831774 - DNA, 120 bp, Artificial Sequence
  ENSG00000240219_14 (sequence is synthesized)
ccttcctcacctgcatatctggggaattcctttccatctctgaagtcatagtttatgctgcacccctatgtggtctttcctgacgaccaggctctaccaccaactcaaaataatcagtcc

SEQ ID NO: 831775 - DNA, 120 bp, Artificial Sequence
  ENSG00000240219_15 (sequence is synthesized)
gaccaggctctaccaccaactcaaaataatcagtcccttgctccttcctccaccctcaaggatccacatccacaaagaaaatgtgctacatatacactgatatggtttggctgtgtcccc

SEQ ID NO: 831776 - DNA, 79 bp, Artificial Sequence
  ENSG00000240219_16 (sequence is synthesized)
ccccacccaaatcgcctcttgaattgtactcccataattcccgcgtgttgtgggattgttgtggtagtgaataagtctc

SEQ ID NO: 831777 - DNA, 120 bp, Artificial Sequence
  ENSG00000259544_0 (sequence is synthesized)
aatgatctgaatccagctgtttcgttcctctttggagctggcatggacttctaccatctctggatctgtcatccccatgctgatcaggaataaacctttctcctcatgtgccacttctct

SEQ ID NO: 831778 - DNA, 120 bp, Artificial Sequence
  ENSG00000259544_1 (sequence is synthesized)
cacaatcagcttctttaaagagatcactgttgacttctggtcctggaaaaagggaagagggcaaataaaagatacatatacaatattctaactctgaaggacagcttcaatctaaggaaa

SEQ ID NO: 831779 - DNA, 120 bp, Artificial Sequence
  ENSG00000259544_2 (sequence is synthesized)
ccacagtcagaaggttttttattgaagggtgtttcagcaacacatacacccctatacgggcaaactatgatctgagatcacactcctccaaagcaacagttttacagttctccaggattc

SEQ ID NO: 831780 - DNA, 120 bp, Artificial Sequence
  ENSG00000259544_3 (sequence is synthesized)
agatctggtcaccagatttttagcagcattttaaaatgggatttatcaccaaagccttgttttggaaaagtttaagtactcagtcctagaaagatatatcccataagacaagattttaag

SEQ ID NO: 831781 - DNA, 120 bp, Artificial Sequence
  ENSG00000179253_0 (sequence is synthesized)
atcttgtcgtatgatattaacacggctgctcggaaacacctcgagagagacaccagctttccccacgctcttcctttggtttctcttctggggggacattggatcgcacagctttgcagg

SEQ ID NO: 831782 - DNA, 120 bp, Artificial Sequence
  ENSG00000179253_1 (sequence is synthesized)
ggaaaaacagcttgtgtttttgaaagcaaggaataaaaacctcacaggcctccgtggctgactcgtaccttggaagattctgcaatgaggccacacggcacagaaatgttcttttacatc

SEQ ID NO: 831783 - DNA, 120 bp, Artificial Sequence
  ENSG00000179253_2 (sequence is synthesized)
cagacactaaacagtggcttgcatccttctctgtattagcaatgaacaaaaactaccaagacttaaaaaaaaaaatctctgattagaacccatggatgctgacaattatgtgtggctttc

SEQ ID NO: 831784 - DNA, 120 bp, Artificial Sequence
  ENSG00000179253_3 (sequence is synthesized)
agatgcaaagccatttggctgcaggtgacatgaagaggctgggatacgattttgatcatttgctttcgccagcacttcctattagcacgagtgtggccagggagggtccttctctcatca

SEQ ID NO: 831785 - DNA, 120 bp, Artificial Sequence
  ENSG00000179253_4 (sequence is synthesized)
cacttagagccactcgtgatgctgagtgtgctctttcatctggtgcagggcagggggcagggcgaggagagaagacccctgcttcacccactaaccaacaccctgggctggaagagctcc

SEQ ID NO: 831786 - DNA, 120 bp, Artificial Sequence
  ENSG00000179253_5 (sequence is synthesized)
aacaagcagcagacagagagttccatccccagcctgacagcaggaacagtgaagtccaagatagagccagctgtcgctgggagcccgggatggtgggtgcagcctcctccgcagctggtg

SEQ ID NO: 831787 - DNA, 120 bp, Artificial Sequence
  ENSG00000179253_6 (sequence is synthesized)
agagtgtgtgtgtgcaggggtgtagggtggcctgttagcctagtgtctcctgcactcaaatgccctgtttcagttgagtaagctaattcacacagtgtcatgcaggctcctctggcttcg

SEQ ID NO: 831788 - DNA, 120 bp, Artificial Sequence
  ENSG00000179253_7 (sequence is synthesized)
gttcaagttaatgtcccattgaaaggcttctgttcaccttaggacacccagtcgggtagcccctgcagcgctctgccctgtgagcctgtgcaggtggtgcttggctgtgatcgaggttgg

SEQ ID NO: 831789 - DNA, 120 bp, Artificial Sequence
  ENSG00000179253_8 (sequence is synthesized)
caggcacctgcctccttctgtgttgggtgtgtccagagccagagaggagcattccttttcatcacacctgaattatctccttcaacacccagagggaccaggctcccacccttggcatga

SEQ ID NO: 831790 - DNA, 120 bp, Artificial Sequence
  ENSG00000179253_9 (sequence is synthesized)
tccaggaagaacagtgactcgagtgtggcttggcagcgccttacaggagaggcagggatgccgagaagggcaggtttgggcttcccccggaggcagagtggggtctggaaggcagggccc

SEQ ID NO: 831791 - DNA, 120 bp, Artificial Sequence
  ENSG00000179253_10 (sequence is synthesized)
cttggacagcatatacccttcaccctgccctggggaaggcagcaggacccagcggctcagtcttccgggtgggtcctaaccagccccacccccacagtgtgggtgctcccttgccttctc

SEQ ID NO: 831792 - DNA, 120 bp, Artificial Sequence
  ENSG00000179253_11 (sequence is synthesized)
tgggaccaggtcagcgtggctacagtaaagggccgcatcccttcacaggggacgctacccacagaggccagcattggtagggtgctgaggatgtgatgtgtgaggttgtaggggacatca

SEQ ID NO: 831793 - DNA, 120 bp, Artificial Sequence
  ENSG00000179253_12 (sequence is synthesized)
gggccttctgtggcacaggcaggacttgacctcaggcggtgggctcctcggcctccctcacagtgccagagcccactctcctgtctccatgtcagtcccttccactaaactagcccaaca

SEQ ID NO: 831794 - DNA, 120 bp, Artificial Sequence
  ENSG00000179253_13 (sequence is synthesized)
cctggttcacggctacctgagcacactgggggctgggggcggggggcagggcggtgatgcacacttattaaaaccaagtatcagacatggtggctcacgcctgtcatcccagcacgttgg

SEQ ID NO: 831795 - DNA, 70 bp, Artificial Sequence
  ENSG00000179253_14 (sequence is synthesized)
tcagacatggtggctcacgcctgtcatcccagcacgttgggaggccgaggccggcagatcacctctatga

SEQ ID NO: 831796 - DNA, 120 bp, Artificial Sequence
  ENSG00000255114_0 (sequence is synthesized)
tgtagaaaagaatattttattgaaacagtttctcaattaacaatggagcaaagtacaatttgactcaaacctgtccaaccagcatcaacagctactgaaagaattcaaacatacagaaga

SEQ ID NO: 831797 - DNA, 120 bp, Artificial Sequence
  ENSG00000255114_1 (sequence is synthesized)
agcatcaacagctactgaaagaattcaaacatacagaagaggtgggggtggggtgaggggtgggacccttaggtcccatctctgccaatgtggcaaaaaaaaaaaaaaaaggaaaagaca

SEQ ID NO: 831798 - DNA, 120 bp, Artificial Sequence
  ENSG00000255114_2 (sequence is synthesized)
gtgggtcgggggcccccaacctagcagagtgatgcacagaggaaggccagccctgaccctcctccttcatccacaggcctgcctcagagagagggaggtggcatctctacattcacacca

SEQ ID NO: 831799 - DNA, 120 bp, Artificial Sequence
  ENSG00000255114_3 (sequence is synthesized)
tggtctctcctttccccaggatcttgggatagggactcacagtagaaagcacattttggtcagcccagggggtcagggggtgagggaaaggctctgtctgggaggagcagaacagcagaa

SEQ ID NO: 831800 - DNA, 120 bp, Artificial Sequence
  ENSG00000255114_4 (sequence is synthesized)
gagaggaggagaacagtttccatttttaaccacagaggtactgcagaaggaaccagtgagctgtccctcccttccccttctccacacctccaaatcacaggggtgagaaaggaactccag

SEQ ID NO: 831801 - DNA, 120 bp, Artificial Sequence
  ENSG00000255117_0 (sequence is synthesized)
agtatctgaatttggggagaacataagtccatgacacatgtgtacaaaactttcattgagtaagaccatttaaagggaccaaaaatggatgaacatacttggcactatgaactaaaagat

SEQ ID NO: 831802 - DNA, 120 bp, Artificial Sequence
  ENSG00000255117_1 (sequence is synthesized)
ctttggctaaagaagagatgaagactcattcaactcctacaagtgaattaaggagctctgagaaggcaaagccagcccaggagggtggacacactaagaacaatgtgccttgtcctgata

SEQ ID NO: 831803 - DNA, 120 bp, Artificial Sequence
  ENSG00000255117_2 (sequence is synthesized)
cacagttgtggtataggtaacaaaatctgagtatccaacctaagatgttacccctcacctcaccagaatacctccaatcccttccctggaaacacagaataaattcctatagaaagttat

SEQ ID NO: 831804 - DNA, 120 bp, Artificial Sequence
  ENSG00000255117_3 (sequence is synthesized)
aaagcagaaaaacaaggtatcttttgtggagtaaagaatgattatggaggaaaaacaccattaactgtcacagaaataattgtgtcattcagcagaatggtagctctaaggaagacagca

SEQ ID NO: 831805 - DNA, 120 bp, Artificial Sequence
  ENSG00000255117_4 (sequence is synthesized)
gcaatactcaaggtacagccattcttctggaacaagtcccaccaatctgaagctggagtcaatggtggtgacagtggtgacattgcagaaaagtaagaaagttgagggagggattcagga

SEQ ID NO: 831806 - DNA, 120 bp, Artificial Sequence
  ENSG00000255117_5 (sequence is synthesized)
tgttggaattagacactcaagatctaaactaaatgggattagtaatgataaaaggataaatggttgatttctcccatcaccactttgcctggaaatattgaaaagcaggaacccagtggt

SEQ ID NO: 831807 - DNA, 120 bp, Artificial Sequence
  ENSG00000255117_6 (sequence is synthesized)
atggttgacttctctagagctactgacaataaaatgggctgcaacaaccaccacacacacacacacaaaaaaatcccagtgggattcttgttaatagggacatttaggaaagggtgggat

SEQ ID NO: 831808 - DNA, 120 bp, Artificial Sequence
  ENSG00000255117_7 (sequence is synthesized)
gctcactcacccaggttattgcagaaaacatcctgctttgactgagaaattgtggaggatgcctaaggtcacttctgacatctatggaactgtaaagtctgtttcccgtggggtatagtt

SEQ ID NO: 831809 - DNA, 120 bp, Artificial Sequence
  ENSG00000255117_8 (sequence is synthesized)
ttgtcatattgtgactatgtatttgtgtatgtattgtgtatgtatatttgtcttcctattagccaatgctctgtcaacccacggttgttttgagaatcaaagagataacatgcaggagga

SEQ ID NO: 831810 - DNA, 120 bp, Artificial Sequence
  ENSG00000255117_9 (sequence is synthesized)
tgaaatgggaacagattaacacaagatgctcacactgcctagtaatcatagctttctccctatttctgtccctgtcatcgggcacagctattctattaaatagctgctctcaatacacaa

SEQ ID NO: 831811 - DNA, 120 bp, Artificial Sequence
  ENSG00000255117_10 (sequence is synthesized)
agtgataatgagagtgatgttgaaatgaggataacttggaagtgactctaatatatgtaaaatttaagcaatctcatttttctaatttattatgagacacactcataactgataatgata

SEQ ID NO: 831812 - DNA, 120 bp, Artificial Sequence
  ENSG00000255117_11 (sequence is synthesized)
caaagtacattttgataagattgttgagaaaatgaattactgctttagagtccagatcccaattcacctactcatgtattatttctgactattgtgatctaccattttactataaaatac

SEQ ID NO: 831813 - DNA, 120 bp, Artificial Sequence
  ENSG00000255117_12 (sequence is synthesized)
ctattccactctgaatcacataacgcacagcatttattcagaatatgcactgtttcacagttttctaattatttcatgtattttcttcccagctggataagaaatgcatcgaagatatta

SEQ ID NO: 831814 - DNA, 120 bp, Artificial Sequence
  ENSG00000255117_13 (sequence is synthesized)
attgcactggctaaggcctccaggataaagttgaataagaacaatgggagcaaatatttttgctacctacctaatctctgtgagtaagaccatttaaagggaccaaaaatggatgaacat

SEQ ID NO: 831815 - DNA, 120 bp, Artificial Sequence
  ENSG00000255117_14 (sequence is synthesized)
gaagacaccgttaacatattggtgtgggggatgggatatttttaaagctactctgcttttcaacatcaaaatgtctgcaaagtaatccttttcccaatttagtacagcaaaagcaactgg

SEQ ID NO: 831816 - DNA, 120 bp, Artificial Sequence
  ENSG00000255117_15 (sequence is synthesized)
agtcatgttgggtgttagggcttcagtatctgaatttggggagaacataagtccatgacacatgtgtacaaaactttcattgtgatattagtgtcataataataatatataacaacatac

SEQ ID NO: 831817 - DNA, 120 bp, Artificial Sequence
  ENSG00000255117_16 (sequence is synthesized)
aacagagcaaccaacaagcttaacacctgagaaaagataggtgcctcccagaagtaacaaacatgagtacttgattacctagggcacacatagcacagaccaagatataatcgccttgaa

SEQ ID NO: 831818 - DNA, 120 bp, Artificial Sequence
  ENSG00000255117_17 (sequence is synthesized)
agtggatgaaaagaatgcagctgaaacatttatcaaattattggaggccaaatgtgaacactagtgaagatcaactgtggttggagaaatgaagaacagcaaaactctaaccccgggaca

SEQ ID NO: 831819 - DNA, 120 bp, Artificial Sequence
  ENSG00000255117_18 (sequence is synthesized)
agtacaagattactgagaaagcttcaccccacaaactcaggggcactaagactgaggctgagccgtaacgacagaattttcccactgttaaagcaaataaatatggcctgagaaggattt

SEQ ID NO: 831820 - DNA, 120 bp, Artificial Sequence
  ENSG00000255117_19 (sequence is synthesized)
gtaaacaagattgaaaacccaatttaggagtatgtgcctgtaattatagctgagtcttggccaattgcagtataacagaaacaagcaaactgaatatggcctgagaaggacttctatatt

SEQ ID NO: 831821 - DNA, 120 bp, Artificial Sequence
  ENSG00000255117_20 (sequence is synthesized)
tgagtccttgtggactaactgcaacctagcttaacaggaaaacaagactgaaaacccaacttaagagtatgcgcctgtaattatagctaagtcttggccaatcgcagtgtaacagaaact

SEQ ID NO: 831822 - DNA, 120 bp, Artificial Sequence
  ENSG00000255117_21 (sequence is synthesized)
ttgagaattaccttctaccaacccatcccccacggagaggatgcctggaggaatttgaggaatgtggtgcactgagagcaaccacagtaacaaccaaactgaaacccaccttagtagtag

SEQ ID NO: 831823 - DNA, 120 bp, Artificial Sequence
  ENSG00000255117_22 (sequence is synthesized)
ggggattcaacctcccactatgctacttctgattcctttctgcatttctgtttttccctttggaattacctcctcctcctcgaagaccatgtcagtattaaagtgtagatctgttttcaa

SEQ ID NO: 831824 - DNA, 120 bp, Artificial Sequence
  ENSG00000255117_23 (sequence is synthesized)
agtatctgaatttggggagaacataagtccatgacacatgtgtacaaaactttcattggctatacaggaagcatgatgctaacatctgctccgtttctggggaggcctcagaaaactcac

SEQ ID NO: 831825 - DNA, 120 bp, Artificial Sequence
  ENSG00000255117_24 (sequence is synthesized)
tgtcatggtggaaggccaagggggagcaggtatgttacatggccagagcaggagcaagcaagagagggagaaggtgctatggacttttaaatgaccagaactcacacacacagtgatatt

SEQ ID NO: 831826 - DNA, 120 bp, Artificial Sequence
  ENSG00000255117_25 (sequence is synthesized)
agtcatgttgggtgttagggcttcagtatctgaatttggggagaacataagtccatgacacatgtgtacaaaactttcattgggcacacatagcacagaccaagatataatcgccttgaa

SEQ ID NO: 831827 - DNA, 120 bp, Artificial Sequence
  ENSG00000255117_26 (sequence is synthesized)
attggtaaataatgacaatttttgctcttttcaatctttatgccttagtttacttttttatcttattgcactggctaaggcctccaggataaagttgaataagaacaatgggagcaaata

SEQ ID NO: 831828 - DNA, 120 bp, Artificial Sequence
  ENSG00000276772_0 (sequence is synthesized)
gtgggctggaggtgggaagggttgtgtgtgcaggtggtgggtagtgcccctgccacacgtacagatccagggcatctcctctggacccctcccagggactgtaaaactttactatgggaa

SEQ ID NO: 831829 - DNA, 120 bp, Artificial Sequence
  ENSG00000276772_1 (sequence is synthesized)
cagactcagtagtattttggggcagcgggaatggttctttactaatgcctaagatcacttaacagggcagaagccataattgggcagaccttacgggccaagaatcttttgcactttatc

SEQ ID NO: 831830 - DNA, 120 bp, Artificial Sequence
  ENSG00000276772_2 (sequence is synthesized)
tgatttaatctgcaccctgtgaggtaggtggcattacccgctttcatgtgttaggaaatgtgtgtaaagatcagtaacttgcccagggtcacccaactagtagctaaagtggctaaagtc

SEQ ID NO: 831831 - DNA, 120 bp, Artificial Sequence
  ENSG00000276772_3 (sequence is synthesized)
ccaggtctgtcactctaaccacccagagtggccttaccctgtacattctcaccctgtacattctcacccttaccctgtacattctcaccctgctgcccctctgaaatagtcactgctggc

SEQ ID NO: 831832 - DNA, 120 bp, Artificial Sequence
  ENSG00000276772_4 (sequence is synthesized)
ttccctagctgaggacactgggcacaaaggctgggcttctggattgcaagtctgtgcttgcagcctgaggcccactctaagggaaggcagatggcctgcctctcctttctgcaaaacccc

SEQ ID NO: 831833 - DNA, 120 bp, Artificial Sequence
  ENSG00000276772_5 (sequence is synthesized)
ctgccacctgctgcgtgctgccagcctgactcactgactccagctacctctgggcctctggcccttctaggatgggcttgttttccaggaaagggtttggagattaagataagccagctg

SEQ ID NO: 831834 - DNA, 120 bp, Artificial Sequence
  ENSG00000276772_6 (sequence is synthesized)
cctccagtgaaaggccctgctgccttggaaagggccgggaaggctgccattccagctccttggtttgctcgcttctctccgtggctggggctgcctcgcctttcatccgtccctgcctat

SEQ ID NO: 831835 - DNA, 120 bp, Artificial Sequence
  ENSG00000276772_7 (sequence is synthesized)
cctgcagagcgagggatttgtaaaatgggtgcccaagctccctctggggctccggctccctcatgtctctgtctgttcttcctggggaagctgctgcttgtatttagataatgaagaact

SEQ ID NO: 831836 - DNA, 120 bp, Artificial Sequence
  ENSG00000276772_8 (sequence is synthesized)
agaaaacagacctggcctcctttcaacctgccgcttcctccagcctgggtaggatccaaagctctggccttcctaagcagtgcttgttcctgacttacacatggatggttttctaaacta

SEQ ID NO: 831837 - DNA, 120 bp, Artificial Sequence
  ENSG00000276772_9 (sequence is synthesized)
agttcattttctgaagcagagaatgaataactcactctactacctcctccccttcatggcaaaattttttcttttgtctgtattttcacggctgctggattctaaaatcaaggtgcaagt

SEQ ID NO: 831838 - DNA, 120 bp, Artificial Sequence
  ENSG00000276772_10 (sequence is synthesized)
tgctttggggcttactaaagtcccgtggccttcccaggccctgtggaaaggttagatgcaccccagataaccagggttggttattccctgtgagagagtcagaggggtgcaggctggaag

SEQ ID NO: 831839 - DNA, 120 bp, Artificial Sequence
  ENSG00000276772_11 (sequence is synthesized)
catagcgctcctccacccctgcgctggtcatcatgtggagcgtgtgctttctaagaagtgccagcctgtgtccagagcctgctgggcagatgttaagccagctgtggacttagtcacagt

SEQ ID NO: 831840 - DNA, 120 bp, Artificial Sequence
  ENSG00000276772_12 (sequence is synthesized)
gactctgctaccaacaacagcaacatggacatttagggaggagcaaatgagaggaaggaagaaataggcaagataacaaggcttgacatctgatctctgggcatttccaatggagggatt

SEQ ID NO: 831841 - DNA, 120 bp, Artificial Sequence
  ENSG00000276772_13 (sequence is synthesized)
tggtttgtttatgtttccaccaccaagaattaacagtggttaacagctgttcatatctgtctgctttacatttttaaataaacattacagataaaattgaagttctctttttgtccctca

SEQ ID NO: 831842 - DNA, 120 bp, Artificial Sequence
  ENSG00000255118_0 (sequence is synthesized)
aggatgccgtagcccacggtggcggctctgaccatgccctggtgcactcgctccttccgatccttggagatgggaccggctccgccgccgtggaccactacgatgggattcatgtcggcg

SEQ ID NO: 831843 - DNA, 120 bp, Artificial Sequence
  ENSG00000255118_1 (sequence is synthesized)
gatcctaggcagcaggaaggcgaaagcgtcgtccaaagccagcccaaggaagccgcgcggattgaaaagcaacgctaggctgtgcgcagtggctcatgccttgtaatcccagcactttga

SEQ ID NO: 831844 - DNA, 120 bp, Artificial Sequence
  ENSG00000255119_0 (sequence is synthesized)
actctatctgtctgggaaacctcagacagggaagagatttcttggtgcctctcttgggaatgtcactgacgtccacagtgactgtcacatgcgtgtcagttgttctgtgggtttgctgtg

SEQ ID NO: 831845 - DNA, 120 bp, Artificial Sequence
  ENSG00000255119_1 (sequence is synthesized)
tgcggggcactgtggaaaggaagaaaggcctagattccagtccagctccaccactcagcagcttcatgcccacagacaaaggacaaaatccccctgagcctcagttttttcgtggacaaa

SEQ ID NO: 831846 - DNA, 120 bp, Artificial Sequence
  ENSG00000255119_2 (sequence is synthesized)
aaccccctgccttggagtctgcaatccttcctcgagcacacggacgcccggggtggggaagcccacagtctggcagggctcgcactgggcagaataattgcaacgtagtcatgaggatcg

SEQ ID NO: 831847 - DNA, 120 bp, Artificial Sequence
  ENSG00000255119_3 (sequence is synthesized)
ggctatgacctgcctgacttttcactcctcccatgatacaccgatgcataccgcaggtgcacactaaacgccgaatctatagaaagtggaacacaccaggacccagcagaaggcgacatg

SEQ ID NO: 831848 - DNA, 120 bp, Artificial Sequence
  ENSG00000276778_0 (sequence is synthesized)
attaggccatgtgaaaatgtgtgtgggaagtagtcatatgtccagatcatgcaggaccctgaagataacagaaagggctcttcattctgttattttcagtaagatggaagagaatttggg

SEQ ID NO: 831849 - DNA, 120 bp, Artificial Sequence
  ENSG00000276778_1 (sequence is synthesized)
ggttaaaggagggaaaatagagaagagtaagaaaaagtgatggaggaaggaagaggaaaagaagcaaggatccaaaatgcaaatgagaatggatggatttacttggcacgtagcagggga

SEQ ID NO: 831850 - DNA, 120 bp, Artificial Sequence
  ENSG00000276778_2 (sequence is synthesized)
cagtctgtggaaagaagtgagaaggataatccaatagcaaaagtgaggggtgatgaagagtgaaaggtacatagattttgtctcctttttgcccttttgccatgtgaggatgccaccatg

SEQ ID NO: 831851 - DNA, 120 bp, Artificial Sequence
  ENSG00000276778_3 (sequence is synthesized)
aggagaccccatggatggacagcaggccctcaccaaacaccaaatcttctggcacctttgtcttggatatcctggactttggaagggtttctgcagatactttttacattgcagaataaa

SEQ ID NO: 831852 - DNA, 120 bp, Artificial Sequence
  ENSG00000276778_4 (sequence is synthesized)
taagacagcctgttggaacacccatatggtatggaactgagggcagcctcaaaagtggccaccagctgatagcaaagagccaaaaggaagccagagcctcagtcctacaactgcaaaaaa

SEQ ID NO: 831853 - DNA, 120 bp, Artificial Sequence
  ENSG00000276778_5 (sequence is synthesized)
tatatttctgccaacaacctgagtgatgttggaaatggactcttccccaggcattcacaactgctaatcatgaatatatctcaagaaagaagtgattgtcgataattatcccctaaagcc

SEQ ID NO: 831854 - DNA, 120 bp, Artificial Sequence
  ENSG00000276778_6 (sequence is synthesized)
cacctcatgcaataccaaaaatgataggcagagagggacagatgacttcctctttgcttggtctgtaagcacaatgcatctccaaaccatcctctgcttagacttcccaggaagccttca

SEQ ID NO: 831855 - DNA, 120 bp, Artificial Sequence
  ENSG00000276778_7 (sequence is synthesized)
gtgattctaaatcagacacatcaatgctccacttgaataccttcaagtgcctcacagtgttcttaggatgaggaacagatgatgacttgaggccctgcaggatttggttgtgccaacctc

SEQ ID NO: 831856 - DNA, 120 bp, Artificial Sequence
  ENSG00000276778_8 (sequence is synthesized)
tgacctcaacccctctcgctccctcttctccttgtgttctgacccacagttctttctggttctccaacacaccaggttccctttccctggggtcccttgcacttggtgaccctcctgtcc

SEQ ID NO: 831857 - DNA, 120 bp, Artificial Sequence
  ENSG00000276778_9 (sequence is synthesized)
agaatgttctgctccagacctctgaatgtctggatttttcttaacattgagccagaggaagacctaccagaccatccaacctcaattactccctcctcacctgtcaccctccatccatca

SEQ ID NO: 831858 - DNA, 120 bp, Artificial Sequence
  ENSG00000276778_10 (sequence is synthesized)
cagcacctgatttattttctttaagtcacttacccttctctgagatcattcatgtattcattttcttatttctatccatttttcctggctagaatgtaagttctgcaagagagggatatt

SEQ ID NO: 831859 - DNA, 120 bp, Artificial Sequence
  ENSG00000276778_11 (sequence is synthesized)
tcaaatataggtgattgatttatctgtagtgctaagattgcctggcacatagtaggtgcttagtaaattaatcagagcatgaataaataaatgcacattttgttatctagggcaaaggag

SEQ ID NO: 831860 - DNA, 120 bp, Artificial Sequence
  ENSG00000276778_12 (sequence is synthesized)
actcatatcttgccatcctccgatggtttagccaagctataaaatgaccagaatttctactttgattcaccttccagttgctgaattgtaattcctaaaattcacagccaagcactatca

SEQ ID NO: 831861 - DNA, 120 bp, Artificial Sequence
  ENSG00000276778_13 (sequence is synthesized)
ggtgaccacagactccaaaaggtatcataaattgcttcatatgtgttcttctggggcttaggcaatgaacttgatatttactgtttggcaaagtctttctgttttactttgttggtaggt

SEQ ID NO: 831862 - DNA, 120 bp, Artificial Sequence
  ENSG00000276778_14 (sequence is synthesized)
gtaagttgatttttgcagccaaaaacacctctttctggctggcttccctgtttttcctccttttactagcataccctggagtagtataaccaagctgaggtgagttatgtgcagggaaat

SEQ ID NO: 831863 - DNA, 120 bp, Artificial Sequence
  ENSG00000276778_15 (sequence is synthesized)
attcatttgatgttagcacattaacactctctttgccaagtcttccaaatttcaacttttctgcacacaaaaataaaaatattggaggaaggtatatctcttttaagaccatgatcttgg

SEQ ID NO: 831864 - DNA, 120 bp, Artificial Sequence
  ENSG00000276778_16 (sequence is synthesized)
aaatacataagcaattccatacccttttttgtagtgaaacgtgctcaaaagcagtcaaccatcatcaacaaaccccagactcaaatgtcaacaagccccattggcataatatattggcag

SEQ ID NO: 831865 - DNA, 120 bp, Artificial Sequence
  ENSG00000276778_17 (sequence is synthesized)
gggcttgggccatgacgtcaggtatactaggtgctgtggcttattggctgtggatctggggcaaggaacttagccttcctaagtctcaggttcctcatctgtaaattcagggcaataata

SEQ ID NO: 831866 - DNA, 120 bp, Artificial Sequence
  ENSG00000276778_18 (sequence is synthesized)
gcacctgtgtcgtatcattaaccattgttaagatgaaataaaatagatgtcaggtgcctagcttattactagcatggagtaaccattctatgcatgttagctgaaaactaaataaattaa

SEQ ID NO: 831867 - DNA, 120 bp, Artificial Sequence
  ENSG00000276778_19 (sequence is synthesized)
ctaaataagtgtcattcccctctccctcctttttagatttcatttccctaccatgctcttccatgctatgctctccttcaagaatgctgaatgatgggatcgatttggagagaaaaatag

SEQ ID NO: 831868 - DNA, 120 bp, Artificial Sequence
  ENSG00000276778_20 (sequence is synthesized)
gcccagttacaattggggtccagcctggagctatcattttcatatcagaaattccctgatatactgtagaacatagtctctcacccaccaaatagagataataatataccctgcaggctg

SEQ ID NO: 831869 - DNA, 120 bp, Artificial Sequence
  ENSG00000276778_21 (sequence is synthesized)
aatatggagtcgaattattctcacgagtctgtttcctgcaagatcttttgccaggtcctggacatattacattaaaaaagacatgggcccacccccacggatcccacagactcacttcaa

SEQ ID NO: 831870 - DNA, 120 bp, Artificial Sequence
  ENSG00000276778_22 (sequence is synthesized)
atctcaattctgtctctgcctggcaaaaatgtgagccagtcactgggcttgctgagcctcggctttgtcctttagaaacggatatctggcctcctacaccctctgtgctgaatgggactt

SEQ ID NO: 831871 - DNA, 120 bp, Artificial Sequence
  ENSG00000276778_23 (sequence is synthesized)
caataagataaagcatttctagtggtcagaatccaactctggataactgaagcaggaagatatttttagaagtttatcgggttactcaaactaccaacccaaaggctggaaaacacacag

SEQ ID NO: 831872 - DNA, 120 bp, Artificial Sequence
  ENSG00000276778_24 (sequence is synthesized)
tatccaagggcctcacagctacttgcaaaaggaacgcctgcagagaacgtagtcactgctagataccaaggccctcaccacagaaagttgcagccaccaccaggaataattgattccctc

SEQ ID NO: 831873 - DNA, 120 bp, Artificial Sequence
  ENSG00000276778_25 (sequence is synthesized)
caaatttacatcctggctcacaacccaaaggcccagagaggaacatccagttgtctgagcctagatcatgagtccactctccagctgccaggggttggggagagggaaatcgagacactg

SEQ ID NO: 831874 - DNA, 120 bp, Artificial Sequence
  ENSG00000276778_26 (sequence is synthesized)
tcagtttccaaagtgggaggtaagcactgccttcctccatcccccaggttgaaggattatgtgggtgctgagcagtcccccaatgccaaatacccactgaaggatatgaaagtactttgc

SEQ ID NO: 831875 - DNA, 120 bp, Artificial Sequence
  ENSG00000276778_27 (sequence is synthesized)
acgccacggatagctgtgtctttctgaatcatgctgactaggcagagttcaaccacctatgagtagggctaatgagaaccacagacctaaggagcacgttcattgtgctttaaaagaaag

SEQ ID NO: 831876 - DNA, 120 bp, Artificial Sequence
  ENSG00000276778_28 (sequence is synthesized)
aagaatgaattatccatactcaaaagagatttactgtaagagcccacgggcatttcctagaaaaattccaatagtttcatgctgttaggacaaggcatttgtgtaacttctacaggggaa

SEQ ID NO: 831877 - DNA, 120 bp, Artificial Sequence
  ENSG00000276778_29 (sequence is synthesized)
atggcttggtgctttattcactaatatcaacctgtcatctcgttactattgatcagcactggctggccaccggcatgttgggagggagctggttcctcaaaggtcggccctgacctgaaa

SEQ ID NO: 831878 - DNA, 120 bp, Artificial Sequence
  ENSG00000276778_30 (sequence is synthesized)
gaaaatcctcctgcccagtgccaggtagtttctgagagctccagaaaattctccagccaatgctgtcttcccctatagcctcctctgcctcagagggtgaaaaaaaaaaaaaaaaaaaaa

SEQ ID NO: 831879 - DNA, 120 bp, Artificial Sequence
  ENSG00000225519_0 (sequence is synthesized)
ttgttttgggatcaatgcctgtttagatttgcctttgtatttaatatttaccagtctctgctcctctttgcttctcacttcctgtgccttctcccagagaaacggagcttttggaattct

SEQ ID NO: 831880 - DNA, 120 bp, Artificial Sequence
  ENSG00000225519_1 (sequence is synthesized)
atgtggatatgatggctggagctccagcagccatcctgtgaccctgagaacaagccattcattgaggctaatgaagcaggaagaaggaatcctgagtccttgggaaacaaggatctacct

SEQ ID NO: 831881 - DNA, 120 bp, Artificial Sequence
  ENSG00000225519_2 (sequence is synthesized)
gaatagctccgaatgcctacttctagatgtccttttagaaagagaagcacacccttgtgtatttcagccactgctatttaaggtttaacctaatcatgatataattggtttttcttggaa

SEQ ID NO: 831882 - DNA, 120 bp, Artificial Sequence
  ENSG00000225518_0 (sequence is synthesized)
caggtttgccgaccttacgggcccttctccgccagccctggctgggtcacccccacgacccgggactcccccgccgttccctcccgggctgcctgcagtgaggtccgctcctgaggcctc

SEQ ID NO: 831883 - DNA, 120 bp, Artificial Sequence
  ENSG00000225518_1 (sequence is synthesized)
cgggggtagggccctctcccgccgtcgccgcagctcctttccgtcccggggcctggggggcaccgtcccacgggtgagggccgcctccagcgcctggcccagccatgcgaacgcctggag

SEQ ID NO: 831884 - DNA, 120 bp, Artificial Sequence
  ENSG00000225518_2 (sequence is synthesized)
aagtgctggaattacaggcatgaaccacggtgcccggctgacacaaggaactttctatgaggtcctaggaatgaaggaaaacaggcaataaggcaagaatcgctgtcgaaggagtctgcg

SEQ ID NO: 831885 - DNA, 120 bp, Artificial Sequence
  ENSG00000225518_3 (sequence is synthesized)
ccacctgctcgcacagctcacttgtgccttctgagcctgctggagcccagtgtacatatgccgtctccgcgtgattagagattgctgctgcacgtgcccaatcccgtggcggggctggaa

SEQ ID NO: 831886 - DNA, 120 bp, Artificial Sequence
  ENSG00000225518_4 (sequence is synthesized)
tgcaaccatgcagatgaagactataccctaggagatggaggaacaacagacaagaaagaaacctgggttcctgaataaccacgtggagccaagcagcttacttatctcaagccactgttg

SEQ ID NO: 831887 - DNA, 120 bp, Artificial Sequence
  ENSG00000225518_5 (sequence is synthesized)
cccacctccagattggttcgtgagatagaaataagcttctatcctttttgcatgactgcattttggggtctgtgttatagcagcttaatctctatctgaattatattggatttaagtgtc

SEQ ID NO: 831888 - DNA, 120 bp, Artificial Sequence
  ENSG00000225518_6 (sequence is synthesized)
tgaagcccaatgacttaacctttcctgaggcaaaggcacagaagagcctattttccaaaaatgggaaaacgaagacataggaaggaaaaacccaacaaatggtcaggaaattatactgct

SEQ ID NO: 831889 - DNA, 120 bp, Artificial Sequence
  ENSG00000225518_7 (sequence is synthesized)
agtgacattaaattgaaggtagaatttggatagatggacatggggagggcaattcaaacaaagggaacttgagcaacagggtggaggtagaaaggtgccagatcttttgggagatgcaga

SEQ ID NO: 831890 - DNA, 120 bp, Artificial Sequence
  ENSG00000225518_8 (sequence is synthesized)
agtgatatcacacagtttaaagccagagttaaatataaaccgatacttagaagcttaaattcaacatggcaaattcacaggtttagtttcctaaaagatttttcatgtttttattacaga

SEQ ID NO: 831891 - DNA, 120 bp, Artificial Sequence
  ENSG00000225518_9 (sequence is synthesized)
cagaactgtctgcaaacaaatctttacttgatgagaagtttaaatataattaaatctagaatattacatgaatattttattgctttattaagtccttcaaacaacacatttatttattta

SEQ ID NO: 831892 - DNA, 120 bp, Artificial Sequence
  ENSG00000286709_0 (sequence is synthesized)
gtagatttgtaaaaggtgttcacagttgtttttgctgttgctgctttctagagtgatagttctttctttagttgggtttggtacatctatttcatgatgcagattttcctgaaatatttt

SEQ ID NO: 831893 - DNA, 120 bp, Artificial Sequence
  ENSG00000286709_1 (sequence is synthesized)
gtcaatctggactatgtgtacagtcaaatatttcacattaattttttaattttctctgaatgtttatatttacttctaccaataatctgggaataagaatgagtaagcagccgggtctat

SEQ ID NO: 831894 - DNA, 120 bp, Artificial Sequence
  ENSG00000286709_2 (sequence is synthesized)
ctctttcagagtatggggatttctgaagaaaaaattgctggaaccaggattaacttaagaaagcaacacacagaattaaatgaggatttggatttctcactattctgaaggcaacagcag

SEQ ID NO: 831895 - DNA, 120 bp, Artificial Sequence
  ENSG00000286709_3 (sequence is synthesized)
cattattacttataaaaatagtgtgtatatttgttgggaggtgttggggataatctcttgtatgtagtacctttttaattatggaagttttcatcagtggtaaattggtttgaggtacag

SEQ ID NO: 831896 - DNA, 120 bp, Artificial Sequence
  ENSG00000286709_4 (sequence is synthesized)
ttagttggaaggtgaagtagtcaggtacgtactgggtatgacacttatttggtaaaggtacaataataatgataaaaattgtgatgtgagcttgttgcactgaaaatctttgtaataata

SEQ ID NO: 831897 - DNA, 120 bp, Artificial Sequence
  ENSG00000286708_0 (sequence is synthesized)
caccacacacacacagaccggaaaccacacgcagacttgcacagctcactcggtcccgcgaagagggacgagacaagacgcagctctggttctaggtccagcctctatgaagcctcccca

SEQ ID NO: 831898 - DNA, 120 bp, Artificial Sequence
  ENSG00000286708_1 (sequence is synthesized)
gcctgccccatcccagtccacactgatgcctgcagctcttgtatggtggaaggtttttctcagcttcaacaaggaggcagcagcatgtggtggttgaaaggacaggttctcaaggtaagt

SEQ ID NO: 831899 - DNA, 120 bp, Artificial Sequence
  ENSG00000286708_2 (sequence is synthesized)
acttcagcatcagatggacatggggttgaaatctggtttgcccaattcctccagcatgtggctctggaaaagtcctgaatttaagatgtcatcggtgccctgcctgcatctccttggcac

SEQ ID NO: 831900 - DNA, 120 bp, Artificial Sequence
  ENSG00000286708_3 (sequence is synthesized)
tcactgttcccaggtcagcttctaggggagccccaccccaaatgccatgtcgcctaggctcttctacacatggagaccacaactgcatctggacgtggaggtttgcatggctgtgatgct

SEQ ID NO: 831901 - DNA, 120 bp, Artificial Sequence
  ENSG00000286708_4 (sequence is synthesized)
gtacgtgaagtgctggcctgtagtacttgatgcacaaggaaccgcatgggcaagtatagattttctaaactatcctttccctttggggccctgggaaagcccaaaaatcagggaacaaca

SEQ ID NO: 831902 - DNA, 120 bp, Artificial Sequence
  ENSG00000286708_5 (sequence is synthesized)
gacactgactccctgcgtaagctgattgtaaaagccagtcctgcttctttcctgcaggactggggattttacaaacatacggacatgagagactcaaacctcgatcctggcacttcaaaa

SEQ ID NO: 831903 - DNA, 120 bp, Artificial Sequence
  ENSG00000286708_6 (sequence is synthesized)
tatgttagtcacgtgagcctgtggtgggtgcccccctctctcaatggggggtgctgtttacagttaacaattgatcagaacaggtaaagggtaattaaaatgtattcgcccaacaaatgg

SEQ ID NO: 831904 - DNA, 120 bp, Artificial Sequence
  ENSG00000286708_7 (sequence is synthesized)
gcattccttttataataatgaaaaaaacctctctgttcgtaaagagttgtctgcatcataaataagaaaggtattcataattatatcccaaaactgaaaagacaacaagtgtctcccaag

SEQ ID NO: 831905 - DNA, 120 bp, Artificial Sequence
  ENSG00000286708_8 (sequence is synthesized)
ttatatcccaaaactgaaaagacaacaagtgtctcccaaggtggattgtgaaatcaactcggtgcttcaacgtacttggaaagtcagcctggtttttgttttgttttgtttttgtttttg

SEQ ID NO: 831906 - DNA, 120 bp, Artificial Sequence
  ENSG00000286708_9 (sequence is synthesized)
tcctgtttttgagtaggggggtttagtggctggaccttaccttctcagaagggaggaagggtggctgtgactccatggggcaagacttagggtcaggggtagcagccccaatatctctca

SEQ ID NO: 831907 - DNA, 120 bp, Artificial Sequence
  ENSG00000286708_10 (sequence is synthesized)
gctccatgtggagagctgggataaggaagccacttcaccccttcctctttgcagtgcaggccccagtgagggtagcccaatggggtagcccttagcttgttaccatcccagacaactcag

SEQ ID NO: 831908 - DNA, 120 bp, Artificial Sequence
  ENSG00000286708_11 (sequence is synthesized)
ggggctctgcctccaggggtgccagcaacaacccctgtcgtcatgggcgggacctgtgctcagactcccttacctcccttcttcactgtgtgcccctggtcaagagagtcccactccctt

SEQ ID NO: 831909 - DNA, 120 bp, Artificial Sequence
  ENSG00000286708_12 (sequence is synthesized)
cacagcagccgatatttttagctctcaaaccaaagctatcctgtgtgctgctctttcatattagggaggcagcaggaagacggtctctggcactctgagagctcagttcattttctaaat

SEQ ID NO: 831910 - DNA, 120 bp, Artificial Sequence
  ENSG00000286708_13 (sequence is synthesized)
cattttgcagacattaactcatcaatctctataacgcgctcatggaggtgctgaggcagccctggcagaaccctggatctcagagcaattaagtgatttgccctggctcacaggagggat

SEQ ID NO: 831911 - DNA, 120 bp, Artificial Sequence
  ENSG00000286708_14 (sequence is synthesized)
gtgcaagtcagtgtcaggcgcagcctttgggaggccccgaggctctgcacaggtgcttgatgacgcaagccatgcatctggctctgcatcctcgtgcggttctccaaggcggggtaggta

SEQ ID NO: 831912 - DNA, 120 bp, Artificial Sequence
  ENSG00000286708_15 (sequence is synthesized)
ccggccgtggttgacgtagggcacacatgccacacggtaaagcctcgacagccaaacacagttctgctttccctgatgccaaaaatgaggtgacgggcacaggcaataaacgacacccag

SEQ ID NO: 831913 - DNA, 120 bp, Artificial Sequence
  ENSG00000286708_16 (sequence is synthesized)
gagcacccccctgacccctttgatggggtgatgccatcttcgaaagctcaccactgccggtccaatgggactgctccccgctgcaggtcctgtggaagcgcggggctggaggaaacaggc

SEQ ID NO: 831914 - DNA, 120 bp, Artificial Sequence
  ENSG00000286708_17 (sequence is synthesized)
cagtgggctcgtccaagttgcaagactgggcccagccgatggcagggcgatgggagagaggaggagccccaaagactctcctcctggttggcacaaggggtactaaaaaggggaatggcc

SEQ ID NO: 831915 - DNA, 120 bp, Artificial Sequence
  ENSG00000286708_18 (sequence is synthesized)
atcagcacaactgcggaggaagtgaagcagaggcaaccagaggggagccgagaggatgccactggctctctctccaccctcatcgggtcaccagctctttgcctaaatagaagcgtggat

SEQ ID NO: 831916 - DNA, 120 bp, Artificial Sequence
  ENSG00000286708_19 (sequence is synthesized)
gctacggcaccttccaataaacacatccaaatcagctgcaaattaatttgtttcagcaatcaagagccgtgccctacatccattgcttgatgcttagcacattctccagtttgatttctt

SEQ ID NO: 831917 - DNA, 120 bp, Artificial Sequence
  ENSG00000286708_20 (sequence is synthesized)
ttctttttagatttttaaaaaagatgtcatatttttagagcagttttaggttcacagtaaaaccaagcagaaggaatagagcttacccagagagcccctgcccctcacgtgcagtctccc

SEQ ID NO: 831918 - DNA, 120 bp, Artificial Sequence
  ENSG00000286708_21 (sequence is synthesized)
agcccctgcccctcacgtgcagtctccccagtcatcaacacccccctggagtgggccatttgttacaactgagagcctacagtgtcactcgaagtccatagtttacattagggttcactc

SEQ ID NO: 831919 - DNA, 120 bp, Artificial Sequence
  ENSG00000286708_22 (sequence is synthesized)
caaatgcgtaacgacatgtatcaatttttatcattaatggggaaaatcagatacatacatcagatagggaatcctagagccaacccttagcataaattaaacacttcctgttcctctccc

SEQ ID NO: 831920 - DNA, 120 bp, Artificial Sequence
  ENSG00000286708_23 (sequence is synthesized)
cattttactaaatcaatgatgttcacatggaaagaaaccttgcaacagggactgtcagaatagatcagaacatcatccttctagagaggcatgtttcagacagcctaacctctaaggtct

SEQ ID NO: 831921 - DNA, 120 bp, Artificial Sequence
  ENSG00000286701_0 (sequence is synthesized)
agatacactgggtagggctgattatggaggaggaacgggaagttctaccaggagtcgctgtactgtattcacggctcttgttatatgatttatgctggcattatctaaactgagaagcgg

SEQ ID NO: 831922 - DNA, 120 bp, Artificial Sequence
  ENSG00000286701_1 (sequence is synthesized)
cccataggagctgccagcagagtcccaatggaggtgagcggctcatttcagctcgggcattctgcttctactggagggcactctgctggaatatgtgagggatgaagacagtgaaagaat

SEQ ID NO: 831923 - DNA, 120 bp, Artificial Sequence
  ENSG00000286701_2 (sequence is synthesized)
accaagcgggaaactgaatcaatgcatgtgccatcttggaaaccaaaaattaaaagatcagcttgctggagatatttaatcaatcttgctgtgcatattaaatgtgcattcaaagaaaaa

SEQ ID NO: 831924 - DNA, 120 bp, Artificial Sequence
  ENSG00000286700_0 (sequence is synthesized)
tacatggtaacagcaacagcaactggccagttctgtctccacatggtcagcctgagaaacatactataaagctccactaccgaagaggaagtggatcgtacctaagtgatggtggggtca

SEQ ID NO: 831925 - DNA, 120 bp, Artificial Sequence
  ENSG00000286700_1 (sequence is synthesized)
tccactcagcttcttgcccaagatctccatggcgtatcatctcacatagtgtcctgcatctggcggagtcttgagaataaggctggatgatggtgataacgagaatgaatgaagatggtg

SEQ ID NO: 831926 - DNA, 120 bp, Artificial Sequence
  ENSG00000286700_2 (sequence is synthesized)
atctggcaagcattcaacacaaacgcaattagagggcttacccttgcatgaaatatttgctttcctgatagtcactaactttaaactttaggaatgccagggcatagtgtttctgtatca

SEQ ID NO: 831927 - DNA, 120 bp, Artificial Sequence
  ENSG00000286700_3 (sequence is synthesized)
gaactagaatcctctacttcactttcttcagctattatttttgaagtttgcatatcgtattaaagtcccaccaaacaataaataggaaagcatgattttattaaaatcctcttgagacaa

SEQ ID NO: 831928 - DNA, 120 bp, Artificial Sequence
  ENSG00000286703_0 (sequence is synthesized)
ggcagtagtaggcgcatgcgtggttgcgatcatggctggcggtaacttcgcgtttctgttacccatttttaaaacgcatcttcaggtgttccttccttctcatggaaggaacattaatta

SEQ ID NO: 831929 - DNA, 120 bp, Artificial Sequence
  ENSG00000286703_1 (sequence is synthesized)
aattcagagggactgggttttagtcctaactcttattcctactggctgtgtaaccgtggacaaattatttaacttctcagaatcaggttgttcaaacctgaggttgaactgcaaaaaggt

SEQ ID NO: 831930 - DNA, 120 bp, Artificial Sequence
  ENSG00000286703_2 (sequence is synthesized)
tacgaagtgacactcagtagggcccgaatccatgttttctttgatcccaatcttttttaaaaaaatttcttttaattacttgccaacattttagaatttggaaatctcacatgaaattct

SEQ ID NO: 831931 - DNA, 120 bp, Artificial Sequence
  ENSG00000286703_3 (sequence is synthesized)
ggacttttgaagctgaggaattccattgcaacaatcaaggagactaaataggaaatgacacttctgtttggccatcttgccctcattggtttagaatggcagtggttctcaaccctggct

SEQ ID NO: 831932 - DNA, 120 bp, Artificial Sequence
  ENSG00000286703_4 (sequence is synthesized)
gcacattagaatcactttaggagaggtaaaaccatactcacgctggagacctactcctagaaattctaaagagtttggggctgggaactggccattgatctgcctttgaagtttcccaag

SEQ ID NO: 831933 - DNA, 120 bp, Artificial Sequence
  ENSG00000286703_5 (sequence is synthesized)
tgattcccaacctctgatgtaataaatttctggctgctgtcgtatttgagatttgacccccccaggtctaagacttaattgatttttaaggctgtaagacatttctaagactttgacttt

SEQ ID NO: 831934 - DNA, 120 bp, Artificial Sequence
  ENSG00000286703_6 (sequence is synthesized)
taagactttcctgcctcattctgaagagaaaaggccacatgaggacaccatgagaaggcagctgtctacaagccaggaagagagtcctcaccagaaaccagctctgctggcaccttgaac

SEQ ID NO: 831935 - DNA, 120 bp, Artificial Sequence
  ENSG00000286703_7 (sequence is synthesized)
ttggacttcacgcctccagaacagtgagaaaataaatttctgctgtttcagccgcccagcctgtggtattctgttatggcagcccaagctgactaatacactacctaatagtgaatgaga

SEQ ID NO: 831936 - DNA, 120 bp, Artificial Sequence
  ENSG00000286703_8 (sequence is synthesized)
agaattaaatcagaaaatataaatgcattaataaacataccatgtattgggcacctccctgtgccaggcacttcaccatcatctctagtcctccaaaacacatgctgtttgcaccacatc

SEQ ID NO: 831937 - DNA, 120 bp, Artificial Sequence
  ENSG00000286703_9 (sequence is synthesized)
atgctgccaggcacatagttggcttgttgatttgtgtgtgtgtgtgtgacaagatctcattctgtcgcccaggctgaagtgcattggcatgatcatactcattgaaacctccaactcctg

SEQ ID NO: 831938 - DNA, 120 bp, Artificial Sequence
  ENSG00000286703_10 (sequence is synthesized)
atgcaccaccacatctggctaattttttttaaatgtttttgtagagacagggtctcactgtgttacccaggctagtctcaaactcctgaccttaagcaatcccccgacctcagcctccca

SEQ ID NO: 831939 - DNA, 88 bp, Artificial Sequence
  ENSG00000286703_11 (sequence is synthesized)
gccggcttgttgaatttgggatatgaatatcatagtcttattaacaccatgtttataagccataattgtctttatgaatgtattcatt

SEQ ID NO: 831940 - DNA, 120 bp, Artificial Sequence
  ENSG00000286703_12 (sequence is synthesized)
atgtttataagccataattgtctttatgaatgtattcattttggaaaagtaagtactaaggatgttcagctttctgtgctatggattattatgtgtggagaaacaagaaaatgagtcaca

SEQ ID NO: 831941 - DNA, 120 bp, Artificial Sequence
  ENSG00000286703_13 (sequence is synthesized)
gtcctcacttaaatattttaccatctagttagagatgaagacaagtatattaatgttactggcccatatgactatctttggaaaaacaatcatataaagtcaagattcagcacagggacc

SEQ ID NO: 831942 - DNA, 120 bp, Artificial Sequence
  ENSG00000286703_14 (sequence is synthesized)
cagggtccaaaagatttgcatttgactcccagctctataacttagccgtgtgatcacagtcaaattgcttaacctctcccttttctcatctgcaaaacagggaaataatagcacccacct

SEQ ID NO: 831943 - DNA, 120 bp, Artificial Sequence
  ENSG00000286703_15 (sequence is synthesized)
ccatcatttattatacacaaagagataatatgcctgaaatatatctagctaaataaagacctaatcaaatgtaagctgtgactattaccgtttgttgtttgcttcctgctttttactatt

SEQ ID NO: 831944 - DNA, 120 bp, Artificial Sequence
  ENSG00000286703_16 (sequence is synthesized)
gcaatttctaagatcagcctttttcaaaagatttttctttcatcttaaggctacctgggaactgactgtacctactacatacaccgtaacatgtatgtactatatacagccataatgggg

SEQ ID NO: 831945 - DNA, 120 bp, Artificial Sequence
  ENSG00000286703_17 (sequence is synthesized)
caaggaaagaaaatggaatgtgtaatataagaataatggcatatagtcctcaaagactgtgttttatattttgtctccattagatattaacacagtgctatgtaatggaggaaacccaag

SEQ ID NO: 831946 - DNA, 120 bp, Artificial Sequence
  ENSG00000286703_18 (sequence is synthesized)
aaatattttttgccttgaagaaaagaacacaaactcagaagtcacatggatctaagataagacttgcaaagatttaaattcaattctgccatttacttcatatgaggaccttgagaacca

SEQ ID NO: 831947 - DNA, 120 bp, Artificial Sequence
  ENSG00000286703_19 (sequence is synthesized)
gttgatagcatatcagaaaagctaattaatttgccatggttaccaggaaaacagggcctagtctccaaagtacagccaaatagaggagccaaataaaaaagagggaaatttttgtcatgc

SEQ ID NO: 831948 - DNA, 120 bp, Artificial Sequence
  ENSG00000286705_0 (sequence is synthesized)
acacacacacgcacgcacccacgcacgcacagcccatccttcctccaaggctcgcgaatcatctctccacaaatcctgccttcggggccgcagcctgcaggccgacctcagtccgtcctc

SEQ ID NO: 831949 - DNA, 120 bp, Artificial Sequence
  ENSG00000286705_1 (sequence is synthesized)
acagagcctagttgggtgcacagctctccctgacgcgcgaggagcaggttcacgggagtcggtcgcgcatccccagcgccctgcgggcctcgcaccggctgtggcggtgaccccgaattc

SEQ ID NO: 831950 - DNA, 120 bp, Artificial Sequence
  ENSG00000286705_2 (sequence is synthesized)
ttccatctctatgagaacaagcccattttaactttctggaggataaaatagcatgctgaggaaagccaaagtgcgccagtttacagacagctcactcccagaagcagagccacctaattc

SEQ ID NO: 831951 - DNA, 120 bp, Artificial Sequence
  ENSG00000286705_3 (sequence is synthesized)
accagcatctgaccactcacacctgaaggagccaaactgagcccagaagaatggcccagctaagcccagcctaaatttctaaccagctcaaccctgagctagtatgtttcaggattgtta

SEQ ID NO: 831952 - DNA, 120 bp, Artificial Sequence
  ENSG00000286705_4 (sequence is synthesized)
tccaggacagattgattacaaataacctgcaaatgcttggcaccctgtaagtattgatattgtgtttcctttatttaaagttaaatttgttgtaagatggtattgacttatatagaagtg

SEQ ID NO: 831953 - DNA, 120 bp, Artificial Sequence
  ENSG00000286705_5 (sequence is synthesized)
aggcaagagaatagggtctggaggcagggaacttaaggccaattcgtgctgaattcctaaagaagaaacaccaaggtctgggagcagggaacctaaggccaattaacgtgaacttcctac

SEQ ID NO: 831954 - DNA, 120 bp, Artificial Sequence
  ENSG00000286705_6 (sequence is synthesized)
atctaaaccaaaaggaaaacctcatctacacctgagtagcaaaggatcaaaggtgactgttgctacaaccctctcctttgcaccagttctctgatagaaaaggagagtgacttggagtgg

SEQ ID NO: 831955 - DNA, 120 bp, Artificial Sequence
  ENSG00000286705_7 (sequence is synthesized)
ccgtgggccaagcacaggccatgccttcatctgcatggggtaccaattcacctcagcctttgattagccacggaccaaatctttcatccagataaggggtagctgatagggacctcaaaa

SEQ ID NO: 831956 - DNA, 120 bp, Artificial Sequence
  ENSG00000286705_8 (sequence is synthesized)
ggagtacttaaaacccagataactttgtaaccgggtccttgagctgcttgctggggctcacacccatcccgtggagtgctttcttgctttaataaacccctgcttttgctgtttccttca

SEQ ID NO: 831957 - DNA, 120 bp, Artificial Sequence
  ENSG00000286707_0 (sequence is synthesized)
agcgcaacagaaccggagactgggctgcaggacgataccagcacttcaggaaccacgttgcaggtgtcacaccttggattcaccatagccagcagaaaccagtggcaacagagactcccg

SEQ ID NO: 831958 - DNA, 120 bp, Artificial Sequence
  ENSG00000286707_1 (sequence is synthesized)
atgataaccagtggattaaccaacaagacccagatcgccccacctgaatagtcctacggcgaaacccaaccaccggtaagaaggacaactggcctgctctgaccacaccggaggatggtc

SEQ ID NO: 831959 - DNA, 120 bp, Artificial Sequence
  ENSG00000286707_2 (sequence is synthesized)
agtctatgcacggctgaagcttgaggatcctgcaagctctgctctagtcacatcctggaagctgactagtctacgcacagtcgaagctaagaggaccatatccggataagtaaatgtgga

SEQ ID NO: 831960 - DNA, 120 bp, Artificial Sequence
  ENSG00000286707_3 (sequence is synthesized)
tacaatttataagcctacttacaattctgtcaacactgattgctctgctgttatgttatcattgcaaatgctgcaaatgtctatgcccagaggaaggtttgccatgcccatgtatagtat

SEQ ID NO: 831961 - DNA, 120 bp, Artificial Sequence
  ENSG00000286707_4 (sequence is synthesized)
aggcatgtttctattacatacactgttgtcgttaccatttctgcctatactagaaggggagaaatctctagaaggatgtccacactgtgtacatactatctgggtaaggaatagcgtagt

SEQ ID NO: 831962 - DNA, 120 bp, Artificial Sequence
  ENSG00000286707_5 (sequence is synthesized)
taaaactctactgtaccatacctactataaatgtacaggaaccaagttagaaacctacacatacaaccagaaacagtctgcaatggtttaacacaagagaggcttagcaagagcagccct

SEQ ID NO: 831963 - DNA, 120 bp, Artificial Sequence
  ENSG00000286707_6 (sequence is synthesized)
aaacacctgtacggagagctacaaatcggatgcccagactgtaacattcggtggtctacactaacacatctccaacacttatattcaggaaggattgctctgctaagtagtatgtcaacc

SEQ ID NO: 831964 - DNA, 67 bp, Artificial Sequence
  ENSG00000286707_7 (sequence is synthesized)
atattcaggaaggattgctctgctaagtagtatgtcaaccaaaccaaattgtaaggcaagaacatgc

SEQ ID NO: 831965 - DNA, 120 bp, Artificial Sequence
  ENSG00000286707_8 (sequence is synthesized)
cttggagttccactactaattgtcaaaaagactagaaggattcaaatgtgtccaaccccacaattccgggtccataagtcattctataaacattttgatcagtcagtgcctgagctttcc

SEQ ID NO: 831966 - DNA, 120 bp, Artificial Sequence
  ENSG00000286707_9 (sequence is synthesized)
catcaaccaaaaatttacttgctcaactagctaaaaacatatctggcagcttggaaatttccttatgctatgtatgcggagaaactaatataggggaccagtggccatgagaggcaaaaa

SEQ ID NO: 831967 - DNA, 120 bp, Artificial Sequence
  ENSG00000286707_10 (sequence is synthesized)
ccaacagcctcaaccagtgtttggttgtttaaaacctccgtaattgaaaagtactgtatcgcctgagtaaaaaaaaaaaaaaaagctttcacagaggcagtaggagaaacaacctgccta

SEQ ID NO: 831968 - DNA, 120 bp, Artificial Sequence
  ENSG00000286707_11 (sequence is synthesized)
gggcaacagtattatgatgagactaaaaacaaaactctatgcagaaacgcccagaacgactcctatttaccagatccaaaccctttctctcggttctctactctaagccactcttggcat

SEQ ID NO: 831969 - DNA, 120 bp, Artificial Sequence
  ENSG00000286707_12 (sequence is synthesized)
cagctagaggctccagatgcttagaaagcaccctttggcctatattggaactgtggagcacgggtgtgtcggcacaggcatatcagctaaatagacagaggcgtgtgtgttaggaacaat

SEQ ID NO: 831970 - DNA, 120 bp, Artificial Sequence
  ENSG00000286707_13 (sequence is synthesized)
ccttctttctaattcctctaaagcaaggggaactcttaggatatccagtttataatgaaaatttaaaaaaaaactaaaaaaagcataatcgcaaaaatgacacaaatgtcaaaaaaatgt

SEQ ID NO: 831971 - DNA, 120 bp, Artificial Sequence
  ENSG00000286707_14 (sequence is synthesized)
aaaaatgtagacataaaagactggaaagataataacggccgagctgtcatagaaatcacagctaaaatgcgcaagttagcccatgttccagttcagacttgctccagataatccccggat

SEQ ID NO: 831972 - DNA, 120 bp, Artificial Sequence
  ENSG00000286707_15 (sequence is synthesized)
tccttgtttagaggatggttctcaacctttaaaagattcaaaaccctcattggtgggtttttgtttattcttggaatctgcctcatcctcccttgacttttacccctgtaagtaggagta

SEQ ID NO: 831973 - DNA, 120 bp, Artificial Sequence
  ENSG00000286707_16 (sequence is synthesized)
tttgtcaactatagaggcagtggtaacccgacacactgccacgcagttgatggcattaaccaaatatcagccgctgccagtagaagaaagagctcagctctgtgaagaggtggcaaatag

SEQ ID NO: 831974 - DNA, 120 bp, Artificial Sequence
  ENSG00000286707_17 (sequence is synthesized)
tggtgctttctattaacacctttgttatgaaaagcaccaaaggggggaaatggaacagaaattaaaagaaattaaagaatgtgtgagcaaaaactcagttatatgtttaaaaaaaaaaaa

SEQ ID NO: 831975 - DNA, 120 bp, Artificial Sequence
  ENSG00000286707_18 (sequence is synthesized)
gctgtgcagctgtaaggtcactagacagataatctcaagtcataaaacatgttgttccttaaaaagtaaaaagtaatataatgcatgtctcagttaaataactgtctttgcttcttgttt

SEQ ID NO: 831976 - DNA, 120 bp, Artificial Sequence
  ENSG00000286707_19 (sequence is synthesized)
ctataataggcttccccctgcacagatctcccctcgccccacaaaatgcttaaaaggtagcttaactctgttcaaggctgtgtcctttaaatgttaatctgactggtttggtgcatctaa

SEQ ID NO: 831977 - DNA, 120 bp, Artificial Sequence
  ENSG00000286707_20 (sequence is synthesized)
agaagaaaaaatcagagctccaggaagttaaagtgaaaggttacaaaaaagtcaggcaggccgtctcaggtctggccgtgcccaagttatgcttatgcctcttaagaggacaaaaggacc

SEQ ID NO: 831978 - DNA, 120 bp, Artificial Sequence
  ENSG00000286707_21 (sequence is synthesized)
cccactaggacccagatgatgcagtccagcttcaacccctacaaaattgccgagaagcacttctgccaaaggctaaaggatggtaaaagaaaaagttgcaggtgtcacaccttggattca

SEQ ID NO: 831979 - DNA, 120 bp, Artificial Sequence
  ENSG00000256642_0 (sequence is synthesized)
ccaagtaggtagaaagcggcctccaggcctcgcgaggatgagcccggcgtcccagtcgcgaggatgggcgcggcagggcgggcgacccggcttgtgggagggagggagcagcgcggggcg

SEQ ID NO: 831980 - DNA, 120 bp, Artificial Sequence
  ENSG00000256642_1 (sequence is synthesized)
gtgggaggggggtggtggggcggcgaaccggacatcccatacacccacactacagaacaccccccgatgggctcaccactcccgaaccttcgcgcccacgtgcgaacaggcagaccgccc

SEQ ID NO: 831981 - DNA, 120 bp, Artificial Sequence
  ENSG00000256642_2 (sequence is synthesized)
gacccgtgcacggcagctgcgagggaccggcggccactcgggcgtggcgggcgcggggcagcccagacgtttgggcagcgaaccagaggcggaccgcggtgcccgggatctcaccgccag

SEQ ID NO: 831982 - DNA, 120 bp, Artificial Sequence
  ENSG00000256642_3 (sequence is synthesized)
cggcctccaagcatgaaggcggccccgcggctcccccaccgcctccgccatcgcggccagcccccggaaccctcttccctgcgcgcgctgcacgccgaccccataccctccgggctctca

SEQ ID NO: 831983 - DNA, 120 bp, Artificial Sequence
  ENSG00000256642_4 (sequence is synthesized)
ccaggcccatgcggagcgccgccgacctggtccggaaggcgcgcgcccggggacagggacaaccggccaaccagtggcccgtggcagcgccacacaaggcggagccgggtttggtcccag

SEQ ID NO: 831984 - DNA, 120 bp, Artificial Sequence
  ENSG00000256642_5 (sequence is synthesized)
agggggccaccacagcctaagctggtgagccgctcggggagagaggatacgcgggcggggaggggggcacagacaggcaaggccagggaccgcaagggcaagggcacccgggagcccgca

SEQ ID NO: 831985 - DNA, 120 bp, Artificial Sequence
  ENSG00000256642_6 (sequence is synthesized)
gggaagaaacctcaggcaaagccgggccaccaggaaaacacggccacgggatcccaccgccacagatacgagggaggtcccgcggcgccccgcctaggaagccggacggcccctggcacc

SEQ ID NO: 831986 - DNA, 120 bp, Artificial Sequence
  ENSG00000256642_7 (sequence is synthesized)
caccgagacccgcctcacgagcctgggtcccgccatcgggaccccgaagcgacctcagccacaaacccaacgccagggccacgttgctggtttcttgtccatcctccgacactgtcaagc

SEQ ID NO: 831987 - DNA, 120 bp, Artificial Sequence
  ENSG00000256642_8 (sequence is synthesized)
tccgggagaccggcgcgccccccacttgggatgcttcccatggccaggcatcccaaccccgtgccacgcaaacgcggttgtcggcaccggtcgctgctcctcaggggagcgggtggagag

SEQ ID NO: 831988 - DNA, 120 bp, Artificial Sequence
  ENSG00000256642_9 (sequence is synthesized)
gtggagagccggctcgcagcggagcgggtcacgcgccggacggaacgcctggcacagccaccgctcgcgcagcctcccaaccgctaggacgccggcccggcccggcgggatcctcccccg

SEQ ID NO: 831989 - DNA, 120 bp, Artificial Sequence
  ENSG00000256642_10 (sequence is synthesized)
gggggaggcgcgggccacacagtaggtgacgagccgccctcggtccccaccgcggaggactctctcaagagagagtcggtaagagactcatcattctctcccgaaagcagtgaggtggat

SEQ ID NO: 831990 - DNA, 120 bp, Artificial Sequence
  ENSG00000256642_11 (sequence is synthesized)
ggtggcttgtgttccgagctcctgtggtttcagttggccgcgcgtagaagagagatttccaatgtttccagagaggcgcgagccacagtcattgaacccaggaagtggaggttgcagtga

SEQ ID NO: 831991 - DNA, 80 bp, Artificial Sequence
  ENSG00000206417_0 (sequence is synthesized)
agcgctgctccggcttctggcccctggcgggcttcttgtccgcgcgccgggagccggccgcgcccggggctgccttcttc

SEQ ID NO: 831992 - DNA, 120 bp, Artificial Sequence
  ENSG00000206417_1 (sequence is synthesized)
gggctccgcgccgctccccgccgccctccagcttcttgcggttgagcttgaaggaaccgttggcgccggtgcccttcacctgcagaagcgtgtcgttctgcaccagcgccttgatcgagt

SEQ ID NO: 831993 - DNA, 120 bp, Artificial Sequence
  ENSG00000206417_2 (sequence is synthesized)
acttgagatggggacaacgccgccgagccgccagccttggtcaccttcttggccattccctcggcggtcgtcactggcagggcctcctcgagctccacggacatgggaaatgatggcggg

SEQ ID NO: 831994 - DNA, 120 bp, Artificial Sequence
  ENSG00000206417_3 (sequence is synthesized)
gcccgatctctgctgattccagtattgggggtgcagagaaggcacaggacagtttttgttgaagccgttgcagcctccacttggggaagctgaggccaggggcacaggacaacgttgagg

SEQ ID NO: 831995 - DNA, 120 bp, Artificial Sequence
  ENSG00000206417_4 (sequence is synthesized)
gcctgaggcctccaccttcttgaagaaggaccatgtgaatttcctgacagagaacggggatgggtttctgaaagcaccacccagctgagcctgccgaaactgcacagctgtttccaggcc

SEQ ID NO: 831996 - DNA, 120 bp, Artificial Sequence
  ENSG00000206417_5 (sequence is synthesized)
aggctggctgcatggaggacgtgagaggaacagccagctgtgtgtgctgggcccactgatcagggtgctcaggaccaggagccttctgaggatgtgcagaggggactctggggagaggaa

SEQ ID NO: 831997 - DNA, 120 bp, Artificial Sequence
  ENSG00000206417_6 (sequence is synthesized)
catggtggccacagctggagtgaccgcagtgtacagagatgggatgggagcaggaaacccaaaagagccggccctggaaccaggtggaggggaggcagcccggccatgacccagagcagg

SEQ ID NO: 831998 - DNA, 120 bp, Artificial Sequence
  ENSG00000206417_7 (sequence is synthesized)
aggcctcccaagaagttgatgccctgtgcttcctgtacagctgcggaaccggatggctttccgtggctttgctacagccactcctggaagtgctgcctgactgaatcctcagggcacccc

SEQ ID NO: 831999 - DNA, 120 bp, Artificial Sequence
  ENSG00000206417_8 (sequence is synthesized)
ggcaggatggacgtggtgtaccccctactttacagatggggaaactgaggcttgagagctaaagcagcccacccagctcccagagatgaggaggccgactctggcaggagtcactgtcgg

SEQ ID NO: 832000 - DNA, 120 bp, Artificial Sequence
  ENSG00000206417_9 (sequence is synthesized)
atgacccattctgggaggccgagagcacctcaaagaactcagcaggaagcacagtttcaattcagaagttctggaaggcgaggcaggacagggcaccctccctgcatggcccgatgacct

SEQ ID NO: 832001 - DNA, 120 bp, Artificial Sequence
  ENSG00000206417_10 (sequence is synthesized)
gcactcctgtttcatctccccgtgtggcacctggggcagcttggagcctaccaaggtctcaacaaggaaccagtaaataccaaaaaaaggacatcacgtcccctacagctaactgcaaat

SEQ ID NO: 832002 - DNA, 120 bp, Artificial Sequence
  ENSG00000206417_11 (sequence is synthesized)
ggtgaccatcccagcccttgtttgataacacaagcaaagcaatggcttcttcaaggacaccgagaggaacctcacctctttctaaaacctccaacacagggccaggcgcggtggctcatg

SEQ ID NO: 832003 - DNA, 120 bp, Artificial Sequence
  ENSG00000206417_12 (sequence is synthesized)
cgccgctccccgccgccctccagcttcttgcggttgagcttgaaggaaccgttggcgccggtgcccttcacctgcagaagcgtgtcgttctgcaccagcgccttgatcgagtacttgagg

SEQ ID NO: 832004 - DNA, 79 bp, Artificial Sequence
  ENSG00000206417_13 (sequence is synthesized)
cgtggtggtgtgcgcctgtagtcccagctgctcggggaggctgaggtaggagaatagcgtgaacccagaaggtggaggt

SEQ ID NO: 832005 - DNA, 120 bp, Artificial Sequence
  ENSG00000206417_14 (sequence is synthesized)
atctcaaaaaacaaacaaacctccaacaccacctggaagggcctggaggcactcactgatgagcctggaatttctcacaggggacagagaggtggccaaggctcctgcacatttccccat

SEQ ID NO: 832006 - DNA, 120 bp, Artificial Sequence
  ENSG00000206417_15 (sequence is synthesized)
tcagcagggagaaggccaggacgtgctccctgactctcggcagggcgggagaagaatgaatcctctgaggtccccagcttggggaaaagggggtgggagagtggcgggcagagacctcct

SEQ ID NO: 832007 - DNA, 120 bp, Artificial Sequence
  ENSG00000206417_16 (sequence is synthesized)
ccgtatccccctctcctgaagccctgccgctgtggcagccctacagggactacagggctccagccctacagggactctgcggtggggcgggtgtgcaggctcacaggctctggaaatgcc

SEQ ID NO: 832008 - DNA, 120 bp, Artificial Sequence
  ENSG00000206417_17 (sequence is synthesized)
ccaggatgccttggcagtgtctcccacagacccaggagcgccactagaaacaggacccttcctcagtcatcctgcatgggggctcctgttgctttgggggctgctttccagcagctgcgt

SEQ ID NO: 832009 - DNA, 120 bp, Artificial Sequence
  ENSG00000206417_18 (sequence is synthesized)
cagacaacgacccacctcatccccccagccaggacctgaacaggcactgacgtcagatacgtagaccttgttgctgaacttgtcaaaaacttcaatggtgatttcatacaggcggccggt

SEQ ID NO: 832010 - DNA, 120 bp, Artificial Sequence
  ENSG00000206417_19 (sequence is synthesized)
ctccagcacccacctatcaccagggtgaatggtgaaccctaaaacaggcagggggagcctgagcactcaggcctcaggggcagcagggtggaggaggatgggaccaccaccctcagcaca

SEQ ID NO: 832011 - DNA, 120 bp, Artificial Sequence
  ENSG00000206417_20 (sequence is synthesized)
ggggccctcagcatccacatgggaagccccactccacccacctgtaggccccacaccacccacctgcaggccccacaccacttacctggaggccccacaccacccacctaggggccccac

SEQ ID NO: 832012 - DNA, 120 bp, Artificial Sequence
  ENSG00000206417_21 (sequence is synthesized)
aattatggcgctggcctcctccacagagagggacctgttgctgaggaacagatgcctgatgccgccttcagccctgagtcctgagctgacctcccgaggaccaaacctggactcatccca

SEQ ID NO: 832013 - DNA, 120 bp, Artificial Sequence
  ENSG00000206417_22 (sequence is synthesized)
ttctatctgaacaaggctccttcaaacttgttcctgttcctcagtgggtctacactcagaatcctagcagctctgtccttaacacacagcaggtctatgctctgaagtgataatagatct

SEQ ID NO: 832014 - DNA, 120 bp, Artificial Sequence
  ENSG00000206417_23 (sequence is synthesized)
atagtgttcacagtagaactagtctgaaccttcagggggtctgtgctctgaggagggatggacatagactccaagaaagtgatgattctggaaaaggaacgcgttgttaaagtttgttga

SEQ ID NO: 832015 - DNA, 120 bp, Artificial Sequence
  ENSG00000206417_24 (sequence is synthesized)
tcaaacccagacacaaggtctgtcagaatctaccacagcattccctatcagcccctcccactggggccaacactgaagaaataaggggtgtcccgttagtcagggctggggctacctaga

SEQ ID NO: 832016 - DNA, 120 bp, Artificial Sequence
  ENSG00000206417_25 (sequence is synthesized)
gacatgtccctgcagcttcctacatcagatctgcccatgtccttgtgaaaaatgcagatgcttggcccctggcccaggctgtgtctgcaagaagcctgggaaactccattttatccacct

SEQ ID NO: 832017 - DNA, 120 bp, Artificial Sequence
  ENSG00000268186_0 (sequence is synthesized)
catttcccaaggaaagaaggcttttttttcccctcagtactgtaaaagggcggaaacagacagagatgaaaactcactatgctgcccagactcgtctcgaactcctgggtgtcacgcgtg

SEQ ID NO: 832018 - DNA, 120 bp, Artificial Sequence
  ENSG00000268186_1 (sequence is synthesized)
atggggccttcgggaggtgatgaggtcatgagggtggaatcctcatgaatggtctcaacgcccttagaaaagagaccccagagacctcgctcccgctttctactgtgggagaatgcagca

SEQ ID NO: 832019 - DNA, 120 bp, Artificial Sequence
  ENSG00000268186_2 (sequence is synthesized)
gagacctcgctcccgctttctactgtgggagaatgcagcaagaagtcagccgtctatgaacaaggaagcaggtcctctccaggcactgaatgtaccagtgccttgatcttggacttccca

SEQ ID NO: 832020 - DNA, 120 bp, Artificial Sequence
  ENSG00000268184_0 (sequence is synthesized)
gatgtaaaaaaaaatctagttttgacaaatgtattggaaataggtcttggcttgccactgcacttctttagagattgaacaactgatcatgggatatgatgtaacaagacctgaaatatc

SEQ ID NO: 832021 - DNA, 120 bp, Artificial Sequence
  ENSG00000268184_1 (sequence is synthesized)
cattatgaattgcatgttatgagatctactggaaaatagcatggtatacacagttgctgtagacaagtaaggaacactggtctataggccatcaagctgaagcacgtgctatgggcacaa

SEQ ID NO: 832022 - DNA, 84 bp, Artificial Sequence
  ENSG00000268184_2 (sequence is synthesized)
atccaaaagttttatggaaatccccagaagaaggacaatggaaagatccagtggatttactgatgagaagacaaggttatactc

SEQ ID NO: 832023 - DNA, 120 bp, Artificial Sequence
  ENSG00000268184_3 (sequence is synthesized)
gatccagtggatttactgatgagaagacaaggttatactcgtgtttttacaggagatggacaaaccgtgtggatgccctcaaggtgcatgagaccatggaatgggagactggaggaaccc

SEQ ID NO: 832024 - DNA, 120 bp, Artificial Sequence
  ENSG00000268184_4 (sequence is synthesized)
tatgggcacaaaaaggttgcatgtagaggtgactcagacctccatggcacctacctccatgcattgccacctttcaacccacaactgaggccctattggtgtttcttattaacagaatgc

SEQ ID NO: 832025 - DNA, 120 bp, Artificial Sequence
  ENSG00000268184_5 (sequence is synthesized)
atgcacagctgtctagtcaaaaagcaggtgatgatacatgtctgaaggagctcagctgagaccagaagaatggccccactcagctcggcctaaatggccaaccatttcaattataaacta

SEQ ID NO: 832026 - DNA, 120 bp, Artificial Sequence
  ENSG00000268184_6 (sequence is synthesized)
ataagttttggatgatttgttatgcctcaatagctaactaatacatgcacccagtacagataagttgccaggattcagtgacaggttgactaagagttggcttctaacagtggacaccct

SEQ ID NO: 832027 - DNA, 120 bp, Artificial Sequence
  ENSG00000268181_0 (sequence is synthesized)
aataagcacatggacaagtgggcacagactcacaggccagatggacctccagccacggccgggccagactcgtggacacaggcgcagtgtcacgtacacaccacggggagacatggcact

SEQ ID NO: 832028 - DNA, 120 bp, Artificial Sequence
  ENSG00000268181_1 (sequence is synthesized)
aggggacaaatggacgtgacaccacaatgcacagggcaggccacagagctcgagggacgtgggcaggggccttttggcatttctgcgctggaatcatgtgagacaagggtggtggccgct

SEQ ID NO: 832029 - DNA, 120 bp, Artificial Sequence
  ENSG00000268181_2 (sequence is synthesized)
ctggaggtgcctggggggttccctcattacccctctgggcttagtccatcctccacactgttgtgcagcttctccacctcctggtagaggataaatactgttacccttatccctggtcac

SEQ ID NO: 832030 - DNA, 120 bp, Artificial Sequence
  ENSG00000268181_3 (sequence is synthesized)
atccagggagacgcgtccagcggccaggcggggacagtgccgttctagaggtccttgagcccctccttcctcaggatctgcagccataggccggtgtgttccgcgtttgtgctgctccag

SEQ ID NO: 832031 - DNA, 120 bp, Artificial Sequence
  ENSG00000268181_4 (sequence is synthesized)
gccccgcatccggtctcgatcccatccagaggagcgtttcccaagacactggctgcgcccacaatggctccgaagaccccagcgaccagcgggtccatgggcttgctggggttgtcccct

SEQ ID NO: 832032 - DNA, 120 bp, Artificial Sequence
  ENSG00000268181_5 (sequence is synthesized)
cggtaccagctgtgcagggaggtcaggaggagaagcagacggcctggttccagccctgctttagcgtgggtgccatgaggccccggtgagtccccttgttctcgcacaatctctctaacc

SEQ ID NO: 832033 - DNA, 120 bp, Artificial Sequence
  ENSG00000268181_6 (sequence is synthesized)
tggtgggagactcctctgcactggaggtctgggaaggtctggccgtggatgaacttcaccttgatggtgtccatggaacatacgaccaccatggcctcggccacgccagcgccctggccg

SEQ ID NO: 832034 - DNA, 120 bp, Artificial Sequence
  ENSG00000268181_7 (sequence is synthesized)
caccgcagccagcgctgccgtcaggccgtccctgggcatcccgcgtctggctgctgtggaactggaacattcagaacccaacgccgccctggagacaagagccgcagagcagggagccga

SEQ ID NO: 832035 - DNA, 120 bp, Artificial Sequence
  ENSG00000268181_8 (sequence is synthesized)
ggccgcggtgccggcccgggacgccatgaccgcgacagtgcgcacgcgggatccatgcgcggtgcccggctggtgccagcgctcgtccggctgcagctacgacctcccgcgctccgtggg

SEQ ID NO: 832036 - DNA, 120 bp, Artificial Sequence
  ENSG00000268181_9 (sequence is synthesized)
gacctcccgcgctccgtggggagcggacgcccatttcaatgccgccggccaggccgcctgctggtgtcgccttccccggagcctccgctgggccttcccggacgcggcgcggcgtggcca

SEQ ID NO: 832037 - DNA, 120 bp, Artificial Sequence
  ENSG00000268181_10 (sequence is synthesized)
cccgctgtgatctgaagtcccagcctcctaaactccgcactgggaccttaatttggttttaacacaaatgaagatctcactaaagataaaaagggatgtcttggcttctaatttttgtta

SEQ ID NO: 832038 - DNA, 120 bp, Artificial Sequence
  ENSG00000268181_11 (sequence is synthesized)
aaagcaatagcatatgttgtataggatagtgcattggggtaaatcttttttttattatttttattttttcatcagcccactgacattgaaaggggataggttttaggttattgacgagca

SEQ ID NO: 832039 - DNA, 120 bp, Artificial Sequence
  ENSG00000268181_12 (sequence is synthesized)
gggtttgtggtcatgttgatgagagggtaggctggggttaaaagtcgttatggcagtaacaaccttctgaggaccaggaaattcaaatccctctcatgatactttgctaatatctcccga

SEQ ID NO: 832040 - DNA, 120 bp, Artificial Sequence
  ENSG00000268181_13 (sequence is synthesized)
gtttgctgtgccttccctttgtgcctcttcccacacgtggtttcttgcacttggcccagctatattccactgttttgactccatgcttcttagcctggtggcagtggtgagggagtgagg

SEQ ID NO: 832041 - DNA, 120 bp, Artificial Sequence
  ENSG00000268181_14 (sequence is synthesized)
agatctctaatgttctgaggaagcctcagacttagcactgtgaactggggtgtggggttactgaccgttgaagagtttcctgcccatcctgtacatgcaatgccaggacaagagcacatt

SEQ ID NO: 832042 - DNA, 120 bp, Artificial Sequence
  ENSG00000268181_15 (sequence is synthesized)
cctgtccctccttgtccatggtaggggaaacgtgctccttctccatgctcttaactcccagttgaagtgggccttgaacagtgccctgtaaattaatggtttcttttctttatgggagat

SEQ ID NO: 832043 - DNA, 120 bp, Artificial Sequence
  ENSG00000268181_16 (sequence is synthesized)
gcatctgtgcagaaatgcgggtgttggccttgttccttcaccctcagttccatgagcttttccccagtgccctttggctcaggtttggatgctctttctctgcagattaggcctcatgtt

SEQ ID NO: 832044 - DNA, 120 bp, Artificial Sequence
  ENSG00000268181_17 (sequence is synthesized)
atataggagagatgtgagggctgtgtctccagagttgcagtagtggatgggatagtggtccctccccatcagcactgtggggtaagcatcctcaggattctaaccccatcttccctgaca

SEQ ID NO: 832045 - DNA, 120 bp, Artificial Sequence
  ENSG00000268181_18 (sequence is synthesized)
ggccttgtagggttcctagaaaaattatacacaacggtataaaccctacgtctgtagactccagggtttctcattctcctcacccacccacacacagccaccaggaactagttcaaaagt

SEQ ID NO: 832046 - DNA, 120 bp, Artificial Sequence
  ENSG00000268181_19 (sequence is synthesized)
tctggcttaattttaccagtttacatggtcttcagggtacacataaaagcctggagcctgtgtgacctgcaggctttctgcatcccctgatgttgggtttgtagtctgccctgtgacctc

SEQ ID NO: 832047 - DNA, 120 bp, Artificial Sequence
  ENSG00000268181_20 (sequence is synthesized)
agttctttaaagggctcaggagaaaccatccattcatttgaagtttctccagcatttttgtttgtttgtttaatgtgtaggagcaactctttgtcaggtctctatatctacaaacttaac

SEQ ID NO: 832048 - DNA, 120 bp, Artificial Sequence
  ENSG00000268181_21 (sequence is synthesized)
aacttaactcagaaactaatatttttaaatatatttcttttctatcatacttttagtgctcctctacctatgctaattgttcttcagtattttttatatttgtatgtctttatctatttt

SEQ ID NO: 832049 - DNA, 120 bp, Artificial Sequence
  ENSG00000268181_22 (sequence is synthesized)
gtttaattccttcttaatcaaattaataacttttcatttatttccctacgtaactttcttttcagacgtttaaagtattgctgtgtgtttcaagtggaggaggtcatattacaactgaca

SEQ ID NO: 832050 - DNA, 120 bp, Artificial Sequence
  ENSG00000268181_23 (sequence is synthesized)
tttgtccttgactactggacatatcacaccagccctgattgcagttatacttgaagccagatctacccttaacgtatattcattttactattcaataaatattaacttatcatgaatggt

SEQ ID NO: 832051 - DNA, 120 bp, Artificial Sequence
  ENSG00000268189_0 (sequence is synthesized)
attcccagtcatgcaagggtgaagagagtcttctctgctggtgggaggatcaactgtttccgtattttttggaaagcagtttgacacaatgtatgaaaagtaaaaatctgtctcattaat

SEQ ID NO: 832052 - DNA, 120 bp, Artificial Sequence
  ENSG00000268189_1 (sequence is synthesized)
ggctgactctcgcgccggcagcactcggccccaccgcgctgcaccggggactaaaggcccgaccccgcgcagcccgacggcttccgggacaggcgccctgggccacgtgagcccagcgga

SEQ ID NO: 832053 - DNA, 120 bp, Artificial Sequence
  ENSG00000268189_2 (sequence is synthesized)
gaccctacacggccccgcgggcctagggcaggtcgggagagaggcggcccccgcggtccgcccgcggccccagacccagctccccgggtccgacctcacaaccccacgctgtagctccgc

SEQ ID NO: 832054 - DNA, 120 bp, Artificial Sequence
  ENSG00000268189_3 (sequence is synthesized)
ccccctagcgccgccattttgtggcgtcttcggaagaggaagccgggagtgcaaaccccggggtcgctgggggccggaaggactccgccgaaggtgaggggcaaaaacggcccacactgt

SEQ ID NO: 832055 - DNA, 120 bp, Artificial Sequence
  ENSG00000268189_4 (sequence is synthesized)
ctaagacgcccccacgaagcccaccgcggcgtctgccccaaccccgagtcccgcccgcctcctcggggcctggcggccaatccgcacgcagagccccgggagcgacggcgccaaagccca

SEQ ID NO: 832056 - DNA, 120 bp, Artificial Sequence
  ENSG00000268189_5 (sequence is synthesized)
ctggccgcctctccggagggcccagctggggcaaccacgctcgggacgaaggcccggccggcggcagtctgcgcagcggctgcgtcgcccgcacagagccttccctccccgctccgcacc

SEQ ID NO: 832057 - DNA, 120 bp, Artificial Sequence
  ENSG00000268189_6 (sequence is synthesized)
ttccctccccgctccgcacccagcagccaacacaaacctccgtagccctggtccatgtcttcgacgcggcccaccagcagccccgtttactaggcgaccacagcacgcatgcgttcagcg

SEQ ID NO: 832058 - DNA, 120 bp, Artificial Sequence
  ENSG00000268189_7 (sequence is synthesized)
cacctccgccatcgactactggaagaccaggcgcacacgtcactacttccgcgcgcccccattggctggtcttcacgagggcccgccctcgccgtcccagctggcctttcgggctgctac

SEQ ID NO: 832059 - DNA, 120 bp, Artificial Sequence
  ENSG00000268189_8 (sequence is synthesized)
ccccgccccgcccgcgcggcacagtaacagagaaacccggaggtgggatgggaaaactttattaggtttggtttccagcttcggccacgcgggctccgcccgccccgagctcgggtcacg

SEQ ID NO: 832060 - DNA, 120 bp, Artificial Sequence
  ENSG00000268189_9 (sequence is synthesized)
gggcgcccccgccgccctcctcgtcgtcctccacgtcgaggcccgggatgccgcggatctggcgttgcagcgcccctcccagcaagggcacggcgccctcctcctcctcctctgggggcg

SEQ ID NO: 832061 - DNA, 120 bp, Artificial Sequence
  ENSG00000268189_10 (sequence is synthesized)
ggctggctctgggggcacgggaggctgcgccggcacgccctctgcgccctccgagatccctgccgcttcgccctgcgccccctcgtccagggcaccgccctcagcctcctcctgctcctt

SEQ ID NO: 832062 - DNA, 120 bp, Artificial Sequence
  ENSG00000268189_11 (sequence is synthesized)
caccgccctcagcctcctcctgctccttctcctcctcggggctgtcggtgaaagggttctcgccctgtggggaggggcgcggacactgaagggagggagcacaggcggggactaagctgg

SEQ ID NO: 832063 - DNA, 120 bp, Artificial Sequence
  ENSG00000268189_12 (sequence is synthesized)
ggacagggcaggcccggaccagtgcctcaccttcaggtagcgctccagcttcttgctgatgagcttgttgttgagaatactgcgggccaccatgagggaggacttcttggactgctccat

SEQ ID NO: 832064 - DNA, 120 bp, Artificial Sequence
  ENSG00000268189_13 (sequence is synthesized)
catgagctgcgggcagggcagaaggagctggagaggctgctctgagtgccctacaagttgctgccccgaccctgccagcttagagggaccccaccccgcccctgcacccacgcacttcca

SEQ ID NO: 832065 - DNA, 120 bp, Artificial Sequence
  ENSG00000268189_14 (sequence is synthesized)
gccccaccaacggagggccactccacaagcatggaaccacaacctatctgatctttgttcaaattccctctccttccacaccacacttactgtaggtaaataaaaatacagatctatata

SEQ ID NO: 832066 - DNA, 120 bp, Artificial Sequence
  ENSG00000270321_0 (sequence is synthesized)
ctggaggctccttgagcaaaattatctacctcttcacctttggatctttcacagttcccagttcggtgtactacagattgtacttgctaaataaaaaatcattgtcatggtttacctaaa

SEQ ID NO: 832067 - DNA, 120 bp, Artificial Sequence
  ENSG00000270321_1 (sequence is synthesized)
gagtaacccaatagtgaggaagaaattgatgctgcaggagagagggaataattgccgaagcaaagatcttgaggtactgagaaaggatgaccctaatttccttaatgctgcaccatatga

SEQ ID NO: 832068 - DNA, 120 bp, Artificial Sequence
  ENSG00000270321_2 (sequence is synthesized)
tcaggacgacaggagttgattgacctgcatcaaacattacctactagtctccctcacacaaaacaaagtaaaagaggagaattggaagaaagcaataccactgcagccacactgggtgca

SEQ ID NO: 832069 - DNA, 120 bp, Artificial Sequence
  ENSG00000270321_3 (sequence is synthesized)
agctttgagaattctgggactttgtacacgagtgaaccagagagaacctgtggtgtgctgggaaaacccataggccctgcagaaacatctaattagtgttgattttgagtagaggttctc

SEQ ID NO: 832070 - DNA, 120 bp, Artificial Sequence
  ENSG00000270321_4 (sequence is synthesized)
gcctgaagtgttaataataaaaaaaaaaccctttattccctcccatacactttataaatctacaggattagagaaacagaatcatctagacatttctggtggtaatggaaaattgttcaa

SEQ ID NO: 832071 - DNA, 120 bp, Artificial Sequence
  ENSG00000270321_5 (sequence is synthesized)
ccactctggaaaattgtttggcattttcctataaaactaaacatgaaattaccatatgacccagaaattgcactcctgggcatttatcccagagaactgaaaacttaagttcacacaaaa

SEQ ID NO: 832072 - DNA, 120 bp, Artificial Sequence
  ENSG00000270321_6 (sequence is synthesized)
aacttgtattatccatgttttcaagtttctgtatatgatgttttgacatcttaggccttgttagtaggaagagactgcccctcccacaggtttagcagttggaattcctagagttagcag

SEQ ID NO: 832073 - DNA, 120 bp, Artificial Sequence
  ENSG00000270321_7 (sequence is synthesized)
aaggctttttgactctcattagagtgtacctttcatatgtgtgttagtcccttttcacgctgctattgtctgtatcagcccatttcacgctgctataaagaatatctgagactaggtaat

SEQ ID NO: 832074 - DNA, 120 bp, Artificial Sequence
  ENSG00000270321_8 (sequence is synthesized)
ttacaatcatggtggaaagtgaaaaggaagcaaggcacttcttatacagtggaaggagagagagagtgaacaatgcaagtaccacactttaaaaccatcagatctcgtgacaattcactc

SEQ ID NO: 832075 - DNA, 120 bp, Artificial Sequence
  ENSG00000270321_9 (sequence is synthesized)
tcgtgacaattcactcgctatcacaagaatagcatgggagaaatcacccccatgatccaatcacctcccacccagacccaccctcaacttgtgaggattacaatttgagatgagatttgg

SEQ ID NO: 832076 - DNA, 120 bp, Artificial Sequence
  ENSG00000270321_10 (sequence is synthesized)
aaaccatatcaatatgtaaacaaactgatccaaaatccacacccctgacctgcctgttctttcaggggttcttactcttgtaagacactattcacctgccctaatcaccccaagactaag

SEQ ID NO: 832077 - DNA, 120 bp, Artificial Sequence
  ENSG00000270321_11 (sequence is synthesized)
catcagccagcttcaacaccctgaagcatactgaaattattcatattagccaagagttctaaacttgcttagcccatttgctttagagcaaatgacccatttcttccaagaaaactatag

SEQ ID NO: 832078 - DNA, 120 bp, Artificial Sequence
  ENSG00000270321_12 (sequence is synthesized)
taaaagctttcctgaagtttcccttgctctctctttgcctgcaactgatgttgttgttctctagtatggtcctgtgaggaatgacactctaccctcctcttgggaactttgaataataaa

SEQ ID NO: 832079 - DNA, 120 bp, Artificial Sequence
  ENSG00000270321_13 (sequence is synthesized)
ctttctaatggcaatgtctcctgatctgttgggctcatcatacctgaataaagacaaaaccccaggtatattttaatataaatctgcacatgaatcttcacagtaactttattcatagta

SEQ ID NO: 832080 - DNA, 120 bp, Artificial Sequence
  ENSG00000270321_14 (sequence is synthesized)
gccataaaactggaaataactcagatatccttcgaagattgaatggttaagcaaaccaccatatccagccatggattattactcaacaataaaaaggaacaaactattgatacatgtaac

SEQ ID NO: 832081 - DNA, 120 bp, Artificial Sequence
  ENSG00000270321_15 (sequence is synthesized)
aatttgggcgaatttccagaattactctgaatgaaaaaaaaaaaaagccaaatctaaaaggctacatactatatgattccctttacataacattcttgaagggacaaaattatagaaaag

SEQ ID NO: 832082 - DNA, 120 bp, Artificial Sequence
  ENSG00000270321_16 (sequence is synthesized)
aagagattagtggttgccagggcatgggcagggcagaaaagaggtggatgtgaacgtaaagagcagcatgagggatttctgtggtgataaaactgttctgtatcttgactgtatcaacac

SEQ ID NO: 832083 - DNA, 120 bp, Artificial Sequence
  ENSG00000270321_17 (sequence is synthesized)
caagatcctaggtataatattgtattatatctcggagaaatgttaccactgggtgaaattgagcaaagggtagacaattgtatgtgaatctgcaattatttcaaaataaaaattgtaatt

SEQ ID NO: 832084 - DNA, 120 bp, Artificial Sequence
  ENSG00000270403_0 (sequence is synthesized)
ttggttgtttttgtgcctcattatgctatagcccagcgggtacctgggaggctggccaggtccctctctaattgcaggatgctggcaagtgagcccaggcaggcacctgtgccagtccct

SEQ ID NO: 832085 - DNA, 120 bp, Artificial Sequence
  ENSG00000270403_1 (sequence is synthesized)
caggcagagagagcttgccctccctgactctcctaccaatgctccagctctagcttccatctgactgcaaagcaacctggtctcacaccagccacttctgctgctcaatgccatctcctt

SEQ ID NO: 832086 - DNA, 120 bp, Artificial Sequence
  ENSG00000270403_2 (sequence is synthesized)
ccggctgttcctgctgcttcaaagagtggggagtagagagaagagaagcgaggtgcgaacaatagccaacttgcctaaaactctgatgctggagttaataaaaagaaatgaacccattca

SEQ ID NO: 832087 - DNA, 120 bp, Artificial Sequence
  ENSG00000254050_0 (sequence is synthesized)
ataagatttctttgtgcccactgtgcttcaacatctttaaggaaaagtatatattttttgtttctatgtctgcttggtgatttctggggtttgatcacatgaatgaagatcttttacacc

SEQ ID NO: 832088 - DNA, 120 bp, Artificial Sequence
  ENSG00000254050_1 (sequence is synthesized)
tttctgtatcctaattgaaagtgggattccactacatttccaaggagcttaaaatctgactgaagaccacaacaacattaggttggaaatgccaggtgacaagtaagtcatgaggacaac

SEQ ID NO: 832089 - DNA, 120 bp, Artificial Sequence
  ENSG00000254050_2 (sequence is synthesized)
ttgctcgatacaaaacagtgacacaggtttttacagtcttcctttgttcaagtataagaaatgatgatggctctaccttcaggaaagtgaaacgaataagatttttctattgctgccaaa

SEQ ID NO: 832090 - DNA, 120 bp, Artificial Sequence
  ENSG00000254050_3 (sequence is synthesized)
taaatgaaaatgataaatgatcgtgtaaaaattgacaaatctcaagcaatagacttttaaccatgtttatttgaagcaacttgctgtacttcagtgcacaattacaaatcatcctttcaa

SEQ ID NO: 832091 - DNA, 120 bp, Artificial Sequence
  ENSG00000272870_0 (sequence is synthesized)
ttttttttttttttttttttttcagtaccgggaaaacaggagcgtgtgattggggtttacagtgttttctctcgctctctctgtttctagggaattcgggctgtgtttagctgctggaat

SEQ ID NO: 832092 - DNA, 120 bp, Artificial Sequence
  ENSG00000272870_1 (sequence is synthesized)
atcgtagaattggttttcagagaagttcctcgactcctgaggcgaaacataaagggatgggagtggtgtgggaagtgatcgtgtggggaaaaaaaagtttcgagcccgtttcgcatttgt

SEQ ID NO: 832093 - DNA, 120 bp, Artificial Sequence
  ENSG00000272870_2 (sequence is synthesized)
ggagacagagtttttggtgtgaccactcttttgtgggaaacccaaaccaaggagaactcaggagaattggcgctcttcggtcctggaggttccgcagctaacatcccggcttgaccaact

SEQ ID NO: 832094 - DNA, 120 bp, Artificial Sequence
  ENSG00000272870_3 (sequence is synthesized)
acatcccggcttgaccaactatcgaggccgcaaattaatagggcacctcctgggaggaaaacgcccatcctgacttctcaactgtgacagtttgctctgtcgcccaggatggagtgcagt

SEQ ID NO: 832095 - DNA, 120 bp, Artificial Sequence
  ENSG00000272870_4 (sequence is synthesized)
gcgccaccccacccagatgatctttttaaatgcaaaatgccatcgacgcagaaaatcaaagaatcagcttaagttccagaaaaaagaaaaaccaaccaaatgaacaataagacaacaaca

SEQ ID NO: 832096 - DNA, 120 bp, Artificial Sequence
  ENSG00000272870_5 (sequence is synthesized)
acaacaacaaaaaaggccttttgggattttggatgatattgcatcaaatccatacattaacctgagagacgagcgacttcttcaacattgagccttccaatcatgattttcaattcattt

SEQ ID NO: 832097 - DNA, 120 bp, Artificial Sequence
  ENSG00000272870_6 (sequence is synthesized)
aggtcttctgtaatgtttcttaatataattgtatttgttgctatgcagaagtttcactgatcttttattatatctctatatatatttgatatttctgacactattgtaaatagtatcttt

SEQ ID NO: 832098 - DNA, 120 bp, Artificial Sequence
  ENSG00000272870_7 (sequence is synthesized)
aatagtatctttttaatatttcattttccttttttgttgcttaaatatatataaaataagctaattttccaaactaatttttatatccagcaaccctgctaaaatttcttatccaataaa

SEQ ID NO: 832099 - DNA, 120 bp, Artificial Sequence
  ENSG00000272870_8 (sequence is synthesized)
gagagagggatgggcgtggctaatatgaaagctgcatctttactagttagctaccatgcgtcattatttatcaaaagatatatgctgcttaaacacaaatacgttttaaaatatatttta

SEQ ID NO: 832100 - DNA, 120 bp, Artificial Sequence
  ENSG00000272870_9 (sequence is synthesized)
atattttaggcagtagggttttgggttttttttttgcaagttcttttggtgagtaaatttagtgataaatgatttttttttcttttgagacagtttgctctgtcgcccaggatggagtgc

SEQ ID NO: 832101 - DNA, 120 bp, Artificial Sequence
  ENSG00000272870_10 (sequence is synthesized)
ccatcgacgcagaaaatcaaaggtatccattgtatctgtgcgtttgagttctaggatatgacaaagaaaaacaatttaaatattacgtaaattcagtaggaaaaagaaagatgatgactg

SEQ ID NO: 832102 - DNA, 120 bp, Artificial Sequence
  ENSG00000272870_11 (sequence is synthesized)
ataagtacattgtgtacctccttaagctgtgctgtccagtaggctgtcctctagccatatgtggctactcagcacttgaaatgtggttgagacggaaaaactgaatcgttaattgaattt

SEQ ID NO: 832103 - DNA, 120 bp, Artificial Sequence
  ENSG00000272870_12 (sequence is synthesized)
gaattaaacaaaaaccaaaaacctgatgctcgattcaattgttggaatacttttaagtgtgtttgcaacaactcagatatatgaatctgtttttccaacttaaattttatgaactctaac

SEQ ID NO: 832104 - DNA, 120 bp, Artificial Sequence
  ENSG00000272870_13 (sequence is synthesized)
tttagcatatgaattgagatgtgctgtaagtatatatcagctggactttttttttatttctggacttactacaagaaattttcaaaaagaatattgaagtgcacattaaaaatttttata

SEQ ID NO: 832105 - DNA, 120 bp, Artificial Sequence
  ENSG00000272870_14 (sequence is synthesized)
tatgtttaaatgttttggatgtaatgggttaaacaaaatattacaataaattgtacctgttgcattagataacactggcttaaagtattacaacacagtagggcgtggtggctcacgcct

SEQ ID NO: 832106 - DNA, 120 bp, Artificial Sequence
  ENSG00000272870_15 (sequence is synthesized)
ccctgtctcaaaaaaaaaaaaaaattacaacacagaataattatatatttatggatacatgttatatatttatggatacattttcttaagtggtaaaaatgagaatatatggatgggatg

SEQ ID NO: 832107 - DNA, 120 bp, Artificial Sequence
  ENSG00000272870_16 (sequence is synthesized)
atgggatgatacatcccaacttcagggtgatgctcatctccaacgaaggaggccaaggaatttgtatatggtgtcagagtaaacataaaatataaagagatgaatttctaaatttaatgg

SEQ ID NO: 832108 - DNA, 120 bp, Artificial Sequence
  ENSG00000272870_17 (sequence is synthesized)
ttttttggggaagcaagaattgcagttcaggacatacacacagactgagtggtctttagtatgtcagaagaacaaagagaaggtcgagagttttattagaaagagaaatgttgctactgt

SEQ ID NO: 832109 - DNA, 120 bp, Artificial Sequence
  ENSG00000272870_18 (sequence is synthesized)
tttgaaagaaggttcattggcactatagtaaagttttgggaagctggcaagctctgattggtgagtgagagtggtagataaaaccagtcttagtcataggagattgtttcagcaactact

SEQ ID NO: 832110 - DNA, 120 bp, Artificial Sequence
  ENSG00000272870_19 (sequence is synthesized)
cggtaaaactggtcttagagttactgcaggccgtttcagcagctgggttgtaaaaaacttaattcttaatgctagagctgtgtgccctgattgctttctcccctggtccctcgattctga

SEQ ID NO: 832111 - DNA, 120 bp, Artificial Sequence
  ENSG00000272870_20 (sequence is synthesized)
tttagttgggtatgacaagaatgatccagattgtatgatcaattttcacactgggaatggcttaaagatggtttcttctgaattttaaagtttttatttattaaaaatatctgaaacatg

SEQ ID NO: 832112 - DNA, 120 bp, Artificial Sequence
  ENSG00000272870_21 (sequence is synthesized)
gagtagctgggattacagacgcgcgccaccccacccagatgatctttttaaatgcaaaatgccatcgacgcagaaaatcaaagacaaaatcttgctctgtctcccaggctggagagcagt

SEQ ID NO: 832113 - DNA, 120 bp, Artificial Sequence
  ENSG00000272870_22 (sequence is synthesized)
cttggctcactgcaacctccacctcttggttccagcaatccttctaccccagcctccagagtaggcgggattacagacaactgctccggcttttccttccactatgattggaagcttcct

SEQ ID NO: 832114 - DNA, 90 bp, Artificial Sequence
  ENSG00000272870_23 (sequence is synthesized)
ctaaacctcttctctttataaatatcccagtcttaggtatttctttatagcaatgcaagaacgaactaatacagaatgtgttttcaagaa

SEQ ID NO: 832115 - DNA, 120 bp, Artificial Sequence
  ENSG00000272870_24 (sequence is synthesized)
caatgcaagaacgaactaatacagaatgtgttttcaagaaatttgtctgtttcatctgaattttcaattggattgactatgatatttctctttttttgtttgttcatttttgatgagggg

SEQ ID NO: 832116 - DNA, 120 bp, Artificial Sequence
  ENSG00000272870_25 (sequence is synthesized)
atcttactatgttgctcaggctggttaaaaactcctagactcaaccaatcctcccatttcagcttcccaataggtggtaggatttctagttatcttgatttgttgagtcttttatgaaat

SEQ ID NO: 832117 - DNA, 120 bp, Artificial Sequence
  ENSG00000272870_26 (sequence is synthesized)
attctttttgtttttagtagtattatcgaaacaaatttgactttgtctgctattagagaagtcatatcagctgtctctggttagtgtttttatgataaacttttttccatcctttttctt

SEQ ID NO: 832118 - DNA, 120 bp, Artificial Sequence
  ENSG00000272870_27 (sequence is synthesized)
gggtttttgattttgtaaccagtctgacaatcttggtcttggtatacttactcaatatattcgaagttaaaactaccacattacatttattttatatttgttctatttgtcctatttcat

SEQ ID NO: 832119 - DNA, 120 bp, Artificial Sequence
  ENSG00000272870_28 (sequence is synthesized)
tttcttctttcccactttaacaaattatttttatctttcaatgcccccctccagtagcttgttattatagtttttaaaattaaacttttactcttaattgcatattgtcatacagttgta

SEQ ID NO: 832120 - DNA, 120 bp, Artificial Sequence
  ENSG00000272870_29 (sequence is synthesized)
agaagcattacagagagacactgtgtctttaccccattttctccaatgacaatattttgcaaaactgtagtacagtatcataaccaggaattgacattgatacagtcaagatacagaaca

SEQ ID NO: 832121 - DNA, 120 bp, Artificial Sequence
  ENSG00000272870_30 (sequence is synthesized)
tttccatcaccacaaggatccctcaaattgcccttttattgcctcacccactccctcccgtccccactgccttctgaacacctggcaaccactaagctgttctttatttctataattttg

SEQ ID NO: 832122 - DNA, 120 bp, Artificial Sequence
  ENSG00000272870_31 (sequence is synthesized)
gcaaccactaagctgttctttatttctataattttgtcatttcaagacaaaatatacaaaaaggcatgggcttatatagtatgtaacctttggaattttttttcttttttgagacggagt

SEQ ID NO: 832123 - DNA, 120 bp, Artificial Sequence
  ENSG00000272870_32 (sequence is synthesized)
aatcgttgagttttccttcattttttattcccttttttcttgtgctactacaggttcaggactctagaacaacattataaaagaggtgttagcaggcaaaaatgtctcatttccagtttc

SEQ ID NO: 832124 - DNA, 120 bp, Artificial Sequence
  ENSG00000272870_33 (sequence is synthesized)
aaaagaaaggcttttcatgtttcgctattatgtatcatgtctgatacagatttttttgtttttcatctaaatttttataccatttatatgttcataacaacctcatgtttttaaggtgtg

SEQ ID NO: 832125 - DNA, 120 bp, Artificial Sequence
  ENSG00000272870_34 (sequence is synthesized)
caagatctgacccagtgtccctatcttcatcatcaattattagtgccttctctcttttgttaatcagtctcaccagtgttctatcaattttattaggcttttcagaggacctgaattttg

SEQ ID NO: 832126 - DNA, 120 bp, Artificial Sequence
  ENSG00000272870_35 (sequence is synthesized)
gaggacctgaattttgtacatagtttttattgtatttttttctatttcaattattctattttctttattatttctttctactttctattttgctgttcttttactaacttctttacaaat

SEQ ID NO: 832127 - DNA, 120 bp, Artificial Sequence
  ENSG00000272870_36 (sequence is synthesized)
acagatttctccatcaatattgttttaactgcatcacacaagtcttgatatgtattattaccattgaatttaaaacatcatctaattttcctatcatttttttgatgcatagatttagaa

SEQ ID NO: 832128 - DNA, 120 bp, Artificial Sequence
  ENSG00000272870_37 (sequence is synthesized)
ttcttttttcttttttttttttttgaaatagagtctcactctgttgcccaggcaagagtgcagtggctctatcactactcatgacagcgtcaacctccccaggctcaggtgattctccca

SEQ ID NO: 832129 - DNA, 120 bp, Artificial Sequence
  ENSG00000272870_38 (sequence is synthesized)
agcctcccaaatagctgggactacaagtgcagactaccatgctcagctaatttgttttttgtgtgttttttatagagacaaggtttctccatgttgctcgggctggtctccaactcctgg

SEQ ID NO: 832130 - DNA, 120 bp, Artificial Sequence
  ENSG00000272870_39 (sequence is synthesized)
ggctggtctccaactcctggacccaagccatctgccagcctcccaaagtgttggcattacaggtgtgaaccatggcacccagcctagaagtaggtttcttatttccaaacatatgcaaat

SEQ ID NO: 832131 - DNA, 120 bp, Artificial Sequence
  ENSG00000272870_40 (sequence is synthesized)
aatgtgattatccttttcttattgatttcgaacacatataaattgtcactttagaactctgtatgatttaaatcctttaaaatttattgagggtttcttttaacttatcttccagtcact

SEQ ID NO: 832132 - DNA, 120 bp, Artificial Sequence
  ENSG00000272870_41 (sequence is synthesized)
cattatctctttaggtgtccctaacctgctctaaaattcacccgtagtctttgtacttttagttattacattttttagttttataattcctatctggttctttttaaaaccttgaatgtc

SEQ ID NO: 832133 - DNA, 120 bp, Artificial Sequence
  ENSG00000272870_42 (sequence is synthesized)
acttttttatgatttctagttcctggacaaaatttatatgcttgactttttctttcatgaacatagtaagcatagtagtttttagactttgttattaagtctgtttcttttgtctattgt

SEQ ID NO: 832134 - DNA, 120 bp, Artificial Sequence
  ENSG00000272870_43 (sequence is synthesized)
ttctcctggtggctgtctcatgcttactcttcctgcatccattaattttgattgtttgcagttcatttaattggaaaaactgatttaatataaacaatttgaagcactggatgatgtaat

SEQ ID NO: 832135 - DNA, 120 bp, Artificial Sequence
  ENSG00000272870_44 (sequence is synthesized)
gttcctatagagaggcgcttcttttccttccattgggtgctaaagggtgccagtagtcctgaatcaatgcttgaggatttctgagccaaccagatcattctagtccctctccccactttt

SEQ ID NO: 832136 - DNA, 120 bp, Artificial Sequence
  ENSG00000272870_45 (sequence is synthesized)
ggcctaggcttcccagggttctatcccagagtaggaggtgtttcactagggttaccaccatcaaggtatactggattccaaccctacatcaaagtgactgccacacgctcagctcttcct

SEQ ID NO: 832137 - DNA, 120 bp, Artificial Sequence
  ENSG00000272870_46 (sequence is synthesized)
cttacttcctattttaagtcacttggttataactagtacagtatatagtaaaataacatctgcattctgatactattcatagtcttaacattttgctcagcatatctctgtggcttttac

SEQ ID NO: 832138 - DNA, 120 bp, Artificial Sequence
  ENSG00000272870_47 (sequence is synthesized)
cttgattttgttctcatgagagagtgaggcataaaaaagatggagatgtagttcccaggtaatgctggaacttgctctgggtacaaaattatttgtgactgactagcaaaatagaatgtt

SEQ ID NO: 832139 - DNA, 120 bp, Artificial Sequence
  ENSG00000272870_48 (sequence is synthesized)
ccagaactaaaatgagaattattatagcattctctcacccataatccacctagattggaatacgttctcaaacacttctgtacagtgttccagttacttgggttcaggagaaacattttg

SEQ ID NO: 832140 - DNA, 120 bp, Artificial Sequence
  ENSG00000272870_49 (sequence is synthesized)
actaacaatcttctttttagtataccagaataaaacgttgaaagcacctcactgaggtgctttcattttaattaaagaaaaaaatctacactatatgctgcaaatgactttatataaaaa

SEQ ID NO: 832141 - DNA, 120 bp, Artificial Sequence
  ENSG00000272870_50 (sequence is synthesized)
ctgctttgggatattaccttctatagttatagccttggtgtcattgcagatgggaacatctacataactgactctaagtgggctactgacaactataacattcttcttcattatctgaag

SEQ ID NO: 832142 - DNA, 120 bp, Artificial Sequence
  ENSG00000272870_51 (sequence is synthesized)
ccaataatcagagtacttccctagaatttcttcatattttttgaaaacatggaacagaaatgaattatattagcattctaaaagaatatgaggtctgcttagttttgaaagttttcattt

SEQ ID NO: 832143 - DNA, 120 bp, Artificial Sequence
  ENSG00000272870_52 (sequence is synthesized)
cttctcctgaaatctatccagagcaaccaagaaaatgaaaataaattcatagaaactgaactttcagcaaatagctaagaaaactccaaaactccaaaattaaatgtgaatgctgcaata

SEQ ID NO: 832144 - DNA, 120 bp, Artificial Sequence
  ENSG00000272870_53 (sequence is synthesized)
ggcaactgaggacagcaagcccacataggaaatcaagacaatatgggaaagtactggaagtggggaaggagtttagtggtggctgtaccctaaaaacaaggctgcgactgaataggctcc

SEQ ID NO: 832145 - DNA, 120 bp, Artificial Sequence
  ENSG00000272870_54 (sequence is synthesized)
aaacattgggaagggagagagagaaggacagaagctgcccaatcagagattgcagaccttagaaagcaccagtaaaataacttctaaaagcagtatcatcatcttagaaggcaatatctg

SEQ ID NO: 832146 - DNA, 120 bp, Artificial Sequence
  ENSG00000272870_55 (sequence is synthesized)
tgtccctgcagcctgtgaataaatcaggaagcccaggactgtgtgtagaagctctttggaaccaggttcagttctgagaggcagagtaggtgttcacagagtttaagaaaagagtcgtct

SEQ ID NO: 832147 - DNA, 120 bp, Artificial Sequence
  ENSG00000272870_56 (sequence is synthesized)
tctatagcaacagaagagggagccctcgagagatgaattttataatgctatcctaatctttcttttcacctcctgttagtagtccaggaaaatttcactaatttaaattcaaagattatg

SEQ ID NO: 832148 - DNA, 120 bp, Artificial Sequence
  ENSG00000272870_57 (sequence is synthesized)
aaagtcatatgcagaacatctattcaaaattataataaaaaaactgtgaaacggagtagcacgattttcctgcagaagatgaaaatttaccagaaaatggttgtcataaaacaaatgaaa

SEQ ID NO: 832149 - DNA, 120 bp, Artificial Sequence
  ENSG00000272870_58 (sequence is synthesized)
tttataactcaacattccaacgtgaatttgaaaaacttaaggaagcaatcacaggtatgaagtaaaatcatgaaaagtaatatatttgactcagcagggagtcagacaataggttattaa

SEQ ID NO: 832150 - DNA, 120 bp, Artificial Sequence
  ENSG00000272870_59 (sequence is synthesized)
tacctacttttataggaatatattcagagaattgattattttggtattttagaagtgcgtagcaaagaattaaccttacccaaaaagaagtctggcctttgtccttgtatcctaggaggt

SEQ ID NO: 832151 - DNA, 120 bp, Artificial Sequence
  ENSG00000272870_60 (sequence is synthesized)
gatctctaggaagagtggctttgtttacctgggagcctttagctacactggatggtgtaagaatgtgatttatgatgtggtctttgggccatgagatagccagtctacctccagaggggc

SEQ ID NO: 832152 - DNA, 120 bp, Artificial Sequence
  ENSG00000272870_61 (sequence is synthesized)
tagccagtctacctccagaggggctgcagactaaaatttcctggactctgctctatgcaccaattcccttggaatcagcatccttttttcccccttttacacacacacacacacacacac

SEQ ID NO: 832153 - DNA, 120 bp, Artificial Sequence
  ENSG00000272870_62 (sequence is synthesized)
tgcttttgttgtaataaaccataactgtgaatataatagttatcagtgagttctctcggtccttcaagtaaattaccagacttaagggtagtcctggtgtgtccagaatttattccttct

SEQ ID NO: 832154 - DNA, 67 bp, Artificial Sequence
  ENSG00000272870_63 (sequence is synthesized)
ttgtggtctcgctgacttacgtccagagttgttcgttcctcctggtgggttcgtggtctcactgact

SEQ ID NO: 832155 - DNA, 88 bp, Artificial Sequence
  ENSG00000272870_64 (sequence is synthesized)
cgtccagagttgttcgttcctcatgaagccacagacactcgcagtgagtgttacagctcataaaggtggtgtggacccaaagagtgag

SEQ ID NO: 832156 - DNA, 76 bp, Artificial Sequence
  ENSG00000272870_65 (sequence is synthesized)
agagtgagcagcagcaagatttattgtcaagagcgaaagaacaaagcttccatggaaggggacctaagcatggccc

SEQ ID NO: 832157 - DNA, 79 bp, Artificial Sequence
  ENSG00000272870_66 (sequence is synthesized)
tcttacaaaacctttagctaaacacagacgttgattggtgtgttttttacaaagtgctgattggtgcgtttacaaacct

SEQ ID NO: 832158 - DNA, 120 bp, Artificial Sequence
  ENSG00000272870_67 (sequence is synthesized)
aagtccccacctgacccagaagcccagacagattcacctctcactgggaaccctgaactcttaagttggggtcagaagtgaaggtgatctcttgtggattgctcccctaactttgaagga

SEQ ID NO: 832159 - DNA, 120 bp, Artificial Sequence
  ENSG00000272870_68 (sequence is synthesized)
tgatctcttgtggattgctcccctaactttgaaggaaacttttgaagttttgctacaaaatatgtaatcagattttataagtattgcttgtttataaggtatattttgggtttgtacaca

SEQ ID NO: 832160 - DNA, 120 bp, Artificial Sequence
  ENSG00000272870_69 (sequence is synthesized)
acagaccccattgagtagatatgtggactactatttgtgtgtttctgataatttttcttgtaaaaccaataatccttgctacatttattttaatgccatgttatctttaatatggaagat

SEQ ID NO: 832161 - DNA, 120 bp, Artificial Sequence
  ENSG00000272871_0 (sequence is synthesized)
ttctttaaatacttaaacatggttataacagctgtgttttaagctccttgtctgttaattccatcatctgtcatttttgcatctgtttttattgactaactttcttcctcatcatggtca

SEQ ID NO: 832162 - DNA, 120 bp, Artificial Sequence
  ENSG00000272871_1 (sequence is synthesized)
catatccttgcttcttcccatatttagtaaagtttagttggatgctggattgttttaatttagcattttggagtgactgcttttgcacttgcctttaaaagtattggacttcgttttgat

SEQ ID NO: 832163 - DNA, 120 bp, Artificial Sequence
  ENSG00000272871_2 (sequence is synthesized)
agttgaattacttgcaaatcagcttgatcattctgagacttgtttttaacttttgtcgaaaaggctatgctacttcaagtataataaaacctagttttagttttatcctataactaaggc

SEQ ID NO: 832164 - DNA, 120 bp, Artificial Sequence
  ENSG00000272871_3 (sequence is synthesized)
atgtgttcaatttgaatgtctccaaccctgtgtgaactctgaaaattgttcagctcccaatttcgcagtaatttttttttgttcagccttgcagtctcatcctactcaagtgtggctctg

SEQ ID NO: 832165 - DNA, 120 bp, Artificial Sequence
  ENSG00000272871_4 (sequence is synthesized)
tatccaacaacagtcttggagatctcatgaagatttctgaaacttttgctctgcaggataccttcctttgtggttatgtgccctgaaaactccagcctccgtgtcttcaattcagtgaaa

SEQ ID NO: 832166 - DNA, 120 bp, Artificial Sequence
  ENSG00000272871_5 (sequence is synthesized)
aatttcaggagtcacctcatttattttcctttttttcagggattatagtagtactataccacctgtcagccaatgtgtgagaatggtggtttcatacattttctccaattctttcttgtt

SEQ ID NO: 832167 - DNA, 120 bp, Artificial Sequence
  ENSG00000272871_6 (sequence is synthesized)
acaggagcctccattacttttcaaacagtaatgcagttgcagttgcctctccttttcttcattatgtgtttatctctggcagtttgagccaagagagggcacggagaagtacaatgacta

SEQ ID NO: 832168 - DNA, 120 bp, Artificial Sequence
  ENSG00000272871_7 (sequence is synthesized)
gagagcacttctgttgaggctcattcattgacccctaccccagtgctttatgaatgtgtgctgcagatgtcatacagcatcacagcttcttctctaatttatgagccataattttttttt

SEQ ID NO: 832169 - DNA, 120 bp, Artificial Sequence
  ENSG00000272871_8 (sequence is synthesized)
ttgtatttttattgtattacctgcttggttgcaagaggatgatgaggaggactactataggataaatttgtttttatagagcaatttctcatgggtcacgagggatagtactccattttc

SEQ ID NO: 832170 - DNA, 120 bp, Artificial Sequence
  ENSG00000272871_9 (sequence is synthesized)
ctcactgatatcggcttgatcatctgagtcagtgggctcattgtggaaacatatggaatcctttatgctttttctcaggctgcttctgttacatgaaataaagccagagttgattgtgaa

SEQ ID NO: 832171 - DNA, 120 bp, Artificial Sequence
  ENSG00000272872_0 (sequence is synthesized)
gcgtaagaacaatagaccatgggcatggatggccgagtctggggatcagcatcgtaatttgttgagaaggaggccgtgctgtgctgccagttattaattggtttaatcggttgatacaca

SEQ ID NO: 832172 - DNA, 120 bp, Artificial Sequence
  ENSG00000272872_1 (sequence is synthesized)
gccctactggcctaaccagtagcccagggccctggaggatttgcaggtcgtgtcagaatttgattgcagttccttccacttggcataaggagacactatcagcctgattgggagggtgat

SEQ ID NO: 832173 - DNA, 120 bp, Artificial Sequence
  ENSG00000272872_2 (sequence is synthesized)
atcaaaagcactggtatgggctgtctatctgtgctggaacctgagtttatctttgtctgcaattacgattcttctgggtttattttgccagctcattatccagccccctggaatcaggcc

SEQ ID NO: 832174 - DNA, 120 bp, Artificial Sequence
  ENSG00000272872_3 (sequence is synthesized)
tcccaaatttagcaggtgctggggaggaccctagggagtggtttatgggggctagctggtgaaactgccctttcctttctgttctatgagtgtgatggtgtttgagaaaatgtggggcta

SEQ ID NO: 832175 - DNA, 120 bp, Artificial Sequence
  ENSG00000272872_4 (sequence is synthesized)
tggttcaggcgcacttcacatgtgcaaagatggagaaagcactcacctacacgtttaggctcagaatattgattgaaacattttgaatgatcaaaaataaaatgttatttttaaagtttc

SEQ ID NO: 832176 - DNA, 120 bp, Artificial Sequence
  ENSG00000277801_0 (sequence is synthesized)
ttcctccacattttcaccatggcagtattaagtagtgagtgtgaatgacacagcatgaaactggttactgaatcagctatgagctcagatggcctcaacatacatactcaagaaatgttg

SEQ ID NO: 832177 - DNA, 120 bp, Artificial Sequence
  ENSG00000277801_1 (sequence is synthesized)
catgtttaaataactgagagtgtgctaaatctcatctaaaaaaaaggaggagaggggctggggaactcaggccacagtcatgaaaggatgaatacaatttctaggtttaataggttcacc

SEQ ID NO: 832178 - DNA, 120 bp, Artificial Sequence
  ENSG00000277801_2 (sequence is synthesized)
atatcgaagtctttgagaatccaatatggaatatcaattattttgcaaaaggtagagaaagcagttctcaacttttgcaaatgaaatacagtggaaaaacactgttgtatatattccaaa

SEQ ID NO: 832179 - DNA, 120 bp, Artificial Sequence
  ENSG00000277801_3 (sequence is synthesized)
caaggtgcagcaccatagacacatcggtttcggctgttaaaagatggatcgttttaaaaactgtgttttccttccttaatttttggtcagtgaagctagcacttgtttgctgaactgtgg

SEQ ID NO: 832180 - DNA, 120 bp, Artificial Sequence
  ENSG00000277801_4 (sequence is synthesized)
aagaactgcaaggtcacacacattattcatgataaagcaaccgagctgacgagtctgtgcttaattcaagaataaccagtaggagagagagaaaacacaaggagttaaccaccatcgccg

SEQ ID NO: 832181 - DNA, 120 bp, Artificial Sequence
  ENSG00000277801_5 (sequence is synthesized)
gtgctctctcaaaggaagaggggttaacagatgaattcacaaaggtaggcagatctatacagaacactgaatgccatgtgtaaatcctcatgaaactccagaaacaggaacaccacacaa

SEQ ID NO: 832182 - DNA, 120 bp, Artificial Sequence
  ENSG00000277806_0 (sequence is synthesized)
ccataagaatacgttttttggaaagtggtatatggcagtatgtataaggtacaactgttcaacctggaaatcataggatagaaaattacaacattaaaactctgaaaattagtagattac

SEQ ID NO: 832183 - DNA, 120 bp, Artificial Sequence
  ENSG00000277806_1 (sequence is synthesized)
atggatgatgtcacttaattttaaaatggaaagaacaagtgttcaaccacaggaatttgtatgaagtgcatttattaatataaaaacacaaagccagtaaaatgatgacatagatgtaca

SEQ ID NO: 832184 - DNA, 120 bp, Artificial Sequence
  ENSG00000277806_2 (sequence is synthesized)
aaatcctattgtagccttcataacaaactaagtgtctttgtgtttctgggtttgtttatttggttatttttagtgtgtatgtacatcatttgtggatgaatattctgacattttccctgg

SEQ ID NO: 832185 - DNA, 120 bp, Artificial Sequence
  ENSG00000277806_3 (sequence is synthesized)
caatgagtatttgctggaatttttcattttataattttatgcattttaaatttctcattgaacaccaattttaccaaagcagttatgtgatgaaaaatttgaaaaattattaatattaat

SEQ ID NO: 832186 - DNA, 120 bp, Artificial Sequence
  ENSG00000277806_4 (sequence is synthesized)
cacttacctataaggactctgaataagattgctctacattgtcatatgacagttcaaaattaaggaatagggatgtggaagtcatatttcaaaataaaaaaatgtatctggtcacctgga

SEQ ID NO: 832187 - DNA, 120 bp, Artificial Sequence
  ENSG00000288068_0 (sequence is synthesized)
gttttttttttttttttttttttttgccacgatgttgatgatggcgatgacaatattaataatagcagcagctaaccctgattgagcccttcccactcttcaagccctattctaggcttt

SEQ ID NO: 832188 - DNA, 120 bp, Artificial Sequence
  ENSG00000288068_1 (sequence is synthesized)
acaagtatgaacactttaaaatcaaacagccctttggggaaggaattagtatcactctagttttataaatgaggaagctgaggcacaaagaggtaaagcaattttctctctcagtgtcaa

SEQ ID NO: 832189 - DNA, 120 bp, Artificial Sequence
  ENSG00000288068_2 (sequence is synthesized)
gagtggtaagtattggagccataatttaagtcaggccgtctgacttcagagtttatgctctcaaagactttattaaactgcctttaatgtatattaacataatggttaacattattacac

SEQ ID NO: 832190 - DNA, 120 bp, Artificial Sequence
  ENSG00000288068_3 (sequence is synthesized)
catttacagatcaaggaactgcatcctgatgagattaagcaaggtcacaaggctagtaacaagcaaaattagatctcaaacccgagtgtctgactccaaagcccatgctcttaaacacta

SEQ ID NO: 832191 - DNA, 120 bp, Artificial Sequence
  ENSG00000288068_4 (sequence is synthesized)
ggtgtgcctctttcttgtcataataacttcctcaccttagacttgctaaaaataaatctccaacagagagctaaaaaagctgtatttctaactagcacacaagtttaaaaatcactatca

SEQ ID NO: 832192 - DNA, 120 bp, Artificial Sequence
  ENSG00000288068_5 (sequence is synthesized)
gtggtcaaagttaaggtactttggaatcaaacagtatagagcgtgggatcctgggcctatcacgtaacctctttaagcctcatttctctaacacagggatagtaattatgtgtaatgaga

SEQ ID NO: 832193 - DNA, 120 bp, Artificial Sequence
  ENSG00000288068_6 (sequence is synthesized)
gctcgcatgtgttaactgcttactgctacccaagcccagtgcttcatgggcatgaccacgtttgattgaagtacccatctcatcaggttgtagtgagagttaagtgggtaacacaagcaa

SEQ ID NO: 832194 - DNA, 120 bp, Artificial Sequence
  ENSG00000288068_7 (sequence is synthesized)
cttgctgccacagtatctgcagccagtagacacccaagaagtgtcgactggctactgtgaggactcttggccctttttgtgttcacctcccttctgggtaggaagcttcctacacctatg

SEQ ID NO: 832195 - DNA, 120 bp, Artificial Sequence
  ENSG00000288068_8 (sequence is synthesized)
atgtgtgtcttactgatttttgtgtctctccagagtctgcctcgtagctggtctccaatcagtctgtataaatctgttgacatgaatgtcaaagtgcatcctctgctaggctttgtgacc

SEQ ID NO: 832196 - DNA, 120 bp, Artificial Sequence
  ENSG00000288068_9 (sequence is synthesized)
cctgagggttttcaggctgacatgagcctcttgccagatttgttcacactgttcccaaattctcccctgaatagtagcaatacatacatattgtacatacatacaacacacacatacgta

SEQ ID NO: 832197 - DNA, 120 bp, Artificial Sequence
  ENSG00000288068_10 (sequence is synthesized)
cattcagtgatgatgtttctgctttagggttaaggggcagtgtgggttgatttttgaaggttttgcagataagaatggacaatttgggcggcttggacaaaccactgtcacaatatcata

SEQ ID NO: 832198 - DNA, 120 bp, Artificial Sequence
  ENSG00000288068_11 (sequence is synthesized)
taaaggaggctgagatgatcgtggccaaggttccagagagtgcttagatgggagacctccctggcttagtcacctgcatttgatttctcacagaggctcatcttgctatgggagtgcttc

SEQ ID NO: 832199 - DNA, 120 bp, Artificial Sequence
  ENSG00000288068_12 (sequence is synthesized)
tcttgctgtcacctataaaatggggtaaccattgccttccacatcaaggggtggcttgaagaccaaaccaaatgatcgcatgctcatggaggcttttgtcaaccattaagctctgcatca

SEQ ID NO: 832200 - DNA, 120 bp, Artificial Sequence
  ENSG00000288068_13 (sequence is synthesized)
gcgcaagacgtgggtcagatgggggttttagttctcaggaaggaggtggtttcttcccactgtggaggcttcctctcccaggactcagggccgcaccttctctaggttctctcctcctgc

SEQ ID NO: 832201 - DNA, 120 bp, Artificial Sequence
  ENSG00000288068_14 (sequence is synthesized)
ttctctgtcattcagcttaagccgggctgagcaacttaacttgcttctgaatcttttcagacccatgttccttatccttgccccctgcttgcagattcttagctaagcttttaacttttc

SEQ ID NO: 832202 - DNA, 120 bp, Artificial Sequence
  ENSG00000288068_15 (sequence is synthesized)
tacctcagtctttctggtgttccggattctactccagcagcgccctgcatcctctggtaagtttcatttggcaatcttgggcagggaccactgcctgagcatgcagccatcttggggcag

SEQ ID NO: 832203 - DNA, 120 bp, Artificial Sequence
  ENSG00000288068_16 (sequence is synthesized)
tgcatgccactcacctcctggagcattctgtcacatgtcttgtctcaggccaacaaaatcccacccttcataagaatttgatttcttttctgacctcatgtcattccataaacatgattt

SEQ ID NO: 832204 - DNA, 120 bp, Artificial Sequence
  ENSG00000288068_17 (sequence is synthesized)
tctggtcccttggggaccctctgaatatctccagctaggggggatctaacccaaactactggaaaacacagcctgctgctgacactaagagctacttctcaggaagctgcaagtgacaca

SEQ ID NO: 832205 - DNA, 120 bp, Artificial Sequence
  ENSG00000288068_18 (sequence is synthesized)
tatgtgcaacacctcagtgaagtccctggcaggtcacacaggagagctctgctccctgccacttcacttccaagccccgggaaagtgtttgaggagcagggactgtctgagcccaagcta

SEQ ID NO: 832206 - DNA, 120 bp, Artificial Sequence
  ENSG00000288068_19 (sequence is synthesized)
ttctgccccatcctaactgatcaatgtactttgtcatctcccccaccattaagaaggttctttgtaatctcccccacccttaagcaggttcttggtaattctccccacccttgagaatgt

SEQ ID NO: 832207 - DNA, 63 bp, Artificial Sequence
  ENSG00000288068_20 (sequence is synthesized)
caggttcttgtattgctcctaactccaccgcctatccccaaacctataagaactaatgataat

SEQ ID NO: 832208 - DNA, 120 bp, Artificial Sequence
  ENSG00000288068_21 (sequence is synthesized)
aagcctgtttggtggactctcttcacacggatgcacttgagaaatttggtgctaaagacccgggtcagagggactccttccggagaccagtcccctgtcctcaccctcactccgtgaaga

SEQ ID NO: 832209 - DNA, 120 bp, Artificial Sequence
  ENSG00000288068_22 (sequence is synthesized)
gaaatttggtgctaaagacccgggtcagagggactccttccggagaccagtcccctgtcctcaccctcactccgtgaagagatccacctatgaccttgggtcctcagaccaaccagccca

SEQ ID NO: 832210 - DNA, 120 bp, Artificial Sequence
  ENSG00000288068_23 (sequence is synthesized)
tatctgatgttgtgagaagacaagactcatacacagagagaacagagagaagctgccatttctgttttagccaagcaggcaagttcccatcaaaataagaggaactccagaaagtaatga

SEQ ID NO: 832211 - DNA, 120 bp, Artificial Sequence
  ENSG00000288068_24 (sequence is synthesized)
tacatacagcccattattaggtgcagagctgagccttgcattcttcagttacctcctccggtggagggcagtgggaagcacctccatttctccatctagaaatgaaagctaccaccagat

SEQ ID NO: 832212 - DNA, 120 bp, Artificial Sequence
  ENSG00000288068_25 (sequence is synthesized)
cttttgcagaagaatatctgcacacacatgttttggagggtcagttaaaattttacccacatgactgaaaatgaattttaagtgttcagaagccaatggaataaggaatctccacatctg

SEQ ID NO: 832213 - DNA, 120 bp, Artificial Sequence
  ENSG00000288068_26 (sequence is synthesized)
tactcagacctattttctgggagtctctagacttctccaagctcaaaggtgggatgcaggaaggaggagagaaacagaattctttctgcatctgggttcccacagtagctgccctcaccc

SEQ ID NO: 832214 - DNA, 120 bp, Artificial Sequence
  ENSG00000288068_27 (sequence is synthesized)
attgcctgttgtgcctcacatgtgccaagctgagtggtggtgccctcaccacgtgtgtctctggtacccagaacagaaagtgagactcttgtgctaaggatgctggaggaggatatgagg

SEQ ID NO: 832215 - DNA, 120 bp, Artificial Sequence
  ENSG00000288068_28 (sequence is synthesized)
gcacaggggcagccatggaggagaggctcctgcccaactcagatctctgccccacactctatggaggacaattccctgctgtcagcagcaggaccccttcagtaggagggagaaagaagg

SEQ ID NO: 832216 - DNA, 120 bp, Artificial Sequence
  ENSG00000288068_29 (sequence is synthesized)
ggacaggaactaccacgtgtccagtgcaacctgctaggggctgtacatgtgatgtctcaatggagcctaacaacattatggggataggtcttaacaggccctttttagagataagaaaaa

SEQ ID NO: 832217 - DNA, 120 bp, Artificial Sequence
  ENSG00000288068_30 (sequence is synthesized)
tgaaaaataggaaaggaagcacattggcctcaggcattaagggatgagccaaagctgtcaattctgtgggtggtggggtgagctggagcctcagaacaataacccccggggggtcattta

SEQ ID NO: 832218 - DNA, 120 bp, Artificial Sequence
  ENSG00000288068_31 (sequence is synthesized)
gggtcatgcacactcagctatttctgcttcaagaagactaattagcattcttttactggaacttgaggaacaaaggaggtggttgagaagaaccaaaacaaccttctgaatgagtgaaaa

SEQ ID NO: 832219 - DNA, 120 bp, Artificial Sequence
  ENSG00000288069_0 (sequence is synthesized)
gacatcattggccattggtaactgaactcaacttccagctcctcttctctctccaaaagtcaggggaaattatgctacagatcagcctaatgggggacccacacctaatagacatacaaa

SEQ ID NO: 832220 - DNA, 120 bp, Artificial Sequence
  ENSG00000288069_1 (sequence is synthesized)
ggacaattagaagagtcgagaagtaaaaagcaaaaaatgaagttttatagaacgaatgaagacaaaaatctgaaccgcacctgaagtggagctgggccttgtcacgaacaaaaacttaca

SEQ ID NO: 832221 - DNA, 120 bp, Artificial Sequence
  ENSG00000288069_2 (sequence is synthesized)
gtgcaaggttctgcagctggctggctttatgaccttgagcttccacttaacctgtccacacttccagttttcatctacaaattgaagggggttgtgcaagcatttgacattctttcagtt

SEQ ID NO: 832222 - DNA, 120 bp, Artificial Sequence
  ENSG00000288069_3 (sequence is synthesized)
gctatgggcagtgaacctatgaacatgacagtgacagcaatggcaagaaacagccgtgaggtcttcttgccatcaggccagagcctcttttcttgctcagactccgctgtggggagcaac

SEQ ID NO: 832223 - DNA, 120 bp, Artificial Sequence
  ENSG00000288069_4 (sequence is synthesized)
cgcacaccagaccctccgacacatcctccgtgtttctgccagctctgccactattcaagttctcctgattttatcagcacctgctcttgttctcccatgcccaggaccactataatagcc

SEQ ID NO: 832224 - DNA, 120 bp, Artificial Sequence
  ENSG00000288069_5 (sequence is synthesized)
cacacaacaggtgcaatacttttgacatattaaatgtgtctaccttcagaatcccccagaaggagactctgtgacagggattcaagcaaaagtagtttatgtgaggtagttggtttcagg

SEQ ID NO: 832225 - DNA, 120 bp, Artificial Sequence
  ENSG00000288069_6 (sequence is synthesized)
aaacacaggcaggaaaggaggcaagtgaacaataaaaggaagacggtcaatgaagggcacattatagcaagtcgccactatgagaaatggcagcttcatctcttggagacactgagaacc

SEQ ID NO: 832226 - DNA, 120 bp, Artificial Sequence
  ENSG00000288069_7 (sequence is synthesized)
agagcaggaccctgcctcagttactcttcctgaaagcctagctagctgaggtttacatcaccacctccggctgtcactggccgtggctgctctcaggagtcaatctcaggcactttcacc

SEQ ID NO: 832227 - DNA, 120 bp, Artificial Sequence
  ENSG00000288069_8 (sequence is synthesized)
tgccaaagagagtccttaggggaagtgttgctactgggcagctggaagtgctgccaggaaatggtaaggaggtgacaggctccaggcaggcaccaacagcacctgcaacaccaccgctca

SEQ ID NO: 832228 - DNA, 120 bp, Artificial Sequence
  ENSG00000288069_9 (sequence is synthesized)
tttttgtttcttaattgtcctgtgtctccttcacacacggagttgatggcagccattgcttcaaagaaagatacagcctaaaataaagactcagggttttgctctgagtttctgatttgt

SEQ ID NO: 832229 - DNA, 120 bp, Artificial Sequence
  ENSG00000288066_0 (sequence is synthesized)
tttctaaaagaaaaggtatatgtaatagtacataatagagtaacaattgtaactcaagtctttttttttcctttttactcaaagcataaaccagacacaatacgttataccagattaaca

SEQ ID NO: 832230 - DNA, 120 bp, Artificial Sequence
  ENSG00000288066_1 (sequence is synthesized)
tgcaacttaaaaagaggttaatgtacatactaagcatggaaattcaccagtaaaatctcatttgtcattttacccccactaccttgacattattcttccatttcataatcaacaaggttc

SEQ ID NO: 832231 - DNA, 120 bp, Artificial Sequence
  ENSG00000288066_2 (sequence is synthesized)
tacttctggtcacctgataaatgccttgcattcctggagcttgacatttcagtcaattatggacacaagaacaatgttacaagcataaagaaaaaatgcatctacgaaacagctgactgc

SEQ ID NO: 832232 - DNA, 120 bp, Artificial Sequence
  ENSG00000288066_3 (sequence is synthesized)
actgctttcaatggaaaggtcctgaagcattatttccctaaacacctaacacatcagcactgaccaaataaaaaccacccaagcactctaaaattctcactttttcaaacattccttgtg

SEQ ID NO: 832233 - DNA, 120 bp, Artificial Sequence
  ENSG00000288066_4 (sequence is synthesized)
tgtaaaattttctaagcatacagagaaacacaagttcacaaaatgataaaaagataagacaaaatttctgcctcttcttgaatgcaaatcttgagtcaaaaccttttattgttttggaaa

SEQ ID NO: 832234 - DNA, 120 bp, Artificial Sequence
  ENSG00000288066_5 (sequence is synthesized)
ttcaaatacaagaaacctaaggttttcttatttgcttgtcaatatgcatagagcccaattggcagggatggagaggggacgggggaaggtgttatacaaacagactaggtggaacccatt

SEQ ID NO: 832235 - DNA, 120 bp, Artificial Sequence
  ENSG00000288066_6 (sequence is synthesized)
tttacctaggcttctctaggacaatatgataaacaagaaagattagtatctactagaagaatttgtcatatttaaaatcaatatgattagtaaaatgtattttaagtacaaattaaaatg

SEQ ID NO: 832236 - DNA, 120 bp, Artificial Sequence
  ENSG00000288066_7 (sequence is synthesized)
tttgcaggtatcacctcatctcatggaaccatagagggatctaagaaaaggctactccaatctaaaggactattttcaagcaaaaatagaggaattctgtgtatcatcaatgaaagaagt

SEQ ID NO: 832237 - DNA, 120 bp, Artificial Sequence
  ENSG00000288066_8 (sequence is synthesized)
ttaggggaagggtatagtacatattacaataatttaaaatcatacgcacatttcactttccatgcacgatgattttaacatgaaacaatgtaactatacatcactgaaaatacaatcaag

SEQ ID NO: 832238 - DNA, 120 bp, Artificial Sequence
  ENSG00000288066_9 (sequence is synthesized)
ctttgccccagaacttacagccactctctatagtcagttaagaaaaaccctggaagaatatatgataaatgtattcagattctattagttttatttgtaagcagattctaaacaaagagg

SEQ ID NO: 832239 - DNA, 120 bp, Artificial Sequence
  ENSG00000288066_10 (sequence is synthesized)
atgaatttgggcacatatacacatgcacaaatgaaatggttcaacatctaaatgatatgacacaaaattaccactatgagaatcaagaggctactcttatgcaagcaacaaacttttact

SEQ ID NO: 832240 - DNA, 120 bp, Artificial Sequence
  ENSG00000288066_11 (sequence is synthesized)
tatgatttcaaacatacagtttaattttctgttaaaactgttttaaaaaacagtactagggttcagttttctagtctcggcatgaactaatgccagggacctatttgaattaggaaagag

SEQ ID NO: 832241 - DNA, 120 bp, Artificial Sequence
  ENSG00000288066_12 (sequence is synthesized)
attaggaaagagacaaaatggtgtgattcgtgcttcattacatcatggtttgttgagggttaggtgaatatcttccatttcaagactttttatttaggccaggcgcggtggctcacacct

SEQ ID NO: 832242 - DNA, 120 bp, Artificial Sequence
  ENSG00000288067_0 (sequence is synthesized)
gctgatcctaggcacaggctccgtgtagctggggttgtggtattcggccacctgtgtgggcttggtggtgtgaagatggagccccagtgctgaaatggtgcaatggctactggccccaga

SEQ ID NO: 832243 - DNA, 120 bp, Artificial Sequence
  ENSG00000288067_1 (sequence is synthesized)
ggaggccacactcctgaggtggcttcagtcttaagatggcactgtgctgcagcagcttggctcattcagaggttctctggaccttctttcggatgcttccagttccacaaaataggcact

SEQ ID NO: 832244 - DNA, 120 bp, Artificial Sequence
  ENSG00000288067_2 (sequence is synthesized)
aaaaaattcattttcttatgtcagagtcccagttatcattgttatggttttgagaaagctatgaactttgcttatataaatactgaacatttttcttaaggttctgcctctagtaccatg

SEQ ID NO: 832245 - DNA, 120 bp, Artificial Sequence
  ENSG00000288067_3 (sequence is synthesized)
ttgctgaagtaccagccctggctggtatactctgcaaacttctgactttctagtttgaccccctaaaaataaaaacttggaatcctgaatttaaaaaaagctgagaaggttttacattgc

SEQ ID NO: 832246 - DNA, 120 bp, Artificial Sequence
  ENSG00000288067_4 (sequence is synthesized)
aggaattctcagagcttacactatgctactgtgcttcgaagatctctaagagagttaaaagacgccccgctttccaagattttgacaaggaacaatgtatctacggagcatcttgaagca

SEQ ID NO: 832247 - DNA, 120 bp, Artificial Sequence
  ENSG00000288067_5 (sequence is synthesized)
gtcacattcagtgcagatacttggggagatgcttatctcctttatatggttttacaaggcctttctcaacccaacctcctctcacccatctgaccacatctctctgttccgcatttttta

SEQ ID NO: 832248 - DNA, 88 bp, Artificial Sequence
  ENSG00000288067_6 (sequence is synthesized)
gttctgcattctattctgagttacaaccacacagaattccttgtcatctttgaacatattctgcttttttttctttcttatcatgctc

SEQ ID NO: 832249 - DNA, 120 bp, Artificial Sequence
  ENSG00000288067_7 (sequence is synthesized)
tttgaacatattctgcttttttttctttcttatcatgctctcccacacagtcttctttgaagactatttctcctccgacttctcctggcaaattttgacgtctttcagaacctagttttg

SEQ ID NO: 832250 - DNA, 120 bp, Artificial Sequence
  ENSG00000288067_8 (sequence is synthesized)
tagccacttcttctgtgaaggcttcctcagacagagttatgatggcttcctgggatgccaatagcatcctcagggcgagattaatacaggcacaaggtgtgacagtctagccttactcaa

SEQ ID NO: 832251 - DNA, 120 bp, Artificial Sequence
  ENSG00000288067_9 (sequence is synthesized)
tcactggaggacatcttggagattggctaccatagcctggattaagagaaggaaaaaaccagaaagatcatagggacaaatctacacaaaaattaattggtatggctcaggatgggtggg

SEQ ID NO: 832252 - DNA, 120 bp, Artificial Sequence
  ENSG00000288067_10 (sequence is synthesized)
ggtgagtggttcaggaccaaggatatgaacaatataatggagacaggtcatactctgtgtggctatggttgtgtggttaaaggtagggatatatgacatgaggtatctctctgtatggac

SEQ ID NO: 832253 - DNA, 120 bp, Artificial Sequence
  ENSG00000288067_11 (sequence is synthesized)
aaattttctttggaaacttgaattctcagtgtgaaagactagacgaatgtagacagcatggatagcattcagcttaaatatgcagatgggggaaatgtataaatgaagcaaattcttcag

SEQ ID NO: 832254 - DNA, 120 bp, Artificial Sequence
  ENSG00000288067_12 (sequence is synthesized)
aataaagtttaaaagttaacaatttggtcagccaaagatacaaaagacaatgtatttcagataatgccaacaactagacgaagagatgatgtcacaaaatggaatctgcaattcaagtag

SEQ ID NO: 832255 - DNA, 87 bp, Artificial Sequence
  ENSG00000288067_13 (sequence is synthesized)
aagagatgatgtcacaaaatggaatctgcaattcaagtagaaataaaagatgttgtggtaatgagaaagtaataaagacctggtttg

SEQ ID NO: 832256 - DNA, 120 bp, Artificial Sequence
  ENSG00000288064_0 (sequence is synthesized)
tataaagcttcaacaatttataaaatgagccatgggaacatgtgaacaagtaggattatctacaccagaaaagtcagggtggggggttggaggtggcagggtcacctgaaaagaaaggaa

SEQ ID NO: 832257 - DNA, 120 bp, Artificial Sequence
  ENSG00000288064_1 (sequence is synthesized)
ggtcaacactaaatatgcattactaagtcagaatcctgtttgcatttgaaatcagaaataataaaaacagtctaatgtgatgatatgaataacaattctgtgattatgtgggaagacttc

SEQ ID NO: 832258 - DNA, 120 bp, Artificial Sequence
  ENSG00000288064_2 (sequence is synthesized)
cttgataatgagaatgctacatttaagattcgttattgagaaggaagtagatctttgtgataccttacattgcctgcagatagttatattgacaagggtggaatcacttcttactgggtt

SEQ ID NO: 832259 - DNA, 120 bp, Artificial Sequence
  ENSG00000288064_3 (sequence is synthesized)
agtagaaagttatgtttaataaacattctgcttaaaaatccctaaaccacccctaaaagtactcccagcacgtcaacacatcaaacagccagttcctcttcctcagcccctttatgttaa

SEQ ID NO: 832260 - DNA, 120 bp, Artificial Sequence
  ENSG00000288064_4 (sequence is synthesized)
ataagttgctctttctttggttgcgcttgagacggactagttgtcttgagtataggcaccaagaaggtgtatttttgaacaatagaaaatctcactgcccactagggaggggatgcttac

SEQ ID NO: 832261 - DNA, 120 bp, Artificial Sequence
  ENSG00000288064_5 (sequence is synthesized)
actatgcaaaacacgagacaactgaagaatctacaacttccacttcatgttcactaatgggggtgcctttcacattatctctgagttcaatggtgcagaacatttgagaggcctcaggca

SEQ ID NO: 832262 - DNA, 120 bp, Artificial Sequence
  ENSG00000288064_6 (sequence is synthesized)
agtgcacagatagagacccaatactgtatataaaacatttaaccattatcaatcaagttaacaaactgttaacatatgttctagcctcctgccttgacatatccttcacataaccgaatt

SEQ ID NO: 832263 - DNA, 120 bp, Artificial Sequence
  ENSG00000288064_7 (sequence is synthesized)
ccatcttgagccattgcctgtcccctttgcttctacctctgtgaagggcctcgcatgaccagtgtggcctctaggtctctcctgtgcctagatatgtttgcactgaaggtgtcatctgtg

SEQ ID NO: 832264 - DNA, 120 bp, Artificial Sequence
  ENSG00000288064_8 (sequence is synthesized)
cttgggagagtagacctggagaggcctacacagaccctggaagtgggcttgaggtcttctgggctaagaattctggggtcctggattctgggtgagcacattgccttaaccccacagaag

SEQ ID NO: 832265 - DNA, 120 bp, Artificial Sequence
  ENSG00000288064_9 (sequence is synthesized)
actttctttgtagggaggactgcagctggaggatggttgaaggaaaactttcggagtgaggtgctatgatattgtgatataataagaaatctatatttggtccctgcacctggttactga

SEQ ID NO: 832266 - DNA, 120 bp, Artificial Sequence
  ENSG00000288064_10 (sequence is synthesized)
gacagagctcctaagacctttctagatggagatgccagaaactgcagtcgattcgttttaccagttctgaagctggtcgagcccattgtggagtggacccccgatgcaggcgatttgctg

SEQ ID NO: 832267 - DNA, 120 bp, Artificial Sequence
  ENSG00000288064_11 (sequence is synthesized)
ccgccgcttccagtcttgcagctcttctatgagcatggtgttcattaacaggtctgtctcatggatgatttgggtcattttactgagagcctcctaaaaacaaaggggactactgaagag

SEQ ID NO: 832268 - DNA, 120 bp, Artificial Sequence
  ENSG00000288064_12 (sequence is synthesized)
agtttcataagaaataagtcacttagaattcaatttacaaaactatttgacctggtagacaaaggcttggttaaaattttgaccaaatattttactaaatgctagcttctatttgccagg

SEQ ID NO: 832269 - DNA, 120 bp, Artificial Sequence
  ENSG00000288064_13 (sequence is synthesized)
ccttttcaaacaattaaattattgacaataaatgatgtcatgagaaaagaagaatggccacagtttaacattctcatcgtgtttcagtataaatatattgaatgtgtaactcctgcggca

SEQ ID NO: 832270 - DNA, 120 bp, Artificial Sequence
  ENSG00000288064_14 (sequence is synthesized)
ctgcggcaacaatattgaatcttgtagtaacaaaactgtatagttgcttattaaaaggatatttatatatgtaatttattttttaataaagatggttattcatttatattaaaatgagct

SEQ ID NO: 832271 - DNA, 120 bp, Artificial Sequence
  ENSG00000288065_0 (sequence is synthesized)
tctgggactccaactatattctgctagaacttttgaccatgtcctacatctgtcttatgctctattctgttttctttttcttccatattttttacctcttgattttggaattctagtttc

SEQ ID NO: 832272 - DNA, 120 bp, Artificial Sequence
  ENSG00000288065_1 (sequence is synthesized)
tagaactgtgaaaagaataatttctgttttaagccactaagtttgtgatcatttattatagcagccctagaagacaaatataactaccacacatcataccgaaattgaacaacgaagtag

SEQ ID NO: 832273 - DNA, 120 bp, Artificial Sequence
  ENSG00000288065_2 (sequence is synthesized)
atggatggctgatagtgggagctaagtttctcactgttggaatgagaagataaaggctagtgtggtctatgtggtaatggattagagctggagacgtcagtatgctctgaggagtttatg

SEQ ID NO: 832274 - DNA, 120 bp, Artificial Sequence
  ENSG00000288065_3 (sequence is synthesized)
acatttcatgaattctataatatagttatatacagaaatgtgtatagatatgtgtatatatacagtatacacacatatatatctccctgttgtcctggctcagtagggcaagaaccaatg

SEQ ID NO: 832275 - DNA, 120 bp, Artificial Sequence
  ENSG00000288065_4 (sequence is synthesized)
tagtaggaaccagggctcctagatgaaatgtctaattatatggctagggcaaagagtaaagaagatgaatttggagcatctcatatagaagatgaatttggagtatcttacagtgccaga

SEQ ID NO: 832276 - DNA, 120 bp, Artificial Sequence
  ENSG00000288065_5 (sequence is synthesized)
aaaagaaaggaagtgcttaaaaaacaaacacaaaacacaaaaccaaaaatgatcggggtatgtcaaagggacataagaatcaactgaaagagctcctaatggccaaagctggaacaatct

SEQ ID NO: 832277 - DNA, 120 bp, Artificial Sequence
  ENSG00000288065_6 (sequence is synthesized)
gaggggaaaaaaagtagtattagattgtaatgcaagtcataaaataaatatccacaagtccatactgatataactctctattccttaagtgtgggccttgcataatgacttccttccaaa

SEQ ID NO: 832278 - DNA, 120 bp, Artificial Sequence
  ENSG00000288065_7 (sequence is synthesized)
agaggatagtatggaggagaaaaaaagaacagctttccagtggagaaacctgacaacacctcctcacctgggagatcaagggttcagatggttccagtcttcttggatttatttcagaag

SEQ ID NO: 832279 - DNA, 120 bp, Artificial Sequence
  ENSG00000288065_8 (sequence is synthesized)
agcacatgttacctaagcttccacaatgactatatagtctagtgggggctatgtggagtatccatcaaatgcttgtctctgctgaaattttcacagtggatagtaaaatatttttttaat

SEQ ID NO: 832280 - DNA, 120 bp, Artificial Sequence
  ENSG00000288063_0 (sequence is synthesized)
gtgcgcgcgggacccggagggcggaggcctgccccgccccgtctccatggcaacgggcgtgtgcctagccccagcgctggctgcggcggaacccacggcgtaccttcccgcctccaacaa

SEQ ID NO: 832281 - DNA, 120 bp, Artificial Sequence
  ENSG00000288063_1 (sequence is synthesized)
taccttcccgcctccaacaaactatccggttgctgaggttgatttagcaacaccccagggcatctgggttggcaggagcaccacagtgacagcctggcccaggctcgggtacgggaggca

SEQ ID NO: 832282 - DNA, 120 bp, Artificial Sequence
  ENSG00000288063_2 (sequence is synthesized)
gcccagtggcccgcagtagagggccaggctggggaccagggagctggggctgaggagaatttgtacagcctagggaggcgcagcacagcagtatcagcctctggcatttgtaccaccttt

SEQ ID NO: 832283 - DNA, 120 bp, Artificial Sequence
  ENSG00000288063_3 (sequence is synthesized)
agtcctgccactttctctcactgtggcttcgcaacagacttgggaaccaagaaaggcataggtgaggaagctgaagcccagtctgggctcgcggaagaaactggtggatccaacttctgc

SEQ ID NO: 832284 - DNA, 120 bp, Artificial Sequence
  ENSG00000288063_4 (sequence is synthesized)
atagcgcaaatatctgcttcctgcctccacccacccattcccacttcccctgattggggaactctagagccccacatcagagttcaacatgtgcctcaggagcttcagcacctcttttgt

SEQ ID NO: 832285 - DNA, 120 bp, Artificial Sequence
  ENSG00000288063_5 (sequence is synthesized)
gggaggagagtccgctggtgactggggctgcaggccatgacatcagcctgcccagcttcacctcaggctgcttccaacagtgccaagtgaggtcccttggcaggatccctgcaaggcagc

SEQ ID NO: 832286 - DNA, 120 bp, Artificial Sequence
  ENSG00000288063_6 (sequence is synthesized)
aaggcactttcttcattccaaccccttgtaacaggtctgaggaaacctgttcgcccagccatgtgctgcaaccatcctccactcccaatcttatctcccaatagcacagattcccctatc

SEQ ID NO: 832287 - DNA, 120 bp, Artificial Sequence
  ENSG00000288063_7 (sequence is synthesized)
atgagtccagacttggccttcatctcctcttgccttcctctgtccaaggaatcactacagagattctttctctatccttctttgtaaatttccagaaaattgtttccccagggcccctcc

SEQ ID NO: 832288 - DNA, 120 bp, Artificial Sequence
  ENSG00000288063_8 (sequence is synthesized)
ccttgaagaaattaaacaggaagctggagtagactgtcccttctttcccccacctctcacactccaaagctctgtttaactctgtgggccagtggctagattccccaacatggatgacag

SEQ ID NO: 832289 - DNA, 120 bp, Artificial Sequence
  ENSG00000288063_9 (sequence is synthesized)
agaatacacatgcaataagaatgttttcgctgccaccagccactcacagacacactgtctcccaccctctgaaggcattgtgcccaatccccagccactcactgtctagtcagggctgcc

SEQ ID NO: 832290 - DNA, 120 bp, Artificial Sequence
  ENSG00000288063_10 (sequence is synthesized)
cctgcaggacttgccttggctgaggaccagctagcttcaagccactctgaagtcagcttgctgtttcccctggagcctggtaatacatccttcttcaggtgaacaaaagcagaaaaagcc

SEQ ID NO: 832291 - DNA, 120 bp, Artificial Sequence
  ENSG00000288063_11 (sequence is synthesized)
cagtgaaccccactgcaacaaagagcctgccatcagtcttccttctgttcctgcctatctcatcacccaagggctatcccagagcccactatgttctaagatctattcctttcaccacca

SEQ ID NO: 832292 - DNA, 120 bp, Artificial Sequence
  ENSG00000288063_12 (sequence is synthesized)
cccagccaaacaactatccagacaattccttgatcaaacaacactgccttcttgagtttaaattttattttacaaaaagagaaataaagaaaactgataggcagttatactgacttacaa

SEQ ID NO: 832293 - DNA, 120 bp, Artificial Sequence
  ENSG00000288060_0 (sequence is synthesized)
gccttccccgccccccgcggcgtccccgtccgcccctcggcgcgctgagctccccacccgccgcttgcgtcctgctccgtttacagcagtaaacactgggcagcggcccctgcgtggaag

SEQ ID NO: 832294 - DNA, 120 bp, Artificial Sequence
  ENSG00000288060_1 (sequence is synthesized)
ggggttgttcggaagtcgtttaaagacagtgtcaccctcagggtaaatgcccagaagccgggccgcgcatccttgggctgagaagtgtgggaacgcccgagaccaagcgagactcaggcc

SEQ ID NO: 832295 - DNA, 120 bp, Artificial Sequence
  ENSG00000288060_2 (sequence is synthesized)
ggagtttggctgcgggtcaggctcagggtctcgggagaagaagccgtcagacacggcagggcttaaaccttctagaaagcatatatatccatccactccttctccaggagcagggagtac

SEQ ID NO: 832296 - DNA, 120 bp, Artificial Sequence
  ENSG00000288060_3 (sequence is synthesized)
cgcctggctgaccgctgcggacgtttcctgtcccgccgcccaaatctcgcgctcccgaggattgaacccaaagctgccattactgcaagaattaatgcttattgccaagaaattcaaata

SEQ ID NO: 832297 - DNA, 120 bp, Artificial Sequence
  ENSG00000288060_4 (sequence is synthesized)
aaggaaactcattggaaatgttcagagaggaaacgatgacagtgataattccaaatatgatgctttctccataaactatccatagagatggcacagctctcgatcaacctttgcctggtt

SEQ ID NO: 832298 - DNA, 120 bp, Artificial Sequence
  ENSG00000288060_5 (sequence is synthesized)
ggcttgaaatgttttaagtctttgacataaaaattgtgaaaggactcgtcgtttccaaagtgagatgaagattttgttactgctgtttattaaaattttttcgttgtgtttccacacatg

SEQ ID NO: 832299 - DNA, 120 bp, Artificial Sequence
  ENSG00000288061_0 (sequence is synthesized)
caggagaagacggaagtggagcgaggacaaaatggctgcgaagtaacatgaggtgatatctttcctggtttgactttcatcaaaaattaaacgacagaccataccgacgctttgaaaacg

SEQ ID NO: 832300 - DNA, 120 bp, Artificial Sequence
  ENSG00000288061_1 (sequence is synthesized)
tgactgagctggtgcacaaaacaatggtgcctagaattttgaattgtgcaatgttgtgcatggccgcggatatgtggggccttgtggttccaagagcctgtctcagggaactggacgagg

SEQ ID NO: 832301 - DNA, 120 bp, Artificial Sequence
  ENSG00000288061_2 (sequence is synthesized)
tgacctctgaatgtgtaatccaaagtactgaacatgatgttttgtaccaccgtgatgcatatggctatccctcttagataccttagaaataagctgtagacattcactttggcatcctat

SEQ ID NO: 832302 - DNA, 120 bp, Artificial Sequence
  ENSG00000288061_3 (sequence is synthesized)
cctaagacttttaagatgacatggctccacacgtagcgccctgaattcttaaccttacaggtgtaccggccctcatcactgggcttcagaggttcaatctgcaaggaggcatctcctgcc

SEQ ID NO: 832303 - DNA, 120 bp, Artificial Sequence
  ENSG00000288061_4 (sequence is synthesized)
aggaaattggaagcaaaggccactcggcccttctgttcctcagtcaagttattgtagacatgacgactggagtaagtgatcacctgtgggatagaccgaggcagagtcaagcagcgtaac

SEQ ID NO: 832304 - DNA, 120 bp, Artificial Sequence
  ENSG00000288061_5 (sequence is synthesized)
tctcagcctgcctttcctgatggtgtgaagaagaggaaagggagtactcccagtggcacaaagtagtcaagcctggggctgagagtccaagagacctctgttctaaataaaagttaaaaa

SEQ ID NO: 832305 - DNA, 120 bp, Artificial Sequence
  ENSG00000232259_0 (sequence is synthesized)
ggcattctgggaaactcaaaccgtcaccgagctttctgtgaagtacttaggttttcccatgtagagaggtagcccagctcaatttgaggatagcgtcttacttactgaaaggcagatctc

SEQ ID NO: 832306 - DNA, 120 bp, Artificial Sequence
  ENSG00000232259_1 (sequence is synthesized)
aaagccatgtcccaaaaggcagggagtctgactctctcttcaaagcaaatagatattctaacacatgaaggacaagaatatcaccttaatacaacaaggttcacattcaggctctcaacg

SEQ ID NO: 832307 - DNA, 120 bp, Artificial Sequence
  ENSG00000232259_2 (sequence is synthesized)
gtgaagcaatacaatgaacaccagtgaggtgtgaactcctctgcagacatggttggtgctctgcaacctcagtgaacacccctatagtgcaaagaaaaaagggaaatcaaacttcatctt

SEQ ID NO: 832308 - DNA, 120 bp, Artificial Sequence
  ENSG00000232259_3 (sequence is synthesized)
ccttcatttcagaaacccagaagttttcaaaacaactgtgggaaagagagatgaatttgcaggccttctgaactctacccacaaactctcaagagaacccacccgctgcagcctgtggct

SEQ ID NO: 832309 - DNA, 120 bp, Artificial Sequence
  ENSG00000232259_4 (sequence is synthesized)
cccaactgtcctgcctacgcccaacagggaactggggatccgtattccagggaaccctctggaaacgtcacactcagttagcagattcttgagggcggtaactatagttttcagatcttt

SEQ ID NO: 832310 - DNA, 120 bp, Artificial Sequence
  ENSG00000232259_5 (sequence is synthesized)
gtgtcctctgtacctggaccaggtagagacttgataaatatctgtagttgttaaataaatgaaatgtttatctttgctgatctcttaaaaataaatcagttttacctacttgccatgcaa

SEQ ID NO: 832311 - DNA, 120 bp, Artificial Sequence
  ENSG00000234155_0 (sequence is synthesized)
agaaaagaggacagagtcattttgctcagaagaaacagcatgtgcaaatgtgccacaaccattcaaagcaagttgctgcttaagtcttgcccacaacttttcatctgaaaagtggagtag

SEQ ID NO: 832312 - DNA, 120 bp, Artificial Sequence
  ENSG00000234155_1 (sequence is synthesized)
ctgaagcagccaatgctggtggttataattcttgaggatgcaacagtaagaacggaaaggaaataacccccgaagcctttgcaactaaggacatgtatccttcagacaagtgtttactgg

SEQ ID NO: 832313 - DNA, 120 bp, Artificial Sequence
  ENSG00000234155_2 (sequence is synthesized)
gcaacttcttcgtgctgtaattgagtgtggccgattgctcacaaagatgtttgcaaaatccctcctgtcccctaactcacttctccttgcagtgtcactctgccaacttctcctgtcgat

SEQ ID NO: 832314 - DNA, 120 bp, Artificial Sequence
  ENSG00000234155_3 (sequence is synthesized)
tggtgaagactgtttctcctcccccttgaatatgggctgggcttgtaacttgcttgaccaatagaatgcagagaaatgaaatgcagccttcaacattcaaggctatgctcaaggagtcta

SEQ ID NO: 832315 - DNA, 120 bp, Artificial Sequence
  ENSG00000234155_4 (sequence is synthesized)
accctgtggatatgctgttgtcaaatgagggagcttcgattagcctgttgaagacacacagacgacccgacaggcaataccaacattcagatatgcaagttatgctgtcttagaccatgc

SEQ ID NO: 832316 - DNA, 120 bp, Artificial Sequence
  ENSG00000234155_5 (sequence is synthesized)
tgcccaggtgaacttttagacgactgcaatttgtgagtgactctaggcaagaccagaagaaacttctagctaaatctaaaccaaatgccaactcagaattgtaagcaaataaaacggttg

SEQ ID NO: 832317 - DNA, 120 bp, Artificial Sequence
  ENSG00000234155_6 (sequence is synthesized)
ttgtttaaagacactaacttttggggtgttttgccacacctcaatacataactgttacactaattatttttcattgtgaaatcttcagcgtcttattctgtaatcaaaccagaatgtcct

SEQ ID NO: 832318 - DNA, 120 bp, Artificial Sequence
  ENSG00000234155_7 (sequence is synthesized)
tgccttcttagcactttgccacagtccagtggggtgaatagacagcagctgctcatttatgctcatgctcatgttcataatttgcatttggactaaaaggagctctgttctccaggacag

SEQ ID NO: 832319 - DNA, 120 bp, Artificial Sequence
  ENSG00000234155_8 (sequence is synthesized)
aactattctaaagctcttcaggaacaggaacaggagtccatcacagacagcgaaatcaaaagcgccctacatagaggcatccagactgagagctgaaagggatctgggaaatcatttagt

SEQ ID NO: 832320 - DNA, 120 bp, Artificial Sequence
  ENSG00000234155_9 (sequence is synthesized)
ctcactccctcattttccattcagaccacagggatgaaagaacttgctgaagttctcacagctctgtagtggcacagtcagaacaaggatcccaatctcctaactactaacataaaatgc

SEQ ID NO: 832321 - DNA, 120 bp, Artificial Sequence
  ENSG00000234155_10 (sequence is synthesized)
gcgttaaagacaaaaaaatgctttggaacctaggtgcttcatatctgaaattggggcaggtacaggtgtattcctaccactaaagggtcattagttggttgggtagtcctttagtgttct

SEQ ID NO: 832322 - DNA, 120 bp, Artificial Sequence
  ENSG00000234155_11 (sequence is synthesized)
tggtactaagcacaaaacatgggtaagatggttcaaggctggttgtggtggctcatgcctatagccccagcattttaggaggccaaggctggaggatagcttgagcccaggaattcgaga

SEQ ID NO: 832323 - DNA, 120 bp, Artificial Sequence
  ENSG00000234155_12 (sequence is synthesized)
caagcctgggcaatatcgcaagaccttgtctctacaaataataatttcttaagaattggctgggcatggtggcacacacctgtaggctatttgagaggttgaggtgggaggattgcttta

SEQ ID NO: 832324 - DNA, 120 bp, Artificial Sequence
  ENSG00000234155_13 (sequence is synthesized)
gtgtgggaggctgaggctgcaatgaggtgatcacactatggtactacagcctgagaaacagtgtaagatcctgcctcaaaaaaaaaaagtttatgttctcaaagtgctcataatctagtg

SEQ ID NO: 832325 - DNA, 120 bp, Artificial Sequence
  ENSG00000234155_14 (sequence is synthesized)
gtagtacagtatttgagatattagagcagtttctcctccttttgcaactaaggacatgtatctttaaagcagaaggaatggcagagtcgtgtaataaaccctcaagtaccattacttagc

SEQ ID NO: 832326 - DNA, 120 bp, Artificial Sequence
  ENSG00000234155_15 (sequence is synthesized)
ttcaacaactatcgacactctactgttcttgtttcatttatgcctcacctccttcccatcccccacttgaatattctcatcctttttttttacagtttttaagataacaattacataact

SEQ ID NO: 832327 - DNA, 120 bp, Artificial Sequence
  ENSG00000234155_16 (sequence is synthesized)
gaaatgcacaaatcttagctgtacagttttgacatatggatacacctgtgtaaccaatgactgtatcacaacatagagcatttcatctccccagcaagatccatgtgtcttttcctagtt

SEQ ID NO: 832328 - DNA, 120 bp, Artificial Sequence
  ENSG00000234155_17 (sequence is synthesized)
aatgcctctttatttctgagatggttattgctctgcttttgtttttcatgttaggctagtcttgcctgttctagaatttcatataactgagaacatacagaatgtactcactagtagtgt

SEQ ID NO: 832329 - DNA, 120 bp, Artificial Sequence
  ENSG00000234155_18 (sequence is synthesized)
ctgactttttcacaaaggataatgtctgtggtattcattcatgctgttgtatgcatcagtagtttattttctttttactattaagtagtgttctaaggactattttaatagcatcccaca

SEQ ID NO: 832330 - DNA, 120 bp, Artificial Sequence
  ENSG00000234155_19 (sequence is synthesized)
cacaaagggggtatgatatgttctatttacattattatttggtttgtaatattttatattttctcttgtgatttctcctttcactcatgaattattataataaattttttaaagtgtatt

SEQ ID NO: 832331 - DNA, 120 bp, Artificial Sequence
  ENSG00000234156_0 (sequence is synthesized)
agaaatgccttttacctcccactgtgattctgaggccccctcagccatgtggaattgtgaatacttggcaggacaacaggcagacaaggagcagcctgggctacaccctcctccatccag

SEQ ID NO: 832332 - DNA, 120 bp, Artificial Sequence
  ENSG00000234156_1 (sequence is synthesized)
gtgcctcagttgaaacttccaatttaacatcctgacacacactactccctcttcctgtgatcatcagaacaagataaaaccttgtgtgtctggatagttctcatctgttaagattcaggt

SEQ ID NO: 832333 - DNA, 120 bp, Artificial Sequence
  ENSG00000234156_2 (sequence is synthesized)
agaaatggaaaagccaatcctgaaattcagatgaaattgccagaaacaatgagtagccaaaactatctggaaaaaaaatgaacaaatttgtagaacctacactttcctatttccagaatt

SEQ ID NO: 832334 - DNA, 120 bp, Artificial Sequence
  ENSG00000234156_3 (sequence is synthesized)
acaaacaaatggaagaacattccatgcgcgcacgtaggaagaatcaatatcgtgaaacacagcttgctgaactcctgcctgaatagaactgagagcggtcactcaagacgctgctcgaac

SEQ ID NO: 832335 - DNA, 120 bp, Artificial Sequence
  ENSG00000234156_4 (sequence is synthesized)
gctgctcgaacagtcactgggggtttatattttcatccagaaacctgcattagggaaagagggatgcgactgtcttcatctttgcaccatcttatccatccttttctgtctctggctatt

SEQ ID NO: 832336 - DNA, 120 bp, Artificial Sequence
  ENSG00000234156_5 (sequence is synthesized)
gcagtgttgatttgaagaagggaaacggaaagattcctcaaccataaagtggacatgggaactactttcacaaagttgttggaagaattaaataaaatgcctattattgtttaaaaatta

SEQ ID NO: 832337 - DNA, 120 bp, Artificial Sequence
  ENSG00000234156_6 (sequence is synthesized)
catggagtcatctgtcttctatggagcacctctgtcttttggtcaaagagggaaaatgaaatcctggccctatggatactgggaagcatactcaagtatctctgagtttgagaccagctt

SEQ ID NO: 832338 - DNA, 120 bp, Artificial Sequence
  ENSG00000234156_7 (sequence is synthesized)
gggcaacagagcaagacgccgtgtctacaaaaaaaaaaaaaaaaaacaagcgataataagtaaaaaaaaaaagtagggtaagaacaagatgacgtttctgcaaggaagaaaatacttcag

SEQ ID NO: 832339 - DNA, 120 bp, Artificial Sequence
  ENSG00000234156_8 (sequence is synthesized)
ggatcttaacccaaaagcatggaggtccacaccatcctccaggatactacagttgacaactggatcccatctcctgtggattccctctctgcctaagagcagtccccgctgcatccttgt

SEQ ID NO: 832340 - DNA, 120 bp, Artificial Sequence
  ENSG00000234156_9 (sequence is synthesized)
tagtcaaggcgactgaggagatagtcatgggattcctccctgactgtgttttttcctcatgccatggaagccgttttacacactcatcacacttggcatttttctgctagcggactaacc

SEQ ID NO: 832341 - DNA, 120 bp, Artificial Sequence
  ENSG00000234156_10 (sequence is synthesized)
tacttactattcatcatattattcaatcatgctgcaataaccttaaccctgtggctctctggacctctccatcagatgaaacaccacatggctgcttaactctgacagaccagcttttaa

SEQ ID NO: 832342 - DNA, 120 bp, Artificial Sequence
  ENSG00000234156_11 (sequence is synthesized)
ttccttgggagcaattcctgtggacaatgctgagttgtcctggtttacagatggctcacatttaaagaatgagtctggcaagtattgtgcaggctgtgcagtcgtgacttcctttgagat

SEQ ID NO: 832343 - DNA, 120 bp, Artificial Sequence
  ENSG00000234156_12 (sequence is synthesized)
gtgggaactcaggcagacgaggcgccgggagcgagcgagagctgcgagaactgccagcacgctgtcacctctcaccacgattacaggtgtaagccacagtacctggcctaccttgaactt

SEQ ID NO: 832344 - DNA, 120 bp, Artificial Sequence
  ENSG00000234156_13 (sequence is synthesized)
tttttaacctaaagaggataatgctggtctcacaaaatggattgggaaatgccacacctctactttctgaaagagtttacataagagcctcactctgtcgcccatgctagagtacaatca

SEQ ID NO: 832345 - DNA, 120 bp, Artificial Sequence
  ENSG00000234156_14 (sequence is synthesized)
gcagctcatttactattaactacttcagcccagcaggcagatctgtttgccctcgcttgagcctgactccttgctacaggaaagacaatgtttatgtaagcagcaggtctactaacagaa

SEQ ID NO: 832346 - DNA, 120 bp, Artificial Sequence
  ENSG00000234156_15 (sequence is synthesized)
ggaattcaaatgattaaggagtaaccatatctttaggcttagtggaatctttactgtgtttcctggtaggagtatccaggatctggaattccagttcagcagagcaaaaagttcaagata

SEQ ID NO: 832347 - DNA, 120 bp, Artificial Sequence
  ENSG00000234156_16 (sequence is synthesized)
ccagaaacataaatgcctccaagacagtgatcaggaagtatggggccaggagaagccaaactgactggagaagcacctgtgagtgaggagcacctctgagtgaggagcatctgtgaggag

SEQ ID NO: 832348 - DNA, 120 bp, Artificial Sequence
  ENSG00000234156_17 (sequence is synthesized)
cacctgtgaggaccacctatcctatgtggagcacctgtgagtgaggagcacctatcctatgagtgaggagcacctatcctatgagtgagaagcacctctgagtaaggatcatctgtgagt

SEQ ID NO: 832349 - DNA, 120 bp, Artificial Sequence
  ENSG00000234156_18 (sequence is synthesized)
gaggagcacctatgagtgaggagcatctatgagtgaggagcacctgcaagaagcacctgtgagtgaggagcacctatcttatgagtgaggagtacctgcgagtgaggtatatcagaggtg

SEQ ID NO: 832350 - DNA, 120 bp, Artificial Sequence
  ENSG00000234156_19 (sequence is synthesized)
ttagggaaagcatgtgtcattcccaggcatgcttggggatactggagcagaattcaatgcatttcctgtagcttttcttagggaaagccaaaatattactctaagtaaagtgactatgat

SEQ ID NO: 832351 - DNA, 120 bp, Artificial Sequence
  ENSG00000234156_20 (sequence is synthesized)
gaaaaagtcttgctccataacttcaattttttttctttgcacaaagtcaaatgatttgatttttgttctacttacttgccagagctgctttttagagatgacaccctggttaacttgtca

SEQ ID NO: 832352 - DNA, 120 bp, Artificial Sequence
  ENSG00000234156_21 (sequence is synthesized)
gaattctgggtctctcaaaatctccatattggcttctggaccaccatttaaattagttcaacccatcacatccatcacacttaaaaataatcttttactttcaaaaataacacatgctag

SEQ ID NO: 832353 - DNA, 120 bp, Artificial Sequence
  ENSG00000234156_22 (sequence is synthesized)
taaaagaaatggtgtgtgtcatacagaagttgacacccaccattcttccccccacactcactccctagaagcaaacattatccatcttttgagtgtgttcttctagattgtgttcttatt

SEQ ID NO: 832354 - DNA, 120 bp, Artificial Sequence
  ENSG00000234156_23 (sequence is synthesized)
catacacaaatatttctgtttcatttttacttaactgtaactatgcgtatacacactgttctggtattttacattttttacttaattatattattactaagagaaaagtacttgtgtaaa

SEQ ID NO: 832355 - DNA, 120 bp, Artificial Sequence
  ENSG00000234156_24 (sequence is synthesized)
cagataggacatgtacaatccaaggcacacttttactggtggctgatatgtatcatatggacagctgaaatagttcaaaggagccttagatatcttatcaaatactgacaccaatcgata

SEQ ID NO: 832356 - DNA, 120 bp, Artificial Sequence
  ENSG00000234156_25 (sequence is synthesized)
aaacagaattatttaaccacagaattttttcaaacaggagtttgaagtacttttaacacagcattattttactcttttgctacttataacaaaatgtatttcacacagaatttgagacat

SEQ ID NO: 832357 - DNA, 120 bp, Artificial Sequence
  ENSG00000234156_26 (sequence is synthesized)
ggacagaagaaaccagacctgcatctatgaatttcttctcatgggcttctctgaacaccaggagcagcaggctcttttgtttgggcttttcctggtcatgtacttggtcactgtgttgga

SEQ ID NO: 832358 - DNA, 120 bp, Artificial Sequence
  ENSG00000234156_27 (sequence is synthesized)
gaacctgctaatcatcctggccattggctctgacctgcacctccacaccccccatgtacctcttcctgtccaacctgtcctttttggatattggctttatctctacaataattcccaata

SEQ ID NO: 832359 - DNA, 120 bp, Artificial Sequence
  ENSG00000234156_28 (sequence is synthesized)
tgctagatcatattagctcaggaattaagctgatttcttatggggagtgtctgacacaactctatttctctggcctatttgcagatctggacaacaactttctcctggctgtgatggccc

SEQ ID NO: 832360 - DNA, 120 bp, Artificial Sequence
  ENSG00000234156_29 (sequence is synthesized)
ttgaccgctatgtggccatcagccatcctctccattatgccctaaccatgaactcccaacgctgtgtcctgttggtggctgtgtcatgggtgatcactattttacatgccctagtgcata

SEQ ID NO: 832361 - DNA, 120 bp, Artificial Sequence
  ENSG00000234156_30 (sequence is synthesized)
ccctcctagtgaccaggctttccttctgtggtccaaatattatccctcacttcttctgtgatctggtcccactcctgaagctggcctgctccagtacttgtgtcaatgatctggtgctca

SEQ ID NO: 832362 - DNA, 120 bp, Artificial Sequence
  ENSG00000234156_31 (sequence is synthesized)
tccttgtggcaggaacactgctgattgcgccctttgtctgcatccttatgtcctacttttacattgcattggccatcctgagaattgattccccaaggggtaagcaaagggccttctcca

SEQ ID NO: 832363 - DNA, 120 bp, Artificial Sequence
  ENSG00000234156_32 (sequence is synthesized)
gctgcacttcccacctctctgtagtctctctgttctatagcacagctatcggtgtctatttatgtcctccatcatcccactcagatggaaaggacagagtcttctcagtcatgtacacgg

SEQ ID NO: 832364 - DNA, 120 bp, Artificial Sequence
  ENSG00000234156_33 (sequence is synthesized)
tggtgactcccatgttgaaccccttcatctacagcctgaggaacagggatatgaagggggcactgggaaaactgcttggaataaaaacatcctaacacccttactcaagaccttaggatc

SEQ ID NO: 832365 - DNA, 120 bp, Artificial Sequence
  ENSG00000234156_34 (sequence is synthesized)
ctgaccccaagactcagagctgggagtggatcagtctcctgagagcccaaccactatagcgtctctcagcccaagacttcattgttgccatgtttacattttgaaatggatgaggagaga

SEQ ID NO: 832366 - DNA, 120 bp, Artificial Sequence
  ENSG00000234156_35 (sequence is synthesized)
accagtgatatcagtcatctttaatcatcttcacaaaatgttcatgccctgactagttcattatccactctcagaattgttgtttgtttttgccaaatgcctgcatgtgggggacttgta

SEQ ID NO: 832367 - DNA, 120 bp, Artificial Sequence
  ENSG00000234156_36 (sequence is synthesized)
tgcatataaaatgaaaacaaaagcctaaatttttgattagctcaagttataaaggaattccagtaagtggcatgagggggaaatgtggaaatgtttagaacttgtggtacatctaatatc

SEQ ID NO: 832368 - DNA, 120 bp, Artificial Sequence
  ENSG00000234156_37 (sequence is synthesized)
ctctgaaatgtcttaaaaataatgatgtaggtctgagagtgctgtaggaggtccatgatatattgatgagagaaacaaagaaagctccagaacaaatgatcctatttttataaaaacaaa

SEQ ID NO: 832369 - DNA, 120 bp, Artificial Sequence
  ENSG00000234156_38 (sequence is synthesized)
attttatatatgcatgttcatatgtgcatagaaattgtctaaatgggtacatgtcacaataatagcaattactcctagagagaaatcaggtagggagtggtgagaaacactctcagtttt

SEQ ID NO: 832370 - DNA, 120 bp, Artificial Sequence
  ENSG00000234156_39 (sequence is synthesized)
tattcaacatatgtcttactgctaattttttaaaaatataagtatgtaccactaaaaaaagcaaataagacgctgcatctctaagaaagaactaagggcagggagacagtccctccctgc

SEQ ID NO: 832371 - DNA, 120 bp, Artificial Sequence
  ENSG00000234156_40 (sequence is synthesized)
cttgaccatatcgaaatttctgtgggcttccttctcaaagccaaatttggagcacatgtagtcaaccccatgtccagactgatctcccaggtcctggctgctctcctgggatcagctgag

SEQ ID NO: 832372 - DNA, 120 bp, Artificial Sequence
  ENSG00000234156_41 (sequence is synthesized)
ctgccaagccacagtccctaatactgacaccaggagcactgtctcatgggcctcactccccagagaagtcagtgaggttggacaatgacacatttgggactccatgctagtgagaaccat

SEQ ID NO: 832373 - DNA, 120 bp, Artificial Sequence
  ENSG00000234156_42 (sequence is synthesized)
ggaatccatgcagaagcatgtgataaaacatcagctgccagcaccttccctagacaggtcctcctgcccctgaagagcagaagcaccaccaggagtctggtggctctacccctacagccc

SEQ ID NO: 832374 - DNA, 120 bp, Artificial Sequence
  ENSG00000234156_43 (sequence is synthesized)
ctccctgatgcttttctttcttctattcttggaaatttcctctgtcttcgctgagtggtcagctccacgctgctgtcaaaacaagacatgatgacagatgctgcctgaggcggattggga

SEQ ID NO: 832375 - DNA, 120 bp, Artificial Sequence
  ENSG00000234156_44 (sequence is synthesized)
cacatatattttccattccaaaagaatattctttccactccatcctgaagggtcttgctctgtcattccagctggagtgcagaggtgtgtgatcgcaactctctacagccttgacctctg

SEQ ID NO: 832376 - DNA, 120 bp, Artificial Sequence
  ENSG00000234156_45 (sequence is synthesized)
ttgtgggagggacccagtggtagataatttgaatcatggggagcagtttcccccataccgttctcatggtagtgagtaagtctcatgagatctgtcgttttatcaggggtttctactttt

SEQ ID NO: 832377 - DNA, 65 bp, Artificial Sequence
  ENSG00000234156_46 (sequence is synthesized)
gctatgattctgaggcctccccagtcatggggaactgtaagtgtaattaaacttctttttcttcc

SEQ ID NO: 832378 - DNA, 120 bp, Artificial Sequence
  ENSG00000287948_0 (sequence is synthesized)
gcaatctgcacaatctagcgacactgtttcacgcggtcagtgtctactttattggaaagtctcactgattctgaatgtgaatgatggaacagccacactggagggtcacttttcaacttt

SEQ ID NO: 832379 - DNA, 120 bp, Artificial Sequence
  ENSG00000287948_1 (sequence is synthesized)
tcaggtttatggatatgctgcctcttctgctaaactgtaaatctttgaagaccaggagccacgtcttacttatttgtgaatttccataacatctagtagagtgttttccacctaattggg

SEQ ID NO: 832380 - DNA, 120 bp, Artificial Sequence
  ENSG00000287948_2 (sequence is synthesized)
agttcttctcactgagggaaaagaagaaaaatctgtctgattcaacaacaattaagtggcactgcttacatcacgaactaagaagatttcgaaagtattcttctgaaacaaggaattatc

SEQ ID NO: 832381 - DNA, 120 bp, Artificial Sequence
  ENSG00000287948_3 (sequence is synthesized)
acaaagaaaatgttcatctcaaaagtgtagagtgatcctaaaacatttaactgaaaaatcttgttccctgttatttatgctgtcgggatgtctgggtagcatggattggtatttgagtca

SEQ ID NO: 832382 - DNA, 120 bp, Artificial Sequence
  ENSG00000287949_0 (sequence is synthesized)
gaaacaacaaaagcacattgctaaatattagttttgtctgctggtactttgaagatgcaaaagatggggaagttaaaaagggccaagaaaatgtcttccgagctatgtacagcattttta

SEQ ID NO: 832383 - DNA, 120 bp, Artificial Sequence
  ENSG00000287949_1 (sequence is synthesized)
acaattgagtaaaatatactcctatgaacaaaattttgagcatatttatttttctctacctgattcttccagaatttggaaactatttatcactgaaatcaaatcaagatgtaaaaaggg

SEQ ID NO: 832384 - DNA, 120 bp, Artificial Sequence
  ENSG00000287949_2 (sequence is synthesized)
ataaagtggctttcttctccattcttccactagtcgccatgacctattgaagaaaggaacttttctctctctcacctgaggcaaggtttctggagaccacagttcttattccccacattg

SEQ ID NO: 832385 - DNA, 120 bp, Artificial Sequence
  ENSG00000287949_3 (sequence is synthesized)
gcgttgtacattactacagtttgaaaagtaaacaaatgtgatcagtcatttgaaaatcttactacatcaagaatccaagagagaatgccagcccagggtcccaggcaccatgagaacttt

SEQ ID NO: 832386 - DNA, 120 bp, Artificial Sequence
  ENSG00000287949_4 (sequence is synthesized)
tggacatgttggtaatctccagatgggattaaaacaaaaaattcaaaagacaaagaaaacactccctctacaaattacttgctgccagtattgaaatctgtcctgccctcaaaaggccta

SEQ ID NO: 832387 - DNA, 120 bp, Artificial Sequence
  ENSG00000287949_5 (sequence is synthesized)
caatgggaacactgtaataagtgtttgtgtatagtaaatgagttaagaattttaatttttaaaatgttttaaaatgcatggtctattttacagggcactggtcaatgctagcacctacat

SEQ ID NO: 832388 - DNA, 120 bp, Artificial Sequence
  ENSG00000287949_6 (sequence is synthesized)
tcatcagagggtgacctgggtggggcatgggggtggaagtttaggtcattttgttgaaaacctacaatgtatcaaaggctttacatatatttccactgaatcttcacaataatcctacag

SEQ ID NO: 832389 - DNA, 120 bp, Artificial Sequence
  ENSG00000287949_7 (sequence is synthesized)
ctgggcagtagaaactccattttgcaaataagaaacctgggactaacagagtaacagctgaattggttctgaaagccaccaaaaccatctgccttttaaatccattctctttctctctat

SEQ ID NO: 832390 - DNA, 120 bp, Artificial Sequence
  ENSG00000287949_8 (sequence is synthesized)
aactcgctcactgcagtccactaggagtttgtgaaacagatgtgctttcaggtctgttacatctgggtgtgaataccaagctctgcccttaccagctctgtaactttagacaactatatg

SEQ ID NO: 832391 - DNA, 120 bp, Artificial Sequence
  ENSG00000287949_9 (sequence is synthesized)
cctctctgagcctctattgcctcctgtattaaacaggggcatcactgaccttacaaaactattgtaaggttttgtaataatatatgtaaattgataggctcataataggtagtctgcaga

SEQ ID NO: 832392 - DNA, 120 bp, Artificial Sequence
  ENSG00000287949_10 (sequence is synthesized)
tagaagccacagtgaattagaaacatgtatttttccactaaaccacatacattacaataaggtataaaaagaagcaataatttataagcttgtattctagatcacattccctggtaggcc

SEQ ID NO: 832393 - DNA, 120 bp, Artificial Sequence
  ENSG00000287949_11 (sequence is synthesized)
agaacatctgggccagaaatccttggcatgcacaggtgaaaataaatacactcttaactactcttcaaggaaagtaaaggagagaagttcgcaggaccggtaaattccaaggtcaagttt

SEQ ID NO: 832394 - DNA, 120 bp, Artificial Sequence
  ENSG00000287949_12 (sequence is synthesized)
acagcacgtaaagtgctatgaaaactctgtgacatcacatgtattcattttacaaggctccagaactatacttcatgctttaaggattcagaaaagctttaagacatatagttcctataa

SEQ ID NO: 832395 - DNA, 120 bp, Artificial Sequence
  ENSG00000287949_13 (sequence is synthesized)
gcaaagcgataaaggggtaaaaaaaaaatgtagccaaaatgttaaatcactgaagatttcagtgatttaaaggctaaatttaaaggctaaaaacaaatttcattaaaatagatcacataa

SEQ ID NO: 832396 - DNA, 120 bp, Artificial Sequence
  ENSG00000287949_14 (sequence is synthesized)
gaaataactgtgtctagacctattaaaaatgccaactctttgcctttcaattttgagtctaaacaggcttctttgtattaaatgaccactatgaagcagctaatgcaacttctaaaatgt

SEQ ID NO: 832397 - DNA, 120 bp, Artificial Sequence
  ENSG00000287949_15 (sequence is synthesized)
taccaaatttataaacagaacaccaaatatgtgtgggtcaaagtccacatacaaatctacactactgctcctttggtggggagggaaatggtaagcacagaacagtttatcaccccataa

SEQ ID NO: 832398 - DNA, 120 bp, Artificial Sequence
  ENSG00000287949_16 (sequence is synthesized)
aaggttcatttgtagtcttacatgctgtaacctatattttaataaaaccatggtccatagctggtcaataacctcttaatcatggtcaaactacatgaccattatgtccacaaattgtta

SEQ ID NO: 832399 - DNA, 120 bp, Artificial Sequence
  ENSG00000287949_17 (sequence is synthesized)
gttttcttgctatatttttttaaaaaacaagcagcccttcctgccgtagttattttccaagaaatagtaatgagcattccaaaggataaaacagaactaaagggtgaagatgaaaaaaaa

SEQ ID NO: 832400 - DNA, 120 bp, Artificial Sequence
  ENSG00000287949_18 (sequence is synthesized)
aagctcttctacttaaagagaaaaagaggactttacacttcataaatcagctatcatctatgaggtctgacttctctttaaaataaagccacaccaataagctttttggccaaaaagtta

SEQ ID NO: 832401 - DNA, 120 bp, Artificial Sequence
  ENSG00000287949_19 (sequence is synthesized)
tagcaataagcatttggaattaattttaccaggccctttgctgatctttattgttacttgtagctccctttcctcatttcattccatgctcccaataccagttcatagaatatggaattg

SEQ ID NO: 832402 - DNA, 120 bp, Artificial Sequence
  ENSG00000287949_20 (sequence is synthesized)
ctgaaatacctatcatgctctgtaaagtccctgaggacttcttcaggtataaatcatgttggatgaaagcttaattatttgttctcaaattcaagtagaatataaatatgatatgttcaa

SEQ ID NO: 832403 - DNA, 120 bp, Artificial Sequence
  ENSG00000287949_21 (sequence is synthesized)
attgtagaaaactataaccatttaaaagtacaaggtgaagtataagtaatgacctgaaaaacccattgttaagttaaaaaaaaaaaaagacaagttggctgggcatggtagctcacatct

SEQ ID NO: 832404 - DNA, 120 bp, Artificial Sequence
  ENSG00000287949_22 (sequence is synthesized)
ttccaacactttgggaggccaaggcaatgcatcacttgagctcaggagttcaagttcagcctaggcaacatggtaaaaccccatctctaagaaattagctgggcatggtggtatgtgcct

SEQ ID NO: 832405 - DNA, 89 bp, Artificial Sequence
  ENSG00000287949_23 (sequence is synthesized)
gcctgttggtcccagctacctgggaagtcaaggctgcagtgagctgtgtttgcaccactgcactctagcttaggcaatgaagtgagacc

SEQ ID NO: 832406 - DNA, 120 bp, Artificial Sequence
  ENSG00000287944_0 (sequence is synthesized)
agaacggaaagcgttggcccttctgcattacaaaacagcatagaacagtaattgccagtggaagagattaagtgtagacactaaaaatgtttactcgcaatgaatatgcataacgatggg

SEQ ID NO: 832407 - DNA, 120 bp, Artificial Sequence
  ENSG00000287944_1 (sequence is synthesized)
taggaaacagcactggaagattaaaaagagagaagggtttgtttacaaggctgggaaaaaaaaaagagtggaatgtcagttggccccgagcctgaaataggaacgaaaaacctttgggca

SEQ ID NO: 832408 - DNA, 120 bp, Artificial Sequence
  ENSG00000287944_2 (sequence is synthesized)
aggcattagggagaaaaacagatggtttgtgaaccttttattagatagaaaaatcattaatcaagcccaggctggaaatggcagggtttttggtagttcatattttagtttattttttct

SEQ ID NO: 832409 - DNA, 120 bp, Artificial Sequence
  ENSG00000287944_3 (sequence is synthesized)
ttttttttttttttttttggtctttttgggacagtcatctatggataatctgtcaataggcactgcatttgtatgacattccacattaaagccagcttcattttaaggtagtgttagtac

SEQ ID NO: 832410 - DNA, 120 bp, Artificial Sequence
  ENSG00000287944_4 (sequence is synthesized)
aaggtagtgttagtactcatttgttctactgagaaaattcctccaaagggtttcacatttcggcacctgttttgcccatatagcaatttaaaaaaaattgcagcatgaaatatttttttt

SEQ ID NO: 832411 - DNA, 120 bp, Artificial Sequence
  ENSG00000287944_5 (sequence is synthesized)
tcattcatgtgccattcctttgctttgggaacttggagaagaaaatggagaagaggaaacttttacatcaactgtggaagtcaaggccagaaatcactcactatatcatctgatattcct

SEQ ID NO: 832412 - DNA, 120 bp, Artificial Sequence
  ENSG00000287944_6 (sequence is synthesized)
gagaaggttttctaattgcaggtctctgttctgatcccattaccatctccctctgattatcattctcctgaaaatcttagcttcattcataccccttcccttcccttagtttcctttatg

SEQ ID NO: 832413 - DNA, 120 bp, Artificial Sequence
  ENSG00000287944_7 (sequence is synthesized)
aacttatttatcttcatgcaatttgcctgcagttaatgtcatcgttaaataaagaatgccataaaggaacgagatcagcagtgaccttctgcacagtttccaaagcctcgccaacctacc

SEQ ID NO: 832414 - DNA, 120 bp, Artificial Sequence
  ENSG00000287944_8 (sequence is synthesized)
tccgtgtcctggtctgacttatggcagaaacagaagttcaaagacctggctgatatgctccgttaaaaacccttccacaacgcagttaacattttctgttttctgactttctttttctaa

SEQ ID NO: 832415 - DNA, 120 bp, Artificial Sequence
  ENSG00000287944_9 (sequence is synthesized)
agagatgcttaaagcaaaaaaggtttcctgccacaaaaatgacattaatatttcgtaaatcaagaactaagataatgttttggctgctacagagacgtttaccttatgtcgtttatctaa

SEQ ID NO: 832416 - DNA, 120 bp, Artificial Sequence
  ENSG00000287944_10 (sequence is synthesized)
atgcttttcgattaaaacatgacacaatttttggactgttttttaccggaaaaaacaattccaagaactttcttatttcagagcctaaaattctttagtatattcctcatcagaattcac

SEQ ID NO: 832417 - DNA, 120 bp, Artificial Sequence
  ENSG00000287944_11 (sequence is synthesized)
tgtggagtatacagccttttagctcattcagaaagtcttcccaaaaaacaagcctttgccaaagatcatttgagtgcactaaatcaaataatcaactaaaagtcaagaagaaaccttcaa

SEQ ID NO: 832418 - DNA, 120 bp, Artificial Sequence
  ENSG00000287944_12 (sequence is synthesized)
atgaaaaccatataaatatgtttgtaaactttcaagtaactgcaatgtcaacaattgtattccccaagatacaattcttttctatattgacctattaaaaaactcgattcgttcaaagaa

SEQ ID NO: 832419 - DNA, 78 bp, Artificial Sequence
  ENSG00000287945_0 (sequence is synthesized)
gtgctgccagtcaaacagttatagccagacacagtggctcacaactgtaatcccagaactttgggaagccagaccaac

SEQ ID NO: 832420 - DNA, 86 bp, Artificial Sequence
  ENSG00000287945_1 (sequence is synthesized)
acttgaggtcaggagttcaacaccagccagaccaacatggtgaaaccccttatctactcacccataatcccagctacttgggaggc

SEQ ID NO: 832421 - DNA, 84 bp, Artificial Sequence
  ENSG00000287945_2 (sequence is synthesized)
atgggccaaaaaacagttaactgtgaaacagcctcaggcagggcctgcaggaggtaccagaagaaggccttgctatcatgggag

SEQ ID NO: 832422 - DNA, 120 bp, Artificial Sequence
  ENSG00000287945_3 (sequence is synthesized)
ctgcaggaggtaccagaagaaggccttgctatcatgggagataacagctccatgagtgctgtcacctctaaagcccttcaagtgtgttggaaatgggtattcaatgtcgcagaaatcaac

SEQ ID NO: 832423 - DNA, 120 bp, Artificial Sequence
  ENSG00000287945_4 (sequence is synthesized)
aaagggtgctactcgctagcagttttgccagagagcacacacaaaagagacagggtcatttatagtctgacacgtccaccctatggctgtgtccagtttccattggctggaatgggacct

SEQ ID NO: 832424 - DNA, 120 bp, Artificial Sequence
  ENSG00000287945_5 (sequence is synthesized)
ggctggaatgggacctcacattctgtacttgtcctgattggctagcaacttagaacatcccaaaagagacatacatagaggagaacaaaggaaaggaggaagtaacttgtggaatgctga

SEQ ID NO: 832425 - DNA, 120 bp, Artificial Sequence
  ENSG00000287945_6 (sequence is synthesized)
agaggaacaggctatgacctaatgctttcttgggcctgtacagactgcgaggaaagtccctttgaagaggaacctctacttcattttctacagagtgggacagaggtgctggtggaagac

SEQ ID NO: 832426 - DNA, 75 bp, Artificial Sequence
  ENSG00000287945_7 (sequence is synthesized)
cggctaatgtgtgtgtttgtgtcttgtttttaacaaaaaagtttaaaaagacaataaaaattttaaaccagaaaa

SEQ ID NO: 832427 - DNA, 120 bp, Artificial Sequence
  ENSG00000287946_0 (sequence is synthesized)
aggtatcagtgttccctggcaccactgtctgctgagctgtgtgtgtcagaaacagagggaaccaggtgccagtccctcccctggcctagctcttcccactaccatgactcttgttgggag

SEQ ID NO: 832428 - DNA, 120 bp, Artificial Sequence
  ENSG00000287946_1 (sequence is synthesized)
tgaaaggattttaccccctttctttgtcagcagctggcctggactcccaggggagcctggtcaatattaatggacacgcaaggctgtggggcacacagggttttgtgattatggattatc

SEQ ID NO: 832429 - DNA, 120 bp, Artificial Sequence
  ENSG00000287946_2 (sequence is synthesized)
cagagatagctggggaagagtgttcctggaacaaggaacagcaagcgcaatggcccagaggcagcagcacatttgcaaaccttttcttaaagggccagatggtattttttggctttgtgg

SEQ ID NO: 832430 - DNA, 120 bp, Artificial Sequence
  ENSG00000287946_3 (sequence is synthesized)
gctgaatggtctctgtcaaaaccactcagctttgccactgcagcacccaagcagcctcagacaatacctaaatgaacatgtgtggctgttccaataaaactttatttacggacactaaaa

SEQ ID NO: 832431 - DNA, 120 bp, Artificial Sequence
  ENSG00000287947_0 (sequence is synthesized)
acggttctgcagactgtacaggaagcatggtgctggcgtctgcttcagtacagaaaaaagtactagatgccagcaagatgataattattttctgagaatgtgaggaaagggagaaggctg

SEQ ID NO: 832432 - DNA, 120 bp, Artificial Sequence
  ENSG00000287947_1 (sequence is synthesized)
aatgtcagtggaaatcacgttctggttactaacagaggaatttgattctggccgtcttaatacaaaatgggattcactagaatcctctcatgtgcttggaggaaaaactgaaagtccgtg

SEQ ID NO: 832433 - DNA, 120 bp, Artificial Sequence
  ENSG00000287947_2 (sequence is synthesized)
cttgagaactgaacaggcatcaaggggggctggacagtggtgagcagaccaaagtgcatgccatgggaagattttggtcagcacaacatcatcattacccccaggaataatacagtcacc

SEQ ID NO: 832434 - DNA, 120 bp, Artificial Sequence
  ENSG00000287947_3 (sequence is synthesized)
atctggctccatcatctgaagtcacttgctcaggatataaagtcccaagagagagaatttggtttgctatgcttgagttaatttcttcaaacaggctcatagaaacaactttataaccca

SEQ ID NO: 832435 - DNA, 120 bp, Artificial Sequence
  ENSG00000287947_4 (sequence is synthesized)
gaactctgaccagacgggaatcaacatattgtgatgtcataatgtaaacatattcatctaggaacttagctggtatgcaatgcaaaagagggctatgcacgtatcaagttatttcatttt

SEQ ID NO: 832436 - DNA, 120 bp, Artificial Sequence
  ENSG00000287947_5 (sequence is synthesized)
ctttgacttctgtaggggcattcctctggctcgacttcctaatggagtgctatttaaatcactgcgactggatgactgttaatagtgctgcacgggaaggaactggatactaatatttta

SEQ ID NO: 832437 - DNA, 120 bp, Artificial Sequence
  ENSG00000287947_6 (sequence is synthesized)
ttctagggttaatttaaaaccatctgaaaactgacttcctcataatgaatcagacttagctgggagcatgataaatttaattataatggacttcctgtgggtattgccagtcatttacat

SEQ ID NO: 832438 - DNA, 120 bp, Artificial Sequence
  ENSG00000287947_7 (sequence is synthesized)
attcattgagtcccatgaagtagtttttcttaccattttgagtgttaaaaccaaggaaaggctaaagcacagaaaggagaaataacaaatttgtctataattaaatgtgaacaggtctct

SEQ ID NO: 832439 - DNA, 120 bp, Artificial Sequence
  ENSG00000287940_0 (sequence is synthesized)
agagaagattgcgtggattgcaagagtcatgtccgtgagagaaaattcctaacctggaatttaatgactggatagagctggattttactggaaggaataggccttcggattcagaatgga

SEQ ID NO: 832440 - DNA, 120 bp, Artificial Sequence
  ENSG00000287940_1 (sequence is synthesized)
cctataccgtcagctctcctgggactccagcttgcaagtttggggacttcttagcctccataactgcatgagccaattcattgtaatctctcaatagacagataaagagatagatctttt

SEQ ID NO: 832441 - DNA, 120 bp, Artificial Sequence
  ENSG00000287940_2 (sequence is synthesized)
attggttctgtcactctggaaaacctggactaatacactgccttaacaattaaaggaaattactggctcaagcaccaattcagttaaagtcgatttagtgttatctgattcaatagttac

SEQ ID NO: 832442 - DNA, 120 bp, Artificial Sequence
  ENSG00000287940_3 (sequence is synthesized)
agaacgtaatgaaggaccagttttcgaccttttcaatgctatccttttctgcaggcaacttcatgttaaagggactacccttgtggttagaaaagttaccagtagcaattcaacttacgt

SEQ ID NO: 832443 - DNA, 120 bp, Artificial Sequence
  ENSG00000287940_4 (sequence is synthesized)
gttttctgtttcattaccagcatattaaaatagaaccttgctattaacttgacactaaagcaatgactacatccaggtgaatggcaggaggcaattgaataaagtcaatcagatgcacag

SEQ ID NO: 832444 - DNA, 120 bp, Artificial Sequence
  ENSG00000287940_5 (sequence is synthesized)
tatgagtggagtttggaagttgtacaacctgaatgataatcttgatagtagatatgggaaggagagttctaattctgggtatgcaaccaacaatatccgctctacttgggcttacttaac

SEQ ID NO: 832445 - DNA, 120 bp, Artificial Sequence
  ENSG00000287940_6 (sequence is synthesized)
agggaggaacctgttgacaggaacataggcagtagacactacctctttagagagcctggaacaagagatctcagagttcaaaaacactgtacttcaggttagaaggtcttatactgagtt

SEQ ID NO: 832446 - DNA, 120 bp, Artificial Sequence
  ENSG00000287940_7 (sequence is synthesized)
tacgattatagataacatgcaatcaacaaaagtggtttcttctataaaataaaaataacattattgtcacagttttgcaaagaagttattgggatcttacaatcagatacatagatttct

SEQ ID NO: 832447 - DNA, 120 bp, Artificial Sequence
  ENSG00000287940_8 (sequence is synthesized)
tgataagagactaagaaatcatggtttaataattaccattcaaactaaatatctacagtgaacatgcttgtgaataagaagaggacagactccttcttttacctactcttcctaatctat

SEQ ID NO: 832448 - DNA, 120 bp, Artificial Sequence
  ENSG00000287940_9 (sequence is synthesized)
tttacttttactcatttatctttttccttttcaaatgacagagcccagataaatggtaaatctgaaagaaattgttacacctctggaaataatcaaagacttaatgtgtttttatgtaac

SEQ ID NO: 832449 - DNA, 120 bp, Artificial Sequence
  ENSG00000287941_0 (sequence is synthesized)
gtgtccattcggatgtggagtttggagaggccctccttgttttccaggctgtgagccatgggaagcgtgtcaaccatgtcaaaccaaaggatcaagaaattgaagattccgttcacttgc

SEQ ID NO: 832450 - DNA, 120 bp, Artificial Sequence
  ENSG00000287941_1 (sequence is synthesized)
cttggagtttgagtttgtgcttttgtgttgtatttaagaaattattgccaacttcaagctcactttctggctttggaggtagagaatgaggtctgcaatccaaggaatcagaagcctctg

SEQ ID NO: 832451 - DNA, 120 bp, Artificial Sequence
  ENSG00000287941_2 (sequence is synthesized)
gagctagaaaagatttactccttatgcttccagaaaggaaaacagccttggcaacaccttcattttatcccaaatgagaaccgtgtcagacttctaacatacagaactttaatataataa

SEQ ID NO: 832452 - DNA, 120 bp, Artificial Sequence
  ENSG00000287941_3 (sequence is synthesized)
tttatgttgttataagccacaaagtttgtggtaatttgttacagcaacagtagaactgtttctaattttggtttctgattttcttttctagtatataaaaataaaattgatttttttata

SEQ ID NO: 832453 - DNA, 120 bp, Artificial Sequence
  ENSG00000287941_4 (sequence is synthesized)
gtgaccatgtctctttcaaccgtgataaacttgttagctctaatagcttttttgtagacttctttctaatatggaagattttatttcattttcttgacttactgtcttgtctagaatatc

SEQ ID NO: 832454 - DNA, 120 bp, Artificial Sequence
  ENSG00000287941_5 (sequence is synthesized)
tagtataatattgactagaagtagtaagagtgagcatccttattgctttcctgatttggggggaaagcattcagcctctcaccattaaatgttagctatagatttttctgtgttagctac

SEQ ID NO: 832455 - DNA, 120 bp, Artificial Sequence
  ENSG00000287942_0 (sequence is synthesized)
gggcttagccacatggctaaatgtggccaatgagaccttagcaagtttaacgtaagcagaagtttggcgcgcactattatggattgagtgtttgttgctccccaaagctcatatgtgaag

SEQ ID NO: 832456 - DNA, 120 bp, Artificial Sequence
  ENSG00000287942_1 (sequence is synthesized)
gagattatcctccagtggagagaggataatggagaaaccctggaatgtggggtattatatgaagagagtgaacatgtagaagaaaactgaaggttcttttcctgtttccaacagtcaata

SEQ ID NO: 832457 - DNA, 120 bp, Artificial Sequence
  ENSG00000287942_2 (sequence is synthesized)
tttcagcctcttgcaaacatatgagtgacgcagccagcataacatgaaacacaaggctcattaagtttacccaaaggaagcacaacaaatactaaaccattgttgttttaagccactaaa

SEQ ID NO: 832458 - DNA, 120 bp, Artificial Sequence
  ENSG00000232063_0 (sequence is synthesized)
gaggcgggcggggttccagcgcgcagccggccgccctcaaccgctcccagcatcggttgccggtggttcggggcagggagacgacgcagcgcgagcggaaagggcggttacccaacggcc

SEQ ID NO: 832459 - DNA, 120 bp, Artificial Sequence
  ENSG00000232063_1 (sequence is synthesized)
ttagctctcatggcgtcctccgtggtgttacctaaaaataaagttatttgtgattagaaggtaatcgcctcctggtcatgcttccgctggtcaacagtgtctgcggggcgaccccatcct

SEQ ID NO: 832460 - DNA, 120 bp, Artificial Sequence
  ENSG00000232063_2 (sequence is synthesized)
tgtggccagagagggcctgtggctgcgctcaaggcgggagcggtccttagcggggccctgcgggacgcccaggccgcgctcctttcccttgctcgcctggccttgaagtgaagggggagg

SEQ ID NO: 832461 - DNA, 120 bp, Artificial Sequence
  ENSG00000232063_3 (sequence is synthesized)
tttaacaatgcagtgggaaccccaaagtttgtctcggccgtgctgctcacattccaaacaatgcaaaaggttgaggaaaacctcagcagttgaaaccgtgatgcatttcagcaaagaagt

SEQ ID NO: 832462 - DNA, 120 bp, Artificial Sequence
  ENSG00000232063_4 (sequence is synthesized)
agctcctgtcctcgtaaaatcagtgaagttctcacggacgacctcattgaaagttttcatgggctgagctgctgacttcagcctgggaactgaggccaacatcggagtctcctcggcaca

SEQ ID NO: 832463 - DNA, 120 bp, Artificial Sequence
  ENSG00000232063_5 (sequence is synthesized)
caagtttgaaagaagtcctagtgacttcaagctcagaaccatggacggcagggctccctctggatgtggaattctccgtccctttccagggagggaacaaagcccacaagcaccgagact

SEQ ID NO: 832464 - DNA, 120 bp, Artificial Sequence
  ENSG00000232063_6 (sequence is synthesized)
ccttcagggtgagcaaaggcctggaaaaacctgtatgcagataaagaaaaggaaagaaagagataatcagtgcatgcagttgtcagctggctgggacctgaggagagtcacttgtggagg

SEQ ID NO: 832465 - DNA, 120 bp, Artificial Sequence
  ENSG00000232063_7 (sequence is synthesized)
caactggtctttatccccattgtccggtacaaggcaggcattaatcctgtgatccttatctgaagctcaggtttgattttattcttttcttaagtacctactgttatccccaagcttata

SEQ ID NO: 832466 - DNA, 120 bp, Artificial Sequence
  ENSG00000232063_8 (sequence is synthesized)
ataatagtttaattgttacagccagtatctcaccttcagaagtaagatgcttaggaaaccaagacaaggaactgtgtgttgcaaacagcatcaccctggagaagaggtggcaggaggtga

SEQ ID NO: 832467 - DNA, 120 bp, Artificial Sequence
  ENSG00000232063_9 (sequence is synthesized)
cctacagaaaatggagtaatagcctagagcaagaaacacagaacaaaagagaaatgaggggttaggcaacctcctggagcaccaatgggacaagcacatattcaggggcctcctaacaga

SEQ ID NO: 832468 - DNA, 120 bp, Artificial Sequence
  ENSG00000232063_10 (sequence is synthesized)
ctcgacttccagcatcctcagatggtgctagacacgttacatagacgttcaagagtagagaactcagggacttctgatttatatcaagaaatgcatacacagcagacgtgtgcctgtgga

SEQ ID NO: 832469 - DNA, 120 bp, Artificial Sequence
  ENSG00000232063_11 (sequence is synthesized)
gtggaattctggaaaagctcacagcccagaacataatgcagactcccccagccacagcaccttccaaacctgagaagagtgctgattctccatctgagcacccattctcctgcaacatca

SEQ ID NO: 832470 - DNA, 120 bp, Artificial Sequence
  ENSG00000232063_12 (sequence is synthesized)
ggggagaggatttcacctaagggtcagaccagcatctccaaacccagctccccacctttgcctgttggtggcacttgtgggagaaggggagatggtatgaaaagagccacaacaggagtc

SEQ ID NO: 832471 - DNA, 120 bp, Artificial Sequence
  ENSG00000232063_13 (sequence is synthesized)
acctggacagggtggagcttgatggaaactgacatttgtgcccattggaggcaaatgtagaatttggtatcttccgtagcgtcaggcacatgaaactctccagtgcccatgacttttgac

SEQ ID NO: 832472 - DNA, 120 bp, Artificial Sequence
  ENSG00000232063_14 (sequence is synthesized)
agtgacttcagagcacatctgggagacccatgtggcccaggctccacacaggcaggagctcagcttcactcacagcaggattcctagtgccaagaacaccataggtgcatagcaggtgat

SEQ ID NO: 832473 - DNA, 120 bp, Artificial Sequence
  ENSG00000232063_15 (sequence is synthesized)
caaaataattgtatgtggctgaatcagtgagaggtaagagagaggacttgatcctagctgcaaactaagagacctcattaaaacctaacatgtggctgggtgtggtggctcacgcctgta

SEQ ID NO: 832474 - DNA, 120 bp, Artificial Sequence
  ENSG00000232063_16 (sequence is synthesized)
tgcagtgagccgagattgcaccactatactccagcctggcaataagagcaaaagtccgtctcaaaacaaaaaacgaaaaaacaaaaaacacctaacatgtgaggcccagcatggtggctc

SEQ ID NO: 832475 - DNA, 120 bp, Artificial Sequence
  ENSG00000232063_17 (sequence is synthesized)
aacaaaaaacgaaaaaacaaaaaacacctaacatgtgaggcccagcatggtggctcagacctgtaatcccaggattctgggaggctgaggctggaagattgcttgagcccaggagttcaa

SEQ ID NO: 832476 - DNA, 81 bp, Artificial Sequence
  ENSG00000232063_18 (sequence is synthesized)
gagttcaagaccaacctgggcaacatagcgagaccctgtctctgggaaaaaaaaaattacctgggcatagttacggagccc

SEQ ID NO: 832477 - DNA, 120 bp, Artificial Sequence
  ENSG00000232063_19 (sequence is synthesized)
ctgtattccagcctgggcaatggagcgacaccctgtctgtcttcaaaaactatatatatatggtgtatgtgtgtgtatgtatgtgtatgatatcagaaaaaaataacctattcatggtgg

SEQ ID NO: 832478 - DNA, 120 bp, Artificial Sequence
  ENSG00000232063_20 (sequence is synthesized)
gggaaaaaagagcctgacttttgaggtgtataagcgtggagtcgggttcaaatcaggctctgatctttctggctctgtgatatggggcagggcatattaccaagctcagcctcagcatct

SEQ ID NO: 832479 - DNA, 120 bp, Artificial Sequence
  ENSG00000232063_21 (sequence is synthesized)
ctacctgtgaaatgggcttgattcagtacaccacacagggctgctgtagtatgtatgaattaatgtttgtgaaatatttagcatggtgcctgacacatggtactcagtaagaaacaacta

SEQ ID NO: 832480 - DNA, 120 bp, Artificial Sequence
  ENSG00000232063_22 (sequence is synthesized)
ttgctattaagtgctttgcactttggttttcacagagctaacaatttttactgtctagctttgtgtctttgaaagatttttgagctctgagaatgaccttttaagacctcagcacttcta

SEQ ID NO: 832481 - DNA, 120 bp, Artificial Sequence
  ENSG00000232063_23 (sequence is synthesized)
gaagaggtcacactttgagcttcaatagctagcatttttgtcaattagttaacagtgtgctgaaagcaagtccctgtagagagtgttcacgggcatgagccacagggaatacaatgtgag

SEQ ID NO: 832482 - DNA, 120 bp, Artificial Sequence
  ENSG00000232063_24 (sequence is synthesized)
gcctgtggaggtggcagctgaggatgtcaacagggaaagcacagagtaccaaagacaaaagttgcccaggacagttctgtgttagctacctggtggcagcctggacacccaaagatagag

SEQ ID NO: 832483 - DNA, 120 bp, Artificial Sequence
  ENSG00000232063_25 (sequence is synthesized)
ctgaagacacctctaatacaagaggcggatgccccggagacgtggctgattccttggctaatttcctcagccccaccgttgtgcagctttgtgacttcctggagagcctacatgcaaaca

SEQ ID NO: 832484 - DNA, 120 bp, Artificial Sequence
  ENSG00000232063_26 (sequence is synthesized)
gaaaagtcccaggataaagaaatgtggatattccacacattttaaaaagacctggagggatgaagaggacaagctgtcccagtaggccccggactgccctggttttaacactaaatgtcc

SEQ ID NO: 832485 - DNA, 120 bp, Artificial Sequence
  ENSG00000232063_27 (sequence is synthesized)
gacatcctgataacccttactcccaggcaaatcaggccagttggtcatctaattggaggttatcaaaggaggtgggttttagcatcctctttcctttcctgttacattgagaccatgggg

SEQ ID NO: 832486 - DNA, 120 bp, Artificial Sequence
  ENSG00000232063_28 (sequence is synthesized)
tgctattgaataaacttgattcggtttcttcaaaaaaagccagaaattgatctaataggttttgctcatatttggtaattgaattggactgtatacagtctgcacgtttaccttattttc

SEQ ID NO: 832487 - DNA, 120 bp, Artificial Sequence
  ENSG00000232063_29 (sequence is synthesized)
cattatataatggtaccaaatatcacaatgattttcaaaaattaatgcttttagtgatggattactaggtgttgaaatgctttataatatacttatgaaaacatttatacaaataatttc

SEQ ID NO: 832488 - DNA, 69 bp, Artificial Sequence
  ENSG00000232063_30 (sequence is synthesized)
atacttatgaaaacatttatacaaataatttcatcctccacatgacatttagaaaagtttagtctggct

SEQ ID NO: 832489 - DNA, 83 bp, Artificial Sequence
  ENSG00000232063_31 (sequence is synthesized)
gtctctactaaaaatacaaaaaatagcccagtgtggtggcgcacacatgtagtcctagctacttggtaggctgaggcagcccc

SEQ ID NO: 832490 - DNA, 120 bp, Artificial Sequence
  ENSG00000232063_32 (sequence is synthesized)
ggcagaggttgcagtgacccaagatcacgccactgcattccagcccaggagacagggtgagactctgtttcaaaaagaaagaaaagagaagagaaaagatgaaaaggaaatgtttagttt

SEQ ID NO: 832491 - DNA, 120 bp, Artificial Sequence
  ENSG00000232063_33 (sequence is synthesized)
gtttgaaattccgttaccgaaagttctcgggggttgggggaggtgggaggcaatatctttttgctattatatttcttatagtgcagtgtcagtgaaactatgtcatcctttgtaaaatca

SEQ ID NO: 832492 - DNA, 71 bp, Artificial Sequence
  ENSG00000288398_0 (sequence is synthesized)
ttttttttccagagtcttgctctgtggcacaggttggagtacagtggtgcactctcagctcactgcaacct

SEQ ID NO: 832493 - DNA, 79 bp, Artificial Sequence
  ENSG00000288398_1 (sequence is synthesized)
tattgttagtagagatgggggtaataatccgctcgccacagcctccgaaaatgctgggattacaggcacgagccactgc

SEQ ID NO: 832494 - DNA, 120 bp, Artificial Sequence
  ENSG00000288398_2 (sequence is synthesized)
gggattacaggcacgagccactgcgcccggcctgcaatgcctttcttgatcatggagttgtcaggccaggcttaggataggagtcttggcagcccaggggcacccgaaagcagcaccatg

SEQ ID NO: 832495 - DNA, 120 bp, Artificial Sequence
  ENSG00000288398_3 (sequence is synthesized)
cgaaagcagcaccatgcagggccaacgaccatcccagtgggggtcagggcgtgagctggcctgagaggcagctctgccccgtgggaggccattgaggacaggagctgggagaggagtgag

SEQ ID NO: 832496 - DNA, 120 bp, Artificial Sequence
  ENSG00000288398_4 (sequence is synthesized)
taggcccagccttgtgtcttggccctgccccataagccagagactggtggaagtaggctaaggaggatgaggggaagtccccagggaaagggacctttatacgatcccctccaatgagcc

SEQ ID NO: 832497 - DNA, 120 bp, Artificial Sequence
  ENSG00000288398_5 (sequence is synthesized)
cctgctgggccccatagatgaacccctgggctgaggcctggcgtgcgtctggctcaaagcagagtgtccccaaagccagctgactctcagaactctgcagctgtaaccaggccccactca

SEQ ID NO: 832498 - DNA, 120 bp, Artificial Sequence
  ENSG00000288398_6 (sequence is synthesized)
cacagtatgacctgtgctcacacacctgtgctaggacgaaagcactttccactcctgccggctggcacacaggaggcccagactcacctgtcctgatgcccgcgcccaagcacactgctc

SEQ ID NO: 832499 - DNA, 120 bp, Artificial Sequence
  ENSG00000288398_7 (sequence is synthesized)
acatgcccatgcacactgccagcctattcaccctgggtactgccacctacatttgtcaacccttccagggtctgggccagaggaagaattgattccagcaccttctcacccctgactaag

SEQ ID NO: 832500 - DNA, 120 bp, Artificial Sequence
  ENSG00000288398_8 (sequence is synthesized)
gcttagagctcaggccctgcacttatcccacaccccaagaaggaatgtccctgggcgggacccccacctcagagcctgcaggccggctcccactcctgcagccctcagccctgcttccag

SEQ ID NO: 832501 - DNA, 120 bp, Artificial Sequence
  ENSG00000288398_9 (sequence is synthesized)
gtgggcctgtccacgtccccctctgtccttaactccaggagaccttggctcacgtggacagcaatggagttgggggaagggccctgaaggcagccccaggcctgactgtgggcctccagc

SEQ ID NO: 832502 - DNA, 120 bp, Artificial Sequence
  ENSG00000288398_10 (sequence is synthesized)
tacaggcgtttgtgtttgggcaccagctaccccacatcccagccggtcatctctgggcataaacccccaccccccagaaaggaggcttcctgtccctcttgggcaccagctcagccaaaa

SEQ ID NO: 832503 - DNA, 120 bp, Artificial Sequence
  ENSG00000288398_11 (sequence is synthesized)
taacctgacccccccacggcgaggcagggcagtcttctcctggctggcactgctctggtcatagaattgatccttcatccacctttaccccaaacaagaggtgtctccctgggtgaggac

SEQ ID NO: 832504 - DNA, 120 bp, Artificial Sequence
  ENSG00000288398_12 (sequence is synthesized)
aaagtggggagggcaacagggctggggcttagagcccctccaccagccatccagggctgccttctcagctcctcccagcgcagcaccggtgccactttagtatttagtaggccacccccg

SEQ ID NO: 832505 - DNA, 120 bp, Artificial Sequence
  ENSG00000288398_13 (sequence is synthesized)
ggacctccatcaccacagtgcagaactggaagccacaatgctttgaatagtcgacgcctgtgcctcctgggaggtctctgggcagccctgtggagagtgagtgagaggagagtgtgttct

SEQ ID NO: 832506 - DNA, 120 bp, Artificial Sequence
  ENSG00000288398_14 (sequence is synthesized)
tacatgcacgtgttcaggctgatggcatgggactgtgacccgtccagtcacacagggtctcaaactccaaggagccccacacctggtttaatgctctgctgttgccctcttgctgatgcc

SEQ ID NO: 832507 - DNA, 87 bp, Artificial Sequence
  ENSG00000288398_15 (sequence is synthesized)
aggctggagtgcagtggcacaatcatcattcactgtcgtttctccccagccccggaagtagctcccaccatacccagctaattttaa

SEQ ID NO: 832508 - DNA, 120 bp, Artificial Sequence
  ENSG00000288398_16 (sequence is synthesized)
ccgtttctccccagccccggaagtagctcccaccatacccagctaattttaaaactttttgagagaccaagctggtctcaaattcctgggctccactgggtgcagtggctcatgcctgta

SEQ ID NO: 832509 - DNA, 120 bp, Artificial Sequence
  ENSG00000288398_17 (sequence is synthesized)
ctcaaaaacaaaacaaaacaaacaacaaaaaatgggctggaggagcgggttgtaggcccttccgcctctggtgggtggggagaagcaggggagctggtgttcagctatattctacaaaga

SEQ ID NO: 832510 - DNA, 120 bp, Artificial Sequence
  ENSG00000288398_18 (sequence is synthesized)
aggggtggatcctgagaggcaagggtgggactgaggcctagttacaggtggtcgggaaggaggttgaaggggaactgtgtgaccttggatgttctttgtaattatcttatgcttagctga

SEQ ID NO: 832511 - DNA, 120 bp, Artificial Sequence
  ENSG00000288398_19 (sequence is synthesized)
cacatctgtaaaatggagatagcagcacccacttctttgagttgtgagaagtaaatgcatgtgaaatgtttagcgtgtgccgggcaccaagttaagagcccagtaaatgttggctgttat

SEQ ID NO: 832512 - DNA, 120 bp, Artificial Sequence
  ENSG00000232878_0 (sequence is synthesized)
cgctcagaatttagaacagcacctggcatatgaaaggcacattgctttcatgacggagatctgaggatccttctaagaaattgtttatccccagagaaaagacctgaagatactcacatt

SEQ ID NO: 832513 - DNA, 120 bp, Artificial Sequence
  ENSG00000232878_1 (sequence is synthesized)
aataaagctccctagctgttaaatttcactcacatactcaaggcttccaatcaactttttaatatctcacacttaaaaactaaattgaggatgtcttgaatctccagacatttcagaagt

SEQ ID NO: 832514 - DNA, 120 bp, Artificial Sequence
  ENSG00000232878_2 (sequence is synthesized)
tcactcttttgcccaggctggagtgcatgggcgcaatcttggctcactgcagcatcgacctcccagactgaatcgctcctcccacctcagcctcaggagtagctgggactacaggcgcat

SEQ ID NO: 832515 - DNA, 89 bp, Artificial Sequence
  ENSG00000232878_3 (sequence is synthesized)
cactgcagcatcgacctcccagactgaatcgctcctcccacctcagcctcagtgccaggctaagttttgtgtttttggtagagacaggg

SEQ ID NO: 832516 - DNA, 120 bp, Artificial Sequence
  ENSG00000232878_4 (sequence is synthesized)
caagcaatctgcccgccgcagcttcccgaagtgctgggattccatgtgtgagccatcgctctcagcctgataattttcttaaaattgccagtgctactgtaagagacatagttaagttta

SEQ ID NO: 832517 - DNA, 120 bp, Artificial Sequence
  ENSG00000232878_5 (sequence is synthesized)
aaaaggaaaaccaaggtattgcttagttgtcataaagttgtgtgaagattaagtgaaatatgttagtggttttctcacagagtatacacacagagagttacactttacacagaaatctat

SEQ ID NO: 832518 - DNA, 120 bp, Artificial Sequence
  ENSG00000232878_6 (sequence is synthesized)
atatcccacaagtaaactgattttaagggaatcattttctagtttcccaatttccatatgtatgatgtcttaaattttgtatgcctgagaaacaatgcaatcaaggcatcccgctggttc

SEQ ID NO: 832519 - DNA, 120 bp, Artificial Sequence
  ENSG00000232878_7 (sequence is synthesized)
ttctgtctcaactcctctgtttcaacagtctttcccttactttcgaaaaaaagcatatttttcattgatctcaaatattacaataacatatacatagaatataaaaatttggggatacca

SEQ ID NO: 832520 - DNA, 120 bp, Artificial Sequence
  ENSG00000232878_8 (sequence is synthesized)
acattgagaaaatctaccacagctgcccattaagatgttgacactgataaggtctaagatgctgcaatccctgcttcctgtctgctcaatgctctacgctcagaatttagaacagcacct

SEQ ID NO: 832521 - DNA, 120 bp, Artificial Sequence
  ENSG00000232878_9 (sequence is synthesized)
ggcatatgctcttgcgatgctcacaatatcagtgacatttggggtcagcttggcaaaaaaaggaatctgaacagcttgcctaacccagcggcagatgttccgcaccagctctggatcctg

SEQ ID NO: 832522 - DNA, 120 bp, Artificial Sequence
  ENSG00000232878_10 (sequence is synthesized)
aaaggaaacatggcgaggttaccccattttggggagtttattacaactatacatggaaaaataaaaaagtaagtgaaatgtttttggtaaaggaagggctaggcctctggggattgggac

SEQ ID NO: 832523 - DNA, 120 bp, Artificial Sequence
  ENSG00000232878_11 (sequence is synthesized)
accataaatcattttgtaagacatacagcagctctaaagagcagctcctgttttcttgttgttactttaggaatgggtgtctattgttttaaggattaaaaactctgcaatacgaataca

SEQ ID NO: 832524 - DNA, 120 bp, Artificial Sequence
  ENSG00000232874_0 (sequence is synthesized)
agcctgccagagacgtggtagctgccctgccaagagctatcctgggagggctattgaacgagctttgaggctgcagccagcttccagcagtcccagtgcccagaaacagcacattccagg

SEQ ID NO: 832525 - DNA, 120 bp, Artificial Sequence
  ENSG00000232874_1 (sequence is synthesized)
gtcacctttgtaatgaccaccttgctgcccccgttctctggcatgtgctgactggtagcttgagaaccctctactagaatcagtatcatagtctttctagatagcagtctgtatgtgctg

SEQ ID NO: 832526 - DNA, 120 bp, Artificial Sequence
  ENSG00000232874_2 (sequence is synthesized)
atcgcagaattcataaccaggatttttttttttttacctataaagcccctgaaatggaatttcaacgtgtgtctgtatgtgcatatttaacaggagcttaataaatattttccaaatgca

SEQ ID NO: 832527 - DNA, 120 bp, Artificial Sequence
  ENSG00000232876_0 (sequence is synthesized)
tgcaagcggggaaccttgagctacctacgccagcgttctggattattttccaaatttggttcctgataatctgagaaagctatgcgctcagtaagagcagggaccttgttttatcaaact

SEQ ID NO: 832528 - DNA, 120 bp, Artificial Sequence
  ENSG00000232876_1 (sequence is synthesized)
ttgatctttcattaagcacacagtgggcattcaacaaacttgtgtaaacttggaatcagatttagcccaggccggtgcggtggctccttcctgtaatcccagcactttgggaagcctagg

SEQ ID NO: 832529 - DNA, 120 bp, Artificial Sequence
  ENSG00000232876_2 (sequence is synthesized)
agggcggatcgcttgaactcaggtgttcgagaccagcctgagcaacatagcgaggctccgtctctacaaaaaatacaaacactagccggccctgtggtgcagacctgtagtcccagctac

SEQ ID NO: 832530 - DNA, 120 bp, Artificial Sequence
  ENSG00000232876_3 (sequence is synthesized)
ctccattccagcccgggcgacaaaaaatccagctaagtaaaaattggcaagatcctgtgacaagatcctgtgacaagatcctgtgatcaagacaaagttttgcccccaaaggacttgagg

SEQ ID NO: 832531 - DNA, 120 bp, Artificial Sequence
  ENSG00000232876_4 (sequence is synthesized)
ctatctgggaattccatgtttgacagaagcgctgacagcataaccaagcaaacaagaaggtattcagggacgctgaaacggatcttcaaagaagactcagtgggtgatttttaatttctg

SEQ ID NO: 832532 - DNA, 120 bp, Artificial Sequence
  ENSG00000232876_5 (sequence is synthesized)
tgtagtattatagagcttaatgcagaacataccaaaaccttggagaggtaatgatagggtcatgcatttcataaggcagagtaatgccctgcaacaacaaaataaagtcaaagagttcta

SEQ ID NO: 832533 - DNA, 120 bp, Artificial Sequence
  ENSG00000273008_0 (sequence is synthesized)
atccgtgtgtgtgcctccaaaaaccgtttgtggagacagcagagtgcccgaggcaggaaaccgctccggcctggaggcgcccctgcccggactcgtggactgcagcgctgtcccgctcgg

SEQ ID NO: 832534 - DNA, 120 bp, Artificial Sequence
  ENSG00000273008_1 (sequence is synthesized)
ggagtccgagcggggccgcggggcctgcgtggcagccgagtcgagggcttcgggccgcggggctgtggagcgccccttggcgctgggccgccggcagccgtgagcgcatcactgcatttc

SEQ ID NO: 832535 - DNA, 120 bp, Artificial Sequence
  ENSG00000273008_2 (sequence is synthesized)
tcactgcatttccctggaggaattcctcatctgttgaatgagggagttgaggcggacacgctgggaaatggcttcgagctcacacactgattttcgtgagtggaaagagaagccctttct

SEQ ID NO: 832536 - DNA, 120 bp, Artificial Sequence
  ENSG00000273008_3 (sequence is synthesized)
taggcgtcttccataccactgcatgttccagggtcctccctgggctctctgtctcccacgccaccgcgagcacggcctaagcgggcgagcgaaggcgcgacggcgccgagagccggctgt

SEQ ID NO: 832537 - DNA, 120 bp, Artificial Sequence
  ENSG00000273008_4 (sequence is synthesized)
ggtgggtgccgggcgcgtcaccgcgggctggcgggggaggggacgctgggaagctctccagaaagaggagccgccaccgagcaaattcccatctgccacgcaccgcagagcctcgccctc

SEQ ID NO: 832538 - DNA, 120 bp, Artificial Sequence
  ENSG00000273008_5 (sequence is synthesized)
cgccgccagcattttctttctttgttctcctagccctacaaacgctgggtttcctttctcattcgtggacttttttccctggatccttcttactgctcctaccctgtggccgcacgtctg

SEQ ID NO: 832539 - DNA, 120 bp, Artificial Sequence
  ENSG00000273008_6 (sequence is synthesized)
gctagcggcggggagactgaagccgcagggtcagggttagttgccacatgttttaaattcctatccaaacttccattataattgtttttatttatttattcatctattttttgagacagg

SEQ ID NO: 832540 - DNA, 83 bp, Artificial Sequence
  ENSG00000273008_7 (sequence is synthesized)
ttttgagacagggtccacggttcactgcagcctccccacctccgactccagcgatcctctcgcctcagcctcccgagtagctg

SEQ ID NO: 832541 - DNA, 120 bp, Artificial Sequence
  ENSG00000273008_8 (sequence is synthesized)
catgccaccatgcccggctaattgttaatattttttttggtagagatggggcctccctctgttgcctaggctggccttgaactcctgggctcaagcgatcttccagcttcggcctcccaa

SEQ ID NO: 832542 - DNA, 120 bp, Artificial Sequence
  ENSG00000273008_9 (sequence is synthesized)
agtgctggcattacaggcgtgagtcaccccgcctggcaagaattgttgttttgaaactaactgaggttctcccatcaatggatttaaattgttactttttaatgatttttttttaagtag

SEQ ID NO: 832543 - DNA, 120 bp, Artificial Sequence
  ENSG00000273008_10 (sequence is synthesized)
ccaaatactaaatgtatgtaatttgaatgtggagagaagataatgcatgattcaaattatgtggctgatcatgggtgatacactgggatatagttgtaaaataagtagttctcctaggga

SEQ ID NO: 832544 - DNA, 120 bp, Artificial Sequence
  ENSG00000273008_11 (sequence is synthesized)
aaatattaaagtacaactgtgttgggtttaatatcagaaaaatgtaattaaaaacatttcctgccaataatttccaatctgatacttaaacaaaacaaaacaataaaagtttcccatctc

SEQ ID NO: 832545 - DNA, 120 bp, Artificial Sequence
  ENSG00000273007_0 (sequence is synthesized)
ctgggttgtttattcttttacagtacattgatttttcagttttggcttttgagggagcttgctcaataggaatccaaaagtgcttttgcttataccacttctgagaattaaaaacagaca

SEQ ID NO: 832546 - DNA, 120 bp, Artificial Sequence
  ENSG00000273007_1 (sequence is synthesized)
tgatgtaagtatcaatgttgactatttcagaaaaaaaagaaacatccaaatagtgaaaagttaaaattaaatttgatctttttattttttatttttttgagatggaatctcactgtgtcg

SEQ ID NO: 832547 - DNA, 71 bp, Artificial Sequence
  ENSG00000273007_2 (sequence is synthesized)
atgctgtgattacagcactcttctttctgggaggaaactagactgctttagaaatcactgcaggaatcaca

SEQ ID NO: 832548 - DNA, 120 bp, Artificial Sequence
  ENSG00000273007_3 (sequence is synthesized)
aggaaactagactgctttagaaatcactgcaggaatcacagagtaaaatggagaagaacccagggatgtgtcataacacagtagtctgaaaaagggccaggtagaagagtgggaaggact

SEQ ID NO: 832549 - DNA, 120 bp, Artificial Sequence
  ENSG00000273007_4 (sequence is synthesized)
atgcctctggcaagtgcaagttcataaattccagtttcttcaagttacgaggcacatctgcatccccagatgatggctactggtcagaacactgaactcataccaaaagctgctgttgtt

SEQ ID NO: 832550 - DNA, 120 bp, Artificial Sequence
  ENSG00000273007_5 (sequence is synthesized)
gacagtttaatgtctatggatctgactcggagagaaatgtgccacttactgaatcaccaacaccatatctttggtgttgaggtggggcacgcttactttttcatctgaagattgacacag

SEQ ID NO: 832551 - DNA, 120 bp, Artificial Sequence
  ENSG00000273007_6 (sequence is synthesized)
cccaccaagaacatttgaaagagacaggattgctgctgaaaaggcatgacatcaagccacacaaattggatggtaagactagagattaacttgtgaacaggtcgtatgacgagagctgaa

SEQ ID NO: 832552 - DNA, 120 bp, Artificial Sequence
  ENSG00000273007_7 (sequence is synthesized)
cctcaaaggagactaagaaatcctgaatttttaatttatgcttaatagccatggctttgtctctacagagtgtttgtgatacatttctaagcattggtaaattaattcttactgcaccaa

SEQ ID NO: 832553 - DNA, 120 bp, Artificial Sequence
  ENSG00000273007_8 (sequence is synthesized)
cttggtggaaatctgttccatcagaaagagttaatacatccaaagagatagaaacacatttaagactaactttcacaagttcctgcttagctaagaatgaaactagaaaactttattttg

SEQ ID NO: 832554 - DNA, 120 bp, Artificial Sequence
  ENSG00000273007_9 (sequence is synthesized)
agtattttacatttctgatggtacagaatcaacagtttgggaagcttaatacctatttgccaagagaaaaagtcagaattctcttttcaggtctacattcttttaacttgtctcatcttt

SEQ ID NO: 832555 - DNA, 120 bp, Artificial Sequence
  ENSG00000273007_10 (sequence is synthesized)
ttatgtaccctagtagtttcagagatacacttgaagatagagcaatttctgttttcatcacttttaacaacaatgggtctttttatcattgtcaatgaatcaatattcagccagtgctcc

SEQ ID NO: 832556 - DNA, 120 bp, Artificial Sequence
  ENSG00000273007_11 (sequence is synthesized)
atcattgtcaatgaatcaatattcagccagtgctcctgaggagatgaaaaattccaccggcaattatcttacagagtcaccatgattactaggttatatggtttggctgtgcccccaccc

SEQ ID NO: 832557 - DNA, 89 bp, Artificial Sequence
  ENSG00000273007_12 (sequence is synthesized)
ttgtgctgtttatggttttataaagaagagtccccctgcacaagctctctctctctttgcctgctgccatctatttaagatgtgacttg

SEQ ID NO: 832558 - DNA, 120 bp, Artificial Sequence
  ENSG00000273007_13 (sequence is synthesized)
ttataaagaagagtccccctgcacaagctctctctctctttgcctgctgccatctatttaagatgtgacttgctcttccttgccttccgccgtgattgtgaggcttccccagccatgtgg

SEQ ID NO: 832559 - DNA, 120 bp, Artificial Sequence
  ENSG00000273007_14 (sequence is synthesized)
gtctggaggaaactaaggagacatgatgactaaatatggtatcctggaacagaaaaagaatattaggaaaaactaaggaaacatgaataaagtatggactttagctaataataacatatc

SEQ ID NO: 832560 - DNA, 120 bp, Artificial Sequence
  ENSG00000273007_15 (sequence is synthesized)
agtatgggttcattagttgcgacaggtgcaccaaactaatgtaggatgttaataaaagtgaaactcagtgtggagtatatagatactctctgtgtcatctttataacttttctgtaagtc

SEQ ID NO: 832561 - DNA, 120 bp, Artificial Sequence
  ENSG00000273007_16 (sequence is synthesized)
taataccattgtaaaactaaaatatattttttacaaaactgactctagggctacaagtaccatcacaaaaaaggatttctcaagtcactagatacagcaactctagctataatgtgaaaa

SEQ ID NO: 832562 - DNA, 120 bp, Artificial Sequence
  ENSG00000273007_17 (sequence is synthesized)
ataaaagcacctcatgcattcctgtgctctactatgcccaaatacagatgattcatatatacatatcactttatttcaccagactgtcaacagcatgtttgtgaagatattcatctattc

SEQ ID NO: 832563 - DNA, 120 bp, Artificial Sequence
  ENSG00000273007_18 (sequence is synthesized)
aaatggactaatacagtaaattggtactaggaatggggtgctgctgaaagatacccaaaaacgtggaagtgactttggaactggttaacaggcaaaggttggaataggttggagagctca

SEQ ID NO: 832564 - DNA, 120 bp, Artificial Sequence
  ENSG00000273007_19 (sequence is synthesized)
ttaacaggcaaaggttggaataggttggagagctcagaagatgacaggaaaatgtgggaaagtttggaactccttagagatttgttgaatgcctctgaccaaaatgctgataatgatatg

SEQ ID NO: 832565 - DNA, 68 bp, Artificial Sequence
  ENSG00000273007_20 (sequence is synthesized)
tatggacaatgaaatccaggctgaggaggtctcaaatggagatgaggaacttgttgggaactgagcaa

SEQ ID NO: 832566 - DNA, 81 bp, Artificial Sequence
  ENSG00000273007_21 (sequence is synthesized)
aatgatatggtttggctgtgtccccacctaaatttcatcttgaatttccatgtgttaaagtctttcccatgctgttcttgt

SEQ ID NO: 832567 - DNA, 120 bp, Artificial Sequence
  ENSG00000273004_0 (sequence is synthesized)
aacttaagggtcgggggggaagtggcgggtgcggagaggaggcgtggagagtgtgaggaagaagagaggcactctgagaagaagtcgaacaactaacccctcatttggcctggtttgggt

SEQ ID NO: 832568 - DNA, 120 bp, Artificial Sequence
  ENSG00000273004_1 (sequence is synthesized)
gagaagattgagtcacttggggaaaaaaatattggagaagtcagagaaggtgtaaatcagtggtgccacaaacaccagtttacttccacttttcaccccccgggtctgttttgtctgcgt

SEQ ID NO: 832569 - DNA, 120 bp, Artificial Sequence
  ENSG00000273004_2 (sequence is synthesized)
gcagctctcctcgtgtcggagacgctgagtcagttctctactggtcttgccctcttccggaaaaagaaaacacacctgagaagtggtagttcctatcctaacctactggggccctttata

SEQ ID NO: 832570 - DNA, 120 bp, Artificial Sequence
  ENSG00000273004_3 (sequence is synthesized)
ccttgcccgggagggagatctgtgaaagcgaaacgtgatttaagctgggatctggcagcaacttcgtggactctgaagggcacgtgggaaaggagttttgattgaaggtgagggatttag

SEQ ID NO: 832571 - DNA, 120 bp, Artificial Sequence
  ENSG00000273004_4 (sequence is synthesized)
tgaggtaaaattatatccaaattagagtttggtaaaggcttccaggttaatgtcctgttaacgcttatcctgatttgtggaggacacttaagctgtctaggcctaaccttgtgtttgatc

SEQ ID NO: 832572 - DNA, 120 bp, Artificial Sequence
  ENSG00000273004_5 (sequence is synthesized)
actcaccttaatttgtagacattctaggagctctttgtcaatgcctcttaccatttttatcattaactatttatgcttatagaagcaggaaaaataaattgtgggagccttcatctgcaa

SEQ ID NO: 832573 - DNA, 120 bp, Artificial Sequence
  ENSG00000273002_0 (sequence is synthesized)
tcctaaaacccagccccgcagccctcgccggacccaggggtagggaggaggtcccagggaagaacctggttgccaaagtctcggccagttggagaagagatgggtctcccgaggataccc

SEQ ID NO: 832574 - DNA, 120 bp, Artificial Sequence
  ENSG00000273002_1 (sequence is synthesized)
aagcccaagctctacactgtcccaaggtggtttgtttttcttctttcttctattggtctggaccttgtatattctgggaggaggtgattaaggccaaattgccttaagtggccatccagc

SEQ ID NO: 832575 - DNA, 120 bp, Artificial Sequence
  ENSG00000273002_2 (sequence is synthesized)
cagaagctggaagaagggaaggatgagagggaatgaactgttgtgttacggctattgagagaaacagtggcaatacacagccaaagccctgagtttctaatacggcgccacctcttatga

SEQ ID NO: 832576 - DNA, 120 bp, Artificial Sequence
  ENSG00000273002_3 (sequence is synthesized)
gctgtgagatcttgggcaaagtaactaacctttaagtatttgtctgtagaattgagattgaaatacttatctttgccagaattgttataagaattaaatgagttgaaagtgtttcatcaa

SEQ ID NO: 832577 - DNA, 120 bp, Artificial Sequence
  ENSG00000273002_4 (sequence is synthesized)
gtgtgcaatgctactcaagtaggagggactaagctacttccttctctcactgcttgactgagcttctctccagccccaccccctgatgtttactgcttatggagaaagagattaagtgaa

SEQ ID NO: 832578 - DNA, 120 bp, Artificial Sequence
  ENSG00000273002_5 (sequence is synthesized)
gcaggcccacacattcatgaaggtggaaggaagatgtagcaggagatggtggagagggaaacagaggaagacaggatgacagacgtggggaggaaaggctgagcgaggcaatgtcctgac

SEQ ID NO: 832579 - DNA, 120 bp, Artificial Sequence
  ENSG00000273002_6 (sequence is synthesized)
tcactctggcgcttccctctttcccatctgggctccagagtctctgccctcattccccttcaccaggttgctcaaccctccatcagactgttaggtcaagggtggacaaacagaccaacc

SEQ ID NO: 832580 - DNA, 120 bp, Artificial Sequence
  ENSG00000273002_7 (sequence is synthesized)
gggatctggatggcccctgggcagtactgacttcccctaccattcccatggcaagaaaagggagtgattccactagcagactcccctaccctgcagtgagacagcctgtaggaaggtgag

SEQ ID NO: 832581 - DNA, 120 bp, Artificial Sequence
  ENSG00000273002_8 (sequence is synthesized)
gctgctcctcttctgagactcacccagtctcatgcctccattagcctcaactcccgacccatggcctgtggtgagaggtgctaacaacatgacctgctttcatcttgaccttcccagccc

SEQ ID NO: 832582 - DNA, 120 bp, Artificial Sequence
  ENSG00000273002_9 (sequence is synthesized)
acccagagaaaagggaatcttggctaaaaaaaggctggaagaggggagaaccctggcactgcgggtggggctgggaggagcccaggcaaccttactggtgagaatctcatggctcttcaa

SEQ ID NO: 832583 - DNA, 120 bp, Artificial Sequence
  ENSG00000273002_10 (sequence is synthesized)
ggtgaatatgatgatgatttccctggggtttctttcaatactcagaagccgccccgagttggaaagcacatgcatacttggggaggccaggggaggaaaaggggggcggctcactctgac

SEQ ID NO: 832584 - DNA, 120 bp, Artificial Sequence
  ENSG00000273002_11 (sequence is synthesized)
agtaaatgaagaaagtggaaacaaattcaaggagcaggcagagctcccggtttcaccagagcccaacggttggtaataaggatgagaacaatgtgccttcacttcctgggatcagaacag

SEQ ID NO: 832585 - DNA, 120 bp, Artificial Sequence
  ENSG00000273002_12 (sequence is synthesized)
cacatggccgcacatgtacgggtatgcatgtgcttccataatcatatactttcccagcttctactctgcctgtggtctaatttcaactccttcagctgctgtacccacccataaaattat

SEQ ID NO: 832586 - DNA, 120 bp, Artificial Sequence
  ENSG00000273002_13 (sequence is synthesized)
gagtgtaaaagcactttgcaaaccctgatactctatgaagaagtaaaaagtagtgctgtaattattatcattattatgtccaatggttgaggtttccgctgcccacctgtcagctatgtg

SEQ ID NO: 832587 - DNA, 120 bp, Artificial Sequence
  ENSG00000273002_14 (sequence is synthesized)
aggcctaaagagagggagggctaggccattcctcagcttctgaggttcctggcccttttccccttccatctgtccacagctgactgctaagctggatgcgtaggggaaagcagagaaaag

SEQ ID NO: 832588 - DNA, 120 bp, Artificial Sequence
  ENSG00000273002_15 (sequence is synthesized)
tgcgtaggggaaagcagagaaaaggtgatttactgggacacagagacacaggctggaagagatagcatgtgtttccttaaaatttgaagcatttggctgggcacagtggctcacacctgt

SEQ ID NO: 832589 - DNA, 89 bp, Artificial Sequence
  ENSG00000273002_16 (sequence is synthesized)
acacctgtaatccctgcactttgggaggtaaaggcaagaggatttcctgggcccaagagttatactccagcctgggagacagaaacccc

SEQ ID NO: 832590 - DNA, 120 bp, Artificial Sequence
  ENSG00000273001_0 (sequence is synthesized)
gatggtctgatctctcccttggccagaattaacggggcaattcctaacccctgttggtcctcagaatcacctggcctatgcacactcccgctaaaccactgaagtccaatttctgggagc

SEQ ID NO: 832591 - DNA, 120 bp, Artificial Sequence
  ENSG00000273001_1 (sequence is synthesized)
tcagccagggaatgtgtatttttaaacaagccccctaggttactctgataagtgcaaagtcagagagcgctgctctcatgcactgagcctgagcactcttctattaataaaaaaggagag

SEQ ID NO: 832592 - DNA, 120 bp, Artificial Sequence
  ENSG00000273001_2 (sequence is synthesized)
gagaatagaagggctaatttagtcattcatgcctttttagagcaaattacatgtggagagggtggggcacactgaattttattttagccaaatgccccttatctccttatgcaattgata

SEQ ID NO: 832593 - DNA, 120 bp, Artificial Sequence
  ENSG00000273001_3 (sequence is synthesized)
tttttatattgaacattagaggattggtcatttgtcatcaagtcgtctgtaatacagaaaacgataaatacaacctaacagttcaaacatgacgagttaaataaatgatggttaaaaata

SEQ ID NO: 832594 - DNA, 120 bp, Artificial Sequence
  ENSG00000285543_0 (sequence is synthesized)
attgaatgatttcatacgactatctggatttctggcttctcttgaaaactgaacatctggtttcaccttccctcctggctgggattgtggctgccatcccattttagatgggtcaccctt

SEQ ID NO: 832595 - DNA, 120 bp, Artificial Sequence
  ENSG00000285543_1 (sequence is synthesized)
tctccggttttcaacattccccatcactgcgtatagctgtactgttcaataaggtcatgggtgaaattgaaattccagaccgcccttcttcgtggcaaacctttagaaattagattgtac

SEQ ID NO: 832596 - DNA, 120 bp, Artificial Sequence
  ENSG00000285543_2 (sequence is synthesized)
taggtcagtgcttctgaaacctgaatgtgaacccctgggtgagattatgattcagttggtctaaggtgggacccacaaatctgcattttgacacgtgccaagaagaggccagtgctgcta

SEQ ID NO: 832597 - DNA, 120 bp, Artificial Sequence
  ENSG00000285543_3 (sequence is synthesized)
gtccgggaccatactctgaaagactgtaaacaccatgtgaatagagatgacttctgtctacttccatgagctctagagcatccacaagctccttacacatgagacgatcagagcatcagt

SEQ ID NO: 832598 - DNA, 120 bp, Artificial Sequence
  ENSG00000285543_4 (sequence is synthesized)
ggcaactgaatgagacatgccagtttgggctcaggctccaagaggacacatccaagtacatctccacgaccaggaggttcatgcgcttggtcctctgtgcgttaagggagcttgggcatt

SEQ ID NO: 832599 - DNA, 120 bp, Artificial Sequence
  ENSG00000285543_5 (sequence is synthesized)
tatccatgactttgcacacctggtacccaagctgtgatttcaggattctaggtcttcatctggagcaaagctggagtgtgactccaggggcccaggaaggccaatcttcatcctaagcct

SEQ ID NO: 832600 - DNA, 120 bp, Artificial Sequence
  ENSG00000285543_6 (sequence is synthesized)
ctgtaagaatagggccaacttgaagctagtatgtgtaactccgtgcattttctccagagacgctggaaccataggcttggccaaaaaaagatgggatgtactaatcagtgatttataaca

SEQ ID NO: 832601 - DNA, 120 bp, Artificial Sequence
  ENSG00000285543_7 (sequence is synthesized)
tggaaaaacatagatggatggttggcacctggtttcagttattatgcctggttacttagactggtttgggctatgtgaccagagggaaataagatgaacatatgccttggcttccctgag

SEQ ID NO: 832602 - DNA, 120 bp, Artificial Sequence
  ENSG00000285543_8 (sequence is synthesized)
gcccagttcttccccatgcactagggggttcacgatgcagaggccgaaccagtcccgtgcgactgaggggggccttagcaactgctcgtggatgctgtggatcttcctgaagttgctccg

SEQ ID NO: 832603 - DNA, 120 bp, Artificial Sequence
  ENSG00000285543_9 (sequence is synthesized)
gtggatcttcctgaagttgctccgagttttcttactcttattgttctgtatcctttgcctgtaataaaaccattcagggccaggtgcgatggttcacgcctgtaatcccagcacttcggg

SEQ ID NO: 832604 - DNA, 120 bp, Artificial Sequence
  ENSG00000285543_10 (sequence is synthesized)
agcccaggagttcagaaccagcctgggcaacatggcgagactctgtctctctttgaaatataaaaaaaaaaaaattgaaaagaaaaacctttcagaccttttactttgttggagtcttgt

SEQ ID NO: 832605 - DNA, 120 bp, Artificial Sequence
  ENSG00000285543_11 (sequence is synthesized)
gagtccttttgatgatctgacccagcatgattgctgcaacctctcttgatgctcggctctagttcctggcagtttcctcttgacatccagactgtagaatcttcagggctcatgggctct

SEQ ID NO: 832606 - DNA, 120 bp, Artificial Sequence
  ENSG00000285543_12 (sequence is synthesized)
ggcccctgcttcttaaggaggagaaggtggagccatggggacctaacccacatctcatggaggtgacggcagggcagtggagcctcagcctgaagatgaattgcctataatcactgagca

SEQ ID NO: 832607 - DNA, 120 bp, Artificial Sequence
  ENSG00000285543_13 (sequence is synthesized)
agttagacgggaagaaaataaatatgacttataaacccattacccagagacaacaatggcccgcattgtaatacaccatcttttagcctgttttctctacatatatatttacatataatt

SEQ ID NO: 832608 - DNA, 120 bp, Artificial Sequence
  ENSG00000285543_14 (sequence is synthesized)
gagatgtattgaacacaccatttgatatcctactctttacctcaactttgcattataagcattagctgacgatttttataaagactccatttcttcatttgtaaaatgagaataatagta

SEQ ID NO: 832609 - DNA, 120 bp, Artificial Sequence
  ENSG00000285540_0 (sequence is synthesized)
gcagagagtggcaggactgaggacccaatatttgttttccagcctggtggagagtgaatagtgaggttccaaaactaaacaagggaggtcaggaaaactttccaaccttacctaatggct

SEQ ID NO: 832610 - DNA, 120 bp, Artificial Sequence
  ENSG00000285540_1 (sequence is synthesized)
tctggccaaagcaaggaagtgtcatggaaagtgttgggtggtgatggtgcaaaaggaacttgaggaggagggaagaaaaagcacccctcaaagctggggaagagaaaatatggagaaagc

SEQ ID NO: 832611 - DNA, 120 bp, Artificial Sequence
  ENSG00000285540_2 (sequence is synthesized)
cctaaattcctcattgaaggccagtctcggaagtggaggggttatgatctgtgcttcagtcaaagtcatcattgtgcagagccttgctgatattctgtgacagacccgaatttactacac

SEQ ID NO: 832612 - DNA, 120 bp, Artificial Sequence
  ENSG00000285540_3 (sequence is synthesized)
gtgctctgaagcgatcaccttttctagagtttcttctgcctgctttcaaattggatgacaagaagcaaagaccaacagatcctctagaccagtgtcagaaatgagagcgaccttcgagag

SEQ ID NO: 832613 - DNA, 120 bp, Artificial Sequence
  ENSG00000285540_4 (sequence is synthesized)
aaaacatccagttccagagtgaccagactttcaggataggaaaactgaaaacaaaattctgagcttgcttttattttgctaagtaaggatgaaaatttttttccacttactatcactatt

SEQ ID NO: 832614 - DNA, 120 bp, Artificial Sequence
  ENSG00000285540_5 (sequence is synthesized)
tcataaacgacaggatgttttaacactgaaaacaaaggtagaaagaatcaacttttaaactgaatggcttcaactctacaaaatactgtatttgttttcttcacctcacaatagcctggt

SEQ ID NO: 832615 - DNA, 120 bp, Artificial Sequence
  ENSG00000285540_6 (sequence is synthesized)
atttgacaaccactgatgtggtccaaccccttattataagatgaagaaaaaagttcataggaggaagtgttttgcctgaggttacaccaggccagccttttcctggctttacagggacta

SEQ ID NO: 832616 - DNA, 120 bp, Artificial Sequence
  ENSG00000285540_7 (sequence is synthesized)
atcacccttgggttccataggtcttggaaccaaatgaactaaggaagctctaaagatgaaggatgtgttggtcatctatttattgcctcacagctccaaatgcactcttcaatacctgta

SEQ ID NO: 832617 - DNA, 120 bp, Artificial Sequence
  ENSG00000285540_8 (sequence is synthesized)
ctttaaacatttctccactaaagggagtgtgatgttaagatttctcagtagagggcaatggaggcacattccaggagaaagaggcttccccaggtttctgggcgaggctggtgtcagccc

SEQ ID NO: 832618 - DNA, 120 bp, Artificial Sequence
  ENSG00000285540_9 (sequence is synthesized)
tgtgagtgtgaagatctccatccagtggagcctgccccagccgtgggaccagaaaaaccatccatctacaaccttacagcctcttctcatggtaacctttccatagctctcttgacatgg

SEQ ID NO: 832619 - DNA, 120 bp, Artificial Sequence
  ENSG00000285540_10 (sequence is synthesized)
aaaccaaagctcctgcctggctcacacacaggtacttttgcctagagggtcatacacaggataaccattccttctgcaagtttccatgtggcccacaagctctgaagtcctctgccctgc

SEQ ID NO: 832620 - DNA, 120 bp, Artificial Sequence
  ENSG00000285540_11 (sequence is synthesized)
tggtgtccaggctcctactgcatgtccacaccagtggctgctgactgactgcctgctctccagccacactctagaggttagctgttgcttacctagcaactggtagacccgccctggcct

SEQ ID NO: 832621 - DNA, 120 bp, Artificial Sequence
  ENSG00000285540_12 (sequence is synthesized)
ggccaaaccatctaacattgctgcttatccagtgggctgagacataccttctccaacgaggtctgaactcctcctttgagtactctctctgaaccctcgcatactgtataggatttcctt

SEQ ID NO: 832622 - DNA, 120 bp, Artificial Sequence
  ENSG00000241933_0 (sequence is synthesized)
gaagccggtcctggcttccttgtctaaaagctctttgggactgaaatggctgtttatgaatccttgtcaacctcgttcgcagtcaacgaccagggaataaattattcgtggaatgacaca

SEQ ID NO: 832623 - DNA, 120 bp, Artificial Sequence
  ENSG00000241933_1 (sequence is synthesized)
gttcataattattataagataaggaaatggaggtcctggaggttacatgactagcccaacaagtatgacaactccgatatcggcttgcggttcactcattcagtttgctgattcagagat

SEQ ID NO: 832624 - DNA, 120 bp, Artificial Sequence
  ENSG00000241933_2 (sequence is synthesized)
ctgtgcattcactcacctgttccttctccagcaaggcctccccaccctaccacctcctcctttcttagtttggctgtctgtgactcactcaacacacatccccagacctttctggaactc

SEQ ID NO: 832625 - DNA, 120 bp, Artificial Sequence
  ENSG00000241933_3 (sequence is synthesized)
caggttgggcagattggcctccacagcaacctgtggatctctgaacactggggcaagggcctggtctcaagcagcttcgtattctgagatcagtttttactgagtattggaccagccagg

SEQ ID NO: 832626 - DNA, 120 bp, Artificial Sequence
  ENSG00000241933_4 (sequence is synthesized)
atactaactagtatttattcagcacctactatgttgagtataaatagcatagtaaaagtaggaaacacacaataatacctcaacagaaaaatgagtaaaccagcgaggtgtcacgcctgt

SEQ ID NO: 832627 - DNA, 120 bp, Artificial Sequence
  ENSG00000241933_5 (sequence is synthesized)
agtcccaggttcttgggaagctgaggccggctaagttcaaggaggatcgcttgagcaggagttccaggctgcagcgcgctatgatcgcgcctgcgaacagccattgcactccagcctggg

SEQ ID NO: 832628 - DNA, 120 bp, Artificial Sequence
  ENSG00000241933_6 (sequence is synthesized)
caacagagcgcgactgtgtctctaaaaaacaacgcaaaacaaaaaacacggcagaacttaagcattttgctgcactgcccagtgaaatccattccatttgacaaatactgccctcttaac

SEQ ID NO: 832629 - DNA, 120 bp, Artificial Sequence
  ENSG00000241933_7 (sequence is synthesized)
attcttagaatttttttttggagcaagtgttagcgtccctgttttcaaggaggtggtcaagtatgcacagacatcagtagtgacgtttgctggagacttcctttagacaaaaatgaactt

SEQ ID NO: 832630 - DNA, 120 bp, Artificial Sequence
  ENSG00000241933_8 (sequence is synthesized)
agggacagcacttaagttagaggccaagtctttggccaaagtagcctgccatcctactccagagaactgctgtggttaaaagaggaaaaactgtattctgcgatcaagtaaggctctaaa

SEQ ID NO: 832631 - DNA, 120 bp, Artificial Sequence
  ENSG00000241933_9 (sequence is synthesized)
cccagtattaggaaagaacagtagccttttgtattagaaagaacactggcgtggaagtcaaaagttctggattctagtgccagctagaatctaccacgatcgtggtaggcaagctgctcc

SEQ ID NO: 832632 - DNA, 120 bp, Artificial Sequence
  ENSG00000241933_10 (sequence is synthesized)
aaaacccagtttctggtaaatgagagtgatgattactaactcacctcactgactgttgggaaaagctaagctatcctaatgtacacattttaccagatgctacttcattattaattatta

SEQ ID NO: 832633 - DNA, 71 bp, Artificial Sequence
  ENSG00000241933_11 (sequence is synthesized)
gtacacattttaccagatgctacttcattattaattattaatgatctcaaaacaccagttgtggccaatag

SEQ ID NO: 832634 - DNA, 120 bp, Artificial Sequence
  ENSG00000241933_12 (sequence is synthesized)
gctgggcatggtggcacacacctataattccagctacttgagaggctgagataggagaatcactggaacccagaaggtcaaggctgcaatgagccatcactgtgctactctactccagcc

SEQ ID NO: 832635 - DNA, 120 bp, Artificial Sequence
  ENSG00000241933_13 (sequence is synthesized)
tgggcaacacagcaagaccctgtgtcaaaaaccagcaccaaaaaagaacataagttgttccacagggctggttcttcgacacatagacacaaactgcgattctgtgaagtgttgctttat

SEQ ID NO: 832636 - DNA, 120 bp, Artificial Sequence
  ENSG00000241933_14 (sequence is synthesized)
agacacaaactgcgattctgtgaagtgttgctttataatattgggttaaggagaaggtcaaggctgcagtgagccatcactgtgccactctactccagcctgggcaacacagcaagaccc

SEQ ID NO: 832637 - DNA, 120 bp, Artificial Sequence
  ENSG00000241933_15 (sequence is synthesized)
gttccacagggctggttcttcgacgcatagacacaaactgcgattctgtgaagtgttgctttataatattgggttaaggatgatcttgtcaaaatacagtaccctgaaaacaacatatta

SEQ ID NO: 832638 - DNA, 120 bp, Artificial Sequence
  ENSG00000241933_16 (sequence is synthesized)
ggagagccagaagtttccaaagaaagaaagcacaccaaagctctagagaattttgaaagtaaaaaacttgtttggggagaaaaaaaacaaaaacagaaaaaagcattacttaaatcttta

SEQ ID NO: 832639 - DNA, 120 bp, Artificial Sequence
  ENSG00000241933_17 (sequence is synthesized)
tacacagaaacagaataaccactagggtaaacaaagcagctatggctttatttccctctaccttcgtaactttgacattctgccttacagtctattttcacacagtttctgttgttaatg

SEQ ID NO: 832640 - DNA, 120 bp, Artificial Sequence
  ENSG00000241933_18 (sequence is synthesized)
ggagctgaggaacaaggtactgacaccttcttatggttcatcaaaagaacctttgactctgaaaggatcttggataggatcatctctccaaacttcctattcatggatcttctgacattc

SEQ ID NO: 832641 - DNA, 88 bp, Artificial Sequence
  ENSG00000241933_19 (sequence is synthesized)
catctctccaaacttcctattcatggatcttctgacattcagttagccagcctcttttctaacactctctattaaagttaagtcacta

SEQ ID NO: 832642 - DNA, 81 bp, Artificial Sequence
  ENSG00000241933_20 (sequence is synthesized)
ggaggcagaggtgcgacagagggagactccgtctcaatgaataaataaataaatagccgggcgtggtggctcacgcctgta

SEQ ID NO: 832643 - DNA, 65 bp, Artificial Sequence
  ENSG00000241933_21 (sequence is synthesized)
gtggatcacttgaggtcaggagcttgaaaccagcctggccaactgctcccgtaatgccagctact

SEQ ID NO: 832644 - DNA, 120 bp, Artificial Sequence
  ENSG00000241933_22 (sequence is synthesized)
caaaaaattagccaggtgtgttggtgtgctcccgtaatgccagctacttgggaggctaaagtgggagaatcacttaaacccgggaggtgaaggatgcagtgagccaagatagcaccactg

SEQ ID NO: 832645 - DNA, 120 bp, Artificial Sequence
  ENSG00000285548_0 (sequence is synthesized)
gagtagctgggactgcaggcgcccgccatcgcgcccggctaagtgtagcagaaaagacccactgttggagaggggttcatctgtcacttgaggggcagcagcaatttatcagttcctgtg

SEQ ID NO: 832646 - DNA, 120 bp, Artificial Sequence
  ENSG00000285548_1 (sequence is synthesized)
agcagcaatttatcagttcctgtgccagatgtttacataatatcaagtcttcacaacagtcctacagaggccctatttcactccaggcaaaaccaaggctcagaggcttaggaactgccc

SEQ ID NO: 832647 - DNA, 120 bp, Artificial Sequence
  ENSG00000285548_2 (sequence is synthesized)
aagagacaatcactgtattctggagggaaagaaatgtttgtaaaggccagcagacggcgcctgactggggcagaagcttgcagcggagaggaaaaaggagtgccccactctgcggcaggg

SEQ ID NO: 832648 - DNA, 120 bp, Artificial Sequence
  ENSG00000285548_3 (sequence is synthesized)
ccccttggtcttctcctctcccacgtccccagcagccttatccctctggagagaggccgagacacagaaaaggagaagttgcatatgagattattagccaagtgcttcccactggcacaa

SEQ ID NO: 832649 - DNA, 120 bp, Artificial Sequence
  ENSG00000285548_4 (sequence is synthesized)
ttaggtgttccacctgctccatacacccatctgcctcaccacacccacctacccacactctgcccttcctgcaccctggcttgcctccgtccctcaggactcacacaattctgcacaaag

SEQ ID NO: 832650 - DNA, 120 bp, Artificial Sequence
  ENSG00000285548_5 (sequence is synthesized)
aactgcacccaggtaaagggaacaacaagctcctagaatactgtgggcttgtggtgagatcaccagaaactccttattctttcagagagatctaatctctgttacttataaaaataatcc

SEQ ID NO: 832651 - DNA, 120 bp, Artificial Sequence
  ENSG00000285548_6 (sequence is synthesized)
ctagcttgggacatcactctcgtctccatactagacactcttaactggagagaatttctgggagagaactaggagaaggagaaaggaacaaattcctagaacccacagggatgtgttttt

SEQ ID NO: 832652 - DNA, 120 bp, Artificial Sequence
  ENSG00000285548_7 (sequence is synthesized)
tctagtatgctcccaaagagggcttgctaggggacttggtctctcttcagttagattatgctatagtttttcatatctaaccagaattgtccccaggtgggaaacccccaccccaccctg

SEQ ID NO: 832653 - DNA, 120 bp, Artificial Sequence
  ENSG00000285548_8 (sequence is synthesized)
catccatggaataaagggccatcctggtagcaccagcagctgctcagggcagagcaaactcataaggagtggggcaaaggattctgagctgaaacaagtctgaaaggtgacgggtcctgc

SEQ ID NO: 832654 - DNA, 120 bp, Artificial Sequence
  ENSG00000285548_9 (sequence is synthesized)
aagaaagaggtggaaaatggatataaaaaaagtgcccacaactttcactctgctttctaaacaagtgcattttacaccggggtagaataaaaattgggagtggggaacgactcacaaaaa

SEQ ID NO: 832655 - DNA, 120 bp, Artificial Sequence
  ENSG00000285549_0 (sequence is synthesized)
attactattagcacatgcatagcagctcttcctttctacaattgatgtggcctttatattacttacacttcctcaacttttgggaagaaaattggattccagaaggggaaaaggaagaca

SEQ ID NO: 832656 - DNA, 120 bp, Artificial Sequence
  ENSG00000285549_1 (sequence is synthesized)
cataatataaattaattgtttagataactcacctctcaacttgtcaagtctctgatgtgagatccagtattaaacaaagagtcacaccgaaaggcttacacagtagaagagtttaaagta

SEQ ID NO: 832657 - DNA, 120 bp, Artificial Sequence
  ENSG00000285549_2 (sequence is synthesized)
aggccctctttccttcatcagtccatcctatgaatcccataatgacagcacatggggaaatatgagagtgagaaataaaaaagaagacagacaacattttgtttcttgagaaagggcctg

SEQ ID NO: 832658 - DNA, 120 bp, Artificial Sequence
  ENSG00000285549_3 (sequence is synthesized)
tgcctttatcaactctttgttttagctaatgagaccgggaaaggcaaaaaccacaatagttttaggtgcatgaaagcagacagaaattgtgctatactttgtggttataaaaaacagcag

SEQ ID NO: 832659 - DNA, 120 bp, Artificial Sequence
  ENSG00000285549_4 (sequence is synthesized)
ttgggcattcagaagttccccggcttccctaagaggagcttggcagccgctgaggaagagcctgtagtcctggagaggctccacgatcagtaactggagacggaaacgccatcgcattag

SEQ ID NO: 832660 - DNA, 120 bp, Artificial Sequence
  ENSG00000285549_5 (sequence is synthesized)
acagggatgcagatagagcggaggaatcagagcagactatgaccaccaaggaaccagcacctctttcccagacaccatggtagtagatcatacttgcggatctgagactccactgaattg

SEQ ID NO: 832661 - DNA, 120 bp, Artificial Sequence
  ENSG00000285549_6 (sequence is synthesized)
aaaggaagagggagggcttccatcttggctgagaagactgaattggctggatttctccagaattcaaaaagatgatactttttctctttggaggatcttgtaatagagattaacttgaga

SEQ ID NO: 832662 - DNA, 120 bp, Artificial Sequence
  ENSG00000285549_7 (sequence is synthesized)
taatgtaataagtgggtactcttttaacctaatttattgagaaatttatgttagctataattgaaaatcatttcctaacccctgcatcttttatataaaaaatagctatggccgggcgca

SEQ ID NO: 832663 - DNA, 120 bp, Artificial Sequence
  ENSG00000214803_0 (sequence is synthesized)
agataaatccttccggatcacggggctgccacgggagtggcttccaccacaccatctcctgtcctgggtgttgtggggagatgagtctggatcctacctggattctgcctccaagctggg

SEQ ID NO: 832664 - DNA, 120 bp, Artificial Sequence
  ENSG00000214803_1 (sequence is synthesized)
ggaagaaagctcccatgttgtgaggcataaaaaggcccacatgtcaaagaactacagcctgccagcgaccacgtgactgagcttggaggtggatcatccctcagggaagccttgagatga

SEQ ID NO: 832665 - DNA, 120 bp, Artificial Sequence
  ENSG00000214803_2 (sequence is synthesized)
cagcaggctgggagggatgctcagccaggaccatgcagccatgctgctccggcattcctgaaccacagatgctgtgagatgacatttttttccctctacatgtgtcagcacttcccagat

SEQ ID NO: 832666 - DNA, 120 bp, Artificial Sequence
  ENSG00000214803_3 (sequence is synthesized)
gtgatgatggtatttgaaagagcatgatctggaaatcctgagccgtgctgccacaagaaaatggatgcacagaggacaaggccaggcagcgcaggtcttcattacactgagactttgcct

SEQ ID NO: 832667 - DNA, 120 bp, Artificial Sequence
  ENSG00000214803_4 (sequence is synthesized)
acctttccataggtcatagccacagctgagcacttggtgtcttactactcagtggagaggagaagtgtgctgaagggtggtaagagagtgtgtccaggggcccagaccagagtgggccat

SEQ ID NO: 832668 - DNA, 120 bp, Artificial Sequence
  ENSG00000214803_5 (sequence is synthesized)
gcctcatctagagagcaagcatcttccagaaaggagagcccttgggtccttttacagaagcaatcagaaaaacatcgggaatctcccagaagactgaatgtaagaggacgaagggtccgg

SEQ ID NO: 832669 - DNA, 79 bp, Artificial Sequence
  ENSG00000214803_6 (sequence is synthesized)
atctcccagaagactgaatgtaagaggacgaagggtccgggcacagtggctcattcctgtaatcccagaactttgggag

SEQ ID NO: 832670 - DNA, 68 bp, Artificial Sequence
  ENSG00000214803_7 (sequence is synthesized)
attccagcctgggcaacaaagcaagaaaacaacaacaacaacaaaaccaaaaaaaaagaaaaagaaaa

SEQ ID NO: 832671 - DNA, 120 bp, Artificial Sequence
  ENSG00000226337_0 (sequence is synthesized)
tgcaggcaggagtggcttcgtgtagctgttttgttcttcagagttgggtgggacactcagctgttcccagttatttgaacgtacagccctcctttgattaaaaggcgctggtctcttaat

SEQ ID NO: 832672 - DNA, 120 bp, Artificial Sequence
  ENSG00000226337_1 (sequence is synthesized)
ccccatggagggcaattccccactaaaagctggagaagttagcactctttaaagaacgatcttctttgaggtttgcagactctctctattgtcctcttggcttacgccctttgaagaagg

SEQ ID NO: 832673 - DNA, 120 bp, Artificial Sequence
  ENSG00000226337_2 (sequence is synthesized)
aagctgccatattggagaggcccatgaggcaaggaattgagggcaggttctggccaacagtcactgaagaactgaggcccttagtccgtcagcccatgaggaactgcatcctgtcaatga

SEQ ID NO: 832674 - DNA, 120 bp, Artificial Sequence
  ENSG00000226337_3 (sequence is synthesized)
ccacgtgagcttgcaatcaaatcctcatcccactgagccttgagatgactctgctcccaagcatcaccttgactcagtgaccctgaagtagaggacccaggtaccaaagttgaaagcccc

SEQ ID NO: 832675 - DNA, 120 bp, Artificial Sequence
  ENSG00000226337_4 (sequence is synthesized)
gaatgctcacagagcagctggaacaagaattactgcctgcaggcgcttctgtccaccagccacgtgtcagtgagtggccctggacccagccaggttgtgtgtgcacctgcggttcttgcc

SEQ ID NO: 832676 - DNA, 120 bp, Artificial Sequence
  ENSG00000226337_5 (sequence is synthesized)
atggggagcaggagccatttggctgctcctcttcatagggcaccacctgcaatctttcactgcccagcgtcttcagacttccaaataagcctgaagaggacaggagagcgagcaatgtct

SEQ ID NO: 832677 - DNA, 120 bp, Artificial Sequence
  ENSG00000226337_6 (sequence is synthesized)
ccctgaatgggactacaggggacgctggtaaccgcacctcattcagcaacttgagaaacatcagcaataatactacaagcaatcgcttaggtacttgactgtgagcaggaatatgagaca

SEQ ID NO: 832678 - DNA, 120 bp, Artificial Sequence
  ENSG00000226337_7 (sequence is synthesized)
cccaaagtcaacccccaagcatccccagaagaaaagtacactttgaataattacagtcctttaactttcctgattcaaccttcaaaggccacgaattgcttctaacgaagaagctgaagt

SEQ ID NO: 832679 - DNA, 120 bp, Artificial Sequence
  ENSG00000226337_8 (sequence is synthesized)
gaaagaagaaggaacgtcaacaaaaatgtctgtttgtgttatctctttactttcacggtttataggtttgggggaaagtttttattttcggtggaatagaagaagggaagaagagagact

SEQ ID NO: 832680 - DNA, 120 bp, Artificial Sequence
  ENSG00000226337_9 (sequence is synthesized)
aaaaagcatttcttagatttccagaagcagtaatggaaaatcccgaccctagagtcttgctttcttcctagaaatagaatgctcctgaagttcccaggagagcccttggcagacagatgt

SEQ ID NO: 832681 - DNA, 120 bp, Artificial Sequence
  ENSG00000226337_10 (sequence is synthesized)
caatcattccatcccttgttttgctgggtggagtcactggagcttaaagaaggggaagtaaactcaagcacacatcctggtgacctctagccacgggtcaaatttcactgatgtcaatta

SEQ ID NO: 832682 - DNA, 120 bp, Artificial Sequence
  ENSG00000226337_11 (sequence is synthesized)
aaaatgaccaaagacccgcccctgtgaaaaccctgtgggcagccattttgtctcagggaaactgcccagatctgatgtaaagtatttccggacgtctcttcgttgtatatggcatttccc

SEQ ID NO: 832683 - DNA, 120 bp, Artificial Sequence
  ENSG00000226337_12 (sequence is synthesized)
tgaaataagcaactctctgaaaaatatcatagcgcagatcaaaatgaagtactctgtggtgaagtagaagtacacagtcaacaaagaaacttgccctcaggctgcacagtaaaacgttgg

SEQ ID NO: 832684 - DNA, 120 bp, Artificial Sequence
  ENSG00000226337_13 (sequence is synthesized)
aaatcccagagcagcaacttggaaatcccacctgctacatatttgcctgagtactttaaggttctatggacaattgtctctctgcgtagattaaccttaaataaacttgttgcgttttga

SEQ ID NO: 832685 - DNA, 120 bp, Artificial Sequence
  ENSG00000273919_0 (sequence is synthesized)
agagagtcctttgttttagagcgtttagtaacattccttatgccactggagttgctgacttacttatgatggccacagttagttgtccacggacttctaatgcaagaagttgcctttcct

SEQ ID NO: 832686 - DNA, 120 bp, Artificial Sequence
  ENSG00000273919_1 (sequence is synthesized)
cagacctgtgctatatatcattagagcggtaatagctggccacttactgggttctcctggaaagaggctttaacagactgtgaacctgttaccctccatatccagctgtccattatgcct

SEQ ID NO: 832687 - DNA, 120 bp, Artificial Sequence
  ENSG00000273919_2 (sequence is synthesized)
tacatcaccctcaaggttcagtatggctaccaaggtctctttgctacaggatggggccaaatctgggccatctgtatattctacttgcaggagaggatggccttctctgtcctcaatttc

SEQ ID NO: 832688 - DNA, 120 bp, Artificial Sequence
  ENSG00000273919_3 (sequence is synthesized)
ttgccatgttttggcactggagaaagacaccacttttccagaccccttggctacccaggaaactcgctggaattaatggagttatttgcaatgagattttgtacacttcacagatggaat

SEQ ID NO: 832689 - DNA, 120 bp, Artificial Sequence
  ENSG00000273919_4 (sequence is synthesized)
tgccatcatcctatgtgatggagcccagtggaatgttgctggtttccatctcttaaccaagacagccatgataaaggatggtacccaaggataaggacaattggccaaactttacacagt

SEQ ID NO: 832690 - DNA, 120 bp, Artificial Sequence
  ENSG00000273919_5 (sequence is synthesized)
catcttaccttactgggtgttctgcccaataaatggccccatctgcacatttttacgtactcttggactactgcctaagggttgcccccttcaggataaagaactttggaaatatcttgc

SEQ ID NO: 832691 - DNA, 120 bp, Artificial Sequence
  ENSG00000273919_6 (sequence is synthesized)
ctcacagatgcccaaaatataaatcaaggtaaaggatggaacacatgctgttagcttttgatttgctcttcctgccacattaagtatacagctcaggaatgattgtgctggagcatagtt

SEQ ID NO: 832692 - DNA, 120 bp, Artificial Sequence
  ENSG00000273919_7 (sequence is synthesized)
ttaaaagcaaaatgatcagtttccacctccaaactcatcatttaaaatagaaaaaaaatgtgtccttacccataactgtatccaacatgagtcagctgaggaccttcactccatagcctc

SEQ ID NO: 832693 - DNA, 120 bp, Artificial Sequence
  ENSG00000273919_8 (sequence is synthesized)
atcatccttcttggggactcaggtttaggggttgcatgtcacttgcaactcagtgggaagtcaataggaagaacaagtattatggtatatcacattcaatcattggcccaggcgatgggc

SEQ ID NO: 832694 - DNA, 120 bp, Artificial Sequence
  ENSG00000273919_9 (sequence is synthesized)
taagtatcacttccactcccagctcaatgcagagaaacagtcacgtggcctcacccagccactgggaaagcaagaagcacgatccttacaagagcatagaacagcggtccccaacctttt

SEQ ID NO: 832695 - DNA, 120 bp, Artificial Sequence
  ENSG00000273919_10 (sequence is synthesized)
tggcatagaaactgttcacctcagatcatcaggcattggttatattctcataaggagcacataacctagacccctcttaagagcagttcatggtagggttcacactcccatgaaaatcta

SEQ ID NO: 832696 - DNA, 120 bp, Artificial Sequence
  ENSG00000273919_11 (sequence is synthesized)
atgctgccactgacctgacaggaggcggagctcaggcagtaatgctcacctcctactgtgcagcccggttcctaacaggccacaaaccagtacaggtgtgtggcgcaggcattgggaacc

SEQ ID NO: 832697 - DNA, 120 bp, Artificial Sequence
  ENSG00000273919_12 (sequence is synthesized)
cttggcctagaaggagaagagagactgataaggtggaacaggtgaatgacaaccacaatggtgctggggttaatttcctttaaccagtaggatgtcactttcctttttactgttttcatt

SEQ ID NO: 832698 - DNA, 120 bp, Artificial Sequence
  ENSG00000273919_13 (sequence is synthesized)
tcctcctcccatcagctatttagcactttcagcttgagctatgtgtaactttgtttcctaaaattgttggtcctagttcctgcctggcctctagctaggtaaatgctgatagaagaattc

SEQ ID NO: 832699 - DNA, 120 bp, Artificial Sequence
  ENSG00000273919_14 (sequence is synthesized)
cctgacctctccaggcctaattttatcaacggtaaatagatggattaggataactttaagagacctccaaatgaaaattttatgattcatgaaaaggcaaaaataaatccttctcttttg

SEQ ID NO: 832700 - DNA, 120 bp, Artificial Sequence
  ENSG00000146666_0 (sequence is synthesized)
tgacgatgaccaccttttcatatgcctgtttgccatttatgtcctctgtagcaagaggcaggacaaacagtgaggactgcaccaacactcaccgggtgacccctttgctttggaaactta

SEQ ID NO: 832701 - DNA, 120 bp, Artificial Sequence
  ENSG00000146666_1 (sequence is synthesized)
ctcagggtgaaaggaattccgattttaaacagcatctctttgtgtggcctgtttgaggcaccacacagagcttgctggagcagctctgttgaccgctgacccttggcctgctaactgaaa

SEQ ID NO: 832702 - DNA, 120 bp, Artificial Sequence
  ENSG00000146666_2 (sequence is synthesized)
caagattcacaagtgaggctgctgccccagtttcatggatgctggcagaagacttaagatttctgaatcagagacagaagacttcatttatttgtcacagctaaagcaatggccagtgtc

SEQ ID NO: 832703 - DNA, 120 bp, Artificial Sequence
  ENSG00000146666_3 (sequence is synthesized)
agtgtatttgcactggtgcctcaagccctgatgcccacggggtgatgcagagaccctatgactcccgcacatgcattgggtcaagtcacagtagaggaccactgagctgggcaccatgtg

SEQ ID NO: 832704 - DNA, 120 bp, Artificial Sequence
  ENSG00000146666_4 (sequence is synthesized)
gcacccagtaagacctgtaggagaacaggaagcctgtggaggactgtttcttccaaaagtttccaagtgttagctcttacacatgtataaacaacactgcaatttgtctccttgcaccgt

SEQ ID NO: 832705 - DNA, 120 bp, Artificial Sequence
  ENSG00000146666_5 (sequence is synthesized)
acatccacgaagcagatttgcttcttgccaaattatttccctcagtgatttcaggaactgacaattcccagtcgcatataggaattttcttgcgtcttcttttcctgactaactcttgcg

SEQ ID NO: 832706 - DNA, 120 bp, Artificial Sequence
  ENSG00000146666_6 (sequence is synthesized)
ttgtcagacactttcatttgtgctaagctgataagtatcaaacgatgatgcaggctattcattatgtgtgtccttgattactgatgagtttgagcaattgtcatttgttggactgatcgt

SEQ ID NO: 832707 - DNA, 120 bp, Artificial Sequence
  ENSG00000146666_7 (sequence is synthesized)
tcaatttcctcttcggtccttggccttttcatatattttgccttttcttgtaggtgtgtccttttcaaattgatttttttggtgtttttggtatatcctgtgtactaattctttgtcatt

SEQ ID NO: 832708 - DNA, 120 bp, Artificial Sequence
  ENSG00000146666_8 (sequence is synthesized)
tatatgcattaataatatctcctttcactgtgtggcttgtcttctcaatttgtttttgggtttttgtttcagagaacattttataagctttaaataataaagtttatttatttttaatta

SEQ ID NO: 832709 - DNA, 120 bp, Artificial Sequence
  ENSG00000233396_0 (sequence is synthesized)
tcttccaaagaagctggtccttagcctgtattgcggagcaagctttcggcgaccagctggaccctgggcacccttcttcgaacaatggcttttaattctcagactagaacgtttaggatt

SEQ ID NO: 832710 - DNA, 89 bp, Artificial Sequence
  ENSG00000233396_1 (sequence is synthesized)
aacaatggcttttaattctcagactagaacgtttaggattacaaaagaaactggttcttttcacattcttattcttgtgatgtagcatt

SEQ ID NO: 832711 - DNA, 120 bp, Artificial Sequence
  ENSG00000233396_2 (sequence is synthesized)
ttcatcattccatgccattagacatgtataggaccatgcatggtgatctcctccagacaaaagtaaatgctggtgcagaacagtgtcttcctggtactacacatgaagatgtcccgctct

SEQ ID NO: 832712 - DNA, 120 bp, Artificial Sequence
  ENSG00000233396_3 (sequence is synthesized)
cccctgctcaaggagagagtgcctgacctgagctgggcccatcagatccagtacttacctggaatacgaaaaagatggagagagtgaccaaagattacaaaaatctctgaagcttatcta

SEQ ID NO: 832713 - DNA, 120 bp, Artificial Sequence
  ENSG00000233396_4 (sequence is synthesized)
cttgagagagagtccctgaagatactggcctctcattcctgctatgtatatccaatgtgactgaactctgaataaaatatacaagttataacaatgtagcaattgacccagcaaacgagg

SEQ ID NO: 832714 - DNA, 120 bp, Artificial Sequence
  ENSG00000233396_5 (sequence is synthesized)
acacaaacgtgttggagggatttgagtttgatgtcttgcatacaatgtgatcccactgtatgactacacaaatgttggcaaaagtgagttcagaggaaatggtaggcaagtacttcccag

SEQ ID NO: 832715 - DNA, 120 bp, Artificial Sequence
  ENSG00000233396_6 (sequence is synthesized)
ttttggccagaagatggagaaaaaagaattctcaaaaaatgttaaaggtgtctacagagaaatagacaagtgatgcacgacagatacatgtgtcagtctggtccctgcagttgtatttgt

SEQ ID NO: 832716 - DNA, 120 bp, Artificial Sequence
  ENSG00000233396_7 (sequence is synthesized)
aataatacacattggagcaatttcatggccatcggttagagaatgtttgaggaatgatccattcatatcaagaaggacatttcaaagatcaaaacctgatggaaatgctggagaccatgg

SEQ ID NO: 832717 - DNA, 120 bp, Artificial Sequence
  ENSG00000233396_8 (sequence is synthesized)
cgctgataggagctcatgcgtgtggaccaattactacgtgacaggcattggctccatgcttttcctgcactgctcatttaaacactggacaacctaagtgttctgatttatcccattgga

SEQ ID NO: 832718 - DNA, 120 bp, Artificial Sequence
  ENSG00000233396_9 (sequence is synthesized)
atgtgtttaacttcaaaccctggcagattaggtttttcatccagagcctgtggcttcaccatagctgtgattcacgttctgtcattctccactttaggaatttccagtattccaaatatg

SEQ ID NO: 832719 - DNA, 120 bp, Artificial Sequence
  ENSG00000233396_10 (sequence is synthesized)
agaagctgagaaaacaaacaacaaactcaaaaccctaaaaaccggatacgtaagggtagatgtttgttgggtgtggattaaaaatggactttttttgccccaagcaacaaagaggcacct

SEQ ID NO: 832720 - DNA, 120 bp, Artificial Sequence
  ENSG00000233396_11 (sequence is synthesized)
tagaaaatagacaagagacaagaagaagagaagctttaagagatatttggtccaaggaagagactcttcagatggaaggtcacgtcagctagaaacattaatatgactggatgggctcaa

SEQ ID NO: 832721 - DNA, 120 bp, Artificial Sequence
  ENSG00000233396_12 (sequence is synthesized)
accactgacttttcagtcaacatctgacagcactaacccagtgttccagagacactgcttgttaaacagtgaatgctgttgctcaattgtgtcatccgtaattgtcaaatattggcattt

SEQ ID NO: 832722 - DNA, 120 bp, Artificial Sequence
  ENSG00000233396_13 (sequence is synthesized)
agtagcacaaggaagtattctccgttgccaagctagagcacccataactcttctgttttgttgaacattgttccccaccacaaaccctctttagaagactgggggctcctaaagcattga

SEQ ID NO: 832723 - DNA, 120 bp, Artificial Sequence
  ENSG00000233396_14 (sequence is synthesized)
ggccgagagtcccgtccttgtgcatgtttgggcattgacccagggccaagtcagtgggagactcctccacgcctacgccaggtccccaggtgacaactgcagtctctggatctgaagtca

SEQ ID NO: 832724 - DNA, 120 bp, Artificial Sequence
  ENSG00000233396_15 (sequence is synthesized)
tccactttcccattcctagctcacctcacccatcgtgaagcctggatttcctttttatcactggttttgatggatttgattaaggcgttccttggtgaagttttcttcatgtttcttgtt

SEQ ID NO: 832725 - DNA, 84 bp, Artificial Sequence
  ENSG00000233396_16 (sequence is synthesized)
taaggcgttccttggtgaagttttcttcatgtttcttgttcttagaataatcatatttctgtaatatttgaagtttatggtttc

SEQ ID NO: 832726 - DNA, 120 bp, Artificial Sequence
  ENSG00000233396_17 (sequence is synthesized)
attccatttagccctatactggggcgtttaaagttttgatgccgatggtgtttttatgttttcaagtcatttgttactgtgtgtttcatttatgttagtttcaacttctattccttctag

SEQ ID NO: 832727 - DNA, 120 bp, Artificial Sequence
  ENSG00000233396_18 (sequence is synthesized)
ttcaataatcttctcttctgcaatgtttaatccactgccttcttccatttcagactgtaaatcatactttttatctacagaatttgatatttaaaaaatcttcaacctccccatttaatt

SEQ ID NO: 832728 - DNA, 120 bp, Artificial Sequence
  ENSG00000233396_19 (sequence is synthesized)
tcccattcctagctcacctcacccatcgtgaagcctggttagtattgccagagacccgagtgggcagatgcccacaccaaagacagaacctgctgcgtgcccaccttgctgatccctccc

SEQ ID NO: 832729 - DNA, 120 bp, Artificial Sequence
  ENSG00000233396_20 (sequence is synthesized)
tccttctagacaaaggcttcataagccagggaccttgggtttgctcacaaggcagcccctcacctagtaggcattagttcattatgtatatgtatatgtagtcctcaggttgtattcctt

SEQ ID NO: 832730 - DNA, 66 bp, Artificial Sequence
  ENSG00000233396_21 (sequence is synthesized)
accaccgcgcctggccaaaacaaagtttttaaaagattcctttaataaacatttacaataacatca

SEQ ID NO: 832731 - DNA, 120 bp, Artificial Sequence
  ENSG00000233396_22 (sequence is synthesized)
ttttaaaagattcctttaataaacatttacaataacatcaagaaatataaacgacatagcaaatatgtgaaagccagccagactctcaatggcatccagaaacataaactacatagaaaa

SEQ ID NO: 832732 - DNA, 120 bp, Artificial Sequence
  ENSG00000233396_23 (sequence is synthesized)
gacatgaaagccagccaggcttggcttcgaatcccagcactttggaaggctgtggcaggagggttgcttgatctcagaagcttgaaattagcctaggcaacatagtgagccctcatctct

SEQ ID NO: 832733 - DNA, 120 bp, Artificial Sequence
  ENSG00000233396_24 (sequence is synthesized)
actgaaaatcagaaaaattacccgggtttggtggtgtgagcctgtagtcccaggaatcagtggatgaggccctaggatgtcataggcctgagaattccatgctgcagtgagctgtgattg

SEQ ID NO: 832734 - DNA, 120 bp, Artificial Sequence
  ENSG00000233396_25 (sequence is synthesized)
tgccactgtactccagcctgggtgaaagagtgagatcctgtgcagaaacaaaagaagaaaaaaagagatatgaaagcctatatattgaagactaccaagtactgcttagagcagttaaag

SEQ ID NO: 832735 - DNA, 120 bp, Artificial Sequence
  ENSG00000233396_26 (sequence is synthesized)
acctttggaatagaaaatgtttcttcttgcatttcaagattgcttttgttttggggggacacactattttttaggaatatgaagttcttcttaggcattcctgtaaaaaaggccacttct

SEQ ID NO: 832736 - DNA, 78 bp, Artificial Sequence
  ENSG00000233396_27 (sequence is synthesized)
aagatgtctgtccattgatttaggtcttcctgaatctcctcgagcaatgttctgtagttgtctgtgtacaagtacggc

SEQ ID NO: 832737 - DNA, 120 bp, Artificial Sequence
  ENSG00000233396_28 (sequence is synthesized)
ctcgagcaatgttctgtagttgtctgtgtacaagtacggcaccttcttgaacaaatttattcccaggcatattattcttacaagtgctattataaatgaaatcattgtgtcaattttctt

SEQ ID NO: 832738 - DNA, 120 bp, Artificial Sequence
  ENSG00000233396_29 (sequence is synthesized)
ctcagattgttcattgctaacacaactgattgtttactgaaagtttgctgaattcacttattaactctagtagtgtgtgtatgtgagtgtgtgtgtgtgtgtgtgtgtctggcctctgtg

SEQ ID NO: 832739 - DNA, 120 bp, Artificial Sequence
  ENSG00000233396_30 (sequence is synthesized)
gtgtgtgtgtgtgtgtgtgtctggcctctgtgtgcatgtatgtgtgtttgcatctgtaggtattatttgggattttctatgcataggatcacaccatctgcaaattgagatcattttgtt

SEQ ID NO: 832740 - DNA, 120 bp, Artificial Sequence
  ENSG00000233396_31 (sequence is synthesized)
ttttaaaagataatttggccaggtgtagaattgtaggtgacagtttttctttttttaagttctttattgcaaacttcttgtttgtatgtgaaatcttatgccatccttatatttagtgct

SEQ ID NO: 832741 - DNA, 120 bp, Artificial Sequence
  ENSG00000233396_32 (sequence is synthesized)
agtaataatatctatttagacataaggagataaataacgaaataattgcttctatgtgatgaaactctgggagtacacaaggggactgctattttactaaacaaattttcaaatatatat

SEQ ID NO: 832742 - DNA, 120 bp, Artificial Sequence
  ENSG00000233396_33 (sequence is synthesized)
aactttgataaagtatccaaataaaataattcctttcccatataagtatgtgtatatatgtattcattgtattttgaagataaatttttacacagtcatgttaatcgctttcatttaagg

SEQ ID NO: 832743 - DNA, 120 bp, Artificial Sequence
  ENSG00000233397_0 (sequence is synthesized)
tgggtgtcaacattccagtggcccaaatggctgtgcatgaatgggctttggttcgaaggatggtgagcagatggtcaccggcctcacagagaagaaggttgtgcaacagggcctggaggc

SEQ ID NO: 832744 - DNA, 120 bp, Artificial Sequence
  ENSG00000233397_1 (sequence is synthesized)
cctctgaagatctgagacaaggggaagaggacaactttaccagggacaagacagcctgagcttcagcaaaacactataaaagagtatccttggttccatatgacccaggcagagggagga

SEQ ID NO: 832745 - DNA, 120 bp, Artificial Sequence
  ENSG00000233397_2 (sequence is synthesized)
ctacttctattgctaaacaagtatagagtttcatataaatataattcataaaaggtataaacggcaagagtttctacccaaagattttgtgaaacacctggcattctagctacagcagca

SEQ ID NO: 832746 - DNA, 120 bp, Artificial Sequence
  ENSG00000233397_3 (sequence is synthesized)
aattatggcatcccttagcccctcagagacctctgtcctcagcagatgtgaccgccttcttggatctcagcagtgcaagggttcagtgtgccagcatctctacatctgaggtcttgctgt

SEQ ID NO: 832747 - DNA, 120 bp, Artificial Sequence
  ENSG00000233397_4 (sequence is synthesized)
cttctgcaggccttccagctgctttgagagagaagtgaccaaagtattctcacttttgaagggagtgaaataaaacctggacaaaccaggttctcaaattaaaattcatggatcttccta

SEQ ID NO: 832748 - DNA, 120 bp, Artificial Sequence
  ENSG00000233397_5 (sequence is synthesized)
tttctaagaattgaaatgcaatctctgttttgctctctcttttgcttttgaaacttcaaacataacgtttcctccacctggagttcattccctttgtttttcatttggctaaggtcctag

SEQ ID NO: 832749 - DNA, 120 bp, Artificial Sequence
  ENSG00000233397_6 (sequence is synthesized)
tcaatgatcgcaactccagtgccatctcatccaagaagctttgcccacccactgccctagcaaggtgcatggcttctgtgctctcaaacagacttgtgcctcactgctttttaacaaagc

SEQ ID NO: 832750 - DNA, 120 bp, Artificial Sequence
  ENSG00000233397_7 (sequence is synthesized)
actcatcactctgtaatgcaattatctaatgtaataattgctaagattcatggaccccgtgctaggtgctggacattcagggttttcaaggactgagaatgcacatatggatagaacaaa

SEQ ID NO: 832751 - DNA, 120 bp, Artificial Sequence
  ENSG00000233397_8 (sequence is synthesized)
ggacaattttcatagcattttcttctcttttgttttgaaaggcattgattagtaagtaggacatttctgttcagcaattgccctttgaagttttattcaaacacagaatttactgtaaaa

SEQ ID NO: 832752 - DNA, 120 bp, Artificial Sequence
  ENSG00000233395_0 (sequence is synthesized)
agggtggcatagacggcgagcccagggaggccactgacatgcattcaagagaaaagaaaagaagccaggctttggcataagtgcttcatggtggagtgagaatggcttgccctggaaggg

SEQ ID NO: 832753 - DNA, 120 bp, Artificial Sequence
  ENSG00000233395_1 (sequence is synthesized)
tcatgttttagaaggagtgatcttcattgtgaagtctaaactgttctggaaatataagctttgaaacccagggctgccaacagggtctaaaatgagaccacaaggctctccttgacagga

SEQ ID NO: 832754 - DNA, 120 bp, Artificial Sequence
  ENSG00000233395_2 (sequence is synthesized)
gtggtgtgcttaaagacaaagtcacctgcaagtactgaattctcacaggaagtctcagacgaagacactgctaactccactttcagagagaaacactgaggctcagagctaaactaactc

SEQ ID NO: 832755 - DNA, 120 bp, Artificial Sequence
  ENSG00000233395_3 (sequence is synthesized)
gcctcagagcccacatcctggacttgagcctcagggtgttgcatgccaaagcctgtcctcttcaccccagcttcctgggcattggagcggatccatagtgttagatatgcagtgggaatg

SEQ ID NO: 832756 - DNA, 120 bp, Artificial Sequence
  ENSG00000233395_4 (sequence is synthesized)
ccctggagaagccgggttccttaacccagatttgaatcaatagcctcacacctggtatgcacatccaggccaagtgtggctgaatggggagcatctgttctggagacggccaccctcatg

SEQ ID NO: 832757 - DNA, 120 bp, Artificial Sequence
  ENSG00000233395_5 (sequence is synthesized)
ggctcctctgcttcctgtcccttcgggcactgatttatggcacacagcagggaagggcctgagcttgagccctgaccatcgttatcatcaccatcttcattccagtgcagtgaagaacat

SEQ ID NO: 832758 - DNA, 120 bp, Artificial Sequence
  ENSG00000233395_6 (sequence is synthesized)
tctgaaggtagagatgaaggtcttctttctgaatgaagctccttgcatgattcagggatcttcctcttgaaggcaccaatcattttgactttaatgcatgcactctgacttacttgtggt

SEQ ID NO: 832759 - DNA, 120 bp, Artificial Sequence
  ENSG00000233395_7 (sequence is synthesized)
gatctctcctggaaatacatggaaaaatgaaaaataggctaactggggagatttcttaaataccagtttgtatggctgtgttaacctgaatgattaaatataggattgttttttaagtta

SEQ ID NO: 832760 - DNA, 120 bp, Artificial Sequence
  ENSG00000233395_8 (sequence is synthesized)
gcaacgcacatgtgcccctgcagggtggcatagacggcgagcccagggaggccactgacatgcattcaagagaaaagaaaagaagccaggctttggtcagttgtgaatataccatctcct

SEQ ID NO: 832761 - DNA, 120 bp, Artificial Sequence
  ENSG00000233395_9 (sequence is synthesized)
gactcccaagcattggttcatcatccagctggcaattgttgagcctcagccaatggtggaaccaaaatctagtatctctggagtaatttccatttccaacagaaggagagtgactttcac

SEQ ID NO: 832762 - DNA, 120 bp, Artificial Sequence
  ENSG00000233395_10 (sequence is synthesized)
actatgaactgcacaaagatggcgctccccataagtgaggctgggcagagccccgctgtgcacccccatctccacctccgcatgtcatttctgaagcctcgccactcagtagtaggagga

SEQ ID NO: 832763 - DNA, 120 bp, Artificial Sequence
  ENSG00000233395_11 (sequence is synthesized)
ataggccagtaccagcaagagagcccctttctgctgctgcatccctccagtgtcctctattgacagttgaacctggtggcagttgcagatgagaaatgcttacagctcatttttttgctg

SEQ ID NO: 832764 - DNA, 120 bp, Artificial Sequence
  ENSG00000233395_12 (sequence is synthesized)
agcaagaaatgagagatgagtttagagctgagaggcattcaactgctaccagatgggatgcagggaacccatgactcccaggaaattggccaagtccctgagaggacagttggtggcatt

SEQ ID NO: 832765 - DNA, 120 bp, Artificial Sequence
  ENSG00000233395_13 (sequence is synthesized)
ctcggagacaggacccttgaggaaaaactctagagcaaagcagaggaacggtgtcagcattttgaaaatgctgagctgaatgacactgagaaatgcccagtgcaatgataaacgggcaga

SEQ ID NO: 832766 - DNA, 120 bp, Artificial Sequence
  ENSG00000233395_14 (sequence is synthesized)
tagtttctcaggggcctggggcctggatgggggctgggctggagtgagagagaggcaggtctccagctgtgctatgcacacctcaggttgaagatgctacataggtaaaagcgctgatgg

SEQ ID NO: 832767 - DNA, 120 bp, Artificial Sequence
  ENSG00000233395_15 (sequence is synthesized)
ttcagcatgattaacaaggtattggggactacatttagactgaggctggtattttgcattgcaatggacaaaaatatcgctgtcacagctgacttggggctcattcattgcacatgcagt

SEQ ID NO: 832768 - DNA, 120 bp, Artificial Sequence
  ENSG00000233395_16 (sequence is synthesized)
gaaggcagctgtgtggcggtggggccacagggcaggtagcatggatggagagaggattctgaataactttgactccgcaggtttttcataaggaagggctgaacaaaagcagccaagggg

SEQ ID NO: 832769 - DNA, 120 bp, Artificial Sequence
  ENSG00000233395_17 (sequence is synthesized)
gccagagaaagagaaagtagagagtgtgagattagaggagatgggcaagttctagtgaagatgcaatggcccatagtgtcacagaagacaaagactgcaaagaggcccttagcgtcagtg

SEQ ID NO: 832770 - DNA, 120 bp, Artificial Sequence
  ENSG00000233395_18 (sequence is synthesized)
gaatgggggcaggagaggaaacagctggtgacaatctgtggtcacatttgcctgtgaatgagaggagaaaggatgagagtaactgtggagaggtgtgaggctgaggcagggttttacttt

SEQ ID NO: 832771 - DNA, 120 bp, Artificial Sequence
  ENSG00000233395_19 (sequence is synthesized)
tactgggagaaggagcatattgatggtgatgagattgcgaagggtggcagatggaggttacatactgtcatgagtgtgagcgagggagagaagactgcaaggggcttgcccagagccggc

SEQ ID NO: 832772 - DNA, 120 bp, Artificial Sequence
  ENSG00000233395_20 (sequence is synthesized)
agtcagggatggcttagcacgtttgctcaccagctgggaggcctataaatgtcatttggatgccttccagggattagccaggggacacagatggatttagtaaggatgataacagatagt

SEQ ID NO: 832773 - DNA, 120 bp, Artificial Sequence
  ENSG00000233395_21 (sequence is synthesized)
tctctttttaagcaaggtcacatggtagtgcatggtgtgtgtgtggtgtgcatgtgtgtgtgtgctgtgcacgtgtgtgtgtgtgttaatagctaccagagcccaggtttcaaactgaaa

SEQ ID NO: 832774 - DNA, 120 bp, Artificial Sequence
  ENSG00000233395_22 (sequence is synthesized)
tcacttgcaaaaggcatcagtcaccagcttctacttgcacatgaaatgcatagtccccactcccagcttttcagagtgccacacatctggaagcagcctcctgatgctcccagctccttt

SEQ ID NO: 832775 - DNA, 120 bp, Artificial Sequence
  ENSG00000233395_23 (sequence is synthesized)
tgggttgtggatttgtttattttgcatttatagttttgccaagtttttggcaaattttttgttgatttacatttaactttatcagtctgttcagggtttccttccctagcttgttctcag

SEQ ID NO: 832776 - DNA, 120 bp, Artificial Sequence
  ENSG00000233395_24 (sequence is synthesized)
atgtggccaagcatcactcttcaccaggagaagacactaaagtaaaagaaccatcaacacaagtgacatgtcatagcaggagctgacacagcctcaccagcccatgctcggccagactag

SEQ ID NO: 832777 - DNA, 120 bp, Artificial Sequence
  ENSG00000233395_25 (sequence is synthesized)
ggagcatcggccgcttgttccatcctgtgcttgtctgcctgcctctctgtcatgagacgcattcgaagagtcctgggcccaaaagcaactcacagtccaggaagacgtccaggccttggg

SEQ ID NO: 832778 - DNA, 120 bp, Artificial Sequence
  ENSG00000233395_26 (sequence is synthesized)
tgacgctcagtctcataaagacggagaatggtggcctcctccacaggaatggtgctcatcattagccatgacaagcttcaatgttcaaaatgcctttgcaaaagaaatactggacaaatt

SEQ ID NO: 832779 - DNA, 120 bp, Artificial Sequence
  ENSG00000233395_27 (sequence is synthesized)
tataacagaggactctcattgcccaggttataggaagactttgaggccagagcacagtgacattggagggagccgcaaccctccctgggttgaaggaactaaggagaatgtggcagaatt

SEQ ID NO: 832780 - DNA, 120 bp, Artificial Sequence
  ENSG00000233395_28 (sequence is synthesized)
cccttgccctcttggaagcaattgctgtgtaggaagtctgaacacctcacaggagatggaggccagttcctgcctgctgtagccacccagctgaagggggtccagacacgagtggaggca

SEQ ID NO: 832781 - DNA, 120 bp, Artificial Sequence
  ENSG00000233395_29 (sequence is synthesized)
ttgtgacctccagcctcagcagacacctccacactgcgcagggcagagcaaccacgccaccgagtgagccccatttgcagactttgagcaaataatgattgtgcacgttggatcatttat

SEQ ID NO: 832782 - DNA, 120 bp, Artificial Sequence
  ENSG00000233395_30 (sequence is synthesized)
tgagtttctctcgtacaccaagcactggttggatcccatgcttgttggtgacagaactgctgtgatgccagtcctgcgtccccttcagcctgtgaaggaggagcaccatgaaccagccaa

SEQ ID NO: 832783 - DNA, 120 bp, Artificial Sequence
  ENSG00000233395_31 (sequence is synthesized)
ctaacacgtgtctaatcacataaagggaactgaacaccagagagccacagtcactttccgaaggtcacacagcaagtgcaaatgaggcctcatcctcagggctgggttccaggcctgctg

SEQ ID NO: 832784 - DNA, 120 bp, Artificial Sequence
  ENSG00000233395_32 (sequence is synthesized)
ggcaggtcggttactgctgcacaaaatttctgttatcctaaaattgtttcagacaagcaccaaaggacgtcccatagttctgcttgactaaggtttaatgaagttaatgttcatactttc

SEQ ID NO: 832785 - DNA, 120 bp, Artificial Sequence
  ENSG00000233395_33 (sequence is synthesized)
ccagccctcattgcttccccagtactggttcctgcaagctgcttggttgatgctccagttcctcctttttcttcctctctgcctggggaacctctcgcatctttcaagaagacactaaag

SEQ ID NO: 832786 - DNA, 120 bp, Artificial Sequence
  ENSG00000233395_34 (sequence is synthesized)
gacccaggttggtccctgtggctgcctttgtgctccctaaatccccttgtctagggtcagcctagggtctggcatggggcagagacaggagtgccctcatctgccagggaaatgctcact

SEQ ID NO: 832787 - DNA, 120 bp, Artificial Sequence
  ENSG00000233395_35 (sequence is synthesized)
gggggagggagcagccggccccccaggccacactccatgccccaccctctaagctgcagagtgcatgtacatcaatggaacacagagggagggtcccaggctcctgtccacactaaaatg

SEQ ID NO: 832788 - DNA, 120 bp, Artificial Sequence
  ENSG00000233395_36 (sequence is synthesized)
cccctggaccccaacccttaacagacgagatcctgtctcattagaaagcacatgtgacttctctagcagctcattcccacttcctttgtcttcagtaaagacggagaatggtggcctcct

SEQ ID NO: 832789 - DNA, 120 bp, Artificial Sequence
  ENSG00000233395_37 (sequence is synthesized)
gacacagcctcaccagcccatgctcggccagactagttaaagcatgtggatgatccgaacaacacaagaataagctagaatgtgaagcagagtcaatcttatcagttaataaagtcaagt

SEQ ID NO: 832790 - DNA, 120 bp, Artificial Sequence
  ENSG00000233395_38 (sequence is synthesized)
tgttgattcagagaagattggccctgagaggatttcaggagcagcagtgtcatcagagccgaggcttcatttgtggttgttaccacaaactcttggctgaacccagaggtggacaagatt

SEQ ID NO: 832791 - DNA, 120 bp, Artificial Sequence
  ENSG00000233395_39 (sequence is synthesized)
ttctgtcatgagacaggtgataacacggacctagctccattcttagtgaaggaaaattacctttctatttttcccatcaatatacaccacaacaaacagaagacactaaagtaaaagaac

SEQ ID NO: 832792 - DNA, 120 bp, Artificial Sequence
  ENSG00000233392_0 (sequence is synthesized)
ctcaaactgggcctggagggccttcagctcctcagtcgtggcactgatggtggcctgcggggagaagggagcccacggtggcaccagggagctgggcccagcagtggagggtgaggctgc

SEQ ID NO: 832793 - DNA, 120 bp, Artificial Sequence
  ENSG00000233392_1 (sequence is synthesized)
tgggatgaggagacatccacggcccctgacagctgtgatgtcgccctctcccgctgcgcagtgccctggggatggggcacaagccctccatcccggctccgagtcaccgagcgtccccca

SEQ ID NO: 832794 - DNA, 120 bp, Artificial Sequence
  ENSG00000233392_2 (sequence is synthesized)
aggccccgctgcctggacgccccggccccccagcaggcggcctgcgcgtgcctctgtgcagtcagtgagaagggctcccgttcagaatgggcagagaagggggctgcctcccgcgcctgg

SEQ ID NO: 832795 - DNA, 120 bp, Artificial Sequence
  ENSG00000233392_3 (sequence is synthesized)
tgccgagagtttcctctggtgcagggccagccgcctcgggttgtttctcctttggaaggatctctctggcccatctgggggagggcagcccagagacacgtgtgcacctgtgtgggctga

SEQ ID NO: 832796 - DNA, 120 bp, Artificial Sequence
  ENSG00000233392_4 (sequence is synthesized)
cctatgcgcagtgtcaccaatgtctgtgacattgctgtaatggcaacaaagctggaggcaacccagatgcccgtggaaggaagaacagccacaggaagacccagttctggcagctcagca

SEQ ID NO: 832797 - DNA, 120 bp, Artificial Sequence
  ENSG00000233392_5 (sequence is synthesized)
tgcagcccagaaacagaagaacaaagctgcagatacacagctgggaaaggccaccgagatgctttgataagtgagaagaggaaagcccaggagccggcatagacttttcattccttttgt

SEQ ID NO: 832798 - DNA, 120 bp, Artificial Sequence
  ENSG00000233392_6 (sequence is synthesized)
ctgactcagccaggcccactttcaccctgaagtcaaactcaccccttcaggaggcttagaaatgatgccttctttcccctgaaaactggtgtcagcttcccttagccaatggcctgggcc

SEQ ID NO: 832799 - DNA, 120 bp, Artificial Sequence
  ENSG00000233392_7 (sequence is synthesized)
aggcaccatttcatctgccctgagagcctgggcttggcttagtgcgtggtgtgagggccccttgtcccatgcccctatggctgtttgcctcttcctagtcccagggactactcttccctt

SEQ ID NO: 832800 - DNA, 120 bp, Artificial Sequence
  ENSG00000233392_8 (sequence is synthesized)
gccagggctttctgcagctgccccacgcggctctgggcccgggcacacctgcactctgcctcgctcagccggctgctcagggtcgccatctggatgcgggagtcatcctgggcagaagga

SEQ ID NO: 832801 - DNA, 120 bp, Artificial Sequence
  ENSG00000233392_9 (sequence is synthesized)
ctgagcctagcctggtacctctgccacctgctgtgagggctgtgccatcctgcccagctgccccacaggggcctttctagagccccagccaggccgttggcctccctctgctccccagct

SEQ ID NO: 832802 - DNA, 120 bp, Artificial Sequence
  ENSG00000233392_10 (sequence is synthesized)
ctgcaccacctcctggaggccacctgtgacctatcttgcctgctggatgggaactccctgtgggcagggacagatggtggcccgcagctcgctgttgaaaagcaacagtacgtccttctc

SEQ ID NO: 832803 - DNA, 120 bp, Artificial Sequence
  ENSG00000233392_11 (sequence is synthesized)
gcgggcctcgtcactcagcgcccggcgggcctcctgggcctccctgtgcagcccctcccggctctcctcgacgccctgcagctcctggcgcagtgcggccagtccctcctgggccacggt

SEQ ID NO: 832804 - DNA, 120 bp, Artificial Sequence
  ENSG00000233392_12 (sequence is synthesized)
cagctgtgcccgcagcctctcagcctggggaggaccattcagctctagaggcccgctggggaccactgctccagggatagccacaggggcctgtggcctctgacatggtgtggcaggcac

SEQ ID NO: 832805 - DNA, 120 bp, Artificial Sequence
  ENSG00000233392_13 (sequence is synthesized)
aggtgccctgcccaacttggtccccatgcgctttgctcaccccatggagccaccaatccctagtgctgcggaggctgcagggcggcttccacgggctgaggcagggccagcctaagagcc

SEQ ID NO: 832806 - DNA, 120 bp, Artificial Sequence
  ENSG00000233392_14 (sequence is synthesized)
cagaagaccccaccttgagcccctgggcccggccccacgctgcggcctctctggacccccaggacgctgaccactgccgctaggtcctggaggctctcgcgtagggccgtggtctccctc

SEQ ID NO: 832807 - DNA, 120 bp, Artificial Sequence
  ENSG00000233392_15 (sequence is synthesized)
aaatgctccatctccctgatggtgtgggagatgcgtgtgagcgagacaccctcagctccaagggtggcacgctgctccgtggaccaggctgtggaagcaatgcctgtcaaatccacacat

SEQ ID NO: 832808 - DNA, 120 bp, Artificial Sequence
  ENSG00000233392_16 (sequence is synthesized)
aagcaatctttggagggtgttgcataacagaagatgtatcaggtctttgtcctggatcctcggaggaagcttctaaaccctgggggtttctcagaagtgtggagcgtctgcattagtcct

SEQ ID NO: 832809 - DNA, 120 bp, Artificial Sequence
  ENSG00000233392_17 (sequence is synthesized)
ggcgggcccctgggaccacacctgagtttatgctaatgaggtgactcagggtgggttcctactgaatttcaggatggggactgtctgctgaaagacccgttattagagggttggggcttt

SEQ ID NO: 832810 - DNA, 120 bp, Artificial Sequence
  ENSG00000233392_18 (sequence is synthesized)
gagccacgggatgtcagcccaacctcccagcagtcagagaagtgggcttcaatcacctaaccaatcactccaccgatcacgttacacagtgaaaccccaataaaactctggacaccaaaa

SEQ ID NO: 832811 - DNA, 120 bp, Artificial Sequence
  ENSG00000233393_0 (sequence is synthesized)
agcaacctagcttaaaggatcctcacatctgcggcgatgactctgtgcacagaccaaggaaggagaagccgccggagccagtaaagtactcccttggtggtcaaattccggagggctaaa

SEQ ID NO: 832812 - DNA, 120 bp, Artificial Sequence
  ENSG00000233393_1 (sequence is synthesized)
gtaaagtactcccttggtggtcaaattccggagggctaaatgtgtgtgtgcatgaatgatcacaaataaccctacctgcggtgttgttcatgtggatggtgacaagacctactgctggac

SEQ ID NO: 832813 - DNA, 120 bp, Artificial Sequence
  ENSG00000233393_2 (sequence is synthesized)
agagtgctgcctttggactttccagtgcctcagcatcagcctggggatcacgttctcatcaaagaggggaaagaagggaaactcgagccagcccgggaaggaccctaccttgtgctgcta

SEQ ID NO: 832814 - DNA, 120 bp, Artificial Sequence
  ENSG00000233393_3 (sequence is synthesized)
accactgagactgctgttcgtaaggttggaaagagatggacacatcacacatgagtcaagcaagcaccattatcctcagaatcatgggccattgttcctggatcaagccctaccaaatta

SEQ ID NO: 832815 - DNA, 120 bp, Artificial Sequence
  ENSG00000233393_4 (sequence is synthesized)
aagctaaggaaagcttagtctatctatcttttcctttcccttccttacccagtgcttatatccattactattcctaccactagcaactctaaccccactttagaacgcttctgtggttta

SEQ ID NO: 832816 - DNA, 120 bp, Artificial Sequence
  ENSG00000233393_5 (sequence is synthesized)
ggagcagaggtcactggaaaggatcctatgggcttctttaaggtgggctttgttctccctcctccacctcctatggctgcccctttcccaaacctacaaaatcaaactatgactcacctc

SEQ ID NO: 832817 - DNA, 120 bp, Artificial Sequence
  ENSG00000233393_6 (sequence is synthesized)
atgccaaatgacaaaagcaaggtcccggtagtagaaataggagacctaaggcaaaccatagccattaaaacagggtataaaaatgtaaatgcctggttaaaattgattaaatattctgtc

SEQ ID NO: 832818 - DNA, 120 bp, Artificial Sequence
  ENSG00000233393_7 (sequence is synthesized)
cacacgttaaacaaaggcaatttttatgcttgtgcacatgacaggccagaagcccagattgtcccctttccactagggtggccctctagttgactgggcatggcctgcatggcagatctt

SEQ ID NO: 832819 - DNA, 120 bp, Artificial Sequence
  ENSG00000233393_8 (sequence is synthesized)
tctttcccaggattattcagcctggggtaacaagtcgtgccaagctctctctctgctacatcccgaagttcaacaccctgcgggtcagcccccaagggccatccagcttccatctcccaa

SEQ ID NO: 832820 - DNA, 120 bp, Artificial Sequence
  ENSG00000233393_9 (sequence is synthesized)
gaagggatgcagtgagattaagaaatttcaagagcttaccaattagcccttactcatccctgagcagatgtgtagtggtattatgatggacctttactggacactctgccgagtaactga

SEQ ID NO: 832821 - DNA, 120 bp, Artificial Sequence
  ENSG00000233393_10 (sequence is synthesized)
agtggcacttgctttagtccagttggctatccctttcacgctggcatttcatcaaccagagaaaggaaaaataagatatcataaagcaaaagaagccccttatgggtcttttgactctca

SEQ ID NO: 832822 - DNA, 120 bp, Artificial Sequence
  ENSG00000233393_11 (sequence is synthesized)
ataaagcaaaagaagccccttatgggtcttttgactctcacatctatttagacataattacagtcccacagggaataccagatcaatttaaagcctgaaatcaaatagctgcaggatttg

SEQ ID NO: 832823 - DNA, 60 bp, Artificial Sequence
  ENSG00000233393_12 (sequence is synthesized)
ggaaaaataggatagccttagacatgatattagcagaaaaaggaagaatttgcatcataa

SEQ ID NO: 832824 - DNA, 120 bp, Artificial Sequence
  ENSG00000233393_13 (sequence is synthesized)
tagccttagacatgatattagcagaaaaaggaagaatttgcatcataattaaaaatcaatgttgtaacttcatcccaaacaacaccgcccctaatggaagtataacaaaggcattgcaag

SEQ ID NO: 832825 - DNA, 120 bp, Artificial Sequence
  ENSG00000233393_14 (sequence is synthesized)
gctctatcctgagttagccaataactcgggggtaaatgacccctttacaggatggctggaaaagtggttcagtaaatggaaaagaatagtagccccaattcttacttccatcgcagccat

SEQ ID NO: 832826 - DNA, 120 bp, Artificial Sequence
  ENSG00000233393_15 (sequence is synthesized)
cataggtgtgcttattcttgtcgggtgttgtgtcacactaaggaaggagaccgctacaactcctgctgccctcctcccaccaccttgcctagttcacaagacaggaggaaagagagaaag

SEQ ID NO: 832827 - DNA, 79 bp, Artificial Sequence
  ENSG00000233393_16 (sequence is synthesized)
aagaagcaggccctaggagttaaaaaggtaataataataacatcaaccccagacctaaactacttgtgttatctgtaaa

SEQ ID NO: 832828 - DNA, 120 bp, Artificial Sequence
  ENSG00000233393_17 (sequence is synthesized)
gttatctgtaaattccagacattgtatgaaaaagcattgcaaaactttctgttctgttagctgatgcatgtagcctccagtcacgttccccacgcttgctggatttatcacgaccttttc

SEQ ID NO: 832829 - DNA, 120 bp, Artificial Sequence
  ENSG00000233393_18 (sequence is synthesized)
atgtggacccctttagagttgtaagcctttaaaaaggccaagaattcagtttgcagggagctcagctcttaagatgcaagtctgccgatgctctcagccaagtaaacctcttccttcttt

SEQ ID NO: 832830 - DNA, 120 bp, Artificial Sequence
  ENSG00000232352_0 (sequence is synthesized)
aaccccagctccaggggctcagcaggcaaagggaatcactgagtgggggcaccacccgtggactccaatatctcaacctctccctccacaggttggaggtgggaggaacaacccccacca

SEQ ID NO: 832831 - DNA, 120 bp, Artificial Sequence
  ENSG00000232352_1 (sequence is synthesized)
gagtctggtgaacgtgccccatttgtaacatgaggggtacttctctggagggactgtatgttgacagtggcagagtggagccctgaagtccacctgagtgaatataccagggcttgagaa

SEQ ID NO: 832832 - DNA, 120 bp, Artificial Sequence
  ENSG00000233399_0 (sequence is synthesized)
acagactccacataggccagcaggaaccagagcaaagcacccggagcctcagctgttaaaatgactggtactgggagctggaggtctcactggccgtgactgggtcgaacccagggtgca

SEQ ID NO: 832833 - DNA, 120 bp, Artificial Sequence
  ENSG00000233399_1 (sequence is synthesized)
tctgatgagtgcaggcatggtagactcaggtgacccagaatcttttggttcagggaggtcacatagcccagtaagagccaatgagatgcagcaaaactgctggagatggaaggacaaaga

SEQ ID NO: 832834 - DNA, 120 bp, Artificial Sequence
  ENSG00000233399_2 (sequence is synthesized)
cactgaatctttcactctggaattgagcctgagatgtgaaggctggagctgctgcaaccattcctgaagcaagagctctgcatggactctgcctccctctttgtgaggtgggttttgagg

SEQ ID NO: 832835 - DNA, 120 bp, Artificial Sequence
  ENSG00000233399_3 (sequence is synthesized)
gagaggaataaaatatgaatgtgtcttcatcaacattttcacctggacatcgtcttctatccattacctctttcaatcccagcaccaacccaggaaagtgggcaaggctgtgtcccctgg

SEQ ID NO: 832836 - DNA, 120 bp, Artificial Sequence
  ENSG00000233399_4 (sequence is synthesized)
gagcagaacagagaattggaggaccagcactcgagagctgaacaagcctgcatggccatccatcatagttactaaagagattagactaactctctgtagctccagagggcaaaagaagaa

SEQ ID NO: 832837 - DNA, 120 bp, Artificial Sequence
  ENSG00000233399_5 (sequence is synthesized)
ccacttggtagaatccaccagaggcagttttgaattcgaagagaagaagcactttctaatggtcacacagctggccagccctgagtgagctgtcccaggaagctcagggaaactatcttt

SEQ ID NO: 832838 - DNA, 120 bp, Artificial Sequence
  ENSG00000233399_6 (sequence is synthesized)
caaggagtaccaaagagagtgcatcaggctaaaatgaaaggactttgaaaggacggtaactggaatccacaggaagaaaacaagagcaccagtaaagatatctctaaaagatatcctcaa

SEQ ID NO: 832839 - DNA, 120 bp, Artificial Sequence
  ENSG00000233399_7 (sequence is synthesized)
tgccatttcacaggtgaggaaatgtgggcacagagaggtaagtcctgagtcaccccaagctctccttgccccagaagtccctcctctggagttgtgttaagtttcaagggcagatgcagg

SEQ ID NO: 832840 - DNA, 120 bp, Artificial Sequence
  ENSG00000233399_8 (sequence is synthesized)
agtcaggccagggccagattttagctctgagccctcaagggctcctggagccatctggagcctctggaaccgtctgagcccaactctcttctgaactgaggcccatgcacctgctctgat

SEQ ID NO: 832841 - DNA, 120 bp, Artificial Sequence
  ENSG00000233399_9 (sequence is synthesized)
ggagccaggccctgactgcaagtttcctctgccaaagtgcaacctcaggggatgtggatcagatgccatttgagaagaacatgctgagaacaactgagagatggcagcatttttcagctc

SEQ ID NO: 832842 - DNA, 120 bp, Artificial Sequence
  ENSG00000233399_10 (sequence is synthesized)
ggggagagagcagggtgggtggatgagtctgcctagggctggaaactctgtcttctgccatgggactgcatgtggccttgggcagcctccttctctgctccagtcttggattcctcatct

SEQ ID NO: 832843 - DNA, 120 bp, Artificial Sequence
  ENSG00000233399_11 (sequence is synthesized)
gtcaactggggtgatgccatctgttcaaagtgttgttaagaacatggtggaagaggatcatgggataaggctatatccccaagctcatttacagcaacaatgagcagttattaagcacca

SEQ ID NO: 832844 - DNA, 120 bp, Artificial Sequence
  ENSG00000264212_0 (sequence is synthesized)
aaggaggggctatgaaatatcttcactccaggttctttatgagctgcagtgtatcatttttatcagcaattggaagcatgctgcatgtttgactctgtggactcctgctttacacaacag

SEQ ID NO: 832845 - DNA, 120 bp, Artificial Sequence
  ENSG00000264212_1 (sequence is synthesized)
aacattccgatggtgtgcatgtgccatagtacgtatagaaattctaagaattcatataatttacctgctaaatcagggactattacagtctgctgtgtaaattcacattttggcactctt

SEQ ID NO: 832846 - DNA, 120 bp, Artificial Sequence
  ENSG00000264212_2 (sequence is synthesized)
taaaaagtggattattattgacccaatagaccataacagctccaaagaagccgttactgtacatcgtgtaaagccttcgtggtgtgtgttttattgaagctctgtagctgtcgggatctg

SEQ ID NO: 832847 - DNA, 120 bp, Artificial Sequence
  ENSG00000264212_3 (sequence is synthesized)
ttgttcttgtccaataagccatggtataaaattggatatttccactgcagtttctttctccacctccagaattctatttccctgtatttatagaggttgaaattttgaaatgtggataag

SEQ ID NO: 832848 - DNA, 120 bp, Artificial Sequence
  ENSG00000264212_4 (sequence is synthesized)
aaaaaaaaaaaaaaagcaggaagaaaattgaagacagtttttgctttgcatgaaaaaacatctcaaagaatgcatgaatttaccagcttccaggaggctgacaacggtcacagtgagatt

SEQ ID NO: 832849 - DNA, 120 bp, Artificial Sequence
  ENSG00000264212_5 (sequence is synthesized)
tccaggaggctgacaacggtcacagtgagatttctctactttaggcttttgggaatccaaataagatttttatttaattttctatgtgctaattttgtgtttttccacctgtctgtcctc

SEQ ID NO: 832850 - DNA, 120 bp, Artificial Sequence
  ENSG00000264212_6 (sequence is synthesized)
ttctttcatttaacaaaaaaatgaacattggaacatttgtcaggaaaaaaaaaaaactttttagttacttgtaccttcagtaaaaataaaataatactttgaggtctcaagctgtaggtg

SEQ ID NO: 832851 - DNA, 120 bp, Artificial Sequence
  ENSG00000234817_0 (sequence is synthesized)
agatgctccccggcctggctccgagtaactgcgagctggaggcgcggctgctctctcgggcggacctcagctctgcgaaccctgtggctgccggagcactgagcgccctgcccggagtcc

SEQ ID NO: 832852 - DNA, 120 bp, Artificial Sequence
  ENSG00000234817_1 (sequence is synthesized)
cgcggagcctggcgaggaggggtcgctgcatcccgagggccagccctgagccgggagatgaaacagctgtcatggaaatattttttaaatctcatactggtcaaacggtgtaaactttgc

SEQ ID NO: 832853 - DNA, 120 bp, Artificial Sequence
  ENSG00000234817_2 (sequence is synthesized)
tggaaggaaccttactcagagggccaatcacctgcttctctagagttctcaagctctcctgtgagcaccaggttgagctgcagaaagccagaaccagctcagaaactgagaaatggacat

SEQ ID NO: 832854 - DNA, 120 bp, Artificial Sequence
  ENSG00000234817_3 (sequence is synthesized)
gaagatgcccaggaaacatctctacagcatccctaactgggggttgatccattcatttccagacacagagaacagagtcacattctgctgtttccatatgtaccattttagtaagacttc

SEQ ID NO: 832855 - DNA, 120 bp, Artificial Sequence
  ENSG00000234817_4 (sequence is synthesized)
ttggggcacaaggcaggaagttggggacaatatatttgtctgcaccaaggcagcctgagaagagagaagtgaatactcctggggttattctatattattcacttaatattctaagtgagt

SEQ ID NO: 832856 - DNA, 120 bp, Artificial Sequence
  ENSG00000234817_5 (sequence is synthesized)
cctctaggggtacctgagacatggagtatgaaagtacacattcacaaaagtaccagctttaaaactagattatctctactattcaaaaacaccaaggaaaggccacacaatggagacaaa

SEQ ID NO: 832857 - DNA, 120 bp, Artificial Sequence
  ENSG00000234817_6 (sequence is synthesized)
gtgcatctgagatctagcaaatttccctgttggccacatactgataatgatgtattaaaatcaattctatactgtggggtacttatttgacattaataggtaccatggtggtttaacata

SEQ ID NO: 832858 - DNA, 120 bp, Artificial Sequence
  ENSG00000234817_7 (sequence is synthesized)
gttgctgcccagagaaaacgccgcacactcacctacactaaaatgaagtctgagtcagctgcctcccctccgccatcccttccaaagccaatggttgaaagtcacagaagtccctctgct

SEQ ID NO: 832859 - DNA, 120 bp, Artificial Sequence
  ENSG00000234817_8 (sequence is synthesized)
gccacctagtgacgacaatgtgaatacaactacacagcctcctgggaaagaagttttgaaccacgtttgcttctaaaggaagcctgtaattacctctgagtgctctattttggctacaat

SEQ ID NO: 832860 - DNA, 120 bp, Artificial Sequence
  ENSG00000234817_9 (sequence is synthesized)
agggagtagaacagacaggcttaagaacagtgcctaaaaatgccactaaatttatctttaaaatgcctgtggttccttagcacttgaattccgttatgcccctgggtatagtcacctgga

SEQ ID NO: 832861 - DNA, 120 bp, Artificial Sequence
  ENSG00000234817_10 (sequence is synthesized)
tgttaggggctgtcaaaattcagccctcagttggtgatcagtaggttttccctttaagtggtttctgaaaggattttttttaaaaatcttgaaattctcatgtctggatgatgtttccag

SEQ ID NO: 832862 - DNA, 120 bp, Artificial Sequence
  ENSG00000234817_11 (sequence is synthesized)
ttttgtggaagaataaaagaaaagggacatgaaattctggctccctgggggcagtggctgtgtcttattaatctctgtgcccattgtaccaacaccggtcagtcacagcatgtactcaac

SEQ ID NO: 832863 - DNA, 120 bp, Artificial Sequence
  ENSG00000234817_12 (sequence is synthesized)
caatgctgatgaatgcagaggggcgaggggctggcacgctcttgaccccttataggggctgcgtcgatggccagggttcaatgggaactttctggtacagtcttgctctgccaatctttc

SEQ ID NO: 832864 - DNA, 120 bp, Artificial Sequence
  ENSG00000234817_13 (sequence is synthesized)
aaattaagtgcagcacaattggaagcctcacattctcatagacgggttgaggagggcattaggggcagaaaggctcacataaggcctgagcgtgaggtttcctgcccagcactgctgtgc

SEQ ID NO: 832865 - DNA, 120 bp, Artificial Sequence
  ENSG00000234817_14 (sequence is synthesized)
cattgcagcccaccttcttctcacctttccttccacaccacggcgcggcaggtgcagaaaccgtgctgggattgaggccctagaggctgactacaggtcttgggggcaaaacatctggac

SEQ ID NO: 832866 - DNA, 120 bp, Artificial Sequence
  ENSG00000234817_15 (sequence is synthesized)
acacagctgaagatgagccaagtatattagtcagggttctctagagaaacagaaccaacaagatagagagatgcagagagacagagggacagacagacagatttaagtaactgacccata

SEQ ID NO: 832867 - DNA, 120 bp, Artificial Sequence
  ENSG00000234817_16 (sequence is synthesized)
aaatcttggaggcttggcaagtccaaaatctgcaagatggaagtgggctggcacattggagactcaaggaagagttgcacgttgagttcaaaggccggctgctggcagaattcctttctg

SEQ ID NO: 832868 - DNA, 120 bp, Artificial Sequence
  ENSG00000234817_17 (sequence is synthesized)
ctcaggtgaagtcggtctctgttctattaagaccttcaactgattggatgaggtccacccatattatgaagggtcatttgctttactcaacatctactcatctaaatattaatctcattg

SEQ ID NO: 832869 - DNA, 120 bp, Artificial Sequence
  ENSG00000264215_0 (sequence is synthesized)
agtcatcaaagcagaagcctggctttgctctattaagattggaaatgtacactaccaaacactcagtccactgttgagccccagtgctggaaggaaggagggcctttcttcctgtgttaa

SEQ ID NO: 832870 - DNA, 120 bp, Artificial Sequence
  ENSG00000264215_1 (sequence is synthesized)
ttgcatggaggctacaggggttagcctggactaaaggcatccttgtgttttgagctattcacctcagtagaaaagaatctaagggaagatcactgtagtttagctctgttgacctgtgca

SEQ ID NO: 832871 - DNA, 120 bp, Artificial Sequence
  ENSG00000264215_2 (sequence is synthesized)
cctaccccttggaaatgtctgctgttatttctaattccacaggtcataagatgccttcttgatgatatatgaacgataaaaacaactttcacttcttcctattgtaatcgtgtgccatgg

SEQ ID NO: 832872 - DNA, 120 bp, Artificial Sequence
  ENSG00000264215_3 (sequence is synthesized)
atctgatctgtaccatgaccctacataaggctggatggcaccctcaggctgagggccccaatgtatgtgtggctgtgggtgtgggtgtgggtgtatctgctgagtaaggaacactattct

SEQ ID NO: 832873 - DNA, 120 bp, Artificial Sequence
  ENSG00000264215_4 (sequence is synthesized)
caagattctaaagctcaattcaagtgacacattaatgataaactcagatctgatcaagagtctggatttctaacagtccttgcttcggggctgtgctggcaacttaactcgggtgcctta

SEQ ID NO: 832874 - DNA, 120 bp, Artificial Sequence
  ENSG00000264215_5 (sequence is synthesized)
catcttttctaatcatagtgttgcatatgagcctgccctcactccctctgtggaatccctttgcacctgagagcctactgaagtggctggtagaaaaaggggcctgagtgaaggattatc

SEQ ID NO: 832875 - DNA, 120 bp, Artificial Sequence
  ENSG00000264215_6 (sequence is synthesized)
catttgatggagggtggaagtaatttgaatgtatttgatttatatatatatatatttttaaggttaaaagatggttgtagcatttaaaatggaaaattttctcctcggtttgctagtatc

SEQ ID NO: 832876 - DNA, 120 bp, Artificial Sequence
  ENSG00000264215_7 (sequence is synthesized)
ttgggtgtattctctctaagtgtagctcaaataggtcatcatgaaaggttaaaaaagtgaggtggccatgttacgctggtggttaaggccagggcctctcctaccactgtgccactgact

SEQ ID NO: 832877 - DNA, 120 bp, Artificial Sequence
  ENSG00000264215_8 (sequence is synthesized)
tgctatgtcaccctgggcaagtcacttaactataaggtgcctcagttttccttctgttaaaatggggatgataatactgacctacctcaaagggcagttttgaggcgtgactaatgcttt

SEQ ID NO: 832878 - DNA, 120 bp, Artificial Sequence
  ENSG00000264215_9 (sequence is synthesized)
ttagaaagcattttgggatccttcagcacagggattctcaagacctgagtattttttataatagcaatgtccaccatcaacttgatatgtccgtgtgtcccagatgctgtcattagtcta

SEQ ID NO: 832879 - DNA, 120 bp, Artificial Sequence
  ENSG00000264215_10 (sequence is synthesized)
tatggttctccaaaaaattgaatgaatccattggagaagcagtggattaactagccagacaaaatttgagaatgcataaaaaacacattgccacggaaacatacagaggatgccttttct

SEQ ID NO: 832880 - DNA, 120 bp, Artificial Sequence
  ENSG00000264215_11 (sequence is synthesized)
gtgattgggtgggattttttccctttttatgtgggacatagtagttacttgtgacaagaataattttggaataatttctattaacatcaactctgaagctaattgtactaatctgagatt

SEQ ID NO: 832881 - DNA, 120 bp, Artificial Sequence
  ENSG00000258342_0 (sequence is synthesized)
ctgctgtctatgggcaagcctgagcacagaggctgctctgctggtgggggtggggtcacttctctcagccccagactgtcagctctcaggattatccacctcggctcctggttgcagcaa

SEQ ID NO: 832882 - DNA, 120 bp, Artificial Sequence
  ENSG00000258342_1 (sequence is synthesized)
ctgctgtggcagtatgtggagcgagcacctctggctcccaacttctcctgactgagctggccactcgcttccttctcctctgtgcctcaggcgcttgctgagacttctctgttggactct

SEQ ID NO: 832883 - DNA, 120 bp, Artificial Sequence
  ENSG00000258342_2 (sequence is synthesized)
agtgctctctcctggatgttctattcgagctctgccgcactaagctctctacatggccgaggcaccagaccagaatgcgccctttcgacaggcagagagagccaaaggggaaaagagctg

SEQ ID NO: 832884 - DNA, 120 bp, Artificial Sequence
  ENSG00000258342_3 (sequence is synthesized)
agtcaaggctgccaagttcctgcttccagccctaccagccggtcactcgcgccttgcaatgaggaaaccaggagtcctatctagagcctttccatagttgtgggaaagaagatgggtaaa

SEQ ID NO: 832885 - DNA, 120 bp, Artificial Sequence
  ENSG00000258342_4 (sequence is synthesized)
gttattgttaatctacagaggaaggaatgatgccaagtttttcaaggcttccagagtcacaggaggagtcacttggtaaatccaggagcagaaaccaggtaccagttggaagaccacaat

SEQ ID NO: 832886 - DNA, 120 bp, Artificial Sequence
  ENSG00000258342_5 (sequence is synthesized)
cagttctaagcgtggactagaatataatttaaggtttctgtgacacggtgttaggactctttcctagaattatgagagctgaactaacagctcccagataactgaagcataataattaat

SEQ ID NO: 832887 - DNA, 120 bp, Artificial Sequence
  ENSG00000258342_6 (sequence is synthesized)
ctagaaaagcggcctcttcttttctgtggttgaacctaagtgtagtttttacttttaactaaaactaggtcaattaagaccattggaattctgtgactgaggatgtgtggtgtttattgg

SEQ ID NO: 832888 - DNA, 120 bp, Artificial Sequence
  ENSG00000258342_7 (sequence is synthesized)
ggatttaaaataagatttttgttcttttataaattttaatataaatagattgttttccctatagtatttagtgttaattaatggggctgacacaattaatggcatcaagaacatataatt

SEQ ID NO: 832889 - DNA, 120 bp, Artificial Sequence
  ENSG00000258342_8 (sequence is synthesized)
atgtttattatactaagaaattatgcaattacgtagttgtttaataggttaagtgatcttatagatatttttatcgtttttgcaacagctttatcctgatttctttgtgagaaagctttt

SEQ ID NO: 832890 - DNA, 120 bp, Artificial Sequence
  ENSG00000258342_9 (sequence is synthesized)
aatgtttcaaaaatgttgagacagacttttgttaaattaatcgcatgaaaaatagtatatctttttcagtaactggggattttcataaaagccatcaaagatataatattagaagatctg

SEQ ID NO: 832891 - DNA, 120 bp, Artificial Sequence
  ENSG00000258342_10 (sequence is synthesized)
ctgttaagatagctgttgtcataaaaaactgttgatgaattttgaattttgactattaactgtccatgctaatcagatattcagagaacaataaacagcatttgctaaattcatttttaa

SEQ ID NO: 832892 - DNA, 120 bp, Artificial Sequence
  ENSG00000258342_11 (sequence is synthesized)
ccagaggcagcaaagcagtcttcgtgcatgctacacatctgatttttctcttcccaatgctgtttttttcagttcgtgcttcattagtaaaaatatgtgtcctaatttaaaacacactca

SEQ ID NO: 832893 - DNA, 83 bp, Artificial Sequence
  ENSG00000258342_12 (sequence is synthesized)
tccagccctaccagccggtcactcgcgccttgcaatgaggaaaccaggagtcctatctagagtctcactttcctgcaacctcc

SEQ ID NO: 832894 - DNA, 120 bp, Artificial Sequence
  ENSG00000258342_13 (sequence is synthesized)
ataggcgtgagccaccatgcctggcccagtgttcactttgacagaatgtgaaaacatctcaaattgaagacattatgaaataagccagtcacaagacaacaaatattgtattagtcccct

SEQ ID NO: 832895 - DNA, 120 bp, Artificial Sequence
  ENSG00000258342_14 (sequence is synthesized)
ccagtcacaagacaacaaatattgtattagtccccttatatgagggacctagagtagtcaaattttataaagacagaaagtagaatggtggttgtctgggagggaatatggaattattgt

SEQ ID NO: 832896 - DNA, 120 bp, Artificial Sequence
  ENSG00000258342_15 (sequence is synthesized)
ttaatggatacagtgttttagtttgggaagatgaagttctggagatagaaggtggtaattgttgcacaacaatgtgaatgtatttaatgccattaaattgttcacttaaaaatggttaaa

SEQ ID NO: 832897 - DNA, 120 bp, Artificial Sequence
  ENSG00000258342_16 (sequence is synthesized)
aaaggaatcaactgagggctcagcttttcctctgcaagaaacctgctctctgggacagcccaagggagctcattcatcccttccaccacgtgaggatgtggtgagaatgtgctatctatg

SEQ ID NO: 832898 - DNA, 120 bp, Artificial Sequence
  ENSG00000258342_17 (sequence is synthesized)
aaccaggaagcagaccctcagcagacactgaatctaccagtcccttgaccttggacatcctaacctccagaactcatgcacaagcaattctaaacaaggctcagcgataacatatccctt

SEQ ID NO: 832899 - DNA, 120 bp, Artificial Sequence
  ENSG00000258342_18 (sequence is synthesized)
cccatgagtggatcactcccactgcctctttcacacaccctgcctcctgcaagccaatgctgtgaagcccaacctagccatgtggcaagggagatgtctgcccagtctccagctgctcca

SEQ ID NO: 832900 - DNA, 120 bp, Artificial Sequence
  ENSG00000258342_19 (sequence is synthesized)
aggcaccagtcacttgagggaagaagccatcttggatgtccagcctagtctggctttgagaagactctagctcctgctgccatcttactgcagtttcatgaaggatcaaatgtcatagcc

SEQ ID NO: 832901 - DNA, 120 bp, Artificial Sequence
  ENSG00000258342_20 (sequence is synthesized)
atccagccgagccttggcaaactacagactgtataaggagtttttttagggcactctgttacgcagcaattgataaacaaaaaagagaagaggcatgcaagaagaagagagcctcttctc

SEQ ID NO: 832902 - DNA, 120 bp, Artificial Sequence
  ENSG00000258342_21 (sequence is synthesized)
tcttaaaatagcaacaagtgtccttggctgtgtggggtctctagagatcagctaatcttgatgttgacagaggccaaaagtacttgatttcactaccggatggaaattatatctgtgtag

SEQ ID NO: 832903 - DNA, 120 bp, Artificial Sequence
  ENSG00000258342_22 (sequence is synthesized)
atgttgctaagcaacaagagatcagaaacctataaggagtgaccatataatgcaaagcattgagtcagccaactgagttcctcctgcacttattttttagaacctgcttataaaagaagc

SEQ ID NO: 832904 - DNA, 120 bp, Artificial Sequence
  ENSG00000258342_23 (sequence is synthesized)
aatgtccacaatgtgtggggggaggaaagtctcctgggaccttaagaggaaagcgtacacttcatcataatttgcctgcaatgatcagcaaacgaaaaagtcaatacacaacctgaaaaa

SEQ ID NO: 832905 - DNA, 120 bp, Artificial Sequence
  ENSG00000258343_0 (sequence is synthesized)
ggaaaccggctctgagcatcgctgtgaggcagccaaggactggaggttccatgatttgggggcgcctctgccgcaggccctttctacctgagtgttctctcttctgcaacacccgtttta

SEQ ID NO: 832906 - DNA, 120 bp, Artificial Sequence
  ENSG00000258343_1 (sequence is synthesized)
actaggggcggcgaaacgcactgaagagagttggatacagaatttcttgcaaacgaggtcgagttgcgtctgggatacggtgtcatgccccacccccgccccacgaccctgccggcccca

SEQ ID NO: 832907 - DNA, 120 bp, Artificial Sequence
  ENSG00000258343_2 (sequence is synthesized)
cctttcttttgcttcgcctgcagaaacccgcacggccttcatacgtgcatttgaaattacctaagggcgtaagcaatatttcctctgtcacggattaaaactttcgatgtaacggtgtta

SEQ ID NO: 832908 - DNA, 120 bp, Artificial Sequence
  ENSG00000258343_3 (sequence is synthesized)
aacggatgtgacttctccccaacttggctaatggggatttactttgtctttttacacccgtgagaatgttcggggtcccagagttccttcctcactcttccaacaggttccatgatttgg

SEQ ID NO: 832909 - DNA, 120 bp, Artificial Sequence
  ENSG00000258343_4 (sequence is synthesized)
gcgccttgcaggcggcgcgcggaccttgggaaaccggctctgagcatcgctgtgaggcagccaaggactggaggaaaagaggaagacagtaacttgacagtggagaaacctggaagccat

SEQ ID NO: 832910 - DNA, 120 bp, Artificial Sequence
  ENSG00000258343_5 (sequence is synthesized)
tgccttaaccgagtcatgaagaataacaacacccgtcctggaggcagaaaaaccatcttgtgcccatgagggagaacaccaaacaaatctggatgacttccttgagtagctgcatttata

SEQ ID NO: 832911 - DNA, 120 bp, Artificial Sequence
  ENSG00000258343_6 (sequence is synthesized)
atgctacatgaattgctgtccacaccttctgctactttcctctgttggccagaagaataattttaatgtcgcccaaatggattatgctgacctcaacccagatccccctgggagatataa

SEQ ID NO: 832912 - DNA, 120 bp, Artificial Sequence
  ENSG00000258343_7 (sequence is synthesized)
acttcttatatgttcctggctgggtcattgtaaataatatctacatgtatcccaaagctctgaattatcctcatctgtaacagacacaacgactaaatggtatctggaacgtagttaatt

SEQ ID NO: 832913 - DNA, 120 bp, Artificial Sequence
  ENSG00000258343_8 (sequence is synthesized)
ttctggaaaatattcaaaggaacaaaatgagcactgcaatacaaaattgctgtcgacttaacttttgccagtttccctggatgtgtaagtagaattatattttcacagaacttgcaaaaa

SEQ ID NO: 832914 - DNA, 120 bp, Artificial Sequence
  ENSG00000258343_9 (sequence is synthesized)
agcaataggtacagaaagttttagctaagagccatttagaaatgtgtgtcaatataatgctgtcaatggtagctatatctgtaataacaacacaactgttcttggtttttgtttttgttt

SEQ ID NO: 832915 - DNA, 120 bp, Artificial Sequence
  ENSG00000258346_0 (sequence is synthesized)
aatttcaaggagctcacattcaaatggagcagaaaggcactgaacccagaaacaaataattctctaggatggtggctggaagtgcatttgctaaagaacctcacttctaccgatctcatt

SEQ ID NO: 832916 - DNA, 120 bp, Artificial Sequence
  ENSG00000258346_1 (sequence is synthesized)
ttccacgcacttacaaacggaccagaggttgcaaaagtgagtctctcctcgcttctaccgatctcattttccacgcacttacaaacggaccagtggttgcaaaaataggaaaaccaaggc

SEQ ID NO: 832917 - DNA, 120 bp, Artificial Sequence
  ENSG00000258346_2 (sequence is synthesized)
acagcgagggaaaatttgcctaaaaatcacacagttggttggaagtgaagccaggattccagcccaggtctgtgtgattccagcacctggaccctggaccaccgagttcacagagaaggg

SEQ ID NO: 832918 - DNA, 120 bp, Artificial Sequence
  ENSG00000258346_3 (sequence is synthesized)
acatttctgcaggggagagctgtggtcaaagagaggaataaagcttagaaagaggaagttcgtgggttgcaaagtgagtaatggctgcatctgggagctgatcaaaggtggccagccaag

SEQ ID NO: 832919 - DNA, 120 bp, Artificial Sequence
  ENSG00000258346_4 (sequence is synthesized)
ttgagtagccagttcggtgtatgagacttaacaacactgtttccccggccatggaaggagtcttgagcagagtgtgagaatggccaggtggcggaagtgtctgagaagatcctgcatcga

SEQ ID NO: 832920 - DNA, 120 bp, Artificial Sequence
  ENSG00000258344_0 (sequence is synthesized)
atttggtgacctattcttcagatcagcagtctttttcccccaaaaccctgggtctataaacagctgtgaaatcagttcaatggaaattgactgctttcttaagacaatgaaatagtatac

SEQ ID NO: 832921 - DNA, 120 bp, Artificial Sequence
  ENSG00000258344_1 (sequence is synthesized)
tgcagacaaaagaatatcagagtactctgcacgtttagtgaaatgtttcaatgtgtgtacaggattagtgtaaaatatatttcttattgcggtcaaaaaagttttgagacgtggatccaa

SEQ ID NO: 832922 - DNA, 120 bp, Artificial Sequence
  ENSG00000258344_2 (sequence is synthesized)
tgccattattttaggaagccaaacaaggacaagatgcaatcaatcgtatgtgtaagtttaagcagcaaaaagtggtaaaaactttttttttctgagacaaggtctcactctgtcgcccag

SEQ ID NO: 832923 - DNA, 64 bp, Artificial Sequence
  ENSG00000258344_3 (sequence is synthesized)
actttttttttctgagacaaggtctcactctgtcgcccagactgggatcccgtctcagcctcct

SEQ ID NO: 832924 - DNA, 120 bp, Artificial Sequence
  ENSG00000258345_0 (sequence is synthesized)
tgtcaacggcagagagatctccctaaaatgaactaaccaaaccagaggccagagttacaagagaatctgtaagagggtcctcctcctctaaagagaggtagtcccagaataatagaagca

SEQ ID NO: 832925 - DNA, 120 bp, Artificial Sequence
  ENSG00000258345_1 (sequence is synthesized)
gcagcagataattagttatgatgctcctccccaccccactctcccagaattgatacctgaggtagctcaggtgaagtccggggctcctgtgggtctccacctccacatcactgctgggtt

SEQ ID NO: 832926 - DNA, 120 bp, Artificial Sequence
  ENSG00000258345_2 (sequence is synthesized)
ctgagcaggaaaaaaacagagacttgggtggaagaaggagtaagagtggaggactatggggtggttgtcacaagaaatctgacaaaacggcaaagcttcgagaacgtgaggatttcctca

SEQ ID NO: 832927 - DNA, 120 bp, Artificial Sequence
  ENSG00000233642_0 (sequence is synthesized)
aaagagtaaccagccacccgggcttgtaactcccgttctcgcactccagataaggcggagaccacttgaagtggctcttgtccccgccgagcccgtccttgcgccgccagctgtggccca

SEQ ID NO: 832928 - DNA, 120 bp, Artificial Sequence
  ENSG00000233642_1 (sequence is synthesized)
ggccccggggcccctgattggggccgcggcggtgtaagtggggcctccacttgcgccggaggccgtggaaccactcggtctccagagtggcgttggccaggtggggtgcggaggaggaca

SEQ ID NO: 832929 - DNA, 120 bp, Artificial Sequence
  ENSG00000233642_2 (sequence is synthesized)
ggtcttggagcaggatgcggctctcctcgcgcgtggcctggaggaagacctgtggggccggtgcggacagcgaatcggtgctgaaggtgatggccgcccgggagatgctgggctcgccct

SEQ ID NO: 832930 - DNA, 120 bp, Artificial Sequence
  ENSG00000233642_3 (sequence is synthesized)
ccagaaggctccacaccagcgcctggtaccaatccaggtcgtcctgcaagttctgctcccgcgacttattgctctgcagcatcacgttgaggaagttggtggcgtgtgtcagtgtgtcca

SEQ ID NO: 832931 - DNA, 120 bp, Artificial Sequence
  ENSG00000233642_4 (sequence is synthesized)
gcgcccggtgcaaggaggggtgcgcgctggccagggctggccacttccccggcaggcccgccaactcgtagcggccggagcagttggctcgcttcagctggtgggagtccccggtgtaga

SEQ ID NO: 832932 - DNA, 120 bp, Artificial Sequence
  ENSG00000233642_5 (sequence is synthesized)
gcactattcctaggcctccaaggtgtctcctcaaagactggctgacccactttccagatggagccaacatcatcctctgtctcatccataaatcatgaacagaaggcccaggaaatgaga

SEQ ID NO: 832933 - DNA, 120 bp, Artificial Sequence
  ENSG00000233642_6 (sequence is synthesized)
agcggagtccccactgggagagtagcagagcttccagcatgaggcccacaacgagatcacagaagcacagcagaattctccagaaagccagttgtgatcaatggcagcacagcctggtcc

SEQ ID NO: 832934 - DNA, 120 bp, Artificial Sequence
  ENSG00000233642_7 (sequence is synthesized)
cacaggaaatgttcctggattttaaaacacaaataaacagtaatgcagaaattagagaagatgtatcatttaccaaatttaatctggcacatttaataatacattatgataattatggca

SEQ ID NO: 832935 - DNA, 120 bp, Artificial Sequence
  ENSG00000233642_8 (sequence is synthesized)
cctgaaagctagatataaatactcattcatttgcaattcattggcaataatagttatttctgagattccctcagaccaatgatggtaaagagaaaagataaagttaatgagcttctcctc

SEQ ID NO: 832936 - DNA, 120 bp, Artificial Sequence
  ENSG00000233642_9 (sequence is synthesized)
tgagagaaggaggtcacaggccactcttccggtcgtcattccctataaaggattaaaggtatgagctcagggaaggatgacttcccccagtactttcttgaagttcttttggaagaagaa

SEQ ID NO: 832937 - DNA, 120 bp, Artificial Sequence
  ENSG00000233642_10 (sequence is synthesized)
gttcatttagaagtcaaaggcatgaggtcagaccttggtctcataatagattagcagcaagagaaattattactgtgggttttgtttttgtatttatttatttatttagacatcaagaaa

SEQ ID NO: 832938 - DNA, 120 bp, Artificial Sequence
  ENSG00000233642_11 (sequence is synthesized)
ctgtgaaactgagcagcccttcagtaggagctggtaggaaaggcagcttgatatgtaagcaatctagaaaaacagctgtactttcagtaattaataaaatttagtccaagtatttgccta

SEQ ID NO: 832939 - DNA, 120 bp, Artificial Sequence
  ENSG00000233642_12 (sequence is synthesized)
agacttttgctttttagtactcatactttttactactcattccaagtaaattaagaattgaagtcggaagggccagatcacagaatgtctcttaaatataggcaaatgattctagatttt

SEQ ID NO: 832940 - DNA, 120 bp, Artificial Sequence
  ENSG00000233642_13 (sequence is synthesized)
atacagtaattccttgatcactaataagtttgtctctaatattgacccaaaggtgaggaaaagagtagttctcagacaaaaaaatgcccaggaataggtgtcaacatagccgaatgactt

SEQ ID NO: 832941 - DNA, 120 bp, Artificial Sequence
  ENSG00000233642_14 (sequence is synthesized)
gtgaattagtgaattcctacaagccaggacagagcttttgaaaattataataaagttattttcctctccagttttttggcattgtattacaatgtctaggaaggaagctaggtttcccca

SEQ ID NO: 832942 - DNA, 120 bp, Artificial Sequence
  ENSG00000233642_15 (sequence is synthesized)
ccctcacatatactcccttctatgaagaaggcagatataggacaaggaccaggacagtactggaccatagcactaaggggtaggcttttaggcattaagagtgcggaagataaaatttaa

SEQ ID NO: 832943 - DNA, 120 bp, Artificial Sequence
  ENSG00000233642_16 (sequence is synthesized)
aaatcaatccatcttaatcaataaaacatcttacctctgcatagtatacctacctgaattccttttttggaatctttttccttatttaaacttgtcatttgagcagctgaagtaaaaata

SEQ ID NO: 832944 - DNA, 120 bp, Artificial Sequence
  ENSG00000233642_17 (sequence is synthesized)
tgggccaggaccctcttcttagtgagaaaatcacttcctaccttcaccccaacaacatcgtcactaaaacaaatcaataaaaacagcctccaatcaaaggtcaaaggaaaccagagggag

SEQ ID NO: 832945 - DNA, 120 bp, Artificial Sequence
  ENSG00000233642_18 (sequence is synthesized)
ctaagggaaaatgcaccattaagtgggcagttcagcctggtcattctagctcttccttctaagagctttagttttaattcataaattatctcttcctggtttggtttggcttttgtgttt

SEQ ID NO: 832946 - DNA, 120 bp, Artificial Sequence
  ENSG00000233642_19 (sequence is synthesized)
tttttcttgccataaaagtgataaggcatgaaattccaagtttagggtgtgagcctgggggaaaaattgccaagaaaactatttggttgccttcaggctaggcttctaagtcttaggggc

SEQ ID NO: 832947 - DNA, 120 bp, Artificial Sequence
  ENSG00000233643_0 (sequence is synthesized)
ttcgtgttaggtggcattgtaaccattacaatgcagtatttgaggccatgccctcaggaacttatagtaagggtgagaagatgtatgtaaaactctatctatccaatggagcaagattat

SEQ ID NO: 832948 - DNA, 120 bp, Artificial Sequence
  ENSG00000233643_1 (sequence is synthesized)
aggttaccccacctgaacatcctcctgggaggaagcagggcatgaatccgaaggaattagtgaagtccttccatagccatccttgatggtggagcgggggtgtgtctcagcaaaaagggc

SEQ ID NO: 832949 - DNA, 120 bp, Artificial Sequence
  ENSG00000233643_2 (sequence is synthesized)
gtaaaggcagtatgattcaatgaatcaattaaatcaggatggagaagggaagcaaaaagtccaagccagataagtggaactacccatgaaactggagggtgtggtgaacaaaagcaaaat

SEQ ID NO: 832950 - DNA, 120 bp, Artificial Sequence
  ENSG00000233643_3 (sequence is synthesized)
gattagtcacaaggtcaggagcaagtggccccaggatgaagaaaggtagctagatggaggatggttctcctcattccgcagatgatgaacttgaaaccagtgacagtgagtgagtttcag

SEQ ID NO: 832951 - DNA, 120 bp, Artificial Sequence
  ENSG00000233644_0 (sequence is synthesized)
ggttcctattgtgtgcgtgctagtgacccaatcacacgcatggaagcgcacgcatggatgccagccataccacctcttcaggcagtctgtttccattaggtcacaagcatgaaggtgaaa

SEQ ID NO: 832952 - DNA, 120 bp, Artificial Sequence
  ENSG00000233644_1 (sequence is synthesized)
gaaaaaagacaattattccacgtgaacaggtgaaagaacaatcttcgaccaccagactcaacttgagttgtcttatgaatctgtactgctctcagttttcttgtacccagattcttcaag

SEQ ID NO: 832953 - DNA, 120 bp, Artificial Sequence
  ENSG00000233644_2 (sequence is synthesized)
ggcacatggaatggtggctgccgatggaagtggcgagacctcaacggtgcccaccccagctgcacttgcttcctggggatctgcatcgctgcagcctaaccttgaggggtggcagggcaa

SEQ ID NO: 832954 - DNA, 120 bp, Artificial Sequence
  ENSG00000233644_3 (sequence is synthesized)
gactcaatggtgaaatgtattctgggttatctgatgaagttttatctttaaatattttgttatccatttttggcattgctatgaatttgggactgttgccaccaactctgagggatttta

SEQ ID NO: 832955 - DNA, 120 bp, Artificial Sequence
  ENSG00000233644_4 (sequence is synthesized)
aactgcttttagagtttgtgagaaccaagcctcaggggatgcatgagtcagttgaagcactgtagtcttgttggtctctctttgacatttcatgtctctggcatatctgaatttaggttg

SEQ ID NO: 832956 - DNA, 120 bp, Artificial Sequence
  ENSG00000233644_5 (sequence is synthesized)
ggaactggaggtttggtacacttgtatctattactacccttcataatctggccagttccatactcatggaaaacaatttgtttgttcccagatggctgcagcatttcatttagagttggg

SEQ ID NO: 832957 - DNA, 120 bp, Artificial Sequence
  ENSG00000233645_0 (sequence is synthesized)
caggtcctcctgatgccacgtccacccatctacctgaaaacaaaacaggcacagagcacctcctgcttgcttgtgtggtcgcagggccccggcgagtcacccaatgctgcagaatctcag

SEQ ID NO: 832958 - DNA, 120 bp, Artificial Sequence
  ENSG00000233645_1 (sequence is synthesized)
aaggcaactggtgtccgagtcatactctgaggataaacctatttcctaagcaaaagcctctccatcatggaaaagcatccaccagccacggtcctccccaggctacctgtggggcccagg

SEQ ID NO: 832959 - DNA, 120 bp, Artificial Sequence
  ENSG00000233645_2 (sequence is synthesized)
gccacggtcctccccaggctacctgtggggcccaggaaggcctgcatgaagtcgggagcggagcttgttgggcgcctggtatttatcaactcctgtgctccagcctgggcgacagagtga

SEQ ID NO: 832960 - DNA, 120 bp, Artificial Sequence
  ENSG00000275427_0 (sequence is synthesized)
gaaaataccgagtccggtcccaggtatggagcagagctcgggaactcacataaaatactgagtccagtcccgggtatggagcagagctcgagaattcacagaaacttccgagtccagtcc

SEQ ID NO: 832961 - DNA, 120 bp, Artificial Sequence
  ENSG00000275427_1 (sequence is synthesized)
caggtatgaagcagagctccggaactcacagaaaattccgagtccggtcccaggtgtggagcagagctcgggaactcacagaaaatgctgagtccggtcccaggtatggagcagagctcg

SEQ ID NO: 832962 - DNA, 120 bp, Artificial Sequence
  ENSG00000275427_2 (sequence is synthesized)
ggaactcacagaaaattccgagtccggtcccaggtgtggagcagagctcgggaactcacagaaaattccgagtccggtcccaggtgtggagcagagctcgggaactcacagaaaatgctg

SEQ ID NO: 832963 - DNA, 120 bp, Artificial Sequence
  ENSG00000275427_3 (sequence is synthesized)
agtccggtcccaggtatggagcagagctcgggaactcacagaaaattccgagtccggtcccaggtatggagcagagctcgggaactcacagaaaatgccgagtcccgtcccaggtatgga

SEQ ID NO: 832964 - DNA, 120 bp, Artificial Sequence
  ENSG00000275427_4 (sequence is synthesized)
gcaaggctcaggaacttatagagcttctgcttccctttcccttcccagctacaggcacccttttcccccagcacacacaggttggaaaagagtttaagaacagaatgcctagttgttagt

SEQ ID NO: 832965 - DNA, 120 bp, Artificial Sequence
  ENSG00000275427_5 (sequence is synthesized)
aattcatcacgacacctgacttaattaccaaagattattttaatggccgtgcatactactctcctagaacttctgtccttcctcccccctccctgggaccttggcagaacccttgcggca

SEQ ID NO: 832966 - DNA, 120 bp, Artificial Sequence
  ENSG00000275427_6 (sequence is synthesized)
aatgtcgtgttgtgttgagggggcctcccgcgctgcctctgctgtggtcacagcccttcctggaggcatgaggaaatggagccggccgtggctctgctgccgtgggaaggggaggggtgc

SEQ ID NO: 832967 - DNA, 120 bp, Artificial Sequence
  ENSG00000275427_7 (sequence is synthesized)
tgtggcgagaacaagcccagagcctccttcaaacatcagaggcctcctgacatcctctgcaggactcatcccaacctggaatcatctccaacttgtttatttgtaaaacgtgaagcttat

SEQ ID NO: 832968 - DNA, 120 bp, Artificial Sequence
  ENSG00000275427_8 (sequence is synthesized)
gttgggcccttccttatcctctaccctctcccagagtccatcaggcagggacgcccatgcacaggcaggatcgggaccatcaagattgtgacagcaagaaaaagagtgaaagtgttcgtg

SEQ ID NO: 832969 - DNA, 120 bp, Artificial Sequence
  ENSG00000275427_9 (sequence is synthesized)
tcacacacttgatgtccagcatgaacctcagacctatcttgagctgatcatcttcaaaaaaaacttcattaagaaaaaaaaaaagtggaggttggagagtgttctaaatctcaaagccca

SEQ ID NO: 832970 - DNA, 120 bp, Artificial Sequence
  ENSG00000275427_10 (sequence is synthesized)
tcagttgctgttgagagcagaacttgcagcagagatgagcttttccatgcctcctaggccccggagctcgagcatgatgcccaggcagaggcctctcatggaggagacagcagcttccat

SEQ ID NO: 832971 - DNA, 120 bp, Artificial Sequence
  ENSG00000275427_11 (sequence is synthesized)
ggaagggtgggacgtggtgctgtcaggacagggtcctgcaggagggctcaggtccagctcccacgtcaggtatcgatgggagaaggacctcaaactcagaggatccacagcactggcgga

SEQ ID NO: 832972 - DNA, 120 bp, Artificial Sequence
  ENSG00000275427_12 (sequence is synthesized)
aatggcatggcctcttccatggccagagggcggggggcagacagttctgttactcagctgcagaggccgcacagccaggagctggaagccacgtggggccagacagggacgcgttccgca

SEQ ID NO: 832973 - DNA, 120 bp, Artificial Sequence
  ENSG00000275427_13 (sequence is synthesized)
tgtgagggtggtgagccccaccagatgagcacagagtggacaccgagccacagggaggacgctgagctcggttcatgcagcaggctgtagggtttatctacgcggcctcactggctggaa

SEQ ID NO: 832974 - DNA, 120 bp, Artificial Sequence
  ENSG00000275427_14 (sequence is synthesized)
atacttgcttagataataagacaaggatgaaatcatacatggaaaatgaacagaactgcaacatgccacacacaccgtggttttaggggccgctctcgctgttcctgtgctgtgtccctg

SEQ ID NO: 832975 - DNA, 120 bp, Artificial Sequence
  ENSG00000275427_15 (sequence is synthesized)
gatgtgaggcccgtcctgttcatggtgcagtctcagaaaacacgagggatgccaccatccccgtctcctaggccgacgtccaggaagctgcagcttagatgtcaaggaggtgaacctcaa

SEQ ID NO: 832976 - DNA, 120 bp, Artificial Sequence
  ENSG00000275427_16 (sequence is synthesized)
agctggactctgggttctcaccaaaaactggccccctcgcctccaactccgatttgtgctgggtgctgaccccacacacgacagggtgtgcttcgcgccgggactgaacagggacaggag

SEQ ID NO: 832977 - DNA, 120 bp, Artificial Sequence
  ENSG00000275427_17 (sequence is synthesized)
ggacggtcagtacttgacaagtacgaagcatggctctacgcccccaggtgcttcacagaggcaagatggcattcacctcctgttatgcatctggggagggcagagccgtgtttcagccgt

SEQ ID NO: 832978 - DNA, 120 bp, Artificial Sequence
  ENSG00000275427_18 (sequence is synthesized)
gcaaacgccagtgtagggagggaaaacgcatctggtaaaatccagtccagggcccctttcctacccttcccctcagtcccctggagggtccaagtacccactccaggggccagcccacgt

SEQ ID NO: 832979 - DNA, 120 bp, Artificial Sequence
  ENSG00000275427_19 (sequence is synthesized)
gtatgtgtatgtatatatatatgtgagtgcatctacacattgtacacatatgcacactttgcacacagacacacacgtataacggtgctattggctttgaacattgctaggggctgaatt

SEQ ID NO: 832980 - DNA, 120 bp, Artificial Sequence
  ENSG00000275427_20 (sequence is synthesized)
ttgtttccctgacaaatcgatatgctgaacccaatgcccagtgtggctgtgtttgaagtgaggatgtaatgaaggtaaactgaggtaatgagagggggacactgatctgaatggatcagg

SEQ ID NO: 832981 - DNA, 120 bp, Artificial Sequence
  ENSG00000275427_21 (sequence is synthesized)
gtctttcaggaagagacaccagcctgtctccctgaggacacagtgagcaggtggccaggaagaggccctccccaggagccaggtctgcccacgccttgatcagcctccagaacggtgact

SEQ ID NO: 832982 - DNA, 120 bp, Artificial Sequence
  ENSG00000275427_22 (sequence is synthesized)
ggggataactcactacctggaggtccatgtcattctcatcgctgtgattgcattcttgccgcattgctgtaaaaacgtttcctctccccaacttcacgaaaaccacgcagcaaagaggga

SEQ ID NO: 832983 - DNA, 120 bp, Artificial Sequence
  ENSG00000275427_23 (sequence is synthesized)
gaagaggaacagcgcttgccgggaacctgctctgtgctgggaacctgctctgtgccaggcacaatctgagggtctcagcccacctgcgccacgaaagggagtcagaaacccgggggccgc

SEQ ID NO: 832984 - DNA, 120 bp, Artificial Sequence
  ENSG00000275427_24 (sequence is synthesized)
atttcatccaccccaactccaccctgcaaagcacccttctgaaaatcaacactcgggaaaggtttacaggcatcaggcgaacagcaggtaaagccaaaataaaaggattgttggcagaca

SEQ ID NO: 832985 - DNA, 120 bp, Artificial Sequence
  ENSG00000231789_0 (sequence is synthesized)
gtcccccgcctgagggaggggagcggtgcagcagacatccgagggcagctgggaccccctgactcagccgacgggtgagtcaggctccctgcaggccacaccggacccccccagggcggg

SEQ ID NO: 832986 - DNA, 120 bp, Artificial Sequence
  ENSG00000231789_1 (sequence is synthesized)
gatttccccaagatgagaaatcagccaccggaagtcacgccggaccttggacgggcagacagaggctgggaggagttctgggtgcagagccccccaacctgtgctctcatctcttgctct

SEQ ID NO: 832987 - DNA, 120 bp, Artificial Sequence
  ENSG00000231789_2 (sequence is synthesized)
ggggtaagccagtggccatgctataaggacactcaagccaccctatgaagaagcccacatgaagaggaactgagatatctggccaacagccagccagtcactgagcctgccaaccacgct

SEQ ID NO: 832988 - DNA, 120 bp, Artificial Sequence
  ENSG00000231789_3 (sequence is synthesized)
ctgtattcctgattgacagaaactacgggatcataaatgcttgctgttcagtctgccaagtgttggcgtgatttgttaaacagcaaccagtaactaatacgccacccatggctgccgcgt

SEQ ID NO: 832989 - DNA, 120 bp, Artificial Sequence
  ENSG00000231789_4 (sequence is synthesized)
tcctgctgtggggccagcactattccatgcttagaggctccatcaatacctgtgatggactaaatggcacggtggctcacacctataatctcaccactttgggaggccgaagtgggaaga

SEQ ID NO: 832990 - DNA, 120 bp, Artificial Sequence
  ENSG00000231789_5 (sequence is synthesized)
ccagcctgggcaacacagcaagacccctgtctctaccgaaaatgaaaaaaattagctgggcatggcagtgtgcacttgggagctactcaggaggctgaagcgggaggatcacttgagctc

SEQ ID NO: 832991 - DNA, 82 bp, Artificial Sequence
  ENSG00000231789_6 (sequence is synthesized)
ggctgaattgagctatgatggcaccactgcagtccagcctaggagacagagctagaccctgtctctaaaaataaataaataa

SEQ ID NO: 832992 - DNA, 120 bp, Artificial Sequence
  ENSG00000249334_0 (sequence is synthesized)
acttcatagttaccagaacacaataaaaggaactgctgggcaacactcaagcatggaagaaagaatgagaaaggaaccagaatcacttccctctctttaaggtgaatggttccagacact

SEQ ID NO: 832993 - DNA, 120 bp, Artificial Sequence
  ENSG00000249334_1 (sequence is synthesized)
catgattgcaaaataaatattaaaatcccttcataaaagtcagttgtgcacctggactcagggttaccatggagattcaaggcagcaatctcactgacactggatccgtgccttctctca

SEQ ID NO: 832994 - DNA, 120 bp, Artificial Sequence
  ENSG00000249334_2 (sequence is synthesized)
gttcatttaacatccggagttcagagacatgaatacttgagcaggccggggcttcgtgagaactaaagcaatgttagaagagcccgcatgactgccttaatgaggaagactctgctggaa

SEQ ID NO: 832995 - DNA, 120 bp, Artificial Sequence
  ENSG00000249334_3 (sequence is synthesized)
ctggggtcagggtctccaggaaattccagtccatcatctcccttggtgagcaaaagaagccactggtggtccttgcaagtagaagtgcaatgaaaacaggattatggcgatggatgacag

SEQ ID NO: 832996 - DNA, 120 bp, Artificial Sequence
  ENSG00000249334_4 (sequence is synthesized)
tgtgagagagaaaagaattatcaccttcttcccctttcccaaataattcattctctaagttcagcagtccaacaagaatggcttctcatgccagagtagactcttcttgtatttaggacg

SEQ ID NO: 832997 - DNA, 120 bp, Artificial Sequence
  ENSG00000196979_0 (sequence is synthesized)
acacagctgaaggacctggaaaaccacaggaagttgaatttggtcgacggagcatatgaggagtggtggcgggcatctcaagaggggaagactctcccactgtgttataagctgctaaag

SEQ ID NO: 832998 - DNA, 120 bp, Artificial Sequence
  ENSG00000196979_1 (sequence is synthesized)
tcaaggaagacaatagtcaagcccccagaggttgcgagtcactctagccagaccgtggcagggtggaaaccagcccacagtgcgccggggcgtctggaagatgaagcagcggaactcaga

SEQ ID NO: 832999 - DNA, 120 bp, Artificial Sequence
  ENSG00000196979_2 (sequence is synthesized)
gagctctgaagggggacgggggcctgcagctgttttttttgttagctgctttttgttcatgggaaaacttgaacaagcttgattgcttcatggaaggagccaggtgacatggaaagggga

SEQ ID NO: 833000 - DNA, 120 bp, Artificial Sequence
  ENSG00000196979_3 (sequence is synthesized)
aagatgcagagtaaggggaccgagggacagcgagatggctgcaaaggtggagggaagaagtgagtgggaacggaggagacgtggtgctgccgctcagctgtgccccatggctttgccccg

SEQ ID NO: 833001 - DNA, 120 bp, Artificial Sequence
  ENSG00000196979_4 (sequence is synthesized)
tggcttgctcccctcctcagtactgttctctcccgtgtggcacagccaggcttactcatcatttcatctgcagccctgcccataccagcgtgtgctgaacgatgttgaaccttaggcgac

SEQ ID NO: 833002 - DNA, 120 bp, Artificial Sequence
  ENSG00000196979_5 (sequence is synthesized)
ggaggccgactggaaccagggctctgagtgacagagacgcagttatgtctaaggacatacgctagaatggctgatgcagggcgcaagctcgattcctgcagatgtgtgttaatgagcagc

SEQ ID NO: 833003 - DNA, 120 bp, Artificial Sequence
  ENSG00000196979_6 (sequence is synthesized)
tccctcatttttgcaaaggtcagcattcctttggcaaactgggaaggagcagtttaaggtgcagctcccaagtgggtcacaccgaccccccaacatccagttcccaactgctgagcgtgc

SEQ ID NO: 833004 - DNA, 120 bp, Artificial Sequence
  ENSG00000196979_7 (sequence is synthesized)
ttctcttcgtgggagtgggcgggccagtgccgaggggctcaggacggattctcagaaacgccccaccatgcaggtggcttacgggagggcaaagccaatgccagcctccaggaagtctgc

SEQ ID NO: 833005 - DNA, 120 bp, Artificial Sequence
  ENSG00000196979_8 (sequence is synthesized)
gctttctttccttaggctgccaatcagagtggaccagctggagatgaccaatcacatgacaagactcctgcacaaagggaagaaatgagatgctgcagctgaggagggcggccaacctgg

SEQ ID NO: 833006 - DNA, 120 bp, Artificial Sequence
  ENSG00000196979_9 (sequence is synthesized)
gaggcatctggctcccctgacaatgcctgccgatcgccaagctggcttccagacctcctgggacagaactgttcctcccaggacgctggtgtaggttcaagtccagttgatatttactaa

SEQ ID NO: 833007 - DNA, 120 bp, Artificial Sequence
  ENSG00000196979_10 (sequence is synthesized)
gcaactgcaatgcccaggcctgttccagtgctgcagagagtaagtgcttatgggtgcttatattcagagtaagtcaatacaccagcttcgtatgacctgcgtcttcggggccagcagggc

SEQ ID NO: 833008 - DNA, 120 bp, Artificial Sequence
  ENSG00000196979_11 (sequence is synthesized)
aggttggtctcctcagcctcacactggagctcctggctggctggtgtctgcggtcaggaccctagtgatgggaggctcagcaaacagaggaggcagaggggctgttctgaaatgaccttg

SEQ ID NO: 833009 - DNA, 120 bp, Artificial Sequence
  ENSG00000196979_12 (sequence is synthesized)
aaacgacctatcaccctcaggggtggtcttactggatgaagtccagcccgccataggcactgaagggctctcatttgctgagcccttgctttgcgccaggcggctcttcctctgccgaca

SEQ ID NO: 833010 - DNA, 120 bp, Artificial Sequence
  ENSG00000196979_13 (sequence is synthesized)
gaggctcagctactgaagccggggtcagacttgtgggcgtgggcttttctaatgccaaacccacgggcgccaaggcttctcaagctcatcctgtcagcccctgaatttctaactggcaaa

SEQ ID NO: 833011 - DNA, 120 bp, Artificial Sequence
  ENSG00000196979_14 (sequence is synthesized)
gctccacgctagcggtgggggaagaaggagccagagagacctgaactgcaaggggaccccatgtgggatggttcaggggagcagcaggacagccaggcccctgccagcacctgcctgcgg

SEQ ID NO: 833012 - DNA, 120 bp, Artificial Sequence
  ENSG00000196979_15 (sequence is synthesized)
tctctcacctggtcccgactgcaatgcctcctggcaggacagagccgccgacttctgtcccgtaagagctgtgtgcaaggtgggcccttgtccgtgttgccagctgaagactgacccaag

SEQ ID NO: 833013 - DNA, 120 bp, Artificial Sequence
  ENSG00000196979_16 (sequence is synthesized)
actcgggaagagaactgggttggatctgttctcagtgtggtccagatctgccatgttggcaccagctgggagtgtgttagcaatgccgactctcaggccccccaggaactctgtcgggga

SEQ ID NO: 833014 - DNA, 120 bp, Artificial Sequence
  ENSG00000196979_17 (sequence is synthesized)
ttcgggtgcttgctgtttgaggaccactggattagatatcagcaaggtccttcctgagtcttttctcagctgtccccttctcgagttgccttggcatctctcatcctgggttctgaatcc

SEQ ID NO: 833015 - DNA, 120 bp, Artificial Sequence
  ENSG00000196979_18 (sequence is synthesized)
tggactccctactctcaggacaccccatgcctcctactcatgctttgcggcacaggcaaggtctccagaaagagctgcgggtggggcatggccactaactgggaaaccttggccacggac

SEQ ID NO: 833016 - DNA, 120 bp, Artificial Sequence
  ENSG00000196979_19 (sequence is synthesized)
tggccactaactgggaaaccttggccacggacagggattctctctccttctcattctgaaatcctatgatctggtgaactgaggttcatgctcacttttttttttttttttttaagacag

SEQ ID NO: 833017 - DNA, 72 bp, Artificial Sequence
  ENSG00000196979_20 (sequence is synthesized)
aacgcaccaccacatccggctaatttttgtagcttttagtacagacagggttttgccatattgctcaggctg

SEQ ID NO: 833018 - DNA, 71 bp, Artificial Sequence
  ENSG00000196979_21 (sequence is synthesized)
actacaggaacgcaccaccacatccggctaatttttgtagcttttagtacagacagggttttgccatattg

SEQ ID NO: 833019 - DNA, 120 bp, Artificial Sequence
  ENSG00000196979_22 (sequence is synthesized)
tggcccatgctcacatttttataagcacaacggcagtaaccaacagagccatttttctgaggccttcctgtgcccagcactgggccaagcccttgacttaatccttattatcccaacaag

SEQ ID NO: 833020 - DNA, 120 bp, Artificial Sequence
  ENSG00000196979_23 (sequence is synthesized)
gttggagtcagcaggcctgggttcttgtctcagctctgacacttactagctgggggaaaaaggggaaggatgtgggtgggcagtggcagaaccttctttaggccccagtttttgcgtttt

SEQ ID NO: 833021 - DNA, 120 bp, Artificial Sequence
  ENSG00000196979_24 (sequence is synthesized)
gaaggcagggctttggagggatgaatcacaaatcagtatgctgtgtgaaagcagccagacacgaaagagggcacccggcgcagtttcattcacatgaagttctagatgaggcaaatgaga

SEQ ID NO: 833022 - DNA, 120 bp, Artificial Sequence
  ENSG00000196979_25 (sequence is synthesized)
ctacgctggaatcagagccggggctgtggtagtttcagaaagggggcagtttggaccgggaaggggcaaaagggggctgcgtggggtgacgggcacgtttcatcttgattgtggtggagg

SEQ ID NO: 833023 - DNA, 120 bp, Artificial Sequence
  ENSG00000196979_26 (sequence is synthesized)
ccacaggactgtacatccatttgtcaaaacgcaacaaacggtacatttaaaaaggatggattctactgtaggtaaaatatgcctcagtttaaaacattcttagtaaaatatgggctttgg

SEQ ID NO: 833024 - DNA, 120 bp, Artificial Sequence
  ENSG00000213062_0 (sequence is synthesized)
cacacgacgtgaactggggcggtggcagcacgccaggcctctgacgtcccagggctcaagcgcggaggacatgtggaactccactccaaaagcggcggcttgcggcggagctctctctag

SEQ ID NO: 833025 - DNA, 120 bp, Artificial Sequence
  ENSG00000213062_1 (sequence is synthesized)
tgaggcggccagctggcgttcgtggcacacttgctgtcggctccgctcatctgttgggaatgcgtcctgtgggcctagtcctccgctggaagaaacgcgctgttctccccaaccaccgtt

SEQ ID NO: 833026 - DNA, 120 bp, Artificial Sequence
  ENSG00000213062_2 (sequence is synthesized)
tatcattcttattcaccgtctccggaatgtccattcagtttccgctcctgagagacttagtgactgaggccaggcaaagatttcaccttggggagggggaacgttaaacctttcctccag

SEQ ID NO: 833027 - DNA, 120 bp, Artificial Sequence
  ENSG00000213062_3 (sequence is synthesized)
cagctttcgtgttttaaattgtattcatccgccatggaaagacatcagaagcccaggatctaagagacagactgaaatgaagaaagtagataatattgtgagaataatgaacaagctggt

SEQ ID NO: 833028 - DNA, 120 bp, Artificial Sequence
  ENSG00000213062_4 (sequence is synthesized)
cactgaacagcagaaccgtaatggagtcccagttaaagggttttaactttatttcgtcactttttgcaagcatgatacaaagaaaacaaacacctaactacgctacggtttatagttaaa

SEQ ID NO: 833029 - DNA, 120 bp, Artificial Sequence
  ENSG00000213062_5 (sequence is synthesized)
aggaaggtggaagatcctgagtcattacagcaatcacaaaacatgatggatttcttcatttaaaaacacaaaagaggtcttggcatagttttcaagggcaaagcatgacaagactctcca

SEQ ID NO: 833030 - DNA, 120 bp, Artificial Sequence
  ENSG00000213062_6 (sequence is synthesized)
gtgctttctttcatccccctctgtgtgcctttttctgcctgactcacagcctggctcaatcctaatctttctactgcaaagatgcagcatttaaagcaatttttcctgtgcagtatttgt

SEQ ID NO: 833031 - DNA, 120 bp, Artificial Sequence
  ENSG00000213062_7 (sequence is synthesized)
agaatgacagatcctgccagaagctcttggaaacattttggaactatcttgcttttctgtatgttatgatccatctagcaccgttttcctcctgtggtagcaaatgacacttttttcaag

SEQ ID NO: 833032 - DNA, 120 bp, Artificial Sequence
  ENSG00000213062_8 (sequence is synthesized)
catcagcagcagaaatgagtctaccagatggaataagatactggtaaagggaaagatttgtttctaagactgcacaaatgaatgcacccaaatctgtgagttgattaatctgtgaagaaa

SEQ ID NO: 833033 - DNA, 120 bp, Artificial Sequence
  ENSG00000213062_9 (sequence is synthesized)
tacaactggcagtatttacatatctcaatgagtctcaaagtgtggtcgaggaagccctgggggtccttgggaccctttcagaggttccacgagctcaaatctattttcataaccatgcta

SEQ ID NO: 833034 - DNA, 120 bp, Artificial Sequence
  ENSG00000213062_10 (sequence is synthesized)
agtctttatttccttttccactccagaggctatataatgtctgatgacatcatcgctttataggatgagagaatacgtgcttgtatattcttgtgtttgtaagactttccaggtttaatt

SEQ ID NO: 833035 - DNA, 120 bp, Artificial Sequence
  ENSG00000213062_11 (sequence is synthesized)
tattaccatatggcaattttcaataagtataacccacaaaacccaacagatttttggggcacctctaacaagggtcctaagaccaaaatgtttgaggactgctaatcgatattattcaat

SEQ ID NO: 833036 - DNA, 120 bp, Artificial Sequence
  ENSG00000213062_12 (sequence is synthesized)
tgtctagtcccctaaactccaacccttcttatcaggactacagagagaaaacaggtggtcttcttgacaatcgctttgtatttacattcagtgctttagtagaagagaagaaagaaagag

SEQ ID NO: 833037 - DNA, 120 bp, Artificial Sequence
  ENSG00000213062_13 (sequence is synthesized)
gctttagtagaagagaagaaagaaagagaaagcaagccagagaggcctcggaaagagaagcctacttattaaaaatagctttctggctggtcacggtggctcactcctgtaatcccagca

SEQ ID NO: 833038 - DNA, 85 bp, Artificial Sequence
  ENSG00000213062_14 (sequence is synthesized)
cgggcggatcacttgaggtcaggagtctcagaccagccaggccaacatggcgaaaacaagtggcatgcacgcctgtagtcccagc

SEQ ID NO: 833039 - DNA, 120 bp, Artificial Sequence
  ENSG00000213062_15 (sequence is synthesized)
caggaggcggaggttgcagtgagcggagagcgagactcgcgagtactcgtctcaaaaaacaaaacaacaataacaaaaacagctttccatcccttccctgaggcttgggtacctgaacca

SEQ ID NO: 833040 - DNA, 120 bp, Artificial Sequence
  ENSG00000213062_16 (sequence is synthesized)
cctgaggcttgggtacctgaaccacgttaatctgtaaatcactgcttctgtaacttttccttggtataaatcacataggcaatgaggttgggtataaacagtaattgtccttgaattggg

SEQ ID NO: 833041 - DNA, 120 bp, Artificial Sequence
  ENSG00000213062_17 (sequence is synthesized)
tagatgttttcttattatttttgtctaagaggtcattgcgataggcagaattctaagaatgatccccagtgacgcttgcccttgtataacccccacccatttgagtgtgaggtgaaacct

SEQ ID NO: 833042 - DNA, 120 bp, Artificial Sequence
  ENSG00000213062_18 (sequence is synthesized)
atgaatttgatgaggcaatactcctgttattatgttacgttttatgacagatgtgagattttccaggtgggcccaatctaatcacaacagccctttaaaagcagagattttccgtctgct

SEQ ID NO: 833043 - DNA, 120 bp, Artificial Sequence
  ENSG00000213062_19 (sequence is synthesized)
aagagcagaagaggaagtcagagagatttgaaggatgagaagaatttgacgtgctgctgttggagggggctacataccaagaaatgtgggcatcctatagcaactgaaactggctcctgg

SEQ ID NO: 833044 - DNA, 120 bp, Artificial Sequence
  ENSG00000213062_20 (sequence is synthesized)
ctgacagccagcagagaatcaggatatcagtcccagaatcataaggaactgaattctgctaaaaacctaaatgagcttggaagtgggattcttccgagaagagcccagccgggtcaccat

SEQ ID NO: 833045 - DNA, 120 bp, Artificial Sequence
  ENSG00000213062_21 (sequence is synthesized)
cttaattttggtctgcgaaaccgtaagcagagaatccactcaagcccacctggatctacagaactgtgagctaagctgatgtggtaatattttaaagccgctaaatttttgttcatttgt

SEQ ID NO: 833046 - DNA, 120 bp, Artificial Sequence
  ENSG00000213062_22 (sequence is synthesized)
tgtgcagcaataggaatctaacacaaaggtaaatagaatatattttttaaatcgaggcaatattcacataacataaaattaaccattaattaagtgtacaacccagtggcattactacat

SEQ ID NO: 833047 - DNA, 120 bp, Artificial Sequence
  ENSG00000213062_23 (sequence is synthesized)
tcataatattgtgaaaccatcacttctgtctaattccaagacattttcaccaccctacaggaaactgatacccattaagcagtcactccctgttccctcctccccttagtccctggcaaa

SEQ ID NO: 833048 - DNA, 120 bp, Artificial Sequence
  ENSG00000213062_24 (sequence is synthesized)
cactaatatgctttctgcctatggatttgtctattctggaggttacatacaatttgtgaccttttgtgtctagcttctttcacttagtttaatgttttaaagattcatccacattgtagc

SEQ ID NO: 833049 - DNA, 120 bp, Artificial Sequence
  ENSG00000213062_25 (sequence is synthesized)
atgtatcagtacttcgttcctttttatggctaagtaatatgtgtatatacaacattttgtttatccatcaattgataacatttggattatttttacttttgtctattgtgaatagtgctg

SEQ ID NO: 833050 - DNA, 120 bp, Artificial Sequence
  ENSG00000213062_26 (sequence is synthesized)
ctatgaacatttgtatgcaagtgtgtatttgaatatttatttttatttctttggggtatatacctaggagtagaattgttgtgtcatttggtaattctgtgtttatctaagaaactgcca

SEQ ID NO: 833051 - DNA, 120 bp, Artificial Sequence
  ENSG00000213062_27 (sequence is synthesized)
aactgttttccacaggctgcatgatttcacattctcataagtaatgtacaaaggttccaatttgtccacatccttgccaacacttattttcctttttatagtagccatcctggtgggtgt

SEQ ID NO: 833052 - DNA, 120 bp, Artificial Sequence
  ENSG00000213062_28 (sequence is synthesized)
gaagtggtatctcattgtggttttgatgtacttctctaatgactgatgttgagcatcttctcatgtatttgttggccaatcatataacttctttggagaaatgcctattcaagtcctttg

SEQ ID NO: 833053 - DNA, 120 bp, Artificial Sequence
  ENSG00000213062_29 (sequence is synthesized)
cccctctttgattcagttgtttgtctttttgttgttgagttagaagagttctttataaattctaggtactagacctttgtcagatatgatttgcaaatatattttcttccattcagtagg

SEQ ID NO: 833054 - DNA, 120 bp, Artificial Sequence
  ENSG00000213062_30 (sequence is synthesized)
ggtaaatagaatattgagagactttttatatagtaatataaaaaagcatgaagggatgtgttttgcaaaaagtaagattacacagtattatacaactatgttatacactttggctcttgg

SEQ ID NO: 833055 - DNA, 120 bp, Artificial Sequence
  ENSG00000213062_31 (sequence is synthesized)
ttttctctctaaggaataactcatgaagaacattccatgtgttaaggtatacctctaattctttctaatgcctacataatatcctattgcatgggtgtgctattcaccccctacttatgg

SEQ ID NO: 833056 - DNA, 120 bp, Artificial Sequence
  ENSG00000213062_32 (sequence is synthesized)
ttattcattctgtttctagtttttggccactgccaacaatgctgcagttaacatccttgtacaatatatgtttatgtattttaaatttcagtttaaaaggatttattctgaggagtagta

SEQ ID NO: 833057 - DNA, 120 bp, Artificial Sequence
  ENSG00000213062_33 (sequence is synthesized)
tttctggtttaaagagtatatgtgtttttaattttaatagatattgctcaattgttttacattaataacttacatttttactagcaatatatgaaaacattctttctgcactgcatcctt

SEQ ID NO: 833058 - DNA, 120 bp, Artificial Sequence
  ENSG00000213062_34 (sequence is synthesized)
gattacagttataatcaaactttacaatttttgcttatctaataggtataaatcagtggttctcaatcggtaatgattttgtcccacaggggacatttggcaatgtttggagacattttt

SEQ ID NO: 833059 - DNA, 120 bp, Artificial Sequence
  ENSG00000213062_35 (sequence is synthesized)
gattgtcaaaatggcggggggacgggggggcggggcgggtggtgctactagcttctgtgggcagaaccagggattctgttaaatatcctgcaatatactcgaggcgtcacccacaacaga

SEQ ID NO: 833060 - DNA, 120 bp, Artificial Sequence
  ENSG00000213062_36 (sequence is synthesized)
atatactcgaggcgtcacccacaacagagttgtccatcccagactgccactagtgagaaagataagaaaccatggtataaagatacctcattgtggctgggtgaggtggctcatgcctgt

SEQ ID NO: 833061 - DNA, 82 bp, Artificial Sequence
  ENSG00000213062_37 (sequence is synthesized)
gcagaggttgcagtgagcagagatcgacgcgactgcactccagcctgagactacctcattgtatcttcaatttgaaaatctt

SEQ ID NO: 833062 - DNA, 120 bp, Artificial Sequence
  ENSG00000213062_38 (sequence is synthesized)
aaaggtacctcattgtatcttcaatttgaaaatctttatgaatgagtttgagcacttttttccatatgtttgtcagctacttggatttatccttctgcaaatagcctatccatattattt

SEQ ID NO: 833063 - DNA, 120 bp, Artificial Sequence
  ENSG00000213062_39 (sequence is synthesized)
gcccattttttcttttggtggcttatccctctcattaatttattctaaagagctttttatattttttaatcatttatttttcctattcgaaaacatttatttttcaaatatactttttat

SEQ ID NO: 833064 - DNA, 120 bp, Artificial Sequence
  ENSG00000213062_40 (sequence is synthesized)
tgacttttgtagtatctttgctagatggtaaaatattattgtagacattaaaacaaggtctgaaaaaatggtcagacatactgtgtctttggatgagaaaagaagcatcataaaaatgtc

SEQ ID NO: 833065 - DNA, 120 bp, Artificial Sequence
  ENSG00000213062_41 (sequence is synthesized)
cttttcctaaagttaatctgtaactttaacacaattccaattggatgtacaaatcagacgtttttaatctatggactagtgcaggctagaaaggagcattgattcatacctattgtgtga

SEQ ID NO: 833066 - DNA, 120 bp, Artificial Sequence
  ENSG00000213062_42 (sequence is synthesized)
catgtagaattttagagcaaaaagaagcattaagattggtctgtccattgcattacttttctgaggaagacactaagttacagaggagttaagggacatatgatatgctaaaattggaaa

SEQ ID NO: 833067 - DNA, 120 bp, Artificial Sequence
  ENSG00000213062_43 (sequence is synthesized)
cattctggttagcccaatttgaactttgttctagaaatgatggaattcaataaaaaataattataatcataaactgttaattttagaaaaaaacattgaaattgagaccaagaaatgtaa

SEQ ID NO: 833068 - DNA, 120 bp, Artificial Sequence
  ENSG00000213062_44 (sequence is synthesized)
atcagcttaccaaaataacctagagagttagcagcaaattctaaatagtctttggtcatgcaaacttacaattcaatactattcctccatgccatgtaacctcttaagtgcttgcctagt

SEQ ID NO: 833069 - DNA, 120 bp, Artificial Sequence
  ENSG00000213062_45 (sequence is synthesized)
taatgtttcttcactttcaatatactggtaccgcaaagcagttcgcctggaaaaacagagtattgaaacgcctttcaaagatatttactagaacttggattcttacttcatccctgtaag

SEQ ID NO: 833070 - DNA, 120 bp, Artificial Sequence
  ENSG00000213062_46 (sequence is synthesized)
tatgataggtacaaatacacattttttctcaatttataggtgggaacactgagggacaaagaatcttagtccttctaggtcacatttatttcctcaacatgagtatattgacagcctgtt

SEQ ID NO: 833071 - DNA, 120 bp, Artificial Sequence
  ENSG00000213062_47 (sequence is synthesized)
gttcaaggccttgcacttggtactacagcaaagataagacagtccccaacctcagagagctcatacggtgaatcagtcacccaagaaccactccaggctatgcccctgagatgctcctaa

SEQ ID NO: 833072 - DNA, 120 bp, Artificial Sequence
  ENSG00000213062_48 (sequence is synthesized)
actgatgacttatttcacaaacagaaccaagttctgttctgacaataatcacagatgaaatgacttgctgtgccatccagtaaaatgctagttcagctcacaagtgactctcttctttgt

SEQ ID NO: 833073 - DNA, 120 bp, Artificial Sequence
  ENSG00000213062_49 (sequence is synthesized)
ttcttaaatgcttgacccagaattttgcatgtagtcatcaagacatcgccccacagctgagctgtgtcatggaacagccagcccatctaaaaggctgcctactcatcagcctgctcagcc

SEQ ID NO: 833074 - DNA, 120 bp, Artificial Sequence
  ENSG00000213062_50 (sequence is synthesized)
tgtgtgggctgggaatgtggtgccatgcaggggaggcattccccccgttgcatggtaccacataccctttgggaaagagctctgtgcctgccccataaacactctgtggcaccattcctc

SEQ ID NO: 833075 - DNA, 120 bp, Artificial Sequence
  ENSG00000213062_51 (sequence is synthesized)
cctcctgactctgcctgtcttctgccatcctttgatgtgtaaattggaaaactgtcatcacctattgatctcaaaaatgtcatcctatgtgaaaagttagtgcactctggaagaacaaac

SEQ ID NO: 833076 - DNA, 120 bp, Artificial Sequence
  ENSG00000213062_52 (sequence is synthesized)
tggttattaaccataattcagttattattaaaccactatcttcatcctctgacttgcatttatttgattgtagtttcttgcctctagtctcaccctagcccaggccaatctttataccac

SEQ ID NO: 833077 - DNA, 120 bp, Artificial Sequence
  ENSG00000213062_53 (sequence is synthesized)
agtaagaagaatcttcctcaaatctgatattacccttgccctgatctctgattgtttaggaatctctggtgcttaataaataaagtagaaacttcttatttctgacttctgctaactgct

SEQ ID NO: 833078 - DNA, 120 bp, Artificial Sequence
  ENSG00000213062_54 (sequence is synthesized)
tcaatctcattttctactaatgtccattaatgctcaccagtttctcaagttgtcattcagatgtcttatctccttcaccactaccaccctagttcaggccatcattatttatcttctgag

SEQ ID NO: 833079 - DNA, 120 bp, Artificial Sequence
  ENSG00000213062_55 (sequence is synthesized)
ctgttaccctagctcctaacccatttctctgaccacagccttcccctactagtctatttgcccagcaggtggattgacctccctaaagcctaaattgaattatgccactcttctgctcag

SEQ ID NO: 833080 - DNA, 120 bp, Artificial Sequence
  ENSG00000213062_56 (sequence is synthesized)
attcctccagtggcttcccatcaaattttgaattaaatcctaagtttttactgtggtctgtaaggccctacctgatatactcactccatctcagtatatctctaatctcatctcctatga

SEQ ID NO: 833081 - DNA, 120 bp, Artificial Sequence
  ENSG00000213062_57 (sequence is synthesized)
acttctacatcaggaccttggcccttgctattctgtctgcctagaacagtctcttcttagatattagtatgatgccctccctcactactttcaggtttctgcctaattatcaccttattc

SEQ ID NO: 833082 - DNA, 120 bp, Artificial Sequence
  ENSG00000213062_58 (sequence is synthesized)
tacttaaaatagcacacattcccatcctggccaccttctattcttctaccctgctttcttcatcttagcactcgtccccacttgctatattatatatttatttattttgcctgtttctga

SEQ ID NO: 833083 - DNA, 120 bp, Artificial Sequence
  ENSG00000213062_59 (sequence is synthesized)
gaataagcactacaataagagctccataaaagcaatggctttgtttttgtttactgttctagaacagtgcttggcaacatactcatacttgacacatatttgttgaatgaatgaagtaag

SEQ ID NO: 833084 - DNA, 120 bp, Artificial Sequence
  ENSG00000213062_60 (sequence is synthesized)
tgtcaattcctctctgcacacttctctgatgcctcttgggcaattgctctgttttctgttcccttggaactatgtatatacctctactatagctatcacattttattgtaactttttttc

SEQ ID NO: 833085 - DNA, 120 bp, Artificial Sequence
  ENSG00000213062_61 (sequence is synthesized)
ctcaccagcctatagaatccttaaaagcagatgtcttatcatatccttcctaacacaaatttggtgaaaatgagtagagtgaatgaaggtcgaagaagaatagcaatacagccactctgc

SEQ ID NO: 833086 - DNA, 120 bp, Artificial Sequence
  ENSG00000213062_62 (sequence is synthesized)
agattcgaggatggacatgtttgagccctcattaatcccatcttcaggaggctgcattggtactatatgtggcatttatttcaatagagatgctcaaggcaaaaacgatattttactggt

SEQ ID NO: 833087 - DNA, 120 bp, Artificial Sequence
  ENSG00000213062_63 (sequence is synthesized)
ctacaagttcccaaatttcctttaggaaaatacttgggtattatcccgtaaactacttgagtggctgaagctttaaaaacaagcatcctggctaacacggagcaaccccgtctctactaa

SEQ ID NO: 833088 - DNA, 120 bp, Artificial Sequence
  ENSG00000213062_64 (sequence is synthesized)
agactccgtctcaaaaagaaaaaaaaacaagctaatatgtaacagttctgtcataaggccatatcacaaacagtgataacgtggaattcaataggaaaatgaaatagatgttcatagaaa

SEQ ID NO: 833089 - DNA, 120 bp, Artificial Sequence
  ENSG00000213062_65 (sequence is synthesized)
aggaaaatgaaatagatgttcatagaaaaaagactttaacacattatccatctggatgccatgagttctgtggacctccctcatacagactctaggaatcaatctaggggaaattttgtt

SEQ ID NO: 833090 - DNA, 120 bp, Artificial Sequence
  ENSG00000213062_66 (sequence is synthesized)
gtgatccaaaaatgtcactggattaggaattgagaaccctaaattctcactcaggtttttctataaataggctacatgacttcagataaatggctgcatgttgtatctgaggttcctcta

SEQ ID NO: 833091 - DNA, 120 bp, Artificial Sequence
  ENSG00000213062_67 (sequence is synthesized)
acatgggtgttaggagtagatgatctccataagccttctagctataaagttcactgactctattgattcagctgggagactgtacctaagtaacaagaacagactgagtactggaagagg

SEQ ID NO: 833092 - DNA, 120 bp, Artificial Sequence
  ENSG00000213062_68 (sequence is synthesized)
aatgtattctctctcaacatcaatgaccttgaatgtgagagtgattacagagttttgacacctagcagtgcctggacccaggtctcaaatcctgtttgtactcctgctcctatagacaca

SEQ ID NO: 833093 - DNA, 120 bp, Artificial Sequence
  ENSG00000213062_69 (sequence is synthesized)
ggtctcaaatcctgtttgtactcctgctcctatagacacaactgcttttcccaaacttgcagaaactggactcccactaagatggaaaagggtgccggccgcggtggctcacacctgtaa

SEQ ID NO: 833094 - DNA, 120 bp, Artificial Sequence
  ENSG00000213062_70 (sequence is synthesized)
ggtttgagacactagctggatttgagagatatgtttagctgaggtcttaggaaggagactgcaaacttgccagcattgtagtgattggctaagctctgctgttggatttttctctgagaa

SEQ ID NO: 833095 - DNA, 120 bp, Artificial Sequence
  ENSG00000213062_71 (sequence is synthesized)
tgagaatgaatgtggcccagcattcagggtgtctcctttgggagttcccatggggcttccagagattgccagaggcacactgggagcagtcacagttacctatgaggtggcagttctgca

SEQ ID NO: 833096 - DNA, 120 bp, Artificial Sequence
  ENSG00000213062_72 (sequence is synthesized)
agccctgtctgtgactcaaagcagcctccttgtttcctcacatcagacagacttccattaagaatggggttcatgtgagaccagaaggggctggactatatatttagccaagacaggtgg

SEQ ID NO: 833097 - DNA, 120 bp, Artificial Sequence
  ENSG00000213062_73 (sequence is synthesized)
tgaaataatttattttctgatatactttatctttcttagagaatgtatcagaacttttttgggaaagagtgatgagtcttgatttgtaaaagcatgtcacctcttatggtaatctccaaa

SEQ ID NO: 833098 - DNA, 120 bp, Artificial Sequence
  ENSG00000213062_74 (sequence is synthesized)
gcagcatttacaatcacatgtgaatgagtcataaactaagaaatgttgaatgatctgaaataagggtatgttgatttctctcatcaaatattcatttttggcaacataatggactcaagg

SEQ ID NO: 833099 - DNA, 120 bp, Artificial Sequence
  ENSG00000213062_75 (sequence is synthesized)
cacagatattaagtgctttgaaattctcaaagccacaaagacaggccatatctatgaatgtttctgatatgtgactctcctccctccttccctcttaatgaggtataaatgcattcaaac

SEQ ID NO: 833100 - DNA, 120 bp, Artificial Sequence
  ENSG00000213062_76 (sequence is synthesized)
acacagtcacacatttattttatctcctctcagttatgtgttctccatgtggtttggtgagatattttaaaatactcttcaatggataattaaaggttcaaaaaattttatgtaaaattc

SEQ ID NO: 833101 - DNA, 120 bp, Artificial Sequence
  ENSG00000213062_77 (sequence is synthesized)
tcccagatagaagagattagtaaagaaatattctttccaagtctcaatctgaatacaatactgattcaggacccccgtccaggttctcataactgcaaattcccaatatgctgttcagct

SEQ ID NO: 833102 - DNA, 120 bp, Artificial Sequence
  ENSG00000213062_78 (sequence is synthesized)
tttgtctccttctcaattctgattttcaagatgagagttcttggctggaatatttgctaacagtgagaagacatcttcagttcttggtgaggcattcaggtattacagaacatgactatt

SEQ ID NO: 833103 - DNA, 120 bp, Artificial Sequence
  ENSG00000213062_79 (sequence is synthesized)
taagccgtgtgtgtgcatgcttgtcacatcctgcctggtaaataatttctggtttttatatacatgacttcctctcccactaactgtagggatttttgtgattagaaactaagtgtggtc

SEQ ID NO: 833104 - DNA, 120 bp, Artificial Sequence
  ENSG00000213062_80 (sequence is synthesized)
tttatctttcctggtgtctcctgtggtgttttaaatataagagttgtccagtaagtgtttggtggacacatttctgagtcctcatgaattatactttcaaccttcactaatgcttttttg

SEQ ID NO: 833105 - DNA, 120 bp, Artificial Sequence
  ENSG00000213062_81 (sequence is synthesized)
cagctcatttacaggtattataacattccgtttagctatagatgaagcattccatccttatagttagccaagttcttctattgtggtgtagagatctttaggtgaaaccatctttagagt

SEQ ID NO: 833106 - DNA, 120 bp, Artificial Sequence
  ENSG00000213062_82 (sequence is synthesized)
ctgtcatgaaccacagggtgaaaaagacctatctgtattacagtatgaacatcctttcaggagaggtctacattcatgcttttgcatataactcatatcagtttaatttctaacctcttc

SEQ ID NO: 833107 - DNA, 120 bp, Artificial Sequence
  ENSG00000213062_83 (sequence is synthesized)
ttctttagctttccattggcattccatagcagaagctcttcctaatgtgaaatacaagagaagatctacagattcaagaatttgtgtctgggaggtccaccaagaactctgaacctcagt

SEQ ID NO: 833108 - DNA, 120 bp, Artificial Sequence
  ENSG00000213062_84 (sequence is synthesized)
tctttattctccaaaggatactttgatatgtacccatcagtgaggacagggactttgtacaagaaagagaaattaatgaaacttgtgagcatctgaatattctgatatcttacctcccca

SEQ ID NO: 833109 - DNA, 120 bp, Artificial Sequence
  ENSG00000213062_85 (sequence is synthesized)
ctcccaccctatctaaaacctcatcacctggcttagcatataaagagcttaatggtgggatacatcaggctgacctaggtttaggacctagccaccattataacttttggcagcctagga

SEQ ID NO: 833110 - DNA, 120 bp, Artificial Sequence
  ENSG00000213062_86 (sequence is synthesized)
caaggtatcattcccttctaaggctcagttttctcatgtaaaatggagataataatatccacttcttggggtagttgggaggattaaataagattatatatgataaatgttctccatagt

SEQ ID NO: 833111 - DNA, 120 bp, Artificial Sequence
  ENSG00000213062_87 (sequence is synthesized)
acctagcacaaaattaatctttaaaaaaaggagatctattattatctaagtaccatagtgggccagcttccaagtacttaggaaagatccttgcacaaagtaggagctctttaaatactg

SEQ ID NO: 833112 - DNA, 120 bp, Artificial Sequence
  ENSG00000213062_88 (sequence is synthesized)
tgcaggcagcaaatgccagttacgttttcaaatttggcttttgtttattttgtcagagactagagcatattcatgagcagaggaaaaagaagagatccagagtataccaaattttcctta

SEQ ID NO: 833113 - DNA, 120 bp, Artificial Sequence
  ENSG00000213062_89 (sequence is synthesized)
aacaactttattgaggtataatttttgtccaatatcacccattttaagtatatattaaatatatatttgataagttttgacaaacatatgtaatcacacatatgaaacaagtccctgagg

SEQ ID NO: 833114 - DNA, 120 bp, Artificial Sequence
  ENSG00000213062_90 (sequence is synthesized)
tatggaggtactgggatccaaaacagaaatataaggtgtgacctgactaagaaaggaaaattcaccctgtcaggtggtcaaaccagaatgactccattttgagtgagggctaggaaaatg

SEQ ID NO: 833115 - DNA, 120 bp, Artificial Sequence
  ENSG00000213062_91 (sequence is synthesized)
aggctgagacttgctgggctgcattctaaaaaagttaggcaatcctagctcttagatgtttatggttaaggggacaaattaataatgtttactaaacacacccagatttaggagtgtccg

SEQ ID NO: 833116 - DNA, 120 bp, Artificial Sequence
  ENSG00000213062_92 (sequence is synthesized)
ggtatcccgatatctggagaataaaggcattcctaattttgctttaaagacagtagtatcaattcttgaaaaatatagtaattaagaaaattcatccttcatcacaaaccctagtagcag

SEQ ID NO: 833117 - DNA, 120 bp, Artificial Sequence
  ENSG00000213062_93 (sequence is synthesized)
aacacatctccccatataatacaagcattgtacctagggtgagtgtgttcctcctcttactttcaggaatgtcctactctgtctatagaatagctgttcttccaccactttacttcctta

SEQ ID NO: 833118 - DNA, 120 bp, Artificial Sequence
  ENSG00000213062_94 (sequence is synthesized)
ttctttcttgcacaagatccaagaaccctttcttggggtctggattgggacccctttcctgtaacggcctcaggctccccagggaaggagttaaggtggatgaaaatgtagataaatagg

SEQ ID NO: 833119 - DNA, 120 bp, Artificial Sequence
  ENSG00000213062_95 (sequence is synthesized)
agggaaggagttaaggtggatgaaaatgtagataaataggcactaggagggggtaggagatgacattgaaaacattccctaatgttatctatttctcctatgtgataagaggcaaggtac

SEQ ID NO: 833120 - DNA, 120 bp, Artificial Sequence
  ENSG00000213062_96 (sequence is synthesized)
ttgctgaaaaaaaggtaaacaaggatgagacaggttctaccttagaatatgaaagtttaaatagcatatgtggggagcgactgacaaggaatgtgaatagaaattgcccagctaggtctg

SEQ ID NO: 833121 - DNA, 120 bp, Artificial Sequence
  ENSG00000213062_97 (sequence is synthesized)
tgtatatgttacagcctgggtgtagcacggagagtgtgagtgctagactaattcaaggttgggggcttctcagggggtaagaatgaggagcagaaggctggagacaagagttttccccag

SEQ ID NO: 833122 - DNA, 120 bp, Artificial Sequence
  ENSG00000213062_98 (sequence is synthesized)
ggtttgtaagtattgttgatgaaccatgggtgtgtgctgcttagagaaggaagggaagccatgaggggacccagaggtatcatgtaatgaagggactgagagagctgggtatctccatga

SEQ ID NO: 833123 - DNA, 120 bp, Artificial Sequence
  ENSG00000213062_99 (sequence is synthesized)
aatgtgagagtgggtggggtgggagttcacacgagctgagatgcacagggagtttcttgctagttggatttaacattccatggaggacatattctgaaggatgatgtattagttttcaca

SEQ ID NO: 833124 - DNA, 120 bp, Artificial Sequence
  ENSG00000213062_100 (sequence is synthesized)
tctgaaggatgatgtattagttttcacactgctataaagatacaactgaagactgagtaatttttaaaggaaagatttaattgacacattgcacgtggctggggaggcctcaggaaactt

SEQ ID NO: 833125 - DNA, 120 bp, Artificial Sequence
  ENSG00000213062_101 (sequence is synthesized)
catctcacatggcagcaggtgagagagagagagagaagtccaggggaaactgccatttataaaaccatcagatcttgtgagaaccctctcactatcatgagaatagcactggggaaaatc

SEQ ID NO: 833126 - DNA, 120 bp, Artificial Sequence
  ENSG00000213062_102 (sequence is synthesized)
acccatatgattcagtcacctcccaccaggcctcttctcaacagctggggaatataattcaagatgagatttgggtgggtacacaaagcctaatcatatcagataacaaagttcatgttg

SEQ ID NO: 833127 - DNA, 120 bp, Artificial Sequence
  ENSG00000213062_103 (sequence is synthesized)
tgctcacagaaatcagctcttcacatacagtggaatgcaaagttaatttgttaataatggatagaaaagaaagaataattttgacaacactaagcttttttttttttttttttttgagat

SEQ ID NO: 833128 - DNA, 120 bp, Artificial Sequence
  ENSG00000213062_104 (sequence is synthesized)
gtgctaggattacaggcatgagccacaatgcctggcccaacactgggcttttaaaaagcactgccagtgtttcagtgggtagtgttcttacccatagtcttgggagacaactattacatt

SEQ ID NO: 833129 - DNA, 120 bp, Artificial Sequence
  ENSG00000213062_105 (sequence is synthesized)
gcatactgcttaattcattagcaaatcctattgactttgccttcaaaatatggccggaattccaccactctcaccatttttattgctaccacagttgatatgaatatctgtaattgcagc

SEQ ID NO: 833130 - DNA, 120 bp, Artificial Sequence
  ENSG00000213062_106 (sequence is synthesized)
taaattggacttcctgctaacatccttgatcccctatagtctcttcttgttatagctgtcacaaagattcttttaaagcacaagtcagatgatattcttctccgttcaatactgtccaat

SEQ ID NO: 833131 - DNA, 120 bp, Artificial Sequence
  ENSG00000213062_107 (sequence is synthesized)
aacttcccatctcattcagcaaatgagcccaagggctgctagacctaaatagccactctattccccaccctctgtctctctccacctttccccacccattttattctttgatctcaactt

SEQ ID NO: 833132 - DNA, 120 bp, Artificial Sequence
  ENSG00000213062_108 (sequence is synthesized)
ctgctctcccccttgctcatttggcttcagccacctggttctccttgtcaatcctggatcactacctgcatatttttactacaaaatgtttattcatggttctttctgctttctaagttt

SEQ ID NO: 833133 - DNA, 120 bp, Artificial Sequence
  ENSG00000213062_109 (sequence is synthesized)
ttttttttcctatatgtctgtggtatttacttcctcacttcctctgctctttgctcaaacatcaagctagggcctcccctgaccatcctttttaatgttgacttcctccccactacaaat

SEQ ID NO: 833134 - DNA, 120 bp, Artificial Sequence
  ENSG00000213062_110 (sequence is synthesized)
attcagctcctgctattgatttatttttgccataggacttattatctaatatcttatatatttttattatggtttattgtctctttctttcaacttgtgaataaactccattcaagtagg

SEQ ID NO: 833135 - DNA, 120 bp, Artificial Sequence
  ENSG00000235492_0 (sequence is synthesized)
gtgaccatcttgttaaagtttattttttcctggctggatttaaagaactacactgccatgttgtaggctgcatgttgggtgaccattgtgacaaggaacttagggtggcccctaggagct

SEQ ID NO: 833136 - DNA, 120 bp, Artificial Sequence
  ENSG00000235492_1 (sequence is synthesized)
gaggatggtctccagttgaacatcaacaagacactgaaattctctgtcctttaactgcaaggaactaaattttgccaacgaaaatgaatctttctccagttgagtttcagatgagactgt

SEQ ID NO: 833137 - DNA, 120 bp, Artificial Sequence
  ENSG00000235492_2 (sequence is synthesized)
tcccagattccagatacacagaaattttaagatgagaattgtgcatcaatgttcaagtcccaagagacgttatcagtctgaacagcccagtgaacaagtatttgtgactctccttccaaa

SEQ ID NO: 833138 - DNA, 120 bp, Artificial Sequence
  ENSG00000235492_3 (sequence is synthesized)
tgaaatgttctacagaaaggtggaagtgtgttgattactggcaggcttctctggtcatctttctccctccacttctatcaacatggagttttgtactcagcaaaataaaaatctttcaaa

SEQ ID NO: 833139 - DNA, 120 bp, Artificial Sequence
  ENSG00000235492_4 (sequence is synthesized)
actgagcaccaaaacaaaacaaaacaaaagatatttttatattaaaaaaccgagagactttgttggtagcaaattaaaactacaataaatggttaaatgaaggaatatggtatcaattgg

SEQ ID NO: 833140 - DNA, 120 bp, Artificial Sequence
  ENSG00000235491_0 (sequence is synthesized)
tcagcccacttgcatccgagtgaataaacagccttgctgcttacacaaagcctgtttaggtggtcttctatatggacacgcatgacaatatttacaacaaataccaaggaagagctaaga

SEQ ID NO: 833141 - DNA, 120 bp, Artificial Sequence
  ENSG00000235491_1 (sequence is synthesized)
gcacatagcatttcccaggcttattagactgtgggatcaacctctttaagaaagcattttgcagaattgttgttcacaggtcattctgcagtgtgaagttttttttgcaataagatcctt

SEQ ID NO: 833142 - DNA, 120 bp, Artificial Sequence
  ENSG00000235491_2 (sequence is synthesized)
aatttggcaccggttgggtcttgtagaaatatttactgcatggagttgaaagaagagtctggactgggagaaggatgtatggataaagaacaagggttcttttcagaaaaccaagcagct

SEQ ID NO: 833143 - DNA, 120 bp, Artificial Sequence
  ENSG00000235491_3 (sequence is synthesized)
actggatactgaccttattctaaaggccaacagaagtggaataaggtgcaatttggaattcaatcaatattgaaggatgacggtgacctttgggaaataggattcagcgatgtcttttta

SEQ ID NO: 833144 - DNA, 120 bp, Artificial Sequence
  ENSG00000235491_4 (sequence is synthesized)
aattctgttatttgtacataacgcactcttacagattttttaaaaaatccaattccacatgaaaaacttttacactgaatttattacatttttaaaaatacataaactcagactttattt

SEQ ID NO: 833145 - DNA, 120 bp, Artificial Sequence
  ENSG00000235494_0 (sequence is synthesized)
tacttttgtaatacatggctcaaaccagggtgaaatgctcattgcagtgctgcaaaaaggtgaggtcacaggacacaaacccatatctgagacctggatgccttcctccacgcactcacc

SEQ ID NO: 833146 - DNA, 120 bp, Artificial Sequence
  ENSG00000235494_1 (sequence is synthesized)
tccattgtcagcttctgacactgcctcttacaaggaggtgactttggaaatgtcattcagccttcctgtgcctgagatcgcctcacctgtcaaatgggaacaataaagcacttcaaagaa

SEQ ID NO: 833147 - DNA, 120 bp, Artificial Sequence
  ENSG00000235494_2 (sequence is synthesized)
gcacacagagggcgactgcagcttgggcgcccaggcggcggagcatggtctgggtggcctctggaatgcgtgcgcgccagacctgagggccctcctgctggtgccacctgacccggtctt

SEQ ID NO: 833148 - DNA, 120 bp, Artificial Sequence
  ENSG00000235494_3 (sequence is synthesized)
ggagcctggagcagctggaatggccactctgcagtcacaggggatagagttaagttttcttatcccaggcatgcacacaaaaagacagagtctcgctcttgtcacccaggctggatgcag

SEQ ID NO: 833149 - DNA, 120 bp, Artificial Sequence
  ENSG00000235499_0 (sequence is synthesized)
cgctccgccccggaggcggcgggcaggcagcactgccttctccagcgtccagaccctggaggaaaaataccaggagaaactgctcactcagctctgcccccaccacacccctacctgctc

SEQ ID NO: 833150 - DNA, 120 bp, Artificial Sequence
  ENSG00000235499_1 (sequence is synthesized)
gtgaagaacccaccgggccaagatgatcccttttctgagggctgctgctggtgtcctcccccagatcctgggccccagcaggtgggagagtggccccctacggagtccgatcagactgct

SEQ ID NO: 833151 - DNA, 120 bp, Artificial Sequence
  ENSG00000235499_2 (sequence is synthesized)
gcagaggaggtgaagaggggttgagaagaggcatccatccacgagactgaagccacttgccttcacccttgtagactcttgactgttctaggcgagaaggacctgttggtggcctttgga

SEQ ID NO: 833152 - DNA, 120 bp, Artificial Sequence
  ENSG00000235728_0 (sequence is synthesized)
gtctgttcatttcagactttgtcttttggtatcaagttggttaatatatgattttgaaaatgtaaatatgcatacctgcaacaaagtgcatcagagttgaaagaagaaagaagcaggttg

SEQ ID NO: 833153 - DNA, 120 bp, Artificial Sequence
  ENSG00000235728_1 (sequence is synthesized)
tgtttgcctaaaagctgcaaaaccagcttttagtctacactctgcatgtgtggcttaggggtcagccagagctgagagcagacagaagttggaaatcctccctcggactctttcccttcc

SEQ ID NO: 833154 - DNA, 120 bp, Artificial Sequence
  ENSG00000235728_2 (sequence is synthesized)
tgcattccctttctcttcccagcagccatggtggccctggattcagctttcccttccacaggccagagagattgtgattttttttccaccaatgccctgccaccctgcaggctgctctca

SEQ ID NO: 833155 - DNA, 120 bp, Artificial Sequence
  ENSG00000235728_3 (sequence is synthesized)
ataacttccctcctctgagcacggaccaccccactcctgggtctgcctgctcttctcactctcatatgtcttcaagaagctgcttgtattacgtccaaagcttacaattggtatgtccag

SEQ ID NO: 833156 - DNA, 120 bp, Artificial Sequence
  ENSG00000235728_4 (sequence is synthesized)
gaggctcagtctggtaggatcttactctgtccttaccagcagcagaagtaatctgtctttgcggatcaaagatggatttgagctctggatctgaaccaacgaacacacaatgacctatga

SEQ ID NO: 833157 - DNA, 120 bp, Artificial Sequence
  ENSG00000235728_5 (sequence is synthesized)
attttttggacaggaacattgaagatggcatgagctatccagtggagacacacatccatatgcatgtgcatttttatatatttttatgaaatgcatgacatgtcttaaaaagccatttat

SEQ ID NO: 833158 - DNA, 120 bp, Artificial Sequence
  ENSG00000235728_6 (sequence is synthesized)
gtagtgtgtaggtgtgagtctatgaaagaattggaaatgaatgtatgcctcctttcactttgttgtttagtattccttaggaagaagcaatattgaataaaattttaactaattatccaa

SEQ ID NO: 833159 - DNA, 120 bp, Artificial Sequence
  ENSG00000232118_0 (sequence is synthesized)
gtaaaggggaatctattggatctgaaatggatttttaaaacttcactggctttttataaatactcagaagtggatttaaaaatttatgaaactctgtgggtacagagtagaacttcccca

SEQ ID NO: 833160 - DNA, 120 bp, Artificial Sequence
  ENSG00000232118_1 (sequence is synthesized)
caaaataaataaatgtttgcagggctcaagttggaaaaaatgtccttctgcagcaaagggtgtggccctggggtcagggaagcacaatgatgaaccaggagcatctaggaagtgacccgt

SEQ ID NO: 833161 - DNA, 90 bp, Artificial Sequence
  ENSG00000232118_2 (sequence is synthesized)
ggaggctgacacacaattggatcatgggtgcagttcccccaagctgttcttgtgatagtgagttctcacgatatctcatggttttataag

SEQ ID NO: 833162 - DNA, 120 bp, Artificial Sequence
  ENSG00000232118_3 (sequence is synthesized)
tgtgatagtgagttctcacgatatctcatggttttataagcatctggcatttccccagcttgcactctatcctgccacccttgtgaagaaggtgcctgcttctcctttaccttgcgccat

SEQ ID NO: 833163 - DNA, 120 bp, Artificial Sequence
  ENSG00000232118_4 (sequence is synthesized)
gtaattgctttgcttcctctacctgcctttaccaagagatgcctggccagaagagcgaggaattaaagtacctgtggaggctgcccaccgagtgaagctgcaggctgcccatcccatcgc

SEQ ID NO: 833164 - DNA, 120 bp, Artificial Sequence
  ENSG00000232118_5 (sequence is synthesized)
gtagctccttagttgtcacttgcactctatcctgccacccttgtgaagaaggtgcctgcttctcctttaccttgcgccatgattgtaagttacctgtggcctccccagcaatacacaact

SEQ ID NO: 833165 - DNA, 63 bp, Artificial Sequence
  ENSG00000235725_0 (sequence is synthesized)
ctcccaacctcaggtgatccgcttgtatgtaattttctatatttattgaaatgcattttaagt

SEQ ID NO: 833166 - DNA, 120 bp, Artificial Sequence
  ENSG00000235725_1 (sequence is synthesized)
aatatgaaagcatttttctccttacaatggaaaaaccaacttgattttacatttatttatataacctgacttaattctatgtaagtcaagtgaaaaaggaaacaactgctctgtggaatc

SEQ ID NO: 833167 - DNA, 120 bp, Artificial Sequence
  ENSG00000235725_2 (sequence is synthesized)
gtggaatcaacctgaagatgtctaatttttcctctgatgccaccagacttaaagcagttcacgatcctctctacaaagaagtatatttaggttctccctctccctctccctctccctctc

SEQ ID NO: 833168 - DNA, 67 bp, Artificial Sequence
  ENSG00000235725_3 (sequence is synthesized)
cccaaagactagaattccatttctaaacccagcccagcagccggaagtcatgaagcagtcaacctgc

SEQ ID NO: 833169 - DNA, 120 bp, Artificial Sequence
  ENSG00000235725_4 (sequence is synthesized)
cccagcccagcagccggaagtcatgaagcagtcaacctgcctggacatccagctacgctctgctgcgccattctatccacccatcaagactcccctcccttctactgataaccctcctaa

SEQ ID NO: 833170 - DNA, 120 bp, Artificial Sequence
  ENSG00000235725_5 (sequence is synthesized)
aagccaactgggattgaattactcctctgccaagaaccctctgctgcaccttatccaaggcccaccataaaatgatgccagcccacctcacccaaaacctcttccagaaagtcccagctc

SEQ ID NO: 833171 - DNA, 120 bp, Artificial Sequence
  ENSG00000235725_6 (sequence is synthesized)
caccctggttctctcctccacagatgtcagacctgtatgtggtctgatggctctctcagcctccttcattctctccccatttctgccacattttccccaataaatcttgtgtgtgtctaa

SEQ ID NO: 833172 - DNA, 120 bp, Artificial Sequence
  ENSG00000235724_0 (sequence is synthesized)
atcaggaggactgaaactgtaaacacaagctggtattttggtgtgatcacgctaatatggcggtttgtgaggtcaaggggtggaaggtgaattatggatccagaatttccttgcttttgt

SEQ ID NO: 833173 - DNA, 120 bp, Artificial Sequence
  ENSG00000235724_1 (sequence is synthesized)
cagtttaagtcaggctgcttgcgagtagctgcttttcaaacttgaataactcagctattttaaagcaatggagacctaccttaaataattagaggggctacactggagaagtgtcttccc

SEQ ID NO: 833174 - DNA, 120 bp, Artificial Sequence
  ENSG00000235724_2 (sequence is synthesized)
aggaaagtagtggaggctccattctgcagaacctttaaaattagaccatgaaaggcatgtaacagcctcgttctcaacataaccatgagttgttcacagcataaagtgttgggtaaaaca

SEQ ID NO: 833175 - DNA, 120 bp, Artificial Sequence
  ENSG00000235724_3 (sequence is synthesized)
acccaaggtctttataaaacttctcatctcaatggaaaaccatttaggtggcttgttttattattagaagttcacttaacaaaaaaatggaaaatagtttatttaactgtccagtgtacc

SEQ ID NO: 833176 - DNA, 120 bp, Artificial Sequence
  ENSG00000235724_4 (sequence is synthesized)
gaggaaaaaattatctttgttgtttagttacaggcagtatgataaggaacaatctgaatgacacgtaaacaggagggggtaaattccaagcacagcctgaatgagaagtacaactcattt

SEQ ID NO: 833177 - DNA, 120 bp, Artificial Sequence
  ENSG00000235724_5 (sequence is synthesized)
cctgtaacctagatgcctttttaacacatctatgcagtctccatgtgaaaccaggtgctgttcccaaaggagaaaacactgccctccagtggtcttcaatgaagaaatggaaatagtttc

SEQ ID NO: 833178 - DNA, 120 bp, Artificial Sequence
  ENSG00000235724_6 (sequence is synthesized)
aggtggaaaccaggcttcttggaagacttcaaactatgccaaatggtctgatttcaccatagagaatgttatactattaattgccaatttgcatatgtgtgcagctgctgttttggctct

SEQ ID NO: 833179 - DNA, 120 bp, Artificial Sequence
  ENSG00000235724_7 (sequence is synthesized)
gaactcaatccgataagcttgctggaggtatcgcagagcacttggcagctttcctatttgaaaagaaagcctctcccctctacagaacagctgatcgtctatcagcgatagaccctgatg

SEQ ID NO: 833180 - DNA, 120 bp, Artificial Sequence
  ENSG00000235724_8 (sequence is synthesized)
gccatcaggaggactgaaactgtaaacacaagctggtattttggtgtgatcacgctaatatggcggtttgtgaggtcaaggggtggaagttacaggtaggcaatatatctttaaccaaag

SEQ ID NO: 833181 - DNA, 120 bp, Artificial Sequence
  ENSG00000235724_9 (sequence is synthesized)
ttgtgctagatggggtcttcaaggttatttggattttgatgtactaagaaaatatcctcagtagaaaaataccagaaatggcattccaactcaccctaccaaggacaagaagcagatcat

SEQ ID NO: 833182 - DNA, 120 bp, Artificial Sequence
  ENSG00000235724_10 (sequence is synthesized)
taggaacagatatattggagcttggccctgtaaaaacataggatagctaacaaatacataaaattagttgtatggcctcatttattccttcatagagatacagctcctggcaaccaccat

SEQ ID NO: 833183 - DNA, 120 bp, Artificial Sequence
  ENSG00000235724_11 (sequence is synthesized)
tctacttgatgcctctatgaatctgactactctaggtacctcagatgagtggaattatgcagtatttgtccttttgtgtgtacaactaatttgacaggcagtatgataaggaacaatctg

SEQ ID NO: 833184 - DNA, 120 bp, Artificial Sequence
  ENSG00000235724_12 (sequence is synthesized)
ttttaccacaaactggaaaaagaattacatggtcatgctgtgcttttaaaggcagtttggttcacttttgtctatttaacacctaattccaagaagtccataggcatctagagatctgaa

SEQ ID NO: 833185 - DNA, 120 bp, Artificial Sequence
  ENSG00000235724_13 (sequence is synthesized)
gtctctggcaggactgtgaggcggcacttagcgccctggtcgctcgcgccccgccgacgcctcctttttctctccctacctctgcgctctgcggccgccgctgagatctgggacggcggc

SEQ ID NO: 833186 - DNA, 120 bp, Artificial Sequence
  ENSG00000235724_14 (sequence is synthesized)
acatccagcccgggagacgactggctaggaaatagaactgtaaaccagagctgctaattactttaaggttttttaagtcacatcttcataatttaaattaatttacctttaccaaaactg

SEQ ID NO: 833187 - DNA, 120 bp, Artificial Sequence
  ENSG00000235724_15 (sequence is synthesized)
cttataatcagattgctgtaataataatcatagaactagaaatatctaagaacatttgaaaatatggctcaaagaccataatactcagctgaagatgaggaaatagtaacttgttcctgg

SEQ ID NO: 833188 - DNA, 120 bp, Artificial Sequence
  ENSG00000235724_16 (sequence is synthesized)
ggtctgatttcaccatagagattctttgctgaagaatgcagctgtattaaaggaagaaagaaaaccaagctacagctccttataattcaacaagcatttaaaagatttataaagatggtg

SEQ ID NO: 833189 - DNA, 120 bp, Artificial Sequence
  ENSG00000235724_17 (sequence is synthesized)
taatgtattctatggtttaaatatttaaaaaattttacatcatacctagaaagtgttgtgtactttctaaagcttataaactgaaaaggatttgaagaatcctaatacagaatcataagt

SEQ ID NO: 833190 - DNA, 120 bp, Artificial Sequence
  ENSG00000235724_18 (sequence is synthesized)
tataattcatccaaaattgtatagttcttaaatttcaaatccaaaccagtggatatctgtctttagtgacatttagattttattcaattaaggtcattgtagctattataaatggaagat

SEQ ID NO: 833191 - DNA, 120 bp, Artificial Sequence
  ENSG00000235724_19 (sequence is synthesized)
tttacttcattgtgtcttatcactgaagtacttcactcttgcttttcaaaagatttctttcaatttcttcagagtcttatttgttctctaagacaaagacttgatttcagtttgtttttc

SEQ ID NO: 833192 - DNA, 80 bp, Artificial Sequence
  ENSG00000235724_20 (sequence is synthesized)
tctctaagacaaagacttgatttcagtttgtttttcttaaaattaatatcttctccaatttatttcccagttttttctaa

SEQ ID NO: 833193 - DNA, 120 bp, Artificial Sequence
  ENSG00000235724_21 (sequence is synthesized)
ttgttagctacattttacatgcaaatgtctatacaaccatgttaatgaagttatagagaagaaaagaaagttggcattcccacttttgttttattccaaagcaacttttcagttgacttg

SEQ ID NO: 833194 - DNA, 120 bp, Artificial Sequence
  ENSG00000235724_22 (sequence is synthesized)
ctatcattttaagccattgttgtttaatcataagaaaacagaaaagtctaacgatgcattcgaattggattgcaagtccagaaaaacaatatgttacttctaaataaaatttagatttga

SEQ ID NO: 833195 - DNA, 120 bp, Artificial Sequence
  ENSG00000235724_23 (sequence is synthesized)
taccatgatagcagcatttacatgaaacatggtatatttatctagtctcatttttggctgtatttcttaagctgaaacacgtctacaactgagcataaggacaaaatttccaagataaat

SEQ ID NO: 833196 - DNA, 120 bp, Artificial Sequence
  ENSG00000235724_24 (sequence is synthesized)
gtaatgaattcactgtttagattgaagattttaaaaatctacctcaaattacatttattaacagggcgaccaggaagtgttaaagttgttagacacttcatttattaaataatttgtggg

SEQ ID NO: 833197 - DNA, 120 bp, Artificial Sequence
  ENSG00000235724_25 (sequence is synthesized)
aaatggtctgatttcaccatagagaaggaatgatccatggaaaggacttaatttctccattttctggaatcgaaatataagggctttttagttaaagttcttcctgtagagtgtattgtt

SEQ ID NO: 833198 - DNA, 120 bp, Artificial Sequence
  ENSG00000235726_0 (sequence is synthesized)
agcctctcttccctccctggagggtggggagtgggaccccaggttcctagcttctcattgcatgggtggttcctccggtcttgaagctatttagggggcatcagtgtcatttcattagcg

SEQ ID NO: 833199 - DNA, 69 bp, Artificial Sequence
  ENSG00000235726_1 (sequence is synthesized)
gctggagtgcagtggtgagatctcggctgactgcaacctctacctcccaggagacacttttgacttgat

SEQ ID NO: 833200 - DNA, 120 bp, Artificial Sequence
  ENSG00000235726_2 (sequence is synthesized)
ctacaggtagagacacttttgacttgatctctgcagtcctcaacatgattgagctggaaacagaaacttctgcagtgttagaccagcgaggttccagtgctgctcctcccaccagccagc

SEQ ID NO: 833201 - DNA, 120 bp, Artificial Sequence
  ENSG00000235726_3 (sequence is synthesized)
cttccctgacagccatcttctatcccaagggcagccatcttctatcccaagggcagccatcttctatcctgagggaagctggcctgaggatgaagccagaatatggagaagaggagaagg

SEQ ID NO: 833202 - DNA, 120 bp, Artificial Sequence
  ENSG00000235726_4 (sequence is synthesized)
agatggctgagaagcagaacggaaacctgaactgcatttttcttagagcaagaattacatcaattcttcaagccaagttgagcactgttggtttctgctacttggaactgaataaactct

SEQ ID NO: 833203 - DNA, 120 bp, Artificial Sequence
  ENSG00000235726_5 (sequence is synthesized)
gacagatactgtacagggaacagtacttggggagctccacttcatctgaggccttcgtgagtggcttgtgtcacattcctggctgttcaggcatcagtcctggtttcctggtgagctctc

SEQ ID NO: 833204 - DNA, 120 bp, Artificial Sequence
  ENSG00000235726_6 (sequence is synthesized)
ctcccttgcttccgtctctgcagcagctacctccgttctcacacatggcttcttctgagttttcttatttcagccagtaccatggaactctcctgaccttgtgggctttgggcagaaata

SEQ ID NO: 833205 - DNA, 120 bp, Artificial Sequence
  ENSG00000235726_7 (sequence is synthesized)
actccactccccacttctctcctaaattactggcaatggtgatactgaccatgcagggagaaacctgagctgttaatgctaggagcgtcaagctgttggtagtgaagccatcatcctctc

SEQ ID NO: 833206 - DNA, 120 bp, Artificial Sequence
  ENSG00000235726_8 (sequence is synthesized)
caagttcccagatacttctttgtgaaaatgatgcaccagactctcatttgtcatcactgggattactgtgatcttgtcttgaatttctacgagtttcacatccacggtggtaacttaacc

SEQ ID NO: 833207 - DNA, 120 bp, Artificial Sequence
  ENSG00000235726_9 (sequence is synthesized)
tgtcactgtcttgttgcctacacctgcattacccagaactacagcccaggcacaggccccttccaggattcaggtggtctccagaaatttcttttagaatgtaataaatgcttaaagaag

SEQ ID NO: 833208 - DNA, 120 bp, Artificial Sequence
  ENSG00000235726_10 (sequence is synthesized)
aattatactgtgagtagaacagcatgcagcctggcacttagcaagtgatcgagaaataattcatgagtgaatgaatgaacagatgacagatgtaaccaaaaatcaaaactaaaatcactt

SEQ ID NO: 833209 - DNA, 120 bp, Artificial Sequence
  ENSG00000235726_11 (sequence is synthesized)
ctgaagtcgaggatgcacttctcaatggtgtgaactttaaaaggtcaaaaagtaaatatgtccttatttggaaaataagacatgtttcttgtgaggaatattggccgatccagaaaaaaa

SEQ ID NO: 833210 - DNA, 120 bp, Artificial Sequence
  ENSG00000235726_12 (sequence is synthesized)
aattctgaggaactgaggtctcctgccaacagccagcatcaacttgccagtcttgtgagtgaatcatcctggaaatggattcttcagccacaatcaagccttcagatgacggtagccctg

SEQ ID NO: 833211 - DNA, 120 bp, Artificial Sequence
  ENSG00000235726_13 (sequence is synthesized)
gctgagagcttgactgcaactgtgtgagtgatcctaagccagaaccaccagccaagccactcacaacttcctgacccacagacactgtaatagatgtttattgttgttttaagctgctaa

SEQ ID NO: 833212 - DNA, 120 bp, Artificial Sequence
  ENSG00000235726_14 (sequence is synthesized)
cgggtgggagtgacccgattttccaggtagagacacttttgacttgatctctgcagtcctcaacatggtcgaagtctgaaatcaagtgtgagcagggccacatgggcccattctgaagac

SEQ ID NO: 833213 - DNA, 120 bp, Artificial Sequence
  ENSG00000235726_15 (sequence is synthesized)
ctgaagacccgaaggagagtccccctttccctcttccagcgtctggcagtcctaggccttctttggttgacggcagcctcacttccatctgtgcctgtgactcacatagccctcttctca

SEQ ID NO: 833214 - DNA, 78 bp, Artificial Sequence
  ENSG00000235726_16 (sequence is synthesized)
acttccatctgtgcctgtgactcacatagccctcttctcaaagtctctgactttctcttctcttaaaagaacacctcg

SEQ ID NO: 833215 - DNA, 120 bp, Artificial Sequence
  ENSG00000235726_17 (sequence is synthesized)
tgctaggattataggcatgagccacagcatggggcccagtttcaatcttttaccaatgaaaacctgaacacaaaacaataattcttaaccaatcatgatgaaacacagtaactttttttt

SEQ ID NO: 833216 - DNA, 120 bp, Artificial Sequence
  ENSG00000235726_18 (sequence is synthesized)
ttaataaaaggaagaagaaagtgttgaaaattgacatctatgtttacatatcacagcaacacaaagtgccagcaaaaaaaaaaaaagtggaaaaatgaaagtatcttggccccatgagtt

SEQ ID NO: 833217 - DNA, 120 bp, Artificial Sequence
  ENSG00000235726_19 (sequence is synthesized)
aaacgtgaattaccaagggactctgtcatgtccttcgttactcatgtgacttccttacatgaaaggaaaatagatcctggggcctccaaatcactcagctaaagggaaaagtcaagctgg

SEQ ID NO: 833218 - DNA, 120 bp, Artificial Sequence
  ENSG00000235726_20 (sequence is synthesized)
ggaaaagtcaagctggatctgcttagggcaaacctgcctcccatttattcaaagtcatcccactcttcactgagataaatgcatatctgatggcctcctttggaaaggctcatcagaaac

SEQ ID NO: 833219 - DNA, 120 bp, Artificial Sequence
  ENSG00000235726_21 (sequence is synthesized)
gtctcttatctacctatgacctggaatttcagtattaaaccaatgtttatcttgcatatattgattgatgtctcatatctctgtagagactacatgaaaattttgttgttgaaataattc

SEQ ID NO: 833220 - DNA, 120 bp, Artificial Sequence
  ENSG00000235726_22 (sequence is synthesized)
attcgttgtactgagcttcaattgaaatgcttaaataccttgaaaacatttccatttttgcctttactcaaatcaggtggtggctactttctaatgaatgcaaatcccagtatgtgaaaa

SEQ ID NO: 833221 - DNA, 120 bp, Artificial Sequence
  ENSG00000235726_23 (sequence is synthesized)
gtgtgggttaggacaataaaaggggaggtgacaccattttaatggtttctcagaagctgtgctccgatgtccttgggcacatgtcatcagtacctcctgaggttatgtcacaggtgcatg

SEQ ID NO: 833222 - DNA, 120 bp, Artificial Sequence
  ENSG00000235726_24 (sequence is synthesized)
tccttaactttggcaaaataaacttcctaaattaactgagatctgtctcagatattcaggcttcagagctatgccagctaaccccttatgctgaaaacgaggacttagaaggaaagggca

SEQ ID NO: 833223 - DNA, 89 bp, Artificial Sequence
  ENSG00000235726_25 (sequence is synthesized)
agagagccagaagtctttccttattcatcaataagccaaaagtagaggttgttagtagaaaatgtgtgcaccaagaagtgaaataaaga

SEQ ID NO: 833224 - DNA, 120 bp, Artificial Sequence
  ENSG00000235726_26 (sequence is synthesized)
agtgcaataccataaaccttgaataacaccatgggacccatatgaagggccactaggaatgctggaagtgctcccaagaagcagagatcagtcatgactttacaagaagaagttgaattg

SEQ ID NO: 833225 - DNA, 120 bp, Artificial Sequence
  ENSG00000235726_27 (sequence is synthesized)
atcttggctcttccccccttaaatttttatttatgtatttatttactttttcatagaaccaccaagtccaatacaatacattttggcaggagttttcattgagattacattgaatttata

SEQ ID NO: 833226 - DNA, 120 bp, Artificial Sequence
  ENSG00000235726_28 (sequence is synthesized)
aactaaacgcgtgaccgtcacgatgacatctctcagcttgctctcatgtggcaccactgggtcatccttcccatcccatgacagttgttagactcaagttcaggtttagttggtctatcc

SEQ ID NO: 833227 - DNA, 120 bp, Artificial Sequence
  ENSG00000235726_29 (sequence is synthesized)
tagccccccgtgttgtttaccattccacagacaatgcatttcttggctactgggaaaaaacatcctgcagtgtgaaccaatctccccctctccctgcctagccctgggtctcagtttgca

SEQ ID NO: 833228 - DNA, 120 bp, Artificial Sequence
  ENSG00000235726_30 (sequence is synthesized)
gaggctctgccttgggctcattctcacagagcagcagcagccgcagataaaagtggggcaaggttcacctgagcacaaagcagagcccggactggctaataaattatgtagagattctat

SEQ ID NO: 833229 - DNA, 120 bp, Artificial Sequence
  ENSG00000232110_0 (sequence is synthesized)
cagctcaggcagatttctaagcagcaaatcagcctttgccagaacactgcaggacaccagtgcagcgcccagcctgcgaccatgaggcattttaaaatctgtggcgcttccagactcata

SEQ ID NO: 833230 - DNA, 120 bp, Artificial Sequence
  ENSG00000232110_1 (sequence is synthesized)
tcaacattccctgatggaagcctttagcaatcctaaccaggaagtggccagagcctggagccagagacgaacgtccctcataggaggggttgctggaggaggaggggcaaatctatttca

SEQ ID NO: 833231 - DNA, 120 bp, Artificial Sequence
  ENSG00000232110_2 (sequence is synthesized)
tgtccttgcaggcacattttcatcagttaatgatgcaaaccaggctgaaacgttcttaacaagcatgtgtgtttctgtttttcatttgaaagtcaggagcatgaggctatattcatcata

SEQ ID NO: 833232 - DNA, 120 bp, Artificial Sequence
  ENSG00000232110_3 (sequence is synthesized)
gaggcagggtttctctgtgtcagagctcagcattggcagctctagcaaaggacaggctgcatttagctggttcttttctaaggagccacagtcaggcactaaaccagcatctacacctct

SEQ ID NO: 833233 - DNA, 120 bp, Artificial Sequence
  ENSG00000232110_4 (sequence is synthesized)
gaggcccctaaaagcctccagtgaagctgggcttgatcagacctcaaaaagatctccctttgcattttgctcttagttctcagtgatctttaaaaaataataataataaaaagattagaa

SEQ ID NO: 833234 - DNA, 120 bp, Artificial Sequence
  ENSG00000232110_5 (sequence is synthesized)
tcatcagcagcacagtgcttcctttcctctgaatctgccatcagctcaggcagatttctaagcagcaaatcagcctttgccagaacactgcaggacaccagtgcagcgcccagcctgcga

SEQ ID NO: 833235 - DNA, 71 bp, Artificial Sequence
  ENSG00000232110_6 (sequence is synthesized)
cctacgacctctgctctaggggatggtagagtcacaggatggaagaactctgtgtccttgaatcattgcat

SEQ ID NO: 833236 - DNA, 120 bp, Artificial Sequence
  ENSG00000232110_7 (sequence is synthesized)
tcacaggatggaagaactctgtgtccttgaatcattgcatggaagagaactggaagttgcccaggaacaccagccttggacagttatgtgaacaagaaataaacttcttttacagtgtca

SEQ ID NO: 833237 - DNA, 88 bp, Artificial Sequence
  ENSG00000232110_8 (sequence is synthesized)
tctcttttctctccacttccctgggggacaaacaccccaccccttccccatgttcctggggtgcaagaaccccccaccccttctctct

SEQ ID NO: 833238 - DNA, 67 bp, Artificial Sequence
  ENSG00000232110_9 (sequence is synthesized)
cgacttaaaacccaaatgccttattttcttctgcaatgccacttaaccccaatacaaactcgacagt

SEQ ID NO: 833239 - DNA, 120 bp, Artificial Sequence
  ENSG00000232110_10 (sequence is synthesized)
cttctgcaatgccacttaaccccaatacaaactcgacagtggttccaaagagccataaaatggcacttttgatttctccatcctacaacacctagataatttttgtcgaaaaatgggcaa

SEQ ID NO: 833240 - DNA, 79 bp, Artificial Sequence
  ENSG00000232110_11 (sequence is synthesized)
cttctttccctcctgcctgtcccctcagttccaaccccaagtgtcactaagtctttccaatcttccttttctaagccag

SEQ ID NO: 833241 - DNA, 73 bp, Artificial Sequence
  ENSG00000232110_12 (sequence is synthesized)
tagcctccgtccagcttccagtttcgttctgcgactagccctcccggacctgcccagcaatttcctcttaaaa

SEQ ID NO: 833242 - DNA, 60 bp, Artificial Sequence
  ENSG00000232110_13 (sequence is synthesized)
gccgcagcagtcaagcattcctagaggaccttctccatcaggatcttgcttcaagtgcca

SEQ ID NO: 833243 - DNA, 66 bp, Artificial Sequence
  ENSG00000232110_14 (sequence is synthesized)
catctgtgtgggaccccactgaaaatcagactgtccagttgacttcttcccagatcttctgggctt

SEQ ID NO: 833244 - DNA, 120 bp, Artificial Sequence
  ENSG00000232110_15 (sequence is synthesized)
aaggctctctgattgacttcttcccagatcttctgggcttagtggctgaagactgacactgcccgatcacctgagaagcctcctggaccatcacagatgctttaggctctaggggatggt

SEQ ID NO: 833245 - DNA, 120 bp, Artificial Sequence
  ENSG00000245849_0 (sequence is synthesized)
gcttccgccctgcgcgctaacccaagacgggagctcgagagcttgatcctgcgcgagtttacagactgccctcttccctttttgcatcgaagaccacgactcccaagaggtaatgcgtcg

SEQ ID NO: 833246 - DNA, 120 bp, Artificial Sequence
  ENSG00000245849_1 (sequence is synthesized)
gcccgggactacatctcccggcatgcatcgccggcgggtccgcgagttctcaccatcgcagctggactattagcgggggccctagcgctcttgtggtttgtttcggcagtatctgaatgt

SEQ ID NO: 833247 - DNA, 120 bp, Artificial Sequence
  ENSG00000245849_2 (sequence is synthesized)
cagcttttggcacttctggtcgctctgagcctcctactcgcattcctggagcaaggtgctttccaggcctcatggaggtggaggagctgaggaagctcgagaagatggatagaagtggga

SEQ ID NO: 833248 - DNA, 120 bp, Artificial Sequence
  ENSG00000245849_3 (sequence is synthesized)
aatggagctagcgtacgggagagggaaatggctggaatattcgtcaatctgtggtgctttactggagatttgcaggagttcagaggaagggggcattgaatttcataacctaaaccgtat

SEQ ID NO: 833249 - DNA, 120 bp, Artificial Sequence
  ENSG00000245849_4 (sequence is synthesized)
ggcaggcggatcacctgaggtcaggggttggagataaacctggccaacgtggtgaaacctcgtctttagtaaaaaatacaaaaattagccaggttttgtggcacatgcctgtaatcctag

SEQ ID NO: 833250 - DNA, 85 bp, Artificial Sequence
  ENSG00000245849_5 (sequence is synthesized)
caacgtggtgaaacctcgtctttagtaaaaaatacaaaaattagccaggttttgtggcacatgcctgtaatcctagctactcgaa

SEQ ID NO: 833251 - DNA, 120 bp, Artificial Sequence
  ENSG00000245849_6 (sequence is synthesized)
tgggcgacagagcgagactgtgtcaaaacaacaccacaagctagctgagtagggattcttgggcgaagtggaagacattataagcaaatagggtagtatgggcatggaaacgaactacat

SEQ ID NO: 833252 - DNA, 120 bp, Artificial Sequence
  ENSG00000245849_7 (sequence is synthesized)
gattaaagattagtattatctggcgagggaggaaaagtgccagagcaagtgccgaaactggaaggttacatttagttcaggatatgaagatcatataaggcctgcacggtggctcacacc

SEQ ID NO: 833253 - DNA, 120 bp, Artificial Sequence
  ENSG00000245849_8 (sequence is synthesized)
accttgggaatcctccccttcaatacatttaattaatgaagtgttacagtgaattctaaaaagatctaagagatttattttcactttaattgctgttatcatgggcctaattacagtcac

SEQ ID NO: 833254 - DNA, 120 bp, Artificial Sequence
  ENSG00000245849_9 (sequence is synthesized)
tgcagtggccaccactgccggaatggcattacaccagtccattcaagcggctcattttgttaatggttggcaagccaattccatccaaatgtggaattctcaacaaggcatcgatcgaaa

SEQ ID NO: 833255 - DNA, 120 bp, Artificial Sequence
  ENSG00000245849_10 (sequence is synthesized)
attggcaaatcaaattagtgatttaagacagtctgttatttggcttggagatcaggtagtgagtctcgagcatcacatgcaaatgcagtacgattggaacacttgagatttctgcatcac

SEQ ID NO: 833256 - DNA, 120 bp, Artificial Sequence
  ENSG00000245849_11 (sequence is synthesized)
cccgtattcctataacgagactgatcattcatgggaaatggtcaaaagacatcttctgggtagggaagataatttatcactggacataactaaattaaagagacaaatttttgaagcctc

SEQ ID NO: 833257 - DNA, 76 bp, Artificial Sequence
  ENSG00000245849_12 (sequence is synthesized)
aaatttttgaagcctctcaagctcaaaaatctttctggattaaaccccaggacttggattaagtctattgggggct

SEQ ID NO: 833258 - DNA, 120 bp, Artificial Sequence
  ENSG00000245849_13 (sequence is synthesized)
atcggcttgtttttagtttgccagactagtcaaagaatcctgcgtcaaaatcaagagaacgaacaagccttcattgccatggcacatttattataaaaagaaagggagagatgttgcggg

SEQ ID NO: 833259 - DNA, 85 bp, Artificial Sequence
  ENSG00000245849_14 (sequence is synthesized)
gcttcagggcagctgtcttttatggtcgcagctgtggggatgaaataagccccagtttctcagagtgctcccaggcttattagga

SEQ ID NO: 833260 - DNA, 72 bp, Artificial Sequence
  ENSG00000245849_15 (sequence is synthesized)
gtgatatcttattaccttgtgaagcatgggatctctgtgacccatttgctggttttatggctcagggggcat

SEQ ID NO: 833261 - DNA, 120 bp, Artificial Sequence
  ENSG00000223669_0 (sequence is synthesized)
ataactatgaatggggctacctgggagccccacatccctggctgtgggaacaggctgaccttccagcacagtgtcctcctggtgccaggcactgcccctctgccaaggaccctgcaggcc

SEQ ID NO: 833262 - DNA, 120 bp, Artificial Sequence
  ENSG00000223669_1 (sequence is synthesized)
tgatcttcttccgaaagaacgtctacacactgccgatgacatttacttcactcagaatttgcaagtccaatgccgacatgaatatgcacggcactgctgcttggatacgtggcctcaggg

SEQ ID NO: 833263 - DNA, 120 bp, Artificial Sequence
  ENSG00000223669_2 (sequence is synthesized)
ccacgcctgcgggtgatgtgacaagtccacagactcccgtggcggcttctcaccgagaaacattccagcacctggaggctgccagctgggaaccccctttaggcgacgtcagcgccgttg

SEQ ID NO: 833264 - DNA, 120 bp, Artificial Sequence
  ENSG00000223669_3 (sequence is synthesized)
ccctgtgcccgctgtggtcctccaggcccaggcagggagagcccgaggaaaagcaagcggagggtcagatggggaaccagcgtgcctggagccacgcagggacacggacttagaattcta

SEQ ID NO: 833265 - DNA, 120 bp, Artificial Sequence
  ENSG00000223669_4 (sequence is synthesized)
ccttgcatttaaggaacagatgatagatactctctacagtctcttccaggaaatagaagcagaggaacactttataactcactctacgaggccggcattaccccaataacaaaaccgagg

SEQ ID NO: 833266 - DNA, 120 bp, Artificial Sequence
  ENSG00000223669_5 (sequence is synthesized)
atgttacaagaaaggaaaacgcagaccaggatgtctcatgaacacagatgcaaaaaccctcaacaaaacagcagcaaatccagcatcacatactaagaattatacaccacaggatttccc

SEQ ID NO: 833267 - DNA, 120 bp, Artificial Sequence
  ENSG00000223665_0 (sequence is synthesized)
aaactcatttttaatggcttgtgcggcatcagttgtgcccctgagctgtaatgaagggctctgcaagtcaccacaagcgagtcagaaatgaatctcacggagaggaaaatgctggaacgt

SEQ ID NO: 833268 - DNA, 120 bp, Artificial Sequence
  ENSG00000223665_1 (sequence is synthesized)
taataggttttaatccaagcctctggaatggatcattctactctcaacctccatgagatgcactttttaagctcccacatatgagtgaaaaaagcgattttgtctttctctgcctagctt

SEQ ID NO: 833269 - DNA, 120 bp, Artificial Sequence
  ENSG00000223665_2 (sequence is synthesized)
ggcttaagctttcttctttccagaactggaaactcagttcttcccagcattagctttgcttctgtgctaagcataaatcattggaatttcataagctttctttctcttagcactcataca

SEQ ID NO: 833270 - DNA, 120 bp, Artificial Sequence
  ENSG00000223665_3 (sequence is synthesized)
ctttgtaaatcaatgatttgcaaagtaaaaagggctcccttcagtaaatatttgcaaggcaggtctgtcttcccctgctttccgagcagaggcaaagactccctctaatcctggcgttca

SEQ ID NO: 833271 - DNA, 120 bp, Artificial Sequence
  ENSG00000223662_0 (sequence is synthesized)
gcagtggtcccagggtccaacttgtgctatttggaaatcaagacatgtccagagagggttttcaggaaaaggcttccagtgatgccacatccaaagcttaattgctccactgaaacactg

SEQ ID NO: 833272 - DNA, 120 bp, Artificial Sequence
  ENSG00000223662_1 (sequence is synthesized)
gcaacaaaaatcgtcttctcttctccctttgtgaaaaaggctttcacttaatgtggagaaaggtattatataccagggaaatggaactttgtataaatgattttcccccaagaggaacta

SEQ ID NO: 833273 - DNA, 120 bp, Artificial Sequence
  ENSG00000223662_2 (sequence is synthesized)
aagcatttggaaggtatctgaattcagatgaggacctaatttattactgaggacctaatctacgggaggtgcaaagaagaatgaaatattgtgtctgcctgtgatgcacattgcttaata

SEQ ID NO: 833274 - DNA, 120 bp, Artificial Sequence
  ENSG00000223662_3 (sequence is synthesized)
tgaatactaagaaaaatagtcatctgtttctgttcctgtccccctcactgcaagggcacttcaggactgcagcaaagggcatttgatggagtctataacagaaaagaaagtcctcctctg

SEQ ID NO: 833275 - DNA, 120 bp, Artificial Sequence
  ENSG00000223662_4 (sequence is synthesized)
gaatttctgactatatttcattggccacaactggattccatggccacccctaactactggggaggctgagaattcaaatgctgaaaattgcaatctccatagtgaaagacacgaagaaag

SEQ ID NO: 833276 - DNA, 120 bp, Artificial Sequence
  ENSG00000223662_5 (sequence is synthesized)
aaattgattgaaatgggttaattaattcaattagcaacactttttctcagcaaaggagctgagaaagaaaatgttttggttcagtcctgggtaggggtgcttgacagtgcttaatatcac

SEQ ID NO: 833277 - DNA, 120 bp, Artificial Sequence
  ENSG00000223662_6 (sequence is synthesized)
cagcactgaaggtaataaatattatctctcttttctatcatgaatatgaatgatactctgaaggctgaatgcaacctcagaatttaagtgagaaatgaggcatgcaacacttttgaaaat

SEQ ID NO: 833278 - DNA, 67 bp, Artificial Sequence
  ENSG00000223660_0 (sequence is synthesized)
gctaatttttaaatttttagtagagacggggttttgaactcctggtctccaacgctcgtgttcttca

SEQ ID NO: 833279 - DNA, 120 bp, Artificial Sequence
  ENSG00000223660_1 (sequence is synthesized)
agtcccacccgcccctttctcttccacggcatccacaccatccggatgcctggattcaaatgccacgtcaccacttgccagctgcagtgccttcgacaagtttctcaatcactctgtgcc

SEQ ID NO: 833280 - DNA, 120 bp, Artificial Sequence
  ENSG00000223660_2 (sequence is synthesized)
tcagcgtcctcctctgtaaaacggcgaatgatggtagcgcctacctcataagcttgtgaggattaagtgagagtctatccagtgttgaggagagtggcataaataaagcgcctagtggta

SEQ ID NO: 833281 - DNA, 75 bp, Artificial Sequence
  ENSG00000226846_0 (sequence is synthesized)
ctcgtcgccattttgtttttggtggtttttgtctggcttctttaccgcaacctgttttatcagcaaagtctttat

SEQ ID NO: 833282 - DNA, 120 bp, Artificial Sequence
  ENSG00000226846_1 (sequence is synthesized)
atgccttaacaactgtctggaatgcagcccggtatgcatggaattctatctctatccctccaagaactttgtttaaataattttgcttaagaggaatgaaatgtccttttctgtcaagct

SEQ ID NO: 833283 - DNA, 120 bp, Artificial Sequence
  ENSG00000226846_2 (sequence is synthesized)
atatgcagatattccagcagaggatcctgataccaaaacggattgcagagccacaggttgaaaatagcagagactccatggttccctcaatgattgcatggaacaataacacatgatccc

SEQ ID NO: 833284 - DNA, 120 bp, Artificial Sequence
  ENSG00000226846_3 (sequence is synthesized)
tgtgatgatctgtggagtggctgcagcacctgtgtttcagcctgaagaatgggcacagatatttcatgattctgaagaagaattggaggtgagacttgagaaaatggagaaaaagatatg

SEQ ID NO: 833285 - DNA, 120 bp, Artificial Sequence
  ENSG00000226846_4 (sequence is synthesized)
ctttggattttcttgaagactagaagctttcttaaccatccaccaccttgttgactggttattattctctctaccttctgtgaaacaaactgatggatactaatggcacaattacactta

SEQ ID NO: 833286 - DNA, 120 bp, Artificial Sequence
  ENSG00000226846_5 (sequence is synthesized)
tcagttgcatagtttatgcacatagttctgcttccagtgtttagtaatgagttaaacattttggctatatttgtctctgaagctataatttcaattaatcattatgtatagcaataataa

SEQ ID NO: 833287 - DNA, 120 bp, Artificial Sequence
  ENSG00000226846_6 (sequence is synthesized)
caagtaaaacaaaaagaagaattttttgtttctatggtaattatgttgggtgctttggatcctcccaataaagttgacttcctaaaataattacacttgaattaggtatagagaagctaa

SEQ ID NO: 833288 - DNA, 120 bp, Artificial Sequence
  ENSG00000226846_7 (sequence is synthesized)
ttgtaacaaattgaaagttactgtaaatcttctaatcgtagttctctgcaagtgtacttaagttattgctccacttgaaataaatgaaaactggaaatctgaggtgatgaattatgggtc

SEQ ID NO: 833289 - DNA, 120 bp, Artificial Sequence
  ENSG00000226846_8 (sequence is synthesized)
ccttttatgtaagaaagatgacaaggaaatctaatctgctgagttatactaaaataaaataccttggcctgggatcaaatataggtgaaagaattaacatttatgttttttaattaagat

SEQ ID NO: 833290 - DNA, 120 bp, Artificial Sequence
  ENSG00000226846_9 (sequence is synthesized)
aaaatgtacaagttttatgtacatattttatgatttcctgatataacaaaaagtgttgataaaagcacccaatactgattctaatgacatttgattagcattaaagagttgctattatta

SEQ ID NO: 833291 - DNA, 120 bp, Artificial Sequence
  ENSG00000226846_10 (sequence is synthesized)
ccctctttggcagactgaatggatgctgccataccatcacactggaaatgaggaatataacaccatgaggaagaatggttgtttcacacactgatatttcatgattctgaagaagaattg

SEQ ID NO: 833292 - DNA, 120 bp, Artificial Sequence
  ENSG00000226846_11 (sequence is synthesized)
agttcgggggcgggcaggagagtaagcaacacagcatgagtttcctgtctgttgcagtgctcttgcagcggctccaaatcactgctcacgtgtgtcagggtttatatctgtggagtggct

SEQ ID NO: 833293 - DNA, 120 bp, Artificial Sequence
  ENSG00000226846_12 (sequence is synthesized)
acatctatgcatcccaagtgcatcaagatggaccaggttgtcagcatgttcagagtaaacatgaagatttatgatgtgcatctaatgcctggtttggggtctgcaccatgttggagtcca

SEQ ID NO: 833294 - DNA, 120 bp, Artificial Sequence
  ENSG00000251281_0 (sequence is synthesized)
ttagcgcctcttcaaagtctctgtggcactgcatttggaagcttctaaaggctgcctgcattccttggctcatggcctgcatcattccaactttgcttctgtcatcacatctcttctaac

SEQ ID NO: 833295 - DNA, 120 bp, Artificial Sequence
  ENSG00000251281_1 (sequence is synthesized)
ggtcattgttgagagacaaaatgagatcatgtctgggaaaatacttctaaattatcaactccctttctatggaagaggatgaccaaagaaggatgcactccttgtctggaattatgccag

SEQ ID NO: 833296 - DNA, 120 bp, Artificial Sequence
  ENSG00000251281_2 (sequence is synthesized)
aggtcttaaaatgctcagaaatgaaatcagccttcttccctgtcctaagaggctcaggttttcggcaagtaactcataaaattaatgctccactgaaaataaaatctgatttgagtagta

SEQ ID NO: 833297 - DNA, 120 bp, Artificial Sequence
  ENSG00000251283_0 (sequence is synthesized)
ctgagattaatggccctgggttgcagccaaaagcatctcagagggtatgatgcatttcctgactgtggtcggctttccatgggtgaaacagaaaagtcttcaaatatcctcaccaactgc

SEQ ID NO: 833298 - DNA, 120 bp, Artificial Sequence
  ENSG00000251283_1 (sequence is synthesized)
ggcttcaggacatagaaaacaacattagttatgctggaaagtatcaccaaagaagtgcagctcagacaagctgtattctattttgttcttttgaacataaacacctataaagggaccaaa

SEQ ID NO: 833299 - DNA, 120 bp, Artificial Sequence
  ENSG00000251283_2 (sequence is synthesized)
agaaatctaaatgatcaacgggagcaatcctgaataggcaacaacaatcattattgccaagtgattgtcttatcatttgtcatcagtttttttttcagagtaattacatttaaatgtaaa

SEQ ID NO: 833300 - DNA, 120 bp, Artificial Sequence
  ENSG00000251283_3 (sequence is synthesized)
gcagttatggcatgggctgatctacccagtcagcaaggccagattgcagagaaactcagagtctaggaaaatgaatgtctaggaacattcctcaaatagtcctaccagaagacacaaaga

SEQ ID NO: 833301 - DNA, 120 bp, Artificial Sequence
  ENSG00000251283_4 (sequence is synthesized)
tgatgcatccggatgaagaatatatcactgagattaatggccctgggttgcagccaaaagcatctcagaggtagaacactgttgcagatggtgatgttaccatttgaaaggtatgatgca

SEQ ID NO: 833302 - DNA, 120 bp, Artificial Sequence
  ENSG00000266101_0 (sequence is synthesized)
agtctgggactggcagaatccctgattttctctgacctgcccccacaagtagtctgcctccctgtccccaaagctggttagcaggaacgaggggggcattagtggagccagaagctcagc

SEQ ID NO: 833303 - DNA, 120 bp, Artificial Sequence
  ENSG00000266101_1 (sequence is synthesized)
ccctccctctcctgaggtgttggggcacagtgatgccacaagagcagaaaaacagtcatgtgtatttaagacattgcaccagtgggtctggatctcacccactgagcaacattgagcttc

SEQ ID NO: 833304 - DNA, 120 bp, Artificial Sequence
  ENSG00000266101_2 (sequence is synthesized)
tcctggggcaccacactgccccgctgtgaggactccagcccgccccagaagccgaggtttctcctgagcgaggtgagcacctgtacctggaggttggagacaggggcagggctggcagcc

SEQ ID NO: 833305 - DNA, 120 bp, Artificial Sequence
  ENSG00000266101_3 (sequence is synthesized)
agggctgcggtagccatggtgcggttcagcagcggattgggtggcgtgctgctgggcgggtgtgtggccttccaataggcttccaagtactccgccagatgctcgcaggcatcctccaat

SEQ ID NO: 833306 - DNA, 120 bp, Artificial Sequence
  ENSG00000266100_0 (sequence is synthesized)
actaaatgagcaccgtgaaaatcagcaataattaccactcaataggtgagtgaagctgaactgatctgaggacacaaaaaacttgttcccaggagacagctaaagagcagtgttgctgtt

SEQ ID NO: 833307 - DNA, 120 bp, Artificial Sequence
  ENSG00000266100_1 (sequence is synthesized)
tttcttctgtgaaaggaggaaattctatgagatggcccctaagatccatgcataaagactctctgcctggaatgctaacatggactccagaggcagctgggacgatgctctggaagcatt

SEQ ID NO: 833308 - DNA, 120 bp, Artificial Sequence
  ENSG00000266100_2 (sequence is synthesized)
atgtcctactcctctggggatataaatatacacacccgcaagccacacatatcaagaacaaagcaggaaacggcacttcagatgatccttaaattatctggtcaaatgcaaggagggagg

SEQ ID NO: 833309 - DNA, 120 bp, Artificial Sequence
  ENSG00000266100_3 (sequence is synthesized)
ggaaagggaagagaagaaacccagctctccaaactcccccagaacaaatgcccttgaatttctcttcctgctcccactcaaacgctccaagtgttagtataaataaacaccctcaaatgc

SEQ ID NO: 833310 - DNA, 120 bp, Artificial Sequence
  ENSG00000266106_0 (sequence is synthesized)
gtggttccccaatgcccccacccttccgtggccccagccagtggggctcagctctggccaccctgacatgaaggggaaggtccagcagccaaaccccaggggctctgaaggaatcggcct

SEQ ID NO: 833311 - DNA, 120 bp, Artificial Sequence
  ENSG00000266106_1 (sequence is synthesized)
gtgggtaggagatgccgggtacctgcttttgtttctttttaaatttcccccaggtggttctgttgtgctaccaggatgccaaatcccccaggccccttaacctttgtaggagcacacgct

SEQ ID NO: 833312 - DNA, 120 bp, Artificial Sequence
  ENSG00000266106_2 (sequence is synthesized)
aacacacctggccacacactgcacacgtgctcacagcaccccacactcacacccacgccgggacctggctccctgaggacctggatgcacaaggagggacatgcgcgtgaccttcaagct

SEQ ID NO: 833313 - DNA, 120 bp, Artificial Sequence
  ENSG00000266106_3 (sequence is synthesized)
gagggtgggatcgcactgctcgaacatgaagtcccagatatccagggttccgtccatcctggtggtaaagaaaacggtcggcctcacggggctccaggcagcatcagtgaggaggaggac

SEQ ID NO: 833314 - DNA, 120 bp, Artificial Sequence
  ENSG00000266106_4 (sequence is synthesized)
aagggagacccaggttctacgacacaggtccaccaagtccctctaggaaccagccctgcgaaaggcctatgggtgctgtgctcgacaccctgctcctttcacacagccctggcagcctgc

SEQ ID NO: 833315 - DNA, 120 bp, Artificial Sequence
  ENSG00000278095_0 (sequence is synthesized)
tgtccccaagggaaatgttccagggaatgtcctcagcaccacagagaactgaaatcctggagaaaactggcctaaggagctcagaaaggccaataaaactggggcatttggggaagaaga

SEQ ID NO: 833316 - DNA, 120 bp, Artificial Sequence
  ENSG00000278095_1 (sequence is synthesized)
ggaaatggaatggcattattggatgatttaaatgtggtgtgttgctatggttcccagccttcttgaaagtcacagacatggtgtatgggctgaattgtgtcttcccaaaactcacatgtt

SEQ ID NO: 833317 - DNA, 120 bp, Artificial Sequence
  ENSG00000278095_2 (sequence is synthesized)
cctttgaaggggtaattgagttaaaatgaggtcataaggtggtccctaatccaaggcgattggtgtccttataaagagagaagataccatagaaggaagaccctgcgaagataaagggaa

SEQ ID NO: 833318 - DNA, 120 bp, Artificial Sequence
  ENSG00000278095_3 (sequence is synthesized)
gagacaaccatctgcaagcagaggagagaggcttcaaaagaaaccaactctgccagcaccttgatcttggacttctaacatctagaaccatgagaaaataaatttctgctgtttaagcca

SEQ ID NO: 833319 - DNA, 120 bp, Artificial Sequence
  ENSG00000261650_0 (sequence is synthesized)
ctatttgaggacaccaggccttggctgtttctgcttcttgtacctcctgagtcaggtggcggtgggggagggcagacgccacacacacctgggtccactggccgcacggctcctggaaat

SEQ ID NO: 833320 - DNA, 120 bp, Artificial Sequence
  ENSG00000261650_1 (sequence is synthesized)
gctagtgtgactttcctaagggttctttcaaaggacacttttagacctgccttttgtcccaaggattctagttgcttcatctttagtaccacagactggtggctaaacaacgaacattta

SEQ ID NO: 833321 - DNA, 120 bp, Artificial Sequence
  ENSG00000261650_2 (sequence is synthesized)
ctccccttggccaagctcatgaactccggagggactagagtatacaatctgcacagagaagttcttgtctggctccgagtgtccgtatcgcgtggctgtatcatttcagaaagcgtattc

SEQ ID NO: 833322 - DNA, 120 bp, Artificial Sequence
  ENSG00000261650_3 (sequence is synthesized)
aaggagcgatattccgggaggccttttccacgcctgggagagacgagtagagactccgtgcaaccggctgccaatgaggacccagggccgtgccctccaaggggcatcttgcaccctctt

SEQ ID NO: 833323 - DNA, 120 bp, Artificial Sequence
  ENSG00000261654_0 (sequence is synthesized)
aaaatgtttaaattcacttgaaactaggcgtatgcaaattaaaaccactcagataccatttatcactttccagactccatgaaatgtaaaaatatggcaatacattctgttgggaaggct

SEQ ID NO: 833324 - DNA, 120 bp, Artificial Sequence
  ENSG00000261654_1 (sequence is synthesized)
gtgggaaaataggtacattcatacattgctgatgggaatgcaaaagtttattagttgcaatattgttcttagttgcaaagtattggaagcaacctaaattcccatccacaggagagtgat

SEQ ID NO: 833325 - DNA, 120 bp, Artificial Sequence
  ENSG00000261654_2 (sequence is synthesized)
ttaataaactatagcatgtcatgcagtggaatattaaataggtataagaaaagaatgaggaagagctctatgaactaatatggagtgatttccaagatggactgtcaaatgaaaaaagca

SEQ ID NO: 833326 - DNA, 120 bp, Artificial Sequence
  ENSG00000261654_3 (sequence is synthesized)
aagcacaaaagagtatccatagcatgctaccttcatgtaggaaagaaaggatatagaaagtaaatagttatctgctcatttgttcaaaagaaatacaggaaagataaaatactagtaagg

SEQ ID NO: 833327 - DNA, 120 bp, Artificial Sequence
  ENSG00000261654_4 (sequence is synthesized)
ctgattacctagagggaaaggaataaagaaggaaatgaggttagcaaggatgaagtacagtaacatttctttgattatatctttctgtgtagctctgactcttggaatcataattatgtc

SEQ ID NO: 833328 - DNA, 120 bp, Artificial Sequence
  ENSG00000261654_5 (sequence is synthesized)
tcacatacccttcacataatcccaaataaataaatgataaaaccaaccaagaagtgtgggaaaccctaaatggaatacaaatactaacaaatgaaagtaaatgtattaagaatgaataac

SEQ ID NO: 833329 - DNA, 120 bp, Artificial Sequence
  ENSG00000261654_6 (sequence is synthesized)
aaccacagttaagcaagtgaggaagaaaataactaggtaactctaagtatcttttctgggcaataaaaggctaatgacaaaaagaatggtactaaagtgctgtaatctagttagtaaaag

SEQ ID NO: 833330 - DNA, 120 bp, Artificial Sequence
  ENSG00000261654_7 (sequence is synthesized)
ggtttcttgcaggggtatgaattagtgctactgaagctacctttacatgtacattagaattgaacaactaagtacatatattgtagataataagagccaggtttctcactgttggagaaa

SEQ ID NO: 833331 - DNA, 120 bp, Artificial Sequence
  ENSG00000261654_8 (sequence is synthesized)
gacttattaaaagaaaggaggtaggccaaaatacaccctgtaatgttggattggagtaagaggtgtcagtataaattaatggttcttaatataaatgtagacagattaagaaatatacat

SEQ ID NO: 833332 - DNA, 120 bp, Artificial Sequence
  ENSG00000261654_9 (sequence is synthesized)
gtgactatatctgtggcatagtatatacatttatacatttcctaactcttaaagggcctagaagcagtgaaacttcagagtaatgagcacatttaacaccagatcttgttttttatcttc

SEQ ID NO: 833333 - DNA, 120 bp, Artificial Sequence
  ENSG00000261654_10 (sequence is synthesized)
tttttttactttaaactttttatttttaatttttgtgagtacatagtaggtgtatatattcatggaatacatgagatattttaatataggcatgtaatgagaaataatcacatcatgaag

SEQ ID NO: 833334 - DNA, 120 bp, Artificial Sequence
  ENSG00000261654_11 (sequence is synthesized)
aatagggtacccaccttttcaaacatttatcctttgtgttacaagaaatccagttacactcttctagttattttaaaatgttcaatcaacttattgttgactagagtcatgctattgtgc

SEQ ID NO: 833335 - DNA, 120 bp, Artificial Sequence
  ENSG00000261654_12 (sequence is synthesized)
agtaggtcttattcattctttctatttttatgtatccattaacaatccctacctccccctccagtgcccaagtacccttcccagcctctgataactatcctactatctccatgagttcaa

SEQ ID NO: 833336 - DNA, 120 bp, Artificial Sequence
  ENSG00000261654_13 (sequence is synthesized)
aatgacagggtgtcattcttttaattactgaatagtactccattgtgtaaatgcactacattttatttatccattcatttgttgatagacacttaggttgcttccaaatcttgcctattg

SEQ ID NO: 833337 - DNA, 120 bp, Artificial Sequence
  ENSG00000261654_14 (sequence is synthesized)
tgaacattgtggcaacaaacatggaagttcagatatctcttcaatatactgatttctttttttggagggtacatacccagcagtgggatttctggatatatggtagctctatttttattt

SEQ ID NO: 833338 - DNA, 120 bp, Artificial Sequence
  ENSG00000261654_15 (sequence is synthesized)
ttttcaggaacctccaaactgttctcaatagtagttgtgctaatgtacattcccaccaacagtgtaggagagttccctttctccacatcctagccagcatttgttattgcctgtcttttg

SEQ ID NO: 833339 - DNA, 120 bp, Artificial Sequence
  ENSG00000261654_16 (sequence is synthesized)
gataaaaaccattttaactggggagaaatgatatctcattgtagttttgactttcattctctgatgatcagtgatgttgaacacattttcatatgcctgcttgctatttgtatgtcttct

SEQ ID NO: 833340 - DNA, 120 bp, Artificial Sequence
  ENSG00000261654_17 (sequence is synthesized)
tttgagaaatgtgtattcaaatcttttgctcattttttgatcagatttttttttcctgttgagttgttagagctccttacgtattctggtttttaatcccttgtcagatgggtagtttgc

SEQ ID NO: 833341 - DNA, 90 bp, Artificial Sequence
  ENSG00000261654_18 (sequence is synthesized)
cttaacttgatgtgatcccatttgtccgtttttgctttggttgtctgtgtttgtggggtactactcaagaaatttttgctcagacaaatg

SEQ ID NO: 833342 - DNA, 120 bp, Artificial Sequence
  ENSG00000261654_19 (sequence is synthesized)
ttgtggggtactactcaagaaatttttgctcagacaaatgtcctggagattttcatcaatgttttcttatagtagtttcatagtttgaggtcttagatttaatcctttagtctactttgt

SEQ ID NO: 833343 - DNA, 120 bp, Artificial Sequence
  ENSG00000261654_20 (sequence is synthesized)
atatgacttttgtatatggcgagaaataggagtctagtttcattcttctgcatgtggatatctagtttcccagaactatttactgaagagaatgtcttttccccagtatattttcttggc

SEQ ID NO: 833344 - DNA, 120 bp, Artificial Sequence
  ENSG00000261654_21 (sequence is synthesized)
acctttgtcaaaaatgagttcactgtaaatgtgtggattcgtttccaggttctctgttctgttccatgggtctgtctggttttatgccaatgccatgctgttttggttattatagttctg

SEQ ID NO: 833345 - DNA, 120 bp, Artificial Sequence
  ENSG00000261654_22 (sequence is synthesized)
ttcctccagttttgttctttttgcttaagatagctttggctcttcttggtcttttgtggttccatataagtttttggatagtttttttttctatttctgtgatgaatgtcattggtactt

SEQ ID NO: 833346 - DNA, 88 bp, Artificial Sequence
  ENSG00000261654_23 (sequence is synthesized)
aaagtgctaggattacaggcgtgagccaggacatttttaactatattgattcttttgctccatgaacgtggaatttttattttggtgt

SEQ ID NO: 833347 - DNA, 120 bp, Artificial Sequence
  ENSG00000261654_24 (sequence is synthesized)
atagaggtctttcacttctttgattaattcctagatattaattttatttgtagctatcgtaaatgggattacttttttcatattgttcactgtttgcctatagaaatgctactgatgttg

SEQ ID NO: 833348 - DNA, 120 bp, Artificial Sequence
  ENSG00000261654_25 (sequence is synthesized)
attttttatgttgtttttgtatcctggaactttactgattttttaaattagttctaatagttttttggtggagtctttaagctttttgactataagatcatatcatctgcaaacaaaaat

SEQ ID NO: 833349 - DNA, 120 bp, Artificial Sequence
  ENSG00000261654_26 (sequence is synthesized)
aatttgacctcttcctgtccaatctggatgccctttatttctttctcttggctgacttctctagctagaacttccagtactatgctgaataacagtggtgaaagtgggcatccttattgt

SEQ ID NO: 833350 - DNA, 120 bp, Artificial Sequence
  ENSG00000261654_27 (sequence is synthesized)
gttccagatcttagaggaaaggctttcagttattccccattcagtatgatactagctatgggaccatcatatatggcttttttaaatgttgaagtgtgttccttctatcccaagttcttt

SEQ ID NO: 833351 - DNA, 120 bp, Artificial Sequence
  ENSG00000261654_28 (sequence is synthesized)
gagggtttttgtcatgaaagatgttgaattttatcaaatactttttcagtatcaattgaaatgatcatatcatttttatctttcattctgttgatatgatgtgtcatgttaatcgatttg

SEQ ID NO: 833352 - DNA, 120 bp, Artificial Sequence
  ENSG00000261654_29 (sequence is synthesized)
tgtatgttgtaccatccttgcatcccagggataaatcccacttagtcatgatgaattatctttctaatatattgttggatttggcttgttagtattttgatgagtatttttgcatcaata

SEQ ID NO: 833353 - DNA, 120 bp, Artificial Sequence
  ENSG00000261654_30 (sequence is synthesized)
ttcatcagagatattggcctgtagttttcatttttcatgtgtctttgtctggttttggtatcagggaaatactggcctcatagaatgagtttggaagtattccttcctcctcattttttc

SEQ ID NO: 833354 - DNA, 120 bp, Artificial Sequence
  ENSG00000261654_31 (sequence is synthesized)
agaatagtttgagtgagattggtattagttcttctctcgatgcttgatagaattgagtagtgaagccattgggtcttgggcttttctttaccggaagactttttattatgactttgatct

SEQ ID NO: 833355 - DNA, 120 bp, Artificial Sequence
  ENSG00000261654_32 (sequence is synthesized)
tactatttttattggtcttttcagattttggatttcttcatagttcaatcttggaacattatatgtgtctaggaatttgttcatgttctcaggttttctaatttattggcatatagttgc

SEQ ID NO: 833356 - DNA, 120 bp, Artificial Sequence
  ENSG00000261654_33 (sequence is synthesized)
tgaatttctgcagtatcagttgtaatgctcctttttcatttctgattttattaatttgtgtctccttttttcttcttagtctggctaaaggtttgtaaattttgtttaacttttcaaaaa

SEQ ID NO: 833357 - DNA, 120 bp, Artificial Sequence
  ENSG00000261654_34 (sequence is synthesized)
aaattttgtttaacttttcaaaaaaccattttgtttcattgatcttttgtattttctctatttcaatttcatttatttctgctctttattatttcttttcttctactaattttgggtgag

SEQ ID NO: 833358 - DNA, 120 bp, Artificial Sequence
  ENSG00000261654_35 (sequence is synthesized)
cattgttagattgtttatttgaagttttcccctttttgatgtaggcacttatagctataaacttcactcttagtactgcctttgttgtatcctgtaagttttggtatgttgtgtttccat

SEQ ID NO: 833359 - DNA, 120 bp, Artificial Sequence
  ENSG00000261654_36 (sequence is synthesized)
atcctgtaagttttggtatgttgtgtttccattatcacttgtttcaagaaatttttcaatttcctttttaatttcttcatcaacccactggtcattctggagcatattgtttaatttcca

SEQ ID NO: 833360 - DNA, 120 bp, Artificial Sequence
  ENSG00000261654_37 (sequence is synthesized)
tgtatttgtatagttttcaaggttcttcttgttattaatttctagttttattccattgtgatcagagaagatgcttgatattatttcaatttttttgaatgttttaagactcgttttgtt

SEQ ID NO: 833361 - DNA, 120 bp, Artificial Sequence
  ENSG00000261654_38 (sequence is synthesized)
acctaaaatatggtatatccttgagatttattcatgtattgaggagaagcatgtgtattctgcagccgagggatgaaatgttctataattatctgtaagtccatttggtcaatagtgcag

SEQ ID NO: 833362 - DNA, 120 bp, Artificial Sequence
  ENSG00000261654_39 (sequence is synthesized)
attaggtctgatgtttctttgttgattttctgtctgaaagatatgtccaatgctgaatattgggtgttcaagtctccagctattattgtattagggtctatccctcgccttagctctaat

SEQ ID NO: 833363 - DNA, 120 bp, Artificial Sequence
  ENSG00000261654_40 (sequence is synthesized)
aatatttggtttatatatctgggtgctcaaggcatgcatatttaaaattgttatatcctcttgctgaattgacctctttatcattatagaatgaccttccttgtctcttctgatagtttt

SEQ ID NO: 833364 - DNA, 120 bp, Artificial Sequence
  ENSG00000261654_41 (sequence is synthesized)
tgtcttgtaatatattttgtatgatataagtatagctactcatgctctttttgggtttccattggaatggaatatctttttccatccctttatttgtagtctatatgtgtctttatagtt

SEQ ID NO: 833365 - DNA, 120 bp, Artificial Sequence
  ENSG00000261654_42 (sequence is synthesized)
tagtctatatgtgtctttatagttgaattgtgtttcttgtaggcaacagattaatgaatattgttttttcatccactcagccattctcttttaattggagagtttagtccatttacattc

SEQ ID NO: 833366 - DNA, 120 bp, Artificial Sequence
  ENSG00000261654_43 (sequence is synthesized)
agtaagagcttactctggccattttgttatttgttttctggtcttctcctccttctttctttcctcctgtcttcctttagtgaaggtagttttttctggtgatatgatttagtttcttgc

SEQ ID NO: 833367 - DNA, 120 bp, Artificial Sequence
  ENSG00000261654_44 (sequence is synthesized)
ttttgtgtattcattgtatgttttttgtttgagatcaccgtgaagcttgcaaataccatcttttaaaccattatttcaatccgataactacttaacactgtgtgtataaacaaacaaaga

SEQ ID NO: 833368 - DNA, 120 bp, Artificial Sequence
  ENSG00000261654_45 (sequence is synthesized)
agcaaaaacaaagctaataaaaagtatatgccttaacttcatccttcaactttttaactttttcctgtttctatgtatatcttattgtactatgtcattaaaagttattgctatttgtga

SEQ ID NO: 833369 - DNA, 120 bp, Artificial Sequence
  ENSG00000261655_0 (sequence is synthesized)
tatccccatgttacaaatgaagaaactgaggctcagagggagaaaggggcttgccaaggtcatagagtgagtgcctgagtcatccaaggccagtattgtcctcaccaaccccagctgtgg

SEQ ID NO: 833370 - DNA, 120 bp, Artificial Sequence
  ENSG00000261655_1 (sequence is synthesized)
ccatgtggagcagctggggtggggggcaccggcccagaggagtcagaggcgtgccccgcaaggtggtggaactgggagtgctgccagggttacttcctccctgggtccggatgcccgaga

SEQ ID NO: 833371 - DNA, 120 bp, Artificial Sequence
  ENSG00000261655_2 (sequence is synthesized)
agcagtgggtatcaccatggccgccagcattcttgatacttaccaggcaccaggcacaattctggaaccttcccccagcccccagctctcgggtgctgctcagagaggggccgtggctta

SEQ ID NO: 833372 - DNA, 120 bp, Artificial Sequence
  ENSG00000261655_3 (sequence is synthesized)
ccagggatgcagggttccacaaggcagaggggcccagcgttcaggaaaggacgtggctgggggacagggctgtgcatgcagaaaaaccccgctgaccacaggtgcagcattcacggcgac

SEQ ID NO: 833373 - DNA, 120 bp, Artificial Sequence
  ENSG00000261655_4 (sequence is synthesized)
tttcaggcaagcaggcaccaacagccagcgagccatcattcccagggctgcgagctggcacccacgtggtcacatgcctagagctgaggagtgaggggtcagggctcaggtgtcctgccc

SEQ ID NO: 833374 - DNA, 120 bp, Artificial Sequence
  ENSG00000261655_5 (sequence is synthesized)
agcccaagccatgagcttcttccaggctcatgtggcccagcagtccctgaatggccttgcttacctgggacccctccacccacgctcacaagtcatccagggccagggactctggactcc

SEQ ID NO: 833375 - DNA, 120 bp, Artificial Sequence
  ENSG00000261655_6 (sequence is synthesized)
attcctccaggagctgtggatcctcttgctccatcttagggggcgccccaagccccagagactacctgccggctcccactcccgcccctcaagcaagctctgcacgtggcctagagtatg

SEQ ID NO: 833376 - DNA, 120 bp, Artificial Sequence
  ENSG00000261655_7 (sequence is synthesized)
acacccctctgcccttggtcccgcactgtactgtgaagacctctccagcccagggctgcaaggaggcaggggccagcgggaaggagtgctaagatgagggggaatggcctgggcaaaggt

SEQ ID NO: 833377 - DNA, 120 bp, Artificial Sequence
  ENSG00000261655_8 (sequence is synthesized)
atgcagcttcccagcccctcccctcccctaccagtcttcccggccccttccccgccagtcttccctgcccctcctccaccggtgttacgtgcccctcgggcctttggcctccccatcaat

SEQ ID NO: 833378 - DNA, 120 bp, Artificial Sequence
  ENSG00000261655_9 (sequence is synthesized)
gacccccagcctggctccattcctggttgtcactctaattcacgctaaagagtgaatggctgacacttgaggattgctgtgcttgaagaggcagggcttgcaatttttctggaacaatcc

SEQ ID NO: 833379 - DNA, 120 bp, Artificial Sequence
  ENSG00000261655_10 (sequence is synthesized)
ctttcttcaggaggaggggtctctaaggcaggtgagccaggtcccctccttgtccccacatctgaaatccaatcattcaacttgggttcctcgggcctcagaggcttctcagactgtaag

SEQ ID NO: 833380 - DNA, 120 bp, Artificial Sequence
  ENSG00000261655_11 (sequence is synthesized)
aggccgggaggggaaggacatcctgtccgaagcggcaagtgcgtccactaccactcatgctggagaggacaggccgcctgtcttctgtggccagggacacaggcttggggcccaccctca

SEQ ID NO: 833381 - DNA, 120 bp, Artificial Sequence
  ENSG00000261655_12 (sequence is synthesized)
gacctctgagaactgcctgccagcccccgatgcagaacccttgataggcaagcctcagtttctccacaccccactcctctttctcctctcctcagccttacagctggagggcagggggct

SEQ ID NO: 833382 - DNA, 120 bp, Artificial Sequence
  ENSG00000261655_13 (sequence is synthesized)
ggggaagggggtcaccccaatgccctggactgggccccacagctcccccggctgcttgcttccttctcctgacggccggctccttcccacttcagcctcctctgtgggcaccgaggccca

SEQ ID NO: 833383 - DNA, 120 bp, Artificial Sequence
  ENSG00000261655_14 (sequence is synthesized)
ggagcttcaaaagtcagaccaagactgtccttggtcccacaggggcagaggtgagatctgtgcgtgccccctctccacactcacggggacagggcgtgagatctttgcgccccctcccca

SEQ ID NO: 833384 - DNA, 120 bp, Artificial Sequence
  ENSG00000261655_15 (sequence is synthesized)
tgatctccctttccagattttcaaaacgcccaagtgacgtgaaatggtgtgtgtatttatatccgacgtaaacaatctccttcacgagatgtcctcgtctggaattaaagctgtttattc

SEQ ID NO: 833385 - DNA, 120 bp, Artificial Sequence
  ENSG00000261656_0 (sequence is synthesized)
atacgtggtgaagcatggagttgtaatttatgcactctgtataaccccaaagactgctcttcccactcccctaaactctttttcccactcttcatataatagtgagtggaagaatctgga

SEQ ID NO: 833386 - DNA, 120 bp, Artificial Sequence
  ENSG00000261656_1 (sequence is synthesized)
caccgagaacattatggtgggcgcctgtgagctcttcctgaccacccaagacttctaggatgctttcccgaccaccctgctccacccagggcagagttgccaactccttgatgcctcctg

SEQ ID NO: 833387 - DNA, 120 bp, Artificial Sequence
  ENSG00000261656_2 (sequence is synthesized)
tgttgcaatcccagtcagatgaggtcccagggccccagggtgggcggcggctcaccgtagccgtgctcgtactctcggtgtcgacgccggcggtggtgatgatggtggtggtggtggcgg

SEQ ID NO: 833388 - DNA, 120 bp, Artificial Sequence
  ENSG00000261656_3 (sequence is synthesized)
tgagccaccgcgcctggcctatttatttctttatatttcttttcttatattgtctatatttttaaggttttctataatgaacacacattacttttctactaggagaaatgaagtcaataa

SEQ ID NO: 833389 - DNA, 120 bp, Artificial Sequence
  ENSG00000261656_4 (sequence is synthesized)
aggagaaatgaagtcaataacatatgctgtaaaaaaggagctgaaatgccatttgtttctcctgttcagggcaccagctgagagacagaatttttggaagaacttaggaaagaaactaag

SEQ ID NO: 833390 - DNA, 120 bp, Artificial Sequence
  ENSG00000261656_5 (sequence is synthesized)
acaacaaacaggccgggaggagggacgggaggccaggagagctccacgttccgtgaaacctttgcaggaaaacccaggaagcagggttatttgtccttatttcataaacaaagaaatgga

SEQ ID NO: 833391 - DNA, 120 bp, Artificial Sequence
  ENSG00000261656_6 (sequence is synthesized)
gcccctgagagccacagtgacatgcctgagagcatcaacctgggcggcgtccaggatgggctcaaacccagggggaagttgatcccacagccacggaaatagccagatactcctctggcc

SEQ ID NO: 833392 - DNA, 120 bp, Artificial Sequence
  ENSG00000261656_7 (sequence is synthesized)
tcagaacagctgccacggaacctcccctgaaactgcaggggcattcccggcatgcctactcaacagcctgaggagggcaccagctgagagacagaatttttggaagaacttaggaaagaa

SEQ ID NO: 833393 - DNA, 120 bp, Artificial Sequence
  ENSG00000253435_0 (sequence is synthesized)
tcagctcctggggctgctaatgctctgggtccctgtggggatattgtgatgacccagcatctgctctccctgcccatccctctgggagagccggcctccatctcctgcaggtctagtcag

SEQ ID NO: 833394 - DNA, 120 bp, Artificial Sequence
  ENSG00000253435_1 (sequence is synthesized)
atttctaacaaattctatggagtcccaaacaagttcagtggcagcaggtcagggacaggtttcacacttaaattcagcaaagtggaggctgaggatgttggggtttattgctgtgaacag

SEQ ID NO: 833395 - DNA, 120 bp, Artificial Sequence
  ENSG00000234459_0 (sequence is synthesized)
cattaaagctcatggacttaattcctgtctccagggctatgtctctttcaactgccatactgaggacttttcagccgtggtcccggatgtctggccatacccatcacttgaaaccaactg

SEQ ID NO: 833396 - DNA, 120 bp, Artificial Sequence
  ENSG00000234459_1 (sequence is synthesized)
atctttctatatggagtataatgctgggaacatcattattccgtaaatatttttaaaaatgcactggatcaattgtgtatcttttattcctcctgtacaaataaagacctaaactagtaa

SEQ ID NO: 833397 - DNA, 120 bp, Artificial Sequence
  ENSG00000250885_0 (sequence is synthesized)
cttgccaacaaaggaagttgagccaaaaccaaggtttgtcaaaagaagccagatgactccacagtctttacatcaccactccatcaccatagccactaagtcccatagccactggatgtt

SEQ ID NO: 833398 - DNA, 120 bp, Artificial Sequence
  ENSG00000250885_1 (sequence is synthesized)
atcctattttccccttacccctctgaaggaaataacctctgtgttcttgaacatatacacaacccaatcccaaaatcctgctttgagattctgttttcggagcataaattgaaccaactt

SEQ ID NO: 833399 - DNA, 120 bp, Artificial Sequence
  ENSG00000234455_0 (sequence is synthesized)
gagctcaccggcctcacccaagctcgcagcattgtgccgggaaaggatgttctcggctccggcctttttcctcctctcctggggacagaacatggatcctggaaggcattgaggaccctg

SEQ ID NO: 833400 - DNA, 120 bp, Artificial Sequence
  ENSG00000234455_1 (sequence is synthesized)
tgctcagcccctgcccatcccttccaccacttatctgtcctgtaggcacactgacgcggctttcacaaaatgggaggctctgagaggtgagctcccaggagacaggaccaaggtctgcct

SEQ ID NO: 833401 - DNA, 120 bp, Artificial Sequence
  ENSG00000234455_2 (sequence is synthesized)
tcatcctgaagtttgcagggcagaggcccagatcctgcaaaggtgatgtgctcaggaagccacagcggagccccacacgcaccatgtgagtcacgctggtgccacaggcttgaactctgc

SEQ ID NO: 833402 - DNA, 120 bp, Artificial Sequence
  ENSG00000234455_3 (sequence is synthesized)
gcaactgtgcaacacctgacttcagaaacagacgtctagagccctgcctgatggagccaggaccagcttgcctggtggatctgtgccctggggacccgcttgggctctagcacagcatgt

SEQ ID NO: 833403 - DNA, 120 bp, Artificial Sequence
  ENSG00000234455_4 (sequence is synthesized)
gctgtagagtcaagcacacatgaggtggccccactgccctgcagaccacagatgcagccccagctcaccattgacatctgtccccagtcagacctctttacgcagcattctagcctctcg

SEQ ID NO: 833404 - DNA, 120 bp, Artificial Sequence
  ENSG00000234455_5 (sequence is synthesized)
ttctctgccacacccattgccccactcaccccgccctctccactcactggagctgcccagcatcctcatccctcttctaagcaacatgccttcctccccatacccaacatctttgcctgg

SEQ ID NO: 833405 - DNA, 120 bp, Artificial Sequence
  ENSG00000234456_0 (sequence is synthesized)
ccagttctcactacatagtgtcccaaaagattgggcctgctctttctttcagagacaattaggaaaaaagtaaacaaacggagcaggatttgggcataacagcatgctcctcccatcccc

SEQ ID NO: 833406 - DNA, 120 bp, Artificial Sequence
  ENSG00000234456_1 (sequence is synthesized)
caaatcccaggagtgtcactgagtaatgtcttacaataacagaatgcaggagagcacatatcaatgaagaaaagacaaaatgtacttatccatgaagctgaggttaagaaaccagtgtct

SEQ ID NO: 833407 - DNA, 120 bp, Artificial Sequence
  ENSG00000234456_2 (sequence is synthesized)
tcaagagccagggacagcactgggtctgtgcagagttgagagatggtgatgacatggtgagacacaaattcagtctatttcatagtttgtggtcattcctattaataaacttcctttcac

SEQ ID NO: 833408 - DNA, 120 bp, Artificial Sequence
  ENSG00000234456_3 (sequence is synthesized)
cacttaaaaggtggatttatttagcacagtatggagtttcttagacttctctatcactgtctctaacaatgacatactcacctaaccccactaagagcaactttatttcatctctagttt

SEQ ID NO: 833409 - DNA, 120 bp, Artificial Sequence
  ENSG00000234456_4 (sequence is synthesized)
tcgtctaaagattcatgtggattttagattctactcttttgtaggttcgtatttgtactattataaaatgtgactctctctccaaactttgcctaaattatggaatgatttttcatgttt

SEQ ID NO: 833410 - DNA, 120 bp, Artificial Sequence
  ENSG00000234456_5 (sequence is synthesized)
atccagtggtttccagcattcttggcccagtctgggattctactcttttgtaggttcgtatttgtactattataaaatgtgactctctctccaaactttgcctaaattacggaatgattt

SEQ ID NO: 833411 - DNA, 120 bp, Artificial Sequence
  ENSG00000234456_6 (sequence is synthesized)
ttcatgtttatgcagtggtttccagcattcctcacccagtccagggacactgtgggtgtgcccagcttaagtccagtaactggaaatacaagcccaagttctggagagtttgagctgcag

SEQ ID NO: 833412 - DNA, 120 bp, Artificial Sequence
  ENSG00000234456_7 (sequence is synthesized)
gcactgcgggtgctctctggcccccaccccatcatcgcgcaacacacccccttcaacatgcgcggccaccctttcattgccctgcgccccgagcggtcccaccgcccggcaaaacactga

SEQ ID NO: 833413 - DNA, 120 bp, Artificial Sequence
  ENSG00000234456_8 (sequence is synthesized)
gcaagccgctgctctcaccttgcttgacacacttgagccggagggggtccttgcagtgtttgatcacggccagcacgtccctgatggtgagccccgccacgggggtctcgttcacctcca

SEQ ID NO: 833414 - DNA, 120 bp, Artificial Sequence
  ENSG00000234456_9 (sequence is synthesized)
cattggccataaccagcagagtggaaaatacaagaagagaaaaaaacattgaactgcgattttataacatcctttactaggcagagagaagaggaaacaccaggaaagaaaactgtatta

SEQ ID NO: 833415 - DNA, 120 bp, Artificial Sequence
  ENSG00000234456_10 (sequence is synthesized)
cgatgtgaaaacttaatgttgagaaattcaggcatcttggggttagtgaggagaagttttaggggcttagattcttctaaacacatgtacagaaatgcatatttcatctgatatcaaatg

SEQ ID NO: 833416 - DNA, 120 bp, Artificial Sequence
  ENSG00000234456_11 (sequence is synthesized)
gcatttatagtgctaatctttacctcaagacttcacatcttttggtgattgcatcttttaggtttatagcagctaagtttgcatgaaaacaccagggctgtttcatttcagtcaagaatt

SEQ ID NO: 833417 - DNA, 120 bp, Artificial Sequence
  ENSG00000234456_12 (sequence is synthesized)
aatgttcattgattgtgcttctgcatttcatgtaactattgtagaatttgttttagttttatgagggaataattgttccaacttctatataactcaggaatttactctcaaacaacactg

SEQ ID NO: 833418 - DNA, 120 bp, Artificial Sequence
  ENSG00000234456_13 (sequence is synthesized)
tcaattagttacttatctctctggaaatgatctgggaacatggagaggaaagggaggaaggggcaaaatctgaccacttaaatctaagcatattagatcattttatgctagaaagtcctg

SEQ ID NO: 833419 - DNA, 120 bp, Artificial Sequence
  ENSG00000234456_14 (sequence is synthesized)
aatgatgtgactttcgttcttgtaaaacacctctttccatagattcatggcccaaacagtatataaagagtggggaaggaactgcatttgcaaatagttcaaatcattgctccatcttaa

SEQ ID NO: 833420 - DNA, 120 bp, Artificial Sequence
  ENSG00000234456_15 (sequence is synthesized)
ctacgcagttcacaaagtgtgaagaaatgtgatcatctcaaaaaagataatggggaaaaaatatgttttgttctgtgactttaaagtcttgcaatattttacataaatgataatgggtgc

SEQ ID NO: 833421 - DNA, 120 bp, Artificial Sequence
  ENSG00000234456_16 (sequence is synthesized)
tttaataagaactcttgatacttttgttattgtattcaatatatgcatataatacaacaggatgatattgttttggatttggaaatgtattctttcttatgcaatcttatgcagtcatac

SEQ ID NO: 833422 - DNA, 120 bp, Artificial Sequence
  ENSG00000234456_17 (sequence is synthesized)
tgcttgaatatcattacctgaatttatctttcttttttttgttgttgttttacactctacttatttggtgcctgtcagtcttttgtcgtcagtttatattctactaaactcaaaaagaca

SEQ ID NO: 833423 - DNA, 120 bp, Artificial Sequence
  ENSG00000234456_18 (sequence is synthesized)
atctcataccttttgtaattgtaggcattctttactagatttttaaatacacttcaaaaattcaagtactttgatttcatgccatcaagtagctgaatctatccccccgtctctttttaa

SEQ ID NO: 833424 - DNA, 120 bp, Artificial Sequence
  ENSG00000234456_19 (sequence is synthesized)
atttaagtgagtagttcaatttctgtcactttctactttgtgaattctaaatcttttaaaaccatcttgccatttttcgtgcacttacccttacagaaaactctgtgaaacactacttat

SEQ ID NO: 833425 - DNA, 120 bp, Artificial Sequence
  ENSG00000234456_20 (sequence is synthesized)
ctctacttttatgtttttaactccttttttatattactattccctctgctttctaaatgcacatattaatttgttctttttattctctgtagctcttctcagtgtatgaattcagtttcc

SEQ ID NO: 833426 - DNA, 120 bp, Artificial Sequence
  ENSG00000234456_21 (sequence is synthesized)
catcagtctccatacaattaaaaaaaagttgagtattctgttattttaataagatatctagtgcccatattctaattctgccccttatttttaatataattttattgttgatttaaaatg

SEQ ID NO: 833427 - DNA, 120 bp, Artificial Sequence
  ENSG00000234456_22 (sequence is synthesized)
acaacagtttcaattcccagaaagtgaaaggaaacaaaggaataatattataggcttaatttttatcagtgaacttgtaggtgaagaaaagatttggggaaggaaatgaacatattatat

SEQ ID NO: 833428 - DNA, 120 bp, Artificial Sequence
  ENSG00000234456_23 (sequence is synthesized)
tgcaaaatagtaaggaacaatcagatgtgttttctagtctctggaaaagcatgtttcaagaaattcaatgaaaagttcatcatgcttgcttagattgttgagaagcaaaaacactgatga

SEQ ID NO: 833429 - DNA, 120 bp, Artificial Sequence
  ENSG00000234456_24 (sequence is synthesized)
tactcttttaataatgttgcaaaactctccaaacactactctgtgtggatgtctttcagaatatgatgaatactagtagtcttattctgcccttttctctctatcacaatatatacattc

SEQ ID NO: 833430 - DNA, 120 bp, Artificial Sequence
  ENSG00000234456_25 (sequence is synthesized)
tatattgcatacacatattttccaaatattacatataatttcatgtaatttatagacctattaaggcccaaccattttcttggataggggattctttagaagtccagcttaaataaagcc

SEQ ID NO: 833431 - DNA, 120 bp, Artificial Sequence
  ENSG00000234456_26 (sequence is synthesized)
cgtatagaaagtttttttaaaatttatacataatcacctaaagtaaccttatctactgaactcttagtacatgctactggaaccttttatcatgtttcttcctggcttgcattacaacac

SEQ ID NO: 833432 - DNA, 120 bp, Artificial Sequence
  ENSG00000234456_27 (sequence is synthesized)
tgttgacatatctcagccttacttctaggcttctttgagagcatgactcatgtttgtattcctcactgaggttgaatgaataagagaaactacagtagtaggaaaaaacagtacatgtac

SEQ ID NO: 833433 - DNA, 120 bp, Artificial Sequence
  ENSG00000234456_28 (sequence is synthesized)
atatcaatgaatatgaaagggtcaaatggatctattatagtaagcacaaaatcaactgacaccagcaaagtaaacccaaaatttttaatggtattttaatagatcaagaggagcaagcag

SEQ ID NO: 833434 - DNA, 120 bp, Artificial Sequence
  ENSG00000234456_29 (sequence is synthesized)
atttttgagacagttgtctcctactttctctatcacagggagtaattttaaaagaaaaatggagggtaagtttctttaagagaaaattgtagtttaaaacaggtcatgggataattagaa

SEQ ID NO: 833435 - DNA, 120 bp, Artificial Sequence
  ENSG00000234456_30 (sequence is synthesized)
ataatttaatttctttagaggattttaatctttcaactgcttgcaattagatcctaaggcaataaaagaataaggagatttggaaaaccattgtctgtaatctctgaagaaaagtggaca

SEQ ID NO: 833436 - DNA, 120 bp, Artificial Sequence
  ENSG00000234456_31 (sequence is synthesized)
ttaggggagtcagttgaaaagcaaagctatcaccattttctaaagaggaaaaaggtgaacctcacaaactatagaccaaaaaaataggacatcgagagaaagaatatgaagctagcatag

SEQ ID NO: 833437 - DNA, 120 bp, Artificial Sequence
  ENSG00000234456_32 (sequence is synthesized)
gttcacaaagaatgagtcaaatcaaacaacatgcattttttatttataaagcatgacttgttcattgtcaattcatgttagcttaatcattaggcattaatgccatcactgcaatgcata

SEQ ID NO: 833438 - DNA, 120 bp, Artificial Sequence
  ENSG00000234456_33 (sequence is synthesized)
tgtcagcaataaataatcaaagaccaggcttccatcattctgtttaatatcttcaagtaatgcttaagtttgcaaatgctcttttaacacattctccatatgcagcctgcccagcactgc

SEQ ID NO: 833439 - DNA, 120 bp, Artificial Sequence
  ENSG00000234456_34 (sequence is synthesized)
acacaatagacctgttacttccccctcacgagcactcctaatatttcatgtgctcatccaattgacttctcccactggtgcctcatattgaatttgtagaatcacacctgctcctttttc

SEQ ID NO: 833440 - DNA, 120 bp, Artificial Sequence
  ENSG00000234456_35 (sequence is synthesized)
aaaactcttctgagttttttcttaaataattcactgaccccaaagttgtcagatatttgaagactactcgcacaattttaatattataaatgtataatgtaaatgtaattaagatttgta

SEQ ID NO: 833441 - DNA, 120 bp, Artificial Sequence
  ENSG00000234456_36 (sequence is synthesized)
taatgtacgatgtactttggtaaataaaagtatgctgtgaataaatacgtatgatacaattcaaaattttacataaatatgtgataaaatttagctcatattctttttttttttctttga

SEQ ID NO: 833442 - DNA, 71 bp, Artificial Sequence
  ENSG00000234456_37 (sequence is synthesized)
gtgataaaatttagctcatattctttttttttttctttgagacggagtctcactctgttgcacccaggcta

SEQ ID NO: 833443 - DNA, 120 bp, Artificial Sequence
  ENSG00000234456_38 (sequence is synthesized)
ccaaagttctgggattacagacgtgaaccacggtgcccggcctagttcatgttctttaaggacaattatgaatatttttatgcactgttaattttcattaagatattgatcaattaatag

SEQ ID NO: 833444 - DNA, 120 bp, Artificial Sequence
  ENSG00000234456_39 (sequence is synthesized)
atcaattaatagctatatatgttctataaattaatcctatctagtttcaatcttaaattgtttgcatataccaatctagtttattgtttgcatatattttatagtgtagagattaggcat

SEQ ID NO: 833445 - DNA, 120 bp, Artificial Sequence
  ENSG00000234456_40 (sequence is synthesized)
ttaggcattttaataaaattttaaaatttccaggacatactgttaatgactatgcttcctactataggccataattaatttttttctattgtcaacaatattttggtagggatgatcagg

SEQ ID NO: 833446 - DNA, 120 bp, Artificial Sequence
  ENSG00000234456_41 (sequence is synthesized)
aaataaggaaatgtttccttcatttgttaacaataggtgtttggggattttaaaatgaaaattgaagaagtaaaagacaccatatatttagtttgtttgatttcgtggcttcaagagttc

SEQ ID NO: 833447 - DNA, 120 bp, Artificial Sequence
  ENSG00000234456_42 (sequence is synthesized)
aataatttattgaaatattttacagaccaaagaacaacagatatattacgtttataagcccccacatattttaaaggataatggtttatatatgaaaattccctgaacctacacttcatc

SEQ ID NO: 833448 - DNA, 120 bp, Artificial Sequence
  ENSG00000234456_43 (sequence is synthesized)
ggcggcggcggcggcagccggagcgagcagtagccgagctggtttgcatccaagagaggggaggacaggggcaaaaggatgcagggaggctgctgatttccactgaagagctaatttcct

SEQ ID NO: 833449 - DNA, 120 bp, Artificial Sequence
  ENSG00000234456_44 (sequence is synthesized)
gtttcatgtcttcatctatatagtcacttatttgtcttaaagttctcgaaattccctcttagagaaggagaaagttagagaactggaggctgcgtaccctgattacgcagaagggaagca

SEQ ID NO: 833450 - DNA, 120 bp, Artificial Sequence
  ENSG00000234456_45 (sequence is synthesized)
gcctcgcattccccggggcaggcccccgcccgcgcgtcccgccagtaggggaatttagcggacggctgcggttgtctggtgaaaggctatccaaggataaggggcttcacttttcccaag

SEQ ID NO: 833451 - DNA, 120 bp, Artificial Sequence
  ENSG00000234456_46 (sequence is synthesized)
taggggaaagagaaggggtctacagggctaggggtggagggagcggatgcagtgagcagcctccgcagagaaattgacaatttaaccagggacctgcggcagagacaaggcggagacact

SEQ ID NO: 833452 - DNA, 120 bp, Artificial Sequence
  ENSG00000234456_47 (sequence is synthesized)
cccttgcccaggaaagccgccagagtccggcttgtacctggggaagaatccttaagacggtctggcccaacactcctttgctcacagagaaaggggagaagactcccgagggtgaaaatg

SEQ ID NO: 833453 - DNA, 120 bp, Artificial Sequence
  ENSG00000234456_48 (sequence is synthesized)
ggggagcctaggcccggcgtggggaggccggcaggaagggcctcgagcccagtgcggacctttcttcagcctctgtgcgaccgagccgcgcgccaggctcctgtgcgaggaggacgcgct

SEQ ID NO: 833454 - DNA, 120 bp, Artificial Sequence
  ENSG00000234456_49 (sequence is synthesized)
gactccctccgacctgggctccgatggagcagaaatagcgggacctggacttgtggcgcgcctggtgccacatctcgggctctgcgagcgtcctggcgcgggatcctgcctgttcccttc

SEQ ID NO: 833455 - DNA, 120 bp, Artificial Sequence
  ENSG00000234456_50 (sequence is synthesized)
atgccagataaaatattcaccttctcggactccctggcaccaggcatggccatgtaatcctacagcacagctgatgaaagagaagacatcttgctgctatttgacaagcaagaagataaa

SEQ ID NO: 833456 - DNA, 120 bp, Artificial Sequence
  ENSG00000234456_51 (sequence is synthesized)
agctttcctataaagatgatggagcaaaaaaatagaaggggcctagactccctaccttcacacttcctgctataaaagcattgctattataaggttaatctgcagaaacagacttctatg

SEQ ID NO: 833457 - DNA, 120 bp, Artificial Sequence
  ENSG00000234456_52 (sequence is synthesized)
tcatatgcttaaatgcatcaaaattcatacaatatccattaaattggtaaaagtatccattttaaaggattaatctgagggacccacagacacttaacacaatcaaatctcagaaaaaaa

SEQ ID NO: 833458 - DNA, 120 bp, Artificial Sequence
  ENSG00000234456_53 (sequence is synthesized)
atcagttatttcattgtgattttgaggctgatcttttatgatcttttagttatcaaactgttaaatacattttaactttcaaattttatgaataaaggagatgaatcctgttattttctc

SEQ ID NO: 833459 - DNA, 120 bp, Artificial Sequence
  ENSG00000234456_54 (sequence is synthesized)
taacagtgatttaagaaaaagattcctgtaactggtaaggaaactgaggtatacaaggatgaacttttgcaaggctacaaatcttgttaatagtgaagctaacgttcagacccaagtggt

SEQ ID NO: 833460 - DNA, 120 bp, Artificial Sequence
  ENSG00000234456_55 (sequence is synthesized)
gtaactggtaaatgaatttcatttgcttaacttttagatgatatgtttcaggcaaaaaaaaagttgtgcacccacttatctctttaaagcggaggatgaaaagcattgaataggtaggat

SEQ ID NO: 833461 - DNA, 120 bp, Artificial Sequence
  ENSG00000234456_56 (sequence is synthesized)
tcttaatgtctgagatgaaggcgatgtaggaggcaaacaatacggttaaaaatgttgagtcgacccaaacagaaagaccaggtttcaatccagactctgcggcttactgagaatatgatc

SEQ ID NO: 833462 - DNA, 120 bp, Artificial Sequence
  ENSG00000234456_57 (sequence is synthesized)
ttgagtaaactgcttgaccttcctgagcctcagctttcttagttgttaaatggactttaacaatactaatctgttaggactgtggtgaggatgaaatcagggaaatcagtcacagcagtg

SEQ ID NO: 833463 - DNA, 120 bp, Artificial Sequence
  ENSG00000234456_58 (sequence is synthesized)
ctctcctggcacaggtgagtaggagttcgaaatgataattccctcctctttccctcttaggtataacttactacttggggatgagggggatcaaatgtagtcagaactggaagagatctt

SEQ ID NO: 833464 - DNA, 120 bp, Artificial Sequence
  ENSG00000234456_59 (sequence is synthesized)
aaaaaaagatgatttgtttaaccttgtgtctttttttcacttgagaaaacagatcctccgtaagttggctgcactagttgaagcttattcagtgagccaggggcagtgccaggatctgaa

SEQ ID NO: 833465 - DNA, 120 bp, Artificial Sequence
  ENSG00000234456_60 (sequence is synthesized)
gccagagctgcaggcaatgcccaggagtaggcaagacttgatagcaaagcctaatctcacccagagaagttgagtgttagcattatgaggcatagttctaaatggaaactcatcatgaga

SEQ ID NO: 833466 - DNA, 120 bp, Artificial Sequence
  ENSG00000234456_61 (sequence is synthesized)
accgaatatatacatattgtaaaaccaaatgacaagctaccattcatggaatatactaatatttattaggttctaactacatgcaagatgttgttttataggctttacacataatactta

SEQ ID NO: 833467 - DNA, 120 bp, Artificial Sequence
  ENSG00000234456_62 (sequence is synthesized)
tgctcttcaacttcacagctacccttctttgccctaaattgtgacattagagctgaaatctgtaaacgtctttatggtcagttggcacagtgtttagctttgtcaatagaaggtgctagg

SEQ ID NO: 833468 - DNA, 120 bp, Artificial Sequence
  ENSG00000234456_63 (sequence is synthesized)
ggaacactgcagaaagaaaggggctccttttcttggttccagtgctttcctgcttgctcctacggtgtggtggccagtgagtgactttctgaccagtggtgtgcaagaaggccatgttac

SEQ ID NO: 833469 - DNA, 120 bp, Artificial Sequence
  ENSG00000234456_64 (sequence is synthesized)
ataatcttcagtaaatttggccagttccctagtatgtgtctttctatggagtaccactggcatgtcagtggaatggcttcctagcaagttttactgaaaacacagctgatggtttcctca

SEQ ID NO: 833470 - DNA, 120 bp, Artificial Sequence
  ENSG00000234456_65 (sequence is synthesized)
gcagcccagtgtgtgacaccttaaatttctggatcattaagtggaccacagccatattatttccaatgagcgcctactttcaggcttagtagggtggagggtgggtagggggaagttcta

SEQ ID NO: 833471 - DNA, 120 bp, Artificial Sequence
  ENSG00000234456_66 (sequence is synthesized)
ctcagttattccctccttgggtactctcctagagcctgagagatagtggctgttcccaataaccactattactgtattctttagtgggattttttcctgtcctaatagtcaatacccttt

SEQ ID NO: 833472 - DNA, 120 bp, Artificial Sequence
  ENSG00000234456_67 (sequence is synthesized)
gactggatcttaactgataaaagtggaaccctgaggaaagcactatccttggagtcagaaattgggatcagattttttttctttctcttatggtattcctcatattcgcttaatttctcc

SEQ ID NO: 833473 - DNA, 120 bp, Artificial Sequence
  ENSG00000234456_68 (sequence is synthesized)
actgcctttaccctttttggatttgatgctatgtcaagaaaaaattatttcatcactgagcactctgagtgtagagcagagtgctaaatattgcatgctattccagaagaaaaatagttt

SEQ ID NO: 833474 - DNA, 120 bp, Artificial Sequence
  ENSG00000234456_69 (sequence is synthesized)
aggaatcctaaaagccaaagaaagaaagatatgaatgcattcagttcttagaagagttctatgagatagatgcttgtggcagacatagtctccacccagatctcctaggatccctttggt

SEQ ID NO: 833475 - DNA, 120 bp, Artificial Sequence
  ENSG00000234456_70 (sequence is synthesized)
tgaatctgagtatccttcctctagcttctgtgttcttttacttctcacagcctgccccgagaatctctttggaggaaggcccaaacactactagactcactttgtgtactggcatagaga

SEQ ID NO: 833476 - DNA, 120 bp, Artificial Sequence
  ENSG00000234456_71 (sequence is synthesized)
gccagacagaaccacctgcaagtttacttctttcccaggataccctttgccaaggactttcctatagagtataaaagaccagccgtcttgcctctagtagcaagaaaacctgaggtgtaa

SEQ ID NO: 833477 - DNA, 120 bp, Artificial Sequence
  ENSG00000234456_72 (sequence is synthesized)
tttacaccctgaggctcccctatagaattatattgatgttaatattttgcctgaaaccaccttcttccctatcttgcttactgtggtacctgatgagtttttcttggtagcatttctata

SEQ ID NO: 833478 - DNA, 120 bp, Artificial Sequence
  ENSG00000234456_73 (sequence is synthesized)
ataaatcacttgcagacaatcttcatctcagggtttgatcctggggatcctgacttaagacattgctattcttttttttttttcttttacagatgaggaaactgaggatcagggctttta

SEQ ID NO: 833479 - DNA, 120 bp, Artificial Sequence
  ENSG00000234456_74 (sequence is synthesized)
aattgccccaaatcacactactaataagagatagagttgtggtaccttttttagagggaccattattctgctgactgcagtactgtagagcataaagtttcttatccacactgtttctta

SEQ ID NO: 833480 - DNA, 120 bp, Artificial Sequence
  ENSG00000234456_75 (sequence is synthesized)
gttcagtctgtcaatatcactactccacgattattgttgtttgtttttctttctccctgtcttttacctcaaaaatctctattgtgatgccagagagacctttctgaaacctctcctttt

SEQ ID NO: 833481 - DNA, 120 bp, Artificial Sequence
  ENSG00000234456_76 (sequence is synthesized)
ttctgtgtttaaaaccccccagtgccgcccatgaaatacacagcaaagtccaaactccttatcttgcttggatcctcctttccaccctttttaactgttcagccatatttctccatgtac

SEQ ID NO: 833482 - DNA, 120 bp, Artificial Sequence
  ENSG00000234456_77 (sequence is synthesized)
ttctgagattggaacccagggcaacaaagctaatgtgggttctccaagattaacacaactgaaaggaggcccctttatgccatctattctaggtcccttggaatataattaaaaacagga

SEQ ID NO: 833483 - DNA, 120 bp, Artificial Sequence
  ENSG00000234456_78 (sequence is synthesized)
atttcaacattgaaatgtaatgatgttcaggtaagggcagtaaggtacattgacttgagtcaatctcccaccatgtctggggactgggacagctgagccaggggtcctacctaagggtca

SEQ ID NO: 833484 - DNA, 120 bp, Artificial Sequence
  ENSG00000234456_79 (sequence is synthesized)
ggcctgtgtcttcacttctcctttcaaccctttacttcttccagagttgaacggcttactttccttctctcactaggccatttcatggcttgtgtttgcctgaaatacaactctttccct

SEQ ID NO: 833485 - DNA, 120 bp, Artificial Sequence
  ENSG00000234456_80 (sequence is synthesized)
ccctggtctacacctgctcaccctgaaagaaatacctctgagcccactttctttcttggaagcattttatgactcttatttctgttatcaacacagcttttatttatgtctccatgtatc

SEQ ID NO: 833486 - DNA, 120 bp, Artificial Sequence
  ENSG00000234456_81 (sequence is synthesized)
ctttgaagaaacacaacttttcaggttctatgttttatttgcattcttagtgtctggcacattgtctgacacagtgtaaaagctgagtagaattttgcctgatagcagatgtgcctgaag

SEQ ID NO: 833487 - DNA, 90 bp, Artificial Sequence
  ENSG00000234456_82 (sequence is synthesized)
agctgagtagaattttgcctgatagcagatgtgcctgaagtgagggtgtccaaaatttcattaaatgacgactgctttaatatgaattct

SEQ ID NO: 833488 - DNA, 120 bp, Artificial Sequence
  ENSG00000234456_83 (sequence is synthesized)
cataggccaccttgccgggcttcacctcccccagcagaggaagcagtggtggtggcgtcggcggcggcggcggcggcagccggagcgagcagtagccgagctgtaatgtcttacaataac

SEQ ID NO: 833489 - DNA, 120 bp, Artificial Sequence
  ENSG00000234456_84 (sequence is synthesized)
gacacatttctttgcaattactgatttacatgtctgcttttatcactggtgaggttctttaggacagagacattattaattcatctctgggcacatatgttccaacatattagaagtact

SEQ ID NO: 833490 - DNA, 120 bp, Artificial Sequence
  ENSG00000234456_85 (sequence is synthesized)
gaagtactacagagtgctattactatgtagtatgtagtattagtagtagttactcacaaatcatttttaaataagtgattataatatctttttgttattatgatttaacacaagatggaa

SEQ ID NO: 833491 - DNA, 120 bp, Artificial Sequence
  ENSG00000234456_86 (sequence is synthesized)
cagaagtttccatgatatatttgttctatttaaaatccaatagccattagaatattaccattatttaatgtaaaacaataaaatattaaatatgatcgttcatatttaatgcaaaccgaa

SEQ ID NO: 833492 - DNA, 120 bp, Artificial Sequence
  ENSG00000234456_87 (sequence is synthesized)
ctcatggaaatattgtgtaaagatcaagtaatttttgacatacaattttaaactcaacttttcatatagcataccttatgatatattttcagcctacttttaaatatgttggcattgaaa

SEQ ID NO: 833493 - DNA, 120 bp, Artificial Sequence
  ENSG00000234456_88 (sequence is synthesized)
gccagttactaattcgctgaattcatgatttctttttaagttatagaagtggaattatgtttgagatattcattgcattacatttaccagaacttgagttcttaacatggaacctgagag

SEQ ID NO: 833494 - DNA, 120 bp, Artificial Sequence
  ENSG00000234456_89 (sequence is synthesized)
tttctccaattcttaagtccctgggagaaatagattagctggatgaggaactgagaggaaaaatggtcagagatgtagcaagagttgggaagaaggaacaatgatttgctttcaaggaga

SEQ ID NO: 833495 - DNA, 120 bp, Artificial Sequence
  ENSG00000234456_90 (sequence is synthesized)
ttttttcattggtctgttttcagtgacaaacccactgcgataatacatgtaaagtgaaaacattcaggaagttcccttagaaacctcttttctggcagttcctaattctacaacattgta

SEQ ID NO: 833496 - DNA, 120 bp, Artificial Sequence
  ENSG00000234456_91 (sequence is synthesized)
taagtgaaataccatagttactgtcatagtaaattgagccaagagaaacaagggagcaggagaagaaaagaattaaagagagttttgtctttcagtcttcactctgtttcttcttgcttt

SEQ ID NO: 833497 - DNA, 120 bp, Artificial Sequence
  ENSG00000234456_92 (sequence is synthesized)
taccagtcattcaggtttatataatttctttagagaggcttctactatgcaggtcttccttaaagtcattggtattacctggcatgatatgtgagcctttaatatcagtccctttatctc

SEQ ID NO: 833498 - DNA, 120 bp, Artificial Sequence
  ENSG00000234456_93 (sequence is synthesized)
tttatttttaaagtttatatcagtacagagtcctggattcttaattaatttaataggttagactttatgctaatattcttcattttgatgctcaaattttccaaaatttggccagcaggg

SEQ ID NO: 833499 - DNA, 120 bp, Artificial Sequence
  ENSG00000234456_94 (sequence is synthesized)
cattttgatgctcaaattttccaaaatttggccagcagggttccttaaagctgggtaccttgccctttcaacatgtccctctgattctttatttttatttacttatttatttatttattt

SEQ ID NO: 833500 - DNA, 69 bp, Artificial Sequence
  ENSG00000234456_95 (sequence is synthesized)
ggctttcaccatgttggtcaggctggcctcgatctcctgacctcaaatgatccaagccgtccctctcat

SEQ ID NO: 833501 - DNA, 120 bp, Artificial Sequence
  ENSG00000234456_96 (sequence is synthesized)
attacaggcgtgagctgccacacccagccgtccctctcattctttaagtacttccatgttttctaaggtacaagatgttccatattattttgttatttgtcttccccagctctgaaatct

SEQ ID NO: 833502 - DNA, 120 bp, Artificial Sequence
  ENSG00000234456_97 (sequence is synthesized)
gcctttccttcaaggagccttggttctttctagtgacaaattatatttagaaagaagatctgggtatttgacttgtatattgctattaattggccattgtttctagtctctttcagtaga

SEQ ID NO: 833503 - DNA, 120 bp, Artificial Sequence
  ENSG00000234456_98 (sequence is synthesized)
cagagctaagaaatgtaaaaggaaatatttgaatgtatgtatatgtgatatattaagtacatttaaacatattaaattcatgagttcatactaatactttcaataagccacaattccctt

SEQ ID NO: 833504 - DNA, 120 bp, Artificial Sequence
  ENSG00000234456_99 (sequence is synthesized)
ttcatgttttcgaaggaaaaatatccattgtctatatacagtggacatagatagtaataatactgatcttgaaaagagcagtcttaaatagatcccattaatagttaaagataacatatc

SEQ ID NO: 833505 - DNA, 120 bp, Artificial Sequence
  ENSG00000234456_100 (sequence is synthesized)
ttagaattctagatattagagagattatctagagctgtaatctagatattttatagatctttgctgtgctgttttgaatttgtgttggagtagaacaatcagatgacaaaagctcatccc

SEQ ID NO: 833506 - DNA, 120 bp, Artificial Sequence
  ENSG00000234456_101 (sequence is synthesized)
aaagctcatcccacatggaaaaatcaaagcattcattacagagagaattttgaaataaatgcatatataaaaaatatatatgcatatataatgcatatgtatatgcatataaaatatata

SEQ ID NO: 833507 - DNA, 120 bp, Artificial Sequence
  ENSG00000234456_102 (sequence is synthesized)
gggttataaacaatgaaggaaatagtgatactatctatgtgggaacaatactagtatcctccctttggatgaatacagtagctacagatgcaattctggggactctgtttagcaatagct

SEQ ID NO: 833508 - DNA, 120 bp, Artificial Sequence
  ENSG00000234456_103 (sequence is synthesized)
taactattgcttggctacaagcatggataacttgttcaaagataatgaggagttgtaaatatttaaataaacaggatttgcaacataaaaagctttgtgactatgtgtctgaattcttag

SEQ ID NO: 833509 - DNA, 120 bp, Artificial Sequence
  ENSG00000234456_104 (sequence is synthesized)
agttttctcccagcaagaccttggatgtggcagacttttctgtaattgtccatctcgcccctatttcatgaaaagccagagcttctctacttagtttgctaaccccaaatatataaattc

SEQ ID NO: 833510 - DNA, 120 bp, Artificial Sequence
  ENSG00000234456_105 (sequence is synthesized)
aatagaagtactagcctgtttttactggtttatttgctttatctaaaaaaaacaaggcatagtttaaagtctgtttttgatagcataacaaaacaaaggttctcattttaataatgcatc

SEQ ID NO: 833511 - DNA, 120 bp, Artificial Sequence
  ENSG00000234456_106 (sequence is synthesized)
ggtaactattgcatagtaataatttaataacttgagaaatatatttatgcatgtatgtgtatatgttcatatatatgttatttttaattcagaagtaaaacaaatattggaagaggccac

SEQ ID NO: 833512 - DNA, 120 bp, Artificial Sequence
  ENSG00000234456_107 (sequence is synthesized)
ggaagaggccacagttattataaaaataatttgaccagtattggacaatgcaaatagcaatcatttagaagtttctgtacaacagatgccatatgtgttacattttatttgatcatcaaa

SEQ ID NO: 833513 - DNA, 120 bp, Artificial Sequence
  ENSG00000234456_108 (sequence is synthesized)
gaaacctcattaaccaacttcttataactaatacatagtagagataaggttgaaacctcattaggtttgactccagaccccagcctcttttgagtgcatcataaaaggctttggtctgcc

SEQ ID NO: 833514 - DNA, 120 bp, Artificial Sequence
  ENSG00000234456_109 (sequence is synthesized)
cgtggccagtaacaacttttactaaattgattctttgctttttatctgtaaaaggaagttattcacctattttgatgatccccaatgtttttaacatcaataaatgtgtccaccacacat

SEQ ID NO: 833515 - DNA, 120 bp, Artificial Sequence
  ENSG00000234456_110 (sequence is synthesized)
gatagtttttaatgttttgtttccatgattacaggattaaaaaactattaattagtgatacttttaattttgattttattaattaaaacacatctgtctacatctgaagaatagcacttg

SEQ ID NO: 833516 - DNA, 120 bp, Artificial Sequence
  ENSG00000234456_111 (sequence is synthesized)
tgacaacagcatagacggcttcattttgaggagtaaattacaattgaacatgaccaaatatacatagagaaggcgtggaccacacaaatgtgattgaaagctggcgtggagtcatcttaa

SEQ ID NO: 833517 - DNA, 120 bp, Artificial Sequence
  ENSG00000234456_112 (sequence is synthesized)
attgactttttcccaaagggcccctaaaagagggtagaatcccaacagatagagtctatggagagatagactgctgagacccatattatggtcagtgaagtgcaggcaaggaagggatcc

SEQ ID NO: 833518 - DNA, 120 bp, Artificial Sequence
  ENSG00000234456_113 (sequence is synthesized)
ttagcaaaatggggagaggaatggatggtctgaaaaaccctgaaggaactgaaacactctgcaaaggaaagaagaacaagtatcagctttgacccctgccagacctaggcagcaacaacg

SEQ ID NO: 833519 - DNA, 120 bp, Artificial Sequence
  ENSG00000234456_114 (sequence is synthesized)
gcagctcacaaagcaccagaacaaacgcgctttcttgtgcccctacatgtcttcccttcaccgtcttgaaccctggtgtcatcataaactgtgtaagttaacaactgaggaggggaagaa

SEQ ID NO: 833520 - DNA, 120 bp, Artificial Sequence
  ENSG00000234456_115 (sequence is synthesized)
tgataaattgggaaaatagaaaagtgtctgggccctactttcataccgtaggccagccttctgtagcatggcagattaggcaagtgcagaagccttaattttgaatgaaagttggagttt

SEQ ID NO: 833521 - DNA, 120 bp, Artificial Sequence
  ENSG00000234456_116 (sequence is synthesized)
ttgttctgctctggctgtacctatcagtttcaaaactggaatagtttaaatgactaaagtactaggaagattttattacttaatataactatggagaactgaccaagattttatctaggg

SEQ ID NO: 833522 - DNA, 120 bp, Artificial Sequence
  ENSG00000234456_117 (sequence is synthesized)
ggaggagtatcaccctacagagcagactttaagggacattatgagagaaaacagttacttagtgatttaatgttgccaattctgttctttagaataccatcatgtatttatatccctata

SEQ ID NO: 833523 - DNA, 120 bp, Artificial Sequence
  ENSG00000234456_118 (sequence is synthesized)
tatcacataactaaaatatacatttatctgtacgcgtgtgtatcatatggagcacattttcttttgcagggtttctttgttttaaatgtctatttggttattttcttgattgaatttctg

SEQ ID NO: 833524 - DNA, 120 bp, Artificial Sequence
  ENSG00000234456_119 (sequence is synthesized)
tgtatgcttttttcctcaatgctttagctgtaagcgaataaggtaaggactttgtatgcaatattctacatgttttgttttataattagagaatatcttattttatctaaacctcgtgta

SEQ ID NO: 833525 - DNA, 120 bp, Artificial Sequence
  ENSG00000234456_120 (sequence is synthesized)
tcacgtgatatatttgacaccctgtcatatatcatacttggatgcaaatgtttatgaaacacaaatcatctcaaatcaacaggatcaaaattatatttgaaaaatgtattcaataatatg

SEQ ID NO: 833526 - DNA, 120 bp, Artificial Sequence
  ENSG00000234456_121 (sequence is synthesized)
tgtaagacaagataaaattaattctaattgaattcacacagcgtttgaaattggatgtaaatctgtaatatcaaattacattacatatgaattattattatatttgcattcaggaaattg

SEQ ID NO: 833527 - DNA, 120 bp, Artificial Sequence
  ENSG00000234456_122 (sequence is synthesized)
tactgtgttcacttctgagtatcacttagaaagaacattagaacagataccctattttcactttctcttctcttttcctgctccttttcttcctcttttcaataacctgtcattgaaaaa

SEQ ID NO: 833528 - DNA, 120 bp, Artificial Sequence
  ENSG00000234456_123 (sequence is synthesized)
tctctccatcttaattatcaatatgaaagactgattctgagaaatgtagagaacctaagatttgcattttggtggaatatagaatataattaataaatatttttataagtatgtaaaata

SEQ ID NO: 833529 - DNA, 120 bp, Artificial Sequence
  ENSG00000234456_124 (sequence is synthesized)
tttaagaggtaacaattttaagatcttaaaagtcttctatcaaatactgaattttagatgttaaggctagtagagctgtacaaaaaacaacagcttcttgtatgaatgttcctcagttta

SEQ ID NO: 833530 - DNA, 120 bp, Artificial Sequence
  ENSG00000234456_125 (sequence is synthesized)
aatatttagtgttctattatcagtatgtgggcattaaaaaaacaagtcatttgaaactgatagagataattaagaaattcttagattttgggtataggtgctgcaacttagaatttaagt

SEQ ID NO: 833531 - DNA, 120 bp, Artificial Sequence
  ENSG00000234456_126 (sequence is synthesized)
gtcgtccaaaagagattagtattggtcataacatggactctaaagccaccatttaaatgaagcatgtaaaaaagaatattctagtacacaaaagttattaatggcctagaatgacctcct

SEQ ID NO: 833532 - DNA, 120 bp, Artificial Sequence
  ENSG00000234456_127 (sequence is synthesized)
tctcactcatatgatgcaaagaataaagtatataaaaatgtttgttacaatggctatccataaaaaagaaaaccctccaaaacagcaaaattgaataggtatccacagtcaactttatcc

SEQ ID NO: 833533 - DNA, 120 bp, Artificial Sequence
  ENSG00000234456_128 (sequence is synthesized)
tgaaaattgcctagaaatactggttgtgattacacagcatcctgagaccaatgaatctttagacagtaataatttcctactctaaagctattctctacttcctccttagtgacagagctc

SEQ ID NO: 833534 - DNA, 120 bp, Artificial Sequence
  ENSG00000234456_129 (sequence is synthesized)
aggaggcaggggaggaggggcgcgcgcgccgggtggggagccacggagggcttcgccgctgcctccctccctccctccgcagcttgacccggtagtgaaggcagagagagaggcaggctg

SEQ ID NO: 833535 - DNA, 120 bp, Artificial Sequence
  ENSG00000234456_130 (sequence is synthesized)
ggtctctcttgaaaagcagaaagttttgcatatgaggtatgatttagtgggctagaaacatcttttccaccctccccaaaatgtttcactatgttttatcatactatctgataattttgc

SEQ ID NO: 833536 - DNA, 120 bp, Artificial Sequence
  ENSG00000234456_131 (sequence is synthesized)
actaaagttttctttctgtgttaagaaaatgcaaatatctctgaatgggtctctttgctttagtcatactcatatggctactactgaacaaaatatgttcattacaggatgaagggaatg

SEQ ID NO: 833537 - DNA, 120 bp, Artificial Sequence
  ENSG00000234456_132 (sequence is synthesized)
ttgccagccagcaaatccctagagtttgcactacaccaaacgttgcttagcaatttccacgattttctcagtctaatttgcaagaatcaaggagatgtttgtgtatgctacatgaagttg

SEQ ID NO: 833538 - DNA, 120 bp, Artificial Sequence
  ENSG00000234456_133 (sequence is synthesized)
taaaattggtatttattgtatgtttctatatcgaaagctttacaaacaaaggaaatggaaagttaacaggtggatatgatagtgtggcactactttagctggatggtaagggagagcttc

SEQ ID NO: 833539 - DNA, 120 bp, Artificial Sequence
  ENSG00000234456_134 (sequence is synthesized)
tcttaggaagtgttttaggccaggacttgaataatgaacagtatctagttgtacaaaaatctggaggaaagacttttcaggcccaggagaaatgaaaattcttttcatgcatacaagaat

SEQ ID NO: 833540 - DNA, 120 bp, Artificial Sequence
  ENSG00000234456_135 (sequence is synthesized)
gaaagtgaaaattacctactctatgtcctgaagtgggaagttggcttgccagagagtaggtaattttcactttgattctttcatgccttcagttatactacttcttaggttagttcataa

SEQ ID NO: 833541 - DNA, 120 bp, Artificial Sequence
  ENSG00000234456_136 (sequence is synthesized)
gggtttccacaatttggttcccacttaaaatttaaaacttccctaacccattcccaccatatattgtgctaatccatgcatatgtgactttgcgtatgctgttttcattgtttaatattc

SEQ ID NO: 833542 - DNA, 120 bp, Artificial Sequence
  ENSG00000234456_137 (sequence is synthesized)
ttctcatgcattcgttctttcctgataacgaactcatctttgaaactccccttcaagcatcctctactttaggaggccgcttctcactgtctcctgcctaccacccattgaattgttcaa

SEQ ID NO: 833543 - DNA, 120 bp, Artificial Sequence
  ENSG00000228172_0 (sequence is synthesized)
gagttggctgcgtttggagatccctcggcctgagagcaccagattctcaaaacagtaagtcctaccacttgttctatcgtaaaacttattttgggcaagtcactcaagccttcgataggt

SEQ ID NO: 833544 - DNA, 120 bp, Artificial Sequence
  ENSG00000228172_1 (sequence is synthesized)
aagatagtacctgaaagcattccagctcaactctgccccaagagggagccaccccatggaaggacggagctgagcaacatgccactcaaaggaaaagcacttagaaccactctaatgcag

SEQ ID NO: 833545 - DNA, 120 bp, Artificial Sequence
  ENSG00000228172_2 (sequence is synthesized)
cctgagtgaccctgggcaagtcacttcacttccctgagactcaagtttcatcaagatgggaacaatgagcatctgcctcacaggcttgtcgtgaggattaagtgagaaggtgcagctgca

SEQ ID NO: 833546 - DNA, 120 bp, Artificial Sequence
  ENSG00000228172_3 (sequence is synthesized)
aagacatcaagctggacccatcgaggatttcggattcagccatcatggggctgctgccggggaagccactgcccctcctttctcctcagcactggggttataaaaaaatacctacaaacc

SEQ ID NO: 833547 - DNA, 120 bp, Artificial Sequence
  ENSG00000228172_4 (sequence is synthesized)
tgcccccgcggggtctgtgtccccgggaggagttggctgcgtttggagatccctcggcctggtattcgtcgcgtctccctgcttgttgctctccacgtttagccccatccgacttctgga

SEQ ID NO: 833548 - DNA, 120 bp, Artificial Sequence
  ENSG00000228172_5 (sequence is synthesized)
aggacacagtgagcgcttcaacgcgctgaactaaacgaatgaaggggaacaccaactcagctgtcacccccgcccccaagtgtcactggctagaagatcttcccccggttcgccggcagc

SEQ ID NO: 833549 - DNA, 120 bp, Artificial Sequence
  ENSG00000228172_6 (sequence is synthesized)
accggtgggtcttgtcacctctgcgccccgcagccctccggaggctgcagttgctgtctgctgacaggcgtcccctcaggagaacgggagctcctccagcgcagggccctgctcagcacc

SEQ ID NO: 833550 - DNA, 120 bp, Artificial Sequence
  ENSG00000228172_7 (sequence is synthesized)
ctgctcagcacccctggtcccgggggcccccacggaggccgccgcgctcagtgaaactttgccgcgcgcagcagtggccggagacccgcgcggaccctctccccgcggggacccgccagg

SEQ ID NO: 833551 - DNA, 120 bp, Artificial Sequence
  ENSG00000228172_8 (sequence is synthesized)
tcccccgcggcagacgacccgacctgggccaaggtcggccaagtgctcgccgcctgcccagcggcccttggacccacaggacccggacccgagtgcgcggaagcctccgagccgcggcca

SEQ ID NO: 833552 - DNA, 120 bp, Artificial Sequence
  ENSG00000228172_9 (sequence is synthesized)
ggtctcagaatgcgcggcggggcagcccggcccgtcaagcagcgaagccgaaactagaagcctgaggtctggcttggtcactgtttgctggggaactccgacgagcaactacccttcggg

SEQ ID NO: 833553 - DNA, 120 bp, Artificial Sequence
  ENSG00000228172_10 (sequence is synthesized)
gactcagtttcccccgggccaagtgagacggacagctgcggctcccgcgagaactcgcgcgggaacaggagctgcgggctccgcacagcgcccggcacgtagacccagtctactaacggg

SEQ ID NO: 833554 - DNA, 120 bp, Artificial Sequence
  ENSG00000228172_11 (sequence is synthesized)
ctggaaggtcgcgctcccgcctccgcgcctccctagaacctttctcacctcaagctcgggctcccggactctctcacctcacggcccctccttccaccttgggccgcccagcctcaaccg

SEQ ID NO: 833555 - DNA, 120 bp, Artificial Sequence
  ENSG00000228172_12 (sequence is synthesized)
ccctcacttccgctgacccgccccccggaagcgatcctccgcagctgcgcaccgaggcgcacctccgcgcaccctcaggaggcgggtccagctcggtggcgaggggagcgcggcccccga

SEQ ID NO: 833556 - DNA, 120 bp, Artificial Sequence
  ENSG00000228172_13 (sequence is synthesized)
ccagttcttggttcccaggcaggtccctttgcaaagcctctctccagcaagaatgcgcagaatgggcctctttctcctcttgactcctgccctccagcactttgcagctttcttctattt

SEQ ID NO: 833557 - DNA, 120 bp, Artificial Sequence
  ENSG00000228172_14 (sequence is synthesized)
cacacacacacacacacacacacggtatattcaatgagtttgcttattagatgggtacttgatgtacaagactccagaggctctgtgggaagagccacattccttccaggctcactaacc

SEQ ID NO: 833558 - DNA, 120 bp, Artificial Sequence
  ENSG00000228172_15 (sequence is synthesized)
ctctgtgggaagagccacattccttccaggctcactaacccactccctctttgtgctccagccctcactgtcttggtctgtggcatgcagttcctgggtcacatttccttctctgccttc

SEQ ID NO: 833559 - DNA, 120 bp, Artificial Sequence
  ENSG00000228172_16 (sequence is synthesized)
agcacagcctcgggctgtgcctggctcccaggctggagttccttggttccaaagcctgcagtcccctctgccagagacagagctggtttcatgggtgaacagcccatgcagtcacaacgg

SEQ ID NO: 833560 - DNA, 120 bp, Artificial Sequence
  ENSG00000228172_17 (sequence is synthesized)
gccgcatgctcagaatcctgtacttggtttagtactttgctgttgccgtcttgaaatgattttctaataggggttcttgtgttttcattttgcacggggctgtgcaaattatgtgactgg

SEQ ID NO: 833561 - DNA, 120 bp, Artificial Sequence
  ENSG00000228172_18 (sequence is synthesized)
tcctggctagagacctcagaggtcgtccaccctgatctccaccatatctcaaacgctgaagattgacttccaggtctggccctcttcccaggatggcacattgtgttttaatcattacct

SEQ ID NO: 833562 - DNA, 120 bp, Artificial Sequence
  ENSG00000228172_19 (sequence is synthesized)
ttccctcctgtgcgatggcggatcatgcaagtccacgctggctgtctgtcctgggtgtagatgctgatttggtgtcccactcagatccccttgcaggaagaacggagctccctacctggg

SEQ ID NO: 833563 - DNA, 120 bp, Artificial Sequence
  ENSG00000228172_20 (sequence is synthesized)
aatttccttcacctcccaagccaatgactgataaaaggtccaaaaggccagttcagctctgcagtgtggtttatgccccacagctcttccactgtgggtcaggccaaggctgggctgaga

SEQ ID NO: 833564 - DNA, 120 bp, Artificial Sequence
  ENSG00000228172_21 (sequence is synthesized)
ctgttcctgctcagcatttttcctttccctcttctgcttccttccttcttttactggtttttctggaagtacactcccccccagccccaccaaacaaacaaaacaaacaaacaaaaaaac

SEQ ID NO: 833565 - DNA, 120 bp, Artificial Sequence
  ENSG00000228173_0 (sequence is synthesized)
agtgcctaagttttctctgagattcatgagtcagaaatgggagccctcccctaggactggtaactggcgcaccatgaatctgcttcacatataacacctgccaggtgtccttcaaaaatg

SEQ ID NO: 833566 - DNA, 120 bp, Artificial Sequence
  ENSG00000228173_1 (sequence is synthesized)
tcatgtgctcataaacacttcaaattctcagtggttctttctgaattataaactccatgaagacccaattccatcagcagccattggaagtttttgacaaaatgggaagatcactgctgt

SEQ ID NO: 833567 - DNA, 120 bp, Artificial Sequence
  ENSG00000228173_2 (sequence is synthesized)
atatttgtagtttaaatagcgagcatttaaagctttctctgaggcagtttctggaaagttaaagactaatgagaaaaacagctgaagaaactctccccaatgagtttatgtccctaagcg

SEQ ID NO: 833568 - DNA, 120 bp, Artificial Sequence
  ENSG00000228173_3 (sequence is synthesized)
tgagccgcagtaaaactccagagaatgctctaatttcttgatttatttcctggatttcctcctaataaacaaagaatgatgaaagcaaatatgcaagggccaagtttctacggtccagca

SEQ ID NO: 833569 - DNA, 120 bp, Artificial Sequence
  ENSG00000228173_4 (sequence is synthesized)
atcacagaatcattaatgctgtgatgcttccaagaatatgggcaaacagcaagagaaagaaactagtaaactttgaagaaatccctttgagaaaatttttaaatgatccaggataaatag

SEQ ID NO: 833570 - DNA, 120 bp, Artificial Sequence
  ENSG00000228173_5 (sequence is synthesized)
aaaataatgtgctgctgttcagataaatttactggagaaaccacaaagatgagattgttaaggaagagtcaagggatggggactataaaatgcatatgcttctccagataacactgagtt

SEQ ID NO: 833571 - DNA, 120 bp, Artificial Sequence
  ENSG00000228173_6 (sequence is synthesized)
ttcagagtggcaaccaacattgcagctttgaaaagaaaaaaaaacacttggaaagtgaaaaagaaagaggggaaattatatgtacaattatcagaaaagcaacatctgagaattcagcaa

SEQ ID NO: 833572 - DNA, 120 bp, Artificial Sequence
  ENSG00000234452_0 (sequence is synthesized)
tactcgccatctaaaaccaaaaatcaggacatatttatatcttattgctatgtccaaaggttgatttttcttcacttgcctctcttgaaggtagttgtggcaataaagtgtagtctccat

SEQ ID NO: 833573 - DNA, 120 bp, Artificial Sequence
  ENSG00000234452_1 (sequence is synthesized)
aactcaaaggcaaaggtactttttgaggacttccagcaccctcttccaacagactggaagatggatgtggatatgaaacgacttcaaccacacagaccaggacatcagtctaggggctgg

SEQ ID NO: 833574 - DNA, 120 bp, Artificial Sequence
  ENSG00000234452_2 (sequence is synthesized)
cagaggtgagcatcttctgtttggcatttccacatgtaataagttaagaactgatttgagaagatatccaaaaaatgcaattgtataaatccaaataaaaaatttaaataatcatcccaa

SEQ ID NO: 833575 - DNA, 120 bp, Artificial Sequence
  ENSG00000234452_3 (sequence is synthesized)
atacagtgagtgctgccaacatctggcatactagaattgatctactgggcactgcagcctagtggctaaaagtcctgccacttactaaccatgggaccttggacatgttcttcaactgct

SEQ ID NO: 833576 - DNA, 120 bp, Artificial Sequence
  ENSG00000234452_4 (sequence is synthesized)
cctgatggcattcaaggttggcatagaacgctacctggcccatgggttactcgccatctaaaaccaaaaatcaggacatatttatatcttattgctatgtccaaaggttgatttttcttc

SEQ ID NO: 833577 - DNA, 120 bp, Artificial Sequence
  ENSG00000234452_5 (sequence is synthesized)
acttggtgagcatcttctgtttggcatttccacatgtaataagttaagaactgatttgagaagatatccaaaaaatgcaattgtataaatccaaataaaaaatttaaataatcatcccaa

SEQ ID NO: 833578 - DNA, 76 bp, Artificial Sequence
  ENSG00000250882_0 (sequence is synthesized)
aaatatactattattgtaattccaaaggaaatgcttttcattcccatctcagaagaattagagaaatgttatcttt

SEQ ID NO: 833579 - DNA, 120 bp, Artificial Sequence
  ENSG00000250882_1 (sequence is synthesized)
cttttttcctagtgataaacatcaactgtagctgaaaaatgtactaaatagaactgtacttcccaatgttttaacagagatctaatcatatttcagcttaacgctttttagtagaaaaca

SEQ ID NO: 833580 - DNA, 120 bp, Artificial Sequence
  ENSG00000250882_2 (sequence is synthesized)
gttttgtattttatactactctactcttatgtctctggtatttaataatgaattgattttctagctatttgttgcggataaaatacaaaaatgaataatggtgtatcataaccttctgac

SEQ ID NO: 833581 - DNA, 120 bp, Artificial Sequence
  ENSG00000257509_0 (sequence is synthesized)
ttaaaaacaaatccagctcagaagcaccacacagacattctttaaaagtttgtgtgagccactgtgcccttgtttgaactcttgcttatctgtccttctgttgggttaacaacgtaaata

SEQ ID NO: 833582 - DNA, 120 bp, Artificial Sequence
  ENSG00000257509_1 (sequence is synthesized)
aagtcaaagaaactgtcctgctctttagtgaggatgggtacatctctagggagtagagggtctcttgagattatgagagaatgagatctttttatatatgtgccaaattttagaaagtcc

SEQ ID NO: 833583 - DNA, 120 bp, Artificial Sequence
  ENSG00000257509_2 (sequence is synthesized)
taatcctgaggctgagcttctgatgactggtgataagatgtgagggggaggtggagaaagagaaaataactgttaaagtgggctaaataaaatggtagggtttaggttctgataggaaaa

SEQ ID NO: 833584 - DNA, 120 bp, Artificial Sequence
  ENSG00000257509_3 (sequence is synthesized)
tatatagactcttatactgagcagtgttggacatgaatgatacaaaacacctagaataatggcgagctccaactcatggtaaactgaaatattctctcattcccaggcagacatcatgag

SEQ ID NO: 833585 - DNA, 120 bp, Artificial Sequence
  ENSG00000281016_0 (sequence is synthesized)
cggttagggcctcgccgtcctgcttccacccctcagggaggcctccgtgattcggcctcagcctccgtcgctctgtgacctgtgggtattggatgattcctagctgagactctgctacac

SEQ ID NO: 833586 - DNA, 120 bp, Artificial Sequence
  ENSG00000281016_1 (sequence is synthesized)
ccctgaagtggggaaatgactatttaatcagctggcagatcaacaggccaaaatttccaccacaactgcaaacttgaatgtggatgaatggattacatgttcaagcctggtaatgagagg

SEQ ID NO: 833587 - DNA, 120 bp, Artificial Sequence
  ENSG00000281016_2 (sequence is synthesized)
cattataatggaataacctatctactaatggtcagcacatgtgtctttgtatctgaggccaaggataaattcatcaactgggtagccaccactatagaagaagccaaccacaatcaatgt

SEQ ID NO: 833588 - DNA, 120 bp, Artificial Sequence
  ENSG00000281016_3 (sequence is synthesized)
aatgagctaccttgaagaatcgtccgtgacaacatttctgaatggctatgtcactatcaatggggccacaacaacaacacttgcaatccaacctgaacttcctatgaccaaaccaagcaa

SEQ ID NO: 833589 - DNA, 120 bp, Artificial Sequence
  ENSG00000281016_4 (sequence is synthesized)
tctatttatgcccaagtcaagtgaaaggtgaactccaccttcaccatgcatcaaaagccttggtatcctgcccaatatgcctggaacggtatatattgggaacctgctgtgctggtggcc

SEQ ID NO: 833590 - DNA, 120 bp, Artificial Sequence
  ENSG00000281016_5 (sequence is synthesized)
ggattccatatagctccccacccacccgccactttgtctggaggccttaaatggctcctctaatgttcctctgggtttctcccaccagacaactgtcaacacatactccaaatcaacagc

SEQ ID NO: 833591 - DNA, 120 bp, Artificial Sequence
  ENSG00000247950_0 (sequence is synthesized)
ggggccggagaggagagaggaagaggaaggaacgcgcctggcgtcactgagggtgtcacccgggaccgcggctcaggaaccccagacgcacgggccttgtgctgtcgctgccgtggcacc

SEQ ID NO: 833592 - DNA, 120 bp, Artificial Sequence
  ENSG00000247950_1 (sequence is synthesized)
ccttctagaagaaaatctaggtatcttgcaccaagaagtggaaaataaagaagagaaatgagaaccatgtttgtattggctgtctataaaataagagggagaagttaagtgaagttttcc

SEQ ID NO: 833593 - DNA, 120 bp, Artificial Sequence
  ENSG00000247950_2 (sequence is synthesized)
aacccacagctggtaagtatcagagtaaggattggagccaggcagagtggttccagagcccacacatttgtccacagtactatgctgcttttttaaaaagtctttctattattattgttc

SEQ ID NO: 833594 - DNA, 120 bp, Artificial Sequence
  ENSG00000247950_3 (sequence is synthesized)
gcatttggagaacattatcctatcaatgatctttttcaaaggggtgtttttatggatcattcatttattcacttaattagagaaatgatttcgtgtgtgcctactttgtgctggcactgt

SEQ ID NO: 833595 - DNA, 120 bp, Artificial Sequence
  ENSG00000247950_4 (sequence is synthesized)
gagggtttagcagtgaagaaatacatgacttctaccctcacacaatttcatttagcttacaattaggtaagataatataaattatatagcttaggattacaattggctttatatgatttt

SEQ ID NO: 833596 - DNA, 120 bp, Artificial Sequence
  ENSG00000247950_5 (sequence is synthesized)
agaaattgatttttcttttccatgaatagagtctggaggtaggttgcttagggctggtaagaaaactccaccatcatcagtgacccaggctgcttctatgttgctgctctgccatccgca

SEQ ID NO: 833597 - DNA, 120 bp, Artificial Sequence
  ENSG00000247950_6 (sequence is synthesized)
tgctgcttgtggttcagagcatctggtctaagctccaagcatcctgtctgctttgcagccaacaaaaaggagggaaagggaagaagagcacttctcttaaggagacttgctgtatgttcc

SEQ ID NO: 833598 - DNA, 120 bp, Artificial Sequence
  ENSG00000247950_7 (sequence is synthesized)
actcacctcactcagatctcatttgtcagaactcagctacctggctacaactaactgcagaggaggctggggaatgtagtctgttagttcggtggctatacgctcaactaaaacccagag

SEQ ID NO: 833599 - DNA, 120 bp, Artificial Sequence
  ENSG00000247950_8 (sequence is synthesized)
ttctacttctgttcccaaggcaaaggagaactgtacacgggaggcaattagcaaacctctacatgtatggaaacattttctaaactgcagagacctttaggaaattaaagatctattaga

SEQ ID NO: 833600 - DNA, 120 bp, Artificial Sequence
  ENSG00000247950_9 (sequence is synthesized)
gtgggataatggctgcatttatttgatattacatctattgtctaatggttttcagtcttcccttgtagtaattatttttcatttagaatctagagttgtcatttgatttcttcagcaact

SEQ ID NO: 833601 - DNA, 120 bp, Artificial Sequence
  ENSG00000247950_10 (sequence is synthesized)
ccagtatccctgaacttatgctcatctttttgctgtgctttcggaaaaagaaagctagatgacttcatatgtattttagcatatatatttggggggagcccaaacctgggagtgaaccag

SEQ ID NO: 833602 - DNA, 120 bp, Artificial Sequence
  ENSG00000247950_11 (sequence is synthesized)
gcctcatgccaaacaactcattacaaaaggagctatggtcccagaccacaacgaagcttcatgagacctctcctcatctgtgcacggacaagtgtctgactctggagcccaggctgttgc

SEQ ID NO: 833603 - DNA, 120 bp, Artificial Sequence
  ENSG00000247950_12 (sequence is synthesized)
tttccagtctggtggtgaatccttcacagtctgcaagccttacaggagaaatcgaaacacagctgctacattgtaagtccacaagtgaaataagcagtgtccagtggataacaagaaggc

SEQ ID NO: 833604 - DNA, 120 bp, Artificial Sequence
  ENSG00000247950_13 (sequence is synthesized)
tcccagaatagctcctcaaaaaatctgccttcttcctttactaccaagaatcctaacctgtaggctcaaagatgattcaaacattgagggcagtggtacttgggattcaaaggcacattg

SEQ ID NO: 833605 - DNA, 120 bp, Artificial Sequence
  ENSG00000247950_14 (sequence is synthesized)
gtgcagaaaggagcccatagcatgctgttgacaatttgaccaggtgaaatctgtaacttcacatgttggctcaccagagcaatattaagagagataatcatcagcaatatccacacaaat

SEQ ID NO: 833606 - DNA, 120 bp, Artificial Sequence
  ENSG00000247950_15 (sequence is synthesized)
tgcattccttaaagcaaaccaattgctttgaaggattgagatgttggaagctttagaatgttgattatgatgatacccaagactcaagtttaagaaggaaaggaagcaataagatcatgc

SEQ ID NO: 833607 - DNA, 120 bp, Artificial Sequence
  ENSG00000247950_16 (sequence is synthesized)
atctagcaatcaaatacctcgatgaatgtgcagagtggcttggaagtgagcagtagttaaaaacaaatgtaacaaaatataagatggaatactttacatcacagttttggctgaggctcc

SEQ ID NO: 833608 - DNA, 120 bp, Artificial Sequence
  ENSG00000247950_17 (sequence is synthesized)
aaagactgagaataaatcagtatctgcccagtcaccacggtgtgccaaaggaggtgctggattgcctcgtcaggacatgctacatggatggagagaagattccttggggagatttggtgt

SEQ ID NO: 833609 - DNA, 120 bp, Artificial Sequence
  ENSG00000247950_18 (sequence is synthesized)
gtgcataaccagtccttccagcactggagaaaggaggagtcctgcacaggttgtacacgattctttccacctggaaacttgaaacatgtgccctggagttgaggatgcttggtttaatga

SEQ ID NO: 833610 - DNA, 120 bp, Artificial Sequence
  ENSG00000247950_19 (sequence is synthesized)
tactgacctgcaattgagaagaccaaaagggcgagacataccttcacgcaaggcgaggatgcatgagttttcctgtgaagcaggaaagagtttaacaattcacggttgcacagtagcgct

SEQ ID NO: 833611 - DNA, 120 bp, Artificial Sequence
  ENSG00000247950_20 (sequence is synthesized)
agcggctttgcggtttggtcctcagacccggcagccgccactggtgatgagctgctaggaagcccctgtcggcaagctcgttggagcttgaatccactgtcacccctctgactcactggc

SEQ ID NO: 833612 - DNA, 120 bp, Artificial Sequence
  ENSG00000247950_21 (sequence is synthesized)
gttccgagaagttgtggctcagcttgctttgtctacattagtggaatctttaagtctttctggtctgtctcagcatactcactggcaggccctagactacattacccaagtcattttgcc

SEQ ID NO: 833613 - DNA, 120 bp, Artificial Sequence
  ENSG00000247950_22 (sequence is synthesized)
gtcttggaatcctgagtatgtcatcactctgtattggagatgagattgctcagaaacactgaattcagaatgggatctagcaagatggtatttctggagcaataagtcatttactgaatg

SEQ ID NO: 833614 - DNA, 120 bp, Artificial Sequence
  ENSG00000247950_23 (sequence is synthesized)
attatgcaaagcataaattgcattgtagtcctagaataatacaaagcttccctttagttgttgccgtaaattaataactggcattttaatgcactaaatgaattttagtagttagattta

SEQ ID NO: 833615 - DNA, 120 bp, Artificial Sequence
  ENSG00000247950_24 (sequence is synthesized)
tatctttgacttctaggaatttcaactacattagagttcatatacacaaaaggggcaagcccttttccacagcatttccagcttctccacagaaacctagccccacatgagcaaaagatc

SEQ ID NO: 833616 - DNA, 120 bp, Artificial Sequence
  ENSG00000247950_25 (sequence is synthesized)
acactctgtgcttcatcaaagagattacacaattacagattccagcatctcccaggagtcctttgaatttggattaaggtctataattacgtgggtaagggaataactaggtaattggct

SEQ ID NO: 833617 - DNA, 120 bp, Artificial Sequence
  ENSG00000247950_26 (sequence is synthesized)
ttctgcacctggaatgtattctcctgggtataagaggctccttttaatcagaagtatatgggatgaaagtgaaccctgtctcttaaggggagactccttaagaggaggattggggccctg

SEQ ID NO: 833618 - DNA, 120 bp, Artificial Sequence
  ENSG00000247950_27 (sequence is synthesized)
tgttttaatagatcttctccacaatctttaatacctaagctccttccccttgtccactaatttgctgtagaatttttctagcatgtttatgatggtgttcagggcacactaccccaaaat

SEQ ID NO: 833619 - DNA, 120 bp, Artificial Sequence
  ENSG00000247950_28 (sequence is synthesized)
cctcatgtgagagatgccctctctatacctggagaaaagaagcagtcttatttgtgaagacagagagacgccaagaggaatctaaatgaataggccttggaaccccagacgcacgggcct

SEQ ID NO: 833620 - DNA, 86 bp, Artificial Sequence
  ENSG00000247950_29 (sequence is synthesized)
cctatctctagctcaagaaatgtcagctctttttttttttttgagactgtcacccagtcgggagtacagtggcgccatcttggctc

SEQ ID NO: 833621 - DNA, 71 bp, Artificial Sequence
  ENSG00000247950_30 (sequence is synthesized)
cagcctcctgagtagctggggctacaggtatgcaccatcactcctggctaattgttgtatttttagtagat

SEQ ID NO: 833622 - DNA, 120 bp, Artificial Sequence
  ENSG00000247950_31 (sequence is synthesized)
cagacgtgagccaccatgcccagccaagaaatgtcaattctttatcgtagcctggctttccatatttctcactagggtttttattctctagtttgtaaatcacatttggcgtttgtagat

SEQ ID NO: 833623 - DNA, 120 bp, Artificial Sequence
  ENSG00000247950_32 (sequence is synthesized)
ttgtagatcactccttcccttttagtggcattctctattaggtgtccatctcccaatatgaagaaacagttttctgctttttcctcctttatctgatccatttacagatttattacattt

SEQ ID NO: 833624 - DNA, 120 bp, Artificial Sequence
  ENSG00000247950_33 (sequence is synthesized)
ataataggctaggtattggggatacaaaaatgaataagatatggtctgttttcaaaggtatgcagaaacttttctatatattcctactgacttgtatttgtatttcttgaattaaaaaca

SEQ ID NO: 833625 - DNA, 120 bp, Artificial Sequence
  ENSG00000247950_34 (sequence is synthesized)
tttcctcctgacaaacactacaacctttatgaaaatatttcactcttttgctttaatttccattactactataagtgaaaaaaggatgaagaattgaatgaataggattgaaccatctac

SEQ ID NO: 833626 - DNA, 120 bp, Artificial Sequence
  ENSG00000247950_35 (sequence is synthesized)
taggcactgtgcttgtaaatctagatatgtatttttttctatttaatcctaacaataactccatgggatatttttcttatccctattttatctgtgaagaaactaatgtttatagagctg

SEQ ID NO: 833627 - DNA, 120 bp, Artificial Sequence
  ENSG00000247950_36 (sequence is synthesized)
aggccggagccgagctggcccaggcctgagtctggcccggggttccgtggccccagtgccggccccgcggctgctgctccggcccggccaggtgccttcgtgttgaggcgaaaggactgg

SEQ ID NO: 833628 - DNA, 120 bp, Artificial Sequence
  ENSG00000247950_37 (sequence is synthesized)
gcctcagtgggtgaagggaccgggtggcccgcttccacctagggcagaggctggatcggccgcggcgaggctgggcccagcattactgggaggggaacttgagagccgcgggttgatgtt

SEQ ID NO: 833629 - DNA, 120 bp, Artificial Sequence
  ENSG00000247950_38 (sequence is synthesized)
cggagctcaggcgacgactgaccacccacccttcctcgaagaggaacaatggcttgggtttggtttttaatttttgattcccccacctcccctttcttgattccaaaggaaatatagcat

SEQ ID NO: 833630 - DNA, 120 bp, Artificial Sequence
  ENSG00000247950_39 (sequence is synthesized)
tcaagcgccatgtctgttgggaatatataattccttggcaaagaaagaggaaacatttctctgataaacacaagaatctcactgatggaatttgagaaatggcaggtgtgaggactctga

SEQ ID NO: 833631 - DNA, 120 bp, Artificial Sequence
  ENSG00000247950_40 (sequence is synthesized)
agtctgaaaatctaggtatcttgcaccaagaagtggaaaataaagaagagaaatgagaaccatgtttgtattggctgtctataaaataagagaatgaattccagcagaccccagactttt

SEQ ID NO: 833632 - DNA, 120 bp, Artificial Sequence
  ENSG00000247950_41 (sequence is synthesized)
accagggaccagtttcgtggaagacaaactgtgtgaggcatggtttcaggatgaaactgttctgtctcagatcatcaggcattagttagcttctcataaggagcttgcagcgtagatcct

SEQ ID NO: 833633 - DNA, 120 bp, Artificial Sequence
  ENSG00000247950_42 (sequence is synthesized)
attagttagcttctcataaggagcttgcagcgtagatcctcgcatgtgcaagttcacagtagggtccgcgctcctgtgagaatctgatgcagccactgatctgacaggaggcggagctca

SEQ ID NO: 833634 - DNA, 120 bp, Artificial Sequence
  ENSG00000247950_43 (sequence is synthesized)
ctgtgcggcctggttcctaacaggtcatggactagtaccgtcagtggctcaggggttggggaccattgaattataaatttgagagctctcctgataattcaggaaaacaacttgcttttg

SEQ ID NO: 833635 - DNA, 120 bp, Artificial Sequence
  ENSG00000247950_44 (sequence is synthesized)
agttacctatcaaaataaattttattcagatgattgctttgatataaataatctagtaaggctattttgtatttccaaaattaaactctcaatttcctgtttgtgtataatgaaatagat

SEQ ID NO: 833636 - DNA, 120 bp, Artificial Sequence
  ENSG00000247950_45 (sequence is synthesized)
aagatgcaaattaaaaaggaaagagaatgactggtctgtgaaaacctcatgaaacagagcttcttgtttaaactgttactatctacaattattgcttttaaggtatttcttatatattaa

SEQ ID NO: 833637 - DNA, 120 bp, Artificial Sequence
  ENSG00000247950_46 (sequence is synthesized)
aatatcctgtataatcatttgaaatattattttaggaaggaaaaatgagtttgaacaatagactcttcattgttaaatagcccctgtgggagatacggacagcctggtgatgactgtcac

SEQ ID NO: 833638 - DNA, 120 bp, Artificial Sequence
  ENSG00000247950_47 (sequence is synthesized)
cccatggcgtgcattcctgtactattgattcgactgtgtcttaacttgcacatattccacatatgcttttgcagcacaaattccaaaatctcatgagaaatgtaaaaatgtgtgctgggg

SEQ ID NO: 833639 - DNA, 120 bp, Artificial Sequence
  ENSG00000247950_48 (sequence is synthesized)
actgtttcttaatgggttgtctataaagtaagcgtgtgtgttgcatatatcttgatattttttctttttcatttttttcaacttagctgcacattaaaatcatccatcttccttggtctc

SEQ ID NO: 833640 - DNA, 120 bp, Artificial Sequence
  ENSG00000247950_49 (sequence is synthesized)
tttttttttttttttttttgctcttagtgaatctttgtttcttcttttcattatggcattccagttgagtttcaccacgcattatcatgagaataaataatttcactgactttaataata

SEQ ID NO: 833641 - DNA, 120 bp, Artificial Sequence
  ENSG00000247950_50 (sequence is synthesized)
actgagggtgtcacccgggaccgcggctcaggaaccccagacgcacgggccttgtgctgtcgctgccgtggcaccccttctagaagaagtgggagccttggacaactgaacgcctatctc

SEQ ID NO: 833642 - DNA, 120 bp, Artificial Sequence
  ENSG00000247950_51 (sequence is synthesized)
tgtattggctgtctataaaataagagttctaggtacatgaaatccactggtgtgctggtaaatgtttaataaccagtcctctggaaaggagaaagttgaagaccccatttatacatttgc

SEQ ID NO: 833643 - DNA, 120 bp, Artificial Sequence
  ENSG00000247950_52 (sequence is synthesized)
tcatttctgtggtgtaaataccctgaaaatagctgatttcgagctatcaacattactgaagatggagctgggaagagggagaagttaagtgaagttttccaacccacagctggcaggtaa

SEQ ID NO: 833644 - DNA, 120 bp, Artificial Sequence
  ENSG00000247950_53 (sequence is synthesized)
aaggaacgcgcctggcgtcactgagggtgtcacccgggaccgcggctcaggaaccccagacgcacgggccttgtgctgtcgctgccgtggcaccccttctagaagtcgtgaaggggcctc

SEQ ID NO: 833645 - DNA, 120 bp, Artificial Sequence
  ENSG00000259281_0 (sequence is synthesized)
atcatcagaccattctgaagaggaggagttggcacagttacttctcctctctgagcctcgatctccctgccggcaaaatggggatccttgtcccagctccactcactctatagggttcgt

SEQ ID NO: 833646 - DNA, 120 bp, Artificial Sequence
  ENSG00000259281_1 (sequence is synthesized)
ttgaggctcatggaatgaaaagatctaaagaagtctggccagagggacactgagatgagcaatgtggttggaggagaggatactgacccaagaattctctggataagaagaaggaggagg

SEQ ID NO: 833647 - DNA, 120 bp, Artificial Sequence
  ENSG00000259281_2 (sequence is synthesized)
aggaaatatcaatgatggacgtcaatattattgcctcctgcatccctgcctgtttatttggagatgaaaagcgccctagggtcatctctccaggacgaagatgagtgatgacagaaggga

SEQ ID NO: 833648 - DNA, 120 bp, Artificial Sequence
  ENSG00000259281_3 (sequence is synthesized)
ggagagctacacatggagaaaagggcatcctccagctggattcattcatgaaaccaggacccatttcctctgggcagagttctctccactgagggcccagggctggggctgagggcaaag

SEQ ID NO: 833649 - DNA, 120 bp, Artificial Sequence
  ENSG00000259281_4 (sequence is synthesized)
gaacctgcacagggaggaggaactagtgatcctgctcccagccctggttcaccaagtgactgcatgtatgcctctttgtgcctcagttaactcatctgataaatgggtatgacaattcca

SEQ ID NO: 833650 - DNA, 120 bp, Artificial Sequence
  ENSG00000259282_0 (sequence is synthesized)
ttttgtggggaaggtccattaaaacctttctagctcctgcacaaagacaaaaccacagaggaaagcactcagaaaggagcaggatgagggaatgcaaagaaaaggcaaatgagggaagcg

SEQ ID NO: 833651 - DNA, 120 bp, Artificial Sequence
  ENSG00000259282_1 (sequence is synthesized)
agggagggaggggagacagttgaagttagaagatgctttgctgtattcaccaagtcttcaaaacaagagcactgaagtgctggggactgtttctccttgactttttagccttgatacaat

SEQ ID NO: 833652 - DNA, 120 bp, Artificial Sequence
  ENSG00000259282_2 (sequence is synthesized)
ggccacaaagaagagctcttcacaatagaagcttgttatgtttgctttgccatcatccaccataaagcctggaatacaaccttcttcccttttcagtaaacatctactgagtaaatcaca

SEQ ID NO: 833653 - DNA, 120 bp, Artificial Sequence
  ENSG00000259282_3 (sequence is synthesized)
tggggaaggcagcagctctggggtctgcaggggggcacctcatggttcccaactctcctagaagcaaaaagggattcaaagaggcccacttgataacctgtcaggctgcatagcagtgag

SEQ ID NO: 833654 - DNA, 120 bp, Artificial Sequence
  ENSG00000259282_4 (sequence is synthesized)
gagacctcagctcctgcacaaagacaaaaccacagaggaaagcactcagaaaggagcaggatgagggaatgcaaagaaaaggcaaatgagggaagcgttgaaagatacagccttgataca

SEQ ID NO: 833655 - DNA, 120 bp, Artificial Sequence
  ENSG00000259284_0 (sequence is synthesized)
ctttcataatttgttctagggctatggagatgctcataaaggattctcattcctattgtaagccagagagaatgcaatccaatgcaatgtttcgatcatggagtctttattggacacagg

SEQ ID NO: 833656 - DNA, 120 bp, Artificial Sequence
  ENSG00000259284_1 (sequence is synthesized)
ctggcatgagttgatggcacctgaaaatcagcaagctacaaatgctcctgggaggaacagcatcttcagtctctaaaccttggtgcagctgagtttattagaggttttccagaccttaac

SEQ ID NO: 833657 - DNA, 120 bp, Artificial Sequence
  ENSG00000259284_2 (sequence is synthesized)
aagagcctgtgacagtactaagaccctggggatggtgcgaaggagtctggaaccaggaggctgctgcgttttacaggatactggagcccagttctcaatcaaacgctagagctcagaaag

SEQ ID NO: 833658 - DNA, 120 bp, Artificial Sequence
  ENSG00000259284_3 (sequence is synthesized)
acatgcctctcagatctgtctacctttaagcatttttttaattaataactggatattgaccattaaaaccatcacaggtataggagtttgttgactaaaatttgtattatagatacaact

SEQ ID NO: 833659 - DNA, 120 bp, Artificial Sequence
  ENSG00000259284_4 (sequence is synthesized)
atgtttacaaatctttataagaaaatcattactacttgggtcagaagcaatgcaagtcaagcttaggtctatggtttttgctcctgatcagtaatatgtagatggcatgtgttctcttac

SEQ ID NO: 833660 - DNA, 120 bp, Artificial Sequence
  ENSG00000259284_5 (sequence is synthesized)
cctctctaaatctggaaagatgcatttcatagtacctctaatctcaaaaattttaactttcacttttaattgttgaaaatgtcattctgaaatccaacaatgaatgagtgaatgtgtata

SEQ ID NO: 833661 - DNA, 120 bp, Artificial Sequence
  ENSG00000259284_6 (sequence is synthesized)
tattcatcatatacttgtacacacacacacaaataaaacctgtatctcacggcccacatatcttgcttaagctgctctttcaggaagatttatgacactctgcttcacaaagaaagttta

SEQ ID NO: 833662 - DNA, 120 bp, Artificial Sequence
  ENSG00000259284_7 (sequence is synthesized)
aaagagagaaagaaaacgaaatgaaacagtgactgttccctagtgcaattactctgtcaaatactcccctagggaaaggaatttgctcttattgtgaaataaattaatatagaaaccaga

SEQ ID NO: 833663 - DNA, 120 bp, Artificial Sequence
  ENSG00000259285_0 (sequence is synthesized)
gcggcagtcgggaccgggagaatcggacagaaaccagcctcagagtccggggcaggagccgttgacggctgcccctcaacgctgcgcttcgggttgggttaagtccccaaggcgtcctca

SEQ ID NO: 833664 - DNA, 120 bp, Artificial Sequence
  ENSG00000259285_1 (sequence is synthesized)
gaccacggcggggcttcaaacgccccagtcccgaagacaggcagggggtccctctgctgcgccgggatgacaggctggccccgacgaccccggccccgtcccgcagccctcacccgctga

SEQ ID NO: 833665 - DNA, 120 bp, Artificial Sequence
  ENSG00000259285_2 (sequence is synthesized)
agagatcggggaaaccgaagaaggttctagaaagtctccgtggacgacgggcgctgggcggccgcttaccttggtgtacttaatttcgagattgggcgtgggcgacggcaggaggtgcag

SEQ ID NO: 833666 - DNA, 120 bp, Artificial Sequence
  ENSG00000259285_3 (sequence is synthesized)
tcgccgggcatctctatcttgctggaagtcatggtggcgggccgggtgtccctagcccgcggcgtggggcagtgcgggctgtgcgcgcggtccgcggcccgggggcgcgctcgcctgtat

SEQ ID NO: 833667 - DNA, 120 bp, Artificial Sequence
  ENSG00000259285_4 (sequence is synthesized)
ataggtgtaaaccaagaacctagagaccctgcctcagaatgggctttggactccgtggactaaatcaaggccgcatggaaagacctgcataagtcccttcccttccttactcctcactcc

SEQ ID NO: 833668 - DNA, 120 bp, Artificial Sequence
  ENSG00000259285_5 (sequence is synthesized)
aaatggaccccggagactattttaaacatgggaactagatttgcctttgttgtaaggcccagttccatttcgtatatgttcgagaagcttcaatttgggtactgggatgagcgcagtact

SEQ ID NO: 833669 - DNA, 120 bp, Artificial Sequence
  ENSG00000259285_6 (sequence is synthesized)
tcatcaataatcacacttaacagacaggaagaaattaaaattccagctgcaccgccttttctgaagggcctgagggaaaaggcattggcgccccctgcagttgatggtgtgtatgtgcaa

SEQ ID NO: 833670 - DNA, 120 bp, Artificial Sequence
  ENSG00000259287_0 (sequence is synthesized)
cgctggtggaagacggaggaatgcttgagggaacgtttattgcatgctgaatccagagctggaaaccaggtttgagccaatctaggcacgggctccctgagcagggcaccctctgtctct

SEQ ID NO: 833671 - DNA, 120 bp, Artificial Sequence
  ENSG00000259287_1 (sequence is synthesized)
ccacctgatgggttgattagactcacagagaaaggaccgtcttacacctggaaaatcaaaagccaggggcagcctgaagacacgctggtcatgccagtactctaggggctaggattgctg

SEQ ID NO: 833672 - DNA, 120 bp, Artificial Sequence
  ENSG00000259287_2 (sequence is synthesized)
gactgggcatttcactgtcccctgtccctgagacacagattctttttctgaaatctggtcaaaataaactggcgatgttgctgcagccaagctggcttactctgggcagtgccttttttc
